United States Patent Application Publication US 2017/0009304 A1 - sequence listing, part 40

SEQ ID NO: 838609 - DNA, 100 bp, Homo sapiens
tgaagcaactataattaacagttcaacatcaataaaggatccaatcctttgatggcaatggaggaggaggaggacacacgttgcacattctccaaatatc

SEQ ID NO: 838610 - DNA, 100 bp, Homo sapiens
accaggaacctgggcgagcagcggcgggggcccgagggcttatgttcctgaggaagaattgaaggcagcagaaatagatgaagagcacgtggaggatgac

SEQ ID NO: 838611 - DNA, 98 bp, Homo sapiens
agggggggcctgaggcactgcagaaagtgggcctgagcctcgaggatgacggtgctgcaggaacccgtccagttcttctcaccactaaatccaatacg

SEQ ID NO: 838612 - DNA, 100 bp, Homo sapiens
ggataggacttcccaggtttgttccctgggttctcttttattggattcctactacaggacaatcaaaggattcatgaacatcgtagctgtgggagctggg

SEQ ID NO: 838613 - DNA, 99 bp, Homo sapiens
aagcgacctctcctcgcccccctctgcaacgggctcatcaactcctacgaggacaaaagcaacgacttcgtatggttacacctatgtttgaggattgga

SEQ ID NO: 838614 - DNA, 100 bp, Homo sapiens
tgagtattggagccaggagcctgccatgagaaaactgattgggaggtagctattaaaagtattaataaaaagaacttgtcaaaatcacaaatactgcttg

SEQ ID NO: 838615 - DNA, 100 bp, Homo sapiens
gaagagacaaaagaggctatgtcagaaatgctaagacatcctaggatatcgggaaagcctatattggtgtgctggagaatctggtaaaagcaccattgtg

SEQ ID NO: 838616 - DNA, 98 bp, Homo sapiens
gggatgctccgaatgtcttgtgaagccatgaacgagctctttcagcccaccgtcagcgggatcatccagcacataggcctgagacctgggaggaagct

SEQ ID NO: 838617 - DNA, 99 bp, Homo sapiens
tcactgcagcactggtggaacttgagaaactgccaagttttggaccttatctggaacagcgcaagaaaatcatagcagaaaacaagattagactgaaag

SEQ ID NO: 838618 - DNA, 100 bp, Homo sapiens
aagcggaagctgcccttcaccgcgggcgccaatggggagcagaaggactcggacacagtggagacctttggcgacttggcctttggcgacatcttcctcc

SEQ ID NO: 838619 - DNA, 98 bp, Homo sapiens
gaaatttgatccacccttaagaaaggagacagaaccacatcatgaacttatcagacactcctctaatttacaaagcagtgcccagctggtttgtgcga

SEQ ID NO: 838620 - DNA, 98 bp, Homo sapiens
gagcaaggagaacccccagggatagcagaaggagcagcccacagtcaaatctgtccagcaggctatggaactcagtcaactccccagggatatggctc

SEQ ID NO: 838621 - DNA, 100 bp, Homo sapiens
atccattatggtgtcattacatgtgaaggctgcaaggaagaagttgaagctttgatatgagtaaacaagtatctctacctgaaatgattaaagactggac

SEQ ID NO: 838622 - DNA, 98 bp, Homo sapiens
tgatgctctctctccagtccttgctgaagagactttccgttacatgatggctgacaagattttgaaaaagaaagaataccctctttatataaatcaaa

SEQ ID NO: 838623 - DNA, 99 bp, Homo sapiens
gatggtgaagcgagagctgacaggaagcctgttctcagaaaatatttacaccagcagctccagttcataccaataaagaagatcctgctacccaaacta

SEQ ID NO: 838624 - DNA, 100 bp, Homo sapiens
gcggaacggatcgacaacgcagatgagctgctggagagcttcctcgagggcttccatgacgagagcacacaggacagagcgggatgccaccagcttgtcc

SEQ ID NO: 838625 - DNA, 100 bp, Homo sapiens
acagagaatcttgtgcgggaattgctgacagtcattttgtttactcattcagccctgttgcaggtcccaataaactcttcataaggttgacagaagcacc

SEQ ID NO: 838626 - DNA, 100 bp, Homo sapiens
ccggagcgagccccatgccccgcgcgggctgacgggccggagcccgcacggagcggccgggcgggacaggtcactcctggaagcaaggcggctctagcta

SEQ ID NO: 838627 - DNA, 99 bp, Homo sapiens
gcactgtcgctgcccgcctgccctgaggagtccccgctgcttggtgaaatgacaatggatgctctgttggctcgattgaaacttctgaatccagatgac

SEQ ID NO: 838628 - DNA, 100 bp, Homo sapiens
gaaaaatgggcacgattctatactgcagaagtagttcttgcattggatgcaatccattccatgggttttattcacagttccaagatgagatgggattctc

SEQ ID NO: 838629 - DNA, 100 bp, Homo sapiens
cgagctgagtggttgtgtggtcgcgtctcggaaaccggtagcgcttgcagcatggcatgtcgggccccaggcctgtggtgctgagcgggccttcgggagc

SEQ ID NO: 838630 - DNA, 100 bp, Homo sapiens
ctgaagctagaagagctctggctcgatggaaactccctgtgtgacaccttccgagaccagtccacctacatcaggggactcgggcaagggtgccgaagat

SEQ ID NO: 838631 - DNA, 100 bp, Homo sapiens
gaagggtcacttgacccagggagttgaaggctgcagtgagccctgtttttgccaccacactccagcctggggaggagctgtgtattgggaagcaatgcag

SEQ ID NO: 838632 - DNA, 98 bp, Homo sapiens
cagtgacacgggggagttaaagctggcagatttcgatacttattgaagatctgctgtcagatgatgccttaaaatctgatagatcaaagatgacctat

SEQ ID NO: 838633 - DNA, 101 bp, Homo sapiens
tagagtagcgacccggggggagcgcggggcgacgctggctgcagggacccggtgacagcgtgagagagggagacgtggtgggcggtccttcctgtgacacg

SEQ ID NO: 838634 - DNA, 51 bp, Homo sapiens
ggagaatccaccgccatccgccaccatggaacttgctactaccagcaccat

SEQ ID NO: 838635 - DNA, 100 bp, Homo sapiens
tggcactgaggctctggaacttctgcccagctctccttggtgtcagcttcctctggtgcaaccagcaagtcttccagtatgaatcccacagaaaccaagg

SEQ ID NO: 838636 - DNA, 98 bp, Homo sapiens
cgactggatggcaactctgccggagagcatgcacagcatccccctcaccaatttagccattccagatttctgcatgaatccccagacagtgctgctcc

SEQ ID NO: 838637 - DNA, 100 bp, Homo sapiens
ttcctgatggaatccaatcctctgcttccaggacaagtcctgcgcttggggatcctctgtacgcccgttcactgttccaagatgagatgggattctccaa

SEQ ID NO: 838638 - DNA, 99 bp, Homo sapiens
ttgaaccctcccacaagtctaaaatcgtagaatttcttcagtcttttgatgagattacagctatgataaagagttctatctgtcttctacgcgggaaaa

SEQ ID NO: 838639 - DNA, 100 bp, Homo sapiens
atacttaattacggacgcactgaaccgcggctgggacagacacttcgggaacccgaggcggaccgggcgacgagatgtgtgcaacagcaccgatcttccg

SEQ ID NO: 838640 - DNA, 100 bp, Homo sapiens
ggaatttccaaggggattcaaacttcaacagaatgtggcaaccaggtcgctcatcccgtcagtcatcctttattgcagtcgggatccttggggttgttct

SEQ ID NO: 838641 - DNA, 128 bp, Homo sapiens
cagctatctcgggagaaacaacaactgctacatctgttggaggagccaactagcatggaagtgcagatgagaagccggcttgcccaggagcgcagtgtgaagctggatgctctccagcgtgcagagga

SEQ ID NO: 838642 - DNA, 100 bp, Homo sapiens
ggctcactgttgtccaggcagctcatttcatcagagaagatatgaaatataaagatgctactaataaacacagccatctgcacagagaagataaacatat

SEQ ID NO: 838643 - DNA, 99 bp, Homo sapiens
acaagtatgctgcaagtgagaacatatttaacagaccccaccaacaactgaacgctttggtcaggctgctacaatggaaggaattggggcaattggtgg

SEQ ID NO: 838644 - DNA, 100 bp, Homo sapiens
gccagccatcctgggaccccaggcgtgcaggttctctttgaggtgcacctggtggacatatggaatgtcatagaagcattgcgggaaaatgctctgaaca

SEQ ID NO: 838645 - DNA, 99 bp, Homo sapiens
aacagatgtgtaccttaagtcactcaaccctcagtggaactcggagtggtttaaatttgaggatacttttgtggaactctatgggaacaatgcagcagc

SEQ ID NO: 838646 - DNA, 100 bp, Homo sapiens
tttccagtataagtatttggctcttaatatgcattatgtagatctgtgactttggcctggcccgtgttgcagatccagaccatgatcacacagggttcct

SEQ ID NO: 838647 - DNA, 100 bp, Homo sapiens
aagatacataagatcgtagccagacccccagaaaggcctaaagaatgtatttgacgaagcaatattggctgccctggagcctccagaaccgaagaagagc

SEQ ID NO: 838648 - DNA, 100 bp, Homo sapiens
tgaaggagtatgcacgaaacaaaaacatccattactatttcatggccctgaagaatgatgagtatgttcatgcggatgctcctaccaataaaacactggc

SEQ ID NO: 838649 - DNA, 100 bp, Homo sapiens
taattatgggcagaccagcaacggggtggccgatgaatcacccaacatgctggtgtacagaaagagaccacagagctgggcagcaagaaggagctcaagt

SEQ ID NO: 838650 - DNA, 100 bp, Homo sapiens
gcacgtactacgagacgtgtgctacatacgggctgaatgtggagagggtcttccaggacggtttacccaaggtccagcctagcccctaggcaccatgtcg

SEQ ID NO: 838651 - DNA, 100 bp, Homo sapiens
ttcagcctgtgccgcggctgctgcaagaagcgagcctccaaagagactgcagactgcccaggtcacgcatgaagggagcaccgtggagaagacagtggcc

SEQ ID NO: 838652 - DNA, 98 bp, Homo sapiens
tttcgaagcctgacttggccaccttcgggttccccatctcatgctgggtctggaacagaatctgacagtgatgaatcagtaccagagcttgaagaaca

SEQ ID NO: 838653 - DNA, 100 bp, Homo sapiens
aaaatgaagaaggaacgatctcgtaagaaggattcagtttattacccagaactctttgtctgggtcagtcaagaaccatttccaaacaaggacatggagg

SEQ ID NO: 838654 - DNA, 99 bp, Homo sapiens
ccgaggcagcgaggcaagggggagatcactcccgctgcgattcagaaggtgaggaattttaaattggaacaagagcaagaaaaaaacaaaatcttgtca

SEQ ID NO: 838655 - DNA, 100 bp, Homo sapiens
gctcatccccgggcgattcctgtctaagaaaaggaggatttgacatgaaagatcagatgtcaacttcatctgtgcaggcattagctgaaagaaaaaatag

SEQ ID NO: 838656 - DNA, 100 bp, Homo sapiens
cagaattgttcagtggaagcccctgcttggatgcctgtccaccactgtactgcagaaatactcagtgtcctcagtcacagaaacatcatccagttttatg

SEQ ID NO: 838657 - DNA, 98 bp, Homo sapiens
ttcaagggatggtgaaatggatgatagtcgagggttctcatgtatcagccatcttctgtaagggtgcccagtgtgacttcggttgatcctgctgctat

SEQ ID NO: 838658 - DNA, 99 bp, Homo sapiens
tcgctccgtggccttagctgtgctcgcgctactctctctttctggcctggaggctatccagcgttgagaacttgttgcttagtaaccaagggaccatta

SEQ ID NO: 838659 - DNA, 100 bp, Homo sapiens
aaggagtgtgcagatcctgctctggaaaccagcctggacaccaagtctgtgtcagaaggccacctcaagaggaacatcgtggtgaagaccgtggagatgc

SEQ ID NO: 838660 - DNA, 100 bp, Homo sapiens
tagaatgtcagcaaggcagaaacaggttggacgtgataagtatgagcctgcagctgtttcagaacaaggtgataaaaagggcaaaaagggcaaaaaagac

SEQ ID NO: 838661 - DNA, 98 bp, Homo sapiens
aatcaggaatagattctcttgaccatgtgacatctgatgctgtggaacttgcaaatcgaaggattccagacagcattggaaaagacatagaaaaggct

SEQ ID NO: 838662 - DNA, 98 bp, Homo sapiens
agcaagattacaaagtttgagaatgctttcttgtctcatgtcgtcagccagcaccaagccttgttgggcactatcagtttccaaggcaggaaaggtaa

SEQ ID NO: 838663 - DNA, 100 bp, Homo sapiens
aaagcacagcctgcatgtgtcattacagcaagcagaagacttcatcctcccagacactacagaggaggaactagacattagaacactgcaaaccaaaaat

SEQ ID NO: 838664 - DNA, 99 bp, Homo sapiens
ttatttgaaagcaatctgctggatgatttgaaaagtgtaatgaaaacaaatgacattgttcgatacagggtgtatgagaacccgaaaacagtggccaaa

SEQ ID NO: 838665 - DNA, 100 bp, Homo sapiens
gatgaccttcacggccactggccagaggtacttcctcaagtgcgtataacccgtatatagagataattgaacaacccaggcagaggggaatgcgttttag

SEQ ID NO: 838666 - DNA, 100 bp, Homo sapiens
gacatctacaaccttcgatctcctgacgagtactccaaagattcaggtttactcacgtcatccagcagagaatggaaagtcaaatttcctgaattgctat

SEQ ID NO: 838667 - DNA, 100 bp, Homo sapiens
aggtcttccacccttggccacctccccaggtgatgcctgaagctcaagggactgtgtccaccctcagcttccgccctgcgctgccagtctcctacctgca

SEQ ID NO: 838668 - DNA, 99 bp, Homo sapiens
ggacagcggccccgaagcgggcggcctgcactcgggctggttatgatggtgagagtatcggaaattgcccgttttctcagcgtctctttatgattctct

SEQ ID NO: 838669 - DNA, 100 bp, Homo sapiens
tctcgtcactcctttctttgtggtcttcatttgtgaatacatagatgcctgtgaggagccaccaacatttgaagctatggagctcattggtaaaccaaaa

SEQ ID NO: 838670 - DNA, 99 bp, Homo sapiens
tgagggtgtacaaatacccctttgaattaattatggctcctttttcacatagctcttggctgtaggattgccccactccaaaaaccagtgtgtggaggt

SEQ ID NO: 838671 - DNA, 100 bp, Homo sapiens
tgaagcggaaccatctgggagccttcctgatccgggagagtgagagctccccaggggagttctctgtgtctgtgaaatgatatcatcaagttgaatcgaa

SEQ ID NO: 838672 - DNA, 100 bp, Homo sapiens
ctaagtacactcgtcttgaataggcaggacaagcgtttagaaagtttcttccactctttgaccgagtattggttgaaaggagtgctgctgaaactgtaac

SEQ ID NO: 838673 - DNA, 101 bp, Homo sapiens
ctttagaccctccacctaattgcagtaacaaatgtggcaattattttggatctatcacctgtcatcataactggcttctgcttgtcatccacacaacacca

SEQ ID NO: 838674 - DNA, 100 bp, Homo sapiens
agtgcctccatgaggagtataggagcaagggcgtctttgtgcaggtctggcgggaatttcctgaccggttggtgggttacccgggtcgtctgcatctctg

SEQ ID NO: 838675 - DNA, 100 bp, Homo sapiens
aatggttcccagtttttcatgtatgcttcagaagtgtccttctgttgatgacttcgtaagtgccctcgtttccgacttggatctggacttcgaaactttc

SEQ ID NO: 838676 - DNA, 98 bp, Homo sapiens
ccattcacctgaggcacccgaagaagagaccatccatatttccaggaatgaggggagaatcatacttcatcggaatgaggagcccagggcagcaggga

SEQ ID NO: 838677 - DNA, 100 bp, Homo sapiens
cccggacgagagctccgtgcgggtggctgtcaggtggtgaggtttctgaagaattatccctgaaactgccaccaaatgtggtagaagaatctgcccgagc

SEQ ID NO: 838678 - DNA, 98 bp, Homo sapiens
ggtcctgctcggctgcctcctggcctcgctcctgttctcaggacaagcagattgcagatttgaaggcagccaggcagcttgcgtctgaaatcacctcc

SEQ ID NO: 838679 - DNA, 100 bp, Homo sapiens
ggagtatgaggatgatttccagatccaaagatcacctaacaggtggagctcagtattctggaagtggaatgcagtagccctctgggcctgggatattgtg

SEQ ID NO: 838680 - DNA, 100 bp, Homo sapiens
aaacatcttgatctggagaaaaactggatgttggtagaaaaagcaagagtttgttatatagcattcttcgtgccatgaaggaggacagtgaaaaagttcc

SEQ ID NO: 838681 - DNA, 99 bp, Homo sapiens
gcggcctccttcaccctgctggttggcatctacttcccttccgtgaccggtgtaggagctgcacgatctgggaacctcacgtttatggtgggaggagtt

SEQ ID NO: 838682 - DNA, 100 bp, Homo sapiens
aaccaaatgtctggacaccatgattcaaaccgccaggttaccatgaggaggatttctggccttcgagtgccaatgggtcatgtttggttagaaggtgaca

SEQ ID NO: 838683 - DNA, 100 bp, Homo sapiens
ggaaaataagaacacagtggatgtcgagaacggtgcttctatggcaggatatggtacgacagtgccagcccacagggccatcctggtggcccgttgtgaa

SEQ ID NO: 838684 - DNA, 100 bp, Homo sapiens
ccatggaaacaggaggaagaattcccaagccaaagctttccagtgcatttctaggtcccaaagacctttttccatataaggagtacaaagacaagtttgg

SEQ ID NO: 838685 - DNA, 98 bp, Homo sapiens
caggatgaagttcgccgagcacctctccgcgcacatcactcccgagtggaggaagcaatacatccagtatgaggatgaccccataggaaatattaacc

SEQ ID NO: 838686 - DNA, 132 bp, Homo sapiens
tcaaaagtgcgagatcaacttggacaggaattggaagaactcacagctagtctatttgaggtcctgaatacatgttttcctctaacatcgagcctgaacctaaagatctcacagtcggggttgccctgcatg

SEQ ID NO: 838687 - DNA, 100 bp, Homo sapiens
tctccaagaaaaaagagatctagtatagtcaatgaattaaagacaagaaggtttccaatcagtattcctgcagctgcgctagacttatttgattacatgc

SEQ ID NO: 838688 - DNA, 100 bp, Homo sapiens
gagaggcccctcttctcctccaacccagaactggacaatctggttcctttgcccaaagactcaacaggtgcagcagatcccccccagccccacatcgtag

SEQ ID NO: 838689 - DNA, 100 bp, Homo sapiens
gtgacgaggacgaagtgtccgaggaggaacatatgcagcagaaaaaagaggaggaagaagttcttaaagaagtaactgcacatttccaaattactttaac

SEQ ID NO: 838690 - DNA, 98 bp, Homo sapiens
tagaacgtgcaaatgcctgcaactcagtcatcatcatctgcttggtggttctggatgccctcctggtgcttgctgagctcatcctggacctgaagatc

SEQ ID NO: 838691 - DNA, 98 bp, Homo sapiens
aaaaactggagagcttcatcaaaaatagtgatagctttgataagctgaggacctgttcgtggaatttgcacataaggcttcagctttgaacaactggt

SEQ ID NO: 838692 - DNA, 100 bp, Homo sapiens
gggaagaacttcgccttgcgggtcctgcttgtccaggtggatgtggtcctggaccggatcaaaggctcactgctgccccggcctggccacaactttgtgc

SEQ ID NO: 838693 - DNA, 100 bp, Homo sapiens
acccactggacaccttcgtcccctttgatccctgtgtgctgaagaggcccgacaacaagctcaaatacgtcaccaaatggcagaggacagcaaagcagat

SEQ ID NO: 838694 - DNA, 99 bp, Homo sapiens
agagataacaaaagctgctcagagtctcaatgaacttgcacacgacggttctgccctttatattaatcgagatgaggacatcgcaccatcagtatccca

SEQ ID NO: 838695 - DNA, 100 bp, Homo sapiens
ttttcttcagaagaaggacttcggaatgcactacaacaggaaaatcatattatagatggagtaaaggcagcggaggaggagaaagagatggacctcccgg

SEQ ID NO: 838696 - DNA, 100 bp, Homo sapiens
acctgaactgcagcgagatcccgaaggtggacctgcgagtgtggcaagactgctgtgcaggggctcaagatctggatcgcatccgactctccacctacag

SEQ ID NO: 838697 - DNA, 101 bp, Homo sapiens
cttccgagagtctctgtggccttaagctggaggtcaacaagtaccagtacctgctgacaggaaatactcctttacaccttgctgtgatgttaggaaataaa

SEQ ID NO: 838698 - DNA, 100 bp, Homo sapiens
cgaagcgctggtggcgggcccgggctgcggcgtgtgcgcgcccgccagctgctccggagatacggaaattgacaatggcccttcagctatgctaggtcta

SEQ ID NO: 838699 - DNA, 100 bp, Homo sapiens
cagagcaagagctggatctcgtctttctctacgagacaatgtgattacacctcgagacacaacaatgaccttcacatgctttgtgttttttgacatgttc

SEQ ID NO: 838700 - DNA, 100 bp, Homo sapiens
tgggagatggtgctatacggtctttagggttacgtgaagtcaagtaaaatcgcacactgttgagccccatatgggggttggcaggcagcagagaggcccc

SEQ ID NO: 838701 - DNA, 99 bp, Homo sapiens
cgagctgcgcccgctgccttcacaccccggacatccgcgccacacgttattctggactttatgaagccattgaaagttgggatttcaaaaaaattgaaa

SEQ ID NO: 838702 - DNA, 100 bp, Homo sapiens
cgggaggacaatctcaacgacagctctcagcagctacagggtatttgaagtataccatacaactgttttgaaaatccagcgtggacaatggctactcaag

SEQ ID NO: 838703 - DNA, 98 bp, Homo sapiens
aaaaagcctggtgagactttcttcatgtgttcctgtagctctgatgagtgcaatgacaacatcatcttctcagaagaggagaaggcagagccccccca

SEQ ID NO: 838704 - DNA, 98 bp, Homo sapiens
ttacaacatatattagtctacttgctgacacaaagctggatctacatttaaaggtttgtaaagtcgatcttgcagtacacggagaacctggtggctta

SEQ ID NO: 838705 - DNA, 98 bp, Homo sapiens
atgcaacagtttcatcaccatcaaagtcaaagaagttagagtgcccttctcctgcggaacaaatgtgtatatctcatgattgatatggagaaactagt

SEQ ID NO: 838706 - DNA, 100 bp, Homo sapiens
caggaagctacgtgaacagagtgagcactattctaagcaactggaaaatgaattggagggactgaagattgtcaaaagagtggggaatggtgaggaaacg

SEQ ID NO: 838707 - DNA, 100 bp, Homo sapiens
catagacgaagaaaactttggacaggaaattatgatgtgatgaccccaatggttgatatacttatgaaactttttcgaaatatggtgaatgtgaagatgc

SEQ ID NO: 838708 - DNA, 100 bp, Homo sapiens
tcattacagttgagtaataaacagactgaacttatccagaaggatatggatattaccctggtcagagttctatatgaagggaaagaacggcttattccag

SEQ ID NO: 838709 - DNA, 98 bp, Homo sapiens
ctggctaaggaaaccctattacctccagtgcaatcgcttccatactaagggcctggcttgaccagtgtgcagaagacttccgagagccccctcacttc

SEQ ID NO: 838710 - DNA, 99 bp, Homo sapiens
ccttcttttttcctacccaaggacatgactatgtacttgcagaaaaacagtctccagagaatacagagggcaaagatggatccaaagtaactaaacagg

SEQ ID NO: 838711 - DNA, 101 bp, Homo sapiens
gcccagaaacccctactcatgatccggaccctgagactcccctaaaggccagaaagaacaagttgaaatcatcgcagaaggataaagttcgtcagtttatg

SEQ ID NO: 838712 - DNA, 100 bp, Homo sapiens
ctttcagaatctattgttaatgattttgcctacatgaagaagagagaagaggagatgcgtgataccaacgataccgccgcagctacgactcggatttcac

SEQ ID NO: 838713 - DNA, 100 bp, Homo sapiens
cgggtgcaatcctggagccccccagtgaggggaaaacaaagtgcatgatgaagtcttcagactgtgtcataaagcatgctggtgtatacagtactggcct

SEQ ID NO: 838714 - DNA, 98 bp, Homo sapiens
tcttgaaagtgcttcttttaggcagaatcagcttgctgctacactggcgagcaatcttcatcactggtccagctgtaataccagggtacttctccgtt

SEQ ID NO: 838715 - DNA, 100 bp, Homo sapiens
tgataagatgtttccagctctgggattcggggcccagttacccccagactggaagcaagccctggatgaaaacatggacctcttggaaggtataactggc

SEQ ID NO: 838716 - DNA, 98 bp, Homo sapiens
taccactgcctcctttattgcagcaggaatttggtggataatattaatgcagctgtgatggatttgaaaaaaaagaagatccgcagtctaagtgaaga

SEQ ID NO: 838717 - DNA, 98 bp, Homo sapiens
cccatcactgcttccctcagccataacaggtcatcaccgagtggtcttctcacatcatccttcaggcagcaccaagagtcactggcagcagagagaga

SEQ ID NO: 838718 - DNA, 100 bp, Homo sapiens
gacggtcgcgcggcggcaggcacaggtcaaaatgcagatcttcgtgaaaacccttaccggcaagaccatcacccttgaggtggagcccagtgacaccatc

SEQ ID NO: 838719 - DNA, 98 bp, Homo sapiens
ccctcgagtgggaacagcagaatcaaggcctggacaagttggatggcttgaggactggtactaaaaggaaacgtgactgggaggccattgccagcaga

SEQ ID NO: 838720 - DNA, 98 bp, Homo sapiens
acctgccatctgaggattctgattgtgggatggagatgctgacacatggggtcgaggatttggtcttttgggttccatttttggaaaggatggtgtat

SEQ ID NO: 838721 - DNA, 99 bp, Homo sapiens
agcaatatcacagcattcgccctgaaggccaaagtcatctaccccatcaatcagaagttccgggtattggcatactccacacatctgtaccattcttga

SEQ ID NO: 838722 - DNA, 100 bp, Homo sapiens
aaagttgaagaagtcttgaatgactggaaactgattggaaactctttgggaaagccactcgaaaagctttccccacaaataaaccagagaaagatgcaag

SEQ ID NO: 838723 - DNA, 100 bp, Homo sapiens
ttagaggaggcagaagatttctggccagtggagagaggaattcctcaagacaccattccagaatgccagaggattcaacatgagcatacctatgcctggg

SEQ ID NO: 838724 - DNA, 100 bp, Homo sapiens
ggccgcggggccaggaagtcggagtttgagccccggaggcagagcggctgccatgggccatgaagcccccaggaggagaatcgagcaatctttttggaag

SEQ ID NO: 838725 - DNA, 98 bp, Homo sapiens
acactaaagcaacctttacctataaagaagttctggagcagatttgggccaggcttagtcatctattggtatggatttatccaggagctggactgcaa

SEQ ID NO: 838726 - DNA, 100 bp, Homo sapiens
tactggagattgggtacgaaaagatgagtataggatcaaaccagtggaagaggtcaaatacatgaaaaatggggcagaagaagagcagaaaatagcagcc

SEQ ID NO: 838727 - DNA, 100 bp, Homo sapiens
tcgagaccacgcccggggcccaggaaggcaagaagcagtataagatgatctgccatgtgttcgagtcggaggatattttgagatacagagtgaaaatggg

SEQ ID NO: 838728 - DNA, 99 bp, Homo sapiens
gtcagaacaatcttgaatcatgaagctactaaccagagccggctctttctcggttttaaaatcaaagatgggaaaatcggagaaaattgcccttcccca

SEQ ID NO: 838729 - DNA, 145 bp, Homo sapiens
aaacactcgctccatctgtctccttgagcaaaaaagaaaagttgtttcctccaacattgatgttcctccagcaaggtcccaaaatggtagaagtccagaatcaacagtttcagatcaactccaacgacggcaagccactatttac

SEQ ID NO: 838730 - DNA, 100 bp, Homo sapiens
cagcaagcacagagtatgaccaccactattaacagaaatgatggaagaattgcatagcctggacccacgacggcaggaattattggaggccaggtttact

SEQ ID NO: 838731 - DNA, 100 bp, Homo sapiens
gattgtgacatatcgttggacccagaattgagctgccactgcagagccccgccatggaagacacgccgttggtgatatcgaagcagaagacggaggtggt

SEQ ID NO: 838732 - DNA, 100 bp, Homo sapiens
gtggaaattttgagccatttcgaatcacttaaaggagtggacattgctagcaatgagctcccaaagccatccaggaggagagacttcagcatgcaaacct

SEQ ID NO: 838733 - DNA, 100 bp, Homo sapiens
tctatagagaagaccgcccaagtctgcccttgtttgaggccttcacagcatgtggttttgtgcagacctcaaaggaagaccttctgcaggctgattttga

SEQ ID NO: 838734 - DNA, 98 bp, Homo sapiens
tgatgctcgctgggtaacatacttcaacaagccagatatagatgcctgggaattgcgtaaagattataccgaaaagaagttctagagaaattaataga

SEQ ID NO: 838735 - DNA, 99 bp, Homo sapiens
gaggagatggactggctcatagttgaggagctcaagcttgggaaaatggtgtgcattccttgtatcgtcattccagttctgctctggatctacaaaaaa

SEQ ID NO: 838736 - DNA, 100 bp, Homo sapiens
cagaaagaacctggaagacagaggctggaggtggtgtttggactctagaccatgtgcctaggtagaagtttttcctttctccgcagctctgctcccctag

SEQ ID NO: 838737 - DNA, 100 bp, Homo sapiens
cacatctgagtggagatagacaaaatatcttggagtctctgtggatcgttatgagccggaatgtgagcctgctgttcaccactgtcactacactcttgac

SEQ ID NO: 838738 - DNA, 98 bp, Homo sapiens
ggttcttcgaaaactgaagcagatgttgaacaacaaggtgtcagctgacaggggctctggccacagcttgtggggatgacgcgatccgcgtgtttcag

SEQ ID NO: 838739 - DNA, 100 bp, Homo sapiens
aggagaccaggtcaagcccgaccaatacactgaggccctggcccagagggacaagaatagccaggccagaagaaggaaggcctgtggtgagtgggacagg

SEQ ID NO: 838740 - DNA, 99 bp, Homo sapiens
tcctggctcctggctccctactcttctaaggatcgctgtcctgacagaagagcgttgtagaatgaatgaagacactggcactgattatataacaccttg

SEQ ID NO: 838741 - DNA, 100 bp, Homo sapiens
ctcccccatccagtgtatccaggccattgcgggtggagatctgcctagtgttactgatattcgaagacctcggctctacctccttcagtggctaaaatct

SEQ ID NO: 838742 - DNA, 98 bp, Homo sapiens
ctgctgcagtggtacctgcggctcaagtcctggtgggcgtccaattatctgtccctgaagtgtcgagcaccagaggtgtcccagcacgtgtaccaggc

SEQ ID NO: 838743 - DNA, 100 bp, Homo sapiens
tttcaactttctggattgctcatcccaacaataatctgattaataatgcagctgcaggctcacagggtggctgtgccagtgtcattgtgtcattaactac

SEQ ID NO: 838744 - DNA, 100 bp, Homo sapiens
ttgacaatccagcagctaaagttttagttgaagacgtgaacgatcaagagagagggaccatagtagatcacgagaaaagagtcgacgtcataaatcccgt

SEQ ID NO: 838745 - DNA, 100 bp, Homo sapiens
ccaagggccctgtaaactcttgtcaaggcaagacttcacagagaatgcagttgtcttgacttcaggtctgtctgttctgttggcaagtaaatgcagtact

SEQ ID NO: 838746 - DNA, 99 bp, Homo sapiens
cgaagccgcggaggacggggtgaagatggcggccttctccggtactccaaagattcaggtttactcacgtcatccagcagagaatggaaagtcaaattt

SEQ ID NO: 838747 - DNA, 101 bp, Homo sapiens
tgaaggtggtgcccccggacttccaggtatagctggacctcgtggtagccctggtgaacgtggtgaggtcggtcctgctggccccaatggatttgctggtc

SEQ ID NO: 838748 - DNA, 98 bp, Homo sapiens
ctgcgttgaggatctttgctcttccatccgcctttgatcgtcttcctcttcagccatccaggtggataagattgtggaccagctgcagcagttaatgc

SEQ ID NO: 838749 - DNA, 100 bp, Homo sapiens
gaatggctatgaatgccagtgtgccacagatcctctggaccttctccatctacctggagtcagtggccatcttgccgcagctgttcatggtgagcaagac

SEQ ID NO: 838750 - DNA, 99 bp, Homo sapiens
ttagccctctacttttcaagacaccaagtgagaggccaaccaggagctgactgctgggcaggaacgtctctcaggagaaagagtggaagagaaaattgt

SEQ ID NO: 838751 - DNA, 56 bp, Homo sapiens
atggatgacgaggagtcctggatcaagctggttgtggtgactcatgcccataatcc

SEQ ID NO: 838752 - DNA, 98 bp, Homo sapiens
tcatcagccactacgccgggcaggatgccacggttccctcggagacatggaggccagagaggaggtgcagttggtgggtgccagccacatggagcaaa

SEQ ID NO: 838753 - DNA, 100 bp, Homo sapiens
ctccctcttcgtcatgaccaacgtgatcctcaccatgaaccagacacagggcctgtgccccgaggagcctccctattaaggaccttgccgtagacagcgc

SEQ ID NO: 838754 - DNA, 98 bp, Homo sapiens
ccgcttcagttctcccggtgtggccacgagtcggataaataggatttaccaatccttggatgaagtgcttgggaagtctttaagtgccataatcaact

SEQ ID NO: 838755 - DNA, 100 bp, Homo sapiens
ttgtatacagcagcagtaaaggaactattcggctatgtgacatgagggcatctgccctctgtgatagacattctaaatgccaaacaccagagcaccctag

SEQ ID NO: 838756 - DNA, 99 bp, Homo sapiens
agcaggtcctgttggagatgatatccaaagcacttagaatctccacaccactaactggtgttaggtacattaaggagaatagcccttgtgtgactccag

SEQ ID NO: 838757 - DNA, 99 bp, Homo sapiens
gatctgcctcagcgaatcagacaagacagccgtgctcaccttaataagagaagagtgccccgactcggcttgcaagcaggacctgctggcctacctgca

SEQ ID NO: 838758 - DNA, 100 bp, Homo sapiens
acagatacttcaacaagacctgcgggctgtgtggcaactttaacatctttgctgaagatgactttatgacccaagaagaatttaagaagtgcaacatggc

SEQ ID NO: 838759 - DNA, 99 bp, Homo sapiens
gctactacatctgccgagctgacagccctgtaggggtgagggagatggaaatctggctgagtgtgaaagacaaaatcgttactggagtaggaggctgtg

SEQ ID NO: 838760 - DNA, 99 bp, Homo sapiens
caggagccagtcaaggttgtctgtctgtccatccactcaggacatctgcagggggaaatttgcagtggtgagaaaatgtataaagaaagattctgggaa

SEQ ID NO: 838761 - DNA, 99 bp, Homo sapiens
accagcatttagagctgtttatgaagcactgagaaattttcttaaacaattaggtctacatcctaactggcaattcgttgatgtatatggaatggatcc

SEQ ID NO: 838762 - DNA, 100 bp, Homo sapiens
cgggggcgagaatgtggagcttgggatcaggggaatgacagaggaagaggaagacaaacttctggcactgaaagacttcatgatgaaatctaataaagca

SEQ ID NO: 838763 - DNA, 99 bp, Homo sapiens
cagcagcagcagtggaggaaagctgtgcatactggcctttgtcttctttctcagtgcaagggcaactgtactcctgatgatattggtctgtgaaacccc

SEQ ID NO: 838764 - DNA, 98 bp, Homo sapiens
aacgagttcatgacctccaaacccaaaatccactgcttcaggagcctaaagcgtgggactgggaagaagagcaggtcagcagtccaaatattctacga

SEQ ID NO: 838765 - DNA, 99 bp, Homo sapiens
caaaacttaatttcatccacaaatcaaatctggatggaacaaatcgattcgccatgaagtcagcgtaaataatgtaacacataaactgtgcagtaacca

SEQ ID NO: 838766 - DNA, 98 bp, Homo sapiens
ctgaatctggtgatgaacttagcagcagctccactgaacagataaggtgctatatgttccacatgtatgttggagttcgtgctggaggagggatcggg

SEQ ID NO: 838767 - DNA, 100 bp, Homo sapiens
agattccacaggttttggtgaagttgaagaagtactctcatggagacaagaggcatttcatccttcatgaagccattcaggattttgaattgcatatgag

SEQ ID NO: 838768 - DNA, 98 bp, Homo sapiens
tttgattatatctgtaagaatggaaggctttgacagatccaaatgcttctgctgcccagcaggctgttctccagcagcacatcaatagtctaacatac

SEQ ID NO: 838769 - DNA, 100 bp, Homo sapiens
gtagtttgaacctggctgttcctccaccaagatttggtgtattatctcatatactttcagcactcagatttgataaagaagttgctcttttcactcaagg

SEQ ID NO: 838770 - DNA, 100 bp, Homo sapiens
ggcggccacagtccgcagggatgaacctcgagttgctgggcatagaatgtcaagctaaccaggcgtccgctacttcagaagagtgtactgtcgcatgggg

SEQ ID NO: 838771 - DNA, 98 bp, Homo sapiens
agttattgaatatcaagaggaggagttgttgaccaagacatttggaggaggtggtggtggtgctagaagtaatctcaatatgaatgctgctggtaacc

SEQ ID NO: 838772 - DNA, 100 bp, Homo sapiens
ggttcccatccaacatgaactctttgaaagatttcttctgtatgaccagacaaaagccatggccaaggacatcctgggtgaagcagggctacactttgat

SEQ ID NO: 838773 - DNA, 99 bp, Homo sapiens
ggggccttaaagccccttcgtctccccagcacccactctctgggggcaggtgggcccggtgacagacattatgatctcaaccagctgctggagcctcga

SEQ ID NO: 838774 - DNA, 100 bp, Homo sapiens
gactcatcggagcgtgtggatttgagccgccgcattttttaaccctagatctcgagaatcacaatgctgtgttttccgctgctggttttaaagacattcg

SEQ ID NO: 838775 - DNA, 100 bp, Homo sapiens
tgtggaatttaatcctcatgttccaaaaggactttaactgcacttcgaatgtgttaccaaggttatggttaccctttgatgctgttcctggaagaaggag

SEQ ID NO: 838776 - DNA, 98 bp, Homo sapiens
tgactcctacttcctctgtatagagcaactgttgaactcagctgcctgtaggtgaatctggattgggaaagtcgacattaatcaactcattattcctc

SEQ ID NO: 838777 - DNA, 98 bp, Homo sapiens
tgcttttttctgggaagaaagggacatcatggcttttgccaacagtccttgggttgttcaggctccttctcctgaaaaagccgaggaggagagtgaga

SEQ ID NO: 838778 - DNA, 98 bp, Homo sapiens
acaaatgctccttctcctggagacgcaactcaagatccagacatttaatgtggatgcaccatgccagaccgtggaagatttaacgaatggggttgtga

SEQ ID NO: 838779 - DNA, 98 bp, Homo sapiens
cggtggcgtcggaggcgcgggaccgcggggagcgcgggtttgacccggagccgcgagggacgaccgggagtgacctatagcattgatggctgcgtcag

SEQ ID NO: 838780 - DNA, 99 bp, Homo sapiens
aagtccttggtcaaatgatgcaaccctgcagcatgttttaatgagtgactgatactggaggagtctctgtgtgaactggttgcgaaacaattgaagcaa

SEQ ID NO: 838781 - DNA, 98 bp, Homo sapiens
ggcttccggctccccccatctggctggaacacacatcagtcactttccacgggctcccttgctcagcagtatgcgcaccctaacgctaccctgcaccc

SEQ ID NO: 838782 - DNA, 100 bp, Homo sapiens
cagtgtatagatgaatgcacagccaggattgaaattggactgcattacaagattccttacccaaggccagagggcagtggctcagagatgcccttcacct

SEQ ID NO: 838783 - DNA, 99 bp, Homo sapiens
gggagtgcctggatccgacggcatcgacgaaaatatatgcagatgatgaacattcttaagccaattgcctttgatgttattcatttcatgtctcaacta

SEQ ID NO: 838784 - DNA, 100 bp, Homo sapiens
gtctctggaggtgcgaaaacgtagacgacggagtagcagattgagggcaatgaggccaaaatacccaggagaaattgtcgtaaatgaagtcaattttgtg

SEQ ID NO: 838785 - DNA, 100 bp, Homo sapiens
cagaatcaaaagcagacctcattttgattgtagtagcagtggaggaagtttcagctgatcctactgccacactcacagcagcagaagaaagaaaggagaa

SEQ ID NO: 838786 - DNA, 100 bp, Homo sapiens
gcctgtgcccaagctcatcgagaagtgctggaccgaggacgaagtgattcgacggaggcgccttgcacgacttgctggtggacagacctctcagccaacc

SEQ ID NO: 838787 - DNA, 100 bp, Homo sapiens
acaacttctgcaaggcggtttctagtgcaaatcccctgctcagggtcttcatccagaaacgaggtattgttgcagcatctggcagtgagactgaggatga

SEQ ID NO: 838788 - DNA, 98 bp, Homo sapiens
aaggcagggcaaggaaactggccacaacacctgttcttcccggagcctatcagcaaagccattcccaaggctatggctacatgcaccagaccagtgtg

SEQ ID NO: 838789 - DNA, 98 bp, Homo sapiens
ccggatagacctattggatatggagcctttggtgttgtctggagtgagctgagtcgacagaaacttcatacccaagagctgctttctcagctggaaat

SEQ ID NO: 838790 - DNA, 99 bp, Homo sapiens
ggatatgttcgtggagacactgtggaaagtctggaccgagctcttggatgttcttggacttgacggcaggatgacgcaaaacacggtgattgtgaatgg

SEQ ID NO: 838791 - DNA, 100 bp, Homo sapiens
tctaagaggccatctgtgaggctcagtctcccaacacctctggccctggctgtggagaatgctgaaggaagaagacgcagaagcaggacgaccctgaaag

SEQ ID NO: 838792 - DNA, 100 bp, Homo sapiens
ggcatgttggtctggtcacccaatcaaaatctgtcagaagcaaagtgtgcagacacgcagtgctgatgagcccatgactacctttgtcttatgcaatgaa

SEQ ID NO: 838793 - DNA, 100 bp, Homo sapiens
gctttgtcaggaagctctggatataagtttggtgttcttgctaagattgtgaattacatgaagaagttccacctggtgccaagcatcaacaccatgagtg

SEQ ID NO: 838794 - DNA, 98 bp, Homo sapiens
ccaatgaccagtaaatcggcatcaggggcttgcttctgacatgtctgatgagcgcattcctgctgttgctcctggctattacaaggtgtcgctgtgga

SEQ ID NO: 838795 - DNA, 100 bp, Homo sapiens
gactcttttcctgtcaaattaccaggtacatggtgcagtggccgggagcacgcatccttcggcgtcaggagctagatgccttcctggctcaggcgctgtc

SEQ ID NO: 838796 - DNA, 100 bp, Homo sapiens
agctgaagatgagctgaatatcgaggccaaggacaggatcccagtttcctacaagcgaacaggattctttggaaaaaacctctgcgccatgagagccaag

SEQ ID NO: 838797 - DNA, 99 bp, Homo sapiens
tcaaagctgcctttgctgaattacacaactgttctaggcacagacagggtggagcagatgaccaaaacttacaatgacatcgacatggttacacatctc

SEQ ID NO: 838798 - DNA, 100 bp, Homo sapiens
gagaagaacttatcagagattgagaatgtccatggatttgtttctcattctcatatttcaccaataaaggtagcagaaggtcaagaaatttgtgtgattg

SEQ ID NO: 838799 - DNA, 98 bp, Homo sapiens
gaattggtggaaaggttgaagttcaagagctcagaccctaaagttcgagaacttgtcttggacaattgcaaatcaaatgatggaaaaattgagggctt

SEQ ID NO: 838800 - DNA, 100 bp, Homo sapiens
gagcatgacgcacacaggagagccaggattcatgctctacatccccatagaggttgcttttaagggtgacccagaagcagccctaatccaatatcttacc

SEQ ID NO: 838801 - DNA, 100 bp, Homo sapiens
tcactatctcctccctcttctcccgactatttggcaagaagcagatgcgcattttgatggggtcgacaagaagatgctgaggaatacttaggcttcattc

SEQ ID NO: 838802 - DNA, 100 bp, Homo sapiens
gacaaaaaccaaagtctcttctgctgggaaatcccagtacagatcgaagatgatttgaatgggatccacattgtggcctttgcagagaagagtgatccag

SEQ ID NO: 838803 - DNA, 98 bp, Homo sapiens
agagactgctgagcccgtccgtccgccgccaccacccactccggacacaggtcctgagaagtatttctcgttttcattggagatcacagcatacaaaa

SEQ ID NO: 838804 - DNA, 100 bp, Homo sapiens
atgaaaccttaagtcaaggccagtcacagagaccgagtatgtgccaagagttgtaacctctgcacaacagaaagcaggaagaactattacagcccggatc

SEQ ID NO: 838805 - DNA, 100 bp, Homo sapiens
tggcagccagtcagtggtggaggtgaggcaggcgactaatcagattgtgatgaattgtgctgatattgatattattacagcttcatatgcaccagaagga

SEQ ID NO: 838806 - DNA, 98 bp, Homo sapiens
agtctagttcagaggagagtagatccgagatatatggtggttctgctgggcatggacatcctgtccgccctggtgacccggctgcaggatcggttcaa

SEQ ID NO: 838807 - DNA, 100 bp, Homo sapiens
aggttgcaggagatcccatatgggctgctttcttacctcatcattgataggcacacttgcactaagccttacaatacctctgtccataatagctgacatg

SEQ ID NO: 838808 - DNA, 98 bp, Homo sapiens
gagatcctggcgagcctgcaggatggcgcggccgagtccccgtacggccacccggcggaactgcaacttccagtgagtccctctgtgtgtctggatca

SEQ ID NO: 838809 - DNA, 98 bp, Homo sapiens
gatggtcttgaaacacaaatggtttttgaaatcaacgaccgggagcagaagttgcatgcccttaaggaggtattaaagaaatttccaaaggaaaacca

SEQ ID NO: 838810 - DNA, 100 bp, Homo sapiens
aaagatatgccaaatttgttaaagagaggatagaaattgaacagaactatgcgaaacaattgagactgcaccttttaattttaatgataatgatttgctg

SEQ ID NO: 838811 - DNA, 98 bp, Homo sapiens
agaacctgcgggaggacggagagaaggcggcgcgggaggtgaagttgctgctgttggaatgatatggaacctagcaaagctgttccactgaatgcatc

SEQ ID NO: 838812 - DNA, 98 bp, Homo sapiens
cttggcaaggagtggaagacaacaaaaacaactgcattgtgtacagcaaagctgtgtcctgtggaatcccagaatccccaggaaacggttcatttacc

SEQ ID NO: 838813 - DNA, 100 bp, Homo sapiens
catccaggatttctgctgcagctactttcatacagcacgagtgcttccagaaatctgaagctcggaagaggtaacaaatgtggcaattattttggatcta

SEQ ID NO: 838814 - DNA, 100 bp, Homo sapiens
agttcttggctgcggggtgatggaacaacaactggtcaattcaggcacagatagatcattatctaggacttgcaaataagaatgttaaagatgctatggc

SEQ ID NO: 838815 - DNA, 99 bp, Homo sapiens
tccatgttttcacatcttccctttgactgtgtcctgctgctgctgctgctactacttacaagtatctactgtgcgtttcagtcaacaatacagcttgtg

SEQ ID NO: 838816 - DNA, 98 bp, Homo sapiens
aacccttccgggaagccatagctctgcatggcatgtggagaccccaaggcaaaaccatcctatcttatcgacaaaaacctggaatctgctgtgaaatt

SEQ ID NO: 838817 - DNA, 98 bp, Homo sapiens
aacgggccgcgaaccgcagtatcatgctggccaagaagatcatcattaaggacggaggcacggtttgctgtggaatttgtcatctaatgacaaactca

SEQ ID NO: 838818 - DNA, 98 bp, Homo sapiens
cctatctgcccgccgctcgcgccgggcccgtggccggatttggaagtcaaaccagaaacttcaggctctactacgatggcaagcactttgttggggag

SEQ ID NO: 838819 - DNA, 99 bp, Homo sapiens
gtttttctgttttgcctgaatacatgatttaaacaagagatttccacagaaggaccgggtgacttttagaagaatcatagtgaaaaataatgcaaagaa

SEQ ID NO: 838820 - DNA, 98 bp, Homo sapiens
aacacctccagagagtggtatttttggatttatgataaacttctctgcatttcttgggaatacagaagcagatttacaaatgaagagacagtgtcatt

SEQ ID NO: 838821 - DNA, 100 bp, Homo sapiens
tggacctgtgtacccacccaaggctaaaggcagagccagactaaacttcagtggctctgtgaggaactgaaagagagagaaaacagagagaaaaatctgc

SEQ ID NO: 838822 - DNA, 98 bp, Homo sapiens
ccaccggccgcttctgtcctcgatgtatcctccactcctcgctggccaccatcctgctgcccaacagaagaagctcttctgtctccgatttcctgaac

SEQ ID NO: 838823 - DNA, 99 bp, Homo sapiens
ttcgttcccgggtcccgcgcgagctttcccgggataagtagctttagcgatcgggagacagccgggcgctgcaagggtatgagctacagttccgattag

SEQ ID NO: 838824 - DNA, 98 bp, Homo sapiens
gactatgaccccaccattgaagactcctacctgaaacatacggagattgacaatcaatgggccatcttggacggtgttggagcgggccggagagaagt

SEQ ID NO: 838825 - DNA, 98 bp, Homo sapiens
ccccatttttattgaaagatgtattgagtacattgaagccacagggactttgaacatgtcggggatcgccctcagcagactcgcccaggagaggaaag

SEQ ID NO: 838826 - DNA, 100 bp, Homo sapiens
cgggcaaacaccgtttatggattgggattctcctctgagcatcatctttcgaaattccacagcctcctagattagaacctcaggaaccaaattctgccac

SEQ ID NO: 838827 - DNA, 98 bp, Homo sapiens
tattgcaatcatggtgcagaaataccagtccccagtgagggtgtacaaatacccctttgaattaattatggctgactgagcagggggaggaacattta

SEQ ID NO: 838828 - DNA, 130 bp, Homo sapiens
tttgtcttgcaaagtgttggaggacagacattaacagtatttactgagagctcatcagcaaagagctcctgggaaggtgctgctggatgcagtttgcaaccacctcaacctcgtggaaggtgactatttt

SEQ ID NO: 838829 - DNA, 98 bp, Homo sapiens
gggacctggcgccaccttgcagagagaagaagaaggaggttcctgctgtgccagaaacccttaagaaaaagcgaaggaatttcgcagagctgaagatc

SEQ ID NO: 838830 - DNA, 129 bp, Homo sapiens
gtttctagtccagaatacaccaaaaaaatagaaaacctatgtgctatgggctttgataggccctggtacctgacagtgtaaagaaggagctcctacaaagaataagaacattccttgctcagcatgcca

SEQ ID NO: 838831 - DNA, 99 bp, Homo sapiens
ttgctcacagagctctgtaaagtttcctcactgcttggaggaagatgagaattctcagaggtccttatgctgccctttttgctgcagtcttgacatctt

SEQ ID NO: 838832 - DNA, 100 bp, Homo sapiens
agatcctggtctggaaaaattggctaggtgtaaaaaggcagccggtgagaagccttataagtgctcatgggagggatgtgagtggcgttttgcacgaagc

SEQ ID NO: 838833 - DNA, 100 bp, Homo sapiens
tacatagaagtggctcatagttccctccagattgtcctcgcagtgcaattaaaaactagcatttctagtcagtatgtaattcggatgcagccgactaata

SEQ ID NO: 838834 - DNA, 100 bp, Homo sapiens
aggagaaccaaagccccagccaacagatcaaactgagtttatagccagcaccatctctgctgttagattcatgcccaagcacaaaacaacccatttaaag

SEQ ID NO: 838835 - DNA, 100 bp, Homo sapiens
gattagagtatgttctgcacttcactgcactgaatgggaagatttactttcgaagctataaatggagcagcatattgtatgggacgtatgaattctgact

SEQ ID NO: 838836 - DNA, 100 bp, Homo sapiens
ctatgggaccaccagcaggagcagctactactccaagttccaggcagggaatggctcatggggatatccgatgccttcaattaagttgcagagttctgat

SEQ ID NO: 838837 - DNA, 50 bp, Homo sapiens
gggacaacgaggccgcggagacatacgtggttgcagtaggattggagtgt

SEQ ID NO: 838838 - DNA, 98 bp, Homo sapiens
aaagactggcatcggaaatctaaagaggcaactatggtcctgagctccgcacacttctggttgggattatttctggttcctactgcctgtttgattga

SEQ ID NO: 838839 - DNA, 100 bp, Homo sapiens
cttcagggcagcatatgctggcaccactgttagtgtgtccagatgcgtctgttactagagtggagagtctaccttcgtctcacatgtgccacaaaggatg

SEQ ID NO: 838840 - DNA, 100 bp, Homo sapiens
gggaccttgcggtgaggctgcgcggggccgaggccgcctccgagcgccaggtcgttcatgcccaacttggtgcctcccaagatccccgatggagagagag

SEQ ID NO: 838841 - DNA, 100 bp, Homo sapiens
aatgctttaaaacaacatgcctactcagaagaacgtcgaagtgcccgcctacatgagaaaaaggagcattctacagcatctgcgggccaggcatcgacat

SEQ ID NO: 838842 - DNA, 98 bp, Homo sapiens
ctgggaacactgaatcaacatgggcaatgagaacagcacctcggacaaccagagtcatttcctacagtgtaaagaggacaacccggactttgaaggcg

SEQ ID NO: 838843 - DNA, 100 bp, Homo sapiens
aagaagtacaacgtgccggtccagctgagatctgtatctgtggacctgaatgttgatccctcgcttcagattgacatacctgatgcgctcagtgagagag

SEQ ID NO: 838844 - DNA, 100 bp, Homo sapiens
ccctattcaccacctaccttcagattcttgaccaaaatgtggcaccccaacatttatgagacttcatgggagactgtagggtgtaagaaaaagaattttg

SEQ ID NO: 838845 - DNA, 100 bp, Homo sapiens
ctgatgtggtgcttttgaaccactggaaagtgaggaattttgaagtacaccgtggtgacattgtatcattggtggctgatcccttatccaacatggttct

SEQ ID NO: 838846 - DNA, 100 bp, Homo sapiens
ggcttgcttattcccccaccatgggactctacctggggatatacatgcatgcaccaaaacgaggacagagtgagtatattgctccatgtgactgtcggcg

SEQ ID NO: 838847 - DNA, 100 bp, Homo sapiens
aaaattaagcagatgctccagtttgagaaacctggatctgcgatctgtttgtggtgaggctgctgtcagaaaggaacttttacacagtttgccttcagag

SEQ ID NO: 838848 - DNA, 99 bp, Homo sapiens
acccacaggtgcatttcacagcactctgggcgaaaattggatgtgaaaatgaagccagaccgaggcatagaatgtcaagctaaccaggcgtccgctact

SEQ ID NO: 838849 - DNA, 50 bp, Homo sapiens
cttttacactgttacttcagtcagcgttatgtttggtggaagaaaagttt

SEQ ID NO: 838850 - DNA, 100 bp, Homo sapiens
ccacatcaatgcactgccaatggtctgacctacgagaaacatggcaaccagcgccgtccccagtgacaacctccccacatacaagctggtggtggtgggg

SEQ ID NO: 838851 - DNA, 98 bp, Homo sapiens
atggtaaatggagaaactgagagttctactgctggattgaaagtcaaaaccgaagaaatgcagtgccagggcactgtgtttagtcttgagtcagagga

SEQ ID NO: 838852 - DNA, 100 bp, Homo sapiens
gatctgaccacaaagaaagtagtagactacacaacagcgaagggccatcgatgcacccctcggagctaatagcggagatgagaaacagtgggtttgcact

SEQ ID NO: 838853 - DNA, 98 bp, Homo sapiens
aaattgcagccagggatattgagaaacttctgagcaacagatctaaagccctggtgattggccatcgggactttgatgtggagaagcgacttcggaga

SEQ ID NO: 838854 - DNA, 100 bp, Homo sapiens
ctcagtatgggctggaacctgacacttggcatgacagtgccaaaactgttacatcaggttgtggagcagttacaaaaggttcattttatcacagataccc

SEQ ID NO: 838855 - DNA, 100 bp, Homo sapiens
gacagattgcagtatccgggatccagttaggaaccttcacccccccaaggatgaaggacccaagggttgctatcaagatcatagataagacccagctgga

SEQ ID NO: 838856 - DNA, 99 bp, Homo sapiens
tggggccggagacgcgacttttcaggacgctcctcagccaagaagaagggcggaaaccacatccccgaaagaagagcttaaagcagcgcctgggtaaga

SEQ ID NO: 838857 - DNA, 100 bp, Homo sapiens
ggccgaatgtgcaggatcaccgaggggaaagtgagcttgacagctatatgttctcctttcagccaagacctttcaccagtgcaggggatagaagattcat

SEQ ID NO: 838858 - DNA, 100 bp, Homo sapiens
gaagattcaaacaaccaaccctgatttcctgcttctccttttcatgagtgttcctgtggtctctgcacctcctttctgaacattttagtggacaaaccaa

SEQ ID NO: 838859 - DNA, 98 bp, Homo sapiens
cgagatcgaccgcaccatcggcaagggcaacttcgcggtggtcaagcgggccacgcacctcgtcaccaaggccaagattcaaccctatgaaaagataa

SEQ ID NO: 838860 - DNA, 100 bp, Homo sapiens
agctcaggctatcccttgttctttggcttgggtgagaccagtagaggaggctgtaaaagaattcattgagcctgaaatagacgagtcttttaaagaagat

SEQ ID NO: 838861 - DNA, 51 bp, Homo sapiens
gccagaccatcaagctcaacatcgcaaattatatccagatcgagagacaga

SEQ ID NO: 838862 - DNA, 99 bp, Homo sapiens
ttatcgaatattcagcaagggtgcatctgagataattctgaaaaagccacaataagccagctaaggagtgaacttgccaaaggcccccaggaagttgct

SEQ ID NO: 838863 - DNA, 100 bp, Homo sapiens
cgggtgtgtggctgcgcgcgccgggagagatgctgagggaaacctgtttgacttcttacgcttgacggaatggcgtggcccccgcgtgctctacttcggg

SEQ ID NO: 838864 - DNA, 99 bp, Homo sapiens
tggcttcaggatgtagagggcctgcagagtctgaaaagtgtcgaagagacagttttcaggaacaacaagcaattattcctactttccaagttattttga

SEQ ID NO: 838865 - DNA, 100 bp, Homo sapiens
tcatttttgccctcaaaagaaatggcagagtgtgaacatggctacgcctcttcattcccgtccatgccgagcccccgactgcagcattcaaagcccccac

SEQ ID NO: 838866 - DNA, 99 bp, Homo sapiens
tgggcctcatcatcttctctcttggtgtgatcagctggcggagagctggccactctagggagtccaggttgtcaatcggtcacagagaaagaagcatct

SEQ ID NO: 838867 - DNA, 99 bp, Homo sapiens
gacagtgtggaggggcccaaggaatttccccaggagaagatgtgtctgcggctcttcaggcaaatcgtacttgcccaatttgccgagctgatgcttcag

SEQ ID NO: 838868 - DNA, 140 bp, Homo sapiens
ctggctccctcattaccgtcgccagcggagcgaacccgagagcgtggagcgggctgggccagggcaatgacatcattgcagcagccaagcgcatggctctgctgatggctgagatgtctcggctggtaagagggggcagt

SEQ ID NO: 838869 - DNA, 98 bp, Homo sapiens
tttgatgatcatgatacagttgataaaattgttgaatggagatttacagacagtcatctgggtggaggacacccttttgggatcagcactgaaagtga

SEQ ID NO: 838870 - DNA, 100 bp, Homo sapiens
ttccttggagtttggcatgatgatcatttttgcttatctgccttatgggcttgcagaaggaatctcactctcagcatccagtcctggatgagccaatagc

SEQ ID NO: 838871 - DNA, 99 bp, Homo sapiens
gaaaatggtatcagagaaaaagatctatgatgtggaacaaacacgttataagggagccatgctcactggtcctcctggtaccggcaagacccttcttgc

SEQ ID NO: 838872 - DNA, 100 bp, Homo sapiens
ccaccgctcccggccgccgcgctccggtacacacaggtacaaatcgaatgaagattatgtatatgtcagaggacgtggccggggaaagtacatttgtgaa

SEQ ID NO: 838873 - DNA, 100 bp, Homo sapiens
ctgcctgactacctggctgccatagatgaggccctggcagccttgcacgtgacgggtggctgtgccagtgtcattgtgtcattaactactcagtgtcctc

SEQ ID NO: 838874 - DNA, 99 bp, Homo sapiens
ccaaacctgctggcaagcagaacggaatccagaaccccatctcgctggaggttctgcggcatgaggaatttgaagaaggctgcaaagctgcctgtaatg

SEQ ID NO: 838875 - DNA, 100 bp, Homo sapiens
agcgagtacactgtaaaatggcaggacttcttcactggacacgtggttgtggctgacaagattttgaaaaagaaagaataccctctttatataaatcaaa

SEQ ID NO: 838876 - DNA, 98 bp, Homo sapiens
cctccggccccaggcctaccccagtcacggacgctaaagattccaggcttcaagatcagaggcagaactctcctgcagggaataaagaaaatattaaa

SEQ ID NO: 838877 - DNA, 100 bp, Homo sapiens
gccgtcacccttcctgcgattctacttaggtgctgcttacgctcatgcagaagagagtatcaagaaattggtggagcaatataaactgccatttttgccc

SEQ ID NO: 838878 - DNA, 125 bp, Homo sapiens
acatctcagaggaaagacaccaccacctcatcacccaattttggtgaaaaagtcaagttcccttttcaatactggattcctcaaaagaatgctatttgaatctcttcaccatggtttggatgaca

SEQ ID NO: 838879 - DNA, 137 bp, Homo sapiens
ggccaatgatggctttgtacggcttagaggacttccctttggatgtagcaaggaagaaattgttcagttcttctcagatgcctgaggaagtgcaccatggagaggaggaggtggagacttttgcctttcaggcagaa

SEQ ID NO: 838880 - DNA, 100 bp, Homo sapiens
tctttgcttctaaaggggcacaccttttatagaagtacgtccaggaatagaagtgacctgctttttcgcaaatgatgatgtgcctgcagatatggttgca

SEQ ID NO: 838881 - DNA, 98 bp, Homo sapiens
cgggcagctccccaaagacaggagcacaggttcgtgctggccgtgggcagcgccgtctttgatgccatgttcaacgggggaatggccacaacatccac

SEQ ID NO: 838882 - DNA, 100 bp, Homo sapiens
aagtcattctgaatggtgatctgtctgagatgtacgctaagactgaacaggatattcagagaagttctgtatattcaagagcaaatgaccaagagccatg

SEQ ID NO: 838883 - DNA, 98 bp, Homo sapiens
aacatctgtgcccctggggaccaggagctcattgctctggccaaaaatcgatttagcctgcgggaggaagcactgaaacaacacaaaaccctatctca

SEQ ID NO: 838884 - DNA, 100 bp, Homo sapiens
tttatctcacagacagcctgagacagttcttacggaaacaccccaggacacaattggttacacatcattttggaatgactgtatatcatctggattacgt

SEQ ID NO: 838885 - DNA, 101 bp, Homo sapiens
aatcaggggaggcatgcttcaggcgcttgaagaggctcagaaagctatccaacaactctttggcaaaatcaaagatatcaaagacaaagctgaaaaatcag

SEQ ID NO: 838886 - DNA, 100 bp, Homo sapiens
gttcccaaggaggcttcaagacaaagggccccttacacaccagacagaaacttgcccctggagtcagccagtttgcttacacgtgtgtacaagaccaccc

SEQ ID NO: 838887 - DNA, 98 bp, Homo sapiens
tggaactgggacttcacctccgcgctcttcttcgccagcaccgtgctctccaccacagaggaggcctaccagaaactggccagcgagaccctggagga

SEQ ID NO: 838888 - DNA, 100 bp, Homo sapiens
aaatctggaatttccatttcgtaaagatcttcgtatgcatttatcaaatactctcttggatggccaagaagttgagaagtttacagacctagagaaactc

SEQ ID NO: 838889 - DNA, 114 bp, Homo sapiens
ggcggtttaaaggaggtggcgggaagcctgtgtgtgcttcaaatcgtcaccctcatggtcgctccgaaaaatggctacaaacttcctagcacatgagaagatctggttcgacaa

SEQ ID NO: 838890 - DNA, 98 bp, Homo sapiens
gccttgtaaccatcaggtagatacagcaccaacgatctatgaggctcagccggagatttcccgggcatttcagaccagagagtttatacccttgcctc

SEQ ID NO: 838891 - DNA, 151 bp, Homo sapiens
cctggccgaggcgaagcggcaggcctccgaggacgccctgacggtcatcaaccagcaggaggactccagcgaggacttccagccactgcgctatttggatggtgtccccagctccttccagttcttcctgcccctcggctccgggggggcc

SEQ ID NO: 838892 - DNA, 100 bp, Homo sapiens
tatttgaggccattaatatcaccaacaatgagagagtggttgtaaaaatcctgaaggctaagaagcaccaggccttcctagtagagacatgtgaaaataa

SEQ ID NO: 838893 - DNA, 100 bp, Homo sapiens
cctgttaaaggaggaactgtagcggatctagaatctttgagcggtcaagggaaagacaagccgactcttcagatccctgtggacacactgcctgctcttc

SEQ ID NO: 838894 - DNA, 100 bp, Homo sapiens
gtccagaatgtcacaggtccagggcagaggaccaacatgggcattttgtttatgagcaagctgaaccacaatctctacgaggtgatgagcaaactggaga

SEQ ID NO: 838895 - DNA, 100 bp, Homo sapiens
tgagacctgcctgaatggcgggaagtgtgaagcggccaatggcacggaggcctgcgtggtcctggcggcagagaccacgtcccagcaggagcggctgcag

SEQ ID NO: 838896 - DNA, 98 bp, Homo sapiens
gtagccacagcggcagctccagcccggcccggcagcgacatggaaggttggcaaggccacaggcttcctcaagaactttctgatcgagcccttcgtcc

SEQ ID NO: 838897 - DNA, 99 bp, Homo sapiens
aggatttctgtgcctggaaaatatctgttaacagactgcttttacacctacatgagtgatgtgtctgcaggaggagccactgtttttcctgaagttgga

SEQ ID NO: 838898 - DNA, 100 bp, Homo sapiens
cacccgagagcaacaaagcaggcgactacagccacgtgaaggtgccaatgggtcatgtttggttagaaggtgacaatctacagaattctacagattccag

SEQ ID NO: 838899 - DNA, 100 bp, Homo sapiens
ggtgtggacatctgctgccggaaggggtcccgaagccccctgcaggaactctacaacccaatccaggtattcaactttgacgtgcgccagttgaactggt

SEQ ID NO: 838900 - DNA, 100 bp, Homo sapiens
tactctcgttatctgacctcatggatgaacttcaggatgttcagctcacagagatcaaaccacttctaaatgataaggaagaaatgttggctatttggcg

SEQ ID NO: 838901 - DNA, 99 bp, Homo sapiens
gtttcccaagcaaggttccttggaagaagatgtctgcagagacattattgcaagagcatctcaagcagacgtcgttacaatcgtgatttggaacaggat

SEQ ID NO: 838902 - DNA, 98 bp, Homo sapiens
cgggcctcgtcctctgcacgttaccttacctcagagattatatgccttacctcgctgaatcatcacagccctaggagagtctgactctatcacccagg

SEQ ID NO: 838903 - DNA, 99 bp, Homo sapiens
ttcactctacctggatgcattttaactaatcctgaggacttcatccggtcaccatctacctattcttcaaatggatttgtacacacagatatgacgaaa

SEQ ID NO: 838904 - DNA, 99 bp, Homo sapiens
ttaaattgactccgctgattctggatgtacgaagtaggtccaaagttgttgaccgtatttacagtctctacaaacttacagctcataaacataaaatga

SEQ ID NO: 838905 - DNA, 99 bp, Homo sapiens
ttttcaccaccttgcactccatgtggctctcctttcccctaattcacagggtgaagccagatttgatctctctggttaataacttcttgaagtatgggt

SEQ ID NO: 838906 - DNA, 100 bp, Homo sapiens
gtgttgaaggaaaagtgcggacaaattcataaagctttacaaggccttcatcacggcggcttggattgtcctgtgccaactgtcacaccacaactaccac

SEQ ID NO: 838907 - DNA, 100 bp, Homo sapiens
gatgcagcaggcatcatccgctatgcaattgggaaagtttcctacactactgaggtttaggggcactgtgaagcaaaagccacgcctcagaatcccaggc

SEQ ID NO: 838908 - DNA, 98 bp, Homo sapiens
gagactcagtgcagacctgcacaaacccactggacaccttcgtcccctttgatccctgtgtgctgaagagggccaagaccagcttcaagtctccatgg

SEQ ID NO: 838909 - DNA, 100 bp, Homo sapiens
gacaacggagaccagacctactgcagccacgcgggcgagcggctgtgtggatgtcggcgaagccgcgggcgagggcagcgggtggcatgagacgtgggaa

SEQ ID NO: 838910 - DNA, 100 bp, Homo sapiens
tggacggggcgatatgcattgccacagcactgtctggaaaccacaggctccagcatatcaaggatagtaaagctctgaaggatgaaaatctacctcctgt

SEQ ID NO: 838911 - DNA, 99 bp, Homo sapiens
tgcagatcatcctggcgatctacttcctctggcagctcatgggcctcctgagtgacccagaattaggtccagcagcagctgatggcttctctctgctca

SEQ ID NO: 838912 - DNA, 100 bp, Homo sapiens
tgcagtaccccagctccatcaacctcacgctgcacctggtgtacaagactgatctggagaaggacattatttcggacacatctggtgacttccgcaagct

SEQ ID NO: 838913 - DNA, 98 bp, Homo sapiens
aggcatggagggaggtgcttcaggaaacctgcattctcgaaaacttgttagctttacattgtcaggcaatccactgtatgacagcctaggttctttgg

SEQ ID NO: 838914 - DNA, 100 bp, Homo sapiens
cgtgaccgagaccgtgaccgagagcgtgaccgagagcgcgaatatcgtcatcgttagaaggtattgttgcagcatctggcagtgagactgaggatgagga

SEQ ID NO: 838915 - DNA, 100 bp, Homo sapiens
cactgcacatggcgatcgcctataaccatccggatgtggtgtctgtcatcctggagcagaaaggagactggagaagctggctggtggaggggcgaactta

SEQ ID NO: 838916 - DNA, 100 bp, Homo sapiens
atttacggagaaatggcagcacacgttgatatgccctgcgtccaagcccaatatagcccttcccctccaggttccagttatgcggcgcagacatacagct

SEQ ID NO: 838917 - DNA, 127 bp, Homo sapiens
gaactttaccagcacctggaatctaaggagtggtttgtgcagctctattaccacgggaagttccgcctggtggtgaagacagccctgaagctgctgctcgtctttgtagagtactcggagtccaacg

SEQ ID NO: 838918 - DNA, 101 bp, Homo sapiens
gcgctgccccgcgggtgtgcctgagcctccgcgccccgcaggccctggcccaggatggcggcccaggtgactctggaggacgcgctgtccaacgtggacct

SEQ ID NO: 838919 - DNA, 98 bp, Homo sapiens
aagcttcagagttctctaaaaaaactggctgtgaataatatagctggtattgaagagatggcaccaaaagcgaaggaagctcctgctcatcctaaagc

SEQ ID NO: 838920 - DNA, 99 bp, Homo sapiens
caaacacaacctctggtcctataaggacaccccaaattccaggtaaccccacgaaagaaattcaagtgtcctgagtgcacagccatagatgggctttca

SEQ ID NO: 838921 - DNA, 98 bp, Homo sapiens
aatttttacgtctagatttccatgcccatggaagctcttccaccaaagccacctaagccaatgacttcagcagttccaaatggaatgaaggacagttc

SEQ ID NO: 838922 - DNA, 100 bp, Homo sapiens
gggcgctggtcctgctcggctgcctcctggcctcgctcctgttctcaggacaagcagagaccacctgggaacgtcccagcagttctcctgggattccagc

SEQ ID NO: 838923 - DNA, 99 bp, Homo sapiens
ccggagaagggctgcgggttagggggccggcgcccgcggttcagaagtctgggccaacggtcacaaaagttgtcactgttgtgacaaccaaaaaagcag

SEQ ID NO: 838924 - DNA, 100 bp, Homo sapiens
agttgatgaacacagctgagatgttccttagtaatcatataccactaagaaaacctcacacctccagtgacctgctggctcaatttcattacccgcgtga

SEQ ID NO: 838925 - DNA, 111 bp, Homo sapiens
agcgtcccggccttcatcgacatcagtgaagaagatcagcaggggaaatgctgtctgtagctgagcacttcctggagcagcagatgcacccaacagtggtgatcagtgctt

SEQ ID NO: 838926 - DNA, 99 bp, Homo sapiens
ggaaaaggccggagaaggtgaaattctgtgtgctccctccggcgagagactttgtcagctcccgcacagtaacggtgatcagcccatgacctaaacctc

SEQ ID NO: 838927 - DNA, 98 bp, Homo sapiens
tctcttcgggagcgacgccgacagcgaagctgagcgtaaagcattttgaaagcgaagcagaagccgtagaatcagcggcgagcctgttgaaagaaccc

SEQ ID NO: 838928 - DNA, 99 bp, Homo sapiens
ccagaggtcatgctgaaagtacgtctaatagacagggtgcaactggaaactgacttgaagattgagaaggaatggaggcagactttgcaggaagatctt

SEQ ID NO: 838929 - DNA, 100 bp, Homo sapiens
gcacatcctctcggtgttcccgctggcggcgggcatcttcttcgtgaggctgctcttcgagcgcactattcctgatcagagaactccagttgcttcaaca

SEQ ID NO: 838930 - DNA, 99 bp, Homo sapiens
ttaatttgggatattactcggtccagacaggtgcagttcaggagcagatgagatccaagggaaaccgagataggccatggagcaattctaggggcttat

SEQ ID NO: 838931 - DNA, 98 bp, Homo sapiens
cattatctcatccacagacaaacttgcacctgttcttcccggagcctatcagcaaagccattcccaaggctatggctacatgcaccagaccagtgtgt

SEQ ID NO: 838932 - DNA, 98 bp, Homo sapiens
tgcgttaatgtttgcaaatgcagaggaagaatttttctatgagacatttgaagacagtgatttgttccatttgattggtgttatctgtggcttagcaa

SEQ ID NO: 838933 - DNA, 100 bp, Homo sapiens
cctcattgtgatttgccttttggggaagctgtatgttgcaaatgctggggatagcaggttctcccccatgggcgtcgatcacatgagcgggctctctggc

SEQ ID NO: 838934 - DNA, 100 bp, Homo sapiens
acaaagactgttgagtatgctccatgtagatcacgttttgaaaacattgaattgactcctcttgctgcaatatgtgtgaaaatatattctggaggaaaag

SEQ ID NO: 838935 - DNA, 100 bp, Homo sapiens
ccaaagatgatgaatctgaaaggaaatccggaattatcacagaaggatgtgaagccactgaaagcttgactcagggaaaagaaatgtgggaccatcacac

SEQ ID NO: 838936 - DNA, 98 bp, Homo sapiens
ctggttcacgaggagggatttcagtgctcttcagcctgacctgggagctgccccttcccaaagatgtggtttaacagagacgaggtctcactatattg

SEQ ID NO: 838937 - DNA, 100 bp, Homo sapiens
gagcacagtaacatacagcactttgtggagaaagtcgtcttccacttgcacgaaagctttcctaggccaaaaagagctggaaaggcagctcatcatgcag

SEQ ID NO: 838938 - DNA, 100 bp, Homo sapiens
ctgaaagttttccttccatctctgctgctctctcatttgctggccatcggattggggcagtatttggcagtcgtattcagagataaacccctggagctat

SEQ ID NO: 838939 - DNA, 100 bp, Homo sapiens
aaaacaaagaggattttgagaaggaaacttttgagaagaactttgaaagagaaacccataaaataagtgagcaaaatgatgctgataatgctagtgtcct

SEQ ID NO: 838940 - DNA, 98 bp, Homo sapiens
agaggggagccggaggaggatgctcctgcctcccagagaggggagccggcgaggatcaaaatcttcgaaggaggagggcctgagctgcatgaataagg

SEQ ID NO: 838941 - DNA, 100 bp, Homo sapiens
aatggatagtatgaatgatcaagctctgtctgtagtgaggatcaggaagctattcaggcacagaaaatttggaagaaagccatcatgcttgtatggagag

SEQ ID NO: 838942 - DNA, 100 bp, Homo sapiens
aaagggataggagaaggatgtggactgcagtgctgcagtgccagtttcctgactttctgagaagccctggtttccccaaagaagtgatttctgatagaaa

SEQ ID NO: 838943 - DNA, 98 bp, Homo sapiens
gccgaagaagcatcgttaaagtctctcttcaccctgccgtcatgtctaagtcagagttttagaaagagcgttttcgctacgtaaagcacattcgataa

SEQ ID NO: 838944 - DNA, 100 bp, Homo sapiens
gatgccaggacaccccgaaagccggaaaacggcataagatgcacatttttctgctctggagccgggaatgaaatattcttgagttcttacaactttatga

SEQ ID NO: 838945 - DNA, 60 bp, Homo sapiens
cgagagggagccgcagctgatgtcaggtactgtccaagaagctggaacattattatccag

SEQ ID NO: 838946 - DNA, 101 bp, Homo sapiens
cagtcggtgttgagcacggcgagcagtctcaggcctttagtgatgatggtgtggatgaggtcaccattgtcaacattttgaccaaccgcagcaatgcacag

SEQ ID NO: 838947 - DNA, 98 bp, Homo sapiens
gagctgacgtggcttgaattgggaggggggcagctggagcctcaggcggcagcgcttctagaggacaagaattttgggcagatttgaatgccatgaac

SEQ ID NO: 838948 - DNA, 50 bp, Homo sapiens
ggtgatttctgcatttccaactgagggtcttgctttgtctcccaggctgg

SEQ ID NO: 838949 - DNA, 100 bp, Homo sapiens
tctgggtgcggactcggagaagccctcgagcatccccacaggtgctggagaatctggtaaaagcaccattgtgaagcagatgaggatcctgcatgttaat

SEQ ID NO: 838950 - DNA, 100 bp, Homo sapiens
ccaaatgtgtcatggcttcagcaagaggccacaagaatcaaagaatcttcaggatggcagcaagtgtttacgagcccatatttggattggactatcgaac

SEQ ID NO: 838951 - DNA, 98 bp, Homo sapiens
ttgaagatccagaagaaggccacttgaaattctcttctgaattaggctgctcactggcccgtctcctctcatgactgctgctctgggaaccacctctc

SEQ ID NO: 838952 - DNA, 109 bp, Homo sapiens
gttccttgtacctgaccatgtcaacatgagtgagctcatcaagataattaggctattcaagatctctggcagtggaggaagtctctttaagaaaatagtttaaacaatt

SEQ ID NO: 838953 - DNA, 100 bp, Homo sapiens
gtccaccactgtccaacatggcaatgtcactcagcctctgaagaagcttcgggttcagactcaggcagtcagtcggaaagtgagcagggaagtgatccag

SEQ ID NO: 838954 - DNA, 100 bp, Homo sapiens
gccacatgtcctctggagtgcccactcccaccaagagagaaactccagaaaatcttgccaaacttctgaccaggatgtatttaaaatcagaagtcatagg

SEQ ID NO: 838955 - DNA, 136 bp, Homo sapiens
gattcatccttaccctcaacgaaggtgtgaaggggaagaagctgaccttcgagtacagagtctccgaggcctactgaacttgacgcactggtatttggccatctatacaccattcttaccacacaattgacaaatg

SEQ ID NO: 838956 - DNA, 100 bp, Homo sapiens
aggactggtgatctacgtgtgctttttcaagggagctgataaagaacttcttcccaaaatgggtcactgggaagatggatgagaaccagtttgtggctgt

SEQ ID NO: 838957 - DNA, 100 bp, Homo sapiens
cgaaaccgccagaagaatcggtcatggaagtacaaccagagcatatccctgcgccggcctcgcctcgcttctcaattctgaacacaaactcgagacgagt

SEQ ID NO: 838958 - DNA, 98 bp, Homo sapiens
cacttatacccataccattagcagtaattacaacatgtattgtgctgtatatgaatggtgaccaagaatatggcccaggtgaccaaagccctggacaa

SEQ ID NO: 838959 - DNA, 98 bp, Homo sapiens
cggccccgcccccgccggttcgcgtctctctgctgcggcgcggggaccgctgtgctctcggggagctgatggagctgatccgcagagagggcaggagg

SEQ ID NO: 838960 - DNA, 98 bp, Homo sapiens
tcaccaaagactacattatgaacccaccactgggcaaagaaagtatccctttggaccagttactctccacaagaaaattcacacaaccacagtgctct

SEQ ID NO: 838961 - DNA, 100 bp, Homo sapiens
atcctggacattgccggcttcgagatctttgatgagctccagggtcagaggtcggatgtctacagcgacctcaacacacagaggccgtattacaaatgag

SEQ ID NO: 838962 - DNA, 100 bp, Homo sapiens
catgtccactcacaaggaatccaaaggaacgtgtgaaagaagaattgtggggaaaaaaaagcaagcataaccaaagatcatcagcagtgaagaatctagg

SEQ ID NO: 838963 - DNA, 100 bp, Homo sapiens
tcgagagaagaaaattttagaagttcatattgacaaaggtggcttcccacacttctgactcggacgttccttccggtgtcactgaggtggtcgtgaagct

SEQ ID NO: 838964 - DNA, 100 bp, Homo sapiens
acgggccagccccgccgccctcgcaacctggcagccgccgccgtggaagaaccccagctcaaagggattgtgacaaggttattcagccagcagggatact

SEQ ID NO: 838965 - DNA, 98 bp, Homo sapiens
gcttcctgccattgtccacatcaatcatcagccattcctagagagaggcgatgggcctattgtatgatgaaatgagtattctcttcacagttttggtt

SEQ ID NO: 838966 - DNA, 98 bp, Homo sapiens
cccagcttgcccacgcaccccactcggcgtcgcgcggcgtgccctgcttgtcacagtttccctgaaacctgggctcttgaagacgcatcactggagca

SEQ ID NO: 838967 - DNA, 100 bp, Homo sapiens
ctgatgcccttctgcagtgcatgaatgtagctcttcgaccaggcaatacagtacggtactgaggataacagtactgcagtagtagtgccttttggtgcct

SEQ ID NO: 838968 - DNA, 100 bp, Homo sapiens
ggacccaaagtgccatgtctttaatgtgtttgtaaaatgtatgaagaacatctgaaaagaatgaatcccaacagtccctctatcacatatgacatcagtc

SEQ ID NO: 838969 - DNA, 100 bp, Homo sapiens
caaactaaatttacagaaaaagaaaaagaagaaaaaagaaaccagcatcatcatgctggatgaaaaagaaagtcggcgtctgttccaacagatcctttct

SEQ ID NO: 838970 - DNA, 101 bp, Homo sapiens
caaaacaacaaaataaccgaaatcaaagatggagactttaagaacctgaagaaccttcacggtgctgctggtcaacctggtgctaaaggagaaagaggagc

SEQ ID NO: 838971 - DNA, 100 bp, Homo sapiens
aaataaggacaaaagccaagaggaggacagttcgctacacagcaatgcatcgagtttccccctttctagggtgaggatggttctacacagccacccggag

SEQ ID NO: 838972 - DNA, 98 bp, Homo sapiens
gagaatcaatttatggtggatattttaaagggtctggaacagaatctgacagtgatgaatcagtaccagagcttgaagaacaggattccacccaggca

SEQ ID NO: 838973 - DNA, 152 bp, Homo sapiens
gaacaacagaagctatgcttggcagcagaaggatttggcaacagactttgtttcttggagtccacttccaattccaagaccttcactgcctggtgtaactcccacctaaggaaagccggcacccagattgagaacatcgaggaagacttcag

SEQ ID NO: 838974 - DNA, 100 bp, Homo sapiens
gcttcatctgcgatggacagaataactgtcaagacaacagtgatgaggaaagctgtgaaagttctcaagctcggacctcaggcacatgcgaatgacccgg

SEQ ID NO: 838975 - DNA, 136 bp, Homo sapiens
cacgtgcaagaggaactggagcgagctccccgacgaggagcgcggcgagatctacgtgccagggaatgaaagctactggttgattttaaagtgcctgggcctcacaggtttggagatgtcccagaataaggcacaa

SEQ ID NO: 838976 - DNA, 100 bp, Homo sapiens
gtgacatcgcttctgggtaccactatggggtagcatcatgtgaagcctgcaaggcattcttcaagaggacaattcaagatttgcttggaacggtagaaga

SEQ ID NO: 838977 - DNA, 99 bp, Homo sapiens
aacaatttctcctgctctgcagcttctgttcaggtctccatcacatttttgcccagaggtaggggggattatgcccagttttgggatgttgaatgtcac

SEQ ID NO: 838978 - DNA, 99 bp, Homo sapiens
gcacccagaggccggggaccttgccaaccctcccaagaagttcagagggaatgaaagctactggttgattttaaagtgcctgggcctcacaggtttgga

SEQ ID NO: 838979 - DNA, 100 bp, Homo sapiens
taaaaaattttccaaaagagagatggagtcacatgccataggaaaaaagcctgaaaattcagcagacatgattgaagaaggggagcttatcctatctgtg

SEQ ID NO: 838980 - DNA, 100 bp, Homo sapiens
ggaagagcagagctgcagacaggaataagaagaacggtaaatttgaagggccactgtgcatgtgcgggtcaacgatgtgaacgagtttgccccagtgttt

SEQ ID NO: 838981 - DNA, 100 bp, Homo sapiens
ggctatcggggtgaacgcatcaatcagctcatccgtcagctgaactagacccagagggttttcaggctgatttctgttgttccttcaaacttgataaagc

SEQ ID NO: 838982 - DNA, 99 bp, Homo sapiens
ggatttttggcctcatactctgttatagataaacaaggagaatcttatttatactgctgatccagaatcctttgaagtaaatacaaaagatatggacag

SEQ ID NO: 838983 - DNA, 99 bp, Homo sapiens
tttggtgtccagatggacagagttgatcagttgccaccttccagagaagaggtacgagatgacaagacaaccataaagtgtgaaacctccccgccttcc

SEQ ID NO: 838984 - DNA, 98 bp, Homo sapiens
agccgccttggtagcagcgggtgacatggaaggggcagtacaagcttacgtctctgctcttcagtacaatcctgcagaagaagtagagttgtatttgg

SEQ ID NO: 838985 - DNA, 98 bp, Homo sapiens
cagctggagcaggagagctgtctggatggctgggagttcagtcaggacgtctacctgtccaccattgtgaccgaggctgctttgtaccgcctcagtgg

SEQ ID NO: 838986 - DNA, 100 bp, Homo sapiens
gagttttagtccgttcccctctctgggtctcagtttctcgctggttttaaaacatgaatcctacactcatccttgctgccttttgcctgggaattgcctc

SEQ ID NO: 838987 - DNA, 98 bp, Homo sapiens
attctgtcggcatctatcactctctgtgtggtcctctgaggtaggaaaagtaattggaattgctattatgaaacactttggatggaaagcagacttga

SEQ ID NO: 838988 - DNA, 100 bp, Homo sapiens
aaattggatttccacctgtgttggagcgatatacatcagtagtaaccttggtgaaacctcatttagtaaaggactcagaattcatgattgaagaaatgca

SEQ ID NO: 838989 - DNA, 98 bp, Homo sapiens
ggtattaagaaacatcgagtcactttgcctggacaggaggaaccctaagactgtgcagtctttgtaactgatgaagagcaaggctttgtctctaattc

SEQ ID NO: 838990 - DNA, 98 bp, Homo sapiens
acctgaacgtcaccgaggagaagtaccaggaggcgttggccaagggtgtggatgaggtcaccattgtcaacattttgaccaaccgcagcaatgcacag

SEQ ID NO: 838991 - DNA, 114 bp, Homo sapiens
agaagttaaggagtatgcccaagttttccgtgaacatgccaacaaattgattgaggttacaacctgccatattcattcatccagtgatgatgaaattgactttaaagaaacggg

SEQ ID NO: 838992 - DNA, 100 bp, Homo sapiens
cccatcccgacttacggagcgcctgaccaaagatggcagtaatgaaaatattgattctcttgaggaagtccttaatattttagcagaggaaagttcagat

SEQ ID NO: 838993 - DNA, 98 bp, Homo sapiens
aagatgtggatctggcccaggtactggcctatctcctccgcaggtagctacagcaagctgggtagcaggcagatccaaaggatatcatgaagtttcca

SEQ ID NO: 838994 - DNA, 100 bp, Homo sapiens
atgtgatgttggagaactacagaaacctcgtctccctgggaagtgtttggattgtgagctatttcagaactgttctcaggactcattattttaacatttg

SEQ ID NO: 838995 - DNA, 100 bp, Homo sapiens
ttcaggaagaacttctgcacactcagacttcctgctatatcctgatcatcactattgcaaatattgcaaatttggccagtactgctactgcaatcacaat

SEQ ID NO: 838996 - DNA, 100 bp, Homo sapiens
cagcacagtttctcaggggaaacagacgatgacaactacttagagaattcagcctcagcccccagatgaagatggggatcacagtgacaaagaagatgaa

SEQ ID NO: 838997 - DNA, 100 bp, Homo sapiens
gggacctgtgaggccacagcaggatcacccctgggtttcatctgccactgccccaaggacatcacacccctgcaggtggttctgcccaacactgccctcc

SEQ ID NO: 838998 - DNA, 100 bp, Homo sapiens
cgcggcaacctccgggactctgacggtgaccaacttattagaaaaggatcctaattatctcatggctaatgaacgcatgaacctcatgaacatggccaag

SEQ ID NO: 838999 - DNA, 100 bp, Homo sapiens
agtgaaacaacaggcccctatcctcagtgttctggcctcatgtctccaggtgaggatcatgagaagcctgaagtcagcgtttctcgcagcacacatccca

SEQ ID NO: 839000 - DNA, 140 bp, Homo sapiens
gaaggaatggagatccccaatttgagagattccttggttaaaattctgcaagactacaatttgcaaatcgaaagctgctttgcgtcgcagttggagcagcacccccaccgcaggtggcattgaagggagcgtgaagctgc

SEQ ID NO: 839001 - DNA, 100 bp, Homo sapiens
caggaaggctcccctgttcctttttgctgacgtgtcatttctaagtactttctcctactccataaagacttcaaagtgggtaaccattgccaataacctt

SEQ ID NO: 839002 - DNA, 100 bp, Homo sapiens
tgtcaatgggaagccctacacaggcccagaggtgaaaagagatttgaatgcccggaatgttctaaaaggtttatgcggagtgatcatctctccaaacatg

SEQ ID NO: 839003 - DNA, 100 bp, Homo sapiens
atctgtatggatgggcgggctgacctcatcctgccttgtgctcacagcttttgtcagaagtgtattgataaatgactataatgtaactgcaaactccaag

SEQ ID NO: 839004 - DNA, 112 bp, Homo sapiens
cctgagcgcactctggagggattctggcatcagggaggctttcagccggagaagcgagtttcagctgcaggtaggaacatgatggagagttcagagctgactccgaagcagg

SEQ ID NO: 839005 - DNA, 100 bp, Homo sapiens
aagactgggaggaactggggtgataagaaatctattcactgtcaaggtggaatacatgttggtatcttttgatcatgaaaataaaaaagtccggttggtc

SEQ ID NO: 839006 - DNA, 100 bp, Homo sapiens
gttatgaagctaatcctggcgttccaccagcaaccatgagtggttccatgatgggaagtgacatgacgtaaaattcatcctgatcagaaaaatattaatg

SEQ ID NO: 839007 - DNA, 100 bp, Homo sapiens
gaggaggtgaatacacctctgattttaatcagttctgcgtttgaaaggaaacccggaagctttctttggaaaagatcttctagatacaagtagacaaagc

SEQ ID NO: 839008 - DNA, 98 bp, Homo sapiens
gaaggaagagtggtaggagtgacccagcctcgaagagtggctgctgttacagagagaaggctcttatgaccgatacctacgaatggatgactattgca

SEQ ID NO: 839009 - DNA, 100 bp, Homo sapiens
cgcacagctactactggagcgcgccggctccctatctgggaaacaaaaatctacctgttactcgtattttggacaatcttatggagatgaagtcaaaccc

SEQ ID NO: 839010 - DNA, 100 bp, Homo sapiens
ttaactgcctttcttctgtgggctgtgattttcagaggggaatgctaagagttacacagggagccgctctgcctccaacatggcgatcgttgatgtgaag

SEQ ID NO: 839011 - DNA, 100 bp, Homo sapiens
aagaatgaacaatccgtcagaaaccagtaaaccatctatggagagtggagatggcaacacagatgtgctcatcttttgctacgggacccagacaatacga

SEQ ID NO: 839012 - DNA, 50 bp, Homo sapiens
caccagtggaagatgatcacatcccaggattggttgccgtggtctttact

SEQ ID NO: 839013 - DNA, 100 bp, Homo sapiens
gaggcctgatgcccgaatttcaggttagaagttcaagccgatgtccaaaaggaaattttccccaaagacacagccagtcttggtgcaattagtgacaacg

SEQ ID NO: 839014 - DNA, 100 bp, Homo sapiens
agccactcactttggagcacaggaagcagccgtgtccctatggtttttcttcccccagtccctcagctgctgctgctgctcaggaggtcagatctgccac

SEQ ID NO: 839015 - DNA, 98 bp, Homo sapiens
cagccttcctgatttctgcagctctgtgtgaagattcatgcccaagcacaaaacaacccatttaaagaagatgctcggccttaaaggaaatggcggtg

SEQ ID NO: 839016 - DNA, 98 bp, Homo sapiens
aggccataggggctgttatccactacctgctgcaggtctgctgctaccatcttccgttgatgcaagtggagctgcccatcagccttctcacacgcctg

SEQ ID NO: 839017 - DNA, 98 bp, Homo sapiens
tacgagtgcaacatctgcaaggtccgcttcaccaggcctccggtgtggctgtctctgatggtgtcatcaaggtgttcaacgacatgaaggtgcgtaag

SEQ ID NO: 839018 - DNA, 100 bp, Homo sapiens
gaaattcaatcatatctgtgaacagacaaggttcaaaaactaagcatccagaggccctgagcagctttcagcactggagaactctgataagaaaagtgtt

SEQ ID NO: 839019 - DNA, 100 bp, Homo sapiens
cagctacttcttgctacagggttgaacaatgggcgtatcaaaatatgggatgtatatacagatttctacctggacaaggactggtactatacccacagat

SEQ ID NO: 839020 - DNA, 99 bp, Homo sapiens
taacttaatagctgtgtccaaattccaaaagcttttttcccaagagcatgagaagagatgtcacagatgtcaggaacttgcatcagcactgaagtcagc

SEQ ID NO: 839021 - DNA, 100 bp, Homo sapiens
aatttattttcatcgcttctatatgtttcattccttcaagcaattcccaagatattgaatgaaaggaatactctacaggaagaaaataaaaagctttctg

SEQ ID NO: 839022 - DNA, 114 bp, Homo sapiens
cagacggtgccccatagatggccagctttcccccgagggtcaacgagaaagagatcgggcccttaagtgagaagcaggaggctttgatgaccaagagccccgcatccaatgcac

SEQ ID NO: 839023 - DNA, 98 bp, Homo sapiens
ttctcttgacaaccaagggcctccgtctggatttccaaggaagaatttcctctgaagcaccgaaaggaaggcagaggaagccacggccactggaccct

SEQ ID NO: 839024 - DNA, 98 bp, Homo sapiens
gagaagccgctggcggcagtcacttgtacagcgccggtcaacatcgcggtcatcaagtactgggtgatggacaaccccctggtcatgcaccagctgcg

SEQ ID NO: 839025 - DNA, 100 bp, Homo sapiens
accgccagatcaacctggagctctacgcctcctacgtttacctgtccatggtacctggtgtccgtgatggagaccttcctgctctaccagcacttcaggc

SEQ ID NO: 839026 - DNA, 100 bp, Homo sapiens
ttcctgggcagctcgtcggtgttctgcaaagactgcaggaaggtgatgtgtccaatctagatcccaacttctcatttgaaggcaccaaactggatgtggg

SEQ ID NO: 839027 - DNA, 98 bp, Homo sapiens
agaattgtcagatttcgctttgatgaatcaggtcccgaaagtgctaaaaaggattgtggtttgctgattcatccagaggaaacctgtgggttacagcc

SEQ ID NO: 839028 - DNA, 100 bp, Homo sapiens
gcacagttacgcgccgcacggatcatggccgcagccgctctggggcagggtgaagttgaacaaattgctatgatgaaaccaaaaggccagactgaacacg

SEQ ID NO: 839029 - DNA, 100 bp, Homo sapiens
ggcggcagcaccggcaccggctccggcgcgggctccggcggcgccctggaggaggaggctggtgagattggagagatgaaggatggagtcccagagggag

SEQ ID NO: 839030 - DNA, 100 bp, Homo sapiens
aaaagttcaccagggcttactcgctaaagatgcatcgcctaaagcatgaagcttaatcttctccatacagagctggctaaacagttggcagacacaatgg

SEQ ID NO: 839031 - DNA, 100 bp, Homo sapiens
cacgcggcctacgtgaacaacctgaacgtcaccgaggagaagtaccaggaggcgttggccaagggtgagagaacgccgagccgtcgccgcagcctccgcc

SEQ ID NO: 839032 - DNA, 100 bp, Homo sapiens
gtctgcttcaggaagaaagtgcctgccattcttatcatttctaagcaggttcatgccagcccagaacagagaatcaggggcccaaatcccagcaaagtgc

SEQ ID NO: 839033 - DNA, 100 bp, Homo sapiens
aaggatcgcggcagcaacacgatcggcgcccgcctgaaccgagtagaagacaaggtctctgctggtggttctgaagccaaacctctgatcttcacatttg

SEQ ID NO: 839034 - DNA, 100 bp, Homo sapiens
aagaatttcaagaacaaaggccgcgacttggagattgtcactgctgttccaagggcacacgcagagggatttggaattcctggagagttgcctttgtgag

SEQ ID NO: 839035 - DNA, 98 bp, Homo sapiens
actatgaggatgacgaggaggatgacgtgcagaacaccaactctgcccttaggtcgttcatgcccaacttggtgcctcccaagatccccgatggagag

SEQ ID NO: 839036 - DNA, 100 bp, Homo sapiens
tatgatcaacttcaaccctcacttcgatttggaggacagagactgcaatcaaggcctggccgacaacaccgttattgctaaagtaaataatgttgtgtgg

SEQ ID NO: 839037 - DNA, 50 bp, Homo sapiens
gcctgggatgcgcttgggctccctggcagaagagcactgatcgtactggc

SEQ ID NO: 839038 - DNA, 98 bp, Homo sapiens
taaaccaaggggctcatgtggacgcccagacaaagcctaccaggacatcctcggaaagtatttattctaggccaggctccagtattcctggctcacca

SEQ ID NO: 839039 - DNA, 103 bp, Homo sapiens
accccctgaactacttcctcggtggctgcgccggaggcctgactctgggagcacgcacgttcctggataaccctggcatcctgagcgagctctgtggaaccct

SEQ ID NO: 839040 - DNA, 100 bp, Homo sapiens
tataattgaaaaacagtaaagatggaaaaccagttattgaatatcaagaggaggagttgttgatgaacaagagaactgggcaacccatgatccacatcta

SEQ ID NO: 839041 - DNA, 99 bp, Homo sapiens
ttgatagtggcagaacatccactagcaatagcaataataatgcttcactacatgaagtcaaaggtcagattgagttgtacactcacctgcctgtgatga

SEQ ID NO: 839042 - DNA, 100 bp, Homo sapiens
tatttcaagatgatatttattcaccaaacaagggaatgaaagctactggttgattttaaagtgcctgggcctcacaggtttggagatgtcccagaataag

SEQ ID NO: 839043 - DNA, 100 bp, Homo sapiens
taaatctgatgactcatatctgcaaagaacagaccgttcagtatatactaactatggtggatgatatgctgcagcttcaaggttactgactttttatgat

SEQ ID NO: 839044 - DNA, 98 bp, Homo sapiens
ccttctactggcagctgccggagacataccagggagacaagatccagaagtggggcaacattgagtgggcccatgactatgagctgcaggagctgcgg

SEQ ID NO: 839045 - DNA, 100 bp, Homo sapiens
acaaccttacagtagttttaactgggggccttgccttagagatgtctctgaacaatttggaccctgacaagaagggtcaaggagaaatcggatactcttg

SEQ ID NO: 839046 - DNA, 100 bp, Homo sapiens
ctgggcagccccggttcagcctcggacttggaaacgtccgggttacaggtctccagaaatgctttgggttcatctttcattgctgcaaggaacttccatg

SEQ ID NO: 839047 - DNA, 100 bp, Homo sapiens
attttcaagtgccaaacggaggaatacctcgtatgcaacctcaggcttcagccattactatgcgagtcagaagaaaacatttgaaattaatcccagacac

SEQ ID NO: 839048 - DNA, 50 bp, Homo sapiens
gctctccagcccgcttgaacggatgctccagaccttgtatgattacttct

SEQ ID NO: 839049 - DNA, 100 bp, Homo sapiens
tgcagctgtggcgcgtgccgggccctggccagtatctgagtgtggccatctggggccgtgtggtatttgccactcaggagacatgtccctatgacatagc

SEQ ID NO: 839050 - DNA, 100 bp, Homo sapiens
tgctaaattcaacctcagtgtaactgatgcatccagaagactctgtggtttcctcaaaagtcttgctcccagatggacgtatcatcaaagttgggggaga

SEQ ID NO: 839051 - DNA, 101 bp, Homo sapiens
tgcaggccggtgctcttgcaactgacgcagtcactgcagcactggtggaacttgaggtagctacagcaagctgggtagcaggcagatccaaaggatatcat

SEQ ID NO: 839052 - DNA, 98 bp, Homo sapiens
gaaatgttgtccaaagttcttccagtcctcctaggcatcttattgatcctccagtcgaggtaagaatgattgatgttggctgatattggagtgctcat

SEQ ID NO: 839053 - DNA, 99 bp, Homo sapiens
tcattacatatgagatgagtctcttgaagactacagatggcctttttgcaaatgtgtaacttgcctatcaaagtagtttgtagggcaaatgcagaatat

SEQ ID NO: 839054 - DNA, 100 bp, Homo sapiens
cctgtacctgttttatacttgcttttgcttcagcgttctgtggttgtcaacagatcgccatgaggttatctccaaagaaatattggaactggacccatgg

SEQ ID NO: 839055 - DNA, 100 bp, Homo sapiens
caggagcgcaattacaacttacaaatgtcgcttgagaccctgaaagatttttgctgtgagaattaattaccagtaacagttcaatatgggggacattctg

SEQ ID NO: 839056 - DNA, 50 bp, Homo sapiens
aagtggagagctgctcctcagccgtggggctttcacttgacagggccact

SEQ ID NO: 839057 - DNA, 98 bp, Homo sapiens
cattaaagcttgcactcgtttcagagcccgaatcctcatctttaatattgaaattcctatcactaaaggatttcctggtgatgttcaccaggcactaa

SEQ ID NO: 839058 - DNA, 98 bp, Homo sapiens
gggaagcagcataaaacagctaaagcgggcccttccttctaccatgattatagtagcagtttattgtcctgtgatagctgctgttttcattgttctga

SEQ ID NO: 839059 - DNA, 51 bp, Homo sapiens
acgcctggctcggagcagcagcctctgaggatgcctaaatcaaaggaactt

SEQ ID NO: 839060 - DNA, 99 bp, Homo sapiens
gaaagcaaagaagaaagcttctaatgggttatcatgtgatgtaaaacttgatcctcgtccagaataccatcggtgtatactaacttggcatcaccaaga

SEQ ID NO: 839061 - DNA, 98 bp, Homo sapiens
gaaggtgcgtgtggggctgggtctcggagtgggagacgtggagtgcaggcgaccgtggcaaaattggggcctctccctcgtgttcttgctgatattac

SEQ ID NO: 839062 - DNA, 100 bp, Homo sapiens
ctgatgtcctggtttatgttaccagcaatgacactacggatcagttcgacagcttagacaagcatacacaatggggaattgacttcttggaaagatatgc

SEQ ID NO: 839063 - DNA, 100 bp, Homo sapiens
ggcggcagtatgaccgggtttctttgatgcgacctcaggaaggagatgaggtttttcgttggaatatacgttgcacatttatggcgattctgagtgtgag

SEQ ID NO: 839064 - DNA, 100 bp, Homo sapiens
acagcatggccctttacaaccggactcgtcgtatttctcagacaagccagaaaacatccagtacagacctttctgatatccctgctctccctgcaaatcc

SEQ ID NO: 839065 - DNA, 100 bp, Homo sapiens
agcgcactgctgcagtttggcgtgacatacctggaggactattcggcagagtacatcattcagcaaggtggctggggtgtacaactatgagcctttgaca

SEQ ID NO: 839066 - DNA, 100 bp, Homo sapiens
catttagagaaaggaggaagctacgtagctctgactgatggcttagggaacctcaccatcatcattgaaaccatgaccagccttaacagcatgatgagcg

SEQ ID NO: 839067 - DNA, 116 bp, Homo sapiens
cgataatattatcaacattgatctcctatttttggcttcaagattttgtgccaaccagattggcgctgttccactggctgctttgggggctcctactcttgatcctgcccttgctg

SEQ ID NO: 839068 - DNA, 100 bp, Homo sapiens
ggaggaggaagtaggggtgcacctcagcactatcccaagactgctggcaacaggttcgacgaggtgctttataaatcatctcaggactttcaacccaggc

SEQ ID NO: 839069 - DNA, 100 bp, Homo sapiens
attttaaaatgctttcgaggaaacttgctcaacttcctgatagatgtacactgaaaactggacattataacattaagaagtccttcttctctggccatgc

SEQ ID NO: 839070 - DNA, 103 bp, Homo sapiens
ccaatgaagagtggaaactttggtggtagcaggaacatggggggaccatatggtggagagccagtcttggtgctctgtgttcacctggttcatctgaggagct

SEQ ID NO: 839071 - DNA, 100 bp, Homo sapiens
ctccccctgcgccgccgccgccgccacccccgggctcggggtggcccccgcttcagtcccagggcagtcaaaccggcacgatgtccaggcaccagaacca

SEQ ID NO: 839072 - DNA, 148 bp, Homo sapiens
gcagtcgtctgcaaggcctgcatgaaggagaacagacgcatcactggccgagcccactggggctcacaccacgcaggcacgcttaaaaaggcctcttaagagccttgatggtgctctatatgatgatgaagatgatgatgacattgaa

SEQ ID NO: 839073 - DNA, 101 bp, Homo sapiens
gggctggccgcgctcctgggacgcctgtccgaccgcctcggcaggaaccgggaccgccagcgcaggaggctctgacgcccgctctgcggcttcggtgtttg

SEQ ID NO: 839074 - DNA, 100 bp, Homo sapiens
gcacgtaccagaggtggaagtccaagtcaaacgcagaaggactgcctcactgagcaaccaagacctgagaatttgcttttagctagcaaatccaagggag

SEQ ID NO: 839075 - DNA, 99 bp, Homo sapiens
gatgtcaccaggaaccctcatctcaacaaggactttctgcagggcgactgcaccaaagcgaaacagaagctgaactggaagccccgggtcgctttcgat

SEQ ID NO: 839076 - DNA, 100 bp, Homo sapiens
caggaaatatacaagacccagatgagcccattttagaatttagcttaggaggcaggtggaagtcatcataaagtttctgtttcacccgtcgtccatgttc

SEQ ID NO: 839077 - DNA, 100 bp, Homo sapiens
ttgaagtttctcacagactgaactgctcccgagaggagaacggcgccagcgtgatcctccgtgacattgcgagagccagagagaacatccagaaatccct

SEQ ID NO: 839078 - DNA, 98 bp, Homo sapiens
tacacaaagagggtcatctcttctattgtacctgcaggtgactattatatggttaaaaagattttggaggaaaacagttcaggtgacttgaacataaa

SEQ ID NO: 839079 - DNA, 100 bp, Homo sapiens
gccaccggctggagcggatcccacacctccggaccgagggacgcggaaagaagagattttatcgacatcgaaagtaaatttgccctaaggacccctgaag

SEQ ID NO: 839080 - DNA, 100 bp, Homo sapiens
ccgagagccagagagatgtcggatttcgacagtaacccgtttgccgacccggatctcaacaatcccttcaaggtttgcagctaaaactgtgcacagtggg

SEQ ID NO: 839081 - DNA, 99 bp, Homo sapiens
attgctaggcggagacagtgcagggaagagagaccttagaaaggatcaggactggcggcccagcgatctgctcacgagctgcccatggttgaaagacaa

SEQ ID NO: 839082 - DNA, 98 bp, Homo sapiens
tgcctggcttatttcagttaacatcgtgacctccagttccatccatgttgctgcaaatggaagaagcattgcatgcatttattcagccagagattctg

SEQ ID NO: 839083 - DNA, 98 bp, Homo sapiens
ttaataaaagaaacccactgaatgccggctcatgggagtggtctgatagaactcctgtcagaagagatcaattctacagaaatttccagtggttctgt

SEQ ID NO: 839084 - DNA, 99 bp, Homo sapiens
tcctgggccacccctcctttcaggtcaagttacagaatgtctgaaggggacagtgtgggagaatccgtccatgggaaaccttcggtggtgtacagattt

SEQ ID NO: 839085 - DNA, 99 bp, Homo sapiens
tcagaggggagtcatcatgagcgatgttaccattgtgaaagaaggttgggttcagaagaggggagcagtgaggagaatgaataccttccaagaccagag

SEQ ID NO: 839086 - DNA, 139 bp, Homo sapiens
ctgcgggcccagcatgaggaccaggtggagcagtataagaaggagctggagaagacttattctgccaaggggatgaacgtagggcacttagcttcttccaccagaagggcctccaggattttgacactctgctcctgag

SEQ ID NO: 839087 - DNA, 100 bp, Homo sapiens
ctatgccaagaaaggagactaccagaaggcttatgaggatggctgcaagactgtcgacctaaagcctgactggggcaagcaactattggatgattatccg

SEQ ID NO: 839088 - DNA, 100 bp, Homo sapiens
ttcttggtgaagtcggccagcctgagcaagcggaggacctacgccggcctggacacgatgaggcgagtggtacgacagagcaagtttcggcatgtatttg

SEQ ID NO: 839089 - DNA, 99 bp, Homo sapiens
tgtacaggtgtttgtacggacataagttgtcatttctcttgagtaaatacctaaaagtgggcttgctgggaactagaacagtctttggctagctggact

SEQ ID NO: 839090 - DNA, 100 bp, Homo sapiens
tgggagataaagctgtgtactgccgttgttggaggtccaaaaagctctggaaaggaagagaaatggaagtgagaaagttgagcatttcctggcagttctt

SEQ ID NO: 839091 - DNA, 98 bp, Homo sapiens
atccaccgtgttgcagatatatctggggtctgtctgacacttactgccaaacgcatggcaaggaaaaactgcttagtgaagaacttagaagctgtgga

SEQ ID NO: 839092 - DNA, 100 bp, Homo sapiens
tggtgaacatgccaggagagcaatgcaaaagatgcctgaggaagtgcaccatggagaggaggaggtggagacttttgcctttcaggcagaaattgcccaa

SEQ ID NO: 839093 - DNA, 100 bp, Homo sapiens
cgagaatggttaacagaactttttcaacaaagcaaggtcaatatgcagaaaatgctcccaggttgtgttgctttctgccacaatgccaactgatgtgttg

SEQ ID NO: 839094 - DNA, 98 bp, Homo sapiens
agtatccagtgaggacattgctgacatgcatagcaacctctccaactatcaccaggaaaccaaccatcaggcctcccagagagaatcgaggaactgaa

SEQ ID NO: 839095 - DNA, 98 bp, Homo sapiens
agggactggacattcccaacatgctcactcccttaatctgtccgtctagaggtttggcttctacaaaccaaggtctataagggagaattccaactacc

SEQ ID NO: 839096 - DNA, 100 bp, Homo sapiens
acctcacgggctttgaagaggaagaggagacgaaaccagacagagggtcaagtttacagatgaccgtgtctgcaagagtcaccttctggactgctgcccc

SEQ ID NO: 839097 - DNA, 100 bp, Homo sapiens
gactgtgacaacgaccacgtctccaaaatgagtcgcatcttcaacccccatctggagtgagccataactggtggctgctcttgcgccaatgagcctcccc

SEQ ID NO: 839098 - DNA, 98 bp, Homo sapiens
tggatgcggccaactccaatgggcctttccagcccgtggtccttctccatattcgagacctagaggatcaagacataatgggagcatttttagacaag

SEQ ID NO: 839099 - DNA, 100 bp, Homo sapiens
aaggagcaaagcaacagaagtttatcaaggctgtcacacatcaagttaaatttggtcaacaaaatccacgtcagcttttaatctagacaacgagcaacca

SEQ ID NO: 839100 - DNA, 100 bp, Homo sapiens
ctgccacaatttgcttacctggctcatcgcctcctggttctgccattactgcaatagccacatctgtgtgtcacggcccaccctgtcgccagcttcatca

SEQ ID NO: 839101 - DNA, 99 bp, Homo sapiens
ccctgagtcactgcctgcgcagctccggccgcctggctccccatactagtcgccgttggtctcttcccatggcgatgtccatctgccaccgtggcactg

SEQ ID NO: 839102 - DNA, 99 bp, Homo sapiens
tcgtccagcctaggttccacccttttctgggaacgtgagtatcaaccaaggttctgtacagagtaatgagatgtgtgacggctgcaaaccaggtgtttt

SEQ ID NO: 839103 - DNA, 133 bp, Homo sapiens
gtcacgaagtaggagtcgcaggagcagccgcagtagatctcgaagtatctcaaaaagtcgctcccggtgaaatgacaatggatgctctgttggctcgattgaaacttctgaatccagatgaccttagagaaga

SEQ ID NO: 839104 - DNA, 100 bp, Homo sapiens
ctttatgtttttcaagggacggatacaacgactagagtgttcctttctgccgaaattctccattcatatagaaaccaagtatgaggacaacaaaggaagc

SEQ ID NO: 839105 - DNA, 98 bp, Homo sapiens
aggatgctctccacctggtgctgaggcgagggttgaggattgggcagttggtacagattgttaaaggaaatgggctggcaggaagacagtgaaaatga

SEQ ID NO: 839106 - DNA, 99 bp, Homo sapiens
tcggcgtacagcagacgctggaggagatggacttcgagaggggtgtttggagaagagggattgaccctgaatcttgaagacgttcagcctcatgactta

SEQ ID NO: 839107 - DNA, 98 bp, Homo sapiens
tcaagttcaccgaaaatcagtgaaaaaaggttttgagttcacactgatggtggtcggtgtgatccctcacatccacaaatctctgattggaaagaagg

SEQ ID NO: 839108 - DNA, 100 bp, Homo sapiens
gccgcagcagccaagcaatggcagatctgagtgggacatacttttgaaggatgtgcaatgttcaatcataagtgtgacaaaaactgacaagcaggaagct

SEQ ID NO: 839109 - DNA, 98 bp, Homo sapiens
tgaatcctgtttatagtcctggatcttctggggttccctatgcaaatgccaaaggaattggttatccaggagggcagctccctgtggaaggccagcat

SEQ ID NO: 839110 - DNA, 100 bp, Homo sapiens
ctggaaaatggagcagacctggacgagatcgtcagtatttaaacagatcacatcatgcgtgagtacaagctagtggtccttggttcaggaggcgttggga

SEQ ID NO: 839111 - DNA, 100 bp, Homo sapiens
gctctaggattctcaccacgtactggctagacttatacttctcaaatcttaatttcctaaaggtgatcatggaggaagcactttactcccaccaaatgtc

SEQ ID NO: 839112 - DNA, 98 bp, Homo sapiens
atgatgacctcgtgcagagactaatggacatcctgtatgcttcagaagaacacgaaaaatttgagggactgtttcggacttatgatgactgtgtgacg

SEQ ID NO: 839113 - DNA, 99 bp, Homo sapiens
tccggcccccgagcacgccggccccgcgcgcgcctcgaggccgagtcaaggtgcttgtactatttggcagagcggtaaacattttccctctttcctacc

SEQ ID NO: 839114 - DNA, 99 bp, Homo sapiens
aagaatcctgcaaaaatgtctctctatccatctctcgaagacttgaagatgatttcagatatcgaaaagaaaaggcagcgtatgattgaagtccaggat

SEQ ID NO: 839115 - DNA, 98 bp, Homo sapiens
ctgaagactattgtggaagaagcatccattaagagcttgctaatgaagcatgaagctttggaaaatgactttgctgtccatgagacccgagtacaaaa

SEQ ID NO: 839116 - DNA, 98 bp, Homo sapiens
gtggtgaccccgcccagttggcccagaggatctcttctaacatccagaagatcacacagtgttacatcgtgaacacccctaaacccgatgaaagagcc

SEQ ID NO: 839117 - DNA, 98 bp, Homo sapiens
cagatgaagggcatcatcagcaggagctgcgggcgtctttggagacacagcgtgctcagagcagtcgactctgcgtggcactgaaacacgagcagacg

SEQ ID NO: 839118 - DNA, 100 bp, Homo sapiens
gaattcgtcctgcagaatcacgcggacatcgtctcctgtgtggcgatggtcttcctgctggggctcatgtttgagatgcgctggctccctccctccgagg

SEQ ID NO: 839119 - DNA, 98 bp, Homo sapiens
ttgcattgacttggatacgaacatgttatatgtgaaagaccacagcaagattctttcattcgtctcctcctagcctgggggaccaggctcgaactgac

SEQ ID NO: 839120 - DNA, 98 bp, Homo sapiens
aggtccctgtcagcaccacggttgtgtccacgtcccaggctcacttttcaggattagaagaggctgtgtatagaaacatacaagcttgcaaggagctt

SEQ ID NO: 839121 - DNA, 100 bp, Homo sapiens
aggacgacgcagttccacagtctgatggagttcgaggaatttataaggcatatcaagagaggagatttctttcacaactcatccagaagtttatctctgt

SEQ ID NO: 839122 - DNA, 98 bp, Homo sapiens
tatgatacccacagtgggcttcaacatgaggaaggtaactaaaggccccgtctgaggtctggcagtcagagacagccgggcgcccacggcccgagcgc

SEQ ID NO: 839123 - DNA, 103 bp, Homo sapiens
ggcctctgaggactccttctatggctggacgcccgtgcactgggccgcgcatttcggcaagctcctctggtgcaagtgtggtagctattgacaacaaaatcga

SEQ ID NO: 839124 - DNA, 100 bp, Homo sapiens
gttgttgcaacttttttcgaaagctgggtttcccgggagatcccaggcggtgacagagtggagccatggctagaggaaactcccagtacagccagcagca

SEQ ID NO: 839125 - DNA, 98 bp, Homo sapiens
tcaagtttaagggtactttggtgcatgaagctcaactcaactatttctacatctctcctggagattgatctccgagatgaccccaaaactttagcaag

SEQ ID NO: 839126 - DNA, 99 bp, Homo sapiens
ggcatggctctcctggtgctcggtatctgctgtgcgtttcagtcaacaatacagcttgtgttcgacaatattccttgatgacagcacagccatccagca

SEQ ID NO: 839127 - DNA, 103 bp, Homo sapiens
aaaacggaagcgcagggagaaggaagaggtgtttgaaaagctattgacctgaaaagtggttctggaaaagtgtaccaaggccctgcaaaaggtgctgctgata

SEQ ID NO: 839128 - DNA, 100 bp, Homo sapiens
cagcaatcataaagtcatccctgtgtatgtaggagtgaatataaaaggacttcatctcctcaacatggaaactaagctggaaagtgaaatttcaaccaca

SEQ ID NO: 839129 - DNA, 100 bp, Homo sapiens
ggcttctcatatcttacccacagaatggaatgactcctctaatgcatgcagcatataaaggaaaactcgatatgtgcaaattactactgcgacatggagc

SEQ ID NO: 839130 - DNA, 100 bp, Homo sapiens
tttaagggtactttggtgcatgaagctcaactcaactatttctacatctctcctggaggcatgtaatgaatttactacacatgtgatgaaccttctccga

SEQ ID NO: 839131 - DNA, 99 bp, Homo sapiens
accacccaacatcagcagccagcatcttctttattgagaatgaggacctaatttgcttcaaagatatcaaaccagcagcaactcatcattatcttgtgg

SEQ ID NO: 839132 - DNA, 100 bp, Homo sapiens
ttggcttgtcagatgaactggctaaactggatgcatttgtagaagggaaatgcaacctcaccacaagtacaaagaccatctttcatggactactttgata

SEQ ID NO: 839133 - DNA, 100 bp, Homo sapiens
ttcagaagctggtcgccgccggcaggcattctttagtggcaggctgaaggccagagggaacatcatgctgagccagaaacttcagatgattcttaaagac

SEQ ID NO: 839134 - DNA, 99 bp, Homo sapiens
accgatgaagatgaaaaaacaaaaggactgtgggattccattaaaagaataatcttggatgaagctgctttacatctatctgacaaatgcaatactgtc

SEQ ID NO: 839135 - DNA, 98 bp, Homo sapiens
atctttgccaggactgatgcagatgcccctcctccaccagaggactgggaggagcatgtcaacagaataactgaagtgaagtgatggactccgatttg

SEQ ID NO: 839136 - DNA, 100 bp, Homo sapiens
ggtggtgtcgcttctgcccaagatgaggagcccctggcctgcccggacgagttcgatgacttcgtcacctatgagcctgtgcacgtcgggcgtagttcgg

SEQ ID NO: 839137 - DNA, 105 bp, Homo sapiens
actagcaaaggaaaaatcacaagagaagatggaacttaccagtacaccttcacagatttacactgactgggccaaccactacctagcaaaatcaggccacaagcg

SEQ ID NO: 839138 - DNA, 99 bp, Homo sapiens
gccttcgcggtggcgatgctcttcttggaaaaccagatccagaaactggaggagtcccgctcgaagctagatgcccagcctacagagtctgagaaggaa

SEQ ID NO: 839139 - DNA, 98 bp, Homo sapiens
gcttttcctcgctggggtgtacgggcgagctggagcggcagctgctgcaggccaaccccatcctggaggccttcgggaacgccaagaccgtgaagaat

SEQ ID NO: 839140 - DNA, 99 bp, Homo sapiens
agaaggctatgattgtatctcatgctgatggagaaactgaggcccagaaattgatgtccagaatgctttgctcttagccactgtactattatggcatat

SEQ ID NO: 839141 - DNA, 100 bp, Homo sapiens
attggcacccgaattgccaaagttttggaaaaggtgtggggatattcagctttgccaggtatggcagtgatttttatagcatgcactataaaggcaaagt

SEQ ID NO: 839142 - DNA, 100 bp, Homo sapiens
cagacatgtacaactttatggccaaagaaggggagtatggcaaattctttgttacggtaccaaagcagtcagactcacagcctaattctgataacctaag

SEQ ID NO: 839143 - DNA, 100 bp, Homo sapiens
aataacgacccatacatgtcaaatggatctctttctccacccatcccgagaacaggtaatacctgcctggagaatggatctttcttactgaactttacag

SEQ ID NO: 839144 - DNA, 98 bp, Homo sapiens
gcggcggtggccgctagctccaaggaagtagcctctagttcgttagtcaaaacgtgaaaaaaaagacctgctttgccctgggaaatagtaaccctgcc

SEQ ID NO: 839145 - DNA, 100 bp, Homo sapiens
gttttttgctgcaatgctgcaaattaattcatcattagagaaattagatctgggtgactgtgatctggaagtgagctcacaatgactcaagctgccacat

SEQ ID NO: 839146 - DNA, 99 bp, Homo sapiens
tgcgagtggagtgtccgctgtgcccgggcctgcaccatgagcgtcccggccttcatcgacatcagtgaagaagatcagatctttgatggaaaacagatt

SEQ ID NO: 839147 - DNA, 100 bp, Homo sapiens
gtggaagtgagaccgaaatagactctgaagtaatatctggactttgaaattgtggacctgtatgtctgtcttttatgtggcagtggcaatgatgaagacc

SEQ ID NO: 839148 - DNA, 100 bp, Homo sapiens
taaacactacccttgtactttggtggggacttggaacacgtggtatggcgagcaggaccaagctggacaatagccggaggcagaagcagttgttaaacca

SEQ ID NO: 839149 - DNA, 98 bp, Homo sapiens
ttgtgggcaacttcaagctgaaagaagccttagcagcaaaagactttgttaacctcaggagagaagtatgagctccatgcagggactgagtccacccc

SEQ ID NO: 839150 - DNA, 99 bp, Homo sapiens
tgacggactcacctttggcaaagggactcatctaatcatccagccctgcaccagaagtcatcagaatgcaagataaaaatccatacagctttcagtcag

SEQ ID NO: 839151 - DNA, 100 bp, Homo sapiens
cccccactccgaaggcggaagctagaacacttggtattgatgaagatgaccctactgctgatgataccagtgctgctgtaactgaagaaatgccacccct

SEQ ID NO: 839152 - DNA, 100 bp, Homo sapiens
accaagcgagtcctccctcccaattggaaatagatggctgcaggccaggtttggggggcctcaaccctctcctggagcgcctgtgagatggtcagcgtgg

SEQ ID NO: 839153 - DNA, 98 bp, Homo sapiens
aaagatacatggcttgcaaaaagtaaaccacgatcgttatgctgagattgaatccaacgacctgcctctgttgactgctattgccagtactcattctc

SEQ ID NO: 839154 - DNA, 100 bp, Homo sapiens
gctgctgcagaccaggaacaagagagaaagagtggatttcagcctgcacggatggtcttgaaacacaaatggtttttggccaaagaactgccaactctga

SEQ ID NO: 839155 - DNA, 100 bp, Homo sapiens
gactacttccaaaatatattctgacaaggagtttgcaggaagttacaacagttcagatgatgaggtgggatgcagatcttcgtgaagaccctgactggta

SEQ ID NO: 839156 - DNA, 100 bp, Homo sapiens
tgaagatcaacctggaagcggcagagttaggtgaaatttcagacatacacaccaaattgttgagagtcatacttacctggttgcttgcgcatctagtaat

SEQ ID NO: 839157 - DNA, 98 bp, Homo sapiens
agggttaagctttgggaagtatttggaggctatttgctttctagaagagaaggccaagcagggtctcctgaaaagcctctctccgatctgggccgtct

SEQ ID NO: 839158 - DNA, 99 bp, Homo sapiens
ccgagtggaagctcttcatctacaacccgaccaccggagaattcctggggcgcaccgccaagagctgggaattttctagaaaccgataatgagggcaat

SEQ ID NO: 839159 - DNA, 99 bp, Homo sapiens
cgggccatggccgccgccgatgccgagtgaagatagtgatccggggagacaggaacacgggcaagacagcgctgtggcaccgcctgcagggccggccgt

SEQ ID NO: 839160 - DNA, 100 bp, Homo sapiens
caggaacatggggggaccatatggtggagatgggcagccagatatatcaaggccttttggatctcagccttggcatagctgtcacaaactcatatatgtc

SEQ ID NO: 839161 - DNA, 100 bp, Homo sapiens
ggctctcacgctttctgctcaagtcctgtcctcttctgaccaaagactaggggtggccgtgtcacagtctggccaaggaaatgaaattgggagttgctgt

SEQ ID NO: 839162 - DNA, 98 bp, Homo sapiens
gtgttttcttatttagccggagtgagaagcaagaaggccctggacacagcaatatctctgggctttcacaggtggcccatgtgagcaagtttagtgag

SEQ ID NO: 839163 - DNA, 100 bp, Homo sapiens
aacttcggagaggaagatctactgtgaccaagagtattgtggagattatcaccacgaggtgtataagatcccagaattcagcaacgatgttaatggggag

SEQ ID NO: 839164 - DNA, 100 bp, Homo sapiens
gagctgaaacttcagagcaagttttcattgggcaaaatgggaaatacaggtatcaggatgaagatacacctcctcaagagcatatttccccacaaatcac

SEQ ID NO: 839165 - DNA, 99 bp, Homo sapiens
ttaaaacgggtcagttggcagccatcaaagttatggatgtcactgaggactgtaacgagattaaaggggagcggttcactgttttggaaaccaggcttt

SEQ ID NO: 839166 - DNA, 100 bp, Homo sapiens
ccaggaaccgaaaaggcgaggagtatagtacggcaaaaaactgtcgctggagcagctaaggagagatcacagatgaattctcaaactgaagatcatgcct

SEQ ID NO: 839167 - DNA, 99 bp, Homo sapiens
tagaagaacgcttagcccaggctatggaggccttagaaaatttacgtgtatacctgtgtgagaaaatcatagctgagagacattttgatcatctacgtg

SEQ ID NO: 839168 - DNA, 100 bp, Homo sapiens
gaagaatgccggtcacagcccaggagatgccatcccgcccactttctacagaccctacttcagaattgttcgatttgacgtctcagcaatggagaagaat

SEQ ID NO: 839169 - DNA, 100 bp, Homo sapiens
ctgaaaacctacaactgctaccatgagggcaagagcttccagctgagacaccgtgaggaagaggagcaggacttggatggtgagaaggggccatcatcgg

SEQ ID NO: 839170 - DNA, 99 bp, Homo sapiens
gaaagaggaggggaggaggaggaggattcagggaataggagctggggagcccttctgcgccacagtgaaagatgtcatgtatatctgcccatttatggg

SEQ ID NO: 839171 - DNA, 100 bp, Homo sapiens
ctggctctgtgggtgtggcccagcacgcaagctgtttcagatagagagccttgcccgggaggcctccactggagtactaaaagacctaatgcatggcctc

SEQ ID NO: 839172 - DNA, 100 bp, Homo sapiens
gtttcgacagcgaacatgtcgcggcctgtcagtggtatgtgtgcaacagagagaaattatgcgaatcactccaggctgtctttgttcagagttaccttga

SEQ ID NO: 839173 - DNA, 100 bp, Homo sapiens
tcacaggaggtgtagagaggaccccgggacatctgaaagccaggaaatggagcttgagaagctggcttctcgaaagttgagaataaatgctaaagaaacc

SEQ ID NO: 839174 - DNA, 139 bp, Homo sapiens
gtctatttcttgatatcataaagaaggtctttgaccgacacctccaccctacaagtactgaaaaggcacagactggaatcagccattttaccaagaaagttgggtttcttttactggcaaatagtacttcaagagcaca

SEQ ID NO: 839175 - DNA, 98 bp, Homo sapiens
tgagttaatgtcaaatgacagcaaagcactgtgtggctgaataagcggaaaatccttgtaaatgatggtgacgcttcaaaagccagactggaactgag

SEQ ID NO: 839176 - DNA, 100 bp, Homo sapiens
gttcagctttaccttctttgcagactttggttggtggaggctgtggcaatggaacaggcttgagaaacagctgtcacgggaagtctttttaggataaacg

SEQ ID NO: 839177 - DNA, 98 bp, Homo sapiens
ggtggtggtagaggaggccgaggaggatttggtggcagaggccggggaggctttggagggcgagtgaacgtgaaaaatgaagaaattgatgaaatgat

SEQ ID NO: 839178 - DNA, 98 bp, Homo sapiens
ctcgccaagaggctcgtccaccagaacagtgcaagtgacgatgccgaagccagcatgatctccaagttaaaggctgccaaacgagggattctttcatc

SEQ ID NO: 839179 - DNA, 99 bp, Homo sapiens
gctcttttaccgatgctttaacatacagccactagatgttggggatcagccaggtgaggtaggttattcaggctctcctgctgaagctcctccaagcaa

SEQ ID NO: 839180 - DNA, 100 bp, Homo sapiens
ggactcttggcctgtccctcacatccgatgcaccctttttgtcagattatcaggatgaggatttggaggccaatcactgccaccttttatttccctgtgg

SEQ ID NO: 839181 - DNA, 100 bp, Homo sapiens
cccgttaagtcccccaaagatgagatttacctgtgagatgtttcatcccaacaaattcatcccacaggcatttggaatgcccttatcccaagtcattgcg

SEQ ID NO: 839182 - DNA, 99 bp, Homo sapiens
ttgagtcgggaaatggccgctgtgtggttgcaacggagataaattcccggaaccgcgattcggcgtgtcaggccttggacaagattcgctatgagagcc

SEQ ID NO: 839183 - DNA, 99 bp, Homo sapiens
acccaccaacaacaccacaataatccacagccaagggtggagagattcaaccagttagcgtgaaagttggagataaagttcttctcccagaatatggag

SEQ ID NO: 839184 - DNA, 100 bp, Homo sapiens
gagaagcgcgagggctacgagcgtctcctgaagatgcaaaaccagcgtggcggccgcgctctcttccaggacatcaagggtgataaaagaaaatgtggct

SEQ ID NO: 839185 - DNA, 100 bp, Homo sapiens
gggagactgactgcctatgaatttgctaaacttaaaagcaagctggttctctgggatataaataaggtgtgactgaagaaatatcaaatgtttcctagta

SEQ ID NO: 839186 - DNA, 98 bp, Homo sapiens
aagaattggccaaagaagttgagaaaatgggagcagttttcatggatgcccctgtttctggtgtaccttccactggaagaatctcaaacagcgctact

SEQ ID NO: 839187 - DNA, 100 bp, Homo sapiens
attacctggaacttcatcatcatctacttcacaggaattgccatttggcagctgcaatgactctccgcacggtattattgtcattgcaagcactattggc

SEQ ID NO: 839188 - DNA, 99 bp, Homo sapiens
gacaaatttagagaaacctcggcagaaaaggcgacggcggattgacagaagtatgattggagagcccacaaactttgtgcatacagctcatgttggatc

SEQ ID NO: 839189 - DNA, 100 bp, Homo sapiens
gttgaaacagaatgaagtgcttcctggagctaagtgtgatttggaaggaatcatgccaaatgttaccatcagcttgagtctccccaccaatggatctcca

SEQ ID NO: 839190 - DNA, 100 bp, Homo sapiens
ggaccacactgcgccaacacagaaattatgtaatagcctgcagctggtgttttgagaagccctactgctgaaaacttaacaattttgtgtaataaaaatg

SEQ ID NO: 839191 - DNA, 100 bp, Homo sapiens
acttccacctgcctcagctcatgcgtgatatccaggatgggtttccagatttccaggattctgtgcaaacactcttccagcaggctagagctaagagtga

SEQ ID NO: 839192 - DNA, 99 bp, Homo sapiens
tcaccttcagctgtttcctgagttgctgtttcttgggactgcgaagctatacaggctagctaatgtcaaaccccgaaattccacaccacctagtttggc

SEQ ID NO: 839193 - DNA, 98 bp, Homo sapiens
acgagcggggcaaccactgcgagtactgcttcaccagggttcaggataagtttgaggtgctgaattacacaagcattcctatctttctcccggaagtc

SEQ ID NO: 839194 - DNA, 100 bp, Homo sapiens
aaacctctccaccctcagtgacccggtgcagctagaagtccatatcgcaaaccagtccagctacgggggcccagccagccagcagctgagtgggggttac

SEQ ID NO: 839195 - DNA, 100 bp, Homo sapiens
cgcagtctctggcggagcagatgaggaagatcgccttggagtccgaggggcgccctgagctttccccagacatggccaacaagggtccttcctatggcat

SEQ ID NO: 839196 - DNA, 98 bp, Homo sapiens
gaatttatccaaagattaaaacttgaagcaacccttaatgtgcatgatggttgtagccaggccaagtctattgcagaacagaagagattcccgtttgc

SEQ ID NO: 839197 - DNA, 100 bp, Homo sapiens
cggaggtctcatctttgaactactgccggagcttctgccagctccacagcacctgttgccttcattagcagcttttcctcctcttccctgcacttcccag

SEQ ID NO: 839198 - DNA, 98 bp, Homo sapiens
ctaagtgctcaaaacagaaaacttgtggaggccataaaacaagacaattactacggtaccccaaagccgccagcagaaccagcaccattattgttaaa

SEQ ID NO: 839199 - DNA, 100 bp, Homo sapiens
ggaagataccaactagagataaaaataccagaaacatacccatttaatccccctaagggacaatgactcattcttcccaggacactggttcttgtggcat

SEQ ID NO: 839200 - DNA, 99 bp, Homo sapiens
gctgcagggcggtaaggatttcaacatgcctctgacaatctctagtagccagataacagtgaatggaaactcaggaggtgccgtgagtcccatgagtta

SEQ ID NO: 839201 - DNA, 100 bp, Homo sapiens
gccggctaccatgtccgcccaggcgcagatgcgggccctgctggaccagctcatgggcacggctcgggacgtgaaaatgcctcgtgtaaaagcagctcaa

SEQ ID NO: 839202 - DNA, 100 bp, Homo sapiens
tggggactctgcctcgtgccgctgagcctggcgcagatcgattgatatcagtaaatgccattatttagtggatttggacaccatgagagaaacaccccgg

SEQ ID NO: 839203 - DNA, 100 bp, Homo sapiens
aaggcaatatccaatatttatttctggagtactgtagtggaggagagctttttgacagaatagattcttggatctcccagtcagcttcatttccccgtaa

SEQ ID NO: 839204 - DNA, 98 bp, Homo sapiens
gaggaattgacaatggccatgtcctacgtgaaggatgacatcttccgaatctacattaaagatgacacctttgaggccctgtgcatcgagccgttttc

SEQ ID NO: 839205 - DNA, 100 bp, Homo sapiens
tgcagtcagggaggcaatcatatgaagtttctgtcttaactgcagtaaatccacaagagattgtagaaggcatgaaacaaaaaatgtggagtattgaaaa

SEQ ID NO: 839206 - DNA, 98 bp, Homo sapiens
cacaaacttatacaacctgatcatccgcagatatctcagcagcgacagttgcctgctgtcagtaagctggtacagaaggttgacgaaaattcttactg

SEQ ID NO: 839207 - DNA, 143 bp, Homo sapiens
ggagtctccgcgtcccgctcgctgggagagaggtacctctccttttccctctccctttccctaagagcaacattttgcagatgttgtacttagtgaagaatttctcaatcttggcatcgaacaagtgtgcagcttaatctcaa

SEQ ID NO: 839208 - DNA, 100 bp, Homo sapiens
gagcggcgttggaggccaccgtttccaggtccggaccctatttgtcagtggccttcctctggatatcaaacctcgggagctctatctgcttttcagacca

SEQ ID NO: 839209 - DNA, 98 bp, Homo sapiens
ccggttccccggcccacagtgggggtgtgcaaacccgagagaactggacatggagttggagctgctgcggggcagccaggccatcatgctgcgctcag

SEQ ID NO: 839210 - DNA, 99 bp, Homo sapiens
tgaaagttcatcctgaacaggaaaagctcatgatggagcagtccaagaagtcctccctcatggtggcccgcagtattctcaacaacaagctcatcagca

SEQ ID NO: 839211 - DNA, 99 bp, Homo sapiens
tgtcctcctgaccctcacaaagggatcggccgagacgcatccagagctttcgtgaccggggactgttctgaagcaggcctcgtggatgacgtatccgac

SEQ ID NO: 839212 - DNA, 122 bp, Homo sapiens
tcgaggccgagcatgggactggggacaagcccgcggcgccgcgggaacgcaccacgcggctggactgggatggaaaggtgtctgagattaagaagaagatcaagtcgatcctgcctggaagg

SEQ ID NO: 839213 - DNA, 98 bp, Homo sapiens
aaacacgtcatctttccaaagaagagtgagtagcttggttggtggtaccctaaaattagggcatgattaagctatttgtggagaccactgatgtcaat

SEQ ID NO: 839214 - DNA, 100 bp, Homo sapiens
ggccgccgtcggcagcaagaacagagagagaggtggacagatctgagagatactgaggtcatttgaaccaattctccgcctccttccccagggaatctct

SEQ ID NO: 839215 - DNA, 100 bp, Homo sapiens
aaggactggtcatctctttcatatctcaaaaccatggctcagggactgtttacattcaaggatgtggccatagaattctctcaagaggagtgggagtgcc

SEQ ID NO: 839216 - DNA, 98 bp, Homo sapiens
ggaaacaagaaaacatcaaagaggtctagcaaaggtggtgctccaaattactaccccaacagctttggtgctccggaacaacagccttctgccctgga

SEQ ID NO: 839217 - DNA, 99 bp, Homo sapiens
ctgttccgcttctcagaggacgccttcaacaccaccttcatctccaccatcgatttaatttacccacacccaaatgcttctgcagaaaaagccagaaat

SEQ ID NO: 839218 - DNA, 98 bp, Homo sapiens
agaaacaaaaggagatatcaagaggatggattcgacttagacttgacctcatcgagagtaaacatgaggttacgatcctgggaggacttaatgaattt

SEQ ID NO: 839219 - DNA, 98 bp, Homo sapiens
ccgctctgcgtgctcgtggtggaggctgctggcaatggcctacgtcgtcataccgggcttccttgccctgtccgggcttctgaaagtacagagaagct

SEQ ID NO: 839220 - DNA, 100 bp, Homo sapiens
ggctcatcgtgatcccggcgacatactacctctggccccgagatcagaatgccgtccagagcacaacctccagaagacaacagaaggaagccagttttgg

SEQ ID NO: 839221 - DNA, 100 bp, Homo sapiens
gggccatgcaacatgtctgcagcaagaatctttgctgatggccgccaaagttggagttcgtatgttgatgacatctgattagcagaagtcatgttccagc

SEQ ID NO: 839222 - DNA, 98 bp, Homo sapiens
gcgtacaggcgcagcggccgcagcagcagcggcagtcacaggcacatcagcaaagaggtcaacatgattgtgtgaccataatcaacaatttctttcct

SEQ ID NO: 839223 - DNA, 98 bp, Homo sapiens
tggagaagcggccgcggccagggaacggggcatcgcggttccaacggtatttataacagcaatgatgtagcagtatcgtttccaaatgtagtatctgg

SEQ ID NO: 839224 - DNA, 100 bp, Homo sapiens
tcaatgggggaccacagcatgcacttccttccagcagctacacagggcggcgactggcggcgcgatggacctgaccgggctcctgctggacgaagaaggc

SEQ ID NO: 839225 - DNA, 100 bp, Homo sapiens
acttccagaacatctgggagaatatttaatggaaaatcgcttggttaaaacctgacacttttaacagagccagaggccaagaagagtaagacggccgcaa

SEQ ID NO: 839226 - DNA, 100 bp, Homo sapiens
ctctactactgccatgaaactgtttgatgactggatggcatccaatggaactcaaagggcttgcgtttcaagaaagcccatgtaacacatcctgaactga

SEQ ID NO: 839227 - DNA, 100 bp, Homo sapiens
catatctccttgatcctggctgtggactggctagtagttggaatggaaactgtctgaatctggagcaattatgacagacctggaggaaaaccctaagaag

SEQ ID NO: 839228 - DNA, 100 bp, Homo sapiens
gtaccagtgatgacacaaaatcccagatctacctgacgggcctgcgagggttgaagattgtgaagcaatagcctaaggaatttttcacagacaacctatg

SEQ ID NO: 839229 - DNA, 116 bp, Homo sapiens
acagcagttgcttcaggcggtaaaccaacagctcacaaaggagaaagagcactaccaggtgttagtttgtgaagaaatatgggaacctttttagcttggagcttggtgacatatct

SEQ ID NO: 839230 - DNA, 100 bp, Homo sapiens
tttccccgcccggccgcgggagcctcgtggctgcgtcaccgccgcccccccagacaagatggacaccgcggaggaaggaaactttgagggaaattttgag

SEQ ID NO: 839231 - DNA, 100 bp, Homo sapiens
tcctcggcatcagaagtccttcaaccctgcagctatctttcagatcattcagagcataaggatgggcatgtgagaaagccagggatttgacaccacctcc

SEQ ID NO: 839232 - DNA, 100 bp, Homo sapiens
ccgcgctgcgcagttttgttctgctccagctgttcgaaggtgatccagggctttatggcgctcccaatgtcagccagctgcggtgccaggagctagggtg

SEQ ID NO: 839233 - DNA, 124 bp, Homo sapiens
taattttgagccaggaaagaagaactttctgcatttgacagataaagatggtgaacaacctcaaatactgctggctattcatgctcttatggaaaatgctgtgcaacccttactcacttctgtg

SEQ ID NO: 839234 - DNA, 50 bp, Homo sapiens
gcggctttaaatacctcaggcttgatgtgcccacttggatcttggtgctc

SEQ ID NO: 839235 - DNA, 98 bp, Homo sapiens
tacttccacttcgtgttcttcctagcttccctgtatgtgatgatgaccgtcaccaactggttcaagtgctccttgtcttctgagatgttgggcccctc

SEQ ID NO: 839236 - DNA, 100 bp, Homo sapiens
tttctggccaaaactacaaacaagacttcgcagaaaccaaggtgtatgttggtaacctgggaactggcgctggcaaaggagagttagaaagggctttcag

SEQ ID NO: 839237 - DNA, 100 bp, Homo sapiens
gcaggccgtcctggcaaggagtcctaatgttttcagggagaaaagcatgcagaacagatatgtacaaagtgaatgtttctccagcccaagctacttgaga

SEQ ID NO: 839238 - DNA, 99 bp, Homo sapiens
gctggcagtgtgggacacctgcttggaggaggagatgttaaagtaacccatcttgcaggacgacattgaagattggtcttctgttgatctaagatgatt

SEQ ID NO: 839239 - DNA, 100 bp, Homo sapiens
tgggactcttggtgccaacagagttactctatgctgtctttgcaggtgccatgcctacaatggcaagcatcaagctgtctacacttcatcccattgtgaa

SEQ ID NO: 839240 - DNA, 100 bp, Homo sapiens
caacagactgagcgcgtccaggcctgacagctctgcggctcgggccctgagctataaggaagaccagatggatgagaaactaatggaacctctgaaatat

SEQ ID NO: 839241 - DNA, 100 bp, Homo sapiens
ccggggccccatcagggacaccttgcagaaccagatgatgaaagtggctatgatgttttagccaaccccccaggaccagaagaccaggatgatgatgacg

SEQ ID NO: 839242 - DNA, 100 bp, Homo sapiens
cccatccaccgctaaaaagtgtccatcattccaatattcctcaatagcgtgcctgccagtgtagagccggtggagcagctgggctcggcgctgaggtttc

SEQ ID NO: 839243 - DNA, 98 bp, Homo sapiens
tggcctcgtcccggtcatctgggcgtgcgggtcccgggttttgatcgcgcgtttgtgtagaaatcaatgtggactgaacataaatcacctgatggaag

SEQ ID NO: 839244 - DNA, 100 bp, Homo sapiens
gcgagagggagccgcagctgatgtcagggttcacctttagatgttcttaaagatgaaagggttcagtactggattgagaattatagaaatttattagatg

SEQ ID NO: 839245 - DNA, 100 bp, Homo sapiens
ttttcttatggagaactgtccttgttgttttgcggctagttggctattcaagaaacctcgcccctctgaatgtcatactgtaatctttaaggaagaaagc

SEQ ID NO: 839246 - DNA, 100 bp, Homo sapiens
gttgtcatatcctcggaagcccattgcacactggcattccctggtggagggcaataaactttcttcggtgagaccaaccaatgtattagagatgatgaag

SEQ ID NO: 839247 - DNA, 98 bp, Homo sapiens
tatctcgcttttcccctggccttctgtatcttcatggtgcggctcatcttcgagagctctcaggtgtccggcatccatgagatgatggggtgcattaa

SEQ ID NO: 839248 - DNA, 100 bp, Homo sapiens
cgagcacaaactccacgaagccaacgcccaggagtccatagaggccactgtattctattgaagaacatgtctaacagtaacactactcaagagaccctgg

SEQ ID NO: 839249 - DNA, 100 bp, Homo sapiens
tttcaccaaggagccctacctggatgagcagagagctgtgaaatatctttggcttgcagccaacaatggggtaacgatgactcggacatagacatccagg

SEQ ID NO: 839250 - DNA, 100 bp, Homo sapiens
tcattggcttctttgagactgaaatggcaggaccttttccagtggtgagtttaatggtgggatctgttgttctgagcatggcccccgacgaacactttct

SEQ ID NO: 839251 - DNA, 99 bp, Homo sapiens
agagatcctgctatgtcttcggttacgcttacaccacctacgtctcctgaggaagtccaaacaggacctgctgtcctttgagctgttggatataaacat

SEQ ID NO: 839252 - DNA, 100 bp, Homo sapiens
cccaatcatccagtaaatcccctgagttgctggctcgatactgtgactccttgttgaagaaaaggtactccaaagattcaggtttactcacgtcatccag

SEQ ID NO: 839253 - DNA, 99 bp, Homo sapiens
gaatatgttagcgttgtatcttgggagaaagacacagtctccatcatcccagaatagcctaacatggcagaccagagacagcgctcactgtctacctct

SEQ ID NO: 839254 - DNA, 98 bp, Homo sapiens
gctccaacaggattccatggtagctgggatgttagggctcagaattctcagaagccaccgctgaactgaccgtctcattcacaaacgaagtcttcaca

SEQ ID NO: 839255 - DNA, 98 bp, Homo sapiens
gggatattcttgaagttaagcgcctccttgatcaccaggataatattctctcattgattaatgtcaatggtcgtttaggccaattgggtttgaaagaa

SEQ ID NO: 839256 - DNA, 98 bp, Homo sapiens
tgctggtgtacctgactcagccagggacccagacatggagctgcgggaagaagcctggtctccggggccgctggattctgaggaccagcagatggcca

SEQ ID NO: 839257 - DNA, 98 bp, Homo sapiens
tccttggaacatcacagtacattttaaggcaattatttgggatatacctgtaagtgtgggggccttcagtcaggaagtcccttaagctcccagacatc

SEQ ID NO: 839258 - DNA, 100 bp, Homo sapiens
cttttggctgatccaggacctgtaaacttcatggttcggctttttgtggtgattgtgatgtttgcctggtctatagttgaaagccatatcttggaagatg

SEQ ID NO: 839259 - DNA, 100 bp, Homo sapiens
cagcgaccgatatagctcgccaggtgacaagttggatggcttgaggactggtactaaaaggaaacgtgactgggaggccattgccagcagaatggaggat

SEQ ID NO: 839260 - DNA, 99 bp, Homo sapiens
agctagacagcagcgactagggctcgggcgccggcgagatgcctttgttcaccgccaaccccttcgagcaagacgtggcggaagatccatccaaaagct

SEQ ID NO: 839261 - DNA, 100 bp, Homo sapiens
tgaaaggttggagttactacttcagaaacgcaaagagaaaaagcagagagatcttgctaagatgagaaaatgtctcagaccagaagaactgacaaaccag

SEQ ID NO: 839262 - DNA, 99 bp, Homo sapiens
aacgattcttgaagttgaagaaaagaagcagctgacacaggatgatgatactgatgcggttgagattgctatcgacaacacggcttttatggacgagtt

SEQ ID NO: 839263 - DNA, 100 bp, Homo sapiens
cgcacaggcgcctctgccctgcacgtggctgctgccaagggctacattgaggtgatgagctgctgatgcaaggaatcccctgggctcccgtccactccac

SEQ ID NO: 839264 - DNA, 99 bp, Homo sapiens
tggatgtttaccaggtagccaagatgatcaatctgatgaggccaggagtctttgctgacattaaaaggttaagaagttcttacaagagttctaccagga

SEQ ID NO: 839265 - DNA, 100 bp, Homo sapiens
gggtccatacggcgttgttctggagtgggaaatatggctatgagagtatctacgctgccctgaggagcatctatcacagtgaggggcaccggggcctctt

SEQ ID NO: 839266 - DNA, 100 bp, Homo sapiens
aggaatcagcttgagaaggaagtttctcaatggcttggaaccagaaaatatccacatgatgattgggcactccacagaaggatgttattatcaagtcaga

SEQ ID NO: 839267 - DNA, 100 bp, Homo sapiens
aatgctccacgtggtggatggtaaagtcccagatacactcaggaagtgtttctcagaggaagtggatgctttggaagaattaagcaggcagctttttctg

SEQ ID NO: 839268 - DNA, 100 bp, Homo sapiens
tagcgtctgcaccttcagaaacagtgctgaagcctttaaatgcagcatctgcgatgtgaggaaaggcacctccaccagctctggagcctcccagctcaat

SEQ ID NO: 839269 - DNA, 98 bp, Homo sapiens
tggtttctagccccagctgtacctctaattgtaaccttggtttgcacagcggaaaggggctggccgtgtggtgcacatctgcaatctccctgaaggaa

SEQ ID NO: 839270 - DNA, 100 bp, Homo sapiens
aagcagctcttgaatttcatggtgttgcccaagatggaagagcaagaagagacgtctgcaattcgagtgggttttatcacatataacaaagttctccatt

SEQ ID NO: 839271 - DNA, 99 bp, Homo sapiens
ccattttcaccatattattgagcagctgcgtttccgccagagcagcgtggggaacatcttcttgtctgctggaggaagagcaagcaggccctgagggac

SEQ ID NO: 839272 - DNA, 100 bp, Homo sapiens
agctcctgcccatctgcagcaccttcggcatctgcccctgccatgaccactgtggagaacaaatccaagattagcacagcacttttctgtagaaggtcag

SEQ ID NO: 839273 - DNA, 101 bp, Homo sapiens
ctgcctttcttccttctcccacaagcctgctccaaagaaactctgtgttatgtgtaaaaatggaaatttaatggagccaccatttcagaaccaaaagaaat

SEQ ID NO: 839274 - DNA, 99 bp, Homo sapiens
aaggatcctgcacatgcgtttaatcacacaccaaaaactatgaatggagacatgagggtactattctgccctaaaaactatggaacaattagagaatgt

SEQ ID NO: 839275 - DNA, 98 bp, Homo sapiens
tagatcacagtggggctctaggagaatgtgagcatttgatccgccatatgttggtgttagatcccaataagcgcctctccatggagcagatctgcaag

SEQ ID NO: 839276 - DNA, 99 bp, Homo sapiens
ggacatcagggagaccaggacagaccaagagaataaggaccctgtggtttgtcctgattgtagtgatgagattgctgtaaaaaaggacaatattcttgt

SEQ ID NO: 839277 - DNA, 100 bp, Homo sapiens
tgcattctgtcgatatatgattgacatatttgtccatggggatttaaaaccagctgacatattgagcagaggaccaaaatcgatgatctccttggctggt

SEQ ID NO: 839278 - DNA, 100 bp, Homo sapiens
attttttctccttctgcgctgaaaccagaaagcaggaactttcgtggtgagagttggcagggggttggcagtggaatccctctgaccggccctcctttgc

SEQ ID NO: 839279 - DNA, 100 bp, Homo sapiens
tctttggagagacatcctatattcctttcagagtactattaatcccgtagatgcaatatatcaacctagtcctttggaacctgtgatcagcacaatgcct

SEQ ID NO: 839280 - DNA, 100 bp, Homo sapiens
cctgttttgaccaacggaaaagagcaaatgcagcatttttgataggtgcctatgcaacctgtcatttactccatcctttatagtgatgctacaggacgaa

SEQ ID NO: 839281 - DNA, 100 bp, Homo sapiens
gctgccgctgccgccctgagtcactgcctgcgcagctccggccgcctggctccccatactagtcgccgatgtgtcttgctgaatcagggctctcttatcc

SEQ ID NO: 839282 - DNA, 100 bp, Homo sapiens
caaaataaaaatacaaactggaaaataaagattacagagaaaaaaccaacaccttcctgtgcagtcctgttggaatttatctttaaatggatgagatggc

SEQ ID NO: 839283 - DNA, 100 bp, Homo sapiens
ccaaaacgtgaccactgaggatgtggagaaggccacaggattgtgcagactggtgcttaaaatggaagtcgatattaatggagagtctagaagtaccctg

SEQ ID NO: 839284 - DNA, 98 bp, Homo sapiens
agacaaggaaattactcatgatgtcaaagggatcgatttgcttagtggtataatacctgaactctgtcagaaatatccagatttaaatttcataattg

SEQ ID NO: 839285 - DNA, 136 bp, Homo sapiens
gagtaacggaaatccttgggtttgaagatgatgttgtgattgagtttatattcaaccagctggaagtgaagggttatgtggtccgaatcagtggtgggaacgacaaacaaggtttccccatgaagcagggtgtctt

SEQ ID NO: 839286 - DNA, 100 bp, Homo sapiens
gagagcttggagataattctggtggctgtgtggagtatgtgttggaggatggcactattaaaattaaagatctcaccttgcctgaactgatagggattat

SEQ ID NO: 839287 - DNA, 99 bp, Homo sapiens
ttaaagcaggctgcagatcttacacaggtggaagttgatgggtcgaaactaaatgtgaccagcacgtggaacctggcttcgcccttattgtctgtcagc

SEQ ID NO: 839288 - DNA, 100 bp, Homo sapiens
tgactcagtcctgcaccaccccgcacctccactccatcctgaaggctaccaactacaatgacaaagccctggacttccctgggttcctggacatgatggc

SEQ ID NO: 839289 - DNA, 100 bp, Homo sapiens
tagacgcaccattgaagttaaccggtgtaggagaagaaatccgcagaagcttattaaagttaagtcttaggaaaagtcctcagtgctgtgggcagtgccc

SEQ ID NO: 839290 - DNA, 100 bp, Homo sapiens
tcttcccggcgctctcctggctcccttctgccccagctccgtctcggcggcggcgggccctggagatgtacaaggatgattggaacaaagtgtcggaaca

SEQ ID NO: 839291 - DNA, 100 bp, Homo sapiens
accttcctgtgcagtcctgttggaatttggccgagatggacgaaaaaatgtggttccttgtgttctctctgtaaatggggacctagaccgaggcatgctg

SEQ ID NO: 839292 - DNA, 98 bp, Homo sapiens
gccccgatgactccgagctcttccaggtaacggaaggccattggaaatggggcggcgtcacagtccaagtgaacagtgcctttttcacaggcatctat

SEQ ID NO: 839293 - DNA, 100 bp, Homo sapiens
tggaaggaataattcggtctccagatttagtgaggtatcacctgattttgatacagcagcaggaagcttgttcccagcctaccagaaacaccaaaaccgg

SEQ ID NO: 839294 - DNA, 98 bp, Homo sapiens
tcctgtttcagccccctgtgcgccaccattgcagccaaagaacccagtgacttgattgtaaaaatttacagagcggaatcatatgctggtctccaaga

SEQ ID NO: 839295 - DNA, 100 bp, Homo sapiens
aacacattggatatgatgattcttccaaagctgcaagcctccagagaagcaggagcagcagctctgagaaacgtggcccagagattatttgaaaactacc

SEQ ID NO: 839296 - DNA, 100 bp, Homo sapiens
gtcgcctgcgctatgccctgctgtagtcacaggagctgtagagaggaccccggtacatctgaaagccgggaaatggggtctctctttttggcatgtcggc

SEQ ID NO: 839297 - DNA, 100 bp, Homo sapiens
gttccccagcagacagtggccccacagcaacagaggcgcagcctcaaggaggaggagtgtccagcagaagccaagtacaagaagctggagaagcgatgag

SEQ ID NO: 839298 - DNA, 100 bp, Homo sapiens
tggacagacagtgacgattatagcacaatatcaacctgaagattgatccaaatcctgatcagtcagcagatgatagaccatcctgcccctctcgttgaag

SEQ ID NO: 839299 - DNA, 99 bp, Homo sapiens
acaagccctttgaatccattgacgaaggccaagtcactcacaactgggatgaagttgatcctgatcctaaccaggcttctttggcagaaacagataaaa

SEQ ID NO: 839300 - DNA, 100 bp, Homo sapiens
cgtcacttgacaagcctatagaatcgcttggtgatccagctatttttcctgccgtaattgtggaacatgttcctggtgctgatattctcaatagttatgc

SEQ ID NO: 839301 - DNA, 100 bp, Homo sapiens
aacccacaggtgcatttcacagcactctgggcgaaaattggatgtgaaaatgaagccagaccgaggtgacagattgactgggatcccctcgcacatcctc

SEQ ID NO: 839302 - DNA, 100 bp, Homo sapiens
caaaagtttttaagactctcaggcttactgtggatctggattctaaggcaacacttccttgaagaaacaagcttacagggcaaatgtgagaaacgagtac

SEQ ID NO: 839303 - DNA, 100 bp, Homo sapiens
aggttgttttaaggcagatgtctaaacataaaaccgaaatccaatcttttttgacatatgcatatagaagttcctagacttcagtgctgaggagacagag

SEQ ID NO: 839304 - DNA, 100 bp, Homo sapiens
caagaaggccctggacacagcaatatctctgggctttcacaggtgcgcatggtgagaggggagctggtggacgagtcggggggctcccctctggagtgga

SEQ ID NO: 839305 - DNA, 100 bp, Homo sapiens
gtccggcggcagtgggagtcgtggagcacagaggacaagaacaccttcttcgaggggctgtacgagccctgggcgctgcctatggcacagccaagagcgg

SEQ ID NO: 839306 - DNA, 99 bp, Homo sapiens
tcagagtttgcattgttaacaaggtggtatggtcaggaaaaagactacaatgtactagtcatggatcttctgggacctagcctcgaagacctcttcaat

SEQ ID NO: 839307 - DNA, 98 bp, Homo sapiens
ctggtctcgaactcctgagctcaagcaatcctccctccttggccttccaaagtgcagtaaaataaaacagggtctgttacctagcttggaagatttgc

SEQ ID NO: 839308 - DNA, 99 bp, Homo sapiens
gacaagcgaatttcagtcagtatatgggagaagggactactataaatgcaagtgcagatggcaacattggaactatagaggatggtagtgacagtgaaa

SEQ ID NO: 839309 - DNA, 100 bp, Homo sapiens
gcaaggtgacccatgcattggttaatatcagggattttatattggaagacatggatcttgctgccaacgagatcagcatttatgacaaactttcagagac

SEQ ID NO: 839310 - DNA, 144 bp, Homo sapiens
tcgaacagctggagcaaggcgacgaaccttggagagaggagaacgaacatcttctggacctttgtccaggtgactctcctattccatctgtttcttcgggatcatcttcacctctttcagccacttctgccccaccaacgttgg

SEQ ID NO: 839311 - DNA, 100 bp, Homo sapiens
agtgcagcggcctctcctacagacctcgaagtagggggaaaactgcagtggaagatgaggacagcatggatgggctggagacaacagaaacagaaacgat

SEQ ID NO: 839312 - DNA, 99 bp, Homo sapiens
gtggttcccgcagagtggataaagaactgggagaaatcagggagaggcgaattggcctattccactagaagcaagatggctgaactcaatactcatgtg

SEQ ID NO: 839313 - DNA, 98 bp, Homo sapiens
cttttcccccaggctgctcggcaggaaagattttaattcagtcgaagaaaagaaatgtaaatcctcaggttggcattttgtcgttaaattttcaagtc

SEQ ID NO: 839314 - DNA, 98 bp, Homo sapiens
aaaacagtgatcgctaagaactttgccgataccttaggatacaacatagaacctattatgctctatcagcaatggtacaacagctccatgaacgtgat

SEQ ID NO: 839315 - DNA, 98 bp, Homo sapiens
tccctcagtgcagcccggtttgctttgcttcgattggaggaaggacctccacacactaaaaactggaggttgatggaaatcacaatcttctgacaaag

SEQ ID NO: 839316 - DNA, 98 bp, Homo sapiens
aacatccggaggctgggaaatgagtgctgatggcagagattggtgaggatttggataaatctgatgtgtcctcattaattttcctcatgaaggattac

SEQ ID NO: 839317 - DNA, 100 bp, Homo sapiens
tgaagatggacctgttgaactatcagtacttggacaagatgaacaacaatatcggcattctgtgctacgaaggaaacctcgacctgtctcccagttggtt

SEQ ID NO: 839318 - DNA, 100 bp, Homo sapiens
tgggggcgcattcggtggtgttggatcttctgcagataccctatgaaaaggaactgcaagcacatgttgaccagataactgaaatggcagcagtaatgag

SEQ ID NO: 839319 - DNA, 100 bp, Homo sapiens
aggttcaaggaaacctgggtgtgcaccgggtgaatgagagtggcagacagaaggaaacagcaaggcctctgagagtgttgcggagataggaacatgggag

SEQ ID NO: 839320 - DNA, 98 bp, Homo sapiens
tgaaggcagacagcgagtggcgacgatggaatgaaagctactggttgattttaaagtgcctgggcctcacaggtttggagatgtcccagaataaggca

SEQ ID NO: 839321 - DNA, 98 bp, Homo sapiens
aaaatagaccctggagtgaaaccattaagcttgtgcgtcaagtcatggtttccagccaatggattctggtcaactggtggagattggctgacaccctg

SEQ ID NO: 839322 - DNA, 100 bp, Homo sapiens
caagtacctgtttctggaacacagggtttgcagcaaacagggaagcgatccaaggccaatatcattttcaacacttctcttggagccattttcggggtta

SEQ ID NO: 839323 - DNA, 100 bp, Homo sapiens
cggaaatgtccggcaagatcgagaaagcaggagagaacattgaaagtattctctaagctatttgaagagagtgactaaatgcacctgggtcaggctgtct

SEQ ID NO: 839324 - DNA, 99 bp, Homo sapiens
acgacgacgaggaagaggaggtttctgaggtacctcatcgcccatccttatcaagcttagaaacgttaatggtttcacagaagtctgaaattgagtatt

SEQ ID NO: 839325 - DNA, 100 bp, Homo sapiens
agcttctccgcctggctgcactgcgtgtgtgtggtgggcttcgacctggagctgggccaggccgtggagaggctgaggggatctggcggtggagcgctag

SEQ ID NO: 839326 - DNA, 100 bp, Homo sapiens
gaagattaaattgcttactggtaaacgcgttcaactggcggaagacctcagaaacctgtccagtttaagtcgtcttggtctgagatataacagactgtca

SEQ ID NO: 839327 - DNA, 100 bp, Homo sapiens
gaatggagccaatgactgagggtggcagagcagaaagatgcatccccagtttcccgcgggcctggaggtgacagatgaggtactggagaaggcagctggg

SEQ ID NO: 839328 - DNA, 100 bp, Homo sapiens
gttccctgcaacccgtgcttatgcagatagttactattatgaagatggagagactggatctccaattactgcgtcatgtgttggattaggcaattctaaa

SEQ ID NO: 839329 - DNA, 100 bp, Homo sapiens
cagagtttgaaaaatcctctttatcagatcaatcatcggcttacacagggggcctggaactgatggagggcaggaagcagtttgatgagctctgcatccc

SEQ ID NO: 839330 - DNA, 110 bp, Homo sapiens
ggtcatcactatcaatgttggattttcaatggcagttgcaatggccatttatgtggctggcggtgtctctgaggaaccgctgctgctggccgaactcaagcccgggcgcc

SEQ ID NO: 839331 - DNA, 100 bp, Homo sapiens
aaaaactggcagagaatatccatgaactctgggttatgaataaaattgagcttggctggcagtatggtccggatgctagacatgcagctgaagaagagat

SEQ ID NO: 839332 - DNA, 100 bp, Homo sapiens
cccaggcctcggactccgcggccggcccggcgcggcccagcgccctcaggaatgacgggacagagtttggcggctccatttaccagaaagtgaacaagaa

SEQ ID NO: 839333 - DNA, 100 bp, Homo sapiens
ctcgaattccagaatgatgaaattgtagccagccccagtgcctgctgagccgtttgacaacactacctacaagaacctgcagcatcatgactacagcacg

SEQ ID NO: 839334 - DNA, 98 bp, Homo sapiens
tctcagcaggcctttgctggacagatgaagagtgacttgtttctggatgattctaagagaaaagcagcatctgttatagcaaaatacccacacaaaat

SEQ ID NO: 839335 - DNA, 100 bp, Homo sapiens
caacatcagcagccagcatcttctttattgagccggcttccaggccgcccatgcctgctcaccaggtgccaccctacaaggctgtgtcggcccggttccg

SEQ ID NO: 839336 - DNA, 98 bp, Homo sapiens
acagcggcgagcagaactacggcgagcgggatgaagaacaagctgtggtactttgaatttggcacctcggagacttttgcagcgacctgcaagaaact

SEQ ID NO: 839337 - DNA, 98 bp, Homo sapiens
cacaacaagtttagggagtccatggccagaaaacttttggggagtggagtcaacatatcaatggagcaagtcacagtcgtcgatgccagcttcttctt

SEQ ID NO: 839338 - DNA, 100 bp, Homo sapiens
atgcccctctatgcagtcatgtatcctgtgtttaatgaggcctactactactgtgccataatagaggatgtgattctgcgctttgcttggactatccaaa

SEQ ID NO: 839339 - DNA, 100 bp, Homo sapiens
atttgccgtggccaggctagagattgaccgactcatcagtcacggggccgacatcctgaagcctgtaatgctcaggcagggagaaaaggaggcagtgggc

SEQ ID NO: 839340 - DNA, 100 bp, Homo sapiens
ggaataatgggtactctttcctcgtggaatttgaagattctacagataaatcagtcacccacaaaagctgtatataatgccagacattggaatcatccag

SEQ ID NO: 839341 - DNA, 100 bp, Homo sapiens
cagtctcaatatattcatcatttagaggcagaagttaagttctgcaaggtagatatagttgtaggtactccgggaagactagatgacttggtgtcaactg

SEQ ID NO: 839342 - DNA, 100 bp, Homo sapiens
tggagattcttctcaaatctgatggactcaggacgttgcaatctgtgtggggaagagagctttggcactgattgtcttcgcagttttaccgacttagaag

SEQ ID NO: 839343 - DNA, 100 bp, Homo sapiens
tagtggtcccggaattaagaaaacagagcgacgagcaagaagcagcccaaagtcgaatgattcagacttgcaagcttcagtatcagacacagcacagcag

SEQ ID NO: 839344 - DNA, 98 bp, Homo sapiens
ttggcaccactgaagtgaccgaatgaggatgctcatggaaaccatttagctgaagaactgggggcttctaaagtacgtgaagctcatttagaagcaag

SEQ ID NO: 839345 - DNA, 99 bp, Homo sapiens
tttgctgctgcagccacgcaacagcagacagcttctgttggctgttgaaggcacgaatggaatagataatcatgtacctacaagcactctagtccaaaa

SEQ ID NO: 839346 - DNA, 100 bp, Homo sapiens
ctcgacgccacttcatgttccagtgcctcgagcgctcaggatggaggaagactcgatccgcctgcctgcgcacctgcatatttggagttcttacaacatg

SEQ ID NO: 839347 - DNA, 100 bp, Homo sapiens
ctgctctagtaataagccggctattgtagaagctgataaaagcttcgatgatgaagaatcagtggatggaaataggccatcatcagctgcatcagccttc

SEQ ID NO: 839348 - DNA, 99 bp, Homo sapiens
ggcacggctggggagcccggacgaggagttcttccacaagatgttccatttaagcagacctcttccatagctgtagctggagcggtaattggagctgtt

SEQ ID NO: 839349 - DNA, 100 bp, Homo sapiens
cccaacaggtttaaccccaagaccttcttcatactgcatggccatctggacccgcttctttcctgcctccgaggctctgaggtctgttttggcccaggga

SEQ ID NO: 839350 - DNA, 100 bp, Homo sapiens
ctggttggcccagctccttggggtttccggctgcagggcggtaaggatttcaacatgcctctgacaatctctagtgcaatgaatcgctccctggctaatg

SEQ ID NO: 839351 - DNA, 99 bp, Homo sapiens
tttaacctttattgtggtggagtccaccccgctgtgtatgcctttctggtgacggcgtctgtgcagtttgctggtgggatcgttatcttctttggactc

SEQ ID NO: 839352 - DNA, 99 bp, Homo sapiens
gcaccgaggaccagctcaatgacaggacccctaccatggaggagaccatcaaagatccccccacatcagctgtcttgctggatcactgtcatttctctc

SEQ ID NO: 839353 - DNA, 100 bp, Homo sapiens
gctggatgtgccagaagacttacggcaaatattgaccttgtacaaataaaacagatgttcgctcagatgtatcagaagactctgggcacaatgattgcag

SEQ ID NO: 839354 - DNA, 98 bp, Homo sapiens
gagcaagaataaatgaaagtctgagccagctgaaaacactgattttggatgctctgaagaaagatgtgtgcctagattgatcggtataaggctcactc

SEQ ID NO: 839355 - DNA, 133 bp, Homo sapiens
agaagtttaaagttggcctacacacttcttaataaactggggaccaaaaatgaacctgtgttaaaacctggagacaggcgaggaagaaaggacccggtttcaggagctgctggccagtccggcctacagagcc

SEQ ID NO: 839356 - DNA, 50 bp, Homo sapiens
gctcattatccattttcgagacattcataatcaggacacccggagcaacc

SEQ ID NO: 839357 - DNA, 100 bp, Homo sapiens
aggacccttaagtgctcttactgaactgaatactaaagtaaaagagaaatttcaacagttgcgtcacagaatacagcttcttccagaccagctggtcttg

SEQ ID NO: 839358 - DNA, 98 bp, Homo sapiens
tagtctctcgccacagcggcctcggcctccccttggattcagacgccgattcgcccagggctgttgataatcaggtgtatgtggccacagcctctcct

SEQ ID NO: 839359 - DNA, 99 bp, Homo sapiens
gtgatcacacgtcggctgctgggaagatctggattctcgtttcaggcttcatccctccacccctcatcttcggggctggcatcgactccacctgcctgt

SEQ ID NO: 839360 - DNA, 100 bp, Homo sapiens
gctgcctacggaggtggcagccatctccttctcggggctgtttgcggggtggggtggggggttcgctatgtcggatgacgattcgagggccagcaccagc

SEQ ID NO: 839361 - DNA, 100 bp, Homo sapiens
tttagtgaagtttatagagcagcctgtctcttggatggagtaccagtagctttaaaaaaagtgcaggtagaaaatctggtgtattaactgtgaaaatttt

SEQ ID NO: 839362 - DNA, 99 bp, Homo sapiens
acttgaaaaccactgaagaggacctctccatagacattggtagacacagtgcttctgttggacacacgtacccagcagcctgccggcacttcaatgaca

SEQ ID NO: 839363 - DNA, 98 bp, Homo sapiens
gaagttgctgctgacgctctgggtgaagaatggaaggatgctcgacatgcagcagaaggagaaatatataccaaactgaatcaaaaaattgatgaatt

SEQ ID NO: 839364 - DNA, 100 bp, Homo sapiens
cggtaacccgtgtgactttgactggtatgaaaagacacagactgtactctcagaactgaagttgaagtttgaaatgactgagcaggaaaagcagtcaatc

SEQ ID NO: 839365 - DNA, 100 bp, Homo sapiens
atatatacaaaattgctgtattgcctggtgatatgcagctgtacctgtgacatcataattgcaccctccgacatgatggagtctcgctgtgtcacccagg

SEQ ID NO: 839366 - DNA, 100 bp, Homo sapiens
tgccactagaaacatgtgcaacgagttactgccgataatgaaacctcatgtgcagtcattggagaaatcgatgaagaaacagattctgcgcttgatttgg

SEQ ID NO: 839367 - DNA, 100 bp, Homo sapiens
agcacatcccttgactgcttgcaggacttctgtttcctgctctcgacaagggctggtggcctgggaatcaatttggcttcagcggacacagtcgtcatct

SEQ ID NO: 839368 - DNA, 98 bp, Homo sapiens
aggcagaagctgtacacactgcaggacaaggcccaaggaagatgttaccgagtacttcagtgaattccttagtgcaggggaacggagtcttgaattcc

SEQ ID NO: 839369 - DNA, 99 bp, Homo sapiens
tttgctgcagctcttcaggtccatcaatgacatgatgagcagcatgtcagaccagaccgtccgggtgaagttaataacgacatgatagtcactgacaac

SEQ ID NO: 839370 - DNA, 100 bp, Homo sapiens
cttgaacacaaggagatcgacggccgtcttaaggagtattacataccggttacggcacctccttcgtgcaaggtgtgatgcatccccagtgaccaacaac

SEQ ID NO: 839371 - DNA, 99 bp, Homo sapiens
attgagctgcactgtattcctgttgagcaatgtttaaagcgtttgaaaaacatgaatttggagggctcaattcaagacctgtttgagttgttttcttcc

SEQ ID NO: 839372 - DNA, 99 bp, Homo sapiens
ggaagccgagtgctcctgcggctcccagactgcaaccagtattcacaggcctccactgggctctcagtaggtgggatttgtcagcagttctcattgcct

SEQ ID NO: 839373 - DNA, 100 bp, Homo sapiens
cacaagcagactgacaacgtttctagtgattcgcctttgccagtctcatctcgtgtctgctttgttaagttccatgatccagactcagcagttgtggcac

SEQ ID NO: 839374 - DNA, 98 bp, Homo sapiens
acaacttataaatatcctgatttgcctataagtcgatacaaggaagaggagaatgaagtttctagattagaagacataatgcagcatttaaaatcaaa

SEQ ID NO: 839375 - DNA, 100 bp, Homo sapiens
ctgcaacctttagactaatgactgtccgaaacatcgcctccatctgtaatatggctgcctctaagaatcaaacttcactcttgggagaaccaccaaaaga

SEQ ID NO: 839376 - DNA, 98 bp, Homo sapiens
agaacccaggcccacggaggaagagccgggcagtccctggagcgggccaggtaagaatgattgatgttggctgatattggagtgctcattcacatgaa

SEQ ID NO: 839377 - DNA, 100 bp, Homo sapiens
ctcatgggaacccagaagaggtgacgactttgctaccaggacttgctggcccctctggggagatggttaaatccacaacaagtctgacctcgtcttctac

SEQ ID NO: 839378 - DNA, 100 bp, Homo sapiens
cagccctgtccggcatctgtcttgagctcccagcaagcatcaaggcatgccatgggttgcctctcataaatggccaaagctgtgacccttatgcaacagt

SEQ ID NO: 839379 - DNA, 100 bp, Homo sapiens
tccgaaagcaagctcttctagaagttgtgagacggtttaagcggaagcatcttactgccattgactgccagcatttggctcggagtcacttggctgtgac

SEQ ID NO: 839380 - DNA, 100 bp, Homo sapiens
gactccaagtgtgaatctggaaaaggacgctgctctttcaaccccaacgtgaacacggtgtctgttatgatcagtcctaggcctacttacaagcctccag

SEQ ID NO: 839381 - DNA, 100 bp, Homo sapiens
tagctgcttaggcagcaagtatgtcagtgaggagacttgtcacatgcatcaggaccagagaatcctacaagggacactttggtcctattcactgtgtgag

SEQ ID NO: 839382 - DNA, 100 bp, Homo sapiens
ctgactctcctcctactcttgttcgtctgagaaaactgaagtttgccataaaagttgatggagattacctttggggtgcaactggaaactgacttgaaga

SEQ ID NO: 839383 - DNA, 100 bp, Homo sapiens
cagggatgcctggaatagaagagaatgacctagcaaaagttgatgatcttccccctgaacccacagctggccacacgctatactctgtgctctcccaagg

SEQ ID NO: 839384 - DNA, 98 bp, Homo sapiens
aaattttttataatgcatcattgtgcgtccctgtatgcatactaccttgtactgggtatatttcagaaatcgctgggtaaagactgtccacccagttg

SEQ ID NO: 839385 - DNA, 98 bp, Homo sapiens
cagccggaaacgtctggacaagagccaaggagcaataactgaacgtttaagaagcttcagtatgcatgatttaacaactatccaaggtgatgagcctg

SEQ ID NO: 839386 - DNA, 99 bp, Homo sapiens
ggaggaggaggggctccggctggtctgtggtgaggaaaatttgagaatggtgttgcagaaggaatggtggatccaagtctcaatcccatttcagccttt

SEQ ID NO: 839387 - DNA, 98 bp, Homo sapiens
cccgggagctcttcttcatcaacatgtggcagaaggtcaacggcagagacttatccagagcaactcatgaccaggctgtggaagctttcaagacagcc

SEQ ID NO: 839388 - DNA, 135 bp, Homo sapiens
ctgttaacatcatccgtacattccttaaagaaaactgcttccgacaatcaacagccaagatccagattgtccggggtcacagtgtcatccgttcagctaccaataccacccttccacacatgttgatgtctcaac

SEQ ID NO: 839389 - DNA, 100 bp, Homo sapiens
ggaagctcgggcgctccggctgtaaggagccgcggcggggggaaaatggagcccttcaccaatggctggtgagattggagagatgaaggatggagtccca

SEQ ID NO: 839390 - DNA, 100 bp, Homo sapiens
ggatggtcacgatgtagttataggccgtcatttccctgatggagatggggttcgacgagaaagaggtgatagatgccctcagagtgaacaacaaccagca

SEQ ID NO: 839391 - DNA, 100 bp, Homo sapiens
ggatggaaagatggagatgaacctctaacacagtggaaaggaaccgttctggatcagaatgctgcctttttatatggtcttggtttggtctacttccatt

SEQ ID NO: 839392 - DNA, 99 bp, Homo sapiens
gtgccgagcaattgtgatgagatattctgctgagtggaagcgtgtgaaggcaaagaagaatgctgctccattcagaagtgaagtctgctttgggaaaga

SEQ ID NO: 839393 - DNA, 98 bp, Homo sapiens
ggctggcccagccaatcctggagctgctgttgcagcacttgttccccaaacaagtgctcctacattctggggagagaccattctaacacaggtaccgt

SEQ ID NO: 839394 - DNA, 98 bp, Homo sapiens
gtactgggatgtgatgatggagaactacagcaacttactctcactgggtgaggtcgcaggagctggtgcagccagtgtcatgtccgccctgactgaca

SEQ ID NO: 839395 - DNA, 99 bp, Homo sapiens
acgacgggccgagcctgccactctcggggtgtggttttctctcggttgtgcctatttggccttggaagactatcaaggttcagcaaaggcatttcagcg

SEQ ID NO: 839396 - DNA, 100 bp, Homo sapiens
tgagctgagcccagtatgggaaagatctaccttctggaagctactactacgtggtgcttggaaagtatgtgcagaagcttataatcctgatgaagaagaa

SEQ ID NO: 839397 - DNA, 100 bp, Homo sapiens
ttttatctgatattttaggccaaggagctactgcaaatgtctttcgtggaagacataaggatgaaacaagtgaagatgctaactgtcttgctttgagtgg

SEQ ID NO: 839398 - DNA, 100 bp, Homo sapiens
ccaccaagcatcccattacagatagaagaggtttttgggtccactgcaatgactcaaagctgaatgtatgcagtgtcgaggaagtgtgcaaaacccaggc

SEQ ID NO: 839399 - DNA, 98 bp, Homo sapiens
gattccatgttcatagtggctttccagttgtttgacaagagtggaaatggagaggtgacatttgcatttgatgagcttgttgaagcataccaagagca

SEQ ID NO: 839400 - DNA, 100 bp, Homo sapiens
atcccaatgttgccctgaaatttatgtccaggattcaaaaagtttaggactgctaagtctggctcttgctgattgaattcctttggtgcagtttagcatg

SEQ ID NO: 839401 - DNA, 98 bp, Homo sapiens
ttagtggattacaaaaacttttcagaatttcttcaggttgaattacctagaagtttgtcactgacttgtgttcctgaactatgacacatgaatatgtg

SEQ ID NO: 839402 - DNA, 99 bp, Homo sapiens
tcatggggaaaatctccccggtgactttcagcctttgcaaaatgttagcacagtgctgcagaagcctaatcctctctataatcagaatacagatatggt

SEQ ID NO: 839403 - DNA, 100 bp, Homo sapiens
ttatcgtaggaggagtcctccacctcgtcgcagccatcagtggcctatgtacataccacgccgggtctgccttcaggctgggaagaaagaaaagatgcta

SEQ ID NO: 839404 - DNA, 100 bp, Homo sapiens
cgaggctgaggactgcaaaacctgtggctacaattacaaacaacttccggtcttggtgcctcagttgaaacttccaatttaacatcctgacacacactac

SEQ ID NO: 839405 - DNA, 100 bp, Homo sapiens
tgcagaaggacagacgcctgccattgggccggatggcgagatgaccacctaagaaaggaggaacagaaaagtactaacattgaagatcttcatgtttctc

SEQ ID NO: 839406 - DNA, 98 bp, Homo sapiens
ctgcggcgagtatacatgcaaagcttccaatgagtatggcagtgtcagctgtacagccacactaactgtgacagtacaagccagctgccatgttgtga

SEQ ID NO: 839407 - DNA, 100 bp, Homo sapiens
aagctacatatgggtggtccctgctacaccagcctcccaagcctcccagtgcaccttctaggagacaagcaagacctgcctagagctggaacgttacctc

SEQ ID NO: 839408 - DNA, 100 bp, Homo sapiens
aaggagctatcctgagatctgtactgctattgtccagtgtacagaagcttactggaaggagtggccaactagttaaaggtttgacacctcaatatcaaca

SEQ ID NO: 839409 - DNA, 100 bp, Homo sapiens
tcttccagtcctcctaggcatcttattgatcctccagtcgaggtgatctttagacagtgactgagtatggatcatttgaacgaggcaactcaggggaaag

SEQ ID NO: 839410 - DNA, 115 bp, Homo sapiens
tactgtgtcttcttcggctgtttcacaaagaagcatattcacgagcatgcgaaggcgaagcggcacaacctggggatgatgcagtgtgtgattgcagtcgcggacaaagtattcg

SEQ ID NO: 839411 - DNA, 100 bp, Homo sapiens
agtgcagaagggtttactgatattgatatagtcgtgagatggagaataaagaaactctcaaagggttgcacaagatggatgatcgtccagaggaacgaat

SEQ ID NO: 839412 - DNA, 98 bp, Homo sapiens
cactatgcttaccgagatgcggttttcctcgcagaacgcctttatgcagaaggccccaggatgcaggccctggtgctactcctctgcattggagccct

SEQ ID NO: 839413 - DNA, 100 bp, Homo sapiens
tgaaatgattctccagaatttctcctcataaaaaagatgccttcaattaagttgcagagttctgatggagagatatttgaagttgatgtggaaattgcca

SEQ ID NO: 839414 - DNA, 100 bp, Homo sapiens
tgctggtgaataggttcctgggccccaagaacagccgtcgggccttgatgggctacaatgaccagtaggaacccagccatggtgaacgaagccagaggaa

SEQ ID NO: 839415 - DNA, 98 bp, Homo sapiens
gacctgcgcggcatgctaaagaggctcaagggcatgaggcgcgatgagaagaagagcacaggtgatgactccatgaggacctcacagctgaatgtggg

SEQ ID NO: 839416 - DNA, 100 bp, Homo sapiens
agcataatccttttgcagacatctcaacgctggctctccaggacttgtcttacaaggaccggcactggcatgaagcctgtttccactgctcgcagtgcag

SEQ ID NO: 839417 - DNA, 98 bp, Homo sapiens
tgccagcaagaaatgatcagtagcaccagtgtttatgagctccttaataagcatttatagtcagtttttggcagcaatagaatcactaaaggcattct

SEQ ID NO: 839418 - DNA, 98 bp, Homo sapiens
gaggcagccaagctcgtagcctgccactccgtgcctgaggaggatgaggacaaggaagatgatttccgagctcccctttacaaaacagtggagataaa

SEQ ID NO: 839419 - DNA, 100 bp, Homo sapiens
ctcatcttagttagcgtgtcctctgaaaggtacttgaccttcactgcctggtgtaactcccacctaaggaaagccggcacccagattgagaacatcgagg

SEQ ID NO: 839420 - DNA, 100 bp, Homo sapiens
tgccagtggatccatacaactgctccgcctggtggaatctgaggggctgtttgcggggtggggtggggggttcgctatgtcggatgacgattcgagggcc

SEQ ID NO: 839421 - DNA, 100 bp, Homo sapiens
gcctctcttactaccactcacccgcagactccttctccagcatgggctcgcctgtcaacgcgcaggacgagattgaggagctgcgggccgagatgctgga

SEQ ID NO: 839422 - DNA, 99 bp, Homo sapiens
agagaacatggttcaaaaacaagtgcaaaggccctttatggatcagttccatgacaagaccccttatacgattatgtttggtccagataaatgtggaga

SEQ ID NO: 839423 - DNA, 99 bp, Homo sapiens
gaatggagcaaaatggcggatcatgtgcagattcttccacaagcacatctcaggcagccaaaaagattgtgttgaattttatgttctgtgggtttcttt

SEQ ID NO: 839424 - DNA, 98 bp, Homo sapiens
gaaagcaatatcaactaactgtgcagaccttcactgcctggtgtaactcccacctaaggaaagccggcacccagattgagaacatcgaggaagacttc

SEQ ID NO: 839425 - DNA, 100 bp, Homo sapiens
ttcatccctgactccagcaagggccttggccccagggcacccgttgagaagctgatgtctcctcgacttccaactggaaccttgaacccccacatttctg

SEQ ID NO: 839426 - DNA, 100 bp, Homo sapiens
cgcatctccccgacaaacaccacgagaattccgcagcccacacgttgggcaagacctgaagctcacagcatgcacatgaggaaagcagcgtcgtacccat

SEQ ID NO: 839427 - DNA, 98 bp, Homo sapiens
acactttggggaatatatatgcagaagacctctggagatacattggagctgatggaggagtcactggacataaatctgttgaataatgccattcgcct

SEQ ID NO: 839428 - DNA, 99 bp, Homo sapiens
tccgctgtttcatctctatggctgtcagaggtgggcggctttgaccgagaggctgctggagctcgtgtttggacgcggagaaccttgctagtgacatgt

SEQ ID NO: 839429 - DNA, 99 bp, Homo sapiens
ctgccagcgcagccgccagcgccgggttattcagcttctcaaggctggaaaagcgaaggaagtttcctacaatgcactagcctcacacataatctcaga

SEQ ID NO: 839430 - DNA, 100 bp, Homo sapiens
gattctggcaaagcttgaacgcttaaaacaacagaatgaagacttgaggcgaatggccgaatctctccggcctgtatgtggaatcagagggaaaacgctc

SEQ ID NO: 839431 - DNA, 100 bp, Homo sapiens
tttggttcataacactagaattcaccttatgccatccatgaatcctgatgggtatgaaaagtcccaggaagggggagacattggacaggacagctctgat

SEQ ID NO: 839432 - DNA, 100 bp, Homo sapiens
ggcacatagttgatgaccagtctttcccatatcagagcatcacttttcctgagttaagcaataaaagagggagccggcatcagaaaacaacactgggagc

SEQ ID NO: 839433 - DNA, 100 bp, Homo sapiens
ctgagaatgggtggactcccggagaggattcctaccgagagtggatacaggttgctgaaaagccaggagtcaaaatgactgagcgctttgactgccacca

SEQ ID NO: 839434 - DNA, 100 bp, Homo sapiens
cagcactgcacagagagtaacatacaaatactacgttggacgcaaggctatgtttgacagcgattttaagcaaggtggctttttctcaagtatattttcc

SEQ ID NO: 839435 - DNA, 99 bp, Homo sapiens
ccgtgcgcggctgcgctttcctgtccccaagccgttctagacgcggttctttcagaatggaaagtatacataataagatgagaggtgctgggaatgaca

SEQ ID NO: 839436 - DNA, 99 bp, Homo sapiens
cgccttggtagcagcgggtgacatggaaggggcagtacaagcttacgtctctgctcttcagtacaatcctattctttccaccatggccagacgcccccg

SEQ ID NO: 839437 - DNA, 98 bp, Homo sapiens
gctgaaggagcggtttgcaaacatgaaggaagggcccctgggtagacagacacagcttgatttcagagcagacataggcgaagaaaacatggcattga

SEQ ID NO: 839438 - DNA, 100 bp, Homo sapiens
ttcatatccaggatccgatagctctctgcttattaatgaggtgtgctctgaacaagccgagacggggccgtgccgagcaatgatctcccgctggtacttt

SEQ ID NO: 839439 - DNA, 100 bp, Homo sapiens
caagcactttcactgtggcaaaaatttcgggacttgagcattgaagagtacattcgggtttacaaggatttgtaggtgaaaatgcccagccaatcctaga

SEQ ID NO: 839440 - DNA, 99 bp, Homo sapiens
ttgatgatgatggagaagggaacagtaaatttttgagagacaaggtctgttgctcagcctggacttaaactatgttgctcagcctggtctggaactcct

SEQ ID NO: 839441 - DNA, 100 bp, Homo sapiens
cagtggtgggaaattacccaattttggttttgttgtgtttgatgattctgagcctgttcagaaagtccttagcaacaggaggctgctattccaaaaagct

SEQ ID NO: 839442 - DNA, 100 bp, Homo sapiens
ctcccaaagcgctgggattacagctgccctgtgagctacaggacatggttcggaaacatttgcacagtggtcaagaggccgccagcccaggtcctgctcc

SEQ ID NO: 839443 - DNA, 98 bp, Homo sapiens
tatccatatgctgccatctcctatgaagaatggaatgaccctcctgctgtggcacaacagcaacgccatgaaagagacttggccctcttgaaactaaa

SEQ ID NO: 839444 - DNA, 100 bp, Homo sapiens
tcacttttcctgagttaagcaataaaattgtagaaggcatgaaacaaaaaatgtggagtattgaaaatattgccttcggttctggtggaggtttgctaca

SEQ ID NO: 839445 - DNA, 100 bp, Homo sapiens
cacagatgcaaacggacgggccaacgccgtggccagctccactgagagaaccccaggttctgcttggattctgctagacagacccgacaaagactgtcta

SEQ ID NO: 839446 - DNA, 98 bp, Homo sapiens
gaagacgagatccagttcctgcgaactacttacaataacagcactaggagaaaagctgaatgattactggaatgaaatgaaagtgaagaaaaatacag

SEQ ID NO: 839447 - DNA, 98 bp, Homo sapiens
actactcctttttacctttggttcacaacatcatcaaatgaaaaggcaacagatggctccctgcaaagtgaggattggacgttgaatatggagatctg

SEQ ID NO: 839448 - DNA, 100 bp, Homo sapiens
agagccttcccttgtcggagccggctcggggacgcagagactgcagctgccatcgaagaggagggaacttctaatggattggggtccatagatgacatcg

SEQ ID NO: 839449 - DNA, 101 bp, Homo sapiens
cgcggatgggatccagctgttagtcgggtaggcatagacaagttggatggcttgaggactggtactaaaaggaaacgtgactgggaggccattgccagcag

SEQ ID NO: 839450 - DNA, 98 bp, Homo sapiens
agctgccagcgcagccgccagcgccgggttttatgaatgaagctatggctacagattccccaagaagacccagtcgttgtactggtggagttgtggtt

SEQ ID NO: 839451 - DNA, 99 bp, Homo sapiens
ttgctttactggaaagacccagaatatgccaagtatctaaaacaacagcagttctgtagagagtttaaatatgaaggaatggcaggacgggctaagggc

SEQ ID NO: 839452 - DNA, 100 bp, Homo sapiens
tggaaggaaactatgtatctttaactagaatcctgaaatgttcagagcagagttccatgccattgcagtgtcaactaggcctcagttacttttcagtttg

SEQ ID NO: 839453 - DNA, 99 bp, Homo sapiens
agaagccgagttcaacatcctcctggccaccgactcctacaagtcactgcttcaaccacctgtgagaaattagaaaaagccaggaatgagttacaaaca

SEQ ID NO: 839454 - DNA, 100 bp, Homo sapiens
gtctctctttcccgtccgcgatgagaagaggggcaagcggccgtctcccctcgcacaccagacttaatgaacaagccagtgaggagattttgaaagtaga

SEQ ID NO: 839455 - DNA, 98 bp, Homo sapiens
caatattcctgctctttacaatagtaaacagcttgaagactttttcaaggcacgtgtggttctcaaatataggcattctgatgggaacttgtgtgtta

SEQ ID NO: 839456 - DNA, 100 bp, Homo sapiens
ctttgatagatgcctgcctagaagaagatgggaaactctacctgtgtgtgtcaagccccaccatcaaggacaagccaattcttgtagacactgtttgggc

SEQ ID NO: 839457 - DNA, 98 bp, Homo sapiens
ctcaggaacgtgtcccggggccgacccggcccgtagtgtggaagcagcttcagcctggcacctgtgtttgctctgtttgtaccattttactgctccat

SEQ ID NO: 839458 - DNA, 98 bp, Homo sapiens
tgcccagagctcctggaccaatgcatcttcccaccaccttaaaccactggtccactggctattctgaggtgatagttgtcgttggaggatgtgagcga

SEQ ID NO: 839459 - DNA, 100 bp, Homo sapiens
caatgatgatgtgaaaacagaagctgtggctgaattaaatcaaaggtggatgagctaaaagcagcctatgaccgggaggagtctacaaacttggaagact

SEQ ID NO: 839460 - DNA, 98 bp, Homo sapiens
cgcccgggtctggccgcctggaccaaagagaaccctgtacagtaagaaatatggtgtggacctcatcagatacactcatgcagcaaacacagttgttt

SEQ ID NO: 839461 - DNA, 100 bp, Homo sapiens
ctggacctggtcagagcgcggatggccgtaaccccgaaggaaataggccacaagaggaagctgaatgaagaggacgccgccagcgagtccagcagggagt

SEQ ID NO: 839462 - DNA, 98 bp, Homo sapiens
tagctttacgtaagcgctacagctacttgactgagcctggaatgatctaccctgacatttgcactatcagccttgtagcagtgagtgatgtgaataaa

SEQ ID NO: 839463 - DNA, 98 bp, Homo sapiens
actggagcctctcataatccagccagaagacattggacaagcaccaatagtcaatgccccagaaggtggaaaggttgacttggaagccttcagccatt

SEQ ID NO: 839464 - DNA, 100 bp, Homo sapiens
gggggatttctacgacccggagcacccgacccctgagttcagattcagaacaagaaagtggacatctctaaggtctcctccaagtgtgggtctaaggcta

SEQ ID NO: 839465 - DNA, 100 bp, Homo sapiens
acttccccattcggtgcaccaagagcaacctcacacggtgtgggctgaatgaagagctgccagatcccacaggcctcagcaactgttgccattcccaaag

SEQ ID NO: 839466 - DNA, 98 bp, Homo sapiens
aggcctgcaggatttggtttcagcatgtccttctctgaatgatgaatacttttactactgtgacaacattaacgcaacaattgtgttaaatgaactca

SEQ ID NO: 839467 - DNA, 98 bp, Homo sapiens
cagcccttcaagaaagacttgatggtctggtagaaacaccaacaggatacattgaaaggtttgaagatcagcttcagcaatggttgtctgaagactca

SEQ ID NO: 839468 - DNA, 100 bp, Homo sapiens
ctattcaagatctgaaattacttgctaataaaacaccacatacttggagtagggagaatattcagatcagtgctaacatcttccgtacacttcctccaag

SEQ ID NO: 839469 - DNA, 99 bp, Homo sapiens
cttggcaacagcagcaaattgaagactttcgacaaggaagtgaaacaccaatgcagaacattctagtatgccagtagaaaaaaatatcactttagaaag

SEQ ID NO: 839470 - DNA, 98 bp, Homo sapiens
tccatcagcttcattacgtgcacaggtacggggctgatgttgacgtcaaccaccacctgactcctgatgtccagcctcgattctcccggcggctcacc

SEQ ID NO: 839471 - DNA, 98 bp, Homo sapiens
gtcggagggcgaggaggacgagacggcggcggagtcggaggaggagccggactccagagcatctgctgcacccaagcctgagccggttcctgttcaaa

SEQ ID NO: 839472 - DNA, 98 bp, Homo sapiens
agcaggttgtccagagcgttgttcatctctacgagctcctcagcgctctgcagatgatccataattatatggaacatttagaaagaacaaaacttcat

SEQ ID NO: 839473 - DNA, 100 bp, Homo sapiens
ctggtttattttgtggctaccgctgttactgcttggagtgcctcaccgagccagaaagaagattggcccatgcacaagctggaatgttctcccatggttg

SEQ ID NO: 839474 - DNA, 118 bp, Homo sapiens
aagaccagattttgaacatgccgtggaagcttctaaactttctagtcaagggttggtgtgtgctggattggctgatatggccagacctgcagaaaaacttagcacagctcaatctgct

SEQ ID NO: 839475 - DNA, 100 bp, Homo sapiens
ccggccctcaccgccctcaccacccctatccagacggctgcccttcaagtaccaagcaagcaccagaagcaccaggcttttgaagcagagctgcatgcca

SEQ ID NO: 839476 - DNA, 98 bp, Homo sapiens
caaccatattctaccttggtgaataacagcgagtgtgttgcaaacatgaaagtcacatgacccatgaagtaacagaggatttttctcctcgggatcca

SEQ ID NO: 839477 - DNA, 100 bp, Homo sapiens
ttcatcacaaagatgcacatgtagatttcctgaaaagtgatacagatcacttggattcagtcgagtttgctttgctccgtgggaactgcaccagagctgg

SEQ ID NO: 839478 - DNA, 100 bp, Homo sapiens
tgactgataagccacccaagcttttgtatcctatggaaagtaaactgacaattcaggagacccagctgggaagctgaaaccccacgtagtgttcttgaag

SEQ ID NO: 839479 - DNA, 98 bp, Homo sapiens
cttccgtcctgcgcgcggagattaacgcaaacccggaagcggatcgggtggagtgaaggtcacgtcgccatggctgaccaactgactgaagagcagat

SEQ ID NO: 839480 - DNA, 101 bp, Homo sapiens
gcttcccaagttcatttaatgaaattttcaccagatggagaattttttgccactgctgggaagtgtaaacaggaacatcgataagtagtgtaaaaacttgc

SEQ ID NO: 839481 - DNA, 100 bp, Homo sapiens
gggcaacttcgcggtggtcaagcgggccacgcacctcgtcaccaaggccaagatgtttgagacggaggcagatgagaagagggagatggccttggaggaa

SEQ ID NO: 839482 - DNA, 100 bp, Homo sapiens
cggcatcggaatgttcgaggctataactacgatgaaggactggaaaaggacacagcaacacagagaagtgaccagacttgcctagaaccatcatgttcat

SEQ ID NO: 839483 - DNA, 100 bp, Homo sapiens
tgaacctaatccttacttctatcaggggagcctgtcacagtgtatcgtttggaagagagttcacccaacatactaaataacagcatgtcttcttggtcac

SEQ ID NO: 839484 - DNA, 51 bp, Homo sapiens
gcgttcacggcaggattcggttagcctgatcctgcctgaagatggtgccac

SEQ ID NO: 839485 - DNA, 100 bp, Homo sapiens
gaagaaacccagcttgatatgttgcttagcaaatggagtacctttgggactctggaagttatgcctcagaatgaatcggaaacacagatgttctcggtgg

SEQ ID NO: 839486 - DNA, 100 bp, Homo sapiens
cctcagagagtgaacttggaatcttggacctcatccaggatggccaggccatgttatgggatctcaacgaaggcaaacacctttacacgctagatggtgg

SEQ ID NO: 839487 - DNA, 98 bp, Homo sapiens
ctggatggaagatagcttgaacagggctgacaacatttttccttttccggtagtaaacctattgatggcaattttgctgactgtggaagtgactcatc

SEQ ID NO: 839488 - DNA, 98 bp, Homo sapiens
gtgacgaggaattgacaatggccatgtcctacgtgaaggatgacatcttccgaatctacattaaaggcctccggtgtggctgtctctgatggtgtcat

SEQ ID NO: 839489 - DNA, 100 bp, Homo sapiens
gtgccaggctgaaggatcactgaggaaggggaagtgggcaaagcagggaactctcagactttgataaagatggtgcattgacactggatgagttttgtgc

SEQ ID NO: 839490 - DNA, 100 bp, Homo sapiens
ttcaagcaattttcatgccgcagcctcctagctgggattacaggattggcctaatgaagaagttcaacctggagagatggaaaatcagctctcataacta

SEQ ID NO: 839491 - DNA, 124 bp, Homo sapiens
agcaacagcaagaagaagagcccagctagcaccttcgccctctccagccaggtacctgtttggagagaagatggcttttatccctcagaacctgtttttgttccagcaccaggaaccaatgaag

SEQ ID NO: 839492 - DNA, 99 bp, Homo sapiens
tgattacttccggtaccttgctgaagttgcgtgtggtgatgatcgaaaacgtggcccacaaactctttaacaacttgaaataaatgtgtggacttaatt

SEQ ID NO: 839493 - DNA, 98 bp, Homo sapiens
ccagtttgaagcatctttgatttattggaccaactggcaacagaaaatgaaaagtagtgtggcacagataaaagaatagccaggccagaagaaggaag

SEQ ID NO: 839494 - DNA, 74 bp, Homo sapiens
acgccttaacccaaggaagtgactcaaactgtgagaacttcagggttattttggagctgttggagcactccttg

SEQ ID NO: 839495 - DNA, 99 bp, Homo sapiens
atcaagccaacgcagaactaactgatgacgaacatgagaatgaatcgaaacatgaagaactggcaggaaactaaatatattttgccaactttggaaaaa

SEQ ID NO: 839496 - DNA, 98 bp, Homo sapiens
gcagctaggcaacagcagcagattgaaaatcagcagcagatgttggttgccaaggatggtctgcttgtccttcattatggtcttgtggtttctcctct

SEQ ID NO: 839497 - DNA, 100 bp, Homo sapiens
ctggtctgtggcgggtgtgctgcatcgaaggtaacacaagtggcaagacagccgggaacccctaccccatccccttattcagcacatgaaataaacaagg

SEQ ID NO: 839498 - DNA, 99 bp, Homo sapiens
tcacctgtacacagctgttcttcggggacagaggttacctacctgggcaaagtctccaccactggcatgcagtttttgtcaggctgcacagaaaagcca

SEQ ID NO: 839499 - DNA, 134 bp, Homo sapiens
aagaattttactgcgaagttttgctcctggatgaatccaagttaacccttaccacccagcagcagggcatcaagcctccaagtctattataaatagtatgctacgggacccttctcagattccagatggagttc

SEQ ID NO: 839500 - DNA, 100 bp, Homo sapiens
gtttcatgaactcagctattcaggggctatctgatgggttagagtgcctttgagaagaaatcagtggatactggatttgctcctgtcaatgaagttttaa

SEQ ID NO: 839501 - DNA, 100 bp, Homo sapiens
gctgcctccactggcccaggcatggaacccgagaccacagccaccactattctagcatccgtgaaggagcagccactgaagatcctggtgtcgccatggg

SEQ ID NO: 839502 - DNA, 51 bp, Homo sapiens
gaactggcccggaaacaggaggactgtcaggggaagctgatggagaatcga

SEQ ID NO: 839503 - DNA, 100 bp, Homo sapiens
ggctaccatgtccgcccaggcgcagatgcgggccctgctggaccagctcatgggcacggctcgggacgagcctggaaacctggccggcgtcaggcacatc

SEQ ID NO: 839504 - DNA, 100 bp, Homo sapiens
gcattctccagggaaaggatgacatatttttggacctgaaacagaaattctggaacacctatatgctactgtttcagctcattattgactacttagctga

SEQ ID NO: 839505 - DNA, 100 bp, Homo sapiens
aaattttgacaccaataattttcaaggaagaaaatcttaggcctgctgatcttaagaagagaatagaatctttaattgaccgggactacatggaaagaga

SEQ ID NO: 839506 - DNA, 98 bp, Homo sapiens
gtagggactccaaaccccagtactcctctgcccaacactgtacctcagttcattgccagagagccatacttcagctacgggacggacgagtacgacgg

SEQ ID NO: 839507 - DNA, 98 bp, Homo sapiens
aacttcttcagaattagaaaggagctgcttcccaataaggaaacattccttgagaatatgtatatcgggaaggaatgtaaacgtgcatgtaataagac

SEQ ID NO: 839508 - DNA, 98 bp, Homo sapiens
taattttagggtcctttatatagaagggagaccgagttcctgttctgggcttcgctgtgcatgacccatctcagcaggatggccgaggacctcatcct

SEQ ID NO: 839509 - DNA, 100 bp, Homo sapiens
cgtaagtgcgggcagagcactgcgccgtttgggaacgcaactttgaggagacagtgcgagtctccctctgttgcccaggctgaaatgcagcagtgcagtc

SEQ ID NO: 839510 - DNA, 100 bp, Homo sapiens
ccacaatagggtatcatttttacgggccttctggagatgcttccgaactgtgggcaaaaatggcggctaccaagcagtttctcgaagagattaacaagtg

SEQ ID NO: 839511 - DNA, 100 bp, Homo sapiens
gtgcctccgacgcctcctgatggtgtttgagaagtcccccctgcgggtgaagaacttcgggatctggctgcgctatgactcccggagcggcacccacaac

SEQ ID NO: 839512 - DNA, 99 bp, Homo sapiens
cactcaccaactacctgcagccgcagctggactggcaggcccgagggcgaggacacattcagctaacgtattttagcaggtggagtgaggttgaagatt

SEQ ID NO: 839513 - DNA, 100 bp, Homo sapiens
agctagaagataattccaatcatcttacaaaactggaaactgaggcatctaatatgaagggctcaaaatctccttcgccaagaccaaacatgcctgttcg

SEQ ID NO: 839514 - DNA, 100 bp, Homo sapiens
acagacgtaaacgtgttcaataccatccttaccaccagaagctatccacaacttcgcagagggaaatatcggctcatcaaattggggtctcaatttgcta

SEQ ID NO: 839515 - DNA, 100 bp, Homo sapiens
caatgaccatggcaagaactggcgtcacgtttacaaggttcttgggtgtctctggggagtccctgggccagaccttcctccagactccagcccacctctt

SEQ ID NO: 839516 - DNA, 100 bp, Homo sapiens
gcaagaccgaattcagaaggatatcgacgtcgtgatccagaagtccagagctgaggactgcctgtttgcaggcatgtcagagcgggagcgacaggtgatg

SEQ ID NO: 839517 - DNA, 98 bp, Homo sapiens
tttttctgttttgcctgaatacatgatttaaacaagagatttccacagaaggcatgccatttatcagcagaataaagaacacttccaggatgagtgta

SEQ ID NO: 839518 - DNA, 100 bp, Homo sapiens
cccagacaggtggcgaaggcagaggagaactatactgaagagtctgcttctgaggacagtgaagatgatgagagtgatgaagaggaggaggaggaagaag

SEQ ID NO: 839519 - DNA, 99 bp, Homo sapiens
gatgtcacagtctacctgtttgaccagctcaaggatctaaatttacttgatcgctgtataaaagaaacattaagacttagacctcctataatgatcatg

SEQ ID NO: 839520 - DNA, 98 bp, Homo sapiens
caaatgcagaggaagaatttttctatgagattggtacacagaacagcttggagcttcttgaggatccaaaagctgaagtggtcgatgaaattgctgcc

SEQ ID NO: 839521 - DNA, 100 bp, Homo sapiens
aaagagccaaaatgagttccagtgaagttggtccttttgtctccaaaataagagcagtgattaacgatattgtttggaaattttagcattcaggtgccag

SEQ ID NO: 839522 - DNA, 100 bp, Homo sapiens
tcccccggagcctggctcccggctcgggccgcaccgccagggactggggtgagcggcccagtttgctggaacattatcagatggcttagggaagacgatg

SEQ ID NO: 839523 - DNA, 99 bp, Homo sapiens
cttctgcctagcgataccaagaggtctcaggcttccactgcagccatgtcactcctcttgctggtggtctcagcccttcacatcctcattcttatactg

SEQ ID NO: 839524 - DNA, 100 bp, Homo sapiens
gcggaccttctggaactcatgccactctcagagattgtcactgctgttccaagggcacacgcagagggatttggaattcctggagagttgcctttgtgag

SEQ ID NO: 839525 - DNA, 98 bp, Homo sapiens
tagaaagaaaaaagaatctctagctgaccagtttgacttcaagatgtatattgcctttgtattcaaggagaagatggagcagctatcagatgaagaaa

SEQ ID NO: 839526 - DNA, 98 bp, Homo sapiens
agctcaaggaaacctttccaacacagatgtccaagctgccaagtgagtggtgtcattgagcaaacacgaagtcgggctcatccaaggatgagattttg

SEQ ID NO: 839527 - DNA, 100 bp, Homo sapiens
ctgaaaggatgtgcaaccctccaagtggaagcaacaccaacattgcttagaagatttggatctcagcttatcaagtcaactgttttgtcagccactactt

SEQ ID NO: 839528 - DNA, 99 bp, Homo sapiens
gtggagatcgcaggtcgctcaggctattgcattacctcctatagccaaatggccataccagaatggttttacatttcatacatggcttagaatggatcc

SEQ ID NO: 839529 - DNA, 100 bp, Homo sapiens
atccacgccagccgcaccatgccgctcctaagcctgcacagccgcggcggcagcagcagtgagagacctttggggggcctgtcttgcttgttctgaaccc

SEQ ID NO: 839530 - DNA, 100 bp, Homo sapiens
gaacatcgacatcgccagcatcgacatggtttccgaagtcaacatgaaaccaaagcccaaaccccggccatccatcacaaaggcaacctgggagagtaac

SEQ ID NO: 839531 - DNA, 98 bp, Homo sapiens
tttcaagtctaactatgcagacctagttttctgaatttccagatcccatgtggggttcagattatgtgcagttgtcaaggacaccaccttcatctgag

SEQ ID NO: 839532 - DNA, 99 bp, Homo sapiens
tcctagtgctagcagcttagatgccatttctcctgttcagtccaaaagaaactcttccttcaaaacctgtgaagaaagagaaggaacagaggacacgtc

SEQ ID NO: 839533 - DNA, 100 bp, Homo sapiens
tgggatttgcctcctttgactccacaaaaggtggatgtgaacactgaccggaagatcagtgccaaggagatgcagcgctggatcatggagaagacggccg

SEQ ID NO: 839534 - DNA, 98 bp, Homo sapiens
ctcaataaatctgaaataagtcaagtgtttgagattgcacttaaacggaacttgcctgtgaatttcgagaaagccatcactgcccaggtagaagagaa

SEQ ID NO: 839535 - DNA, 98 bp, Homo sapiens
gtgtctaattctgctaacctgaaagtaatgcccaagagtgcatctccctcgccccctgagagtctcgtggaggaggagcgaccgagtggccctggtgg

SEQ ID NO: 839536 - DNA, 100 bp, Homo sapiens
cctttccagcatgcaggggctgctcagggaagtcgagacaacatgagtgtgattttgatctgttttccaaatgcacccaaagtatcgccagaagcagtga

SEQ ID NO: 839537 - DNA, 100 bp, Homo sapiens
gactagccactttgcattgactggaaacaatggcatttacagaaagagtcaacagcagtggcaacaggtggctacagtttcagaaaagtcacgtataatg

SEQ ID NO: 839538 - DNA, 100 bp, Homo sapiens
atcagaaaaaatagaggatgctttattatgggaatgcccagtgggccatgatccaaaggaaccagagcagttgagaaaactgtttattggtggtctgagc

SEQ ID NO: 839539 - DNA, 100 bp, Homo sapiens
acatatagtaaatcaccagatgatgctgtgttccaacaaatagcactttcttattccaaggttcaaaccttgtactactcagctgatcacaagctgcttg

SEQ ID NO: 839540 - DNA, 100 bp, Homo sapiens
agcggccagagttgttcatccagggagacagcgtcctcccgtcctcacggaagtcatctgtagctttgcccaggaggccacgcactgtgtaatccttcaa

SEQ ID NO: 839541 - DNA, 98 bp, Homo sapiens
ccaatttaagttttgaagatgaacaccaagatgaaagcagcagttttcatcatctaagtgaaaggtattgcaggcaatgggatatccaacaggctttg

SEQ ID NO: 839542 - DNA, 104 bp, Homo sapiens
cgaagagcagcattggaaactctgtttacgttattatcaacacaggaccagaaactgttggacttaatagaagacttgaaaaaaaaactgataaatgaaaaaaa

SEQ ID NO: 839543 - DNA, 100 bp, Homo sapiens
ctggtcttgtggaactgaacttagctcgacggggctgaccgctctggcccagggtgagtgcctggtgaagaatgtgatgggatcactagcatgtctgcgg

SEQ ID NO: 839544 - DNA, 98 bp, Homo sapiens
gaatggcaagtggacaggcaacagtggtcaggtgacttcatggtcatgacgattttcttcaatgtgagcaggcggtttggctatgttgcctttcaaaa

SEQ ID NO: 839545 - DNA, 100 bp, Homo sapiens
tgagaatttatcctcaagagtcagctggcagtggagtgctggttccaggaggatttggtgttcgaggaacagaaggaaaaatccaagcaattgcctgggc

SEQ ID NO: 839546 - DNA, 100 bp, Homo sapiens
gacctttcaagttcagtggctccaatatggccgcgtggaaagtgtcaaaattcttcccaagaggggatctgaaggaggagtggctgcctttgtggatttt

SEQ ID NO: 839547 - DNA, 98 bp, Homo sapiens
ggcctgagaggcgggtcctggtggatgatggatggatattagcatactgccatgttcggagtttcataatagaagagcagagtttcttactatgtgaa

SEQ ID NO: 839548 - DNA, 99 bp, Homo sapiens
aggaggcggctataataatagcaaacatcgatggcctactggggataacattcatgcagaacatcagatgtccggtctgtgctacgacagcaaaatgtt

SEQ ID NO: 839549 - DNA, 100 bp, Homo sapiens
cctcacgcagctccacagacagccccagctcggtgttcctcagttaagtgggcagaccaacatccacctcagcaaaaacttcttcctgacgaatcgcgcc

SEQ ID NO: 839550 - DNA, 98 bp, Homo sapiens
gtgacaggaggaggaagaagaagcggaggggccgggccactgactccttgccaggaaagtttgaaggacttgtcttacaaggaccggcactggcatga

SEQ ID NO: 839551 - DNA, 134 bp, Homo sapiens
acatcgaccggcgacagcagccaggagtcatgagcgacagcggcgagcagaactacggcgagcggagtactattaatcccgtagatgcaatatatcaacctagtcctttggaacctgtgatcagcacaatgcct

SEQ ID NO: 839552 - DNA, 135 bp, Homo sapiens
gaaatgtcttctgaagctgacatggagtgtctgaatcagagaccaccagaaaacccagacactgatggcaccattcccaaactcacagctaaatccaactgccgctatgaaattgagtggattactgagtatgcc

SEQ ID NO: 839553 - DNA, 100 bp, Homo sapiens
gtattcatagtggaaaaagtgatgtaaccttctgtaatggaagatgattgaagacaaggggcctcgtgttgctgactactttgttgtagcaggattaact

SEQ ID NO: 839554 - DNA, 100 bp, Homo sapiens
atttaatccagaagtatttcaaccacagatggcactgccaacagctctgggttcccttcattatcctgtggaagtagcggtagcagttcatccaacacgg

SEQ ID NO: 839555 - DNA, 100 bp, Homo sapiens
ttggggtttccggctgcagggcggtaaggatttcaacatgcctctgacaatctctagtgtgcctgagatcatcagctccatccgtcaggcggggaagatc

SEQ ID NO: 839556 - DNA, 100 bp, Homo sapiens
tctggcagattgaggaacaaagataagggagaacaagcagaaactggtcagaggtttgtcaagggctatttaatgagttactagaaaatgggatttctgt

SEQ ID NO: 839557 - DNA, 98 bp, Homo sapiens
ggcagtggaaaatgcgctcgggctggaccagcaggcctaaaggggagtggccccagtggcggtagcggcggtggtgccaatggtacctctttcagcta

SEQ ID NO: 839558 - DNA, 98 bp, Homo sapiens
tcatcgatggcaccccctgtgaccagaacggcacggccatctgtgtgtctgggcagtgcaaggaagaaaaaatgctgggcatcttggtgcagcacaaa

SEQ ID NO: 839559 - DNA, 98 bp, Homo sapiens
tctgcaggggggcaaggacttcaacatgcccctcactatctcccgggtgctactcgtgagcagtagtcgccatccagacagatggattgtccctggag

SEQ ID NO: 839560 - DNA, 99 bp, Homo sapiens
gcgactccctatgttactgacgagaccggcgacacgatgaggcgagtggtacgacagagcaagtttcggcatgtatttgggcaagcggtgaaaaatgac

SEQ ID NO: 839561 - DNA, 100 bp, Homo sapiens
tcagcacaaaccacagttgtaactagccagttttttgctccactcaagcctgttagaatcaccatggaatacagctccagtgggaaggccactggagaag

SEQ ID NO: 839562 - DNA, 98 bp, Homo sapiens
gcagcgacccgaccccacccgacaggccagaggtagaatcactgtggactgagacccacctttctagacctgaagcccaggaggaggaagaggaggct

SEQ ID NO: 839563 - DNA, 100 bp, Homo sapiens
accatatgaaggcggagtatggaaagttagagtggacctacctgataaataccctttcaaatctccatctataggtatattgaagcaagtcaaagattac

SEQ ID NO: 839564 - DNA, 100 bp, Homo sapiens
cggccagagcgccggcaagagctcggtgctcgagaacttcgtgggcagttgcagaggaaagtggtcgcttatggtcagaggagcagcctgctcaccctct

SEQ ID NO: 839565 - DNA, 100 bp, Homo sapiens
caaaggtaaagacactcaaggacagacatttttggcagaggtttgttcggacagtgttaccattttctcaggaatttcaaagagataagcagcctaatgc

SEQ ID NO: 839566 - DNA, 100 bp, Homo sapiens
agccaagatcttggcaaagcttctccctcagtatttagaccagagcaggttatctctggaggaccagaatgaagtgtcgctgctcacggctctgacggag

SEQ ID NO: 839567 - DNA, 100 bp, Homo sapiens
ccgtgatgtgacgctggagaacctggcacttatgtcctccctggatatggctcgtggacagcagaaaattcagtctcagcagaaaaatgccaaaaagcaa

SEQ ID NO: 839568 - DNA, 98 bp, Homo sapiens
ctgcgcggctttttgagcggtcccgcatcaaggctctggcagctgacatagcccagagatacaggataagcaaatacccaaccctcaaattgtttcgt

SEQ ID NO: 839569 - DNA, 98 bp, Homo sapiens
gccgttggtgatctggcatgggatggatgtgttcagagcaacattgttttgttgacacaagcatttagaagaaagtttgtgattcctgactttatgtc

SEQ ID NO: 839570 - DNA, 100 bp, Homo sapiens
catttcccccagtacattcagaaaacatggtttggctcatgatgaaatgaaaagtccccgggaacctggctacaagataagttttttcagtcagccatga

SEQ ID NO: 839571 - DNA, 98 bp, Homo sapiens
aactatagcaacttggtatcactaggtatcattgcccagtgcctaagatcttttatgttcagctcactgtaggaaataatgaattttttggggaagga

SEQ ID NO: 839572 - DNA, 98 bp, Homo sapiens
ctggataagaacccagaaacccgacccagtgccgcgcagctgctggagaacacttcagttatggaagatcaaaatgaagatgagtccccaaagaaaaa

SEQ ID NO: 839573 - DNA, 100 bp, Homo sapiens
gacatgaatatggagtagttttctctagcaaaggtgatgttctgcaccctgaacacccacaaagtggacatggacaagctcctggggggccagatcgggc

SEQ ID NO: 839574 - DNA, 98 bp, Homo sapiens
cccagagggagccctgaatatacacgagaaagcctggaatgcttacccctactgcagaaccggggtgagcccctccagactccgaataggagatcaag

SEQ ID NO: 839575 - DNA, 101 bp, Homo sapiens
ggagggggcgcagaggtcaggggcgctgggggcgccacaccaggtctcggcgcggaagatggccggcggcgtggacggccccatcgggatcccgttccccg

SEQ ID NO: 839576 - DNA, 100 bp, Homo sapiens
taatcggttagacttctcaagtgcaattcaagatatccgaaggttcaattatgtggtcaaaaacccttaggagaaatcttgagagtggacagcaattgtg

SEQ ID NO: 839577 - DNA, 98 bp, Homo sapiens
ttaaaacctctagacaaagtaaccaaatctccagccagcatccgtgtcattctggaccttactcccaactaccggggtgagaactcgtggttctccac

SEQ ID NO: 839578 - DNA, 133 bp, Homo sapiens
cttggccatgtcaccaaaacaaggagaaggtgcaagactgtccgtgtggaccctgactcacagggctccaacaaaagaatcctctgaagaggagtatgactctggagttgaagaagaaggatggccccgccaa

SEQ ID NO: 839579 - DNA, 98 bp, Homo sapiens
acgtgctcagcgacccgcgcaagcgcgagatcttcgaccgctacggggaggaaggttacttcctcagaatgttggcctcctgtatgttggaggttatg

SEQ ID NO: 839580 - DNA, 100 bp, Homo sapiens
ggaaaagcttaataggcaatgggcagtcaccagcattgcctcgaccacactcacctctctctgctcatgcagctcttgaaagaggcctaaccaaggctct

SEQ ID NO: 839581 - DNA, 100 bp, Homo sapiens
gttcagtctagaggagggttcgtccttctggaaccaagggctcacgtggaaagtggtgtgatccctcacatccacaaatctctgattggaaagaagggac

SEQ ID NO: 839582 - DNA, 100 bp, Homo sapiens
cccgttcgctggactgcaaaccgagctcccgtctgccttgcaggagatctattgggaaactgattataaccactcgggcaccatcgatgcccacgagatg

SEQ ID NO: 839583 - DNA, 100 bp, Homo sapiens
ctctttcgctctttggactaatgggagttgcttttggaatgaatttggaatcttcccttgaagaggtcatgaagaaggatatttcacagctataatgttg

SEQ ID NO: 839584 - DNA, 100 bp, Homo sapiens
ccttccagtattatcagttacacaaggttatgttgtgtggcatgcaggaggttgacttggcagattggcagagaaatactgtttatcgacattatacaag

SEQ ID NO: 839585 - DNA, 133 bp, Homo sapiens
cgaaatccccggacggtgggtctgcatcgagaccccgagctctggagctggaaaaacccggatcaccggcgtaatcaacccagcgttggacaaatactttccgtcagactctggagtgagaatcatagctgag

SEQ ID NO: 839586 - DNA, 98 bp, Homo sapiens
ttttggcgatgatagactactaatagaaaaatttattgataatcctcgtcatatagaaatccaggttccagagagattcctggaagttgctcagatca

SEQ ID NO: 839587 - DNA, 99 bp, Homo sapiens
ccagggcttcctggcccgaaaggagagcctaaccttctgaggaaaggaggccatacagaaattgaacctcagcacttctgtcaagctttccacagagag

SEQ ID NO: 839588 - DNA, 100 bp, Homo sapiens
gaagaaatcaattgcaaaggtacttctttagaaaatctcatcatggaaatcacagcacctgattcccaaggcaagacagagatcctgagtcatgtgttcc

SEQ ID NO: 839589 - DNA, 98 bp, Homo sapiens
ggctgcaacaaagaaacaaaaatatgaaaagattagtgaaaagaagatgtccacgcctgttgaagttttatgtaagaatttgcaccatcctgggattg

SEQ ID NO: 839590 - DNA, 100 bp, Homo sapiens
tcagctactgggacaccggggtcctgctgtgcgcgctgctcagctgtctgcttctcacagctggtggcagcgatcgtgtttatcagttttggcgtggtgg

SEQ ID NO: 839591 - DNA, 98 bp, Homo sapiens
ttttcaactgacttttacttttgacgaccaccatgactgagatcactgctgaagcaccaccatctccaccctgtgatatcacctgtcttgaaagtttt

SEQ ID NO: 839592 - DNA, 118 bp, Homo sapiens
ggggctgtagccgtctctgctgccccaggctctgcagcccctgctgctggttctgcccctgctgcagccatcgacgagtacaagccccaggatgctaccaccaacccgtccctgatcc

SEQ ID NO: 839593 - DNA, 101 bp, Homo sapiens
gagaacctgtaataaaagcatgtattgaaaatggagccagttgtatcgacatcagtggagaacctcagtctctgctggatgaaccgaatcctaacagtcca

SEQ ID NO: 839594 - DNA, 99 bp, Homo sapiens
tggctgtgggtattgctgcggctggtgcgtcgtcgctctagttgctctaggtcgtaaccagcctttgaaaaaggagaaaccaaaatggaaaagcgatta

SEQ ID NO: 839595 - DNA, 100 bp, Homo sapiens
actgagcatgcagacctgcagggaagaactgcacttcacgatgccggaaagtattacttttacgacaactactttgacctgccaggagctcttctgtgtg

SEQ ID NO: 839596 - DNA, 100 bp, Homo sapiens
caatcaacatcaaagtgaagctggatttctcctgccaggagaatctcctgcaggatctcagtgatggtggtataagttgaaatccaaaccaggaaagaag

SEQ ID NO: 839597 - DNA, 100 bp, Homo sapiens
ccggtgaatctgggcttatgggatacagctggacaagaagattatgacagattacgccccctatcctatccgcaaacagacttgtcttacaaggaccggc

SEQ ID NO: 839598 - DNA, 100 bp, Homo sapiens
ggactctatacagggacgtgatgctggagaattataggaacctggtctccctgggtgtcagttgtacccgaggcgttctcagcagcagcaagtacctgtg

SEQ ID NO: 839599 - DNA, 100 bp, Homo sapiens
ccggaacggcggcgacaagggtgttcccgaactagagtgggcattatccaattggtttgctatttgatcttcttgcatcaagttcagctcttccttggaa

SEQ ID NO: 839600 - DNA, 99 bp, Homo sapiens
gataccgaagcgggctgtgtgccccttctccacccagagattgcaagactggaggaagataaagaagaactacgtaaccagctgcttaatgttgatctc

SEQ ID NO: 839601 - DNA, 100 bp, Homo sapiens
tgaacaaagtctgctcaaatctcctgctgtgaaccagcagaatttttgaacagggtccaaattccaagcctgtagtgtccttcattgctggtttaactgc

SEQ ID NO: 839602 - DNA, 99 bp, Homo sapiens
caggactggactaattccaagcaactatgttctttattggtgaaaacatgaatccagatggcatggttgctctattggactaccgtgaggatggtgtga

SEQ ID NO: 839603 - DNA, 98 bp, Homo sapiens
gaaagcctacaaaagtgtggagaggttccttcaggaggatcagcatcaacaacagcaacttgtgattggcggtgaccggatattcagttgcacatccc

SEQ ID NO: 839604 - DNA, 98 bp, Homo sapiens
atgattctccagaatttctcctcataaaaaagctgtcaaagctcgaaaaacagcagcagaggaaagaaaagaccagagctaagggaccttctgaatca

SEQ ID NO: 839605 - DNA, 98 bp, Homo sapiens
tgcctgggcagagactactaagcggaaaacatcttcagatggtgagtgttgtgcaagattctgtcaacatttctggccagaataccatgaacatggta

SEQ ID NO: 839606 - DNA, 98 bp, Homo sapiens
cgccttccagctccggctcccgctgcctgcaccatgtccgccagagatgacagtcgaactgcaagccagttggatgaatttcaggaatgcttgtccaa

SEQ ID NO: 839607 - DNA, 100 bp, Homo sapiens
ccaacatcacgcccttcggcgccgaccagccgttggacataccagatggtcgaagagctccacttcctgctcattaccggagcagtagtactcgcagcat

SEQ ID NO: 839608 - DNA, 100 bp, Homo sapiens
ttctctcaaagagtccaccgcaaagcagactggcatgaaatatagtgcttcggctcctgaaggagggggcagacccccacaccctcgtctcctcgggagg

SEQ ID NO: 839609 - DNA, 100 bp, Homo sapiens
ttggagataaaattctcggagatctgagctacagaagtgcagcatcagaagagctaacaattgctggaatgacctttacaacttttgatcttggtgggca

SEQ ID NO: 839610 - DNA, 100 bp, Homo sapiens
atacttcacactatggagagggaagcagatgattgcagatggacagagagagcttattgagtcatacagtgtcaaaaagagacactttattggaaataca

SEQ ID NO: 839611 - DNA, 117 bp, Homo sapiens
gggcaacaacctcaccgtgcaccttcgcaagaagcaccagttcaagtggccctcagggcatccccgttttcggacagtcattttgtttactcattcagccctgttgcaggtcccaat

SEQ ID NO: 839612 - DNA, 99 bp, Homo sapiens
gactctatacagggacgtgatgctggagaattataggaacctggtctccctgggagctagggaaatacggagtacttttctacaatgcctgcttcatga

SEQ ID NO: 839613 - DNA, 100 bp, Homo sapiens
ggagcggcccaagacttgtggagatcacccaatcaggtatgtgaaacaagaagttctgggtcctttcatcataagggagaagcttcagaaagttccgagg

SEQ ID NO: 839614 - DNA, 98 bp, Homo sapiens
ctcaaagaccacggtacagccttcaccatcatgcactacgcaggaaggattgttcagttcaagggaatgaagaattcagaataattttggtaaatgga

SEQ ID NO: 839615 - DNA, 100 bp, Homo sapiens
caaccgcccattcagtctacggctggggccgtcccagttcgcaatgagaaagattgagaggatccagaatccagatctctggaatagctaccaggcaaag

SEQ ID NO: 839616 - DNA, 100 bp, Homo sapiens
aataaatcaacaagctcagcttcaggagtttggtcaaagcaaccgaaaaggagagtttcctgactggtgaattttcagctcgtttccttttgaagctgcc

SEQ ID NO: 839617 - DNA, 100 bp, Homo sapiens
gaaaagcagaaagccgcctcttggtttgcgtcctgcactgaaaggaaatgacggattttaggtaagaagtatggagagacagctaatgagtgtggagaag

SEQ ID NO: 839618 - DNA, 100 bp, Homo sapiens
atatcctctgtggagaacacccccccatggaggcgaggtagagttggggtcgcaggcctggcaaaaagcacgaagtgatgggtgggagcgagccttttgt

SEQ ID NO: 839619 - DNA, 136 bp, Homo sapiens
ctctagcacatccttcagcgatgctgaccggtggaaaccagagcagtacctcgtgtatactacgctatcttttgatgtggacaatggcacatctgcgggacggagtcccttggatcccatgaccagcccaggatcc

SEQ ID NO: 839620 - DNA, 100 bp, Homo sapiens
gaagctgagttacccagactggggaagcggatgctatcaggccgtggtggtgactgatggggagcgcatcctgggcctgggagacctgggctgctacggc

SEQ ID NO: 839621 - DNA, 100 bp, Homo sapiens
aaatctatagataacaaggcactttatgatactttttctgcttttggaaacatactgtcctgcaagagtctccaaaaagcctagggaaatgaaaggaaag

SEQ ID NO: 839622 - DNA, 98 bp, Homo sapiens
ggatgttgagcactacagacctcacagtgccaaatggagctggaagcagtccagtggctgttgaaaatggacagatagatgtgttaaggctgttgctt

SEQ ID NO: 839623 - DNA, 99 bp, Homo sapiens
tcctcgctcgtcaccagcaagcttgcggggaccttaaaggctttgatccaggagagaaatactttcataacacatcatggggtgatgtttctctctggg

SEQ ID NO: 839624 - DNA, 100 bp, Homo sapiens
ccatgtcaagaaggcctgagatctcccaccatcagctacagccaatttgtcagtcacgaataactcaagtcacctgtactggaaatcagtttgctgaaat

SEQ ID NO: 839625 - DNA, 99 bp, Homo sapiens
ttccgaggatgtaccgtgtggctaacagtcacccacaaaagctgtatataatgccagacattggaatcatccagattcagaagaactgcctgggccacc

SEQ ID NO: 839626 - DNA, 100 bp, Homo sapiens
acgtggacccccacaatggggctgacgatgtttgtacccttccgggactacgtggaccgcacaggcaaccacgtgctgagcatggcccgcctggcccgag

SEQ ID NO: 839627 - DNA, 99 bp, Homo sapiens
agagattcatatgagagttatggttgcaataaattgacagaccagaccctgatctacctacggcgcattgccaacgtcaccttgatcgaccttcgagga

SEQ ID NO: 839628 - DNA, 100 bp, Homo sapiens
cggacagcgggctggagcctgacgagctggcgggaggagacatcacagctttcccagatcgggaggaaaaatatggaatgtgttttaccgctgactgaac

SEQ ID NO: 839629 - DNA, 98 bp, Homo sapiens
acgatctcatactggcagtgttggaaatacaagatcatcatctgtttctagagatgctttcaattcagctgaaagatggggaaattgaggcagagaag

SEQ ID NO: 839630 - DNA, 98 bp, Homo sapiens
ccagtccgttgctttactttttgcttcaccgacatagtcattatgccgaagagaaagggaaagtgtggagagcctgattcaaaagcattcctatgcac

SEQ ID NO: 839631 - DNA, 120 bp, Homo sapiens
ggaaagtcaggctaaaagtgtctgctgctgctgccgccccccactccgcctccgggagagactatttggagttttcctcgtcttactggatgtcactctcgtccttgccgacctaatttt

SEQ ID NO: 839632 - DNA, 98 bp, Homo sapiens
gattatatttctagggacaaacctatcacatttactcagctggaggaaagcaggaatgttcagaggcaaatgaagattctgcagaataagcaagctca

SEQ ID NO: 839633 - DNA, 100 bp, Homo sapiens
ccgagttgtaactatccataagcaagatggtaaaaatctggttattcagcttctcaaggctggaaaagcgaaggaagtttcctacaatgcactagcctca

SEQ ID NO: 839634 - DNA, 100 bp, Homo sapiens
gaacagtttttgctgaactacctcaaagagaaggatgtggcagatggaaatgtctcggattttgataatgaagaagcatcaagatggtgctcatgtggac

SEQ ID NO: 839635 - DNA, 98 bp, Homo sapiens
gaggaggccgtccagcagatggcggatgccctgcagtacctgcagaaggtctctggagacatcttcagcaggtttctgggactcctcgctgaatcctc

SEQ ID NO: 839636 - DNA, 100 bp, Homo sapiens
gtaactacaatggatgctgagctggaatttgccattcagcccaatacaactggcaaacaactttttgaccaggattaaagcaaggagagccaatcatgac

SEQ ID NO: 839637 - DNA, 100 bp, Homo sapiens
ccaaaagaccacgggctcctgtgctagtaccaggcgaggattaaatccaccacacagggtgaaatctatctccatgacaacattcacacaacaggaaatt

SEQ ID NO: 839638 - DNA, 99 bp, Homo sapiens
tgtcatgaatcttgacaaattgagatttgctgatggaagcataagaacatgagaactgcgactcagcatgcagaagctctgatccagtatatacggcct

SEQ ID NO: 839639 - DNA, 100 bp, Homo sapiens
cggggtgcgccggcagaggatccagtgttcaccatcctggccccggaaggatgctccaggatgaaacgccataggcctgtcagcagcagtgacagttcag

SEQ ID NO: 839640 - DNA, 99 bp, Homo sapiens
tctgccaccctcccatccgtccgcgggtccgtggagctggagcagatcccccagccggctgagacaggtcatgctaaatgtgtagaagttgtaaaaact

SEQ ID NO: 839641 - DNA, 100 bp, Homo sapiens
ggcaatacattaaaaactactcatgtggttttgattcccaccatggccatcacccagtttcggttatttaaattttgtacctgcctagcaacagtattct

SEQ ID NO: 839642 - DNA, 111 bp, Homo sapiens
acctccatagcccccagcaaaggcctcagcaatgagccagggcaaaacagctgcttcctcaacagtgccctgcagacagcgtttgtttgaaaatttgcgcatgttacctca

SEQ ID NO: 839643 - DNA, 100 bp, Homo sapiens
gttttggggccattggtgggggcggtggaccagggcaccagttcgacgcgctttttgcagggagaaggttttaaggtgaaaacgaagaaagaaatccggc

SEQ ID NO: 839644 - DNA, 100 bp, Homo sapiens
ctttttcttcaatgggcagcatatgaaagtggattatgggtggtgtcccagcgaatcagtaccgtggatctctcgtgttacagcctcgaggaggttcctg

SEQ ID NO: 839645 - DNA, 100 bp, Homo sapiens
cctggcactccttgttccagccgcccactgccgtggagctcttccaccaaagccacctaagccaatgacttcagcagttccaaatggaatgaaggacagt

SEQ ID NO: 839646 - DNA, 99 bp, Homo sapiens
agggagtcgccgctggagaggggctcggcgcccggcggggactgcagagatgccctgtatccaagcccaatatgggacaccagcaccgagtccgggacc

SEQ ID NO: 839647 - DNA, 100 bp, Homo sapiens
cgagagcgggagaaggagaaggagaaggagcgggagcgggagcgagagcgggagcgcgaggcagagcgggcggctggagagccctccggctggtcagaag

SEQ ID NO: 839648 - DNA, 98 bp, Homo sapiens
aaggaggaggaataatatttatggagcatatattatggaacacaaaacctttcaacgaagtctaaaaataggaagcttccagaaccaccagacaatga

SEQ ID NO: 839649 - DNA, 100 bp, Homo sapiens
tttcctcagcaagctgtggacgcttgtggaggaaacccacactaacgagttcatcacctggagccaggatgaagtcattgctgtttccgaaaaggtgatt

SEQ ID NO: 839650 - DNA, 98 bp, Homo sapiens
gaccaaagccattgcttttgaagttattaaagtctgttggtgcacaaaaagacacttatactatgaaagagatgcctgaggaagtgcaccatggagag

SEQ ID NO: 839651 - DNA, 100 bp, Homo sapiens
cgccatgcagccctccagccttctgccgctcgccctctgcctgctggctgcacccgcctccgcgctcgtcagtatcaagtggggcagctgtattctgtgg

SEQ ID NO: 839652 - DNA, 98 bp, Homo sapiens
agagagtgaggatgaggagagctatgacacagagtcagagttcacggagttcacagaggacgaggttacaggaattaactgtttgttcagaagacaat

SEQ ID NO: 839653 - DNA, 99 bp, Homo sapiens
gtgtttcacaagtagcaaatgagatgaaccatcttcctgcacacagccaaagtctgcaaagatcagaaaagcaatgttgacttcaaagttatccaaaga

SEQ ID NO: 839654 - DNA, 100 bp, Homo sapiens
gcagatggacagaagaggcctactcaaatcctttctgaggaataagaggctgatggaacctgcaggtaagggaagagctttgacttggacagagaagtgg

SEQ ID NO: 839655 - DNA, 100 bp, Homo sapiens
tctcttactaccactcacccgcagactccttctccagcatgggctcgcctgtcaacgcgcagcagaagatggctgtgccacccacgtatgccgatcttgg

SEQ ID NO: 839656 - DNA, 98 bp, Homo sapiens
agaggtcaaattcaattaaaaggaatcctaatgcaccggttgtcagacgaggttggctttataaacagatcctcccactatcacagaatccaagagca

SEQ ID NO: 839657 - DNA, 98 bp, Homo sapiens
tttcttcaaaatgttgaaccggtccctctccacgttcatgaacgccttcacaggcagcaagagcaactcaccaccagccttgggcccagaagcatgcc

SEQ ID NO: 839658 - DNA, 98 bp, Homo sapiens
gatatggatatgccttgttgccatgggatacctgttcatgtgttttggaggcaccgtctctccctgggaccaggttccctctcccagcctgtgctgac

SEQ ID NO: 839659 - DNA, 100 bp, Homo sapiens
ttagctccgtcactgactccaagttcatcccctctgtctttcagtttggaattaaacaaccaccatgtcgagcaaaaaggcaaagaccaagaccaccaag

SEQ ID NO: 839660 - DNA, 100 bp, Homo sapiens
ggactaatgggagttgcttttggaatgaatttggaatcttcccttgaagaggaaatggagaagcatcatgtgccaagtgacttcaatgtcaatgtgaagg

SEQ ID NO: 839661 - DNA, 99 bp, Homo sapiens
tgagactcctgctcagtgtagcattaaggtccccagtctatgtgaggatctcctgtcttctgttgaccagccactgaaaattgccagagacaaggtggt

SEQ ID NO: 839662 - DNA, 99 bp, Homo sapiens
ggagatcagcgtgaaggagttgcggacaatcctcaataggatcatcagcaaactttgtggaaaacgttacaagaaccgaccaggcctcagttaccacta

SEQ ID NO: 839663 - DNA, 100 bp, Homo sapiens
ttacatggaggagacgtgtcgtcactatgtggcccatgtgaagtatgagcccagaggacctggtcggcccttgtaccaaagaagaatctcatctagctca

SEQ ID NO: 839664 - DNA, 100 bp, Homo sapiens
tcgtgctcaggatccagatcatagacagcaatggatagatgccattgaacagcacaaggtgcatcagacaaaaatcagcttctttatcaatggcgtggag

SEQ ID NO: 839665 - DNA, 98 bp, Homo sapiens
ccattttgctaccaagaaagccaaaggaggctaagaagtcccgcttgccaatcctaataaaaccatcccggtcattaggaaatatgtatcgtctccct

SEQ ID NO: 839666 - DNA, 100 bp, Homo sapiens
aaatagattagtaactggcatagacaactatgggcagtactatactggcaattgctggagaagattttgcaattgttgcttctgatactcgattgagtga

SEQ ID NO: 839667 - DNA, 98 bp, Homo sapiens
aaggagtcacggatcggattcctcagctacgaggaggcgctgaggagaggccccttttggatatgtgccacgttggtctttgccatagcaattagtgg

SEQ ID NO: 839668 - DNA, 100 bp, Homo sapiens
ctgggagccacccactccccgtggcaaggacccgctcatgtacttcattgagaaggctgaagccgacgtagcttctctgaacagacgcatccagctggtt

SEQ ID NO: 839669 - DNA, 100 bp, Homo sapiens
cgcggggcagccgccgctcctccggggtgtcgtgaaaactacccctaaaagccaaaatgggaaaggaaaagactcatatcaacattgtcgtcattggaca

SEQ ID NO: 839670 - DNA, 100 bp, Homo sapiens
cagagggaagatctttttcctcaattgattggttttcacagaattccatggactttaactgctgaaccaatgatgcactgattttgtcacttgtaccagc

SEQ ID NO: 839671 - DNA, 100 bp, Homo sapiens
atttctgtgtgaagaacatcaagcaggcagaatttggacgccgggagattgagattgcagagcaaggtttctaagcatgaattgaggaacagaagaagca

SEQ ID NO: 839672 - DNA, 100 bp, Homo sapiens
ccggagccgcagaggctcccgggctggactcaggcttctcagctcctgcccctcctaaagctgaagccaaagcgaaggctttaaaggccaagaaggcagt

SEQ ID NO: 839673 - DNA, 100 bp, Homo sapiens
ggagaccccgaaaacggaagcgcagggagaaggaagaggtgtttgaaaaggtcttaaagaaagtgcagaagagatggtcaaaaacaaattggaaggaaag

SEQ ID NO: 839674 - DNA, 98 bp, Homo sapiens
ccttatggcgtgcctatgattgtaccggcagctccttaccttcctggactgattcagactacgcgtttgttcacatggagaaggaagcagatgccaaa

SEQ ID NO: 839675 - DNA, 98 bp, Homo sapiens
gggctgtccaacgccttccagctccggctcccgctgcctgcaccatgtccgccagaggctgaagccgacgtagcttctctgaacagacgcatccagct

SEQ ID NO: 839676 - DNA, 98 bp, Homo sapiens
agaaccaaggagctgcgctgctacagatgttaccacttctgtggctgctaccccactcctgggccgtccctgaaggtcatcatcagatttgaaatatt

SEQ ID NO: 839677 - DNA, 100 bp, Homo sapiens
agtggataaagtgaaaattgtagcctgtgatggtaaaaaatctccagaaccacttggtcaatcatttcagatgggccacatgtgcagagataaagaaaat

SEQ ID NO: 839678 - DNA, 100 bp, Homo sapiens
aggatccgagcgttctgcacaccgaggaaatgcgcttcctgagggagtgggtggagaggtggccctggtacagtggacggaaagtgtgggcttaaccctg

SEQ ID NO: 839679 - DNA, 100 bp, Homo sapiens
tttgagcaggagtccgggccctcgtgtcaccgctctgaagtcaaggagattcttcgctgctgctgccttaccgccgagaaccaccacccgccaggcgtct

SEQ ID NO: 839680 - DNA, 100 bp, Homo sapiens
attttactgcgaagttttgctcctggatgaatccaagttaacccttaccacccagcagcagggcatcaagtgaatggtagtgtctagaaagggtatgtcc

SEQ ID NO: 839681 - DNA, 100 bp, Homo sapiens
agcagtaggttattgaagacagcagccccagaaattgcatctgatggtctcaagggtcgtgtgtttgaagtgagtcttgctgatttgcagaatgatgaag

SEQ ID NO: 839682 - DNA, 100 bp, Homo sapiens
cttttccctctccctttccctaaggcaggtgacaaacattaccaccccagctgtgcacgatgcagcagatgcaaccagatgttcacagaaggagaggaaa

SEQ ID NO: 839683 - DNA, 98 bp, Homo sapiens
ggaccgagttcatgaagacctcaaccattcagtgaagcagagtggccagcctcctctgaaggtgcagcttttagcagcctggcaagagctgtgtcaaa

SEQ ID NO: 839684 - DNA, 100 bp, Homo sapiens
aacgttcagtgcctcgaaagaacttccgtacgacctcgaggatgccatggtgttctggatcaacaagacgtatggggcattattctgtgaaacaagtgcc

SEQ ID NO: 839685 - DNA, 100 bp, Homo sapiens
tcaatggagattctcgatacttcctgtggccactccaggtacaggtttgcagattccgccagcagcacagcaagctctacagatgagtggctctttggca

SEQ ID NO: 839686 - DNA, 98 bp, Homo sapiens
acatcttgaaagagaagctcttcctgtgaggattatatgcgtcaggcaggagaagtgacttatgcagatgctcacaagggacgcaaaaatgaaggggt

SEQ ID NO: 839687 - DNA, 98 bp, Homo sapiens
ggggcccccgtcgttgctgccgggattttggaggccggggccgcgctgagggcgcccagctgcaggaggccactgtctgcagctcccgtgaagatgtc

SEQ ID NO: 839688 - DNA, 75 bp, Homo sapiens
tggctatcctactctcctactcagaaagagatttttgcactgagtggccagccgcactggacagtgacgagaaat

SEQ ID NO: 839689 - DNA, 100 bp, Homo sapiens
catcccattctcctcactaaccaaagggtggctttgcaaaatgttacgagatgacagatttgacaaataacaaagtctacgccgcaaaaattattcctca

SEQ ID NO: 839690 - DNA, 98 bp, Homo sapiens
tagttaaagaagagatggatgcctccattaagaaaatgaaacaagcctttgctgaattggagagctgctgtaagaaaagcctggagtgcacgaagttg

SEQ ID NO: 839691 - DNA, 99 bp, Homo sapiens
tacctgttttatacttgcttttgcttcagcgttctgtggttgtcaacagagaatggtgacttcttggccctggatcttggaggaaccaatttccgtgtg

SEQ ID NO: 839692 - DNA, 142 bp, Homo sapiens
ggaagagggactggaaccatctcagaagccatgcccctcaggctggaacttgccctgtctcctcgcagatgaggaaatggaagttccagtattaccgaaaatctctctaccgatcaccagttcttcactgcctacctttaat

SEQ ID NO: 839693 - DNA, 100 bp, Homo sapiens
ttgaagatacaatacgtcttgctgaactagtcattgaagttcttcagcaaaatgaggagcaccacgcagaggatagatcactgcgaccagaggaaattga

SEQ ID NO: 839694 - DNA, 99 bp, Homo sapiens
ccggaactggagccgaggcgcaggtggcgctgggctccttcgagagcagtggatccgggccaagtacgagcgacaggagttcatctacccggagaagca

SEQ ID NO: 839695 - DNA, 99 bp, Homo sapiens
aggaaccacatgttgaagagcaacagcagcagacaccagcagaaaataaggcagagtctgaagaaatggaggtacaagaaaattccccaggacacagag

SEQ ID NO: 839696 - DNA, 100 bp, Homo sapiens
gtgtggcaaagggaagctggaagatggggatggcatcaacctgaatgacatcgagaaggtccttccagcctggcagtgtgcaggagaagagaattgggtg

SEQ ID NO: 839697 - DNA, 100 bp, Homo sapiens
acatgaacaacagctgattctgaatcacaagatggaacctctccaggtggtgaaaattatggcctttgccgggttatatcagttcctagcttgaggtttt

SEQ ID NO: 839698 - DNA, 101 bp, Homo sapiens
gagatagatttaaagaatgaaccttggtataaattcttttcggaattggagtttgggaaaccggaaactctgatgaggaagaaagtgcttcagaatctgaa

SEQ ID NO: 839699 - DNA, 98 bp, Homo sapiens
atgggtaggcctttgtaaaattgacagagaggggaaaccccgtaaagtggttggttgcagttgtgtagtagttaaggggatggactatttgggttctc

SEQ ID NO: 839700 - DNA, 100 bp, Homo sapiens
gttatgagagatttttgggacctgaaatcttttttcatccagagcagaagatggctgtgccacccacgtatgccgatcttggcaaatctgccagggatgt

SEQ ID NO: 839701 - DNA, 98 bp, Homo sapiens
agcgactgagtccgcgatggaggttgatggaaatcacaatcttctgacaaagctttctctggaagaggaaaactgtcttattcagctgaagtgtgaaa

SEQ ID NO: 839702 - DNA, 100 bp, Homo sapiens
cagcaaaaaagaaagactcacatttacaagagaagcatcaagtgtacctgatttgtgaacctatcttgcttcagttggtttcctcctaaatattaggcag

SEQ ID NO: 839703 - DNA, 98 bp, Homo sapiens
tcatcgtttataaaatccgggctgctggtcactgaactgatgcaggagcagtcatacctgaagtctgaattgggcctgggacttggagaaatgggatt

SEQ ID NO: 839704 - DNA, 98 bp, Homo sapiens
gacagtggagatttcatttgtgaggctcagaatcccgctggcagcacaagctgcagtaccaaggttatagtaaaagatacacaaatagccatcattgt

SEQ ID NO: 839705 - DNA, 98 bp, Homo sapiens
ttaccgccatgctgtgccttgtgtaggagctgcacgatctgggaacctcacgtttatggtgggaggagttgaagatgaatttgctgctgcccaagagt

SEQ ID NO: 839706 - DNA, 100 bp, Homo sapiens
atgggcagctgatggttggagttgatgtcagtggggccagggttgccacaccatttggaggttttgaaaaagcatcaagaatggttaaatttaaagttcc

SEQ ID NO: 839707 - DNA, 98 bp, Homo sapiens
cgagtcccgctccaaggcttcaaggctttgcaaggcatcgactgggcccccgagagtaaccgtattgtgacctgcggcacagaccgcaacgcctacgt

SEQ ID NO: 839708 - DNA, 144 bp, Homo sapiens
cctgagctaaacatctaactagaagggatacccttccatttcaaagaacagaatgctaaggaagctgtggcaatttggagtttgagaatcagaagactcgcttgggcattcagttggattttgaaaagaaccaactgaaggagg

SEQ ID NO: 839709 - DNA, 100 bp, Homo sapiens
atctgcgagaacagagaagggagctctatagtcggagtggagaactgcaagagaccctcctggatgacttccttctcacgtacactgtcttcatgacaac

SEQ ID NO: 839710 - DNA, 100 bp, Homo sapiens
gcgagctctccgataccatccccgtggtgcacgcgtctatcgccggctgccgcatcatcgggcgcatgtgtgtggccacccctttgctgtgaagttgctt

SEQ ID NO: 839711 - DNA, 100 bp, Homo sapiens
gttgcaacggagataaattcccggaaccgcgattcggcgtgtcagcacctgttcttcccggagcctatcagcaaagccattcccaaggctatggctacat

SEQ ID NO: 839712 - DNA, 98 bp, Homo sapiens
ggcgttgctggtgcgagtccttgtcgagttcccaccagatctctgttcccgggttacttttgtaaacttcacagttacccgtagcagtttacaaagcc

SEQ ID NO: 839713 - DNA, 100 bp, Homo sapiens
cagtaaactaaatccacgtaagatcatccgcatgtgggcagaaaaagaaatgcacaatctcgcaagactctagatctcgttagagcattacaagatctgg

SEQ ID NO: 839714 - DNA, 98 bp, Homo sapiens
tctccgccggctactgccgcttcagttctcccggtgtggccacgagtcggatccaggatgagaagactgataaaagaagaagctagctgaacagctgt

SEQ ID NO: 839715 - DNA, 99 bp, Homo sapiens
gaggacttggggaaaaaggaccacatagtccatcgaagaagagtccttggaacaagcaactggctattgaaaagaccgagattttgatgatggcgtact

SEQ ID NO: 839716 - DNA, 100 bp, Homo sapiens
gcctgagaaggtcaaggtggaggtgaagaagtttgtgaagatcggccgcccgggctacaaagcactgccatctccccacaccctccaggaagttcaggtc

SEQ ID NO: 839717 - DNA, 100 bp, Homo sapiens
cgagagtggccctgacggaggggaggaagttatgaagacagtatggagtttccagaccatagtagacatttgctacagtgtctgagcgagcagagacacc

SEQ ID NO: 839718 - DNA, 100 bp, Homo sapiens
gtgaccacccctcccccgcttgttcggggcactcagaacattcctgctggcaagccatcactccaggcgtctactagaaaaatctcagagggtagaagcc

SEQ ID NO: 839719 - DNA, 100 bp, Homo sapiens
agctgctggaatcatataggtcattaacccttggctatatggcagaagcgtttggtgttggtgtggaattcattgatcaacatgccaatatttggtttct

SEQ ID NO: 839720 - DNA, 100 bp, Homo sapiens
ggaatatcaaagagatgctcagtattccttcaggctctgggctatgtcttgcccagccacgtgactgaggagatgctatgggagtgcaagcagcttgggg

SEQ ID NO: 839721 - DNA, 100 bp, Homo sapiens
caggcaaacctttctctgttcctagaggcagctagtggcttctatactcaggagacgcaggtcagaatggaaatgggctgcagaccgggcagctattgtc

SEQ ID NO: 839722 - DNA, 100 bp, Homo sapiens
agggctctgcttccgacactcatgaacaggctatcttgcggcccctgaatgtgacagtgatccgcaggggggaaaaacaccagcttagacttgttccaac

SEQ ID NO: 839723 - DNA, 100 bp, Homo sapiens
gcagcagaagctgcatatcaaactgtggaatattggtgaacgatactaagttagatggacctatattacagattctattcatgaacaatgctatttcaaa

SEQ ID NO: 839724 - DNA, 99 bp, Homo sapiens
ctgaatgtctccagaaacaacctgaaggtgtttccagatccctgggcctgccctttggagcgaatccgtttagctcgacagattgagaaatctgagtat

SEQ ID NO: 839725 - DNA, 100 bp, Homo sapiens
gattggtggtcgcttggggtgatcatgtatgagatgctcatcgtagcataatggcagaacctgtttctccactgaagcactttgtgctggctaagaaggc

SEQ ID NO: 839726 - DNA, 98 bp, Homo sapiens
tgcagcattaaattcccgaactggggagatctgtgaaaggtgtagcagtcactcggcctacacccacagcatcgaccttgtgaacccagcgacctgac

SEQ ID NO: 839727 - DNA, 100 bp, Homo sapiens
cgatgcgggagtatgtaggagacttgtggaactgctgataggactactgagcccagccaggctgtatgccattgctgccaaagaaaaagatattcaagag

SEQ ID NO: 839728 - DNA, 99 bp, Homo sapiens
tcctttcttagcttcggataatgaagaggaggaggatgagaaaggcaacagcggaaggtttggaagaggacagttgccctttattctggcggcagatag

SEQ ID NO: 839729 - DNA, 100 bp, Homo sapiens
gcatgggaaggaggccgagccgggatctcaggtcctcgggggcggcggccacgccaaggacggtatcctagaaggaaaacatcaccatggctacagaaat

SEQ ID NO: 839730 - DNA, 99 bp, Homo sapiens
cgagcggggcctggtggaggagtatgtggagaaggtccctaaccccagcctgaagatgtcatccatcaacgtctctgtgaacgcagtgcagactgtggt

SEQ ID NO: 839731 - DNA, 98 bp, Homo sapiens
agacacgtacctgaacgccgccttggacctcctgggaggcgaggacggtctctgccagtataaatgcagtgacgattgtgccggctgcggaagagata

SEQ ID NO: 839732 - DNA, 99 bp, Homo sapiens
tatctcaaagaaagagttttctatcgatgttggttatgagagatttttgggacctgaaatcttttttcatccagaggcccagaggcagagctacacaac

SEQ ID NO: 839733 - DNA, 100 bp, Homo sapiens
tcgtctgcaacaacatgttaaggaggaattcatggatgctgtttgtgatggtgtaggcttaggaatgaagattttattagattctggactggaaaaagca

SEQ ID NO: 839734 - DNA, 100 bp, Homo sapiens
gcctggagctgggcgacgtggaggaggaccaggtggtggccgtgttcgtggtcaccttcgacccccgctcgggtctttaaggaggagaagtacttgaaag

SEQ ID NO: 839735 - DNA, 100 bp, Homo sapiens
tttgggaggtgtctagcccagtggaccttctgaagaagacccttttgaggacttctttgggaatcgaaggggtccccgaggaagcagaagccgagggacg

SEQ ID NO: 839736 - DNA, 124 bp, Homo sapiens
tgagagtcgtcagtgccctattccttcacatgtaattcagaaattagggacagggaccagttactctccacaagaaaattcacacaaccacagtgctcttcatagttcaaattcacattcttct

SEQ ID NO: 839737 - DNA, 98 bp, Homo sapiens
acaagtgaggaggaacgcatcagtcttcaacaggaattaagtcgggtgaaacaggaggttgttgatgtaatgaaaatgtctgatatgccaaagcctgc

SEQ ID NO: 839738 - DNA, 98 bp, Homo sapiens
agtggatgaccgtccaccgcatcatcaaccacaggttccctgggccccctgctggatggtacagccaccttaaggctggtgaagagacaagtccccct

SEQ ID NO: 839739 - DNA, 100 bp, Homo sapiens
tgcctggaccctgcccagcagaatttgtatagagatgtgatgttggagaactacagaaacctggtctccctaggaattacatgaacgacagccttcgcac

SEQ ID NO: 839740 - DNA, 99 bp, Homo sapiens
ggatctcgaagttatcacttcggttactttgcatcagcagactgcaaactttttcttaaagagccagataggaaatagtccaatcctgaagtgggccat

SEQ ID NO: 839741 - DNA, 100 bp, Homo sapiens
cttcaagaaaggcacagagatctgtaattacagctactccagcaacatcttgtccataaggctgaaccggcaaattgagaggatccagaatccagatctc

SEQ ID NO: 839742 - DNA, 98 bp, Homo sapiens
ggacttcaagaaagagacagaatggtccgagcatgcattgccattatctgtgaactaggaaccaaagaggttgttgtaaatgtggatgatgatggagt

SEQ ID NO: 839743 - DNA, 100 bp, Homo sapiens
cctcctgtacctcatggaatgatgccgcagatgatgccccctatgggagggccaccaatgggacaattgacatcacttgttagaagagcaactctgaaag

SEQ ID NO: 839744 - DNA, 99 bp, Homo sapiens
gaagattatggaggtgatgttcaagcagtgcctgtctccgcacttacgtcagccataatggcaggtgaagaaattaatgaagactatccagtagaaatt

SEQ ID NO: 839745 - DNA, 99 bp, Homo sapiens
tggacagcgaccagttccagctggggaggagtaaagtgttcatcaaagcccccgagtctgttcaacagagtttggaaaagatttctaaactggagcagg

SEQ ID NO: 839746 - DNA, 98 bp, Homo sapiens
ggcaccgcaaccgaatggacaggccggtggacaaccagcaagccatggtgcgcagggagtctgtggtcaatctggagaacttcaggaagcagtatgtc

SEQ ID NO: 839747 - DNA, 100 bp, Homo sapiens
gagaagattgtcaatggcatccagctggggatccacttgtacgcccatggcgtgtttctggagtggtatgaggagcatgccagggagcaagagcagcagc

SEQ ID NO: 839748 - DNA, 100 bp, Homo sapiens
ttccagatgataaaagatgaattattaagacatgactctggttgtaaagaagaaagttctaccctttctgtcaaaatgaagtgtgattttaattgtaacc

SEQ ID NO: 839749 - DNA, 74 bp, Homo sapiens
ccgggatggagaaggaggaggaatcgagaggatctgacgaactactctcaggcagtgttctcagtagtccgaac

SEQ ID NO: 839750 - DNA, 98 bp, Homo sapiens
agggtgcccagcgcgccgctgctatcgcgcgccagaaggccgagattgccgcctccagatttgggccaggcttagtcatctattggtatggatttatc

SEQ ID NO: 839751 - DNA, 98 bp, Homo sapiens
aagcgaggctgaagaaggccaaggctgcagaagccaaagccacgaacatcctgaagagggtagaagagaggtctgagcgggagtgcactgctttggat

SEQ ID NO: 839752 - DNA, 100 bp, Homo sapiens
cgccggaggaggcattaacgagaccgggggttgcagatggtgtaggaggctggagagactatggagttgatccatctcaattctcagggactttaatgcg

SEQ ID NO: 839753 - DNA, 100 bp, Homo sapiens
aactccgtcagctcgttagaaaggtaaaaagatggcctatcagaaggtccatgcagatcaaagagctccaggacactcacagtacttagacaatgatgac

SEQ ID NO: 839754 - DNA, 100 bp, Homo sapiens
aattttagaaaatggacctgctgacagagcagatggcctggagattcatgacaaaatcatggaggagaatgtcaaaatactccaggagagaagcattgct

SEQ ID NO: 839755 - DNA, 100 bp, Homo sapiens
gcctccccagccacgctttctgtacagcctgcagaactctctattaccaggttttaaacttcgccatgatcgtgtcttctgcactcatgatatggaaagg

SEQ ID NO: 839756 - DNA, 100 bp, Homo sapiens
atttcgctgcgaagctgtctttaatacccagcccgccacctggaccgctccatttgcacttgcacctcctgcgccgccgccccccatccaaggatatgcc

SEQ ID NO: 839757 - DNA, 130 bp, Homo sapiens
aacctcgtgagaaaagctttacgtctcattcaagaaaccgaagtgatttccagaggatttacactgccgtcaccgatgggttgtatatactactgaaatgaatggcaaaaacacattctgggatgtggat

SEQ ID NO: 839758 - DNA, 100 bp, Homo sapiens
cgcggcggcgtgtgcgcccctcaggagtatgctgctgctgttccgctttgcgtcctcgctacaaacgcctggtggacaacatattccctgaagatccaaa

SEQ ID NO: 839759 - DNA, 98 bp, Homo sapiens
aaagtctgagagagggaagtcgcctctgtgctcgtgagtgcatggggtataagaataaaagccagggatccatctttgtccggatacacgccccgtgg

SEQ ID NO: 839760 - DNA, 100 bp, Homo sapiens
agctcaactcaactatttctacatctctcctggagatggagagattacctccaagcccatggtactgttcctgggaccgtggagtgttggtaaatctacc

SEQ ID NO: 839761 - DNA, 99 bp, Homo sapiens
tcaactccaccaacaagtaccaggccataggaaaaggatacagagtagagtttcatgaacctgaaacttggtggaaatttgatcctgaagaattagaaa

SEQ ID NO: 839762 - DNA, 100 bp, Homo sapiens
aaaatcaggctctttgcacaataacttcatttcccagaaatcttacaggctggtgttaaaggaacttcggaatcccttaaaggtgtgaaacgcaaaaaga

SEQ ID NO: 839763 - DNA, 98 bp, Homo sapiens
agctggtggtggaagtgcggggctccaatggcgctttctacaagctcctgagaaccatgtctatgcccaaaggtagagttctggataaaaacctggat

SEQ ID NO: 839764 - DNA, 100 bp, Homo sapiens
gaatatttgaagtttgctggaatgcagcaggagacaaagttggagccagtgcatcagatggttcaattgataggcagcagtttgaagaaacagttcgaac

SEQ ID NO: 839765 - DNA, 100 bp, Homo sapiens
cgatactgagcttcttcctatttgccatggatgaccttccatcagtgcccgtgtttgacagaactctgccagtgaagcaaatgcatgtgcttgagaccct

SEQ ID NO: 839766 - DNA, 98 bp, Homo sapiens
aaactcaagtgctcatactgtgacaagtcattcaccaaaaactttgacctgcagcagcacatccgaagaattctggggagacattgccaaggaatttt

SEQ ID NO: 839767 - DNA, 100 bp, Homo sapiens
gctgaatgatagttaagctgaatgtctgctaaaaggtcagagtaatgcagaatgcgtgccttcatctcagatttgttcatcacaggtggatcccatgtgt

SEQ ID NO: 839768 - DNA, 100 bp, Homo sapiens
gaagtgaggtgaaaagcttctgcagcgagaagtgctttgcggcctgccgacgagcctacttcaagagaaataagatacagtttatgtaacttgatggaag

SEQ ID NO: 839769 - DNA, 100 bp, Homo sapiens
ccaacttcttcgccaaattaaagttttacaagatttaacctgtcatcaagacctgggattttggtgtaagctgtgctagaacaaaaatgcaatgaaagaa

SEQ ID NO: 839770 - DNA, 98 bp, Homo sapiens
tgtgacttggcaaggagtggaagacaacaaaaacaactgcattgtgtacagcaaagatgcatactctcattcctcaagcgagaatggaggcaagtccg

SEQ ID NO: 839771 - DNA, 100 bp, Homo sapiens
ttcttcgtggagcctcatctcatcttacaggagcagactagacagaagatccaaccatggagcgaccctatacatttaaggactttctcctcagaccaag

SEQ ID NO: 839772 - DNA, 98 bp, Homo sapiens
ctgactcagcctgttccattaagggaatggatttgtaaactcaagagcttctccaaatttgattggagctactggtgcaaatagcttaggcaaagtca

SEQ ID NO: 839773 - DNA, 99 bp, Homo sapiens
cctgggcgccgcgccgcacgagcaccagcctagagccaggccccccggacagaccacccagccctgtacagggacctgctgaggaccagccgcgtgcac

SEQ ID NO: 839774 - DNA, 98 bp, Homo sapiens
agtatacatgcaaagcttccaatgagtatggcagtgtcagctgtacagccacactaactgtgacagtctacgagaacgaagaccagctgctctgggac

SEQ ID NO: 839775 - DNA, 100 bp, Homo sapiens
ccttctcctatgttttccagaaatgacttcagtatctggagcatcctcagaaaatgtattggaatgcaatggtacaacagctccatgaacgtgatctgca

SEQ ID NO: 839776 - DNA, 141 bp, Homo sapiens
gcaagcaccacgcggcctacgtgaacaacctgaacgtcaccgaggagaagtaccaggaggcgttggccaagggctactgcagcactggggtgtcagttgttggtccgacccagaacgcttcagttctgctctgcaaggata

SEQ ID NO: 839777 - DNA, 100 bp, Homo sapiens
caaaagcgcagaccacagttacatgtatggagaatggctggtctcctactcccagatgcatccgtgtcagaaagattctgaagcttggcggagaggggtg

SEQ ID NO: 839778 - DNA, 100 bp, Homo sapiens
gcttccataaatcctgcttcctgtgcaaaaaactaagacgcagtcttccaaacctgtcccgaacatctaatacacaagttgactcagtgaaaagcagcag

SEQ ID NO: 839779 - DNA, 99 bp, Homo sapiens
ggagctgaacgtggacagcctcatcacccggctgctggaggatatgatacaccaacttctaaaaagaaagtacgaattaaagaccgcaataaactttct

SEQ ID NO: 839780 - DNA, 60 bp, Homo sapiens
cccgttggaccacagaggagcagcttctagcagtgcaagataacaacgaacttgatgcaa

SEQ ID NO: 839781 - DNA, 99 bp, Homo sapiens
tacgttaatggaagcctcttcagtgaggtccatggggtatacaaaaagagtatctttgttttcactcatgtacttgtacctgtctggattattcattat

SEQ ID NO: 839782 - DNA, 100 bp, Homo sapiens
tcatgtcttttcagacattcctgggataaacagtgtgaccgatgtcatatgctaggccactatacagatagtgaagatagtccaagtcctaagagacagc

SEQ ID NO: 839783 - DNA, 100 bp, Homo sapiens
ctgatgtggcaactgctgatgctcatggtccccatggcatgggggcctcagggcagcctgcctggagaattctgcttggtcagaatcgtgatggcattgt

SEQ ID NO: 839784 - DNA, 110 bp, Homo sapiens
aagttaagcgcctccttgatcaccaggataatattctctcattgattaatgtcaatgtgcatgcaagatatgggaaatactaaagcaagactactctatgaagccaatct

SEQ ID NO: 839785 - DNA, 100 bp, Homo sapiens
tgcaatgtttagccaacccaaattaccttaattgtgtgatgaatgcagactctgctaccattttggctgtttggatcctcctttgaaaaagtctcctaaa

SEQ ID NO: 839786 - DNA, 126 bp, Homo sapiens
cgttccaatgatcagaggcaaaaaattaaagcagcatttaagacctcctatggcaagtcataccctaatgatcccagcaagataatgtcctgtcttctaagatgtgcatcaagcctggtacatact

SEQ ID NO: 839787 - DNA, 100 bp, Homo sapiens
cttgtaatcgtttgtgggtggggacaggaaatggtgtcattatctccatcccattgacagaaagtatgatgaaatgagtattctcttcacagttttggtt

SEQ ID NO: 839788 - DNA, 100 bp, Homo sapiens
gcatttcttgccctagtgacttaactgccgaaggaaaatgtcactgtcccattggccatattttaggacccatggatgaaggaccagatcttgatctagg

SEQ ID NO: 839789 - DNA, 98 bp, Homo sapiens
ttacaacgccaaaatcggttacagccatgaaaatgtgtcggcaccagtgtcttgtcacctggactccacataggactaattattatactggcaataat

SEQ ID NO: 839790 - DNA, 100 bp, Homo sapiens
cagaaatattggttcagcccctgaaagtttccaacaggaaatcatagggagacgtggtgggcggtccttcctgtgacacgacccttgagtgacagttcta

SEQ ID NO: 839791 - DNA, 109 bp, Homo sapiens
cgcagaatgcttctcagcagcaacatccccaaacagcggcgtttcacggtggcacatacatggttactagtattggaatctactgctccatcaggagacctcacccgcc

SEQ ID NO: 839792 - DNA, 100 bp, Homo sapiens
gctcaaagtggtacagaccaagtatgtggaagccaaggactgtctgaacgtgctgaacaagagcaacgagggtatggcggctctgaatggaggacttggc

SEQ ID NO: 839793 - DNA, 100 bp, Homo sapiens
gccctgtgactgcagccatggccacaggcttagctgttaacgggaaaggtccacattggccaactgtattcaactgacaagctgatcattgagaatcgag

SEQ ID NO: 839794 - DNA, 100 bp, Homo sapiens
aggttatgaagctaatcctggcgttccaccagcaaccatgagtggttccatgatgggaagtgacatgggccacccgttcatcgtgcagttcaatgatgga

SEQ ID NO: 839795 - DNA, 98 bp, Homo sapiens
taattgtcatgagcaaacatatgatgaagaatttctgaacacttttactcatctttcacaagacttactaatggaacacatacaggaaattcgaactt

SEQ ID NO: 839796 - DNA, 100 bp, Homo sapiens
cactatcgagattggaaccacagaagctgataggaagatgtcttcaggaaatgctaaaattgggcaccctgcccccaacttcaaagccacagctgttatg

SEQ ID NO: 839797 - DNA, 100 bp, Homo sapiens
agatctacaaccttggagcccagagccacgtcaaagactaccgaccagactcccggaaatcatgttggtaggatcccagtctttttcgcctggagggccc

SEQ ID NO: 839798 - DNA, 98 bp, Homo sapiens
catcgtgatttaaaagctgaaaatttacttctggatgccaatctgaatatcaaaatagcaggtgacttcatggtcatgacgattttcttcaatgtgag

SEQ ID NO: 839799 - DNA, 100 bp, Homo sapiens
acctccatccagcccggggcccccaaggtgagcacctgcggatctgtccccagggctacacctgctgcaccagcgagatggaggagaacctggccaaccg

SEQ ID NO: 839800 - DNA, 98 bp, Homo sapiens
catcggagagcccctggaggacctggaccccttctatagcacccaaaagcctcttgttgctgtaccacatagaattcactcaacaagtagaaacgtga

SEQ ID NO: 839801 - DNA, 100 bp, Homo sapiens
acaggaaaaacagctggcatggaaggaaactttgagggaaattttgagtcactggaccttgcggaatttgctaagaagcagccatggtggcgtaagctgt

SEQ ID NO: 839802 - DNA, 99 bp, Homo sapiens
acaatcggcaaggggaattttgcaaaagtaaaattggcaagacatatccttacaggcagagaggattggttgccgtggtctttactgcttttctccctg

SEQ ID NO: 839803 - DNA, 98 bp, Homo sapiens
gcaccatggacctgcccttccaggtcttattagtaggtaagaaacagctgctcctccacctccaccccagccccatggagcttgctttttccaggcca

SEQ ID NO: 839804 - DNA, 100 bp, Homo sapiens
agctgctgaagaaccactgattgagcccctgatggagccagaaggggagagttatgaggacccaccccaggatagatcactgcgaccagaggaaattgaa

SEQ ID NO: 839805 - DNA, 100 bp, Homo sapiens
ccggatagacctattggatatggagcctttggtgttgtctgtgctatatgttccacatgtatgttggagttcgtgctggaggagggatcggggatgaaat

SEQ ID NO: 839806 - DNA, 98 bp, Homo sapiens
aggctgctgagcgtgagtggcggtgtctggcaggagctgcgtggcagggagggcgtccatggctgcagccaacaaggcagcctcccgcgacgatgccc

SEQ ID NO: 839807 - DNA, 100 bp, Homo sapiens
ctagacacatccagaagaggaggaaaatggctccgagcagggaccgcctgctgcactttgggttcaaggcgacacaaaagctggcaggctgacagaggcg

SEQ ID NO: 839808 - DNA, 100 bp, Homo sapiens
gagcggatcctaataaggggaaaatgactagacgcttgaagcaaagctgccatcccagaagacgacatgctctcagcaacccccctgtatgggaacgttc

SEQ ID NO: 839809 - DNA, 100 bp, Homo sapiens
tcatggcaggcacatcaattcgaggcctggattgctgctttcaattactggcatccagaaattgtgtattcagagttgtggaaagtaaaaatgtagccct

SEQ ID NO: 839810 - DNA, 100 bp, Homo sapiens
tcttgctggccttcatcctcttcgtctgctttgctggacagcttctgctggacagtgccacatcgcttatccaggcagctaaaaacctgatgaatgctgt

SEQ ID NO: 839811 - DNA, 100 bp, Homo sapiens
ccagactcattgggactgctctagatcttcactatccaatacgaatgtcaaaactggaccaatggggccaggctgaagtattgaactttctgctacgcta

SEQ ID NO: 839812 - DNA, 99 bp, Homo sapiens
gggctgcaggagaagatggcggtctccacagtactatactggcaattgctggagaagattttgcaattgttgcttctgatactcgattgagtgaagggt

SEQ ID NO: 839813 - DNA, 100 bp, Homo sapiens
tatgtcaaggatcgatattttgtcgaagaaactgtggaagtcattaggaacaatggtgcaagcagaaaaatatggctcaggagactaaccagaccccggg

SEQ ID NO: 839814 - DNA, 98 bp, Homo sapiens
ttatttacaaatgcccgcaaatttgatgggaaggatttccgatgggaggcctggagaacccaggagtttccaagctgtgctgccacccgagctctgga

SEQ ID NO: 839815 - DNA, 100 bp, Homo sapiens
ctgttcctcccagctacgagctgccccagataagatttgtgaccaaatcagtgatgctgtccttgatgcccaccttcagcaggatcctgatgccaaagta

SEQ ID NO: 839816 - DNA, 98 bp, Homo sapiens
gagttacgatgtattgagcgcgtcgtatgcggccagcactaagggacattagtcatgagtgccgagtgtgcggggtcacagaagtgggtctttctgca

SEQ ID NO: 839817 - DNA, 100 bp, Homo sapiens
ggtaactggagccgtagcgtcggtgctggaagacgaggccacagacacttctgatagtgaaggatcacctgctgttaccagctaccacccataacaagac

SEQ ID NO: 839818 - DNA, 101 bp, Homo sapiens
ccgggaggtgcttctgcggctgtacggagccatcttgcagaaactggcgatggaatatgagaggagccctctggaaagaaaaggacagaccctgtgctttc

SEQ ID NO: 839819 - DNA, 100 bp, Homo sapiens
gacttagtccgaacaattggaggagacctggtggaaaaggttgatctcatagacaagtttgtacatccaaagcttgttagcagtggcacaagatcttaca

SEQ ID NO: 839820 - DNA, 99 bp, Homo sapiens
tttcttttactggcaaatagtacttcaagagcacagtcttatgtaagagctgggatgcattcttcctctcctatccttggacatcagaactccaggctc

SEQ ID NO: 839821 - DNA, 100 bp, Homo sapiens
ctgaccactctccagcaccagcttccagttagtggatatagcacaccatccccagccactgccaaggggccaagggatgagctggggccctccttcccaa

SEQ ID NO: 839822 - DNA, 100 bp, Homo sapiens
ttgtacaaaggagagtttaaacagccaaaacagttcattcatattcagcgggtgcactgagcggtttgtgtcgagccctgaggaagtcatggatgtaata

SEQ ID NO: 839823 - DNA, 98 bp, Homo sapiens
tgtcatcaactatgatgcgtctacggatgagcatttagtgaaggatttgggcagcctcaatgggcaaggtaagctgtcatcagttggaggtaagcgga

SEQ ID NO: 839824 - DNA, 100 bp, Homo sapiens
cagctggttcttgaagctgctgcctcgaggtctttaggaaaacggtgactctggagcacagccctggatccctgatggcaggtggatgaatctgctcccc

SEQ ID NO: 839825 - DNA, 100 bp, Homo sapiens
tcaagacaacagtgatgaggaaagctgtgaaagttctcaaggcagctgagtatgtcccagagaaggtgaagaaagcggaaaagaaattagaagagaatcc

SEQ ID NO: 839826 - DNA, 100 bp, Homo sapiens
gcagcacctgcttccagactcagagtgtgagaaaaaaataaactcctatttgtttatggcaagatacagcagcacgtctttcctatcagaatgatcctcc

SEQ ID NO: 839827 - DNA, 100 bp, Homo sapiens
ccgacgcgagtggccgagctctacgaggaggagctgcgggagctgcggcgccaggtggagcccagtgacaccatcgaaaatgtgaaggccaagatccaag

SEQ ID NO: 839828 - DNA, 100 bp, Homo sapiens
gatgaagttgaccatgacaatggcactgagcctcataccagcgatgaaggtgtggaaacaggaagagaactagaactggaagtaaagcattgaagatgtg

SEQ ID NO: 839829 - DNA, 98 bp, Homo sapiens
gagggccaccccctggtcctctgccctcgcgccccgctagggccaggatggcactggatctttaaaacgcagtggttcctttagcaaactccgggctt

SEQ ID NO: 839830 - DNA, 117 bp, Homo sapiens
ttcgagtccatccctcactggattcatgagatagagaaatatggagctgcaaatgtggtcattatgctgattggaatctctgaagaagagcaacttttcagacaggtagagtgtgcc

SEQ ID NO: 839831 - DNA, 98 bp, Homo sapiens
aatactttgttgacactgcaagagtgtggctggtaaagaggataatacagacactgaccaagagaagaaagaagaaaagggtgtttcggaaagagaaa

SEQ ID NO: 839832 - DNA, 100 bp, Homo sapiens
caagaaagtcactgtttcagcttcagtagtcattatcctcatggaatcaacacagctatttaccaccctggtcacaggttcaggaacaagtgcatcccac

SEQ ID NO: 839833 - DNA, 100 bp, Homo sapiens
gagtcgccccctacccgcttctcgtagtcctgggagcacagcagaagtgtttggcaaacatcgaaaagatgacaagattgagaaaacgggtaaaataaaa

SEQ ID NO: 839834 - DNA, 98 bp, Homo sapiens
acacaacgagggacctgggtctacgataacgcgcttttgctcctcctgaagtgtctttggtccaacgttgttccagacaaatttacatgtattggaga

SEQ ID NO: 839835 - DNA, 100 bp, Homo sapiens
gaggtcaaatacatgaaaaatggggcagaagaagagcagaaaatagcagccaggaaccaagaaaacttggctccctggggaagggaatgcagggttgctg

SEQ ID NO: 839836 - DNA, 98 bp, Homo sapiens
gaaatgctccacctgtaagaacagaaaatcgtcttatagttgagaatttatcctcaagagtcagctggcaggcaatttgaatcaacccatagaagtga

SEQ ID NO: 839837 - DNA, 100 bp, Homo sapiens
attaagggttgtacaggctctttgaatatgactctgcaaagaattagaagtgcgtctcaccaaccagccaagatgaacatggtgaagaggatcatggggc

SEQ ID NO: 839838 - DNA, 99 bp, Homo sapiens
ttcgttcccgggtcccgcgcgagctttcccgggataagtagctttagcgatcgggagacagccgggcgctgcaagacctgtcgcgaaatcgcctttcag

SEQ ID NO: 839839 - DNA, 100 bp, Homo sapiens
tctctgctagtgatcgtgtttattatcatagttttgtacatgttaaggaccctagaagagcgagcccagagactattcagtaccaaaggaaagtccctgg

SEQ ID NO: 839840 - DNA, 98 bp, Homo sapiens
tgctgattggactttcaactggtctgtttgatgcaaacaacccaaaggcatggtctacatggctggacttgtttttgctgttggtggctttaatggct

SEQ ID NO: 839841 - DNA, 100 bp, Homo sapiens
taatggagaagttgatgactctcgtgaacatagctttaatagggttgaaatcacaaagattagacacctttttagataggtgttcttcagcaccactgac

SEQ ID NO: 839842 - DNA, 100 bp, Homo sapiens
acattaagaaggagctgtttaagggccctgaaaaaaactctcttcctgtgtctggccagaggtatagagagagacaggttcaactctaaggcctgaaaag

SEQ ID NO: 839843 - DNA, 99 bp, Homo sapiens
agtgcctcaaagtctacctgagcgcccaggcaatggacctcatcatgaccgttgctgtacttacaatgaaaacaacttggtggatggtgtgtattgtct

SEQ ID NO: 839844 - DNA, 98 bp, Homo sapiens
ggggttcagattttaatgaagattgaatatatgcagcaaaatttagtaagctgggatgaaagcagctccatcagtagtggactcagcgatgcctcaga

SEQ ID NO: 839845 - DNA, 100 bp, Homo sapiens
caagaaatgatcagtagcaccagtgtttatgaactctcttgatagagcccaagcagccaagaataaaggcaataaatattttaaagcaggaaaatatgaa

SEQ ID NO: 839846 - DNA, 100 bp, Homo sapiens
tgttccctaaatctatagaaacacctaatgtcagggcagaccccttcaaagaactaagcactttgatatgcctcatgatattgttgcatctgaagatggg

SEQ ID NO: 839847 - DNA, 100 bp, Homo sapiens
gagatgattgccaaatccccaggtggaaccgtcccaaaatgtcccttgctcagaagaaggatcgggtagctcaaaagaaggcaagcttcctcagagctca

SEQ ID NO: 839848 - DNA, 99 bp, Homo sapiens
gaggacggtctgcatactcgctgcccgccggctccctcccccgcgtccctgcgaccgccgcggcgaagatgcgaaaccccaaagagtcaggtagggacc

SEQ ID NO: 839849 - DNA, 99 bp, Homo sapiens
ggtggcgatgctcttcttggaaaaccagatccagaaactggaggagtcccgctcgaagctaggtttcccaggcagctgcagacttgaaacagttctgtc

SEQ ID NO: 839850 - DNA, 100 bp, Homo sapiens
tggaaaagaaccattgaagcttgagagaaaagcccccaaaagcagctattcaggcagaactggggctcccttgcatcttccagttacaaattcagtgcct

SEQ ID NO: 839851 - DNA, 99 bp, Homo sapiens
aacacccccaagaagaaggagagtaaagtcagcatgagcaaaaactccaaactcctctccaccagcgccaagaggatcaactcactatcctgaaggtcc

SEQ ID NO: 839852 - DNA, 98 bp, Homo sapiens
ccatggggaacaagcagaccatcttcaccgaagagcagctagacaactaccagtgcaccaattccagctggacatcactgtgaaaatgggacgggata

SEQ ID NO: 839853 - DNA, 101 bp, Homo sapiens
gcagctcagccctgaagaaaagggaaaacttgctgcggttgctcaagataagaccatcatcatgtggaaactgaccagggatgagaccaactatggaattc

SEQ ID NO: 839854 - DNA, 100 bp, Homo sapiens
tgagtccttaaaatcacttcttcagcttcatgaacatcatactaaagtctgcgggccaggcatcgacatccgcaacgactatcagcagctgaagcgcctg

SEQ ID NO: 839855 - DNA, 98 bp, Homo sapiens
gccgctgagccgtcgcggagccgcgcagccctcggagcacgggatgtttcagcagcccctgagaaggaagaggaggaagctgagggcccgctgagggc

SEQ ID NO: 839856 - DNA, 99 bp, Homo sapiens
tagaagtggtgatgcaagaagtttctaggaaaggccggacaccagatgcatcaatctcaaataattctacaagtaaaaggaaatctgagtctgccactt

SEQ ID NO: 839857 - DNA, 100 bp, Homo sapiens
gctccggctggtctgtggtgaggtccgggcagctccccctccacctacacagaatcaccgaaggccagcagagaagattgaagatgtggaaatcacactg

SEQ ID NO: 839858 - DNA, 98 bp, Homo sapiens
gcaaaggcggctcaagcgcccagaaacccctactcatgatccggaccctgagactcccctaaaggccagaaagatttcgccagaagtttgagtatcac

SEQ ID NO: 839859 - DNA, 99 bp, Homo sapiens
ctcacctatgcaaagaaagggaagctattgctgggattttgaggagtcggacgaggaaggcagccaggagaaaggaggggacgacagccagcagaagtt

SEQ ID NO: 839860 - DNA, 100 bp, Homo sapiens
tcccagggcatatgtctgcacgctgaggccgaggcggagaaggggcttcctgagcgtcccagtacactgacagagaagcgccaagaaccagaaccagaac

SEQ ID NO: 839861 - DNA, 100 bp, Homo sapiens
cctagccagtggagccatagatggaatcatcaatatttttgatattgcaactggaaaacttctgcataccctggaagaaaccatcatagcctttgcctgg

SEQ ID NO: 839862 - DNA, 98 bp, Homo sapiens
cactgccttacgctccagaagcgcaaaggcttcgtgcgcctggcgctgaggcacggggtcatgaagctggaagccagctgtggcacagccacctcaga

SEQ ID NO: 839863 - DNA, 100 bp, Homo sapiens
tgcccgcgtccgaggctcgcgggcggcgggcccgggctgaagccgacgtagcttctctgaacagacgcatccagctggttgaggaagagttggatcgtgc

SEQ ID NO: 839864 - DNA, 100 bp, Homo sapiens
acaactggatctggacgggccaaaggagctttcgaggagagaacgactggagcgctgctcagcgctttcgttcagctgtgccacatttccacgacgctgg

SEQ ID NO: 839865 - DNA, 100 bp, Homo sapiens
atcgttgctgccttcttcgtcaagaatgagcatgttgattacgtagatgttggtggagcttatgtgggaccaacccaaaacagaatcttacgcttgtcta

SEQ ID NO: 839866 - DNA, 99 bp, Homo sapiens
caatttgcacctacattgaaattggacatcatcctgaggtgtctggagtagatttgcagaatgcctcacacagcgaagcagttgaggccattaagaatg

SEQ ID NO: 839867 - DNA, 100 bp, Homo sapiens
cggggcagaccgctggggactgcgggcggcgctgtgtccgtcgccatgacagatggcccctgagttctgcagcctcgaggaaggcctgccctatctggac

SEQ ID NO: 839868 - DNA, 100 bp, Homo sapiens
gaaaaagtcaataagcatatagactactctttccaaatgagtgagtacacattttggaactttatacccaagaatttatttgaacaattcagaagagtag

SEQ ID NO: 839869 - DNA, 100 bp, Homo sapiens
tgatggaaacataatccttggtgccactgttgatacccaactgtgtgataaacttttaacttacgctggaaaaactccaacagcttcatatggacagatg

SEQ ID NO: 839870 - DNA, 100 bp, Homo sapiens
ttccctccccagaggtatcactactttttagtgctggactttgaggccacgtgcgacaagccacagattcatcctcagggggagtcggtgaagtacttcc

SEQ ID NO: 839871 - DNA, 99 bp, Homo sapiens
gttagtagcagcggggcacagaacagcgacagtacaaagaagactcttgtcacactaattgccaacaacaatgacccttacttttggtgatgtggttgc

SEQ ID NO: 839872 - DNA, 114 bp, Homo sapiens
ctttcaatatggaacttgaaaagcgtgaaaaaagaagcttattaaacaagaatttagaggagaaactgacgtttgcaggtcgaagtaagaaggaaaccaaatattctcttaagg

SEQ ID NO: 839873 - DNA, 98 bp, Homo sapiens
cagttccgacaaaggtcgcctttgctactaccgcgactggctgctgcggcgcgagaggcaaggtcttgctatgttgctcagactgatcttgaactcct

SEQ ID NO: 839874 - DNA, 100 bp, Homo sapiens
caaagtgctgcttccaaagctcattgacttttctgctcaggtcttgagagctgatgacaataacatgggcaatggctgctctcagaagctggcgactgct

SEQ ID NO: 839875 - DNA, 100 bp, Homo sapiens
ctttcgccttcttcctgcccgagctggacttgtcttacaaggaccggcactggcatgaagcctgtttccactgctcgcagtgcagaaactcactggtgga

SEQ ID NO: 839876 - DNA, 100 bp, Homo sapiens
gacaatgaaggccaaacagctctacattatgggcccagtcatatatgcacagttagaccactccggcggacatcacagtgacaagattaacaagtcagag

SEQ ID NO: 839877 - DNA, 98 bp, Homo sapiens
gctttatatcctaaacttttcaagcctgaaggaaaggcagaactgcctgattacaggagctttaacagggccaaggagattaagatcaagttgggaat

SEQ ID NO: 839878 - DNA, 100 bp, Homo sapiens
atattgatctgaaaagaggctttggttttgtggttacacaggcagtctgttgaaacagccaggaaacaattacttgaatatcaaactatgttaaaaggaa

SEQ ID NO: 839879 - DNA, 100 bp, Homo sapiens
ggcggactcctcggccaatcagcctcgaaaattgtacaagctggagataaggaccttgatgggcagctagactttgaagaatttgtccattatctccaag

SEQ ID NO: 839880 - DNA, 98 bp, Homo sapiens
ctgcctgtaccaaacgtggttgtacgagacgtggcctgtggcgctaaccacacggtgctggagaatctggtaaaagcaccattgtgaagcagatgagg

SEQ ID NO: 839881 - DNA, 99 bp, Homo sapiens
aaggcactgctttttcatgacggaaatctggcattttttaaagtttgcgccccacaaagaggaaatattccaaaggtactcaggatgtaaaaggggaga

SEQ ID NO: 839882 - DNA, 100 bp, Homo sapiens
cggaaacatggcactgttgcctatcagaagtcaattcaaaggacctgcccccagagagacgtgctcttgctaaaactggagctgaatctatcagtttgct

SEQ ID NO: 839883 - DNA, 100 bp, Homo sapiens
cgtgacctgaaggctgtcaagtatgtggagtgttctgcacttacacaggatacctacctggtttatattctaaatgaattggctggaaactcctttatga

SEQ ID NO: 839884 - DNA, 100 bp, Homo sapiens
cgacgagcgctgcactaacgcaggatccggctgccgaaggtcctcgccaggagattacctggggcaattgatgttatcggtcagactataactatcagcc

SEQ ID NO: 839885 - DNA, 98 bp, Homo sapiens
tggcggctcagtgcgtgaggttggcgcggcgcagtcttcctgctttggcgttgtctctcaggtaagagcttctgttcgtgtgcagggaaagcagctca

SEQ ID NO: 839886 - DNA, 100 bp, Homo sapiens
taaagtcatccctgtgtatgtaggagtgaatataaaaggacttcatctcctcaacatggaaactaagactggtcgaattgacaaatcttaccctacagta

SEQ ID NO: 839887 - DNA, 126 bp, Homo sapiens
ccaaaatcaagtgctgggaaatccatcatggactgtgggctgctcagtggatgtcagatatcatcgagaaaggagaagaacactgtggacatctaattgaggcccacaaggaatgcatgagagccc

SEQ ID NO: 839888 - DNA, 100 bp, Homo sapiens
cacgtaccagaggtggaagtccaagtcaaacgcagaaggactgcctcactgagcaaccaagatcggatgcctcctccctgtagtgattcctgtgactttg

SEQ ID NO: 839889 - DNA, 100 bp, Homo sapiens
aggctcagcgtcagttacctgagagccaagagcttctttgatggcagatccagttcctaatggtttgcgagctttgccagttttctatgcctgcacagtt

SEQ ID NO: 839890 - DNA, 98 bp, Homo sapiens
cagacctggatggtgcccgctgtgcgtgtggacttctacaatgcagacgagctcaagattagaaatgatatttgccaaatttgatgaagtgcaaagtt

SEQ ID NO: 839891 - DNA, 100 bp, Homo sapiens
aaccacctgagcaatactgtacgtagccaggttgtggcagcactgcctgaaggtatgagaccagattctaatctttatggttttccatgggaattggtga

SEQ ID NO: 839892 - DNA, 99 bp, Homo sapiens
gactgttcactcagtacaacatccagaaaaaagcgatgactgtgaaggagttcaggcagctggccaacagtggcaagcccgatgagagaaagggaaagt

SEQ ID NO: 839893 - DNA, 98 bp, Homo sapiens
tcaggagaaagtgagaatgagaatgagttggataactctctaaactctcagtctaacacgaatacagacagccggatcgagctgggagatgtgacacc

SEQ ID NO: 839894 - DNA, 100 bp, Homo sapiens
ctttatgtggaaaagccaaaactggacaaaggccaacggaaaggaatgcgcttcaaaagtgatcagcagctggactgtgccttggacctaatgaggcgcc

SEQ ID NO: 839895 - DNA, 98 bp, Homo sapiens
tggagcgggagccgcaatggcacggccgggtgctcgtccactgccgggaaggttatagccgctccccaacgctagttatcgcctacctcatgatgcgg

SEQ ID NO: 839896 - DNA, 74 bp, Homo sapiens
tgaacgaattctcaacccctacaacttattcctgtccggagacagcctaaggcacacagcatgcctctgcaatg

SEQ ID NO: 839897 - DNA, 99 bp, Homo sapiens
gaagctttacctcgctgaccctatgaagccaaagaagcctaaagccccagacaatccatttcatggcattgtttccaagtgttttgagcctcatctcta

SEQ ID NO: 839898 - DNA, 99 bp, Homo sapiens
cagaactggattccaaagttgaagttttgacctataaaaaggcagatactgatctgttcacagaagaaaagcttggccaggctgagaagacagaattgg

SEQ ID NO: 839899 - DNA, 100 bp, Homo sapiens
acaaccccgacacagtagcatttgtgccaatttctggttggaatggtgacaacatgctggagccaagtgctaacatactgtggatggtagggaagaaaag

SEQ ID NO: 839900 - DNA, 100 bp, Homo sapiens
caagaccatgacggaggatgatgacatcactaccgggctctgccgacttccagttctggaacaagatggttaaactcatttttccctgctctgctcctct

SEQ ID NO: 839901 - DNA, 98 bp, Homo sapiens
agcttcggtgggatgaccagcagaaagtcaagaagacagcggaagctggaggagtgacaggtatgtctgattgacctgggctgcttccgagaaattga

SEQ ID NO: 839902 - DNA, 100 bp, Homo sapiens
agaagatttctttcttcatgaccctgcccttgccagaatttcctgcgctgttccacctcattcaacttcagtcaccaggagactaaagtccatcaaaaac

SEQ ID NO: 839903 - DNA, 98 bp, Homo sapiens
aacgctgaaggctcggtgcagcagccctgcaaagacattgtatgcaaacctgttccattctttcttcgtggacaacccattccaaaaagaatgcttcc

SEQ ID NO: 839904 - DNA, 100 bp, Homo sapiens
tcttcggtggactccttcggcagtccacccaccgccgccgcctcccaggtggtgaaagcctatgatcatcagacccaggagcttgtggccatcaagatca

SEQ ID NO: 839905 - DNA, 100 bp, Homo sapiens
gagagaaaagtgagtttattctgaagagcatccagagatactttctagttgggagcaataatgcagaaacgaaatatcgtgtcttgaagattgatagaac

SEQ ID NO: 839906 - DNA, 100 bp, Homo sapiens
gaggatgatgtttttggtgaagggattttatattggaagacatggatcttgctgccaacgagatcagcatttatgacaaactttcagagactgttgattt

SEQ ID NO: 839907 - DNA, 100 bp, Homo sapiens
gccgagatgaccttgttgaacgacctacttcacagagaatgcagttgtcttgacttcaggtctgtctgttctgttggcaagtaaatgcagtactgttctg

SEQ ID NO: 839908 - DNA, 100 bp, Homo sapiens
atccccatggctgatgcagcaggcatcatccgctatgcaattgggatataaagatgaagcgcagctgtataaagaagagcacctgaggaatcggcagcac

SEQ ID NO: 839909 - DNA, 99 bp, Homo sapiens
cgaggctggagggggagaacacccaggaataattctgctacaaggctgatttcaaggacatgaattgttgacctcatcccaacatcagaacctcagatg

SEQ ID NO: 839910 - DNA, 100 bp, Homo sapiens
agaaagaatggctgtcagccacctgccaaccatggtccaggacaatataaggcttcaagattgctcagcactatgtgaagaggaagaagatgaagatgaa

SEQ ID NO: 839911 - DNA, 100 bp, Homo sapiens
gtttccttctgctgcttggattccagttcgtctgcccacagccctccactcaacacaggaagactttaagaaagaaaggccttaatggttgtgagagccc

SEQ ID NO: 839912 - DNA, 108 bp, Homo sapiens
cactttttgttgcggcgttattgggccttaggaaattcgttgatgttctggtggattatggatcagatccaaatcaaagctgaacatggttatgcctccatgttacca

SEQ ID NO: 839913 - DNA, 101 bp, Homo sapiens
ctcacatttccaaggaagaggactccacggcaacctcataatattctgcagaggcgcctcatggaaaccaacctgtctaagctccgaagcggtccccgtgt

SEQ ID NO: 839914 - DNA, 100 bp, Homo sapiens
ggagtctgcgaaggccgggacccggttccccggcccacagtgggggtgtgcaaacccgagagaactgggttgctgcttttgctcagaggacatccatgac

SEQ ID NO: 839915 - DNA, 98 bp, Homo sapiens
aaaactcaaagaaaaagtggatgtaagtctgattgaacgaatcaatctgactggagagatggacacgttcagcacgagcatccccccggtccttcaga

SEQ ID NO: 839916 - DNA, 100 bp, Homo sapiens
ggccttaaagccccttcgtctccccagcacccactctctgggggcaggtgggcccggtgacagaacattaaccaggtggtatttgttggaaatttcttga

SEQ ID NO: 839917 - DNA, 100 bp, Homo sapiens
gaagacttgaacttaatacagcaagaaagaccatcaagtttaccaatccgtggccgttcacatggtttcaaggcacaatgagactcactggcccttggaa

SEQ ID NO: 839918 - DNA, 98 bp, Homo sapiens
aagaaaccatcagaggtaacaggcatattctcagtttgggtgtggtggcgtgtacctgtggccctggctactcagaaggctgaggaaggaggatccct

SEQ ID NO: 839919 - DNA, 100 bp, Homo sapiens
gcaggatctcacagctgcagtctaatagtaacacagagatggcagctcagatccgtgaggtggagcagagccgacaggaggtggttcggtctgtcttaga

SEQ ID NO: 839920 - DNA, 98 bp, Homo sapiens
ctcagtgtcaaccccaagaggcaattcctagccaagatacttttacagagatcctgtccattgatgtgaaaggggaagcagaatctttaattgcaaaa

SEQ ID NO: 839921 - DNA, 99 bp, Homo sapiens
gtgcggatttctgctatgatgacagatcatacatctgtcggtggcctgggagacagtttttatgaatacttactgaaagcatggttgatgtcagataaa

SEQ ID NO: 839922 - DNA, 100 bp, Homo sapiens
aagctgcaggctgccaatgcggaggacatcaagagtgcctggtgaagaatgtgatgggatcactagcatgtctgcggagagcggccctgggacgagattg

SEQ ID NO: 839923 - DNA, 98 bp, Homo sapiens
tccctgcgactcctggaccaccgggcgctggtctgctcccagccgcgccgtgccgtccctgcagtgacaccgaggtgctcctagccgtctgcaccagc

SEQ ID NO: 839924 - DNA, 98 bp, Homo sapiens
tctccagatgccaacattgacctcacaaccgagcaaattgaagagacgttaaaatacttccatcacctccaatgagaagcacttggagagcctcaaga

SEQ ID NO: 839925 - DNA, 98 bp, Homo sapiens
tatgacattgaacttactcatcacgtctctatagtgtcttctggaggacttaaatgcattggacagtggacaaagaccatttaaatggattacaaaaa

SEQ ID NO: 839926 - DNA, 100 bp, Homo sapiens
aactgactctgatctcaacattttggctgaagatggcttctggaaacttacaccagaactgggacttatattaaatcttaatacaaatggtttgcacagc

SEQ ID NO: 839927 - DNA, 100 bp, Homo sapiens
aattctacgcatattggtgaagataggtgtcgaacttggctgggagaatggctgcagatttcctgcagcctgaaagctgaccaagaatgggacagtggag

SEQ ID NO: 839928 - DNA, 100 bp, Homo sapiens
tctacacctacccattggtctaaacttgatccaaagacaatgaagggtgctcaggaacggatagatagcttgcgtcgaactggggtgatccatgaaaaac

SEQ ID NO: 839929 - DNA, 98 bp, Homo sapiens
cccatgccgcttgctccggagaaggaaagaccacagcaagattctttcattcgtctcctcctagcctgggggaccaggctcgaactgaccctggacat

SEQ ID NO: 839930 - DNA, 100 bp, Homo sapiens
ttccgaggcctggtcagcctgcagtacctctacctccaggagaacagcctgctccacctacagatgacttcctgaagccacagatcatcacccagccaga

SEQ ID NO: 839931 - DNA, 100 bp, Homo sapiens
catgccttgcttatgccaccagaacctatcatcattaatcatgtcatcagggattccagcagaagttcaccttccacagcaaggagattgtggccatcag

SEQ ID NO: 839932 - DNA, 100 bp, Homo sapiens
cagcggcaagtttctgcggaggtacttcattctggacacccaggctaactgcctcctctggtatatggacaacccccagaccctacagcttggggcctgg

SEQ ID NO: 839933 - DNA, 100 bp, Homo sapiens
tacaagactgatctggagaaggacattatttcggacacatctggtgacttccgcaagctgatggttgccctggcaaagtgaacagagtatctgtcaggca

SEQ ID NO: 839934 - DNA, 100 bp, Homo sapiens
cgatatggaacccaagcagtggcgaagggaatcgcaaggctcttccctgaccattttctactgtccctgcgcgagctgatgaacttattagtcctaaaga

SEQ ID NO: 839935 - DNA, 100 bp, Homo sapiens
ttgcggatggattttggtggcgttctcattcttattcaccgttataactttcccaatctcaatatggatgtgcataaagagaacactttttacagttggc

SEQ ID NO: 839936 - DNA, 98 bp, Homo sapiens
gcttgcaaatgtccttgagattgacttatccctggttaagcttgatgtagttttagagaccaatctggcaacaatccgggttctggaagcaatacaga

SEQ ID NO: 839937 - DNA, 118 bp, Homo sapiens
tgaagattcacctcctcccctacctgaaagaactcctgaatcgtttgtgttagcaagtgaacatacatttctggaaaggagtccattatcgctgggcatttttcatggccagtggccc

SEQ ID NO: 839938 - DNA, 100 bp, Homo sapiens
ccgcgagcacagagcctcgcctttgccgatccgccgcccgtccacacccgccgccagatgtccagctcgccgctgtccaagaaacgtcgcgtgtccgggc

SEQ ID NO: 839939 - DNA, 98 bp, Homo sapiens
gaagcggatcgcgtggactggaagtcacactgcggcggtgtcagttgtacccgaggcgttctcagcagcagcaagtacctgtggtggatttccaggct

SEQ ID NO: 839940 - DNA, 101 bp, Homo sapiens
aattgccttttacaatgggaataaaagagaaaagcagacagtccactcagtcttccgaaaactgcttcatgattgtatccaaaaaaccttgaatgaatgga

SEQ ID NO: 839941 - DNA, 98 bp, Homo sapiens
ttatcaagccctcaaagccacccaggcaaagcaggcacttttggcaaagaaggagctatcagttgagggatttgcagttgataaaatggctggagagg

SEQ ID NO: 839942 - DNA, 100 bp, Homo sapiens
gctaaagaaatttctacacctacccattggtctaaacttgatccaaagacaatgaagggttgtcgttttggaaagtaggccaacagaaaatcctactgca

SEQ ID NO: 839943 - DNA, 98 bp, Homo sapiens
caagaatttcttctatcttattaaatgggatgaactccacagtcagacttgttggggcttattcaggtcatgattgtggtatttggagatgaacctcc

SEQ ID NO: 839944 - DNA, 98 bp, Homo sapiens
gaaagcagcacagcaggcagcctcttccagtgggcagggtcagcaggcccaaacccccacaggtgccctaatgcatgagttatcaaatgatggtgctc

SEQ ID NO: 839945 - DNA, 100 bp, Homo sapiens
ctgctggctgtgtgtgctgcaaaccgagacaagttcaccccgaagtctgccgatgatgtgatgccagccacttactgtgaaattgatttagataaagaaa

SEQ ID NO: 839946 - DNA, 98 bp, Homo sapiens
ttgaggagcaacacaggagtctctggagttaaaggcattaggatttcctgaaggacttgtgatacaagcgtattttgcttgtgagaagaatgagaatt

SEQ ID NO: 839947 - DNA, 100 bp, Homo sapiens
atgggagaaaaccagacctccacttccaaggatatagagcaggaacaagactgccaatggagactgccgcagagacccccgggagcggagccgcagcccc

SEQ ID NO: 839948 - DNA, 100 bp, Homo sapiens
ctatacataaggatttggaagacactgaagcaaataaagagaaaaatctggagcagtataatggatctgtttatatctacacttttggtaaggagccaac

SEQ ID NO: 839949 - DNA, 99 bp, Homo sapiens
gagaaccatctgtccttcctatagtagttcttctcagaatgccgactctatgctaatgtcgtggcattcctggtggctttccatcagaacaagcagctc

SEQ ID NO: 839950 - DNA, 111 bp, Homo sapiens
gaggaccaagtttgtttcgttcacatcccggctgctgggcgtgacgcctgcttcacatctctaatgaacaccctcatgacgtcgctaccagcactagtgcagcaacaggga

SEQ ID NO: 839951 - DNA, 100 bp, Homo sapiens
ataaatctaagcaactgttcaatgggttaagcttagaccatgctcagcctccaagcagccttgtcatcgacaaagaatctgaagtttacaagatgcttca

SEQ ID NO: 839952 - DNA, 98 bp, Homo sapiens
cgactttggggcccgtcaccctcagattcaaccctatgaaaagataaaggccaggggcttgcctgataatatatcttccgtgttgaacaaactagtgg

SEQ ID NO: 839953 - DNA, 100 bp, Homo sapiens
aagaagagagggaacttgaggaagggaatcttttaactgagccagtcggctacttggaatcttgtttctcggccaagaatggtactccaagacagccatc

SEQ ID NO: 839954 - DNA, 99 bp, Homo sapiens
gcggtccgacagagtcctccgtgtcctcccccgcatgacccccttgaatggtcagtctgtagacgttgaagagacattgccatctgaaccagaaaatgg

SEQ ID NO: 839955 - DNA, 99 bp, Homo sapiens
ccgctcaggccatctctggcttcttcgtgtggacggccctgctcatcacatgccaccagagggcaaggagttggtgcacacctacaagggctgcatcag

SEQ ID NO: 839956 - DNA, 100 bp, Homo sapiens
aagaattaaaagatgatgagaaataaggacaaaagccaagaggaggacagttcgctacacagcaatgcatcgagagtaaacatcagtctccaaagataac

SEQ ID NO: 839957 - DNA, 100 bp, Homo sapiens
attgacttattattgcactgtccaagcaagggcttcataaaagtcagagttcatgtttgtcaggacctaatgaagaacaacctctgttttccactgggtc

SEQ ID NO: 839958 - DNA, 99 bp, Homo sapiens
gcagtactccgactacagctaccgcaccaacccccccaaataccccagcaagcaggttgccaacttggcctgttccatctcaaataatgaagaaggtgt

SEQ ID NO: 839959 - DNA, 98 bp, Homo sapiens
ggactcccccagcagatacattctcagtatggcagatcccagaaaatggactcaccctttccctgactgaacctgtggtgattttggaaggccactca

SEQ ID NO: 839960 - DNA, 51 bp, Homo sapiens
agaagatgcacgatcagttacatctatgccaagaaggatcaagaaggtgga

SEQ ID NO: 839961 - DNA, 100 bp, Homo sapiens
atcaggaagaaacatctccaaagacccatctttagattggtggaacgagaatgcctacacgcagccacaggaatccagtttccatggaaaccaaaagcag

SEQ ID NO: 839962 - DNA, 126 bp, Homo sapiens
agtgccttctgcatttgcagctatttactctaaaggaggtattccttgcaggtaactgcgtcattgattggctggtatccaaccagtctgttaggaatcgccaggaaggcctcatgattgcttcat

SEQ ID NO: 839963 - DNA, 100 bp, Homo sapiens
gtgccctacacctgctgcatcaggaacacggctctcaccacacacttgttcatgggcgcagcaaagaagagggatccacagagctggagccatgagggct

SEQ ID NO: 839964 - DNA, 99 bp, Homo sapiens
tcaagatggcggcgcagccaccccgcgggatacgcctcagcgcgcaaattgtggctactaatttgccccctgaagatcaagatggctctggggatgact

SEQ ID NO: 839965 - DNA, 100 bp, Homo sapiens
aagctccccacgtggttccgttggaagacaagcattccagtgatgccagtagtttgctcccacagaatattttgtctcaaacaagcagacacaatgacag

SEQ ID NO: 839966 - DNA, 100 bp, Homo sapiens
ggcatgcggtaccaccccatcgacattgagacctctgtcatccgagcacacaggagcatcgctgagtggacagagcgggatgccaccagcttgtccaaag

SEQ ID NO: 839967 - DNA, 100 bp, Homo sapiens
gccttcctctcctgcgtgagaccagaaagctgggagccctgcgtggagccttcatacaccgaattcgacatcagtggcaacgtcctcgctctgatcttca

SEQ ID NO: 839968 - DNA, 100 bp, Homo sapiens
tcacctatgcaaagaaagggaagctattgctgggattttgaggagaaagctacatccatattggaattttaccgggaacttggattgccgccgaaacaga

SEQ ID NO: 839969 - DNA, 100 bp, Homo sapiens
attgtcattgcaagcactattggcagctgcagagccagatgatccacaggatgctgtagtagcaaatcagtgagaaagatcagtctaaagaaaaggagaa

SEQ ID NO: 839970 - DNA, 100 bp, Homo sapiens
aagggagagagccttgggagatgacgagtgagatgacaagaagcccattctcagacatatctgaagagatggattaagaatgctttggattaaggattgt

SEQ ID NO: 839971 - DNA, 99 bp, Homo sapiens
ttgaagatttgcataaagccaacattcgcaccgtcatggtcacagcagatataatttctacagtagaatttaatcattctggagaattactagcaacag

SEQ ID NO: 839972 - DNA, 99 bp, Homo sapiens
cggcaccgcgcctgctgccgggttgcgctccgtgcacctcttgcggatgatgaataaggtatttggaggtactgtgcacaaaaaaagtgtcagagaaga

SEQ ID NO: 839973 - DNA, 98 bp, Homo sapiens
gaaatcaagggaaatccagtccaagttgaagcctgtgggagctcggaggcctcagcctacctggatgagctgcgtttggctgtggcttggaaccgcgt

SEQ ID NO: 839974 - DNA, 98 bp, Homo sapiens
aatgaagaagaaatacgtgcaaatgtggccgtggtttctggtgcaccacttcaggggggtggctttgtccactatggtgaagtgaccaatgactttgt

SEQ ID NO: 839975 - DNA, 129 bp, Homo sapiens
gccggtttgaaatgcaagatggcggcggcgtggcgctgagaggcgcggcggcccctgcaggtgaaagaagaacgtccagaaaaaataccagatttaaaattattggtagagaagaaatttttggcttta

SEQ ID NO: 839976 - DNA, 99 bp, Homo sapiens
ccaacattgacctcacaaccgagcaaattgaagagacgttaaaatacttccatagcaaagccattgtggatgggaacctgaagctcatcttgggtctgg

SEQ ID NO: 839977 - DNA, 99 bp, Homo sapiens
gaaagacccaggagaagccgcccaaagaactgttttccaagagataacttcaccaagatgtccagtgataggcaaaggtccgatgatgagagccccagc

SEQ ID NO: 839978 - DNA, 98 bp, Homo sapiens
aagctatgcttggcagcagaaggatttggcaacagactttgtttcttggagtccacttccaattccaaggcctttttgcaaatgtgtaacttgcctat

SEQ ID NO: 839979 - DNA, 129 bp, Homo sapiens
tcagttttcttcagaagaaggacttcggaatgcactacaacaggaaaatcatattatagatggagtaaagatcacaaatcgggacaaaccgctgtcatttggtatttcccttcaaaatctgagcatgca

SEQ ID NO: 839980 - DNA, 100 bp, Homo sapiens
gtttgaaactattccaatgttcagtggcggaacttgcaagctggagtggaccagagaaattgcttgctttagatgaactcattgatagttgtgaaccaac

SEQ ID NO: 839981 - DNA, 100 bp, Homo sapiens
ccgcagccatgaagaaccaggttgcaagatttaatgacctcaggtttgtcggtcgaagtggaagagaacaactctgctcatggtgattacatgcaaaata

SEQ ID NO: 839982 - DNA, 100 bp, Homo sapiens
taactactatggaatgcaaagatttggaaccacagctgtccctacgtatcaggttggaagagccctccctgccctcctcggaagttgctgatgaacctcc

SEQ ID NO: 839983 - DNA, 99 bp, Homo sapiens
ttcttggcaagagaggcatcctccttgaagtatttggctgaggagttttcaatcccatgtgttaacagggcacaaccattatgtgatgtgtgctcagtt

SEQ ID NO: 839984 - DNA, 100 bp, Homo sapiens
gtggttttgcaggaaatgtgaatctcaggagagagcagccagagtgataatcagacagctaaatggagtctgagcagctgttccatagaggctactatag

SEQ ID NO: 839985 - DNA, 100 bp, Homo sapiens
gaggtttagatatgaaagtgattttgatagaagactttcgagagtgtatacaaatgacagccaaaccactgagcatattgttaaactagtggaacaacac

SEQ ID NO: 839986 - DNA, 100 bp, Homo sapiens
aatccagtccagcgtgcgacgacttactggcttcatggccgactgcagcagtggcccagggcaaagagtgtgcgtcatcgatgagattgggaagatggag

SEQ ID NO: 839987 - DNA, 100 bp, Homo sapiens
actcactctgcctcagcaacactggtccctgttgccccaccaatatgccaggttctccttactatgacaatgtccgccccctctcttaccctgattcgga

SEQ ID NO: 839988 - DNA, 100 bp, Homo sapiens
aaccaattattacattgaatctctgctctggaaagttcttgtcaataccaagatgagacgtgcaggtaccatcaggaagcagcgggataagctgataaag

SEQ ID NO: 839989 - DNA, 100 bp, Homo sapiens
agaatgagagcacccattcaggaaacctgaacagggaaggtgaacccctgtcctgaccaaaattgggaccatcgagtctctgtataaggaactggtggaa

SEQ ID NO: 839990 - DNA, 98 bp, Homo sapiens
aaaaggcctctcctttggtggtggctgcagcggcagcagcagcggtagctgcccaaggaggtccttattccttaaatggatacagagtgagagtatat

SEQ ID NO: 839991 - DNA, 98 bp, Homo sapiens
tgaaacatgtgaacactcaagtgaagcaaaagccttccatgattacgatccttcaaaccaaaaatgtggtggaagaaagaaaaccgtgtctttcagca

SEQ ID NO: 839992 - DNA, 100 bp, Homo sapiens
aagagggttgtccccaaaaagcctcccccatcaccccaacctacagacttgtgtgcgagacagagccactctttctatcctggctgttaggaatatcagc

SEQ ID NO: 839993 - DNA, 98 bp, Homo sapiens
gctgaaaatttacttctggatgccaatctgaatatcaaaatagcaggagctaatttcgttactcgaaaaattagccggtcagtagctaagatttacct

SEQ ID NO: 839994 - DNA, 99 bp, Homo sapiens
cccctcacatctatgccatcacagacaccgcctacaggagtatgatgcaagtttggtagtggccccaatgaagaaccttcagaacctgtagcacacgtc

SEQ ID NO: 839995 - DNA, 99 bp, Homo sapiens
ctgttttgccggaggagcccctcaggccgtgaaattcgatgctactgtgatgctgcccactgtgtagccactggttatatgtgtaaatctgagctcagc

SEQ ID NO: 839996 - DNA, 101 bp, Homo sapiens
tggctgctgcaggagccattttaggacacaagaagctctgacgaccagaaagatgatattcccgtggagaactatgtggctcagcgttacattgaaaatcc

SEQ ID NO: 839997 - DNA, 100 bp, Homo sapiens
ctcatggtatatttgcagccagtactctatatgaacaatccgtctggatcacggatgtaggaagtgggaggcttgtggatcagaatctgaacaaaattgg

SEQ ID NO: 839998 - DNA, 98 bp, Homo sapiens
aaaaccaacgcctggctcggagcagcagcctctgaggatttcagatgcatgccaggtttccactgattgccagaactcgagatcactacacatggatc

SEQ ID NO: 839999 - DNA, 98 bp, Homo sapiens
aagactggtccacggagtgtatgaccacaaacagccatcaagttaagtgggcagaccaacatccacctcagcaaaaacttcttcctgacgaatcgcgc

SEQ ID NO: 840000 - DNA, 100 bp, Homo sapiens
aagcgagggacctgggactgctcacagccaggtgcaggaagctgtttggagactctggaaaaaggaaagccactcgtagtggttataaacgaaaagttga

SEQ ID NO: 840001 - DNA, 99 bp, Homo sapiens
agcagtcctcgcagtcccagagtcagacccttggtctccaagcaatgcagccccagcagcccttggcacagtgcccacttgttccgtggcacagcccca

SEQ ID NO: 840002 - DNA, 100 bp, Homo sapiens
gctccacttcgtcttcaacgacaccaagctggacgctgtcctggaggaattcaagcgagtgaaaatgcctcgtgtaaaagcagctcaagctggaagacag

SEQ ID NO: 840003 - DNA, 100 bp, Homo sapiens
catcaatgtaatgttgtctcatcccaatcacacaggtggttctttgaagctctgaagtatcccaagttttctaaagctatcgttatcaatggaatactca

SEQ ID NO: 840004 - DNA, 98 bp, Homo sapiens
cacaccacccaacagaccctgtagaactgaggcgccttaactttcaaacaccggggtatccattactgtcagctgagatagaagaaatagaagatgca

SEQ ID NO: 840005 - DNA, 100 bp, Homo sapiens
agacagagggttttcttttgaggtctgtagcatctctgtctgttggagaaggcacaggtgtcagagcaccagtcagaacagcaacagatgataccaaacc

SEQ ID NO: 840006 - DNA, 98 bp, Homo sapiens
aattcggggaagcagcataaaacagctaaagcgggagaactgcttatctgtgcagcaatctatccgagggcctttgggccattatgctgtgaatgtga

SEQ ID NO: 840007 - DNA, 100 bp, Homo sapiens
cagactcgtgggggaaaggctgacttggggacagagagcgtcagtggcaccctcagttcactccagcaatgtaatccccgtgacggctttgacatgtttg

SEQ ID NO: 840008 - DNA, 100 bp, Homo sapiens
gagtatggctgcagaggatccatctgtcttagcaaggctgtcatcacagcattctgtgaaactttagaagagacaaactaccgcttacagaaagaactac

SEQ ID NO: 840009 - DNA, 99 bp, Homo sapiens
gagacccggctggaggaatgttttaattcttcggaaataccaagtggtctctgattgacatctttaagtatgtgatctacggcatcgcagctgcgttct

SEQ ID NO: 840010 - DNA, 100 bp, Homo sapiens
ctgggcctgcctgccccctggggaacacaggagttcatgatcaagtgttgcccacaccaaatgcttcatccagagtcatagtacatgtggatctggattg

SEQ ID NO: 840011 - DNA, 100 bp, Homo sapiens
atttcatgagagaagaaatacaggatgcctctcagctgccacctgcctttgacctttttgaagcctttgcaaaagtaaattcgaaccaccattatttcac

SEQ ID NO: 840012 - DNA, 100 bp, Homo sapiens
ctctcaggcattaacaccatcattgatcgaactgtgagaatttggaaggctcgcaatttgcaagatggtcagatctctgacacaggagatctgggggaag

SEQ ID NO: 840013 - DNA, 100 bp, Homo sapiens
ggctacttgccattctcacaggactaatagctggcaaatttctgttccatcagcgtttgtttgagactaatagacaagtcacgagttacctgtgtcaaat

SEQ ID NO: 840014 - DNA, 98 bp, Homo sapiens
gagggggatttgatcgtggaggcatgagcagaggtgggcggggaggaggacgcggtggaatgggtcggaattgagatgggcgattggcaggaagtctg

SEQ ID NO: 840015 - DNA, 99 bp, Homo sapiens
cctcattaaagcagccggtgtaaatgttgagcctttttggcctggcttgtttgcaaaggacactgcccatctctaagataagaacctggaaaggggact

SEQ ID NO: 840016 - DNA, 98 bp, Homo sapiens
gggcccgggccatggccgccgccgatgccgagcttctaaccgaaaatcttcagttggcgtaaaaaagaatagcaagagcagaacgttaacgaggcaat

SEQ ID NO: 840017 - DNA, 100 bp, Homo sapiens
catctttcagccctctgaaaccgtgtccagcacagcctcgaagcggaggatccctgtgtcccagccgggcatggccgacccccaccagcttttcgatgac

SEQ ID NO: 840018 - DNA, 100 bp, Homo sapiens
gagaattttccacctcctgacacaacaccactcagtgcaatggatgagcttcatagtctggatccaagaaggcaagagttattggaagctagatttactg

SEQ ID NO: 840019 - DNA, 117 bp, Homo sapiens
cgctctcttacactcgggcctcagaagtccgtgccagtgaccggaggcggcggcggcgagcggttccttgtgggctagattgcagagggaatggcatacatcgagcggaagaactac

SEQ ID NO: 840020 - DNA, 100 bp, Homo sapiens
aaagacattcaaaccatctacaatatgtcagcttcaagattgtcactgctgttccaagggcacacgcagagggatttggaattcctggagagttgccttt

SEQ ID NO: 840021 - DNA, 99 bp, Homo sapiens
ctggagccagaaacattaccgtcatattccacccattactaaggggtcggcaccaggaattattatagaaagatcggctacagattacaaggcccgtac

SEQ ID NO: 840022 - DNA, 98 bp, Homo sapiens
ggaatatttatgcaatatttcttcggatgaatatactttacttaccatccacacagtgcatgtaggatcagctcagctactatttaataaaacaaaat

SEQ ID NO: 840023 - DNA, 100 bp, Homo sapiens
acagcagggcggaggaaagtgcaggtgtgttctactccctcttctgggaatgaagcctccccagcaaagcctatacctgcttgttgattctgttgatgaa

SEQ ID NO: 840024 - DNA, 118 bp, Homo sapiens
attggtcttatcatcttttgctgtcgtaaaaagcgcagagaagaaaaatatgaaaaggaagttcatcacgatatcagggatagtaaagctctgaaggatgaaaatctacctcctgtca

SEQ ID NO: 840025 - DNA, 98 bp, Homo sapiens
gctacgctgtctactggaacagcagcaaccccagaatggctattcaagtggacaagttcaactttgagagtttcccggagtcccctggggagaagggg

SEQ ID NO: 840026 - DNA, 100 bp, Homo sapiens
ttcccactttggggatcggcgctctggctgtttcgtgaaggagagagaggaggaatgcaggctcaggttggaatgccaggaagtggaccagtgtccatgg

SEQ ID NO: 840027 - DNA, 100 bp, Homo sapiens
ctggccatcccaatcctggcatttgtggcttcatttcttctgtggccttcagcactgataagaatctattattgagcaatggtggaacaaagcggcaaaa

SEQ ID NO: 840028 - DNA, 98 bp, Homo sapiens
gatcacacgcccactaaagcccagaagaatgtggctaccagcgaaggtacatctccgttcatggatgcattaacagccaatgggacaaccaacataca

SEQ ID NO: 840029 - DNA, 100 bp, Homo sapiens
ccgctgctgtggccgctgctgctgctgctgctcctggaaaccgacctggaatcatttttctgataatgaggcagagcgggttaaaatgatggaagaagtg

SEQ ID NO: 840030 - DNA, 100 bp, Homo sapiens
ttggactatgactttcaacgggactattatgataggcctgatcaaccccgtataaccaaagatgtaatttgttttcatgctgaagatttcttagaagtag

SEQ ID NO: 840031 - DNA, 100 bp, Homo sapiens
taaggaggaagattgccactctccaacttctaaacctcccaaacctgatcagcccctaaaggtttttgccaatccagaagactgtgtagcatttggcaaa

SEQ ID NO: 840032 - DNA, 100 bp, Homo sapiens
ttggcatcactgcagctagtaatttgccttctggattggaactctaatgatccaggacaaagaagttaccctggagtatgtatcaagcctggatttttgg

SEQ ID NO: 840033 - DNA, 99 bp, Homo sapiens
ggtattgctgcggctggtgcgtcgtcgctctaggacctgagagtcagtatactaagactgcccaggagattgtgaacgtctgttaccagacattgactg

SEQ ID NO: 840034 - DNA, 98 bp, Homo sapiens
gaaacctctaacaaagtgaggaactatcgcatttttgagaagatggtcatcatgggccagtgctactacaacgagaccatcggcttcttctataacaa

SEQ ID NO: 840035 - DNA, 100 bp, Homo sapiens
aacatctcaccaatttcaaatctgtatggtttgaagtggtgaacatggatttttctcggcttcacatgtacagtcctccccagtgtgtgccggagaacac

SEQ ID NO: 840036 - DNA, 100 bp, Homo sapiens
ctgacacagcccagcctgcggtgatggagacacccgtgggtgatgcagacgcaagcgcaatggatcacttggagtcctttattgctgaatgtgatcggag

SEQ ID NO: 840037 - DNA, 98 bp, Homo sapiens
ttcaaacaaccaaccctgatttcctgcttctccttttcatgagtgttcctgtggtctctgcacctcctttctgaagaagttgaagctttgatatgagt

SEQ ID NO: 840038 - DNA, 98 bp, Homo sapiens
aagagcaaagcgagcctctgaaatggcaagtgagcctttagaagaagccacactctctgaattaaaaactgtcctcaagagcttcctaagtcaaggcc

SEQ ID NO: 840039 - DNA, 100 bp, Homo sapiens
cgtctcttcgagttcttcgtgctgctcaagggcgtctctggccgagcctctttttgtggaaaacgacagcagcagcagtggcctggaagacgccaccgct

SEQ ID NO: 840040 - DNA, 100 bp, Homo sapiens
gacaagccagcagctcgctcagtacaagaggcttgacctctgctgcccttgttgcctctcagcaggtggctgcccaggcatctgcatctggaatgtttcc

SEQ ID NO: 840041 - DNA, 100 bp, Homo sapiens
cagttccctgtcttgggaaaaggagaactcctgactgattagcattcacaccaggtctctgctggtggttctgaagccaaacctctgatcttcacatttg

SEQ ID NO: 840042 - DNA, 98 bp, Homo sapiens
tgttgccaaaatgtttcctaaagttcgtgaatctcaactttctacatcagcatcagcatctgcgtcaccatttcaatctgcatggtatagtgaatctg

SEQ ID NO: 840043 - DNA, 99 bp, Homo sapiens
aactctgcagtggaccacagcattcctgaaatacatccaggaaagacatggagattctcttaaaaaggtgtggtcactcacctgtctaccactcccgtg

SEQ ID NO: 840044 - DNA, 99 bp, Homo sapiens
tgtacagagaggtgatgctggagaactacaggaacgtggtctccctggattaaagtatggacagccaacccccaacaatttgtagaagatgaagatgat

SEQ ID NO: 840045 - DNA, 100 bp, Homo sapiens
cacagctcgacagtacgcctacttctataaagtcatccagggcgtctctggccgagcctctttttgtggaaaacgacagcagcagcagtggcctggaaga

SEQ ID NO: 840046 - DNA, 100 bp, Homo sapiens
tcatcccatcgggagatgctcatcaggaagatccctcctgcggcagatagccccctgccctcgccagcagcccacatcaccacccccgttccagcatccg

SEQ ID NO: 840047 - DNA, 100 bp, Homo sapiens
gagaaaagacgaagagcaagaataaatgaaagtctgagccagctgaaaacactgattttggatgctctgaagaaagatgactaaggactcacccaagctg

SEQ ID NO: 840048 - DNA, 100 bp, Homo sapiens
tgggatgtgaagtagatgataaagatgatgatatccttctcaaccttgtgggatgtgaaaactctgttactgaagttggaaatctacatttctgaaggaa

SEQ ID NO: 840049 - DNA, 99 bp, Homo sapiens
gcggcctctctggcagcagacatcagccacgcatctgaccttgttggcatggaaaagaccttgccagagcctgtgggcacccaagtcagcatggaagag

SEQ ID NO: 840050 - DNA, 100 bp, Homo sapiens
ggatattaatgattataaccggagattctcagggcaacccagatctgacagtcattttgtttactcattcagccctgttgcaggtcccaataaactcttc

SEQ ID NO: 840051 - DNA, 100 bp, Homo sapiens
atgcgctggttcctgccggacttgcctccttcccgcagcgccgtagagatcgctcccactcaggtcacaggtacaggtttgcagattccgccagcagcac

SEQ ID NO: 840052 - DNA, 100 bp, Homo sapiens
cttcctgatttctgcagctctgtgtgaagccctgggcgctgcctatggcacagccaagagcggtaccggcattgcggccatgtctgtcatgcggccggag

SEQ ID NO: 840053 - DNA, 100 bp, Homo sapiens
cgagatccagttcctgcgaactgttgctgaaaagccaggagtcaaaatgactgagcgctttgactgccaccattgcaacgaatctctctttggcaagaag

SEQ ID NO: 840054 - DNA, 101 bp, Homo sapiens
tgcgctgctcaaggacacggtctacaccgacttcgacggaagatgttaccgagtacttcagtgaattccttagtgcaggggaacggagtcttgaattccag

SEQ ID NO: 840055 - DNA, 98 bp, Homo sapiens
gccccgacggggcgcgcgcgaagcgagcgagaaggcacggagtcgccgcggagcgcagagtttgtgaagcggctccggtactgcgaatacctagggaa

SEQ ID NO: 840056 - DNA, 100 bp, Homo sapiens
caaggtggggttggcatcccccacatacggcttgaagaccctgcaatgtggtgatgggaaatgagacttgctctctggccttttcctattttcagcccat

SEQ ID NO: 840057 - DNA, 100 bp, Homo sapiens
tggagtaagaggggttggctgtgaatgacaccatgtaaaattgaacctagtataaaccacatcctaagcaccagaaagcctggaaaggaagaaggagatc

SEQ ID NO: 840058 - DNA, 99 bp, Homo sapiens
tgatggtggcttgaggtgttgggaatctggagatgatccatgggtagaacatgccaagtggtttccaaggaaccaaatggcgagacaccatcatcttta

SEQ ID NO: 840059 - DNA, 100 bp, Homo sapiens
gatatacagcaggttggatacggtggcctcactgccctccatattgctacaatagctggccacctagaggctgtccggagtacacatggcttagaagttc

SEQ ID NO: 840060 - DNA, 98 bp, Homo sapiens
tggtgatacccaagaaacatatatcccagatttctgtggcagaagatgatgatgaaagtattttccacagaatgagcctcagatcaagaatcagttta

SEQ ID NO: 840061 - DNA, 99 bp, Homo sapiens
caggatgctgtagtagcaaatcaggaggagagacttcagcatgcaaaccttcatctgttcggcttgcaccgtcattttcattccatgctgctggccttc

SEQ ID NO: 840062 - DNA, 98 bp, Homo sapiens
gctgctgtccagtgtcttcgatctgcttctgatgaaaatggccaaagttttctggtcttggatgagcaacgatttgcaaaagaaattcttcccaaata

SEQ ID NO: 840063 - DNA, 134 bp, Homo sapiens
gcgaggccgggactcgggcttagggcctgctgtggaggcagcggcggacgccgagctaagcaggccaattcctgtccccccagcagcatggcatcgtgtgctgaaccctctgagccctctgccccactgcccgc

SEQ ID NO: 840064 - DNA, 100 bp, Homo sapiens
gggacaatgacaagttttctctggatgactacttggcaaaagcggcgccaggaaattgaacaaaaacttgaagttcaggcagaagaagagagaaagcagg

SEQ ID NO: 840065 - DNA, 100 bp, Homo sapiens
ggaagacttgtaacctggagaagaggacatggatttgattgacatactttggaggcaagatatagatcttggagtaagtcgagaagtatttgacttcagt

SEQ ID NO: 840066 - DNA, 100 bp, Homo sapiens
tgaaaaggagaaaatgaatgccaaatgggacacgggtttggacagaggagccaaaggccaaatttccactttcagcagttttatttcagctgttagcccg

SEQ ID NO: 840067 - DNA, 98 bp, Homo sapiens
gaaacatccaagaaaaatgtccttaaagcaattgagcaggctgatctactgcaggaggtgcttgaggaatccaaagccctcgtgcgctgcaacatgaa

SEQ ID NO: 840068 - DNA, 100 bp, Homo sapiens
ctttccttctgatggcctctcagtaccaacaaccccacgaggaattcattgaagagttgctgtctcccccttttgggggtttagtggcatttgtgaagga

SEQ ID NO: 840069 - DNA, 98 bp, Homo sapiens
gagctggcgaagatgggcgacccggatctcctggaagtgttggcggaggaagctctggtcccattttggcagaagaagctgtcctgaagcagaagtgt

SEQ ID NO: 840070 - DNA, 100 bp, Homo sapiens
aacacatgacgtcagatcaaagaaaacagatcttctccagattggcagaaagttgatataggtggacttttttacaggttctaacattcccatggaccag

SEQ ID NO: 840071 - DNA, 100 bp, Homo sapiens
ttcaaacttagactaggacatctcaaaaaggtgatggagaggtgattgaacaaattataagcctgcaaaccaatgataatgatgaacgcagcccagaatc

SEQ ID NO: 840072 - DNA, 99 bp, Homo sapiens
aggagtgctgccagaaatttgaacaactttccgaatctgcaaaagaagatgctggatcccctgagcagtgcagaaaattccttgtctggaagctgccaa

SEQ ID NO: 840073 - DNA, 98 bp, Homo sapiens
gcaatcatggtgcagaaataccagtccccagtgagggtgtacaaatacccctttgaattaattatggctggcaccagaactagcacctctgaaaagta

SEQ ID NO: 840074 - DNA, 98 bp, Homo sapiens
caaagatctcccagatgaaattcctttgcctctggttattggaacgaaagttacagatatttgatcctgatgacctttattcaggggtcaatttctcc

SEQ ID NO: 840075 - DNA, 98 bp, Homo sapiens
ggaggagaagatggtgtccctgctgcaggagaagaatgacctgcagctccaagtgcaggcggtatctcagatgaagacatcatcaacattactcttcc

SEQ ID NO: 840076 - DNA, 98 bp, Homo sapiens
tctcctcctttgacagggacatcagtggagccttctcagacccacaggcaatgatgcaacatcaattgtcaactgtcttcatattttgggtcagactt

SEQ ID NO: 840077 - DNA, 100 bp, Homo sapiens
aaggaaagcacttaaaagtggaaagatgacggatgaaaagaatgaacactgtccttcaaaacgaaccacacctgtgacaatgcaggttggagaaggtcag

SEQ ID NO: 840078 - DNA, 100 bp, Homo sapiens
gattatgctgatcatcccttagataaacttctgcactggaggggcctctcctcccctcgttctgcacatggagctctaatccccacgcctgggatgagtg

SEQ ID NO: 840079 - DNA, 100 bp, Homo sapiens
actctggcggaccatcagcaagaacggaggggctgacaactgcgtgtccagtccttcagaaggcatcaggaagtaactctgggtggattttaactacaac

SEQ ID NO: 840080 - DNA, 135 bp, Homo sapiens
ttggtccagctgtctggcagggaggagagacagaagctctggcccgcctggataagcacttggaacggaagaatccagactccaaaatgatgcaaatcaacctgactggatttttgaatggaaaaaatgctcgag

SEQ ID NO: 840081 - DNA, 100 bp, Homo sapiens
tcttactgggctttcttaaatattatgctacagaatttgaaggatggcattccctgtggatatgctggaaaattgcagccatgaggaattggaaaattct

SEQ ID NO: 840082 - DNA, 100 bp, Homo sapiens
tcagcagattggaaagactggaagcttcttcaggtgctggagaatctggtaaaagcaccattgtgaagcagatgaggatcctgcatgttaatgggtttaa

SEQ ID NO: 840083 - DNA, 100 bp, Homo sapiens
agaagccggtggtgactttccaaggtttctgccacctctttctgccagatgaacagtttcctgaagggttccagtttgacactgacgatgtgaatttccc

SEQ ID NO: 840084 - DNA, 100 bp, Homo sapiens
gaccgcggagaagctgtgcatttacaccgacaactccatcaagcctcaggagctgctgggtctcctatggacagaagtgcgggcaaggagctttgttcct

SEQ ID NO: 840085 - DNA, 51 bp, Homo sapiens
ggcggacgagcacgaacacacggacgcaatgagcccctgaagaaagagcgg

SEQ ID NO: 840086 - DNA, 100 bp, Homo sapiens
cgaccaggacgtcagccagcactgcacagacagctgcgaccagagactggaggccgggatagaaaatcgtcagctggacacagtaaatttctttttgaag

SEQ ID NO: 840087 - DNA, 98 bp, Homo sapiens
cctgaagaagctctgtagtggccccgaaggaggactgaggaagctccctgggaagctgaatgaagcggatcataacggagatctggcattagatctag

SEQ ID NO: 840088 - DNA, 100 bp, Homo sapiens
gaaaaaaacattcttcctgtggattctgctgtgaaagaggccataaaagctggcagccggtcaagttccccaggaaaattgttgggaagtggttatggtg

SEQ ID NO: 840089 - DNA, 100 bp, Homo sapiens
ggcatggaaggggtcctcagagttactgggattgtgactgcagcgcggcagggacccagggcaacgcctgccggaaggacccaagggtgggacgctgtct

SEQ ID NO: 840090 - DNA, 100 bp, Homo sapiens
ttttcatggatgcccctgtttctggtgaatgtgaatggcataaagtatcacgctaagaatggtcacagaacacagattcgtgtccgcaaaccattcaagt

SEQ ID NO: 840091 - DNA, 100 bp, Homo sapiens
gtccaagccaggtcgtggcccagcgagtggggacgcgccccgaaccaggcagcaccttcgaaatgcatctacaaccacaactgtgatagacagcaaaaat

SEQ ID NO: 840092 - DNA, 100 bp, Homo sapiens
cgatgtccaacttcaagcctttgattttgaagatgaccactttggaaatggcgttcgtggcattcagggatgtggctgtgtacttcacccaggaggagtg

SEQ ID NO: 840093 - DNA, 98 bp, Homo sapiens
agggctttatacagggccgtgatgttggagaactacaggaacctggagtctgtggactgattcttgctattccaaatcctcttccacgttgacagccc

SEQ ID NO: 840094 - DNA, 100 bp, Homo sapiens
aaaaccaagaaggagattttgaagatgcagatacccagggtcatgatcagagttcgactcttgcccaacactctgttgaactgactttacccaatcatca

SEQ ID NO: 840095 - DNA, 100 bp, Homo sapiens
attcagccagcacactcctcgcgagcaaggcctgggttctgaggaaaacgcaatggtggccatggacttgggctctccctcgctccctaagaagagcctg

SEQ ID NO: 840096 - DNA, 99 bp, Homo sapiens
ctgtccttctttgtggagagcaagggttattatgtgtaccgtgacatgctaggcgaaaaaggagatttcattacttcacctgaaataagtcaaatcttt

SEQ ID NO: 840097 - DNA, 123 bp, Homo sapiens
tttttgcggaacctgaaaaattcaagaagttgaaaaacgcttttcacgtcacctggagagatgcacagatgcatttttgtagaagcattttgaggatgaatgtttgcaaatcattttgaaatt

SEQ ID NO: 840098 - DNA, 98 bp, Homo sapiens
ccttagcggcccggcgttgaattccgggaagtgggagcttcaggctcgctccgtgcggctcgtttgacagcaagtttgtttaccagcaaataggactc

SEQ ID NO: 840099 - DNA, 100 bp, Homo sapiens
atgaacgaattctcaacccctacaacttattcctgtccggagacagcctaagggttgcccctctacctggcctccctcttcatcagccttgttttcctgt

SEQ ID NO: 840100 - DNA, 100 bp, Homo sapiens
gaagcactgcagcttatgctaagaagatcaaggccctgttagactggaaacattcattgtaagacctagtgccataagaaaattcatttgcaaattgccc

SEQ ID NO: 840101 - DNA, 98 bp, Homo sapiens
ttcagattgcaaggtggcaaggagcagaagcagcccttacaagttgcaaagatggggtcgaggatttggtcttttgggttccatttttggaaaggatg

SEQ ID NO: 840102 - DNA, 99 bp, Homo sapiens
tccaggatgcgctgagccctacaacacccccagcggccgccggctcccccacgaggtctataagggagaattccaactacctgactttcttaaagaaaa

SEQ ID NO: 840103 - DNA, 100 bp, Homo sapiens
actgtcaaaactgaaggagcagaggcaactcctggagctcaggattatattccatcacaacaagatattctgcttgccagaagacccaccaaaggcatcc

SEQ ID NO: 840104 - DNA, 100 bp, Homo sapiens
ggggagacgccgaggggggcgcatccccaccatgggctgcctggacctgcccggagagtctgtggtccgaagacaaccctatgaggcatcagtagggttt

SEQ ID NO: 840105 - DNA, 98 bp, Homo sapiens
cactgcaatgtttttgtggaacatggtatcatctttatcagaaagtgaggagtcccaggactcatccgacagcataggctcctcacagaaagcccacg

SEQ ID NO: 840106 - DNA, 100 bp, Homo sapiens
ctcccatctcagcctcctgagtagctaaggactacaggttatcaatactctggctgaccatcatcatcgtgggactgactttggtggaagtccttggtta

SEQ ID NO: 840107 - DNA, 100 bp, Homo sapiens
ggggtcccggccgccaggccggagcgcgaatgtcgtgctcaccctgcctccttcccgccgccccctgggggtacagctcgcagaaagaagaaggtggtac

SEQ ID NO: 840108 - DNA, 98 bp, Homo sapiens
gggagttcagcttttagagcaggtgtatgatcttttggaggaggaggatgaatttgatagagagtccctgagacggcgggcaacagcatcggcaggaa

SEQ ID NO: 840109 - DNA, 100 bp, Homo sapiens
actcagagaccaataaaaataaactgcttgaacatcctttgactggttagccagggacattccagctacatcacacaccttgactggtccccagacaaca

SEQ ID NO: 840110 - DNA, 100 bp, Homo sapiens
taccttgaagtcctagagtccaataaaatcgctgcctcccagctgtttggatcacagagagaatgaggaaaatggggagcaggaggctgacaatgaggta

SEQ ID NO: 840111 - DNA, 120 bp, Homo sapiens
cttccctgaaggagtgacagtctagggaggaaggcagactgcaggacagagcgggatgccaccagcttgtccaaagggaagttccaggagctcctggtgggcatcgttgtggagaatgac

SEQ ID NO: 840112 - DNA, 101 bp, Homo sapiens
cagaaagccaggaccaagagacaggcagctcaccagggtggacaaatcgccagagatgtgataataattgtgcagtttggtggaaaacctttcagttgttc

SEQ ID NO: 840113 - DNA, 100 bp, Homo sapiens
gtcaccttctacggggcactattcagagaggagaaccggagccttaccatcaaacttcggaaacggaagccagagaaaaaggtagaatggacaagtgaca

SEQ ID NO: 840114 - DNA, 100 bp, Homo sapiens
ctgcaaagagagagatgctgctaaaaaggttggattagcttttcaaaacagaaattcttggaaagaattaaatgacattgcatcgaagccctcccaggaa

SEQ ID NO: 840115 - DNA, 100 bp, Homo sapiens
atgctgaagcctggttcaccagccgggttgttttctgcatggaccgtgccctagaatttgcccctgcctgccatcgcttcaaaatcctcaaggcagaatg

SEQ ID NO: 840116 - DNA, 100 bp, Homo sapiens
cagcaagcgggagtcggggatagtgtcatcggttcggtaaagtttctgttctctgggactttgaacatgtcggggatcgccctcagcagactcgcccagg

SEQ ID NO: 840117 - DNA, 99 bp, Homo sapiens
cagtatgacaaggcactggatgatgcaatcaaagctcgacttctcaatcccaagtggccaaagaaccaggaagacagcgcttccagcaacccgtttgca

SEQ ID NO: 840118 - DNA, 100 bp, Homo sapiens
gccctcccaggccaaggactggcctcccccaaggcaagaaaagttgcccccaagtttcctggcagtgtgtgatactgaggaggtgagcttgtttctggag

SEQ ID NO: 840119 - DNA, 100 bp, Homo sapiens
caacaccgccttgcagtccgtttctcttcgaagtaagagtggggaacgccaagcacaacgtgcatgtcatgaacatctccacaggcaagaaagtgaaggg

SEQ ID NO: 840120 - DNA, 110 bp, Homo sapiens
gaactcaaagaactataaacaggatgcctgcaaaggctccacctggtgatgaaggatggacaaccggaaattttctacacattttggaattcagttactcaggcactttc

SEQ ID NO: 840121 - DNA, 98 bp, Homo sapiens
aatgtctaaccggagaagacatactggcagcaggtcgttccccatcaggaagtcctcgcagaagtgcaagtcctgaaagaatggactgaagctctcaa

SEQ ID NO: 840122 - DNA, 100 bp, Homo sapiens
ctgaactggaaaagaacattgttggtgaaaagaccaagactttcaaacctctggttgaaagaaatatacccagttcagtcactgcagtagaattccttgt

SEQ ID NO: 840123 - DNA, 100 bp, Homo sapiens
tcgacattatgcaggcgatgtagtggattttatattggaagacatggatcttgctgccaacgagatcagcatttatgacaaactttcagagactgttgat

SEQ ID NO: 840124 - DNA, 100 bp, Homo sapiens
ttaccttatcccctcaacaacttttcagtggcaattggttgaatctggcgatgtggaacccatggatatggagggctgactatatacaccatgttttttc

SEQ ID NO: 840125 - DNA, 100 bp, Homo sapiens
tcgcctacacaaaggagagcaagctgggatctagcaattgggaggcagcagacttgggtaatgaagagagaaaacaaaagttcttgagacttatgggtgc

SEQ ID NO: 840126 - DNA, 100 bp, Homo sapiens
acagatggcaaccccaagttgaccctgggtctgatctggaccattattttgcatttccagggttggggtctgctaggtccccggaatgagttgtttgacg

SEQ ID NO: 840127 - DNA, 100 bp, Homo sapiens
cgccgcggctcttttctaaaagtaacaaattggagctctggcagatcagcatatcattcatgtggcatgtggcgagtcccacagtctggccctcagtgac

SEQ ID NO: 840128 - DNA, 98 bp, Homo sapiens
agattgcagaatacatcttcaagacctggaatgtatccgctgctgtattaaagtatgaaaataatgtgatgaatattcgacagtttaactgttctcca

SEQ ID NO: 840129 - DNA, 100 bp, Homo sapiens
caaatgcattgagcttgggtcaggacaattccatttggggaccagagatggacggtcactcagcctatggagatagtgtgtgtaccatatcagtggcgtg

SEQ ID NO: 840130 - DNA, 100 bp, Homo sapiens
catcactgtctctggccccactgtctcccagtgagtgagatcattggccgagacctgagtggcttccctgcacctcctggagaagagcctcctgcctgaa

SEQ ID NO: 840131 - DNA, 50 bp, Homo sapiens
gagcgtggagcgggctgggccagcctgattacatcaaccccagagccgtg

SEQ ID NO: 840132 - DNA, 100 bp, Homo sapiens
gcgagtgggagcaccaggatctcgggctcggaacgagactgcacgctttatcttcaagccaggatgaagggagactgggcaagactcttacgccccacac

SEQ ID NO: 840133 - DNA, 99 bp, Homo sapiens
aaaagaccactgaatctagaaatgaggagtatgccaaaatggtccaggtcttacatgcatactgtatcatttcagcaggcatccgtgtaagttgcacca

SEQ ID NO: 840134 - DNA, 99 bp, Homo sapiens
tggggacctctggatcccagtgaagagcttcgactccaaggaagttgacaaaagtgttgaagaactacgtggacggtgctgagaagccgggagtaaatg

SEQ ID NO: 840135 - DNA, 100 bp, Homo sapiens
ctggaggtgctggacatgtaccctgagttctccgaccacttctggtccagcctggagatcaccttcaacctgcgagatactcaaagtcctctggctcaca

SEQ ID NO: 840136 - DNA, 100 bp, Homo sapiens
aacattggtctaaagtctttccaaaaggtcaaggttcacaagatctctcaaaggccttggttctgacagaaattggccccaaacgtgaccctgcgaccct

SEQ ID NO: 840137 - DNA, 98 bp, Homo sapiens
tgggcttcctgccatcaccgatgtgcctaggcgcatttcagaaatggatgaaaagaggctgctggatccagggttgaaggttcataaaggcctctggg

SEQ ID NO: 840138 - DNA, 100 bp, Homo sapiens
aaaacaaaattctgaactcaggacttggcaagagaacgtatttaccgggcagtcaaagatctattcctacatgagcccgaacaaatgctctggaatgcgt

SEQ ID NO: 840139 - DNA, 98 bp, Homo sapiens
agaggttgagagcttccagcagctgctcaatgctcggacacagggatcactgagattctgatgaacagaccttctgcccgcaatgccttggggaatgt

SEQ ID NO: 840140 - DNA, 98 bp, Homo sapiens
gtctacttcttccgggctgagagcaagtacacatttgaaaggctgactcttgcttgtggtggggtggccctgaattcttttgaggacctaagtcctga

SEQ ID NO: 840141 - DNA, 98 bp, Homo sapiens
ctgcatgttgcagccgaaagagcccataatgatgtcatggaagttctgcataagcatggcgccaagagacgagttgtactgctgtcacaggaaatgga

SEQ ID NO: 840142 - DNA, 98 bp, Homo sapiens
atagaagaacaagatgatcaagatggctcttcatggaaatgcattgtcaggcatgaacaaccgggaggtgctggagcaggtggagcgaggctacagga

SEQ ID NO: 840143 - DNA, 99 bp, Homo sapiens
ctgtctcctggtgaccgagcacccgcctccgggcatcttcaactggtctccaactgaattccttgaagagaaaatggcctaccaggaatacccaaatag

SEQ ID NO: 840144 - DNA, 100 bp, Homo sapiens
gtgaagccacttcattatatatcctggctggttggacatgaaggcaaaggcagcattctttctttccttaggaaaaatgtaactcagctccacctgaagg

SEQ ID NO: 840145 - DNA, 99 bp, Homo sapiens
ctgggcgaagcacgctactacctggtgcagggcctgattgaggactgccagctggcgctgcagtattcaagtcaaacaacgttgaaatggattgggtgt

SEQ ID NO: 840146 - DNA, 98 bp, Homo sapiens
tctgaagaggtcaaagaaacgtggcatcctgatgaaaagagattggaaggcctctccaagcaactggactgggatgttcgaagcattcagcgctggtt

SEQ ID NO: 840147 - DNA, 51 bp, Homo sapiens
acatggaacagggactcactgggggtatctcagatgaagacatcatcaaca

SEQ ID NO: 840148 - DNA, 99 bp, Homo sapiens
accggctggctgggcacacagacactgtcactggagtggccttcaacccatcagcgccccaggtgtttgcgagtaaaccccaaagggttagatgaagaa

SEQ ID NO: 840149 - DNA, 98 bp, Homo sapiens
ctacgtcatcttcgacagagcccagaagagggtgggcttcgcagcgagcccctgtgcagattctccggtgaagactcccatcaaggtgaaggtgatcg

SEQ ID NO: 840150 - DNA, 100 bp, Homo sapiens
ggtcattctcgctaacaactgcccagctttgaggcaatactgaacactgcgcagcttgcagaggtctcctggcagccctcattaggaattctgtctggcc

SEQ ID NO: 840151 - DNA, 100 bp, Homo sapiens
tggcaaaggaggaaaaaccaaattcaccatagagaatgtgacacggacaaggatagttttggctgatgtgtatctggaccttcgtcgatttggatctgtg

SEQ ID NO: 840152 - DNA, 100 bp, Homo sapiens
gcttgctcagttgtacacatgagcccgagggtcctcagcttttctttccataggttccagaggccgtagtttctttaacaaggtggtgactgtggatggc

SEQ ID NO: 840153 - DNA, 98 bp, Homo sapiens
tgctgtattcagctcaggaccaggcaccttctgtggaagctctcttcaatctaattcccgtgggcctgcgtgtagtggccatccaaggagtgaaggct

SEQ ID NO: 840154 - DNA, 99 bp, Homo sapiens
ggcgggtgctgcttgctgcaggctctggggagtcgccatggtactccaaagattcaggtttactcacgtcatccagcagagaatggaaagtcaaatttc

SEQ ID NO: 840155 - DNA, 99 bp, Homo sapiens
tttcgacagcgaacatgtcgcggcctgtcagatgccactgtgtacgtggggggcctggatgagaaggttagtgaaccgctgctgtgggaactgtttctc

SEQ ID NO: 840156 - DNA, 100 bp, Homo sapiens
gccatgacgacagtgtggaggggcccaaggaatttccccaggagaagatgtgtctgcggctcttcagaatgctgcttctaaattacttgggcaaaattgg

SEQ ID NO: 840157 - DNA, 100 bp, Homo sapiens
aaggattccaagtaactcttatttggaccagctggaagcagaaagaagaaaggccaatttcacagggcaccaaacaagtatgaaatgtaaatcagaaatg

SEQ ID NO: 840158 - DNA, 100 bp, Homo sapiens
tcaaagaaagcaagagatggaaaattgttgcctgaagaataccaaggaggatcttttagccctgcctctttcttgtcgcagtcagtttcatcatcagata

SEQ ID NO: 840159 - DNA, 100 bp, Homo sapiens
tgaagacgaaactcctgcacctgtatatagggccaagtcaattctggagacctgggtgtgggtcaagcaaccagatatttggagttcttacaacatggca

SEQ ID NO: 840160 - DNA, 98 bp, Homo sapiens
gagcctcgacatcctgcagaggcgggaggatccttgagggcactggtgcgactttcaggtgctggagaatctggtaaaagcaccattgtgaagcagat

SEQ ID NO: 840161 - DNA, 99 bp, Homo sapiens
ggactcatggaggctgagcatttattcaggggctgaaaatgtgctaaagcgcatgaccatcattggggttatcctcagtttcagggccatggcccaaga

SEQ ID NO: 840162 - DNA, 98 bp, Homo sapiens
gctgcttccagtgttcgccgagagaggtcggatccgcagctgcttgcccggttctactatgccgacgaggagctgaaccaggtggccgcggagctgga

SEQ ID NO: 840163 - DNA, 100 bp, Homo sapiens
tccatctccccagactgcagcatgctgtgctctgcagctggagagaagtcgtttgtcccgctggctggaagcctggcagtgacacgattaagcccaacgt

SEQ ID NO: 840164 - DNA, 98 bp, Homo sapiens
cgcggtcgcagatgtgtacgacatttccaacatagatagaattggtcgatcagagaagcggttattgagcattcgctgtgtaccaagtgctgtccttg

SEQ ID NO: 840165 - DNA, 100 bp, Homo sapiens
cagctttccctcccccttctttcgatcagagatcggcggagaccctcgaagtgcgcaaacttgacactcaccctgaccgatgcacccactgggcctatgt

SEQ ID NO: 840166 - DNA, 100 bp, Homo sapiens
ctttttcaattggtctaggaccaaccactgttccatccctgacccatctttgtcgtttggaaattcggtccagtctaaaatcagaacgtctacggtctga

SEQ ID NO: 840167 - DNA, 100 bp, Homo sapiens
ttcctgggaaggtggagccaccagcctctccttggttggacgtgataagtatgagcctgcagctgtttcagaacaaggtgataaaaagggcaaaaagggc

SEQ ID NO: 840168 - DNA, 100 bp, Homo sapiens
attgtatgaaaatggtgtgactgattctctgaagagtaactttgccctcctcctaaagaattctgcttggtcagaatcgtgatggcattgtgttcagcac

SEQ ID NO: 840169 - DNA, 98 bp, Homo sapiens
ggctgcgggaaatcgggctgaagcgactgagtccgcgatggaggcctgtcccaggctctctatcttctctgctacatctccacaacagacagagacag

SEQ ID NO: 840170 - DNA, 99 bp, Homo sapiens
aatgacgtggaagctcctctcagaaggtaaatactacagtgaggaggccgaggtggatctgcgggaccctggcagagactatgagttatacaagtacac

SEQ ID NO: 840171 - DNA, 100 bp, Homo sapiens
cttttccttggagagtcataacatatcactgactgataacttcactcttctctgcaacgaatcccaaaagtatataattgagctgactgcaaggtacttg

SEQ ID NO: 840172 - DNA, 100 bp, Homo sapiens
aagctctgttacgtctccaggatacctacaatttggatacagataccatctcaaagggtaatcttccaggcacgtgtggttctcaaatataggcattctg

SEQ ID NO: 840173 - DNA, 100 bp, Homo sapiens
cctgcctccgggcacacccggctccccggacgcctcggccaagatgttcataaatataaagagcatcttatggatgtgttcaaccttaatagtaacccat

SEQ ID NO: 840174 - DNA, 100 bp, Homo sapiens
gtctgcctgacttctcacccatcacgttatacgcctcatgctgcagtgaccctctgtcaggttcagaagttgttagcggttctcgagatgccactcttag

SEQ ID NO: 840175 - DNA, 125 bp, Homo sapiens
gttttattcaggctcagtacaactgtgcctggaaccagatgccctgtccgtcggcgctggtacttacagattccagtctgctgttagatgattattcatccaagttgagccccaaaccaaagaga

SEQ ID NO: 840176 - DNA, 100 bp, Homo sapiens
ggaacacgtagatctgggtgcatactattatagaaaatttttctaccagaaggccagaagaaacagccttggaggtgatgtcttatttgtggggaaacat

SEQ ID NO: 840177 - DNA, 99 bp, Homo sapiens
atgatggctatgcaccacctgatatcaccaactctgtacaggaagaggcacatacaaagaaaagaatccccgaaagggcggtttgtgatgctcctgcca

SEQ ID NO: 840178 - DNA, 100 bp, Homo sapiens
cttcattcgagatgagtttctgaggatctactacctgtctttagagttctatatgggacggacgctacagaacaccatggtgaacctggccttagagaat

SEQ ID NO: 840179 - DNA, 99 bp, Homo sapiens
cgcttcaagaggttcggaagtgccaaggtcatccggtccctccacgggcggctgcagggtggagagtttgctctccaaagctcggggaattgattccag

SEQ ID NO: 840180 - DNA, 100 bp, Homo sapiens
ggcggtgtgggcgcgtcaggccgcgacgagggcgctgagggcccgtcacagctggagctgactctccaggcatccaagcaaaatggcacctggccccgag

SEQ ID NO: 840181 - DNA, 98 bp, Homo sapiens
ttgtcaacttcaccactcaggctgaacgcaagattcgtatcattatggcagagcccctgtctgatcttgtggatcaaagtatatttaattttatccca

SEQ ID NO: 840182 - DNA, 99 bp, Homo sapiens
ctgaagcaaaagttgcagtcatacaagatctctcctggagggataagccagatgacccctaaatccaaaaggaagagtatccatagccgaatgctgcgg

SEQ ID NO: 840183 - DNA, 100 bp, Homo sapiens
ccccctcaccaatttagccattccagggcctggaggctctcaaggcatggccagacgctctgtcttgtacttcatcctgctgaatgctctgatcaacaag

SEQ ID NO: 840184 - DNA, 105 bp, Homo sapiens
gccgggaagaggcgctcctcacttcccagactgagcgtgcctaccaaaagcagccgaccatctttcaaaacaagaagagggtcctgctgggagaaactggcaagg

SEQ ID NO: 840185 - DNA, 111 bp, Homo sapiens
gtcattatacttggtgcagagtttgcctggcatctctcgctggtttgaagtggaaaagcgtgaagtgctcccacatgtgtttgtgaattgtgttgaatgctttacattgag

SEQ ID NO: 840186 - DNA, 100 bp, Homo sapiens
ctgagctcgtcaagcagctgtcggccaagctcatcgccaacgtgatgggtcgttcccctatgactctgtcccttggcagcagaacaccaaccagcctccc

SEQ ID NO: 840187 - DNA, 100 bp, Homo sapiens
atccaaagagtgtctgacatttcttttgtgcaagatgagcctcaagtgcttctgcattacattggatgaaaaatctgacaaacagtatgctgaaaattat

SEQ ID NO: 840188 - DNA, 100 bp, Homo sapiens
tttcctcagaactactatattcagtggctaaatggctccctgattcatgatgggcttaggtcacgagcaaggatttggagccccttgtttaaaatgcaaa

SEQ ID NO: 840189 - DNA, 98 bp, Homo sapiens
gagtgtatgcactttactacaaagatggacttctctgtacaggtcattatccaacttttagaggtgatggatcatctgcatagaggggaattggttgc

SEQ ID NO: 840190 - DNA, 100 bp, Homo sapiens
gtgttccttccccgtgggggagggggctgccacaggcatgatctttgtgctgggggcggcgactggcggcgcgatggacctgaccgggctcctgctggac

SEQ ID NO: 840191 - DNA, 100 bp, Homo sapiens
atggagctactgtactggctattggaaggaggagattctgaagataaggaggtctgttgcggttctcccacttttccataagcagaacaagaaccaaatc

SEQ ID NO: 840192 - DNA, 100 bp, Homo sapiens
ccggatattcagttgcacatccccacatcaatgcactgccaatgctcggtcaaggagtgtgatgactggcgagcagatggctgccttccatccatcgtcc

SEQ ID NO: 840193 - DNA, 145 bp, Homo sapiens
ctgaacaaatgcctcctgaggatttctgtgcctggaaaatatctgttaacagactgcttttacacctacctccgggaagcagtttgttcgctatataaacatgttgataaacgacacgacgtttttgctcgatgaaagtctggag

SEQ ID NO: 840194 - DNA, 100 bp, Homo sapiens
cattgaccggtttcgctacaatgccaacagggcctctcaagtgcagagtaaactcaagatgctggagaagctgattatacttactcagctgttaagagta

SEQ ID NO: 840195 - DNA, 110 bp, Homo sapiens
gagagagaatgagccagagggacacgctggtgcatctgtttgccggaggtggctgcttcaacccccaactccactgctggtgcagccatgaactccttgacctctctcgg

SEQ ID NO: 840196 - DNA, 99 bp, Homo sapiens
gacttcttaaagcaaatcatcggacgaccagttgtggtaaaattaaattctggagtggattatcgagggctatgggagctggagcggagaggagagaag

SEQ ID NO: 840197 - DNA, 100 bp, Homo sapiens
tggcgcagccgggcccggcttcccagcctgacggttaccttgaggatagttttgtaaaatctggagtcttcaatgtatcagaacttgtaagagtatccag

SEQ ID NO: 840198 - DNA, 100 bp, Homo sapiens
caaggaaacctttccaacacagatgtccaagctgccaaattcaattagcagagcctcacagacaatggccaaatgtgtcaaagctgtcacagagggtgcc

SEQ ID NO: 840199 - DNA, 100 bp, Homo sapiens
gaaagaccctttgcacaaatcaagcaattctgtggtgttcttggtcacacatttatggagtttctgaagggcagtggagattactgccaggcacagcacg

SEQ ID NO: 840200 - DNA, 98 bp, Homo sapiens
ctgccaaattggttttgtagaagacaagtctgaaaactgtgcttctagttggattacagaaactcctatgaaattgaatatatggagaaaattggctc

SEQ ID NO: 840201 - DNA, 98 bp, Homo sapiens
ggaagagatgtttcacaagaagtctgaggccgtcagggttaccacacttgtaaactgtccccagaacccttccagcaggaaaaaaggacgttcgaaaa

SEQ ID NO: 840202 - DNA, 99 bp, Homo sapiens
cgaaaacaggcactggaccacttcaatgcagatgggtctgagcactattcatggccgaattgatcaagtcaaccaactccttgaactggatcatcagaa

SEQ ID NO: 840203 - DNA, 51 bp, Homo sapiens
ctgggtccaccaccttcaccaagtgagaaagatcagtctaaagaaaaggag

SEQ ID NO: 840204 - DNA, 100 bp, Homo sapiens
agcatttccacccctttcaacccccaatcagaccactgcattcagtggtattggaggactttcatcacagcttccaggtgccttggcatctcccaatggg

SEQ ID NO: 840205 - DNA, 100 bp, Homo sapiens
gcctgatgacctgctcatcagcacctaccccaagtccggccctggccaacgtcaacattgggagcctcatctgcaatgtaggggccggtggacctgctcc

SEQ ID NO: 840206 - DNA, 100 bp, Homo sapiens
gagctgagccaagcgtttactgggcagctgttacgtctggctcttgctgattgaattcctttggtgcagtttagcatgttcctctgtgttctgcatctcc

SEQ ID NO: 840207 - DNA, 108 bp, Homo sapiens
cattcttagcagaatggggtgatcgctctcaactaactacaattgtattggcagctagagaggtagctacagcaagctgggtagcaggcagatccaaaggatatcatg

SEQ ID NO: 840208 - DNA, 99 bp, Homo sapiens
cttgaggtgttgggaatctggagatgatccatgggtagaacatgccaagtggtttccaaggagtaaacatggaagtactaacttcattccagaacaatt

SEQ ID NO: 840209 - DNA, 100 bp, Homo sapiens
ctccatccagatcagctgaatcagagtttgcattgttaacaagataccctcaaaaagttatggataaaatacttagtatggctgaaggcatcaaagtgac

SEQ ID NO: 840210 - DNA, 99 bp, Homo sapiens
cagcctttggacaactattttcgtcatctttggaacaaaggttactggttgcctagctataaattgaagtcttcctgggccacaggcctccatctctct

SEQ ID NO: 840211 - DNA, 100 bp, Homo sapiens
gggtacattgaagaccttaagaagtttctaaaacaatctttggaagaactaccagaaacgagtgggaaaacaacccggagattcttctttaatttaagtt

SEQ ID NO: 840212 - DNA, 100 bp, Homo sapiens
gttactttcctacagagatatccaggatagcttatcctgtggtgcagatggccacccagtcaggaaagaatgtatatttgacggtcaccaaggaatctgg

SEQ ID NO: 840213 - DNA, 100 bp, Homo sapiens
ctccgccccagacctgtcggcgaaaggagaagccaaggcatgcgtggtgcacggctctgacctgaaggacatgacatcggagcagctcgatgagatcctc

SEQ ID NO: 840214 - DNA, 123 bp, Homo sapiens
ttagatgccagcgcagaagggacgtgagcccagccgaggtaccgctgaagaggaatcaattttgcagagcatcctggccagaacaagccaaggagccaagacgagagggacacacggacaaac

SEQ ID NO: 840215 - DNA, 98 bp, Homo sapiens
gccgatggtgtttgtatgacgtttatgaagcagattgcagggtttggaaatcccttgtctccaggttgctgggattgacttcttgctcaattgaaaca

SEQ ID NO: 840216 - DNA, 100 bp, Homo sapiens
aagaccgcatgtgccattaataagcaaactgaccgggcaaatagattcgagtatttattaaagcagacagaactttttgcacatttcattcaacctgctg

SEQ ID NO: 840217 - DNA, 99 bp, Homo sapiens
tgggatctctatgtcggcatgtagagaaatagcagagtctcgctctcagtcaaaatctccaacgggaactcctgctcgtgtaaaatcggagagcaggtc

SEQ ID NO: 840218 - DNA, 103 bp, Homo sapiens
tacagacagtacacataaatgaaaatttcgccaaattggcagaagccctctacattgctgatcggaaggtgggattatagtgcaacagaagaaggtatgaaag

SEQ ID NO: 840219 - DNA, 99 bp, Homo sapiens
ttctagggttctaagtgatgtccaggaaggaggaggaataatatttatggagcatatattatggaacacagcatcttgtactgatgggagacttttcaa

SEQ ID NO: 840220 - DNA, 50 bp, Homo sapiens
ctctaagatacccaagatatggtggacaagatcgaggaacttgatcaaga

SEQ ID NO: 840221 - DNA, 98 bp, Homo sapiens
cccaaaggaggaaacagctggctaagctcatcattgttactgcctggctttcgaaaacatctgggcctgctggagaaaaagaaagattacaaacttcg

SEQ ID NO: 840222 - DNA, 98 bp, Homo sapiens
agaaatgtgctaagtgctggtggaagtggtgaagtaaaggtgctggtgtttgtccactcccggaaggagactggaaagacagccagggccatccggga

SEQ ID NO: 840223 - DNA, 100 bp, Homo sapiens
aaaagcgatgactgtgaaggagttcaggcagctggccaacagtggcaactgtgttctcatttcacccaagacctttggctagatcagaacataaaaaatt

SEQ ID NO: 840224 - DNA, 98 bp, Homo sapiens
cacaaaagcacacaaagacctcctcctccacaggggagacagagtgctattatcatctctggaggacctaattctgtgtatgctgaagatgctccctg

SEQ ID NO: 840225 - DNA, 100 bp, Homo sapiens
ggcctgatgccttacacgaattacacatttgatttcaagcaagttgtcctcgaagaaggtacaattgcttttaaaaattgggttaaaacaggcacagaag

SEQ ID NO: 840226 - DNA, 100 bp, Homo sapiens
atccccatcatagtcctccccctcatatctggagtccatctttcaccatcttctcctgagattgtactggaccgtgaccactcttcttccattggctgcc

SEQ ID NO: 840227 - DNA, 100 bp, Homo sapiens
aatacatgaaggagacctagtggaagtggttctttcaggtcaaggtgaagatgttcttaaagggtcccagattacgtatgttacaggtgtagaaggggac

SEQ ID NO: 840228 - DNA, 100 bp, Homo sapiens
gatgtggcatttgtttgcccaagacatgaaatatgcattggagggcagcggtagtagtggtgttcaattttgccatggttctgctcatttttcctgcaat

SEQ ID NO: 840229 - DNA, 98 bp, Homo sapiens
ctgattcaacttggagatgagcgggtctgtcctcttcacggcgggagaaaaatggctacaaacttcctagcacatgagaagatctggttcgacaagtt

SEQ ID NO: 840230 - DNA, 100 bp, Homo sapiens
tcattgaagcttggaattacatagctggaaaggatcttacaggacaaagtattttggacagatatcatcaacgaagccattttcagtgccaaccgcctca

SEQ ID NO: 840231 - DNA, 100 bp, Homo sapiens
aaaactgtttctttggggacaagcactttatatcatcgcaaaactcctggcctacaacacagcagtcccctcaggatgagcaggaaaagctcttggatga

SEQ ID NO: 840232 - DNA, 99 bp, Homo sapiens
tggagtgcgtgggggaccggctgttggcggaggccatgtggaagtgttacatcaccttttgcttggaaagatttactaagaagtcaaatagtgggttcc

SEQ ID NO: 840233 - DNA, 128 bp, Homo sapiens
gactgtaagcagtggttataacaccaaaaaaataggcaagaggcttaatatccagcttaagaaagagctggaagtcgagtgtgctactcaactcaggagatttggagacaaactgaacttccggcaga

SEQ ID NO: 840234 - DNA, 98 bp, Homo sapiens
tttgtatggggcaagaacatccgagggtgcctgggaatcggtcgcctggaggaccagtatttcccatggaggcgccgacaccatgtggatccaggttc

SEQ ID NO: 840235 - DNA, 100 bp, Homo sapiens
cctgaagacttcacctactttgcaaaccatacctgccctgaaagactcccttccatgaatctccaagaaggagaagcttctctcgcagccggagcaggta

SEQ ID NO: 840236 - DNA, 100 bp, Homo sapiens
caaggataagtctcatgacaccgtagctacagcaagctgggtagcaggcagatccaaaggatatcatgaagtttccagggcctttggaaaaccagagatt

SEQ ID NO: 840237 - DNA, 100 bp, Homo sapiens
caagagatgcagtctgctggatcacagagaggtggtggaagctacaatgattttgggaattacaacaatcagtcttcaaattttggacccatgaagggag

SEQ ID NO: 840238 - DNA, 98 bp, Homo sapiens
ccagaagaaaagaggcattttccccaaagtagcaacaaatatcatgagagcatggctcttccagcatctcacaattccatcacccagcacaaggtctg

SEQ ID NO: 840239 - DNA, 98 bp, Homo sapiens
aagacgtggtgaccaatggcattggccgtgtggagggcattgcagtggactggatcgcagaggaagctgtccccgctgtctgcaagaccaggacggtc

SEQ ID NO: 840240 - DNA, 100 bp, Homo sapiens
tcgggtcatggaagaaatccggaatttaacagtggagtatagtcatggccaacagcaaaaaactcaagagggggaactgaaaattagtgctgtgttttca

SEQ ID NO: 840241 - DNA, 98 bp, Homo sapiens
ggagccgcagccggcggaggaggcagtagcgggggactcgatggaccgcggctggcaaataacgaaggaggcccaacttcattcaataaggagcctga

SEQ ID NO: 840242 - DNA, 98 bp, Homo sapiens
gcgccccgctctgctgtgggcgctgctggcgctctggctgtgctgcgcgacccccgcgcatgacccaacatgagtgaagtttcctgcaagaaacggga

SEQ ID NO: 840243 - DNA, 100 bp, Homo sapiens
caacactggtccctgttgccccaccaatatgccaggctatcgccccattccagcggagacttatgtaggagggaccttccctctacctcccccagttagt

SEQ ID NO: 840244 - DNA, 98 bp, Homo sapiens
aacgttcaccaagtgggtcaacaagcacttaatgaaggcttattgtgtaacagaacctggagcaggctctgatgtagctggtataaagaccaaagcag

SEQ ID NO: 840245 - DNA, 100 bp, Homo sapiens
ctgcggtgtaaacagccgcggcgggcaggccaggactgtcagtgcccgcccctcggggcagataatcaatatgcatttccaagccttttggctatgtttg

SEQ ID NO: 840246 - DNA, 98 bp, Homo sapiens
caacgtcttgaaaggagtgcttatagaatggctaccaaagtgacagcagatggcgagcagaccggacaggatgctgagaggaccaacacaagagcaaa

SEQ ID NO: 840247 - DNA, 98 bp, Homo sapiens
tggcatgctgaaaatacgaatcggttttccaagagataacttcaccaagatgtccagtgataggcaaaggtccgatgatgagagccccagcaccagca

SEQ ID NO: 840248 - DNA, 98 bp, Homo sapiens
ccttcaatgccgtcgtcaattacaccaacagaagtggagacgcacccctcactgtcaagaacaggcctttgagagcagccagaagtacaaagagggga

SEQ ID NO: 840249 - DNA, 90 bp, Homo sapiens
aaatgaaatccagtgaagaaatgatcaaaagtgagctggcaacctttgacctttctgttcaagtgggaatgtaagacggacttagatatt

SEQ ID NO: 840250 - DNA, 99 bp, Homo sapiens
ttctccagacgtcccccagcccaggcgagtcgggcatttggatttgatcccaaagtcgacagttatgttgagaaggcagttgctgtgtttggtggattt

SEQ ID NO: 840251 - DNA, 98 bp, Homo sapiens
gcgtccggctgtggaagagagcggcggccgctcacaacatgcacagcctggcgacggctgcgagttagactggctgagcaacccaagcttttgtgttg

SEQ ID NO: 840252 - DNA, 100 bp, Homo sapiens
ggtttttggatgcagcatagtcatggtgatgggtattacagatgtagatgataaaatcatcaaaagagccaatgaggccgaaatagaactatttgtgaac

SEQ ID NO: 840253 - DNA, 98 bp, Homo sapiens
cctcgaccgctcgcgtcgcatttggccgcctccctaccgatccagacctctctgatatgaagaataatgagccttatgactataagtttgtgaaatgg

SEQ ID NO: 840254 - DNA, 100 bp, Homo sapiens
taactcagtcactggctgcaacaggaccacagtcaagacgatcatagtcactgacttaattcagtgcacaaatgagatgaatgtgaacatcccacagttg

SEQ ID NO: 840255 - DNA, 100 bp, Homo sapiens
acaataaagcttctcctttgggttgtactcatagattgtgtaggcgttggtcttctgatagcaactttaatgtggtatgttgagtctaaaaaggacagag

SEQ ID NO: 840256 - DNA, 100 bp, Homo sapiens
ctgcacatgcgtttaatcacacaccaaaaactatgaatggagacatgagggtttattacccagaactctttgtctgggtcagtcaagaaccatttccaaa

SEQ ID NO: 840257 - DNA, 100 bp, Homo sapiens
atctcttctatgccgaagacttcagcacaatggatgagataagtgaaaaactcaagaaaggcatctgtgaagaaaaccgtgaggacatactgaatgccgg

SEQ ID NO: 840258 - DNA, 99 bp, Homo sapiens
gaaaggagatcacagagaaagtgattacagacattgccgggtagtcaaatcagcctagcagaaacaaagtacgttaaccaatggaaaactgacggagag

SEQ ID NO: 840259 - DNA, 100 bp, Homo sapiens
tttgaattcacgcttatggtagtggatgctgtcttcgcaggtgccatgcctacaatggcaagcgtcaagctgtctacacttcatcccattgtgaatcatc

SEQ ID NO: 840260 - DNA, 99 bp, Homo sapiens
taacatgtatcctggagcgaatcctaccttccaaacagcattttctgcattagcaaatatcgacctggctttagaacaaggagatgcactggccttgtt

SEQ ID NO: 840261 - DNA, 100 bp, Homo sapiens
agaaactgcagcaccgcctcattgagccaaacgctgcgacttaaaaggaattgtattcgtcatccagagtcaaagtaattcttttcatgcaaagagagca

SEQ ID NO: 840262 - DNA, 98 bp, Homo sapiens
cagcagctcctgcctattctcctaacatgtatcctggagcgaatcctaccttccaaacaggtggttgtactacaatcccagagtcagacctagaagaa

SEQ ID NO: 840263 - DNA, 100 bp, Homo sapiens
tgccgttctccagcgctttacaggggttatcgcacttaagcctcggaacaactttaccagggtcaaagaattgactgtagatccaactgctgctggtgat

SEQ ID NO: 840264 - DNA, 98 bp, Homo sapiens
tttatccaaagattaaaacttgaagcaacccttaatgtgcatgatggttgtatgaagatcagcttcgtgcaaagggttatgacaaaacaccagacttc

SEQ ID NO: 840265 - DNA, 100 bp, Homo sapiens
gccgggggaggtgaaggaccggatcctggagaacatctcgctgtcggtgaagaaggcacgcacagaggctgggctgcggtccagatgcgtttgctccatg

SEQ ID NO: 840266 - DNA, 98 bp, Homo sapiens
catactattgattgggtgcgagaaaaatgtaaagacagagaaaggcatagacgggtagtagatgatgactccccagagatgtataagacaatctctca

SEQ ID NO: 840267 - DNA, 98 bp, Homo sapiens
tgatcggactttgtgcttgcatttgccgaagcttatatcccaccattgccacgggcattctccatctccttgcaggacgggtagttttccaggttcct

SEQ ID NO: 840268 - DNA, 100 bp, Homo sapiens
ctccatcccacactgcccagctgggtggcggagtttgtggatcggatattccttcctcatgaataccctctaccatctgctttggtcagggtgccgctcg

SEQ ID NO: 840269 - DNA, 98 bp, Homo sapiens
actcagatggagttatccccagctcccactataattttgtttggctatgccaccacagtcatccccagggtctatacatactatgtttcaactgtatt

SEQ ID NO: 840270 - DNA, 98 bp, Homo sapiens
gcagccccgggcacggcggaggcagcggagccctgggccatcgcgctgataaagcagtttgtgtccgacgtggcctggggggagctggactacctggt

SEQ ID NO: 840271 - DNA, 100 bp, Homo sapiens
aaggagttccctctgtctggcccacatcctcccaggcccttccatggactgaccagggtcctgggtgccaggtttgttggagactgaaccgttgcaagga

SEQ ID NO: 840272 - DNA, 98 bp, Homo sapiens
gctgaatagactgcacctggctatcccaaccaggagggacgataagttgttcagcacttctggtctcttcagttctgatatgattttaggattgcttc

SEQ ID NO: 840273 - DNA, 99 bp, Homo sapiens
tttttcctatgcgtttaatgttgagattgggtgcagaatataaaggaaattatggaagtggaaattacaatgattttggaaattataaccagcaacctt

SEQ ID NO: 840274 - DNA, 100 bp, Homo sapiens
agaccgtttgtgttttgtgatggaatatgttaatgggggcgagaatggtaccaaaccaccactggatgcagatgtaaatttggaagcaattgctggtgac

SEQ ID NO: 840275 - DNA, 100 bp, Homo sapiens
aagcctttaccaacgccatcaccgacctcatcagtgagctgtccctgctggaggagcgcttccgggtggagtctgtatttgagacactggtagaggacag

SEQ ID NO: 840276 - DNA, 100 bp, Homo sapiens
aggaggcgggggcagccgctgagacggtttttcacaaggtgccatgcctctgcaactcctcctgttgctgatcctactgggccctggcaacagcttgcag

SEQ ID NO: 840277 - DNA, 100 bp, Homo sapiens
atgcagacattgaagccgtgaaggagatctacagtgagaactctgtatccatcagcaatcaaggagaccgcgaaggcgtacattcccgggtgttgcttcc

SEQ ID NO: 840278 - DNA, 98 bp, Homo sapiens
gagaggcgagctcgcgatgagtggtctcggcaggctcttcgggaaggatgtacaggtggatcatctgaatctcctgaaacagtttgaacacctggacc

SEQ ID NO: 840279 - DNA, 101 bp, Homo sapiens
caaggcctgagtagccggtaacaaacgagggttcccgggattggaccgacgcagccatggggctgggaaccgacgaggactctctcattgagatcatctgc

SEQ ID NO: 840280 - DNA, 99 bp, Homo sapiens
aaaccgtggctgctcgataaatcagacagaacagttaatcctcaatttaagcctgatctaacccctagaaacagatgagtcagatgaagccccatgtgt

SEQ ID NO: 840281 - DNA, 98 bp, Homo sapiens
cagtcactggctgcaacaggaccacagtcaagacgatcatagtcactgtgccgcagaatggaattcggcattgttcctacacagcttctcggcaacat

SEQ ID NO: 840282 - DNA, 100 bp, Homo sapiens
gcagtcggcttctctacgcagaacccgggagtaggagactcagaatcgaatctcttctccctccccttcttgagatgggggtcttgctctgtcactccag

SEQ ID NO: 840283 - DNA, 98 bp, Homo sapiens
gctcgatcgctgcccgccgccagcatgttgggcgccccggacgagagctccgtgcgggtggctgtcagggaggttatattcaaaagaaaaaggaactg

SEQ ID NO: 840284 - DNA, 128 bp, Homo sapiens
gatggccccaggtgtaagcgcagaaagcaggcgaacccgcggcgcaataacggacatggatttgattgacatactttggaggcaagatatagatcttggagtaagtcgagaagtatttgacttcagtc

SEQ ID NO: 840285 - DNA, 98 bp, Homo sapiens
ttgactgccatttttggctacttgacattctatgctagtatgttcaacacaccaggaatgcagagcttgttgcaacaaataactgaaaacccacaact

SEQ ID NO: 840286 - DNA, 100 bp, Homo sapiens
ctgtttgtaatgtatgccagtttaggtaatcctcctcttcccaatccttttggtgatcctaatttatcacaacctataatgccaattcagcagaatgtgg

SEQ ID NO: 840287 - DNA, 98 bp, Homo sapiens
caagaatccaaagaaaacaaaatggtggtatcatggtgactctgttttgagaagtgcaaccagatctctcctggaattcaacacaacagtgagctgtg

SEQ ID NO: 840288 - DNA, 100 bp, Homo sapiens
actcgctggagagggagacgcaggaagcgatgaaagagatgtctgctaagcactatcctttgtactccctcaacgtggcctccatgtggttgaagctagg

SEQ ID NO: 840289 - DNA, 98 bp, Homo sapiens
tcaagcccgaccaatacactgaggccctggcccagagggacaagcttgagaaagagatccaagatcttgaaaaagctgaactgcaaatctcaacgaag

SEQ ID NO: 840290 - DNA, 100 bp, Homo sapiens
gactgtctctgtatagtgacaaccaagagtgcctggtgaagaatgtgatgggatcactagcatgtctgcggagagcggccctgggacgagattgagaaat

SEQ ID NO: 840291 - DNA, 100 bp, Homo sapiens
acatttgaacaaattaggaagctgaatcctgcagcaaaccacagactcaggattctaacattttcagagaaccttttggaaagaacaagcctacttcaat

SEQ ID NO: 840292 - DNA, 99 bp, Homo sapiens
agatattgtgctcttgccctgtatccatcatttcttgtctgtacaaccatatccagttgtctagtaatttaatgcctggctgtgactactcacttttta

SEQ ID NO: 840293 - DNA, 99 bp, Homo sapiens
attacgccccctatcctatccgcaaacaactatgtcttcagcagtggtgcagttatatgcagcagatcggaactgtatgtggtcaaagaagtgcagtgg

SEQ ID NO: 840294 - DNA, 98 bp, Homo sapiens
tggattaccaagttcaaattcaagaagagtttgaagaaagttctgaaattctcctgaaggagtttcttaaggtcctggacccaagccagaagcctctg

SEQ ID NO: 840295 - DNA, 99 bp, Homo sapiens
agcgaagttggcagcaggtctggtgtgctggtgtttggggcacgtccagcctctttggagggtgtccggtggagagctgtttgaccggatagtggagaa

SEQ ID NO: 840296 - DNA, 100 bp, Homo sapiens
cacacacagatacggagaaccagaagtgccagagtcagcattctggaagaaaatcatagcatatcaacagaaacttctatggcgggaccactggatgcag

SEQ ID NO: 840297 - DNA, 100 bp, Homo sapiens
gttgctgtagtcatctacaataataaatccaaagaggagccagttaccatgactcatccaggacatggatttgattgacatactttggaggcaagatata

SEQ ID NO: 840298 - DNA, 100 bp, Homo sapiens
taagctatcactggacatatcaaggacttcactaaattagcaggttgttcctggtcattgagtacgtcaacggcggggacctgatgttccacatgcagag

SEQ ID NO: 840299 - DNA, 99 bp, Homo sapiens
tttgctggtctttcttggactattccagagagagattaaaatggcttccagaggaaagacagagacaagcaaattaaagcagaatttagaagaacagtt

SEQ ID NO: 840300 - DNA, 100 bp, Homo sapiens
ggattctcgctgtgacagagacaacaccgagtatgagaatgtactaatggtcacttgatgtgcgctggctgttttatccacctactagcagatgcccggc

SEQ ID NO: 840301 - DNA, 99 bp, Homo sapiens
agacagcctggagaagagcgaccagctcactaagaacatggtttctctggaaacccccctggtaagtgtggaggaggcgggacactctgacccaagacg

SEQ ID NO: 840302 - DNA, 98 bp, Homo sapiens
catagcaaccagcaccaaatgaaagagtacacgtcatggaggaagctcaccagtgtgggaaggggcttctcatccactgccaggctggggtgtcccgc

SEQ ID NO: 840303 - DNA, 100 bp, Homo sapiens
ttaagaaaccgaaatttgtcatttatgcattatggctaacttcagctgatattttgggggaagaaaaagatgaaggatttgggggcagagcacttggcag

SEQ ID NO: 840304 - DNA, 98 bp, Homo sapiens
ggattctggacttcagctcactgctgaaaaagagaggcatgaaagtcattgagagtcgagcccaaaaagatgaagaaaaaatggaaattcaggagatc

SEQ ID NO: 840305 - DNA, 100 bp, Homo sapiens
cttggccttcctcacgctcctgcccacctccatcagccagttcttctccggtgccgtgagcgatgtggagatgcaggaacactatgatgagttttttgag

SEQ ID NO: 840306 - DNA, 100 bp, Homo sapiens
ctgcagctgaataacccttttaacgagtattccaaatttgatggcaagtctgtgctgagacctataaccctgatgaggaagaggaagatacagatccaag

SEQ ID NO: 840307 - DNA, 100 bp, Homo sapiens
tcttcaatctggaaatgacagaacaatcaccctttaaaataaggaagtgcaattcagtgaagacaggatgtcttccaagcgaccagcctctccgtatggg

SEQ ID NO: 840308 - DNA, 100 bp, Homo sapiens
caacatggcgcagtctattaacatcacggagctgaatctgccgcagctagaaatgctcaagaaccagctggaccagtttgacaagtatgcgcccaagctg

SEQ ID NO: 840309 - DNA, 100 bp, Homo sapiens
cacgccgacagcgtggccaagcgtccggagcacaatagatctgaagccttgaagactccgtgggaaggaggcttgtttaaactacggatgcttttcaaag

SEQ ID NO: 840310 - DNA, 98 bp, Homo sapiens
aggaaaatcacagaggtaaagcatcatttcatcacatcctgtcaagggtgggccgtaccttgtctaaggtccaacaagtgctgagctggtcgtatggg

SEQ ID NO: 840311 - DNA, 100 bp, Homo sapiens
gcagtgaaggagtgcagaggcatcacctgaaaggtatttattacagtatcaggagccaataccttgtgagcagttggttacagcgctgtgtgatatcaaa

SEQ ID NO: 840312 - DNA, 98 bp, Homo sapiens
agagagtgcgcagaaggattccgggagcacagttccgccgagacccaaccctggaagaaaagatggaatattttcagaatcaacttttaattctccac

SEQ ID NO: 840313 - DNA, 98 bp, Homo sapiens
ggcctggcgagagccctgagatcagctctaggctagggagctcggcagaaacccgtgggggagagagggcaccccagattatgtttgagaccttcaac

SEQ ID NO: 840314 - DNA, 98 bp, Homo sapiens
acttggaagataacagcgacctcttttctgaacaggtctcagccaatttcttctccagtcatcctccagtttggtcatgcagagactcttcttccact

SEQ ID NO: 840315 - DNA, 98 bp, Homo sapiens
gaaggtgtaatgagaaatgttaacttccttacaagtactggaagtcgaggctcaagaggttctcaaattgatagtcacagtagtaatagcaactatca

SEQ ID NO: 840316 - DNA, 99 bp, Homo sapiens
gagccccgaggaggcagagcacaaggagatggagatcctggtgcacctgagccgtggaggggctgaagtccagatctttgctcctgacgtccctcagat

SEQ ID NO: 840317 - DNA, 100 bp, Homo sapiens
ggcagtgatgagaagctgaagcagtgcctggtggccgaccttgtccacacagtccatgttctccttactatgacaatgtccgccccctctcttaccctga

SEQ ID NO: 840318 - DNA, 100 bp, Homo sapiens
acagccaagagccaggaccccctagaagtctagaaatggccctggccaacgtcaacattgggagcctcatctgcaatgtaggggccggtggacctgctcc

SEQ ID NO: 840319 - DNA, 100 bp, Homo sapiens
aaggcacagctgggtcctgatgaaagcaaacagaaatttgtgctcaaaacccccaaggaaatggaagttccagtattaccgaaaatctctctaccgatca

SEQ ID NO: 840320 - DNA, 100 bp, Homo sapiens
ccttggggaggagatcttggctctgcgtaagcagcttcacaggtacccaggatggaggagaaggaggccctggtacccatccagaaggccacggacagct

SEQ ID NO: 840321 - DNA, 98 bp, Homo sapiens
cccccaccaggatttgggcctgatgagcccagctgggtgcctgcctcatacttggagaaagactttccatttcaacacggttgaagaggttcattcaa

SEQ ID NO: 840322 - DNA, 100 bp, Homo sapiens
attactgatgggagcaagttgactaccaccagtggagtccaggatgaggtactgggaacagcttttgatcctttcttaggaggaaaaaacttcgatgaaa

SEQ ID NO: 840323 - DNA, 98 bp, Homo sapiens
gaatatgaaattgcatgtgaacacgaacactctaattgcctcctgatagcacacagaaagggtctaaaattcccaggactccacagctttgcaccaga

SEQ ID NO: 840324 - DNA, 99 bp, Homo sapiens
cccagcccgcctctgtgccactttgcatcccacgccggaggaggcattaacgagaccggagcttggaggactcctgaagtatgtacgacccttcttgaa

SEQ ID NO: 840325 - DNA, 99 bp, Homo sapiens
tgtcagccagggctgaacccccgcagatacagtttatgtaacttgatggaagaaaatggaattactccaaaaagacaagtgctcaagcagcaaaatcct

SEQ ID NO: 840326 - DNA, 100 bp, Homo sapiens
acctgtttcacggagtcttgggacccagcatcagcccctcccacagccaggcactggtgaggtggattgatgatgaatcttctggcacacctggagcaac

SEQ ID NO: 840327 - DNA, 99 bp, Homo sapiens
tcctcctcactctgtccagtatacatttcccaacacccgccaccagcaggcaaggggagagccagttgcgcagagccctgcaaccagcagtccagggag

SEQ ID NO: 840328 - DNA, 100 bp, Homo sapiens
tgaatactgagctgctcggctatctgcaggttttccctggcttgctggaaagagtgattgagacagggcctcactgtgtcacccagggtggaatacagtg

SEQ ID NO: 840329 - DNA, 99 bp, Homo sapiens
cccgaggggctacacagtatataaggtcaccgcccgggaagaaatgcagagtaacgtggaagtggtccacacctaccgccagcacattgtgaatgacat

SEQ ID NO: 840330 - DNA, 101 bp, Homo sapiens
gggcttgaggctcgcgagcctccttcgccgcgccccacttgctcgtgcactttacacacatgaggcactactgcagtcttcagttaagcaacaagtagaag

SEQ ID NO: 840331 - DNA, 100 bp, Homo sapiens
cttccaacgccgaatggcatacaattagaagctgagaaaaaagcattctctgaaaaccttgatcctgagatattgatgatgttaagaagttcaaaccggg

SEQ ID NO: 840332 - DNA, 99 bp, Homo sapiens
tcgcagtttgactctggagccactcaggtttttcctaagctcaactctagccagctaggttcctggtgctttgggggtgcagtctttgcaagccacatt

SEQ ID NO: 840333 - DNA, 100 bp, Homo sapiens
acctgctgatacccagccaagcgcttcacaccctggtggccagagtctgaaactggttgttccagaagctgtagagaaatatgaagaagtgctacataat

SEQ ID NO: 840334 - DNA, 114 bp, Homo sapiens
aactcagcgcaggaggaccggctgccgccgccgccgccgccagcacaaacgtgcagatatctgatagccctttccgttgcactcaagaggaagcaagatcattagttgaatcgg

SEQ ID NO: 840335 - DNA, 100 bp, Homo sapiens
gagctaagacgctgtttcagagcgtttgggtcctctgaggccccttgaccagagctcctgaaattattcttgggttaccattttgtgaagctattgatat

SEQ ID NO: 840336 - DNA, 100 bp, Homo sapiens
ggctgcattggggccaaacacagaatcagcaaagaggaggccatgcgctggttccagcagaaggaacgtcaaggtcgtgggaaataaaaggcagttctac

SEQ ID NO: 840337 - DNA, 100 bp, Homo sapiens
tatagagcacctggaagcagtaacatgcaatgatacctgcaatatatcagacagaagctgatccattagctcaggttcgtcaggtccagagggaagatga

SEQ ID NO: 840338 - DNA, 98 bp, Homo sapiens
gggagccaacatggcagcggggttcgggcgatgctgcagggcctatggcatgtctgcgttacctttaaatctgataaaaggcactagaagcgctgctt

SEQ ID NO: 840339 - DNA, 98 bp, Homo sapiens
ggggtccagcctgctacggcggatttgacctgtacttcattttggacaatagagacggggtttcatcgtgttagccaggatggtctcgatctcctgac

SEQ ID NO: 840340 - DNA, 99 bp, Homo sapiens
cttgtcaagctgtgtcagccggccatgccacttcattttttggcccagccttggagcgctactcatcctttcaagtcaatggcagtgatgatattcggc

SEQ ID NO: 840341 - DNA, 50 bp, Homo sapiens
atcattttggcacagtcaaatctgaggaatctgtctgctattcaggatag

SEQ ID NO: 840342 - DNA, 100 bp, Homo sapiens
tttcggcactgcagtctaattccatctatcggttaaaaaagacttgggctgccgtcccaagattggagaaaaccaagtccctggcccagcagttgacaag

SEQ ID NO: 840343 - DNA, 98 bp, Homo sapiens
tcgatcctgagaatgaggacgaaggcatggatgaggagaagccccgaaacactctcttcaatctaattcccgtgggcctgcgtgtagtggccatccaa

SEQ ID NO: 840344 - DNA, 100 bp, Homo sapiens
cctccaagtgaagagcatttgtcaccacagtcatttgccatgtaagtacaaggtggactgtgcatgcctcaaagaaaacccagagtgccctgttctaaaa

SEQ ID NO: 840345 - DNA, 99 bp, Homo sapiens
ggaagatgccggccgtgtccaagggggacgggatgcggggcctggcggtcttcatctcggatatccgcaactgtactccaaagattcaggtttactcac

SEQ ID NO: 840346 - DNA, 100 bp, Homo sapiens
tgtatctactgtatccatgcactcagatgctgggctcttgcactgtttggtggaaatggtgagacaggatttgagcaaaattctacttattcagtgttca

SEQ ID NO: 840347 - DNA, 148 bp, Homo sapiens
aaactgtttcagagaactgctgggtcgagcaacttttgggaatatgaataatgctgttagaccagtttttgcccctctcaggaagtggtgaaggagatgatacaattctccaaggatacattggaaaagatagacaaggctcgttccg

SEQ ID NO: 840348 - DNA, 100 bp, Homo sapiens
ctttctggccgccgatatcttcgccatcgccagcatcgccaacccggactggatcaacaccggggagtctgcgggttgttattgatgccttcagattgat

SEQ ID NO: 840349 - DNA, 100 bp, Homo sapiens
tacctcctgcgaggcctcccgggctccgggaaaactacactggccagatacacaatcatcatcttactagttctctgtgttgctcgctaaccagtccccc

SEQ ID NO: 840350 - DNA, 98 bp, Homo sapiens
caagaaagatgattccttcttggggaaactcggagggaccctggcccggaggaagaaagccaaggaggagccagcccctgggcaacaaagtggaaatg

SEQ ID NO: 840351 - DNA, 100 bp, Homo sapiens
gtctactttgagaactcctccagcaacccatacctgatccggagaatcgaggagctcaacaagaccggagagcaatggtgtgatctccgcacactgcaac

SEQ ID NO: 840352 - DNA, 98 bp, Homo sapiens
aatctatagttaatcttggcgacattgacaatgatggctttgaagatgatgaggagtctgatgaggaagctgtgaagaaaaccaacaaatgtgtacta

SEQ ID NO: 840353 - DNA, 101 bp, Homo sapiens
ccggcaggcaccgggagatccgtagctcagacgccaggacatcccggaagctgggaaatggtgaatgtgccaggtgaactgcgccaggccactgtggccat

SEQ ID NO: 840354 - DNA, 100 bp, Homo sapiens
gccaccacgcctacctgcatgaccagttctggagctactggaatagatcaaccacctcagaagagccagattccacttctgtggccaggacttttacatt

SEQ ID NO: 840355 - DNA, 99 bp, Homo sapiens
cgcagaggaggagcgcagcccggcctcgggaccagttactctccacaagaaaattcacacaaccacagtgctcttcatagttcaaattcacattcttct

SEQ ID NO: 840356 - DNA, 140 bp, Homo sapiens
cagccacatcatatcacagtatcagttaaggagcttgatttgtttttggcatactacgtgcaggagcaaggaagtgtttggattgtgagctatttcagaactgttctcaggactcattattttaacatttgggagaaaca

SEQ ID NO: 840357 - DNA, 100 bp, Homo sapiens
gagtttgatgctcgctgggtaacatacttcaacaagccagatatagatgcctgggaattgcgtaaaggtggtgagatctgctgaggaagcggcatcagtg

SEQ ID NO: 840358 - DNA, 100 bp, Homo sapiens
aagcaacagattttgatgtcctttcttataagaagacaatgttgcacttaactgatattcagggggcacccaagccaattgccattgaaccatgtgctgg

SEQ ID NO: 840359 - DNA, 100 bp, Homo sapiens
ggcagccgtcaacagcctggtcaatttgtacctgcaggcctcctacacctacctctctctggtcatggaaaatggaagatttgcaaaatacaaatatttt

SEQ ID NO: 840360 - DNA, 100 bp, Homo sapiens
acttgtccacgacaccggctacttctcagctttaccatccctggaggagacctggcagcagggaggagattggacaggctggactccccattgcttttct

SEQ ID NO: 840361 - DNA, 99 bp, Homo sapiens
tcatcttaaggtctcaactggtgagccagaaagaggccatccaacccaaggttctaggagcagccgttgtgaaccagccactctccatacaggtgatat

SEQ ID NO: 840362 - DNA, 101 bp, Homo sapiens
gggagcgaaggctgaggtggcagcggcaggagagtccggccgcgacaggacgcatgccaatgaagatgtggaaagaatgttactaggaaacaagtgtgata

SEQ ID NO: 840363 - DNA, 98 bp, Homo sapiens
acaggatgatgatactgatgcggttgagattgctatcgacaacacggcttttatggacgagttcttttctgaggaaatgcatctacaaccacaactgt

SEQ ID NO: 840364 - DNA, 100 bp, Homo sapiens
tacaagttgaaaattcctaagaatccagaacttgtgccacagaactacactcctctggtgcaagtgtggtagctattgacaacaaaatcgagcaagctat

SEQ ID NO: 840365 - DNA, 98 bp, Homo sapiens
tgaagatcgatgcttttcattatatccagctgggaactgtctacaggaggagcaccgaacagccagttccctgagcagtggtgcccttacgtggacaa

SEQ ID NO: 840366 - DNA, 108 bp, Homo sapiens
cttggagccaactagaggcagggtcatccttgcccttgtcctcccctttcatccctatgtggaaaacgatgctgacaagtcggcctacctcatggggctgaactcagc

SEQ ID NO: 840367 - DNA, 98 bp, Homo sapiens
acgagctggagaaggccatcaccacgcagaacgtcaacaccaagtgcatcaccatccccaggtgaatcaattcagatatttgctgagattgagaactg

SEQ ID NO: 840368 - DNA, 98 bp, Homo sapiens
gtgttttgagtttctgactggcgtgccggaaagatcatgttagcacacccagaaacttcacacgatgcagaccccagttgatcatcatggagacccgc

SEQ ID NO: 840369 - DNA, 100 bp, Homo sapiens
tactaccactcacccgcagactccttctccagcatgggctcgcctgtcaacgcgcagggaatgggtactgttcaaaaaggaatgccccacaagtgttacc

SEQ ID NO: 840370 - DNA, 98 bp, Homo sapiens
cggccaaagtcactgctgttaacaaggatgtgttatagttttgccgctggactcttccctcccttcccccaccccatcaggatgatatgagacttgaa

SEQ ID NO: 840371 - DNA, 99 bp, Homo sapiens
ttcgaagggggctgcagcggagatccgagagcagggggatggggcagaggacgaggagtggggacgtgcttccttaacacaagagaaagagaagtttgc

SEQ ID NO: 840372 - DNA, 100 bp, Homo sapiens
ctatccagaacctccactctttcgaaatccaagggggagagtgatgacttccatatggactttgactcagctgtggctcctcgggcaaaatctgtacggg

SEQ ID NO: 840373 - DNA, 100 bp, Homo sapiens
ctggaagcacagaacggacttttcgtgtcccgctgtaaggaaacaagatggtccttaaaaccgaagaggaggacgaatctgggatgttaaccagaagacc

SEQ ID NO: 840374 - DNA, 100 bp, Homo sapiens
tgttccaccttcagagcgtcacggcgtacgccctcatggggaaaatctccccggtgactttcaggcttctcgtcagtgcctcgcaggatggtaaacttat

SEQ ID NO: 840375 - DNA, 98 bp, Homo sapiens
cattgaaaaatgctggccaggctgtcacaattgttgcacaatatcgacctgaagggtgagaatccttttgaaattcaagaccattctcaggatcagca

SEQ ID NO: 840376 - DNA, 100 bp, Homo sapiens
cttggggaagaaaccttgtgtacgcacacctgcacacacacacagtctccggaggaggaggctggggcagcagtgctgggcacctcagaggagaggacag

SEQ ID NO: 840377 - DNA, 98 bp, Homo sapiens
tcaggcgtgcgcggacggtgtgcggagcattggggagtcagcaatgtccgttgtgttaaatcagctgctgcccatgattaagcctgtaacccagagaa

SEQ ID NO: 840378 - DNA, 98 bp, Homo sapiens
acggtctgcatactcgctgcccgccggctccctcccccgcgtccctgcgaccgccgcggcgaagatgctcaatgtcaattgctgcaagcttagtgagt

SEQ ID NO: 840379 - DNA, 100 bp, Homo sapiens
tttgagtggtgatgcttttttacaccttcttccacatatcttcttggaaacagaattgttctacaaaggtatccgccctgcaattaacgttggtctgtct

SEQ ID NO: 840380 - DNA, 100 bp, Homo sapiens
ccaaaccagtcacctccccacccccaccgccaagcagccacgagaaagatctccagtctatgtgctgaagaagcagcagcccaagagcagacaggtcagg

SEQ ID NO: 840381 - DNA, 99 bp, Homo sapiens
ggctgccctgtggcctcgctcctcggaggtgacatcgatgtggcccagcagttcagcttgaatcagagtagagtggaagagataaccatgagagaagaa

SEQ ID NO: 840382 - DNA, 100 bp, Homo sapiens
atgggatgtcaggtcgggaaccatccttggaaatcctgccgcggacttctctgcacagcatccctgtgacagaaatggtggagtcaatgaagaaagtagc

SEQ ID NO: 840383 - DNA, 100 bp, Homo sapiens
ctacttattcatcagtttgttgtgcttgtcaagatcagggaagtcgagacaacatgagtgtgattttgatctgttttccaaatgcacccaaagtatcgcc

SEQ ID NO: 840384 - DNA, 98 bp, Homo sapiens
aaaaaacacctgttggtccacgcccctgaagacaagaaagatgacattctacgaatggattccaccaatgcagatgctctgtatgtacgaggtctttg

SEQ ID NO: 840385 - DNA, 100 bp, Homo sapiens
tctgtgctccaggactccctcaataatgaaatggtgttcacactggccctgaatcaagggaacaccagttttcacatgctggcagaagcaatggccgggg

SEQ ID NO: 840386 - DNA, 50 bp, Homo sapiens
cagagtggagccatggctagagatatcagttttagagaatgtggcgtgga

SEQ ID NO: 840387 - DNA, 98 bp, Homo sapiens
gaattttgcaaaagtaaaattggcaagacatatccttacaggcagagaggaatagccaggccagaagaaggaaggcctgtggtgagtgggacaggaaa

SEQ ID NO: 840388 - DNA, 100 bp, Homo sapiens
ctgaagaccatggatcacaaccggaaccgcagggatgctggcatttaaagcgacagctcagctgttcatcctgggctgcacgtggtgtctgggcatcttg

SEQ ID NO: 840389 - DNA, 100 bp, Homo sapiens
cggctgcggaccctgccattccggaggagaatgacagcccatatcaaggcggtgtattctttttgacaattcattttcctacagactaccccttcaaacc

SEQ ID NO: 840390 - DNA, 100 bp, Homo sapiens
gggccgcatccagctgcgggagcagctgccccgctacctcatgggggagacgcagctgtgcaccacaagctgagtcatccaatggtggctattcctgaac

SEQ ID NO: 840391 - DNA, 98 bp, Homo sapiens
agaagctcttgctatggagactgcagaagtgaagatgatgaagcaacagaatgggactggttcgttgtaaacccaacaacaaccaaaagctttgaaaa

SEQ ID NO: 840392 - DNA, 100 bp, Homo sapiens
cagcagtgatggggagagccatagcgttactccacaggatccgctgaacataggatgttgccacaaaatctacctcgtgtatttttctctttcactcatg

SEQ ID NO: 840393 - DNA, 99 bp, Homo sapiens
gtccatcgtgtgcctgatgatcacgcagctggctggcttcagtggaccagccttctccacagtaggcactcctgactacattgctcctgaggtgttcat

SEQ ID NO: 840394 - DNA, 98 bp, Homo sapiens
tgaacaactacaaaggctatgaaaagaagccctattgtaatgcgcggttcagctgctgaagccagagggtgtgctggtttatagcacgtgcactataa

SEQ ID NO: 840395 - DNA, 100 bp, Homo sapiens
ttcatatttggcttcaatgtcatattttgggtatctcagatgaagacatcatcaacattactcttcctactggagtccccattcttctggaattggatga

SEQ ID NO: 840396 - DNA, 98 bp, Homo sapiens
gagatccagttcctgcgaactatgctgatgcagagattgaaggagccccagctgctcccttggatgtgaagtgcttggaggccaacaaagattatatc

SEQ ID NO: 840397 - DNA, 98 bp, Homo sapiens
tctcagttaaatgcagcgaagaagataggtcagcctggaaacacgcgggagctctcaaaaaggcaacaagaatgggtgaatcagcaaagggaagatat

SEQ ID NO: 840398 - DNA, 100 bp, Homo sapiens
cctggccgcagcccgctgtctgcagagaagatgttaccgagtacttcagtgaattccttagtgcaggggaacggagtcttgaattccagggatgcggcaa

SEQ ID NO: 840399 - DNA, 107 bp, Homo sapiens
acaggcacatggaatccttgagtcagtccaaaagtttccgtcgtcggcacaactcctctatccagtcagttcgctgctattcccatgggtcacaggagacagatgag

SEQ ID NO: 840400 - DNA, 50 bp, Homo sapiens
gttctactccttctacaggtgtgtatgatggagtttcactcttgttgccc

SEQ ID NO: 840401 - DNA, 100 bp, Homo sapiens
tgtgagccactgcgtctggccccaagtaactttttaacacagttcttcaactgcataccttcaatctaagatgctgcaatgtacaacaactctgaagccc

SEQ ID NO: 840402 - DNA, 100 bp, Homo sapiens
gcctcctgaggagctgggattacaggtatcattggaacatttcaagatcatcaaatcaaattccacagggattggtgaccaaccagaaggctcagacatc

SEQ ID NO: 840403 - DNA, 100 bp, Homo sapiens
cgaatgggccagtatgaatttcccaacccagaatggtcagaagtatcagaggaagattccgttgccaactcgtccccattggtttcttctttttggtact

SEQ ID NO: 840404 - DNA, 100 bp, Homo sapiens
ggaatcatcgatgcaggggcctcaattaatgtatctgctattgacctgaaaagtggttctggaaaagtgtaccaaggccctgcaaaaggtgctgctgata

SEQ ID NO: 840405 - DNA, 98 bp, Homo sapiens
ctcagtcttttgaatgatttccactctggaaaacttcaagcatttggacacattcagctaacgtattttagcaggtggagtgaggttgaagattcctg

SEQ ID NO: 840406 - DNA, 100 bp, Homo sapiens
gctcaaaatgtgaagcaatttgggacggaaaaggagaatctttgtaatttggaaaagaaatactccagcctctctggggggaaagggtttcccgttaacc

SEQ ID NO: 840407 - DNA, 100 bp, Homo sapiens
gatccaccaagtcaagcacatgtaccaggcagccagcagttagattccattcatgtaacacagttggagagagataccgttttagtgtgtttagacagta

SEQ ID NO: 840408 - DNA, 100 bp, Homo sapiens
aacattgtattgagaacaatatagatttgcaggaatgtatcctgtcaggtataatgtcagtgaatggcaagaaagttcttcatatggatcgaaaccctta

SEQ ID NO: 840409 - DNA, 51 bp, Homo sapiens
cgtcccagtgccgggagcgcatcaagacttaattcagtgcacaaatgagat

SEQ ID NO: 840410 - DNA, 99 bp, Homo sapiens
atcaccacaccatacatgaccaagtacgagcgagcccgcgtgctgggcacccgagcgctccagattgcgtgtcggcggtgctccagcaccctgctccct

SEQ ID NO: 840411 - DNA, 100 bp, Homo sapiens
ggccgccccatgagagttgtgggctggtatcattcccatcctcatataactgtttggccttcacatgttggtggcagcaaatgcacacattcctccagac

SEQ ID NO: 840412 - DNA, 99 bp, Homo sapiens
gaaatgagcagctttggataatgacgacagcaacccgaagacagggaaatttaggtggtccagcacatcatccagcaaaatcatgtcccagagtcaagt

SEQ ID NO: 840413 - DNA, 124 bp, Homo sapiens
agcggggaccgagcctgggaggccggccggtgccagcacctttcggcttctgagacggcggcagcagcggcattcagaaagaagagattttatcgacatcgaaagtaaatttgccctaaggacc

SEQ ID NO: 840414 - DNA, 99 bp, Homo sapiens
tggcaagctctcggggcactttgtctgatagtgaaattgagaccaactctgccacaagcaccatctttgtggacccccaaaagtacaagggcatattta

SEQ ID NO: 840415 - DNA, 99 bp, Homo sapiens
ttttagagctggcagcagcatctcagcccaagagaaggctgctgatactttggctgtgaggcaaaaaaggagaatttatgatatcaccaatgtcttaga

SEQ ID NO: 840416 - DNA, 100 bp, Homo sapiens
ctggcatgctgactaagctccagcatgtagagcgcatgaagtacaggacaataaagcttcctacacatatcaccaggaggatctctttgaaagattcact

SEQ ID NO: 840417 - DNA, 100 bp, Homo sapiens
atctgggcttatgggatacagctggacaagaagattatgacagattacgccccctatcctatccgcaaacagggatcccaacaagccctcaggattcaga

SEQ ID NO: 840418 - DNA, 100 bp, Homo sapiens
accaagtacaccagcctggccagctctgccaacagctccaggtggagcctgcgcgcggcagggaggctggttgcaatgaggtgtcgctgcagcagcatgc

SEQ ID NO: 840419 - DNA, 98 bp, Homo sapiens
aggattccaagtaactcttatttggaatatgatgaagaatgggctaagaaaattcagagtgaaaagtttcgctggcataactctcagtggctggagat

SEQ ID NO: 840420 - DNA, 98 bp, Homo sapiens
gccagcagaagaaagtcaagcagatggtcgaggagagtaacagattccctggataccctttcagaaatttcttcaaataaacagaaccattcttatcc

SEQ ID NO: 840421 - DNA, 100 bp, Homo sapiens
ggaactggtgacaatcaactattcctctgacctgaagaatctgattttagtgttgcggagataggaacatgggagagaaacaatctgggtaacatgaaag

SEQ ID NO: 840422 - DNA, 99 bp, Homo sapiens
tggaaggaggagcttccaagtccctcttctttccagatgaagcaataaacaagcaccctcgcttcaggttacggcctccgctgccacagggccatcatc

SEQ ID NO: 840423 - DNA, 100 bp, Homo sapiens
acaaggatgcgagggaacgtggctctcaaagttcagactcttctagtagctcctcgtgtgcaagctgaacacaaggaccaccatcctggcagcaacgaac

SEQ ID NO: 840424 - DNA, 100 bp, Homo sapiens
gttgcaggagcaacactatcagcagtacatgcagcagttgtatcaagtccagcttgcacagcaacaggctcttctcaaccatctgtgagtccaggggaac

SEQ ID NO: 840425 - DNA, 98 bp, Homo sapiens
gatccaggttctagaacaaagtatcctcagagtctctgttgcccaggctggaatgcaatggtgcgatctcagtcactacaacctctgcctcccgggtt

SEQ ID NO: 840426 - DNA, 100 bp, Homo sapiens
aaatacgaaggtttctggctggaaatacactttcgggaaatggcctctaaatcctggctgaattttttaaccttcctctgtggatcagcaataggatttc

SEQ ID NO: 840427 - DNA, 100 bp, Homo sapiens
gtgaagcccaacgatcagcacttcagtcggaaagttggaacctctgacaagaccaagtactaccttcaagataacagacgagtacctttggaaaggtcac

SEQ ID NO: 840428 - DNA, 100 bp, Homo sapiens
ccagtacctggcggtgccgcagcacccctaccagtgggcgaagcccaagcccctgtcccctacgtcctacatgagaccgagtgtgtcagcagccaggact

SEQ ID NO: 840429 - DNA, 100 bp, Homo sapiens
gtgaatttgcctcggggacgcctctccaggtctcctctgagcctccggcctccataagacccaaaacagatgacacctcttcccagtcccccgcgccttc

SEQ ID NO: 840430 - DNA, 98 bp, Homo sapiens
gttcttactggccctgagtctttgggggcagcctgcagaggctgcggtggtcattgggactcccacacttaaacaaagaaaggaaattctgcaagtga

SEQ ID NO: 840431 - DNA, 98 bp, Homo sapiens
gggggagctgagggagtggaggtccccagatccccagtcctcctgtgcaagttggacctggacaagaccctgtgcttgacttgcatcgtctcaggaga

SEQ ID NO: 840432 - DNA, 99 bp, Homo sapiens
cttatgcattagctgaacatctttcagagttgtatcctttaagctatgaagaaggacatccctcacactctgaaacagatctccttcagagacagagtt

SEQ ID NO: 840433 - DNA, 98 bp, Homo sapiens
ctttctcaagcactgtgatcttcaaatgtgacgagagcagacgtggatgtccagccctatgcgttcacaaccaagtctctgtttgttgggcacatgga

SEQ ID NO: 840434 - DNA, 51 bp, Homo sapiens
tactccttttggttgaacaagcagcattgcagtgtcgagatggctatgaac

SEQ ID NO: 840435 - DNA, 100 bp, Homo sapiens
aatatctgtcttcggtggactccttcggcagtccacccaccgccgccgcctcccagtgggacctgatgcagaacatcatgaatgacatgccgatctacat

SEQ ID NO: 840436 - DNA, 98 bp, Homo sapiens
agggcggtaaggatttcaacatgcctctgacaatctctagtatatttggatttgacctgcattttggaatttatctacacttaaaatgccaccagcag

SEQ ID NO: 840437 - DNA, 100 bp, Homo sapiens
aagtgaagaagatgctgctttagctggacgattactgagagccaatcagattagtttcaactgggacaggcttgctagctggatcaaccttactgagcag

SEQ ID NO: 840438 - DNA, 98 bp, Homo sapiens
tgtgaaaagattgcagctgctaccagaatcttttatttgcaaagagaaactagtaggttgtgacagttggaagtgtcatgtacaacatgcggcgatta

SEQ ID NO: 840439 - DNA, 99 bp, Homo sapiens
tatgccctggcttttgcagaaagaggagcgttagttgttggaagatgatgagaagcttattgaggaaatccagaaggaggctgaagaggaacagaaaag

SEQ ID NO: 840440 - DNA, 99 bp, Homo sapiens
caagactgtttgtgttgcgggggccggacttcaaggtcaatcctgaccgggttgttccccccgacctcgggcaccgcctacatcctgggaaaagacatt

SEQ ID NO: 840441 - DNA, 100 bp, Homo sapiens
cgatgctcccagcccggtgagacctgcctgaatggcgggaagtgtgaagcggccaatggcacggaggcctgcgttgaagatagtgatccggggagacagg

SEQ ID NO: 840442 - DNA, 100 bp, Homo sapiens
tgccctgagctggcagtacctgaccactctctcccaggtctcctctgagcctccggcctccataagacccaaaacagatgacacctcttcccagtccccc

SEQ ID NO: 840443 - DNA, 101 bp, Homo sapiens
gtgatctctgagaagaacaaattagaatcagattatatggccgcatcttcacaactccgtcttacagagaaattacagaagacatccccgtgaagactttg

SEQ ID NO: 840444 - DNA, 100 bp, Homo sapiens
cagcatcccacattaagtcaacggttctagagcacaagttgaaagaagctgatgaaatgcacacattgttacagctagagtgtgaaaaatacaaatccgt

SEQ ID NO: 840445 - DNA, 100 bp, Homo sapiens
gtgaaaatgattttgaagttattggaagataaaaatggagaggtacagaatttagctgtcaaatgtctccggagtagagatgaagagagaatttctaaac

SEQ ID NO: 840446 - DNA, 100 bp, Homo sapiens
ttccctccagctctgtctatcctaccaaggcaccatgctgggagataaggatccaacataagacaaacagtgctgatgcttttggaaagctcatattcaa

SEQ ID NO: 840447 - DNA, 100 bp, Homo sapiens
attgagggcacctacattgacaagaaatgccccttcactggtaatgtgtccattcgagggcggatcctctctggacacaatgtttgcacgaggactgaag

SEQ ID NO: 840448 - DNA, 100 bp, Homo sapiens
ggccaagcgcctcacgccggacctggtgcaggccaaagatgaagaggaagcctttctggattggagtgatgatgatgatgatgatgatgatggatttgat

SEQ ID NO: 840449 - DNA, 100 bp, Homo sapiens
accgtggttgatgatgcagacactgttgaactctgtggtgcgcttaaggaatggaattctgctgttgagaagctgaagagtgaggcactgagaattctgc

SEQ ID NO: 840450 - DNA, 99 bp, Homo sapiens
actggggcagcgtctgaggaactgaaacccgaggcagcctgctcgcctggattttttaagtttgaggcatctgagagcccctgcttggagtgccctgag

SEQ ID NO: 840451 - DNA, 100 bp, Homo sapiens
acctcctgcatcctgcgttcccctccatccttctggatctggccaacaccaccggcacagtgacggcttcagagggtagtgggcagcagtcagtgacagg

SEQ ID NO: 840452 - DNA, 99 bp, Homo sapiens
agccggtgggtgagcggcggccacggcatcctgtgctgtgggggctacgaggaaaggacttgatagacgacctgaagtcagaactgagtggcaacttcg

SEQ ID NO: 840453 - DNA, 99 bp, Homo sapiens
aaaagatgaggtgacttggtgattttcctggaaaattataggctggtaatcctggtggacctggacctggtggtcgaggaagaggtagaggtcaaggca

SEQ ID NO: 840454 - DNA, 100 bp, Homo sapiens
aatggcccgagacccccagcgctaccttgtcattcagagcaagctaggaattgtttcccttctactgggcacaatacacgcattgatttttgcctggaat

SEQ ID NO: 840455 - DNA, 100 bp, Homo sapiens
cgacggcaccgaggccaaggtggatgaggcccaggctgatgggaaggagcacccaggagctgaaggaagctgagatgatttccaagaacaagaaccctag

SEQ ID NO: 840456 - DNA, 100 bp, Homo sapiens
ggaagctattgctgggattttgaggaggttatcctaccttgcggatagagaagaacgacttgagaagtgtcactcttttggaggccaaaggcaaggtgaa

SEQ ID NO: 840457 - DNA, 99 bp, Homo sapiens
ctaggcccgcgctcgcgcccggacgcggcggcccgcttcggaaccaaaaagaagcttcccagagccggggccaggagccccaagcgccctctagcagca

SEQ ID NO: 840458 - DNA, 100 bp, Homo sapiens
cactcatccaccgttgcctccagcccacccacctccagataccctcaaaaagttatggataaaatacttagtatggctgaaggcatcaaagtgacagatg

SEQ ID NO: 840459 - DNA, 98 bp, Homo sapiens
tctactgacgaagcttggaagttgcagaagttttgacacatgatgaactctagcactggtgtatatgagaaggaaggcgaaagcatgacaggaaacct

SEQ ID NO: 840460 - DNA, 98 bp, Homo sapiens
agttgagccaaaacgtgctgtagcaagagagcaccttctaagtgagcaacacagaaactttgcacagagtaaccagtatcaagttgttgatgatattg

SEQ ID NO: 840461 - DNA, 100 bp, Homo sapiens
tttctttccccctttaacttagaggaacgaggattatacagaaatttgaaagagctattgcttaccttttcccaagtggtttgtttgagaaacgagccag

SEQ ID NO: 840462 - DNA, 98 bp, Homo sapiens
aaagtcaaaacgggcaataagactctttaaagaaggcaaggagagaatgtatgaagaacagtcacaggacagcctgcctagggtagttaaaagacgag

SEQ ID NO: 840463 - DNA, 100 bp, Homo sapiens
ttgctgggcggctgttcagcagaagaactcactgcagagcgagtctggaaacctcccactgtggctgcataaggcccctagcagtcttcttgatgctttg

SEQ ID NO: 840464 - DNA, 98 bp, Homo sapiens
acagtctctgcatgtttccaagagcaacaggaaatgaacacattgcagaaagtgactgagaccgaagatgatagtgatagtgacagcgatgatgatga

SEQ ID NO: 840465 - DNA, 100 bp, Homo sapiens
ccccagcctttcctacgcccaccccagttctgacacatctatgttagatactaaagaaggcttccccacaacccatatgcatctgctttgactggtggtt

SEQ ID NO: 840466 - DNA, 98 bp, Homo sapiens
gattccaagtaactcttatttgacaagccatctatgatgcatttgaccgcttcctccataaatacgctaactagttggattattatatgtaaccagtg

SEQ ID NO: 840467 - DNA, 100 bp, Homo sapiens
ttcctgaaatacatccaggaaagacatggagattctcttaaaaagagatcgcggattcaggtgtggctctatgagcaagtgaatatgcggatagaaggct

SEQ ID NO: 840468 - DNA, 98 bp, Homo sapiens
acgaacctggacattgaggagctcaagggtgagcccatcactttctgtgaggagagttttgtaaagcaccgctcaagcgtgatgaaacagttcctgga

SEQ ID NO: 840469 - DNA, 98 bp, Homo sapiens
tcgtcgtcagtggcagccccatgcgagcacccgaggaagcttcgcagaatcaagaacggctatgtgcgtttaaagatccgtatcagcaagaccttggg

SEQ ID NO: 840470 - DNA, 100 bp, Homo sapiens
ggagcctcgccgcccgtccccggcacacgcgcagccccggcctctcggcctctgccggagaaacagagctggagataagatgggtagactgctacttccc

SEQ ID NO: 840471 - DNA, 100 bp, Homo sapiens
acttctttgtggctttgctaaaggacagcacccagtttggccttctctgaggtcagatcggaacaactcacttgaaaaaaagtcaggtgggggaatgcca

SEQ ID NO: 840472 - DNA, 100 bp, Homo sapiens
taacaggaaacaaagtagtgaactgggacattaagttattgggccagttcaattgtcttactcatcaactggagtgtacccaaaacaaagatctagccaa

SEQ ID NO: 840473 - DNA, 99 bp, Homo sapiens
ttcaacagaagagtgagagatggaacccgaagaagaaaggattcgttacagccagagattggagctcgtgtaaatgccaaggacaacatgtggctgact

SEQ ID NO: 840474 - DNA, 99 bp, Homo sapiens
ggagccttcaggcacatgacacatcatcactgcccacggtcattatgagaaacaagcaaagtggggctgatccaacaattgaaactgactctggatata

SEQ ID NO: 840475 - DNA, 99 bp, Homo sapiens
ggaccatccgctctccctgcgctctccgcaccgcggcttaaatgatgtattttgtgatcgcagcgatgaaagtgctacagttgaaactccagcagcgcc

SEQ ID NO: 840476 - DNA, 100 bp, Homo sapiens
tgacgtccggccctatgtgtgcaagcactgtcactttgcttttaaaaccaaaggtctgagagtcactggagctaccagaagcatcatggggccctgggga

SEQ ID NO: 840477 - DNA, 98 bp, Homo sapiens
cagaatggaaagataaatatgaagaaagcaggcgggaagtgatggaaatgaggtgcgtggatgtgatgatagccagactcaagccaagcaccatcaag

SEQ ID NO: 840478 - DNA, 100 bp, Homo sapiens
accttccatttttctctctacctcccagattcctgatgagttcgacaatgggcaccttctctttcatcatcgaaacctggagagaggagttaggagacca

SEQ ID NO: 840479 - DNA, 99 bp, Homo sapiens
agcggctgtgtggatgtcggcgaagccgcgggcgagatgtgttcagagcaacattgttttgttgacacaagcatttagaagaaagtttgtgattcctga

SEQ ID NO: 840480 - DNA, 98 bp, Homo sapiens
gagggtgttgatttctccaaggatctgctgaaaatctctgcactcgtcctaagagcccaggcctccgagatcttacttgaagagttacagcaggggct

SEQ ID NO: 840481 - DNA, 106 bp, Homo sapiens
cttcatcgagacctcagccttggattccactaacgtagaggaagcattcaagaacatcctcacagtgaaggagaacgacctgctcagaatgagaagaggaaggaga

SEQ ID NO: 840482 - DNA, 98 bp, Homo sapiens
tttgattagaaatgcaagactggatgccaagattgattctaaattagatttgtgtatcttagaggaccagacgaacaggctaaggatgagactgataa

SEQ ID NO: 840483 - DNA, 100 bp, Homo sapiens
ttttctttccccctttaacttagaggaacgaggattatacagaaatttgaagatacctgcccactatgtctatccgcaggcttttgtgcagccgggagtg

SEQ ID NO: 840484 - DNA, 100 bp, Homo sapiens
gatcatcttgggagtgatttgcgccatcatcctcatcatcatcataggagaagctgtctttgctcggtgcttatcatctctgaaggatgagagaattcaa

SEQ ID NO: 840485 - DNA, 100 bp, Homo sapiens
tagctcagatgtctggagcgatggctttgggtggtaccattggcattccaaccctagggaagaatgtggttgtggctggaaggtcaaaaaacgttggaat

SEQ ID NO: 840486 - DNA, 100 bp, Homo sapiens
ggcaaggtgatccagcaaggtcggcagagcaaggggcttacgcagaaggacctggccacggatctgatgacgcaaaatggaataagctacgtcctcaacg

SEQ ID NO: 840487 - DNA, 100 bp, Homo sapiens
agcaataattatcacaattactgatgggagcaagttgactaccaccagtggagtccaggatgagagccactccatccccaaattcaagattagaaagatc

SEQ ID NO: 840488 - DNA, 100 bp, Homo sapiens
gtcagaatcccctgaagagcttgttaaaacacaaggtgctggccccatccagaattgctgattcggaatgaatctgaagtctgctgcagtaaaacacaga

SEQ ID NO: 840489 - DNA, 100 bp, Homo sapiens
cgtctagattacatcacgcagagcctccagcagcagggcgtgcagcaatcccacagagtattgatgaggaaactgaagtttggagcgatcacatcatttt

SEQ ID NO: 840490 - DNA, 100 bp, Homo sapiens
tttgctgtggtcacagtggagaaggaactgtacacttgggtgggccgttgctccagggagaactgcaaatatcttcatccacccccacatttaaaaacgc

SEQ ID NO: 840491 - DNA, 100 bp, Homo sapiens
agtttactctccgtcttgtgtcatgtgttcagctggccagcaaactttccttccgaaacaaatgatgactcgtggcactgcctccagcccctcctataga

SEQ ID NO: 840492 - DNA, 98 bp, Homo sapiens
ttgcaaatcttactgctgtgatggaaccacgccctactgttgctcctactacgcttatattgggaatatcctctcttggctggagttgtcttccttgg

SEQ ID NO: 840493 - DNA, 98 bp, Homo sapiens
tttgcctatagtttcctccaacaactcattcgctatgtggatgaagcccatcagtatatcctggagtttggaggtgataacctttatgatggtattga

SEQ ID NO: 840494 - DNA, 99 bp, Homo sapiens
gctgatattgatattattacagcttcatatgcaccagaaggagatgaaggtgctcttgatgatttcgataaagccaaaccctccccagcacccccttct

SEQ ID NO: 840495 - DNA, 98 bp, Homo sapiens
caactggttgaaggggaccaggaggttggacacagaccattgcaatggaaatggtttgttggcatccaaagctgttggggttgatggtgctgaaaaaa

SEQ ID NO: 840496 - DNA, 98 bp, Homo sapiens
gtcacaggcacatcagcaaagagattctggaaaccaaaatggaggaaatgatgataagactaagaatgctgagaggaactatttaaatgttttacctg

SEQ ID NO: 840497 - DNA, 100 bp, Homo sapiens
agagaaccctcctcaaggttgaggtcatgcagtgtcaccgacgcagttgcagaacagggccatctaccaccggtattacatttatgcactgtctgctgcc

SEQ ID NO: 840498 - DNA, 100 bp, Homo sapiens
gataacagctaaggtattcctggaagcagagtaaataaagctcatggcccaccagctagaaaggcgaggattaaatccaccacacagggtgaaatctatc

SEQ ID NO: 840499 - DNA, 99 bp, Homo sapiens
gcaactgaagaaaatgtttgaagcaacaagattgcttgcaacaattgttatgcttcacccagtcagcttgaagagtttcaaatggaccctaccactgag

SEQ ID NO: 840500 - DNA, 100 bp, Homo sapiens
tcctggaagtgttggcggaggaaggaagtgactttggtccagagacttctccagtcctgcaccttgaccacagtgctgactctcctgtgagcagtcttcc

SEQ ID NO: 840501 - DNA, 98 bp, Homo sapiens
tagtctgagttttgctgattgcaactttctggtgtcatttaccaggagttgatccccctcatattgtgtacagcatgtctacatcctgagcctaaaga

SEQ ID NO: 840502 - DNA, 100 bp, Homo sapiens
accccagcacacagaagccgagacggtgtggatgaggtcaccattgtcaacattttgaccaaccgcagcaatgcacagagacaggatattgccttcgcct

SEQ ID NO: 840503 - DNA, 100 bp, Homo sapiens
gcggaggcttgtcattctgacccggggattcctcacagcgtctggcagcatttggccatccagtgtcattggtctcagaggccagcagttattggagatg

SEQ ID NO: 840504 - DNA, 99 bp, Homo sapiens
ggcaacgtgttggaccttccggagcttctcagaagacagagggttttcttttgagcagctcttgccaggtaaaaagttttgggaaacagatgaatccag

SEQ ID NO: 840505 - DNA, 100 bp, Homo sapiens
ttcacggtggacagcagcaaggctggcctggctccgctggaagtgagggttctgggcccacgaggaacgagctagagcgacagtttcttgaattgctgca

SEQ ID NO: 840506 - DNA, 100 bp, Homo sapiens
cggcttcacctgcccacactgcacgctacggaagcctggccgcctgcccgacacggcactgcccacgctgcagaatggggcagctgtgactgatctggcc

SEQ ID NO: 840507 - DNA, 100 bp, Homo sapiens
gtccctgcgccatgtggatgccagcttcttcttggggaaggtgtgtttcctcgccacaggtgtgaattctccagtgctctggagtacttgaaattacttc

SEQ ID NO: 840508 - DNA, 100 bp, Homo sapiens
accaagatcttgtcaagctgtgtcagccgccttcccttcttcttggtggtgttcttgagtaagataatctggactggcccccgtctttgcttccctgcct

SEQ ID NO: 840509 - DNA, 100 bp, Homo sapiens
gctactagtgccctagatgtgcagtgcgagcaggccattctggctgtgactcagtcactgacactgagcctgaggacgagaaggttgtttcctactcgaa

SEQ ID NO: 840510 - DNA, 51 bp, Homo sapiens
atcctacctccagtcccagttaaaaaggttgcacagtgaattaaaagatgc

SEQ ID NO: 840511 - DNA, 100 bp, Homo sapiens
gagtccttgatgcacttttgcctttggcgaggaggcaggacagtcaggcgtggaggttgctgaaaagccaggagtcaaaatgactgagcgctttgactgc

SEQ ID NO: 840512 - DNA, 100 bp, Homo sapiens
ttttaatagctactacataggcaagtcaccaaggtaaaagccccaaagctgtcatcagcattaaggacttgaatgccaccttccagacagagaagatagg

SEQ ID NO: 840513 - DNA, 100 bp, Homo sapiens
cgccactctttgcaggcacagatgtgattccagctcatcagtttccagatgtccctgaaaaacagctgaatgatattgaagattgtgacctcaatgtggt

SEQ ID NO: 840514 - DNA, 100 bp, Homo sapiens
tgtttgtgctgggtcacttcaattttgatacacgtggagcagctggaaactgttctgagcaggaagggcagcagtgggcctttggagtgacgctgtggga

SEQ ID NO: 840515 - DNA, 100 bp, Homo sapiens
cacccgattttcagttgaacccaactggtgtgggttgtgttggtggaagtgggctaactggagctaaacttcaggactgtatgagccgagcagttacaag

SEQ ID NO: 840516 - DNA, 100 bp, Homo sapiens
ccaactccttcttcccacgctgctactgcctgggggctgaggatgacaaaaaagccttcataggtggcggcctacggtgggaagttgcgatacaccctct

SEQ ID NO: 840517 - DNA, 100 bp, Homo sapiens
atgcacatgttgaatggagctcttctggcattgctgtttcctgtggtaaacactcggctggtgcaacattagaggaaatcaatcagcactgggactggct

SEQ ID NO: 840518 - DNA, 98 bp, Homo sapiens
gatgatgagcagtacgcttgggagtcctcagcagggggatcattcacagtgaggacagacacaggtgagaagccctaccactgcaactgggacggctg

SEQ ID NO: 840519 - DNA, 100 bp, Homo sapiens
caaaattcacaaggcaaggtgactttgaaagaaaagcgtggttgccttacgacaacttctgcctaactcccagagcttcatccagcaatgtgttcagcag

SEQ ID NO: 840520 - DNA, 100 bp, Homo sapiens
aagagctggatcatcccagaatagttaagctgtatgattacttttcactggatactgactcgtagctacagcaagctgggtagcaggcagatccaaagga

SEQ ID NO: 840521 - DNA, 100 bp, Homo sapiens
aatgggaaaaccagaacattgatgatcagcaccaaaatctcaggagaaatccaagatgtatttatttgtgggggctataatggagaggtgatcctgggag

SEQ ID NO: 840522 - DNA, 98 bp, Homo sapiens
tggcgatgcagaggggtgcgcagtccagcgtgaactacagtcagggcagcctgaaggatgcaccttccttgaatccagaagctggcaaacagcatcag

SEQ ID NO: 840523 - DNA, 99 bp, Homo sapiens
aggacttccctttggatgtagcaaggaagaaattgttcagttcttctcagatgctgagatgaatcgtcacctgtgtgtttggctttttagacatccatc

SEQ ID NO: 840524 - DNA, 100 bp, Homo sapiens
ggtggtgtgcaaggagtccccaaaggagtatctccagcctttcaaggacaaactagaggagttcttccaaaaaggaaatcagggatcctcttatgcagtg

SEQ ID NO: 840525 - DNA, 100 bp, Homo sapiens
gcatggctcatattctacttcattcagaagatcaggtacacaaatgcacgcgacaggaaccaggtgtggaatatcaaacaaatgattaagttgacacagg

SEQ ID NO: 840526 - DNA, 100 bp, Homo sapiens
cactcacttacacagtattgggaaatctgtgaaagatggacttatggattcatccaggccaagcaattcatttgctgctcagccatggcatagttgtcat

SEQ ID NO: 840527 - DNA, 100 bp, Homo sapiens
ggagcatagctgctacactgaagatgaagcaaggcccaatgacccaggcggccaatggccatgtgtctcaggatcaagaggaacccgtctacctggagag

SEQ ID NO: 840528 - DNA, 100 bp, Homo sapiens
acatattatggaccatctggccagaaaacaattcattctgaacaggcagtatttgatatttactgtacaggtttgcagattccgccagcagcacagcaag

SEQ ID NO: 840529 - DNA, 98 bp, Homo sapiens
ggaaagtcaagaaaatagatgcttctaaatctgttgatgaagttctgatctacaatggccaactggacatcatcgtggcagctgccctgacagagcgc

SEQ ID NO: 840530 - DNA, 120 bp, Homo sapiens
ccccacctttcctcaggagtcatttctgttccgcacaggcctgctgaactgggtgctttatataggaaagctttggacttggctgacatgataacccgggtgatccaggagggattggag

SEQ ID NO: 840531 - DNA, 50 bp, Homo sapiens
tggcaaccgcctacgagacactcaagatgtttgagacggaggcagatgag

SEQ ID NO: 840532 - DNA, 98 bp, Homo sapiens
cgtttcctccaggacagcacctagtcgtggccggaggagtctcagagctgtcagaaagagaccacaccgctgttccagaccctctccatggatgatgt

SEQ ID NO: 840533 - DNA, 98 bp, Homo sapiens
tgtgggtcacgttgtcaccctggccgctgtgtggcactggcgcaggggacgtcggtgggcgcaggacgagcaagggagtgcatccgccccaacccttt

SEQ ID NO: 840534 - DNA, 98 bp, Homo sapiens
ggggaaagagcaccgaagaagcttcgaggatctgatcagtgtgcgtgtgaccaccatggatgcagagctggagtttgccatccagcccaacaccaccg

SEQ ID NO: 840535 - DNA, 100 bp, Homo sapiens
cgaggagaactactccgtgacctggtacatcgccgagttctgatccccccatggctgtaacccttggactccgcatggaagaaatgatttttaatcttgc

SEQ ID NO: 840536 - DNA, 100 bp, Homo sapiens
tgtctgctctgtggactcaacagtttgtggcaagacaagctcagaactgagaagctgtcaccacagtgtgttaacagggcacaaccattatgtgatgtgt

SEQ ID NO: 840537 - DNA, 98 bp, Homo sapiens
gtgcttcccgtctcagaggcaaactggaaaagagtgcaaattcggaaagcacctcaagctgtttcagatacagttcctgagaggaaaaggtcaacccc

SEQ ID NO: 840538 - DNA, 98 bp, Homo sapiens
agctattctcaggatatgacaggggtaacacccttccagatgatttttgagcacctgttccgcgagcctgagaagaggccccccaccgtggtgtccaa

SEQ ID NO: 840539 - DNA, 100 bp, Homo sapiens
tcctcctttgacagggacatcagtggagccttctcagacccacaggtgcaacaatcgaacacagtgtatagtagttactgggtcagatgtgtttcctgat

SEQ ID NO: 840540 - DNA, 100 bp, Homo sapiens
ccgaactggaatctggatgagcagctcaagcagatgagattgtggggaacctgggtgaaggcacctttggcaaggtggtggagtgcttggaccatgccag

SEQ ID NO: 840541 - DNA, 100 bp, Homo sapiens
ctttccagaattatacaatatttgaaactgccaagttttggaccttatctggaacagcgcaagaaaatcatagcagaaaacaagattagactgaaagaac

SEQ ID NO: 840542 - DNA, 100 bp, Homo sapiens
atgcctggccattctcaaagggatttttggtagcagtgcagtacctcagcgagaactttcaaaggcttccaaatctgatgctacttctggaatcctcaat

SEQ ID NO: 840543 - DNA, 100 bp, Homo sapiens
cagaaatgtttaccagttccttctgtaagggtctactgagcgccatcccttgtgctggactctggctacttaaataggaatcaagccaggtccctaccat

SEQ ID NO: 840544 - DNA, 100 bp, Homo sapiens
gaactaccagtgggcctgggcctgcccgcccagcccgagcccggcctaggagaccccgagaggagacgaaggggcaggatggggctgggaagtccaaccc

SEQ ID NO: 840545 - DNA, 98 bp, Homo sapiens
tgctagtaattgagcctcaaaatgaagatggcacatggcccaggcagaccttgcagtcaaaactcaccccacacagaccgcgtttctctccagtgtcg

SEQ ID NO: 840546 - DNA, 129 bp, Homo sapiens
agtccatcaagggtttccaaacactctgaatcccattctcgatcaagatcaaaatccagggaatcttttaactgagccagtcggctacttggaatcttgtttctcggccaagaatggtactccaagaca

SEQ ID NO: 840547 - DNA, 99 bp, Homo sapiens
gacaatggcagcatctacaaccctgaagtgcttgatatcacagaggaaactctgcattctcgcttcctggagcctactcgccctcctaatggtcaagga

SEQ ID NO: 840548 - DNA, 100 bp, Homo sapiens
gcggagatctctctcatctcgctcggctgcgggaaatcgggctgaagcgactgagtccgcgatggaggtcgagcctcttaggcagagtttaacacatggg

SEQ ID NO: 840549 - DNA, 98 bp, Homo sapiens
gggtaggagtggtgaagctggaacagccagaattggacccgaaaccatgcctcactgtcctaggcaagcgatacagtgtggaaatgtccatcagacac

SEQ ID NO: 840550 - DNA, 98 bp, Homo sapiens
tggctgtcagtagaagagcacagaaacatgctttgaaaggggttgtagaaggtgatttagctgccatagaagcatacaagtcatcaggaggagacatt

SEQ ID NO: 840551 - DNA, 100 bp, Homo sapiens
ccttgggtcttccggtaggagctgtaatcaattgtgctgacaacacagctcttcataccgttcgctcaccagagtggtgtccagtttcaggagcacggaa

SEQ ID NO: 840552 - DNA, 100 bp, Homo sapiens
aattggccgcggaaaccgatctgcccgttgtgtttgtgaaacagagaaagataggcggccatggtccaaccttgaagcggagtttaagagagctgtgaaa

SEQ ID NO: 840553 - DNA, 118 bp, Homo sapiens
ctgacagatgccagcgtagctgaatccagtaccaaaaacgtcaacaacagttttacgttgtgaaagattttcaagactatatggaacctgaagaaggttgtcaaggttccccacagag

SEQ ID NO: 840554 - DNA, 100 bp, Homo sapiens
gccatgtcgggttattcgagtgaccgagaccgcggccgggaccgaggctgaggagaagaaagtggaagcaaagaaagaagaatccgaggagtctgatgat

SEQ ID NO: 840555 - DNA, 98 bp, Homo sapiens
agtccgttgctttactttttgcttcaccgacatagtcattatgccgaagagaaaggtttgacagtgctctggaagacctacctaagagtggacctcac

SEQ ID NO: 840556 - DNA, 131 bp, Homo sapiens
tggactctgtatctggaactggtggcgtcggcccaggtcggcgggaaccccctgaaccggagtaacatcttaggtgtcattcgagaccacaaaaagctagtgaatacatttcgactcatgagaagagcagg

SEQ ID NO: 840557 - DNA, 100 bp, Homo sapiens
gctttatgaggcagctgtctgagtatgaaggcatcttggatgcaagactggtcgaattgacaaatcttaccctacagtatgtggccacacaggaccagtg

SEQ ID NO: 840558 - DNA, 100 bp, Homo sapiens
aattcaatgaaaacgtattcttaaaggcgaaaaaggtggatttgctaggactatcctattaagtgtaatctcactgcttaatgagcccaacaccttctcc

SEQ ID NO: 840559 - DNA, 100 bp, Homo sapiens
gaaaatctatcgtgaggttcagctgatgaagcttctgaaccatccacacatcataaagctttaccagttttacaatttgtcacaagacagaagttgtcaa

SEQ ID NO: 840560 - DNA, 100 bp, Homo sapiens
ctgacattgcatcttcaagactgtgtttggaattcacccagttgcaggccgaatgcctggtcagcttaatgtgctgctggctgaggctggtgtgccatat

SEQ ID NO: 840561 - DNA, 100 bp, Homo sapiens
cagtctgttctagtatctgcacatacctcagcgggaaaaacagtatgcgccgagaaatctactttcttcaatgtgttaaccaatagtcaggcttcagcag

SEQ ID NO: 840562 - DNA, 98 bp, Homo sapiens
catctgggtgtatatcaaacggcaagatgtccagtaatgtcccggcggatatggaacttagtgatttggcccgtgaccctccagcacaatgttctgca

SEQ ID NO: 840563 - DNA, 98 bp, Homo sapiens
aaaactactttgatgatattccccgatcaaaactggagaggcagatggctcaggatggcactggatctttaaaacgcagtggttcctttagcaaactc

SEQ ID NO: 840564 - DNA, 99 bp, Homo sapiens
gcagacgttagcgtgagtgatcactctcaatcccgggctatcagctgtactctgaactgtagttgccaaagtttcaaacccgggaaaataaaccaccgt

SEQ ID NO: 840565 - DNA, 98 bp, Homo sapiens
catggctcagaaaatggactgtggtgcgggcctcctcggcttccaggtaaacactacacgtgaagagtggtgaaagggaacattgattactgaagtgc

SEQ ID NO: 840566 - DNA, 98 bp, Homo sapiens
tcacgattaccgcagccaagtggcgctggcaaaactgttgtaggtcagaatggcggcagtggagcatcgtcattcttcaggattgccctactggccct

SEQ ID NO: 840567 - DNA, 98 bp, Homo sapiens
caaatgccagtcttcttggaggaggaggtggaccccagccatgataggctgctcgttcgtggtcaacaggaagttcttcggtgaaattggtcttctgg

SEQ ID NO: 840568 - DNA, 99 bp, Homo sapiens
ccgtggaccgccccacctttcttgacaaggtgaacatgattaaagatgatgggacagttattcatttcaacaatcccaaagtccaagcttccctttctg

SEQ ID NO: 840569 - DNA, 100 bp, Homo sapiens
cgcctgctcccccaaagcagcacagcagtaccagtcccttccccacctccacgcccctccgcagagttatcaatactctggctgaccatcatcatcgtgg

SEQ ID NO: 840570 - DNA, 98 bp, Homo sapiens
ggacattattgcgcgtggaacggctgcttttggaagtttcactgttacatgccttgaagtgatgaggaggtttctgttactatatgctacacagcagg

SEQ ID NO: 840571 - DNA, 100 bp, Homo sapiens
acaggacaagagttggaaagacaggctgattttgacagggctgcagaagatgtgaggaagctgaaagcaagaccagatgatggagaactgaaagaactct

SEQ ID NO: 840572 - DNA, 100 bp, Homo sapiens
gaacaagctccagagtttctcctagcttcctgcctgacacagctcacttcaagaagtgcacaatgtcagaacgtggaattaagtgggcttgtgaatattg

SEQ ID NO: 840573 - DNA, 99 bp, Homo sapiens
ccaacgcgcaggtgctagcggccccttcgccctgcagacagatgcaccatcaggaatggaattacagtcatggtatcctgttataaagcaggaaggtga

SEQ ID NO: 840574 - DNA, 100 bp, Homo sapiens
tgcaccttgcatgagggacaaagctacacagaacaagttgaaatcatcgcagaaggataaagttcgtcagtttatgatcttcacacaatctagtgaaaaa

SEQ ID NO: 840575 - DNA, 100 bp, Homo sapiens
acgtggtccccaccagtctgtctcatgggatcaagttggtcaacccaatgttccgaggctatgcccagcagggcctcctgcaaaacatccttccttgaag

SEQ ID NO: 840576 - DNA, 100 bp, Homo sapiens
acctgtgcgggatggaacaaaagatctggccagtgggagcccctcaagctggcttcttgatatgtcttcattattttttgaacatttacttattttctta

SEQ ID NO: 840577 - DNA, 100 bp, Homo sapiens
ctcaatcagaaactattcagacagcggcttctctgttggcctctcaggttggaaaagagactgttcaaaccactgaggatcagattttgaagagagatat

SEQ ID NO: 840578 - DNA, 100 bp, Homo sapiens
ctctctccagtccttgctgaagagactttccgttacatgaatgacatgaagaatgcttacaagctgcatactttggatacttgtctaaaacttgatgata

SEQ ID NO: 840579 - DNA, 100 bp, Homo sapiens
gggactgccccggcaactccagggtgtctggtccacgacctatcctaggcgccatgatttcaacactacacttgcacaatgtctttgaaaccaagagtag

SEQ ID NO: 840580 - DNA, 98 bp, Homo sapiens
tcttattgattcacttaagaaaactcagcctgagaatgggaagtcccacctggccatcgtgcagaaggtaaacaacgagggtgagggtgaccccttct

SEQ ID NO: 840581 - DNA, 100 bp, Homo sapiens
gtgctatgcaatcatggtcactgctagtgtatccaatattcacagcatcagacaacagtcagcgctttcgagaaacctgttttgcatttgccttgacacc

SEQ ID NO: 840582 - DNA, 100 bp, Homo sapiens
tgacttacatggaggagacgtgtcgtcactatgtggcccatgtgaaggtaacttgggtttttactcctgtaacaactgaaataacaagtcttgatacaga

SEQ ID NO: 840583 - DNA, 98 bp, Homo sapiens
ccaggactgatgcagatgcccctcctccaccagaggactgggaggagcatgtcaacaggtgggcttggattttacaggatatcttggggattgctttc

SEQ ID NO: 840584 - DNA, 99 bp, Homo sapiens
gtcgatccagctgccagcgcagccgccagcgccgggttggatttggtctagggagtcccagaaagaagtagaaaaagagagagaagcctaccgtcggag

SEQ ID NO: 840585 - DNA, 100 bp, Homo sapiens
catgggaatttccaaggggattcaaacttcaacagaatgtggcaaccagttttgaatcaggaaattgaagcgttcagtctgtccgaagacacttcatcgg

SEQ ID NO: 840586 - DNA, 100 bp, Homo sapiens
cttggcacctgccatccgtgacaaactggacatccttggggctgctgagacagatacagaagtttacggtgagttttatcccgtgccacctccctatagc

SEQ ID NO: 840587 - DNA, 98 bp, Homo sapiens
gctcagaagagcacagtcctaacggcttgacttccgataactcagatggacaaggtttcaggctctgtataactatactcccaggaatgaagatgagc

SEQ ID NO: 840588 - DNA, 98 bp, Homo sapiens
aaggagcacctgctgcacggcaacatgaccagcagtgacatcctcctgtgctacaccacgtttttcccaggtcatgagtctcgggctacagaagcttt

SEQ ID NO: 840589 - DNA, 98 bp, Homo sapiens
tcatttttcagacagattttgaagatggaatccgtagcgcccagctcattgcctcagctaagtgcagattcactttataggaacagcttcagcttcag

SEQ ID NO: 840590 - DNA, 98 bp, Homo sapiens
aggtcccaatcccccactctttccgccctaatggaggtctccagtttcggtaaaatatacccaggaccataaacagatgaaaggtagaccaagtctga

SEQ ID NO: 840591 - DNA, 100 bp, Homo sapiens
ccggccttggtccctgcggcgcggacgtccggcgcgggagagaaagacttaattcagtgcacaaatgagatgaatgtgaacatcccacagttggcagaca

SEQ ID NO: 840592 - DNA, 98 bp, Homo sapiens
tcaacatcgtcttcacctccctcttctctctggaatgtgtgctgaaagtcatggcttttgggattctgctttggacatcagacagtgcaggagaagaa

SEQ ID NO: 840593 - DNA, 100 bp, Homo sapiens
caaggatgagattttgccagagaaaggacgagcagcaagtcagggagcttaagcttttcagaagagctggtagatgaagctctgggtgctgtggctgctg

SEQ ID NO: 840594 - DNA, 100 bp, Homo sapiens
gggaatttccttgtgcctccattcccgggaggggggagcggcgttggaggccaccgtttccaggatgtgggctctcttgatgagaagatgaagagcttgg

SEQ ID NO: 840595 - DNA, 98 bp, Homo sapiens
tttcatcgttttttctactccaaatctttcgtcaaacacagtttcgaggaacacaacatggatctatcctcttaaattgtggagggcaccgcacatca

SEQ ID NO: 840596 - DNA, 50 bp, Homo sapiens
ccgggactaggagcttaagtgaagaggtcaaaatgcagatcttcgtgaaa

SEQ ID NO: 840597 - DNA, 100 bp, Homo sapiens
tgatattgatattattacagcttcatatgcaccagaaggagatgaaggttgaattgaccaaagcaatggtgatggagaagcctagtcccctgctggtcgg

SEQ ID NO: 840598 - DNA, 100 bp, Homo sapiens
ccgagctgctagaattgaccactatgttgtggaagtcaataaactaataatcaggttagagaaggcaaaatttggtttctctaatattactggaattgat

SEQ ID NO: 840599 - DNA, 100 bp, Homo sapiens
gggtgagcgacctgcgagactcacaagaggggaagctgacagagatacctacagacggagtgctgtgccacgtctccaccagctcctggccgggttcgag

SEQ ID NO: 840600 - DNA, 98 bp, Homo sapiens
gcagccgccgccgccgccccagccaccgcccccgccccaagccggcctaccccagatcatccaaaaggacaagcagatcttttgaaatatgctaagaa

SEQ ID NO: 840601 - DNA, 100 bp, Homo sapiens
tgaccgagaccgtgaccgagagcgtgaccgagagcgcgaatatcgtcatcgttagaagcaattctgtggtgttcttggtcacacatttatggagtttctg

SEQ ID NO: 840602 - DNA, 98 bp, Homo sapiens
ggagagtcccgtattctcagagtaaaagttgtttctggaattgatctcgccaaaaaggacatctttggagccagcttcctgcagatttcacaaaactg

SEQ ID NO: 840603 - DNA, 100 bp, Homo sapiens
tgtgttttctggtgtgctgcaggacatcaattcttcaaggcctgttttactaaatgggacctatgatgtgcagtatatttgccttccctccatgatctcc

SEQ ID NO: 840604 - DNA, 127 bp, Homo sapiens
cgggatgttcagtctgatggccagttgctgcggctggttcaagcggtggcgggagcctgtcagattgatcattcttagaagagctgctgtaacacataggggaagtgaaaactaacagatgaaagtt

SEQ ID NO: 840605 - DNA, 98 bp, Homo sapiens
acagtccctccacgcggaaagaagtaccttcgccggtcaccggctcctgcagggtatggaattgtttgaagaggcattgcgtcgatgggaacaagctc

SEQ ID NO: 840606 - DNA, 100 bp, Homo sapiens
tttcgcaacgggtttgccgccagaacacagctggagctctcaaacactgctgtcctgcaccagatgcggcgggaccaggtgacagacacgtgccgagcca

SEQ ID NO: 840607 - DNA, 98 bp, Homo sapiens
tgaatccaagttaacccttaccacccagcagcagggcatcaaggtggaatatgtgatcaagtgtgacatgtcagctctgcagaagattctgtatcgcc

SEQ ID NO: 840608 - DNA, 98 bp, Homo sapiens
tctcctggatgttgatgagaaaaccgggaactcagagtcaaagaagaaaccgtgctcagaaactagccagattgaagaactaaggccacatttcagcc

SEQ ID NO: 840609 - DNA, 100 bp, Homo sapiens
aggacatcgtgtaccggcagctgaatgagagtgataatgaactctcaagtggaacaggtgatgtgtctaaggattgtcctgagaagatcctgtattcttg

SEQ ID NO: 840610 - DNA, 98 bp, Homo sapiens
cctgcccgcctgcggctgctccggacaacatctggggaagatgtacgagacttcacaaaggtacttaagaacaagttcaggtcgaagaagtactttgc

SEQ ID NO: 840611 - DNA, 107 bp, Homo sapiens
caatatacagagctgctctggaagaattgcagagacgattacagtttgaagagaaaaagaaacagcgtgaaattgagggagaaaagggtgaagcaggtcctcctggc

SEQ ID NO: 840612 - DNA, 98 bp, Homo sapiens
gcagggatcagacctgagtgaacagaagaaaagagcattttaccgatggtatcaacttgagaagacaaaccctgaaagctcctgctgcttctgtaccc

SEQ ID NO: 840613 - DNA, 100 bp, Homo sapiens
gagccaacatggcagcggggttcgggcgatgctgcagggttgaaatcacaaagattagacacctttttagataggtgttcttcagcaccactgacaacac

SEQ ID NO: 840614 - DNA, 100 bp, Homo sapiens
cttctgacattcttaattacagattcccagaagttgtgcatgagttcctgtgaggagagttggcatcttggaaatcaaagacggttgtgatgcagttttt

SEQ ID NO: 840615 - DNA, 99 bp, Homo sapiens
agtacctccttttcagctacaacatcatcttctggttataaaccggtggaccataagcttatttggctacccttacgggaggcatttgaggaactcttt

SEQ ID NO: 840616 - DNA, 100 bp, Homo sapiens
aatggattactctttggatataacaccaccttcaaaaatttctggcaagactggagagttaaatcagcttttaaatgcagttaaatcaatgcaggagaag

SEQ ID NO: 840617 - DNA, 99 bp, Homo sapiens
ggaattcctcaagacaccattccagcaactttcatcctttgaaacgtgtgctgaaaaagaagaatcagcaaatactactgaaagtgcaatatttgagta

SEQ ID NO: 840618 - DNA, 100 bp, Homo sapiens
gagaaggaaacacttagaggaagttctggagatgaaccaggcccagacatgtccgtccttgtaagttaaaagcttccatgggagccttccttcctaatca

SEQ ID NO: 840619 - DNA, 98 bp, Homo sapiens
ccatggcataaggaactctatcccaggaatacagctttgcattaggcagatcgggagcggtgccgagaaaaatttccttactagatgacatttcatcg

SEQ ID NO: 840620 - DNA, 98 bp, Homo sapiens
cagatctgcacgggctaaggccagcatccaagccgcgtcggctgaaagttccgggcaaaagaaagggctattgcaagacacgaagtccgagaaattga

SEQ ID NO: 840621 - DNA, 99 bp, Homo sapiens
gacacgggctgcaacctgcagcacatcagcgaccgggagaacatagacgtgatgtttatccatgcatcgttgagacttcggaacctcaagaacaaactg

SEQ ID NO: 840622 - DNA, 125 bp, Homo sapiens
taccatggcgaggagtctctgtccgggggcctggctaaggaaaccctattacctccagttgtattccctgaatgactataaaccacccatttcgaaagcgaaaatgacccaaattactaaggcag

SEQ ID NO: 840623 - DNA, 132 bp, Homo sapiens
accgagaccattacggcaggaagattcttttgctgtttgcagccaattgggatcagagtaggcaaaaactgattattccaagtggaagttgccctgttattctgaatacttacttttgtgagaaagttgttg

SEQ ID NO: 840624 - DNA, 98 bp, Homo sapiens
gagtcctgaagaattcatcaacttggtgttccataagatcgatataaacaatgatggaacgccccatgtgtctggtgggaagatgctcagtgctctgg

SEQ ID NO: 840625 - DNA, 100 bp, Homo sapiens
cctgcagatgtcgccaggaaagtggtgatccaggcaggaccaggctgcactgaagggacagaggcagcctgcttctgcaaagtggtacgatcgaagggac

SEQ ID NO: 840626 - DNA, 99 bp, Homo sapiens
gaaaatgaattccgtattgctttaactgttgaagccagaagatttcaagattggtcgtttttcaatgagctagagaagttaccaagtctacgggctttg

SEQ ID NO: 840627 - DNA, 99 bp, Homo sapiens
tgaacctcacaggcaggctaaacaaggccctgaagcgccagagctcgttgggcctttccttctttaacagcatcttggcccatggggacctacgcaaca

SEQ ID NO: 840628 - DNA, 99 bp, Homo sapiens
ttaatgggagcatatatgatgagaatgccagtgcccagtatctgggagaagtattttttgacatttcgctgtttgtccattgctgttttcttgttaccc

SEQ ID NO: 840629 - DNA, 99 bp, Homo sapiens
agcggctgagttatcggagaagcgtttgtagattattaagaaatggactcggcactactgcgccattgccgatgccaagctgtccttcagtgatgacat

SEQ ID NO: 840630 - DNA, 131 bp, Homo sapiens
tggcttccagaatcactgagctgtaacaaagcactctgtgctagtgatgtgagcaaatgcctcattcagcaaaacttagagagtaacctcaccaaccttattaagaggaacacagaactggagaccctttt

SEQ ID NO: 840631 - DNA, 99 bp, Homo sapiens
cgagaccgaattggcatttccaaatcagagttagttgccatgttggagaaagttcgtcgctgcttcctgtgctccaggagaggacatctcctgtattcc

SEQ ID NO: 840632 - DNA, 98 bp, Homo sapiens
ctggatctttatctggcttactttgtccacactccgggtctattattagcagaagatttttctgcatagttggcacgctgtacctgtatcggtgtatt

SEQ ID NO: 840633 - DNA, 100 bp, Homo sapiens
tggactctagggaccctgctgaatagctggggctacaggcgtgtgtcactgcgcccagaccactctgcttcatttttgggagaaaacttctcacactatg

SEQ ID NO: 840634 - DNA, 100 bp, Homo sapiens
ctcagtatgacgcttctgagctaaaagcttccatgaagaaaccagactgtgatgactgggagagcgggctgaatgcaatggagtgtgcattacatttgga

SEQ ID NO: 840635 - DNA, 100 bp, Homo sapiens
gtgacctctagcacatcacctacactaccacggccacactcaccactccatggccacacagctgtgaaaaagggctcctatgacatggtgtcgactctga

SEQ ID NO: 840636 - DNA, 100 bp, Homo sapiens
tctggttcttaaggattgaaaagggttacacatcattttggaatgactgtatatcatctggattacgtggctgtatgttaattgaattagcattgagagg

SEQ ID NO: 840637 - DNA, 98 bp, Homo sapiens
gccaacttccattgaacttcccagcactcgaaagggaccgaaatggagagcaaagggctgcgtccaaagaggactctgcggctggtgctctggactgc

SEQ ID NO: 840638 - DNA, 98 bp, Homo sapiens
cagcctcagctatcgccgctgactgtgcccctgtggaaggagaacgtgctggccaaagcgctctatgacaatgtggccgagtccccggatgagctctc

SEQ ID NO: 840639 - DNA, 100 bp, Homo sapiens
tgtggaggacgagggcaccccaaccctgtcggtggtggcaaaggaagcctgggagaatcacaggttgaggaatgattctgtgattgtggatactttccat

SEQ ID NO: 840640 - DNA, 99 bp, Homo sapiens
ttgaggacactgtattatacggttactataagccctatgagtttgtctctctggaatggctgcaaaagtggttggatgaatcaacacctaccaaaccta

SEQ ID NO: 840641 - DNA, 100 bp, Homo sapiens
aatggatctgtacatcaaaaggatggattaaacgatgatgattttgaaccttacttgagtccacaggcaaggcccagccctatgagtttgtctctctgga

SEQ ID NO: 840642 - DNA, 100 bp, Homo sapiens
gtggcgaatggggctcacgtcgactccagtggctgttggacaattatgagacagcagaaggagtgagccttcccagaagcactctgtacaaccactacct

SEQ ID NO: 840643 - DNA, 100 bp, Homo sapiens
acgaagacagtccctggatcaccgacagcacagacagaatccctgctaccagctctcaaaattagagagatgtgtaattgtccaccactgtctaatccag

SEQ ID NO: 840644 - DNA, 100 bp, Homo sapiens
atcccagcactttggaaggccgaggatgaagatttgataaagtggaaggcactgtttgaggaagtccctgagttactcactgaggcagagaagaaggaat

SEQ ID NO: 840645 - DNA, 98 bp, Homo sapiens
cggcggcaaaggagacagacttcggatgggaggtgcagtcagcctcagtttccaaagccggaaaaggatcctctagtagccacggtgtggcagctgct

SEQ ID NO: 840646 - DNA, 98 bp, Homo sapiens
ccaagaagatcatcccagagaagaaagttcctgtcatcaaaaaaccagaagcaccgcctcctaaagaagcccccgagcgcccacagcatgaaggagga

SEQ ID NO: 840647 - DNA, 100 bp, Homo sapiens
aaacattttattctggcaggcctgtgaatattttaatcatgttcctgcacatgacaaaaaggagggttatatcagttcctagcttgaggttttccaggga

SEQ ID NO: 840648 - DNA, 98 bp, Homo sapiens
aacatgaacaactacaaaggctatgaaaagaagccctattgtaatgctgcagctgtctgcttcagaaagtgagggctccaggaatgaggagaatcttc

SEQ ID NO: 840649 - DNA, 99 bp, Homo sapiens
ttggaaatcagacgaccccaatcccatcgaggctttctatcttcttgccaaaaggaacttctttaagatgagctttgatccaaaccttctccacaacaa

SEQ ID NO: 840650 - DNA, 98 bp, Homo sapiens
tttggatacagataccatctcaaagggtaatcttccaggtctgcttagtggcctatcttggcttgtttatgctttgtgtctcatatcaggttgacgaa

SEQ ID NO: 840651 - DNA, 100 bp, Homo sapiens
ctttaaaagaaaaagaaaacagattattattgcaacaaaggattctggatggagaacagccatttgcccagattattgtcctaacatgtatgaagaaatg

SEQ ID NO: 840652 - DNA, 100 bp, Homo sapiens
cctgttcgctcttttcagcccctcggagaaaaggttctgcaggacgatgagttcacctgtgacctcttccgattcctgcaactactctgtgagggacaca

SEQ ID NO: 840653 - DNA, 100 bp, Homo sapiens
gggacagcaggagcagtggtgctgtcagcgcggccgtcggagacatgggagacccggggtcggaacccatgcaggtgctgttttccggtgaggccaccca

SEQ ID NO: 840654 - DNA, 100 bp, Homo sapiens
ggcgggaggaacgctcactgtcagcgcctggaaacttgctcactgagaaagatcagtctaaagaaaaggagaagaaagtgaaaaaaacaattccttcctg

SEQ ID NO: 840655 - DNA, 100 bp, Homo sapiens
cggcagccggctgagtgggaaccgcgcggtgtctgaggaggcagtcggcgaccgagcactgtccagagcttcctccagtggacaatagcatatttgtcgc

SEQ ID NO: 840656 - DNA, 100 bp, Homo sapiens
ctctcctggcttcttactcagtccatcttctgcttagtatgtgtattcagacaggaagtgggaaaactcttgcctttgccatcccaatgattcatgcggt

SEQ ID NO: 840657 - DNA, 100 bp, Homo sapiens
ctgcagcatctaccgctcactgtagaccatctcaagcagccttcaaatgtttatctggtgtgactgtattatgccctcagagagtactgtatgttgccca

SEQ ID NO: 840658 - DNA, 98 bp, Homo sapiens
gtgggagctggcagccccggaagctgccagtcttcaagtccctccggcacatgaggcagcctcttagcaatgcataccacgagttagcacaagtgtat

SEQ ID NO: 840659 - DNA, 100 bp, Homo sapiens
taaggccaccattcaagaagttcagcaaagggaaggtgtcttgctgcaggtaactaatgaagaagtggtcaaccacagagtcttcaagaaataagaaatt

SEQ ID NO: 840660 - DNA, 100 bp, Homo sapiens
tgaacactatgattaccaccaggagattgcaaggtacaggtgaacaaaggcagagtaaactgtcaccccagatgcaggtacatcaagacaaaaccctgcc

SEQ ID NO: 840661 - DNA, 98 bp, Homo sapiens
gcaggtcaccctgaagaccctccagcagcagaccttcaagatagacattgaccccgaggagacggggatatcattttcaatgcccaatacccagaact

SEQ ID NO: 840662 - DNA, 99 bp, Homo sapiens
atttctcctattgaggagtcaaccctccatcaagaaatcggcgagagagagctgagctaaggccagacttctttgactctgcagctatcatagaagatg

SEQ ID NO: 840663 - DNA, 100 bp, Homo sapiens
aggattcaagggaaccttccctgatgcgacaagcatgagacgaagctgaagggagtcatctatttccaggccattgaggaagtgtactacgaccacctgc

SEQ ID NO: 840664 - DNA, 100 bp, Homo sapiens
ctggccttgcgggcccggaactacgagtacctgatccgcctcttccaggagtgggaggtgctggagaatctggtaaaagcaccattgtgaagcagatgag

SEQ ID NO: 840665 - DNA, 100 bp, Homo sapiens
cgcagcctccgcggccgagagtgcagcgaattcactgcgtgctgtcctcacttgttctacaatgagtgccaaatctgctatcagcaaggaaatttttgca

SEQ ID NO: 840666 - DNA, 100 bp, Homo sapiens
ggatttatacagagatgtcatgttggagaactacaggaacttggtatggcttgaagaagcctgggaagtttataaacagataaagacgcaacatgaaaga

SEQ ID NO: 840667 - DNA, 100 bp, Homo sapiens
agccaaaccagatttagataaagtcatcagtttgaaagaagctaatgtgaagaaacatggcttagttataatccccgatggcactcccaatggtgatgtc

SEQ ID NO: 840668 - DNA, 100 bp, Homo sapiens
gaagaggggtccagtgggtctgagcaaaagccattgatcttatcaacaatttgctgcaagtaaaaatgagaaagcgctacagtgtggataagaccttgag

SEQ ID NO: 840669 - DNA, 98 bp, Homo sapiens
aagtccgtgctgtttgtgtgtctggcttgcctgggaccagtggcagggaccccggaacctgaaggtgctgacaaagatgacctgctgctgttgagtga

SEQ ID NO: 840670 - DNA, 100 bp, Homo sapiens
aaaagatctcccgtgatgagctgttacagctgatgtcatgtggtttgctggaaacactcaagtttggtgttttggagttgcaagaacacctggatacata

SEQ ID NO: 840671 - DNA, 99 bp, Homo sapiens
gacaagtcggcgccccagagcggacgaggatgaccagtgtcccagtgaaggaacgagtgaaggtgtctcagaactggagactggggcgctgccgagagg

SEQ ID NO: 840672 - DNA, 98 bp, Homo sapiens
tctatgtgggtgacttcaattacatccgacgcatctttccctctcgaaatgtgaccagcatcttggagttacgagctaaagttgcagacaagatccag

SEQ ID NO: 840673 - DNA, 99 bp, Homo sapiens
ggacttctaaaaggaactatgtctggaaggctgtggagaactttatctactcctgcgctggctgctgcgtggccacgtacgtcttgggcatctgtgacc

SEQ ID NO: 840674 - DNA, 100 bp, Homo sapiens
tgtaaacattgccactgctcagaatggcatcaaagtggttaaatggattcacaacaagcccccgcctcccaacactgctggtaatgaatcttgccctcag

SEQ ID NO: 840675 - DNA, 98 bp, Homo sapiens
gcgcgctgctggacgaagagctctcctccttcttcctcaactatctcgctgacacgcaggaagagctaaggagcaaatccaagatctgtgccaatgtg

SEQ ID NO: 840676 - DNA, 100 bp, Homo sapiens
atgtgagctgcttgagcacagggactacatcataatgttttttgctctcttacatgtctcatcaacgaatggattaggattaaaagtaagttggatcaag

SEQ ID NO: 840677 - DNA, 98 bp, Homo sapiens
tcaaaggaattgtttgaaaccaaacatgttatccagtaatggagcctctaaggtttgaagacatacctgatatcgggtcagagagccaaggagtctcg

SEQ ID NO: 840678 - DNA, 99 bp, Homo sapiens
cccgatgaatgtgggaagactgaggtttcggctgagtccagctcctccatgaactccaacaccccgctggtgaggataacaacacgcctctcttcaacg

SEQ ID NO: 840679 - DNA, 100 bp, Homo sapiens
cagaagtgcagaatctgggaggagagctcattgtgtcagggctggccaactcagccaatccgcacatttagctctccaactaccatacaacgtgcttggt

SEQ ID NO: 840680 - DNA, 98 bp, Homo sapiens
aagctcttcttgaaaaatgcaaagatgtagatgagagaaatgaggttccaagaccaaagattaaattaagagaaggtaaagctggacaaaatctgctg

SEQ ID NO: 840681 - DNA, 98 bp, Homo sapiens
ttgtcttaacttccaaacatcatgaaggtctaacttcaaacttgtggctgttaattcaaaactctatgccatcggagggcaggccgtttctaacgttg

SEQ ID NO: 840682 - DNA, 98 bp, Homo sapiens
agttcttcgatgtatctaaacttggcaccaagtatggctcgattatttgatgaacctcagcttgctagtctttgtctagatacaatagacaaaagcac

SEQ ID NO: 840683 - DNA, 99 bp, Homo sapiens
agagtcaccgcggcggcgccgggtggtggttaaaccatgttaaggaggattttacagagggtttgatctgtggatgaaatgaatcatgattttcaagct

SEQ ID NO: 840684 - DNA, 100 bp, Homo sapiens
gccagttcccagctgtggaacacacagattcaaacgctcaagaaattaaggacatttatggactaaatggacaaatagagcacaaactagctttcctgag

SEQ ID NO: 840685 - DNA, 100 bp, Homo sapiens
ccagaggagtgtgccatattccaatggctgagccgttttgccccaaaacgagagagggagacattgggtcagtagtggatgaacacttctcaagagcttt

SEQ ID NO: 840686 - DNA, 100 bp, Homo sapiens
atttgagtcatttccttcgtacccacagtgcttcatgagagagagacccttgtgagcatacaagctctcatttggaagcctcgggaagccatatggttgg

SEQ ID NO: 840687 - DNA, 100 bp, Homo sapiens
cctgtcaagactcaatatgatttcccatcttgcagatgtgtaggcatgctgcttgcagggtttctcatcagaaatatcccagtcatcaacgataatgtgc

SEQ ID NO: 840688 - DNA, 98 bp, Homo sapiens
gctgctgagcaaagtgggatcgattatgtttgagaccttcaacaccccggccatgtacgtggccatccaggccgtgctgtccctctacgcctctgggc

SEQ ID NO: 840689 - DNA, 100 bp, Homo sapiens
ggcggtggagcctttatatcatgggaagcactctcacttattaaagatcttggttactataacaacagtaccaaggtggctgtgaaaaccctgaagccag

SEQ ID NO: 840690 - DNA, 121 bp, Homo sapiens
tgtagctgcagtaaaatgggtgatgtcaaagagaactatcttgaaacatttatttccagtccaaagtggctttttctcaagtatattttccagtctgtttggaactcgggaaatgagaatt

SEQ ID NO: 840691 - DNA, 100 bp, Homo sapiens
ggcgcctggagtgagggttctggttcccgccggcgaggtgtgttctactccctcttctgggaatgaagcctccccagcaaagcctatacctgcttgttga

SEQ ID NO: 840692 - DNA, 99 bp, Homo sapiens
tcttcttcgggatcactggattgctgacggcagccctctcaggcatgcccaagagaatcgtaaatgcaaaaattgcttgccttgacttcagcctgcaaa

SEQ ID NO: 840693 - DNA, 99 bp, Homo sapiens
ctcccgagtagctgggactgcaggaccaggagctgcattatctattctagacaaatttcttgaagaatcctccaaactgcagtctgattcacaagaacc

SEQ ID NO: 840694 - DNA, 100 bp, Homo sapiens
cgccgagccacccgcccgcccaaggtctctcgcgggcgggagaacggaaaactcccaacttcctgcttagaccatgctcagcctccaagcagccttgtca

SEQ ID NO: 840695 - DNA, 100 bp, Homo sapiens
gaaagagaggcaaacctggaacccactttactcagagtgacagagctccacagaaaagagtccgatcaagaggtgtggaaaaagaagctctcggcggccg

SEQ ID NO: 840696 - DNA, 100 bp, Homo sapiens
gaaatgggccatgagctcttcaaattggcccagatctttttcaacgggttctgagtggtgttgctcagccagtagcttttggtcaaggacaacagttttt

SEQ ID NO: 840697 - DNA, 100 bp, Homo sapiens
tctagttggccgaaatctggatggccttctgcatttcagaagccaaaaggacggaatgaaagctactggttgattttaaagtgcctgggcctcacaggtt

SEQ ID NO: 840698 - DNA, 100 bp, Homo sapiens
actggatgtggcagggagtcctaggacatgtgtggtgtgggcttcttcaggtgctgacaccaaatcctactgcaagcgagtttattcctaaaggaggatc

SEQ ID NO: 840699 - DNA, 100 bp, Homo sapiens
cagatgctggagcagcaccttcaggatgtccggaagagagtgcagactctggccatctatgaccggtttggccggttgatgtatggacaggaagatgtac

SEQ ID NO: 840700 - DNA, 100 bp, Homo sapiens
gatggcctggaccagtatgagcgctactcagagcagcacaaggaagctgccttcttcaaagagctgcgtttgctgccaattgatggggcaaatgatctct

SEQ ID NO: 840701 - DNA, 99 bp, Homo sapiens
gaatttaaacctgagccactatctgaagctggagaatgctggaggagaccttaaggatggccaccaccactatgaaggagctgttgtcattctggatgc

SEQ ID NO: 840702 - DNA, 139 bp, Homo sapiens
gggaagttgctggcttcagctgatgactttggcaaagttcacctgtttagctacccctgctgtcagcctcgaccccgaggaagctgggcggtacctggagacctacaaggcctatgagcagaaaccagcggacctcctg

SEQ ID NO: 840703 - DNA, 98 bp, Homo sapiens
caagagcttgtccaaagtgcaacattcatttcaatcttttggatcctttgaaaaatcacatgaagattgcagtgcttttgtccacaaaggctgccgag

SEQ ID NO: 840704 - DNA, 100 bp, Homo sapiens
caaaagacaactctgcttttccagaaactgtgccaggatcacgggaaaaagacctcgatgaagttctgcagacccactcagtgtttgtaaatgtttctaa

SEQ ID NO: 840705 - DNA, 98 bp, Homo sapiens
gaggagccagttaccatgactcatccagatcatggaagggaagtggttgctgtgtatgttactggtgcttggaactgctattgttgaggctcatgatg

SEQ ID NO: 840706 - DNA, 99 bp, Homo sapiens
ttccgggagcctagatcctgtgctttactctgaagactcgcctccaagactgcagagaatgccaccagtggggaaacattagaagaaaatgaagctggg

SEQ ID NO: 840707 - DNA, 100 bp, Homo sapiens
acagtgaaaaatgatgaagagcagatggaaacacatgaaagacttcctcaaggactacagtatgcacttaatgtccctcttattttgggagaggccagcc

SEQ ID NO: 840708 - DNA, 100 bp, Homo sapiens
agcagtgcctggtggccgaccttgtccacacagtccatgctgctttgtaccgcctcagtggagactggaatcccttacacattgatcctaactttgctag

SEQ ID NO: 840709 - DNA, 99 bp, Homo sapiens
gtgattcccgtgattgcgttacaagctttgtctccttcgacttggagtctttgtccaggacggctacccacctttctgttctgagacccctcaagagac

SEQ ID NO: 840710 - DNA, 100 bp, Homo sapiens
agctgtatggcagctaccctgaggatcattgaagagaacatccctgagaaactggcgatggaatatgagaggagccctctggaaagaaaaggacagaccc

SEQ ID NO: 840711 - DNA, 98 bp, Homo sapiens
gtcttgggacccttgcatggtgtttcaaagggtggtgaagaactaaggaatgtatcctgtcaggtataatgtcagtgaatggcaagaaagttcttcat

SEQ ID NO: 840712 - DNA, 75 bp, Homo sapiens
cgacggccactgttctctgggacaatgcttttgcagagccttctctcagcaaacctgctgggcgacagcggactc

SEQ ID NO: 840713 - DNA, 101 bp, Homo sapiens
aatttctcttgtcaatggccaacagagggaaggatacaaatggttcacagttcttcatattttgatggatcatcaaaatctgtcagaacatgtactctgca

SEQ ID NO: 840714 - DNA, 98 bp, Homo sapiens
gaattttgccgatttcatgactaaccagttgagtccattcttgcacaccgagaaaatatgcgacagatgataagaagtttttctgaaccctttggaag

SEQ ID NO: 840715 - DNA, 100 bp, Homo sapiens
agtttgttgtgcttgtcaagatcaggttcttggtgagattcaggaaattgtgaaaacagggctttgggtaggcgattgcttcatttacacaagttctgtg

SEQ ID NO: 840716 - DNA, 99 bp, Homo sapiens
tgcggaggctgcctcggcggagcagaggaaccacacgctgatcatgatggatcctgagcttgaaaaaaaactgaaagagaataaaatatctttagagtc

SEQ ID NO: 840717 - DNA, 100 bp, Homo sapiens
gccatgctcagatactccagtcttccaggtcccagtagggatggcacaatcagcgaggacaccatccgagcctctctcatctctgcggtcagtgacaaac

SEQ ID NO: 840718 - DNA, 100 bp, Homo sapiens
gggggtcgctggctctgctgctgccgccggcgaaggaggaggcgttgccgggcaaaggcagctcgagcatctcatctgacgtgagttcaagtacagatca

SEQ ID NO: 840719 - DNA, 100 bp, Homo sapiens
ttcagttttcattatcttgcatttttctgagggaaggaaaagccacattatttgcatgggtgcaaaagaaaatggtttgccgctggagtatcaagagaag

SEQ ID NO: 840720 - DNA, 98 bp, Homo sapiens
cttggacttatttcagcttaataagggtgtccgcaatgttgccagtgtctgtctgcagattggctacccaactgttgcatcagtaccccattctatca

SEQ ID NO: 840721 - DNA, 98 bp, Homo sapiens
acacactcagttaattaatctgtggtgccagtgaagaagaggacacatgaaggcttgctacccccagtggaaaatcatcccctccccttgtgtgtatg

SEQ ID NO: 840722 - DNA, 100 bp, Homo sapiens
gcttgtgtagcgtcagatccttgagtgataaaggagtagagcaagatggattctggatatactctgagtattgtaacaaccacctggatgcttgcatgga

SEQ ID NO: 840723 - DNA, 99 bp, Homo sapiens
cagggcagccgtgcccatttccccagggcatggaggaaaatatctaaatgtggtcagagagtgtggccatgacgtcacctgcccggtggctaaagagat

SEQ ID NO: 840724 - DNA, 100 bp, Homo sapiens
caagaggcagacctaggaaatggacagagagtgcatgggctgaagaatactctgaaaagaagaaagggtctcacaagcgctcagcatcttggggcagtac

SEQ ID NO: 840725 - DNA, 98 bp, Homo sapiens
ccttgctgatgatcgggatgactatgatttcttgatgcaaacgtccacgcaaatgcctattattattgctggaaatgatcaacaaaagaagaagtatt

SEQ ID NO: 840726 - DNA, 99 bp, Homo sapiens
ggaggcggaggcagaggtggaggcgctttgaaagagggccactgccaaggcgacaagtcaatattctgtaggatggaagtcttgtcccgctattgctcc

SEQ ID NO: 840727 - DNA, 100 bp, Homo sapiens
aggagacttggtgaagaaggaaagagttcgttttctagccaaggaaaatgtaacccaggacgctgaggacaacacagtctctttcctgcagcccaatggt

SEQ ID NO: 840728 - DNA, 98 bp, Homo sapiens
gagtatctggtgaaatggagaggctggtcgcccaaggctcttccgtgggcggcggcttcgcgggcttggagttcgcgcggccgcaggagtcggagccg

SEQ ID NO: 840729 - DNA, 98 bp, Homo sapiens
ccaccaactcctacagttgagacgatttgctcatggaacagcaggtctggtgttccttacggccctctcagagctcgtccgcatggtgctgaatggct

SEQ ID NO: 840730 - DNA, 100 bp, Homo sapiens
agggaatacaatttctagaagcagtcccaaattcattggtcattcccctcaacctctaggctatgacaggtgctggagaatctggtaaaagcaccattgt

SEQ ID NO: 840731 - DNA, 98 bp, Homo sapiens
tcatcgtcctgcctctggccaagatgtatgtccctgggaagctgcatgatgtggaacacgtgctcatcgatgtgggaactgggtactatgtagagaag

SEQ ID NO: 840732 - DNA, 98 bp, Homo sapiens
gaaagcaagctcttctagaagttgttgatacaccaaaatcggcaagctatcttaaaccagtttgcagcaactgctcctgttggcatcaatatgagatc

SEQ ID NO: 840733 - DNA, 100 bp, Homo sapiens
gctggataattttatcccagggtggctgaatcacggaatggtggttgctgtatatggaactttatctgatttgctttctgtggccagcagtaaactcggc

SEQ ID NO: 840734 - DNA, 100 bp, Homo sapiens
cctcctgggtagctgggactacaggttctccaactctgtggcttactatggcctggccatggacctgcagaagtttgggctcagcctatacctggtgcag

SEQ ID NO: 840735 - DNA, 100 bp, Homo sapiens
caacgtggctatcccctctgacgtctcccacttccgcttccattacctccctgcacttggctattcaaaacgggtccatctgatgaatcctatggttcca

SEQ ID NO: 840736 - DNA, 99 bp, Homo sapiens
ggcgacaagggtgttcccgaactagagtggtgatgtcttggcattgcccattttcaagcaggaagattccagccttccattggatggtgaaacagagca

SEQ ID NO: 840737 - DNA, 100 bp, Homo sapiens
ctcggagaagcagaggcactgcctggagctgcagctgccaatttgtggtgtctgaagaccaagactacacagctcattttgctgatcctgatacattagt

SEQ ID NO: 840738 - DNA, 98 bp, Homo sapiens
ccaaataagctatatactttggttacctatgtacctgttaccactttcaaaatttcagaagaggagccccgccgaggcatgagggccgtgctcccccc

SEQ ID NO: 840739 - DNA, 100 bp, Homo sapiens
agcatctgatgcacgttccatccggcgctcagctgggcttgagttggcctttaccagagtttgatccaagccagattcgactgattgtatatcaagactg

SEQ ID NO: 840740 - DNA, 100 bp, Homo sapiens
gctgcttggtcaggctggacgccatgttccgaagacataggccaaggagccagacttcctgtgttaactccttcctctgccactttttaccttggggacc

SEQ ID NO: 840741 - DNA, 100 bp, Homo sapiens
gtttacttcaaagcccacagagcagtgcttgctgctttttctaactatttcaagatgatatttattcaccaaacaagaagcggcaccatgtactacagac

SEQ ID NO: 840742 - DNA, 100 bp, Homo sapiens
caagtggacattttactggctcaagaagacagtgacccgcccattcatgaaagtctcagcatagaaaatacattgtgggcaagcaccattgttgcatcag

SEQ ID NO: 840743 - DNA, 100 bp, Homo sapiens
agggagagcatttacccctatctagaggatataccagaccctggagtgaactggattccatgtagagacccctggagagtcacctctactttcctgctac

SEQ ID NO: 840744 - DNA, 100 bp, Homo sapiens
cagcagcagcagtgatggtggcagcaacaaggagggaaaaaagagcaggtggaaaaggaaaggcagtggagctactgctgtggttcaggcagccctatgc

SEQ ID NO: 840745 - DNA, 100 bp, Homo sapiens
ttcaacatgcccctcactatctcccggaaatcatgagtggaggatctcaagtccacattttttggggtgctccaattgctccactgaaaatcacagtatc

SEQ ID NO: 840746 - DNA, 100 bp, Homo sapiens
ccccccgaagggcgtgaccatcccgtaccggcccaagccgtccagctctccggtcatctttgcaggtggtcagcgttgggccggagcactagcctcacgg

SEQ ID NO: 840747 - DNA, 100 bp, Homo sapiens
ccacttgattacccgttaagtcccccaaagatgagatttacctgtgagatgtttcatcccaacaggataaacacacttgttacctatgatatggttccag

SEQ ID NO: 840748 - DNA, 98 bp, Homo sapiens
cgagtgtccctttccttcctggcgctttcctgggttgcttctggcggccatggtgttgctgctgtactccttctccgcctctgcctgtgagtttctgg

SEQ ID NO: 840749 - DNA, 100 bp, Homo sapiens
ggcgaggagaaccaactggtcccgaaagaggtgattttcttccacccccacctccacctctagatgattccagtgcccttccatctatctctggaaactt

SEQ ID NO: 840750 - DNA, 98 bp, Homo sapiens
gtcattaccactcacactgtacttccagggagacaccgattataagaagagaaactcagcgctggggaagaagcatgggctactgcatcctttttgtg

SEQ ID NO: 840751 - DNA, 98 bp, Homo sapiens
tgaggaagatgtgacaactaccggaggtgaaggttgctatccttaaatacatagaaactctggccaaacagatggatccaggagattttataaattcc

SEQ ID NO: 840752 - DNA, 100 bp, Homo sapiens
gacgagggaaaggtgtcctaaagcatactattcttgttcagtcctggtatccaatcacagtggccacaaattctagagagcagaagaaaatattggccaa

SEQ ID NO: 840753 - DNA, 138 bp, Homo sapiens
agcacctgcttttgcagccccttggaggcgaccttgagtctctcagatggttgccccaaatctgcagcctttgaagtaaattttatggatgatgtaggtcagactctattaaactgggcctctgcttttggaactcag

SEQ ID NO: 840754 - DNA, 111 bp, Homo sapiens
ggctgcagggcggtaaggatttcaacatgcctctgacaatctctagtgttcgatctggggctaatgttctaatttgtggtccaaatggctgcggaaagagttcacttttcc

SEQ ID NO: 840755 - DNA, 122 bp, Homo sapiens
ttgactgaagaacagaaggcgatcaaggccaagtatccgccagtcaataggaagtacgagtgttatacattggctcttcaaagacgttcacctcatcagagaaatccctgactcctttgcag

SEQ ID NO: 840756 - DNA, 100 bp, Homo sapiens
tactctgatgtcaatcttgagggctagttttcggctttgtgagaaaccttaccatcaaacacgatggccagcaacgttaccaacaagacagatcctcgct

SEQ ID NO: 840757 - DNA, 100 bp, Homo sapiens
gttgggaaatgattctactcggacagaggaagttcagaagatggcagtgaacgtatactcaacgtcagtgaccagtgataacctaagtcgacatgacatg

SEQ ID NO: 840758 - DNA, 100 bp, Homo sapiens
tctcttctggaagagatggaccaaaagcctctccagcaataatccgttcaaaaaggcatttgaatctgagccaacactacagtcaggaattaattatgcg

SEQ ID NO: 840759 - DNA, 99 bp, Homo sapiens
ctgaggtggcagcggcaggagagtccggccgcgacaggacggctccgagctctgtccagtggtgggagtattacatcccctcctctttctccagcattg

SEQ ID NO: 840760 - DNA, 99 bp, Homo sapiens
agaaaaccgacaaccttcccagaaagtccaagctcgtggtgggtggaaaagtgttcgccgaggtatgattatcgggaaatgctgcacaatgccactttc

SEQ ID NO: 840761 - DNA, 100 bp, Homo sapiens
tgccagaggaggagccagaaacagatctcagccccgggctcccagctgcccacctcatagagatcctgaaggagctagacgagtgctacgagcgcttcag

SEQ ID NO: 840762 - DNA, 98 bp, Homo sapiens
gccgccgccgcggggcgaggtcgccgccatggcccgctggatcccgaccaagaggcagaagtacggggttgagcctccattatggcatgctgaattta

SEQ ID NO: 840763 - DNA, 98 bp, Homo sapiens
caacagaagctatgcttggcagcagaaggatttggcaacagactttgtttcttggagtccacttccaattccaagaagggtgatgatctggaggaggg

SEQ ID NO: 840764 - DNA, 50 bp, Homo sapiens
ttaggtcccctcaatggggacacagaaagacgagaatccaggacttgaat

SEQ ID NO: 840765 - DNA, 99 bp, Homo sapiens
aaagttgtgttggatcattttgaaaaacagtattccaaagaactcggagatgcctggaatacagtaagagattccttattagcaagtttgctggatgga

SEQ ID NO: 840766 - DNA, 99 bp, Homo sapiens
agaaggagggcagcctgcgggattggtatgacttcgtgtggaaccgcacgcgtggcatacggaaggctcaggcaaagcaacgagctggcagagctggga

SEQ ID NO: 840767 - DNA, 98 bp, Homo sapiens
gcccctggtaactgacaaggaggccaggaagaaggttctcaaacaaggacatcctggagtggaagaccgcacgcaccttcctgtattggcgtctgcgc

SEQ ID NO: 840768 - DNA, 121 bp, Homo sapiens
aagctccagtgtcccacttgcatcaagctgggcatccagggctcgtacttctgctcgcagctaaaagatggcggcaaggcagcccaggcaaatgtaagaataggcgatgtggttctcagca

SEQ ID NO: 840769 - DNA, 100 bp, Homo sapiens
tgaaagggaacagagtaaagaaaaccaaaccagcagctcattttctacccaagccattggaaggaacatcatttacagcgagcaatttcagcacagcaag

SEQ ID NO: 840770 - DNA, 101 bp, Homo sapiens
aaatagactgcccttgcaacaacatgaaacagcatctcagacttctttcccagatgtttataatgagggcacacagcacgagattatccttggacgctcaa

SEQ ID NO: 840771 - DNA, 98 bp, Homo sapiens
tcgtccttgggcccagccacacaggtggttcctgtccagccccctcacctcatatctcagccatacagaaactggtggtgacaaaagagaaagagaag

SEQ ID NO: 840772 - DNA, 98 bp, Homo sapiens
ggggttggtgtgattagcttcgcagtctggaaagctttaggagttcacagtgttgttagcgacatgagtacagggtctggatcttacccattcaagag

SEQ ID NO: 840773 - DNA, 99 bp, Homo sapiens
aacaaggcagatctggagtcacagcgccaggaatgctgaaatacttttaaagctgataaacctagggaaactgcctcctgatgccaagccccctgtcaa

SEQ ID NO: 840774 - DNA, 98 bp, Homo sapiens
ttcagaaagcctccggaatctaaaaagccctcagtaccagagacagaagcagatggattcgtccttttaggaagtggcagtgaagctagaatctcaga

SEQ ID NO: 840775 - DNA, 99 bp, Homo sapiens
gaaactaaaaggacagtagaaaaggcttttccagtttgcataatgcacaccctctggaagcgggtccaaggtgctgtcacccctctgctggcgagcatg

SEQ ID NO: 840776 - DNA, 100 bp, Homo sapiens
cgacatcttttccaagttttctgcctacatcaaaaataccaagcagcagaacaatgctggaatgaggggagaatcatacttcatcggaatgaggagccca

SEQ ID NO: 840777 - DNA, 100 bp, Homo sapiens
ctgatgaggacaagctgaacaatgctaagtgactattatatggttaaaaagattttggaggaaaacagttcaggtgacttgaacataaattgcgtagatg

SEQ ID NO: 840778 - DNA, 98 bp, Homo sapiens
aaaagtatcgtcgagaagcctatcatcggaagcatcggagagcaagagacaggtccagatcctcctcctcttcctcccagtcatctcactcctacaaa

SEQ ID NO: 840779 - DNA, 98 bp, Homo sapiens
ggctggttgcgggccggcggcgggctggcggagatggagcgcgttccttcacctcgggcagaataactttgcagaagcccacaggttcttcacagaga

SEQ ID NO: 840780 - DNA, 98 bp, Homo sapiens
acagccggcatctttgctacctacccctctggacacttggatatgatcaatggcttctttgaccaggagaacgtatttaccgggcagtcaaagatcta

SEQ ID NO: 840781 - DNA, 122 bp, Homo sapiens
cgaggcctctataaacaaggacaacattggctagagaaaaaagatgttgtggggagagccaggggtaaggttcgtgatcctcgggccaattttgatcagtccctacgtgtactgaaacatgc

SEQ ID NO: 840782 - DNA, 98 bp, Homo sapiens
cgagatccagttcctgcgaactgttggagtccccaacccggtctctagtgatggaggccccaaaaggagtggaaatcaatgcagaagctggcaatatg

SEQ ID NO: 840783 - DNA, 100 bp, Homo sapiens
attcccgtgattgcgttacaagctttgtctccttcgacttggagtctttgtccaggacggtcaccaggcagcagggattggaaaccaggcaacaggaatt

SEQ ID NO: 840784 - DNA, 130 bp, Homo sapiens
gttatggatattctggtggggagatgaacccaacctagtgggtgtaatacatcatgaactgcagggaactcaccttcgaggcttggaaaccacagccacgtatgaccctgaaacccaggagttcattctc

SEQ ID NO: 840785 - DNA, 100 bp, Homo sapiens
gatcacctgtctagagcaaggaaaagagccctggaatatgaagagacatgcgatggtagatcaacccccaggggatcatcgtcttgctcttcttttatct

SEQ ID NO: 840786 - DNA, 100 bp, Homo sapiens
aaagatacattgaactcttcaggagcacagcagctgaagttcagcagctcctcagtgggtagtgcacttccacgaagacgctgctgtgcatatattacca

SEQ ID NO: 840787 - DNA, 100 bp, Homo sapiens
cgtcagcactcagcgcgggccggagaactacgatgacccgcacaaaacccctgcctccccagttgtccacatcaggggcctgattgacggtgtggtggaa

SEQ ID NO: 840788 - DNA, 98 bp, Homo sapiens
tcacatatggctctgatagaactgaggcactgaagagaatggcagatgcactggataactatgttattcgaggtggaataacactcccatggatgaag

SEQ ID NO: 840789 - DNA, 100 bp, Homo sapiens
agcgggtgggcgacctcttccagaagctgtttggtaactctcattcgacatccatctgaactaatgaatgttcctcttcagcaacaaaacaaatgtacag

SEQ ID NO: 840790 - DNA, 100 bp, Homo sapiens
agtccttggataattatcattattgtgtttctgggacgttacaaatttaccattctcttctgcacaatttacctttgtagtaagaaggcagtgctttcca

SEQ ID NO: 840791 - DNA, 99 bp, Homo sapiens
tctcaagatgctgcttactggtgggaaatcaagtcgtaaaaacaggtcaagtgataacaacgaacttgatgcaagtgataggtttgccaaggtcagacc

SEQ ID NO: 840792 - DNA, 98 bp, Homo sapiens
gcactgtatttccttggagagtgcaataatccaccagtggtaaaaacagagatggtaacaatttctgatgcctcacaaaggacagaaatctccaccaa

SEQ ID NO: 840793 - DNA, 60 bp, Homo sapiens
ccaagaaattactgtctcaagtgatacggttttcctcctccaccaggcgctccacctcca

SEQ ID NO: 840794 - DNA, 100 bp, Homo sapiens
tttggatgtagaaagtgtgaggaaaaggccatatgattctgataacctacagcatgaagagctactcatgaaggctttgagttacacaggtagccacatg

SEQ ID NO: 840795 - DNA, 98 bp, Homo sapiens
taatacagaactgccccatcgatgtgcggcgtccgctgtataaggaccaactgttgccaatcctgagctgttccgcaagttcggacgagggccagagc

SEQ ID NO: 840796 - DNA, 100 bp, Homo sapiens
gtcataccagtcaactagtaactgatattcagccagttcttgaagcaaggggatgtcccactcttgttcaagcattgccaggccctagcacacaagtcac

SEQ ID NO: 840797 - DNA, 100 bp, Homo sapiens
tgcttgcaggtgttattctaggaggagcatacttgtacaaatattttgcacttcaaccgggcccctcagatgagagctgcacccaggccagcaccagtcg

SEQ ID NO: 840798 - DNA, 100 bp, Homo sapiens
gaatcccccacttccagagatccccaacggtgaatggctctgtccccgttgtacggcatcaagcatgatggaaccatgtgtgatacctgccgccagcaac

SEQ ID NO: 840799 - DNA, 100 bp, Homo sapiens
gccaccggcagcagcagcaccaccggacgatggctctgagagattcctctgcgaatctgtttttagctatcaagtggcatccacgcttaaacaggtgaaa

SEQ ID NO: 840800 - DNA, 98 bp, Homo sapiens
tgaagttacatttagagactgaaatcactgcaccttaaaaacaaaagattgagctgcactgtattcctagcctggagaaagttcttgtggaattcagt

SEQ ID NO: 840801 - DNA, 98 bp, Homo sapiens
gcaggttgtcagtttcctgcttatgaagataatccagtttcttcgggacagctggaagaggttgatccaaaagactacatgttcagtggactgaagga

SEQ ID NO: 840802 - DNA, 100 bp, Homo sapiens
aaagagggcatcgagaaagctcgccatgaagtcttactcatctctgccgagcaggacacccagattcagctggacgatgcagtccgtgccaacgacgacc

SEQ ID NO: 840803 - DNA, 100 bp, Homo sapiens
atgaagttgaggttcaggaaggattcctgagattccaggaggaagtactggcgaagtgctccatgaatggagatgaggcgcctggtgtttggatgatccc

SEQ ID NO: 840804 - DNA, 98 bp, Homo sapiens
cagcgagggaacgaggtgtcagctctgccggccaccctagactgtggcgacatgtctaagaatgtgagccagtcacagatggcaaaattgaaccaaca

SEQ ID NO: 840805 - DNA, 98 bp, Homo sapiens
ctacttggcaactttcctggcccttttgaagaggaaatgaagggtattgccgctgttactgatatacctttagctgataggaagatgtcttcaggaaa

SEQ ID NO: 840806 - DNA, 127 bp, Homo sapiens
gcagcacgggatcccagcctcaggcctgcacggacggtgttggttgggaaaaatccagttacactcttaaaggaattgtcagtgataaagtctcgatatcaaactttgtatgcccgctttaaaccag

SEQ ID NO: 840807 - DNA, 98 bp, Homo sapiens
ttctatgctgcagaggtcacatcggccctcatgttcctccaccagcatggagtcatctacaggatctcaaagatttcatgagacaagctggggaagta

SEQ ID NO: 840808 - DNA, 100 bp, Homo sapiens
ccagacagagattctggagacattggctggtaacagatatcaagcctggcttgccggtgggctctgtcccggcccccgcctgccctccgtccctccagca

SEQ ID NO: 840809 - DNA, 98 bp, Homo sapiens
agcttccaatgagtatggcagtgtcagctgtacagccacactaactgtgacagtttgtgaagaaatatgggaacctttttagcttggagcttggtgac

SEQ ID NO: 840810 - DNA, 100 bp, Homo sapiens
ttgcggaaaggatgttggcggtccctgtgacctgtggagacacggccagatctgccctccactgtgatgcagatccatccgccctagcaaaatatgttct

SEQ ID NO: 840811 - DNA, 100 bp, Homo sapiens
tgacacagaagctatttgaatgtgatagagaccagatgtactacaatctgctaaaactgtataatctcctccctggttcgaagggctgccctcacacaca

SEQ ID NO: 840812 - DNA, 100 bp, Homo sapiens
gacagacagtgtgagattcatggccacgcagtgctttgcaacgctaattagactcatgccacttgaggcagcacacttctgcttttgttccttcatcagg

SEQ ID NO: 840813 - DNA, 100 bp, Homo sapiens
ctcctatagacctacaggctgaagctcagcatgctagtggagaagttgaagaaccgcaagacactaagggcgactaccagaaagcgctgctgtacctgtg

SEQ ID NO: 840814 - DNA, 100 bp, Homo sapiens
cgatatgctagcatcaatgcacatcttggtattgagcagaggagagaacattgaaagtattctctaagctatttgaagagagtgactaaatgcacctggg

SEQ ID NO: 840815 - DNA, 100 bp, Homo sapiens
gaagttccttgaaagaaatagaaccaaatctgtttgctgatgaagattcacctgtgcatggctgcatatctggttggtgtctctgaccccaatagccaag

SEQ ID NO: 840816 - DNA, 100 bp, Homo sapiens
ggaccatgaggaagagacggctggaccagtgtcagcagtacgtggtctttgagaggagtgccaagcagacacattccttaacccagcgcagggctgtcca

SEQ ID NO: 840817 - DNA, 100 bp, Homo sapiens
ggaccagagatggacggtcactcagcctatggagagccctaatttgtttagaactgtaatatgcacagttaaaacaacttgtcctctcaggaccttttgc

SEQ ID NO: 840818 - DNA, 99 bp, Homo sapiens
tttctggtcactccccaggattatgcgcgccaatgaatttccctgtttgccaaagcaagtggcttggatcctggccacaagcaaggttttcatgtatcc

SEQ ID NO: 840819 - DNA, 99 bp, Homo sapiens
ggaaatgtccaccactgtttctcatcatcaccaaacggaattttggagagtaaaaggctgaaccttgttaaagagaaaaccattaatcagaccatcggc

SEQ ID NO: 840820 - DNA, 99 bp, Homo sapiens
ttctcatcctgtttatgtccgacgtgcagctcagccatggcaatgacaggctcaacaccttgctcatccatgagtaaccacacaaaggaaagggtgaca

SEQ ID NO: 840821 - DNA, 135 bp, Homo sapiens
gtttccgtagcctcattcccagttacatccgtgattctgctgcagctgtagtagtttacgatatcacaacctgactggctcatggagaaagcctacctaagaatgaagccgggacccggcagaatggctcctgtg

SEQ ID NO: 840822 - DNA, 130 bp, Homo sapiens
cttccccaacctcctggtggcctgtgatgtctgcctgtgtccctacacctcccatggtcactgcggaacagcatatgccatatatgagctggctgtggcttcatttcccaagaagcaggagtgacttcag

SEQ ID NO: 840823 - DNA, 98 bp, Homo sapiens
atgctgggggctcagatcaccgtagacaactggacactcaggaccacgccatggaggagctgcaggatgaagaagatgatgatgactatgttgaagaa

SEQ ID NO: 840824 - DNA, 98 bp, Homo sapiens
gacctgagctgtcagatcaccattcccaaaggacttcttaattactcaaatgactggaaaagagctctttgagatgtggaagataataaatcccatgg

SEQ ID NO: 840825 - DNA, 100 bp, Homo sapiens
gcccattaacaagcagctcttccggaagatcaactgcagactgtcctattgcatctcaagccctattgacctgttgtattggcgggacatcaagcagacg

SEQ ID NO: 840826 - DNA, 100 bp, Homo sapiens
aatgataattcatgacagaagggagtttgctaaatttgaaaaggagaaaatgaatgccaaatgggacacggttgttcagaatgaagaaaatgaaaactgt

SEQ ID NO: 840827 - DNA, 100 bp, Homo sapiens
gttttctgaagcttcagcaagatcaacaggaaatggaactaagaagactggatgatgaaattgggagaaaggctcgaaaagagattctaaagattcacac

SEQ ID NO: 840828 - DNA, 100 bp, Homo sapiens
ctggcagcaccgacgaacccccaatgctgaccaaggaggagcctgttccagaactgctggaagctgaggcgttggagaccagggccagccctggccacac

SEQ ID NO: 840829 - DNA, 98 bp, Homo sapiens
acggaccagcgacccaagcgccgcggttaaccacgtctcgtccacgacctccctaggtttcaggctctgtataactatactcccaggaatgaagatga

SEQ ID NO: 840830 - DNA, 100 bp, Homo sapiens
gccgagtggtctaaggcgccagactcaaggtgctggagaatctggtaaaagcaccattgtgaagcagatgaggatcctgcatgttaatgggtttaatgga

SEQ ID NO: 840831 - DNA, 100 bp, Homo sapiens
gcagctcacccaccaggcgttcagccacagcagccaccatatacaggagctcagactcaagcaggtcagattgaagggatgatcatggtgattttactgc

SEQ ID NO: 840832 - DNA, 99 bp, Homo sapiens
tgtgcctcttgaatgtggactcgaggagccgggagcacggtctgaatctgcacagagcaagatgctgagtggagtcgggggctttgtgctgggcctgct

SEQ ID NO: 840833 - DNA, 98 bp, Homo sapiens
tgcctcaagatgactcaagtggattttgaatgtggaaatgacgtggaactgtcttttaccaagaatggaaagtggatgggcattgctttccgaatcca

SEQ ID NO: 840834 - DNA, 100 bp, Homo sapiens
cctcaaagggaaacacctcagctttttctaagaagagatgtgagacttcccttggaagttgaaaaacagcccagcagagctccccctgacagaccgcgag

SEQ ID NO: 840835 - DNA, 98 bp, Homo sapiens
agcatccaggcctcattggacagcattcgaggctgctctttggcgtaaattgcaatcgattagggatcgtttctcagaatcaagttagaagtgagagt

SEQ ID NO: 840836 - DNA, 100 bp, Homo sapiens
ctatgacagcacaagaaatgtgtataggataatcagtttagatggctcaaagagatgtgctccggcatctattcgcctcatggacaacaagcagtttcag

SEQ ID NO: 840837 - DNA, 99 bp, Homo sapiens
ttacgacaaggaggttcagtggacccttggagccatcctctacaggacccgctttctaccattaagattttaacagcttctctgtggatgatgagtgct

SEQ ID NO: 840838 - DNA, 100 bp, Homo sapiens
ggaggcagaggtggaggcgctttgaaagggacaccatgtggcggatctttactggatcgctgctggtagaggagaagtcaagtgcccttctgcatgacct

SEQ ID NO: 840839 - DNA, 98 bp, Homo sapiens
aaactggatatggccaggatgctatagcattgtcagtcactattcctgatcagagaactccagttgcttcaacacacagtatcagtagtgcagccacc

SEQ ID NO: 840840 - DNA, 100 bp, Homo sapiens
cagagtacgatactcaggtcaaaggaattcctcctatgagtggaacaggaacgctgcagatctatttacttgatattaatgacaatgcccctcaagtgtt

SEQ ID NO: 840841 - DNA, 100 bp, Homo sapiens
ccaactcctctggaccctcgcggccgtgggcagcggctgccgcgcctgtctgcccgagggagatatggagattaatcaccaacttcttattttttgggcc

SEQ ID NO: 840842 - DNA, 100 bp, Homo sapiens
gacagcatcaagaattattacagggttgagaatgcttgcaccaagcttgtccaggcagctcagatgcttcagtcagacccttactcagtgcctgctcgag

SEQ ID NO: 840843 - DNA, 100 bp, Homo sapiens
cccttcacctgtgaagatgccctctccaccatgggaatccagtgaaagatatgatcctgagcccaaatcaaaatgggatgaggagtgggataaaaacaag

SEQ ID NO: 840844 - DNA, 98 bp, Homo sapiens
ttgtacaggctctttgaatatgactctgcaaagattgttagaaacggatagtaagtctttaagatctgtaaatgggtcaagaagaaacagtggctctt

SEQ ID NO: 840845 - DNA, 99 bp, Homo sapiens
acatgagcattcagtttcttggtacagtggccgaaatagaactatttgtgaacagacttgattcagtggaatcagttcttccttatgaatacacagcgt

SEQ ID NO: 840846 - DNA, 100 bp, Homo sapiens
gccagtgcatcttttgcacagctgtttttgagttccagttgactgcagaggacatgaaagccatagatggcctagacagaaatctccactattttaacag

SEQ ID NO: 840847 - DNA, 99 bp, Homo sapiens
gaggctcggcggcgggcggcagcatgtcggtggcggggctgaagaagcagttctacaaggcgagccagtgagaaacctggttcccaccatctgcgactt

SEQ ID NO: 840848 - DNA, 99 bp, Homo sapiens
caccctgtagaagatggaatcatggatgctgccaattttacttcctgggaatgaaaatggttggtgagctgctacgaatgtcgggtgcctttttcatgc

SEQ ID NO: 840849 - DNA, 100 bp, Homo sapiens
actgggtctgccaaaaatgtggatttgtggtctgcttagattgttacaaggcaaaggaaaggaagagttctagagcttggagttatgacctacagtgata

SEQ ID NO: 840850 - DNA, 99 bp, Homo sapiens
ttgtccaggcgggcctcccgtttctggctccgggctgagcttcctggagaagaggaaggagcttctaagtaggacatccttagaaactcagaagttgga

SEQ ID NO: 840851 - DNA, 98 bp, Homo sapiens
aaagaaaccatgtgctgaaatgtttgacgacactgatggtttggcctatatgaacccaatagcaatggcgagatcaaggggtccaatccagtcttcag

SEQ ID NO: 840852 - DNA, 100 bp, Homo sapiens
ccaaccataagaaatcagaaaagcaagataaagttcagcacacagtatgtatggattgcagtagctacagtacatactgtcccattgttaggcatgcggc

SEQ ID NO: 840853 - DNA, 100 bp, Homo sapiens
aatatgtccctgggggtgaaatgttttcacatctaagaagaattggaaggttcaggttttacaactgcctacagcatgctttggaaagggaaacgatgac

SEQ ID NO: 840854 - DNA, 100 bp, Homo sapiens
caatcatctactattcatgatgttaagcaaaagtttcacaaagcatctgagtcatccaatggtggctattcctgaacatgaagctcttgattccaaagag

SEQ ID NO: 840855 - DNA, 99 bp, Homo sapiens
ttggcatttggctttgcctttctggacacagaagtatttgtgacagcacttttccagccattaactccaggctctcgagaatttgaagatgttgtaaat

SEQ ID NO: 840856 - DNA, 99 bp, Homo sapiens
gagctggatctcgtctttctaacaaaaagagcctggtagcctttaagatcatgcccctggaggatatgaatgagttcaccacacatattctggaagtga

SEQ ID NO: 840857 - DNA, 100 bp, Homo sapiens
taagactcgaaggcagcacaggacctggaaaaattacatatttctcactatgtgcaatagacactttggcagtgttgtggcacaaaccattcggactcaa

SEQ ID NO: 840858 - DNA, 100 bp, Homo sapiens
gtcagatgacaagaaaccattcaagtgtttcactcctaaaggttcatctctcaagttgctttgcggagtcaggccagtgctcatgccggcctcacatgat

SEQ ID NO: 840859 - DNA, 98 bp, Homo sapiens
tgtagcactacagaaaccctggttcttgggctccactgagccccaggtcagattgtcaagcatggagatatcaagtgtgtactaaatgaaggcatgcc

SEQ ID NO: 840860 - DNA, 100 bp, Homo sapiens
gactattgtggaagaagcatccattaagatttcctggcacatcatggaaccgactgctggacttaccattattctgaaaaacccatgaactggcaaaggg

SEQ ID NO: 840861 - DNA, 100 bp, Homo sapiens
tgaagatttgcataaagccaacattcgcaccgtcatggtcacagatatgtcttgtcgttcaagacttgcaacactaaacgagaaattgacagcccttgaa

SEQ ID NO: 840862 - DNA, 100 bp, Homo sapiens
tctgcattgccattgttctgagcccatgactgaagagttgctgaaacaacaaaagctgaattcacatgagaccactataactcagcagtctgtatctgat

SEQ ID NO: 840863 - DNA, 98 bp, Homo sapiens
tgaccgaggagctccttttcgagcttttccaccaggtgctggagaatctggtaaaagcaccattgtgaagcagatgaggatcctgcatgttaatgggt

SEQ ID NO: 840864 - DNA, 51 bp, Homo sapiens
tgccatcatcgtggtagttattgtaagtgtgtattatgatgaaagctgcaa

SEQ ID NO: 840865 - DNA, 98 bp, Homo sapiens
gagataaggcgcttcaggactaccgcaagaagttgcttgaacacaaggagatcgacggccgtcttaaggagtcgtctgaccaaacacaccaagttcgt

SEQ ID NO: 840866 - DNA, 99 bp, Homo sapiens
aaccctcctaaggctcgaacttacactgaaactgtcaaccatcactacttgctctttcaagacacagatttgggtccctgatgggcctgggtgacatta

SEQ ID NO: 840867 - DNA, 100 bp, Homo sapiens
aagagaagaagaaaacaatttcaaatacttttaaaccgtcttctcctggtaaaaaggttttaaaatcaaagatgggaaaatcggagaaaattgcccttcc

SEQ ID NO: 840868 - DNA, 100 bp, Homo sapiens
gagatgagaatgcagaaatggatgctcgaaccatcttactgaagtgccatgtttcagaacagagtaagacccctggtaaagaagaactgaagatattata

SEQ ID NO: 840869 - DNA, 100 bp, Homo sapiens
agaacaaactcgtagggactccaaaccccagtactcctctgcccaacactgtacctcagttcattgccagagagccatcatgttggcagataaattgaac

SEQ ID NO: 840870 - DNA, 100 bp, Homo sapiens
tccttcatcaaccgcccgaaccagagccggaggcgggaggacgggctgccgcagaacattctagtatgccagtagaaaaaaatatcactttagaaaggcc

SEQ ID NO: 840871 - DNA, 100 bp, Homo sapiens
caattctgaaagctccggtattattctttgatagaaatccaataggacttgacccaatgaaagaagcatatggcacttgtgaagataaatgttactcctc

SEQ ID NO: 840872 - DNA, 100 bp, Homo sapiens
ctaccaagccggaggactgtgctgtgcctctctcgcccacattttccccaagcactctcaggaacctggcaacagcgccccgggatgccgtctggagccc

SEQ ID NO: 840873 - DNA, 100 bp, Homo sapiens
aatttttttcttgtttttgtgtgtctaccttggcatatactaaaggaagttcattatgctgacatatcttttcatgttggcctggctgggagtcacggct

SEQ ID NO: 840874 - DNA, 100 bp, Homo sapiens
ttctccgttgtgttcatctttttccagtgccatcaaccacctcaaagacactggttgaagaaatgcagagtaacgtggaagtggtccacacctaccgcca

SEQ ID NO: 840875 - DNA, 100 bp, Homo sapiens
aaagcctcttacagcctggggagtgcgagagaaacccagccgaagcatttaaaaggacttcattgacttaactagagagaccagaccaaggacaaaagat

SEQ ID NO: 840876 - DNA, 100 bp, Homo sapiens
cagaaaccgctgcctgtgagccgctgggctcagatccacctggtgaaggactcagtggtctttgaggatgtggctgtgaacttcacccaggaggagtggg

SEQ ID NO: 840877 - DNA, 100 bp, Homo sapiens
tgctctacagtgctcagtctttgaggtgctgactgggttacttttttaaacactaggaatggtaatttctactcttctggacttcaaactaagaagttaa

SEQ ID NO: 840878 - DNA, 100 bp, Homo sapiens
cgagagcccctgcctcccgctcctgcagagcgcatcagcgaggaggtggggctgctgcagctccttggggaccccccgccccagcaggtcacccagacgg

SEQ ID NO: 840879 - DNA, 99 bp, Homo sapiens
cctggtcctgcattacggtctctataagaagatgatcgacacattggcgtgagacctgggagtacgttgtgccaaatcattgccacttgccacatgagt

SEQ ID NO: 840880 - DNA, 98 bp, Homo sapiens
acggtagcgcagccgctctgaggacttgtcttacaaggaccggcactggcatgaagcctgtttccactgctcgcagtgcagaaactcactggtggaca

SEQ ID NO: 840881 - DNA, 100 bp, Homo sapiens
tatttatttttcagctcctcttttgacttggactatgactttcaacgggactattatgataggtagctcgtaagctggtcatcctggagggtgagctgga

SEQ ID NO: 840882 - DNA, 98 bp, Homo sapiens
ccataatatatgggcaaagaaaaagaaaatggagttggagtccaaagctttctctcctttgaaaacactaagaataatgtcactgcatcagtttttac

SEQ ID NO: 840883 - DNA, 100 bp, Homo sapiens
ctggaagagagggccttctcccgcttctctcctcctcctctccacgctggggggatcctggatatgaggccccaggattcctggcgaggtcctcctcccc

SEQ ID NO: 840884 - DNA, 51 bp, Homo sapiens
acttagctcagcaattcttaccttgtatccagctcacatagaagacattga

SEQ ID NO: 840885 - DNA, 100 bp, Homo sapiens
tcctccactgccactacagggaagtgcatcacatgtcagctctctatcaatatcagctcacatcattgaaaagataattttgaagacatgttttgctgaa

SEQ ID NO: 840886 - DNA, 99 bp, Homo sapiens
gattatccactggattataatactggagaggataaatcctcaaaaaatcttcttggttctgctacaaatttgccacttgacactgacctggaaaatgaa

SEQ ID NO: 840887 - DNA, 51 bp, Homo sapiens
tgtttgcaggttgtcagagaagtacaggtttacaaagatgagcaggtggtg

SEQ ID NO: 840888 - DNA, 100 bp, Homo sapiens
ctggtcatcttctatttccaaacatcctggtggggaagaagttttaagggaacaagctggaggtgacgctactgagaactttgaggatgtcgggcactct

SEQ ID NO: 840889 - DNA, 98 bp, Homo sapiens
ccccaatcttgtgtgggcactgaagggggactacaggttcgagaagagaggctgctcacccaacagacgtctccatctccaaaacagccttgtactcc

SEQ ID NO: 840890 - DNA, 99 bp, Homo sapiens
gttcccatggaaaccctctcgtcagaggagagctgcgatagttttgactcactagagtcagggaaacagtgctacacacgcagggccctgtcgatggca

SEQ ID NO: 840891 - DNA, 100 bp, Homo sapiens
tatttaattatgaggagagaactcagcgacactacctgggccatacagactgtgtgaaatgactggtgtcgttcagtatttctacattgaagactggcaa

SEQ ID NO: 840892 - DNA, 100 bp, Homo sapiens
caaacttgggccaaaggacagttagaagacagtagatgcgctggtagctatggagaaggccatgaagagagacaagattatagtcaatgatcggcagttg

SEQ ID NO: 840893 - DNA, 98 bp, Homo sapiens
acgtccgccatacctggaagagcaattgctttgcagttcctgaccccttaatgcctgacccttccaagcaaccaaagaaccagcttaatcctattggt

SEQ ID NO: 840894 - DNA, 100 bp, Homo sapiens
tcatgacccacaaacttaaacatactgagaatactttcagggagactgcattgcttattgatccaaaaaattcctgttcttcatcccgccagtgggttgc

SEQ ID NO: 840895 - DNA, 100 bp, Homo sapiens
caaccccaatgccaggctgcgcagtgaagaaaatgagagtagcaaagagctcctgttacaacctgtgaccatcagcaggaatgagaaggaaaaggttctg

SEQ ID NO: 840896 - DNA, 100 bp, Homo sapiens
caggcagagggtgatagaagaggccaagactgcgttcctgctcaacatccaggttcatcctaagttccactataaacaggctcatgactcgggcacagac

SEQ ID NO: 840897 - DNA, 100 bp, Homo sapiens
caaggcactcagctcaaatacacacacctgttgccattatagagctggaattaggcaaatatggacaggatttcagatgcatgccaggtttccactgatt

SEQ ID NO: 840898 - DNA, 100 bp, Homo sapiens
gttttgtggccaaaccaccaccaaaaacctcacactgtgatggtgactgtgaagatcacgctaaccttctgtgcagccttcttcttggatatggattaga

SEQ ID NO: 840899 - DNA, 98 bp, Homo sapiens
tcggacacagaggacagcggcagcgacgagaacctggatcagggacattagtcatgagtgccgagtgtgcggggtcacagaagtgggtctttctgcat

SEQ ID NO: 840900 - DNA, 98 bp, Homo sapiens
agcaaacagtcttccgcaggaaggagatgtggttgattcttcaccacactgaaaccattaggaaaaatccttgtggttaacagcagaggcttcagagt

SEQ ID NO: 840901 - DNA, 100 bp, Homo sapiens
gctgggaatccggaatgctgcccgatggccctgggtcctcgctgtggggcaatccgggcttgcagacgaggaagctcttcgtgggcggtcttgactggag

SEQ ID NO: 840902 - DNA, 98 bp, Homo sapiens
agcagagaaaacagcaagcaacagccatcatgaaggaagtccatggaaatgatgctgaaattttcttctaaggagaaatatcccttatttacttttgt

SEQ ID NO: 840903 - DNA, 98 bp, Homo sapiens
ctgggaaacatggcgaccgagggaatgatccttactaaccacgaccatcaaatccgtgtcggagtccttacagccaagaaggatcaagaaggtggaga

SEQ ID NO: 840904 - DNA, 100 bp, Homo sapiens
aggaaaagaaataacctgtcgaagttatctgatgacaaattacgaaagtgctcccccatccccacagtataaaaaggatactcactgttaccattctggc

SEQ ID NO: 840905 - DNA, 100 bp, Homo sapiens
agctcatgaagatttggcctactcttcttatgtccaccagtatagctctgggaaatttgacaatgcactgtgcatggaggactgcaacagaggagtgggg

SEQ ID NO: 840906 - DNA, 100 bp, Homo sapiens
ctttttacaccaggacaattcacaaatgaagctttatgtaaggctttacaggcaaatgaagatgtgacacagattgtggagattctccattctggaccta

SEQ ID NO: 840907 - DNA, 100 bp, Homo sapiens
caagaaaaaagacatgtccattctataagaaaatacctggatgctgaaaacgccattcaacagatgggtggccagtggcttggtggaagacaaatcagaa

SEQ ID NO: 840908 - DNA, 98 bp, Homo sapiens
attaactttgagaaatatgatgatataccagtagaggcaaccggcagtaactgtcctccacatattgagaatgttggatgcatcataatatggatcta

SEQ ID NO: 840909 - DNA, 98 bp, Homo sapiens
agtagcgaggaatctgattccaagcaaaaaccagcggctctaattagaggaaatcgtaaaaactgtgctcaattttctggctccctcgactggttgat

SEQ ID NO: 840910 - DNA, 98 bp, Homo sapiens
agaatccaccgtcaggcataaattgattattcctcgcccacatctgtgccagatttttgatgaaattgagtcatgaaactgtaaccattgaattgaag

SEQ ID NO: 840911 - DNA, 101 bp, Homo sapiens
taacattccaacacataaaaattatttatccaacagctcctcccagatgggtgcatgtttttcaaaagtttttaatgggtgtcccttgaaaattcactgtg

SEQ ID NO: 840912 - DNA, 100 bp, Homo sapiens
ttctatacttggaccgtttttccccaaagagagttgtgccttttactggggatttacttcttggattgcctactacattaatcatccactatatacacca

SEQ ID NO: 840913 - DNA, 100 bp, Homo sapiens
agatctgcagagctcccagggcggacagcagcctcgggtgcaatcctggagccccccagtgagggtggtagctgagcacccagatgcttcaggtgaggag

SEQ ID NO: 840914 - DNA, 100 bp, Homo sapiens
gcggctgcgggaagacgtcgctgctgatggtcttcgccgatggggccttccccgagattttgctggaggagcttgccaacagcgatcccaagttagccct

SEQ ID NO: 840915 - DNA, 100 bp, Homo sapiens
gtaagaagaggtcccaatcccccactctttccgccctaatggaggtctccagtttcgggaatgaaagctactggttgattttaaagtgcctgggcctcac

SEQ ID NO: 840916 - DNA, 100 bp, Homo sapiens
ggagggacccacagggctgaaggaagctgccttgtacccacatctcccgccagatgcagaaactgaggcccgggaccacacacctgacaccaagtggact

SEQ ID NO: 840917 - DNA, 100 bp, Homo sapiens
tccagaccagcaggaggacaatgttgatgaacagtaccaggaagaggcagaagaggaggagtcagagtcagaagcaaaggtagatggagagactgcatcg

SEQ ID NO: 840918 - DNA, 100 bp, Homo sapiens
acgctgggaacactgaatcaacatgggcaatgagaacagcacctcggacaaccagcaattctgtggtgttcttggtcacacatttatggagtttctgaag

SEQ ID NO: 840919 - DNA, 100 bp, Homo sapiens
tgatgaagaagatccttcaaaattaaaagaggagcagcatggcatttcagtcactggtttgcagagtccaggtattgcacatctattacaaatttcctgg

SEQ ID NO: 840920 - DNA, 99 bp, Homo sapiens
tgagcgcctcgcctggatgtgagtttcagccaggtgttttgtccagtctgagtcctgtgaattcttccaaccatggaccagtgtctactggctctctaa

SEQ ID NO: 840921 - DNA, 100 bp, Homo sapiens
gtcttcttttagtacttcccatgtgccagaggaacttaagcagccgttacacagaaagtccaaatcgcagctgactataaagaaagcttcaacactatca

SEQ ID NO: 840922 - DNA, 100 bp, Homo sapiens
cccctcacctcgatgcagccagtagcttggatccttgtgggcatgatccataatcggtttcaagaaatttgggattcaactgaaagaaattgacaaagaa

SEQ ID NO: 840923 - DNA, 95 bp, Homo sapiens
gctaaatttctcaacaccacagtcagctaaggaaaatatgttgtgttcttcttttaccctcttgacttcacctttgtgtgccccacggagatcat

SEQ ID NO: 840924 - DNA, 100 bp, Homo sapiens
tcttatatgccatctccaagctggggccagggaagccagtcttaatatgatggaaacatctctgaacttctaaaagaccaaggttggcgttttagctcta

SEQ ID NO: 840925 - DNA, 98 bp, Homo sapiens
tagcagcaatttgggcaactttaattatggtctgccatgtgaatctggaggggcagccgttctactccaagaaggacagacccctgtgcaagaagcac

SEQ ID NO: 840926 - DNA, 98 bp, Homo sapiens
cggccccaggggtgccctgggctccgcgacggaacctgtggatgtgcctacgtttctgaaggctgctctggagaataaactgccagtagtagaaaaat

SEQ ID NO: 840927 - DNA, 100 bp, Homo sapiens
aatttaaccaagaaaaattaccgagccagccagcaggaaatacagcatattcacggcccttccacagtaccttccacaataccagtgctaatctgactga

SEQ ID NO: 840928 - DNA, 98 bp, Homo sapiens
aagaaaagcctctgggagcagaagggaggctccaagacctcatcaacaattaagtctctgctggatgaaccgaatcctaacagtccagccaatagcca

SEQ ID NO: 840929 - DNA, 98 bp, Homo sapiens
caagtttgtccacgaagacagcagccacatcatctccttctgtgatacagccccaagagcccctcgctacagtccgagaccgtccactacaagagagg

SEQ ID NO: 840930 - DNA, 98 bp, Homo sapiens
agcagatctggatcatcaaagacagaaccaacaccgagcagtagatcaagtaattaaagctgtaagaaaaatctgtagtgctttagatggtgtcgaga

SEQ ID NO: 840931 - DNA, 100 bp, Homo sapiens
ctgggatacttgctgcaaatgctcgtgctacctgccctggccctgctcagcgccagcggcactggctccgccgcccaagtcattgaagtcaacaagagag

SEQ ID NO: 840932 - DNA, 98 bp, Homo sapiens
ggaccccaatggcaaaacctgcagccatgtggaaacaacttctgtgcatctcatcgttatgcagaaactcatggctgtacctatgattacaagagtgc

SEQ ID NO: 840933 - DNA, 50 bp, Homo sapiens
tcctttatatagaagggagataaatggggagcaggagaaccgagtgcaga

SEQ ID NO: 840934 - DNA, 100 bp, Homo sapiens
cagtggaatgcagttatatttggctacaaaagaccccacagctgtagagagagcaaacttgttaaacatggctaaactgagtatcaaaggactcattgaa

SEQ ID NO: 840935 - DNA, 100 bp, Homo sapiens
tgggcagctatgtcatcaacgggcgcaccaaggtgctggagaatctggtaaaagcaccattgtgaagcagatgaggatcctgcatgttaatgggtttaat

SEQ ID NO: 840936 - DNA, 100 bp, Homo sapiens
attgaaaaaggaaccccaaaggagtcgattcttaaaaactctgcttctgttgtttctctgcaggtggatattgttcccagccagggggagatcagcgttg

SEQ ID NO: 840937 - DNA, 99 bp, Homo sapiens
tttatcaaaacatttcattccctataatgcaaagaatcttgcctcctggaatccttcaaatcctgaatgtctcttacttgtggtgaaggaacttgtgca

SEQ ID NO: 840938 - DNA, 98 bp, Homo sapiens
aggaaatgaaaaagttctggaaaggtaacagctatcaggattatttccattcaatacttggacctggaaacatcaaaaaagctgtcgaagaagctgaa

SEQ ID NO: 840939 - DNA, 100 bp, Homo sapiens
atgcaccttacaaacttccatacaagacaatgtgatggtcatgaagtctctgtcagagaggaaagagggagttaatctataatgaagatcaacagtgaag

SEQ ID NO: 840940 - DNA, 98 bp, Homo sapiens
tttctttccccctttaacttagaggaacgaggattatacagaaatttgaagtccagatagtctccaaaaaagtgagctacagccatattcagtccaag

SEQ ID NO: 840941 - DNA, 100 bp, Homo sapiens
tgtatctgaattttgcagctgcagaatgtgtagtaccttaaaaggtcctcagaatggttggaatgaccctccagctttgaacagagtacccaaaaagaag

SEQ ID NO: 840942 - DNA, 99 bp, Homo sapiens
ggggctgtttggaaagacccaggagaagccgcccaaagaactgctgtggtgtgatttccacgctgagaagccgggaggagggcgctgtggacaagagct

SEQ ID NO: 840943 - DNA, 100 bp, Homo sapiens
gtttgaagacttgctagttaggattttattactggcagcatgtatatcttttgtgaccagcaatggcagcatcgggagggacccgccagcggagacccag

SEQ ID NO: 840944 - DNA, 100 bp, Homo sapiens
ctttactgttaaaagaaattcttaaacacactccaaaagagcaccctgatgttcagcttctggaggatgctgaaagaccacagcaagattctttcattcg

SEQ ID NO: 840945 - DNA, 100 bp, Homo sapiens
gccagtgcgtgttccaacatgttgctggatttgtgcgactcggtgaaggatgatgcccggagggtgatctcgacctttaacattccacacacctacctcc

SEQ ID NO: 840946 - DNA, 98 bp, Homo sapiens
ctgcttcccgaggagcattggaaggttttggagattttaggtaagaagtttcctgttactgagaactcaaagggttacaagttgctgccaccttatct

SEQ ID NO: 840947 - DNA, 100 bp, Homo sapiens
ttggaagtgtctcttagcagcgcgcggagaagaacggggagccagaggaaccgctgctgctggccgaactcaagcccgggcgcccccaccagtttgattg

SEQ ID NO: 840948 - DNA, 98 bp, Homo sapiens
gccaaaatcactcgaagatttaatttttgagtctttaccagagaatgcatcacacaagttagaggtggtatgcagatcttcgtgaagaccctgaccgg

SEQ ID NO: 840949 - DNA, 100 bp, Homo sapiens
aactggcatagacaactatgggcaggtgcactttacaggtccccgatgaaccaagagaaccctccaccatatccaggccctggtccaacggccccatacc

SEQ ID NO: 840950 - DNA, 99 bp, Homo sapiens
gacaaactctggagtaattggagccaagaaatgagtatagagctccacacagaacatcatcaaagaactgatggacacttcatctccctgggtgagggg

SEQ ID NO: 840951 - DNA, 115 bp, Homo sapiens
tcgccggctgcagtggccgccgctggagaccgcgggacctggcgctgcagcgagatacaaggtctcgctgttctacctaggctgttctagaactcctaatgtcaagctatcctcc

SEQ ID NO: 840952 - DNA, 100 bp, Homo sapiens
tcccaagaggaatgacaaacaaccagctcttcaggaactgcaagcacatgttgaccagataactgaaatggcagcagtaatgaggaaagccattgaaatt

SEQ ID NO: 840953 - DNA, 100 bp, Homo sapiens
actggggctgctcccatcattgatgtggtgcgatcggtacaccagaggatcgcttcctggcagaatttgggagctgtttattgcagcactgttgtgccct

SEQ ID NO: 840954 - DNA, 98 bp, Homo sapiens
tgcgcccagccagacacttattagctcagatgttcaggcggttgcttatgaggaaccaaaacactggtgctctattgtctactatgagctcaacaatc

SEQ ID NO: 840955 - DNA, 101 bp, Homo sapiens
tgttcgagaacgaccccgagacgaagttccacctggtgccaagcatcaacaccatgagtggcagtcaggagctgcagtggatggtacagcctcatttcctg

SEQ ID NO: 840956 - DNA, 110 bp, Homo sapiens
atcaagaatcaatgcgtggaattctcctacacttcctatttatgaggcggcatgcgttcctgcggacgatcgcatcttgtgtcgctgaagcgcctcccccagggaccggc

SEQ ID NO: 840957 - DNA, 98 bp, Homo sapiens
cctgagaatctgggacctcaacagcactattcctgatcagagaactccagttgcttcaacacacagtatcagtagtgcagccaccccagatcgaatcc

SEQ ID NO: 840958 - DNA, 98 bp, Homo sapiens
tcgatgccatcgtgatggcggatgagagactggatctcgctcttatctcccaggttggagtgcagtggtgccatctcagctcactgcaacctcctccc

SEQ ID NO: 840959 - DNA, 100 bp, Homo sapiens
tcaaaggataaatccagcaaaaagaatgtatttgaggggagcatgtaacttcaaggtttaaaaacgaggtggagaggatgggttttgatatgaacaacgc

SEQ ID NO: 840960 - DNA, 100 bp, Homo sapiens
gatgctgatgctttgggaagtatgttaatttcatggtacatgagtggctatcatactggctattatatggatgaaatctgtaagtacagacctgagaatt

SEQ ID NO: 840961 - DNA, 100 bp, Homo sapiens
ctgatgcatcggcagatcaggagccaggaatctaaggccgctgctccagctcctgtgtcggaggctgtgtgtcggacctccatgtgtagtatacagtcag

SEQ ID NO: 840962 - DNA, 100 bp, Homo sapiens
aagacgactcaataggaggaagacatgaagccattattatatcaggaaccgaaatggccaagcatatccagaaagaaatacagcgaggtgtggaatcatg

SEQ ID NO: 840963 - DNA, 98 bp, Homo sapiens
ggagttcaagaagaacactccagagatccatggaaaactctgcatattttgtttgctttgtgaagcatacctgaggtggtggcagcttcaagattcca

SEQ ID NO: 840964 - DNA, 100 bp, Homo sapiens
tgttgtaccttgtgacagaatatgccaaaaatggagaaatttttgtgggccggatgtatcccccgcgttctcccaagtctgctgcccctgccccaatctc

SEQ ID NO: 840965 - DNA, 98 bp, Homo sapiens
gctgaaggcggagatcgcccgccgagggtgttgaaagcagcaggggcctagaagacattaaaccgataccacagaaatacaaaggatcattagagact

SEQ ID NO: 840966 - DNA, 148 bp, Homo sapiens
ttcttcaaacgctaaatcaagcttggaatgatcatcaaacagctatggtgatgattagagacatactaatgtacatgggtgagcagggcagcatttccttctcccactgctgctgagatggcagaaattagtcgaattcagtacgaaa

SEQ ID NO: 840967 - DNA, 132 bp, Homo sapiens
atcaaaatagtaatattagaacatacatgttggctcgcacagatatggaaaatcttattctgaaggaagatttccattaggtaatttgtttaatcagtgcaagcgaaattaagggaaaatggatgtagaaaa

SEQ ID NO: 840968 - DNA, 100 bp, Homo sapiens
ctatcggcgccgcggcaagagccagattgctcatttagaaagtggatgtgtgggataacatgtccaatgtgtccgaggagagaagaaaaaggcagcagaa

SEQ ID NO: 840969 - DNA, 100 bp, Homo sapiens
ggccgccggcggcccggcttcagtacctggagtagaacagaaaaattattatgtctgtgttcccttgggactcattggaaattgtacagtgacatcttct

SEQ ID NO: 840970 - DNA, 100 bp, Homo sapiens
caacttgtaccactgtggaacttgtgacaggctggttaaagcagcaaagaaaatcttgggatccgatggagcctttaggagccatctccagtactttggg

SEQ ID NO: 840971 - DNA, 100 bp, Homo sapiens
gttgacactggcagaagctctcaagttcattgatcgtaagagctctctcctcacagagtgcttctgtgagccacaggttcaggactccactaggaaactg

SEQ ID NO: 840972 - DNA, 127 bp, Homo sapiens
gcgacataatgatgagggacaacctctttgaaattgtaacaacgtctcgaactttctatgtgcagcaaagaatggctcaagaagtactgacacatttaaaggagcatcctgatgcttggacaagagt

SEQ ID NO: 840973 - DNA, 99 bp, Homo sapiens
ttgcttcccgtccgtgtcgcggccctgcggttggcggcctcctcgtggagcggagcaaggactacgtctactttgagaactcctccagcaacccatacc

SEQ ID NO: 840974 - DNA, 98 bp, Homo sapiens
cagcttgggaggtgctgccaccacagggtgtgctgggtgcatcatgtaactggcatgtgggtgtaccctttcctggaacacattggcccaggagccag

SEQ ID NO: 840975 - DNA, 100 bp, Homo sapiens
atgtctaagctgtctgtgaatgcccctgaattttacccttcaggttattcttccagttacacaacctttccaaagtgaaactgatgagatttgatgatcc

SEQ ID NO: 840976 - DNA, 100 bp, Homo sapiens
gagcgtggagcgcgtgcgcacagatagcacgggctctgctgtctccacggacgactcagagcaagctatggaagtgataaacaagtccagtgttaagtat

SEQ ID NO: 840977 - DNA, 100 bp, Homo sapiens
ggatgaacaagtactgatggaactaaaaacttgttcggtgaccagtgacttggattttccaacacaagtcatcccattaaagactctgaatgcagttgct

SEQ ID NO: 840978 - DNA, 51 bp, Homo sapiens
tacccgggatacggaggagggatgccttcaattaagttgcagagttctgat

SEQ ID NO: 840979 - DNA, 100 bp, Homo sapiens
tgggaggtgactttgagttcatggatgatgccaagagttcctgtgagaacaagcgggcagacctggttttcatcattgacagctctcgcagtgtcaacac

SEQ ID NO: 840980 - DNA, 100 bp, Homo sapiens
aaaaagcatcttaaagcaggctgcagatcttacacaggacccagatgatgtggtaccagttggccaaagaagagcctggtgttggtgcatgtgctttgga

SEQ ID NO: 840981 - DNA, 100 bp, Homo sapiens
cagattgcaaagagttatggatattctggtggggagatgaacccaacctagtgggtgtaatacatcatgaactgcagggatttatctgaagcaatggaaa

SEQ ID NO: 840982 - DNA, 100 bp, Homo sapiens
tggtaccacgaggatcggattagagcgtgacttcccaagtatgcctggccacaatacctccaggaattcctcttgcgatcctatagtgacaccccactta

SEQ ID NO: 840983 - DNA, 100 bp, Homo sapiens
caaaatcagtcactaacttctctctcagatgttgaaaagtgacctgaccaacggtgcagatgggatgctggccacaagctccaatgggtctcagtacagc

SEQ ID NO: 840984 - DNA, 98 bp, Homo sapiens
tcacttcagatgagaccagaggtgcggaaggaacagaaagggtcagtatagaccttctgatttgctgtgccctgagacatatgtttgggtacccattg

SEQ ID NO: 840985 - DNA, 99 bp, Homo sapiens
agccatggacgcgtccctggagaaggtgtcagttgtacccgaggcgttctcagcagcagcaagtacctgtggtggatttccaggctgaactgaggcagg

SEQ ID NO: 840986 - DNA, 100 bp, Homo sapiens
ttaaatttagtagtcgatatccttttgactctcctcagggagtcctcttggtatatgatattacaaattatcaaagctttgagaatttagaagattggta

SEQ ID NO: 840987 - DNA, 100 bp, Homo sapiens
aacaattcacatttatgacatgaaaaagaagattgagcatggggctctagtgcatcacagtggatgtacagttacccagcacgtgtacctcctcctcctc

SEQ ID NO: 840988 - DNA, 100 bp, Homo sapiens
ccgccgcattttttaaccctagatctcggagagaacattgaaagtattctctaagctatttgaagagagtgactaaatgcacctgggtcaggctgtctgt

SEQ ID NO: 840989 - DNA, 100 bp, Homo sapiens
gtcaaacgcagaaggactgcctcactgagcaaccaagagctctttaagggtcacccagagactctggagaagtttgacaagttcaagcacctgaagtcag

SEQ ID NO: 840990 - DNA, 100 bp, Homo sapiens
cttttggatttctttttaataatgtgtgacccttcacctttgatcccctgacctgcattaccttgtgaaatcccattctctggctggagacacagatggc

SEQ ID NO: 840991 - DNA, 99 bp, Homo sapiens
tgaagactgcctgcttattggacctcagtgtgcctggtgtgctcaggaggaagttggtatgccagcggattatgtaaacaagcttgctagaatgtttca

SEQ ID NO: 840992 - DNA, 99 bp, Homo sapiens
accagtgtggcatgggcatgtaaggtgcgcggagggactgcaccttctccatcaggtgcagaaggtgcaatggatgagcttcatagtctggatccaaga

SEQ ID NO: 840993 - DNA, 123 bp, Homo sapiens
ggcgtgggaggaggaagatggcggccggcaagagcggcggtagcgcaggggagattacttttctggaagctcatgatggagcagtccaagaagtcctccctcatggtggcccgcagtattctc

SEQ ID NO: 840994 - DNA, 100 bp, Homo sapiens
cggaggctctggatggaagccatggatggccgggaacctgacacagaatttccaggtgttgtggtgcgaccaattggtgaatttcgtagttccatagatt

SEQ ID NO: 840995 - DNA, 98 bp, Homo sapiens
aggagactcaatttgaactcagagtactgggaaaagatagacagcatcttgctgccacccaggctggagtgcagtggtgcagtcttagcttactgcag

SEQ ID NO: 840996 - DNA, 99 bp, Homo sapiens
acagaatcatctagaaggacaaatgaacttcaatgcagattctagccaacataaagactcagtccgctagtagcacactccagaaacacaaatcttcct

SEQ ID NO: 840997 - DNA, 98 bp, Homo sapiens
gacacgctggtgcatctgtttgccggagggtgtgtggaggtcattgcaaaggaaggacaaaacctgaaagagctatatttggtgtcctgtaaaatcac

SEQ ID NO: 840998 - DNA, 98 bp, Homo sapiens
acatgtcctgtccatgtaaacagaacttcctccatgagatgttacagcccagatagctcttcagcctgcactgaagttcaatggtggtggtcatatca

SEQ ID NO: 840999 - DNA, 98 bp, Homo sapiens
tttggcattaatagcagctttagaattgggaataacttagcttgcacatgaatgcagtcatgcaaaccgttaggaaaaccagagcctatatggagttc

SEQ ID NO: 841000 - DNA, 99 bp, Homo sapiens
accgagccgcgaagcgacatggtgctgctcaaggagtagtactccaaagattcaggtttactcacgtcatccagcagagaatggaaagtcaaatttcct

SEQ ID NO: 841001 - DNA, 99 bp, Homo sapiens
agcagctgttggtaggctctgctgtgaggtctcctcttccggctttcccacttcccaagaaactgccaagttttggaccttatctggaacagcgcaaga

SEQ ID NO: 841002 - DNA, 100 bp, Homo sapiens
acgcctgcccattcggcccggcagtgtgtgaggcgcctttcaaaccggagggattggcaaggcagaatccagagaccacatttgaagtatatgttgaagt

SEQ ID NO: 841003 - DNA, 100 bp, Homo sapiens
gagctgggcgacgagctgaccctgggagacatcgacggtcacgcaatatttaaactcacgtatctaagcaatcacgactataaacacctctactttgaat

SEQ ID NO: 841004 - DNA, 100 bp, Homo sapiens
ctgccaaactccaggctcagatgtcacagactgcttttcaggaagccttggacgctgcaggtgataaacttgtagtagttgacttctcagccacgtggtg

SEQ ID NO: 841005 - DNA, 101 bp, Homo sapiens
aagaattagaggcgtatagagacaaattgaaacaacagcaagctgcatttttgcctgtatacatgcacattcgagttctggttgctgcatatttatttcag

SEQ ID NO: 841006 - DNA, 100 bp, Homo sapiens
gtgctcatcactcccttggagaagtttcgaaaggaacagatcggggctgccaagttgccgaacaagcaaccggaaaagcttaataggcaatgggcagtca

SEQ ID NO: 841007 - DNA, 99 bp, Homo sapiens
gggactagcatcttgcagtctgttaagatgaaacgactacaaagtgccatgacagaaggtggtgtggttctacgggaacctcagagaatctatgaataa

SEQ ID NO: 841008 - DNA, 100 bp, Homo sapiens
aggtctggagctcgaccgggccaggtggagcagttctggaggttttatagccacatggtacgtcctggggacctgacaggccacagtgacttccatctct

SEQ ID NO: 841009 - DNA, 100 bp, Homo sapiens
agaagtaccaggaggcgttggccaaggaatccacattcatctcaatggaaggatcctgccttaagtcaacttatttgtttttgccgggaaagtcgctaca

SEQ ID NO: 841010 - DNA, 100 bp, Homo sapiens
aaatgtctgtcacatatgatgattccgttggagtagaagtgtccagcgacagcttctgggagcaattctgtggtgttcttggtcacacatttatggagtt

SEQ ID NO: 841011 - DNA, 100 bp, Homo sapiens
gcttcagtaacctcccgtcaaggagctcccagttttgttgaggagaccaagaagtaaacagttacagtacagcttggatcacactgtgaattaaccttgg

SEQ ID NO: 841012 - DNA, 100 bp, Homo sapiens
cccgccgggaggaccgagcctaagagggcagccgcctgaaggaacgcgacggcggcgcccgcagatttgcttgtaaatgcatcacgaagaggcagcccag

SEQ ID NO: 841013 - DNA, 99 bp, Homo sapiens
ccgcggccacttttgccttcccgggtggaagttgatgggtcgaaactaaatgtgaccagcacgtggaacctggcttcgcccttattgtctgtcagcgtt

SEQ ID NO: 841014 - DNA, 99 bp, Homo sapiens
ctgggcctgcagctctcggtggagacgctggatggtcccttcaccgatgttgtcaccaccaacctaaagcttggcaacccgacagaccgaaatgtgtgt

SEQ ID NO: 841015 - DNA, 100 bp, Homo sapiens
ggcgatgcagaggggtgcgcagtccagcgtgaactacagtcagggcagcctgaaggatgcaattgtgaagatggaaagggtccaacccctggaagagaat

SEQ ID NO: 841016 - DNA, 100 bp, Homo sapiens
gttctttggaattccattcttttccttattcttctgatgtggatccagattacttctctaacaggatcaccagtttgctccacaaagcacaatgtctcga

SEQ ID NO: 841017 - DNA, 98 bp, Homo sapiens
ttcaaagtccctcatcaggaagagaatggctgtgctgacttttttatccgtggagagcgactcagggacaaaatgatttgggccaggcttagtcatct

SEQ ID NO: 841018 - DNA, 100 bp, Homo sapiens
aagaaacacaaggaccaaaatcgaagcacggagaggcgccagtcggagcctcatggccttttcgatgagttttgatcatcctgagaaaaatgggccttgg

SEQ ID NO: 841019 - DNA, 100 bp, Homo sapiens
tgaactcattgaacaggtgatgaaggaggagcacaaggggacactacacagaaaatgagaactgctcactatcctaccccagccgaattggatgcgtatg

SEQ ID NO: 841020 - DNA, 100 bp, Homo sapiens
atctgggttgaaggtgatcatcatggacacagttttgacagtaattcttttgggccgctctttcagtctcacatggcaacgaaaacaacttgtatgtctt

SEQ ID NO: 841021 - DNA, 99 bp, Homo sapiens
gagagatgctgggcgtggcggccgggatgacccacaggtggactgtgcattgtcacttattcgacttgggatggagcggaatattcctggtttgctggt

SEQ ID NO: 841022 - DNA, 98 bp, Homo sapiens
tcacgaggctcccttgacaggcggctttgcatcggaaatcagctctacagttcaggcctatggcatgtctgcgttacctttaaatctgataaaaggca

SEQ ID NO: 841023 - DNA, 100 bp, Homo sapiens
cggcaagatccggacgcggcgttgccaccaggggccaattaagccttaccagcaggggcgacaacagcatcaggagtcaactgagagttcaaatacaaca

SEQ ID NO: 841024 - DNA, 100 bp, Homo sapiens
gggcacggatgtccagatctacatctgcaaacaatggacggagattcttcactttacagattaccccggaagctttcgagaagctgggattccctgcagc

SEQ ID NO: 841025 - DNA, 100 bp, Homo sapiens
gtaaattcagagctgaacccttcaaccggaaatcgatcaaggtacaggtttgcagattccgccagcagcacagcaagctctacagatgagtggctctttg

SEQ ID NO: 841026 - DNA, 100 bp, Homo sapiens
aaattacatattccagtaatggtggatgaagttgttcattgtttgtcaccacaaaaaggacaggctttcctgaatgtattggaccagtgtcccaaactgg

SEQ ID NO: 841027 - DNA, 98 bp, Homo sapiens
tctgtacagcagtttcctcatccctgcagctgtgtttgaacagcactattcctgatcagagaactccagttgcttcaacacacagtatcagtagtgca

SEQ ID NO: 841028 - DNA, 100 bp, Homo sapiens
cgcgaatatcgtcatcgttagaaggttgcccagagaaaaattcaggaaattctgactcaggtaaagcagcaccaacaacagaaggctctgcaaagtggac

SEQ ID NO: 841029 - DNA, 100 bp, Homo sapiens
gttagcttcagagttctttgtggatggacttgattctgatgagaggctgaccggttccctgatgtgttacctgcttctgctactgatccaaactgcagaa

SEQ ID NO: 841030 - DNA, 99 bp, Homo sapiens
ttggaagcgctttgatttacagcagctgcaggattggtagcttatgtcgatcttgatgaaagagcaattgatgctctcagggaatttaatgaagaagga

SEQ ID NO: 841031 - DNA, 100 bp, Homo sapiens
caatggcgagatccccttgaaagacaagacgctgattgaggtgtcattccacacatccacaaatctctgattgggaagaaaggacaacagaagactgtct

SEQ ID NO: 841032 - DNA, 100 bp, Homo sapiens
agaggaggggaggaggaggaggattcagggaataggagctggggagcccttctgcgccacagccattcgttatctatgacatgaattccttaatgatggg

SEQ ID NO: 841033 - DNA, 100 bp, Homo sapiens
gttggagcagggagaggagctgtggataacgggaggtgaatttccatgtcaacatagtcctgaaggaagaatcctgctcaaaaatgaggtgaattaatac

SEQ ID NO: 841034 - DNA, 100 bp, Homo sapiens
tggatttcagcctgcacggatggtcttgaaacacaaatggtttttgtttctcagctacctcagtgcctgtgaccgcctgttacgtcagggatatgaggaa

SEQ ID NO: 841035 - DNA, 100 bp, Homo sapiens
taaaagctgtaaaatgataacagagcgtggggtagagcagcggctgccatgctcttctgtggcttcatcatcctggtgatctgtttcatcctctccttct

SEQ ID NO: 841036 - DNA, 98 bp, Homo sapiens
atgaaggacccataggccaccaggggccgattggccaagaagaaatgctccacctgtaagaacagaaaatcgtcttatagttgagaatttatcctcaa

SEQ ID NO: 841037 - DNA, 98 bp, Homo sapiens
accagaaatcaggcagaacatctattgagacaagaggtgaggaattttaaattggaacaagagcaagaaaaaaacaaaatcttgtcagaagcactgga

SEQ ID NO: 841038 - DNA, 107 bp, Homo sapiens
ggctgtagcctttgctgagcaggagcaactatgtctctggttcttaaggattgaaaagttcagacttggttccttcaacctagagaaagttgaaaacccagctgaag

SEQ ID NO: 841039 - DNA, 98 bp, Homo sapiens
tggaagccgcccaacaccaccactgagagccccgtcatgggctattttgtggaccgacccccagaggagcccaccacctggaccgggtacttcgggaa

SEQ ID NO: 841040 - DNA, 100 bp, Homo sapiens
cccggaaaacctaaccatgaagacttgaacttaatacagcaagaaagaccatcaagtttaccagtaagaatgattgatgttggctgatattggagtgctc

SEQ ID NO: 841041 - DNA, 100 bp, Homo sapiens
gatttcttgctggttgaatacctccctctccactcccatcttcaggcttcccatcgacggtcagtgcgcacgttgtaatcagctgaggccatgtcaggag

SEQ ID NO: 841042 - DNA, 100 bp, Homo sapiens
cagaagatgaccctgtcataaagaaaattgcccttcgggaaatccgaatgctcaagtggaaggaatgaaggccagctgaatggtgaaacaaatacaccca

SEQ ID NO: 841043 - DNA, 104 bp, Homo sapiens
catagatagaaacagagggagctactctcaggctgcagggcattcttagcagggttacagaatctgttaagaatattgtgccagggtggctacaaagatacttc

SEQ ID NO: 841044 - DNA, 100 bp, Homo sapiens
agaataacggctgcacctggagattgacgcagagtgggcggcggtggtggccacagttaagatggaggaatatagtgaccttctgaagagcactgaggct

SEQ ID NO: 841045 - DNA, 100 bp, Homo sapiens
gatattattgaacaactggtggaatttgcttatactgctaggttgatgccggcccaggatggatcagacctgtgaactacccagaagaaattgtctgctg

SEQ ID NO: 841046 - DNA, 100 bp, Homo sapiens
tccccgttcgccaccaattatgggagggctggccaacttctgctacagacgactcatctctgctggatgaaccgaatcctaacagtccagccaatagcca

SEQ ID NO: 841047 - DNA, 100 bp, Homo sapiens
agattcccttgcaaatttacatacgagaatggcttgtgaaatcatgcctctgcaaaggatttcagatgcatgccaggtttccactgattgccagaactcg

SEQ ID NO: 841048 - DNA, 112 bp, Homo sapiens
ggccggccgacccttcctgtcgctgacggcgactgcgggaggccagataaactgtgtgacgttccctcacccagacacgatgccggaacagcagctgctgaaaccaaccgag

SEQ ID NO: 841049 - DNA, 100 bp, Homo sapiens
ccagagggcaccttctgcaaacatgtctgtggatcccctatccagcaaagctctaaagacttcctagcatgggctgttgtgctggagagaacgagagcta

SEQ ID NO: 841050 - DNA, 100 bp, Homo sapiens
gttcttatgactcctccatgtctccagatagcagactccttgaaagcagggtccttgtttagtgcatctttgcccacatacaccacaacatatcaagatg

SEQ ID NO: 841051 - DNA, 98 bp, Homo sapiens
ggatgttaggatattgtggaacggtgaaaagaaatctgttgcttcttgcatgggagcatattaatgaaaagtgccataaactgaaaaaccaaacatga

SEQ ID NO: 841052 - DNA, 99 bp, Homo sapiens
ggaaatcctctgcttgacatctctgctgtagtggacaaagatttccttgataagaacaagagtttgttcagaaacaacagcaagaattagatggctctc

SEQ ID NO: 841053 - DNA, 98 bp, Homo sapiens
ggctccagggcactggtaatttggctagaggaccgcgcggaggcagcgggactttgatgatagcatgttcgttaagacctcaactcctgcggagtgga

SEQ ID NO: 841054 - DNA, 99 bp, Homo sapiens
agcaacccaagacgttcaccgtgaggatcgtcaccatggacgccgagatggagttcaattgcgaggctagcatcccattctctgtggttggatccaatc

SEQ ID NO: 841055 - DNA, 100 bp, Homo sapiens
aatgatcctgaaaacagaaggaaattgaaggaacttggagttaatggtctaatttatgatagctattgacctgaaaagtggttctggaaaagtgtaccaa

SEQ ID NO: 841056 - DNA, 100 bp, Homo sapiens
aggaggaggaggggctccggctggtctgtggtgaggtgtgggctaagctggtggccccggctttagactggaccccacaatgtttgcagagatgttcagg

SEQ ID NO: 841057 - DNA, 98 bp, Homo sapiens
gaagctttgcgaagaaggttagaaaaaaggatatatatacctctcccaacagggttctgagcaaggttcaaccagtcaagaacaggccttatctgctc

SEQ ID NO: 841058 - DNA, 100 bp, Homo sapiens
ttggaaggatgcttcagctcatcttaggctgtgctgtgaactgtgaacagaagcaagcacatggattaattgatgtatgttgagtttatggagctgcctt

SEQ ID NO: 841059 - DNA, 100 bp, Homo sapiens
cacatcttgtaaaattggacaatggctctttagagagttatctgagtctcattgctatggacagtgctatcaccctgtggcagttccttcttcagctcct

SEQ ID NO: 841060 - DNA, 98 bp, Homo sapiens
aaaaactcttggagaaggagaggctgggggaatgtggaaagattattaatgctgcacttgctttggctgcaagacccaaaagtcaagcggtcaaaaac

SEQ ID NO: 841061 - DNA, 98 bp, Homo sapiens
acgtcatcattaagttggagcagggagaggagctgtggataacgggaggtgaatttccatgtcaacatagtcctgtttgctgggggaagcgggccagg

SEQ ID NO: 841062 - DNA, 98 bp, Homo sapiens
ttcagaaaaaccatcttttataatgggaggctccatctcacagaataaaagccgccctcattctaggggagaatataatgtttacagcacctttcaaa

SEQ ID NO: 841063 - DNA, 100 bp, Homo sapiens
ttttgccagcgataatacgcctcagatgaccctaattttcagtgcaaattcaaaggtctctggagtaaggaaaaatatctatgtatgccctaggaagatt

SEQ ID NO: 841064 - DNA, 100 bp, Homo sapiens
cagcatgggtcgggagtcacggtcccgcggcagtgctggtggccatggttcccgtagccagaaggagttgcccacagagcccccctacacagcatacgta

SEQ ID NO: 841065 - DNA, 100 bp, Homo sapiens
ttgaatttgactttaaaggcgatccactaggaggagtaataagtaacttaggtggcaagtgggagaaaccatcagaaattttggaaatcaaaggacagaa

SEQ ID NO: 841066 - DNA, 100 bp, Homo sapiens
cggagaggaaggcgtggtgtggcgtctccaggtctgagttcactgacaccatcctgtccgtgcacccctctgatgtgctggacatgcccgtggacccaaa

SEQ ID NO: 841067 - DNA, 100 bp, Homo sapiens
gagaagcagtctgtatggcagaaagcaatggatcatattgagaatatggtgcacctgaagattgggaactcaaaacacagcaaccacttatgctgaaaaa

SEQ ID NO: 841068 - DNA, 98 bp, Homo sapiens
gaaaagattgaaaatatctacatgcgaagtgagcctgttgctcaggtgtttgtccacggagaaagcctgcagctgtcacaagatgaaggtagaggcac

SEQ ID NO: 841069 - DNA, 100 bp, Homo sapiens
atcaccgtcacggcctgctgctgctaaagcggaacttcagcagcggcaccatccctggcacccctgggcccaacggagaggacggggtggagcagacagc

SEQ ID NO: 841070 - DNA, 100 bp, Homo sapiens
gggaggaggaggaggattcagggaataggagctggggagcccttctgcgccacagggtgataaaagaaaatgtggctgaagttacccgaagttcagcttg

SEQ ID NO: 841071 - DNA, 98 bp, Homo sapiens
gctctccgccgtccccagccctgcctctccctgggctctggtatatttgcttacttaaactaccatgttcctcgaacgagacgagaaatcctggagac

SEQ ID NO: 841072 - DNA, 98 bp, Homo sapiens
tgttagatatgcccccactgaggtcgggctccatgagatgcacatcaaatacatgggcagccacatccctgttggattggatgctgctggcaagacaa

SEQ ID NO: 841073 - DNA, 100 bp, Homo sapiens
acctggacctcggctacagactgctggctgtgtgtgctgcaaaccgagacaagttcaccccgaagtctgccggttggatggcaagcatgttgtgttcggt

SEQ ID NO: 841074 - DNA, 99 bp, Homo sapiens
ttccccaggcctgcgtccgagtctccgccgctgcgggcccgctccgacgcggaaggagatggtaacctgcacctcaatgtgacggcggaggccttcagc

SEQ ID NO: 841075 - DNA, 100 bp, Homo sapiens
caggaatccctggggggaaaccggccacaacacacagtgatcttgttctaagagcaacaaagctgggaattccttatagagttattcacaatgcctccat

SEQ ID NO: 841076 - DNA, 100 bp, Homo sapiens
ttgctgatgtacttcctgaagcagctgctctagtgaaatgtccagaaggcttcttgggggaatattgtcaacatcgagacccctgtgagaagaaccgctg

SEQ ID NO: 841077 - DNA, 100 bp, Homo sapiens
actgctggacgacctcggcgaggtgcccaccatcgagtccctgatagagctccccggattatggtgcactgagaaggcatctggaagcctgggccctcat

SEQ ID NO: 841078 - DNA, 115 bp, Homo sapiens
tgacacatccaacttcgacgtggatgacgacgtgctgagaaacacggatacaacttcagtattaaaggaggaacatgttacaacctttgaagatgaaggatcctatataattcaa

SEQ ID NO: 841079 - DNA, 99 bp, Homo sapiens
ttatggtgggaggagccgatactgagcttcttcctatttgccatgggtccagtgcgaggcattgacttccataagcagcagccactgttcgtctctgga

SEQ ID NO: 841080 - DNA, 99 bp, Homo sapiens
aaatgaacataattagggaaaataaggatctggcatgtttctacacaacaaaacattcatggagggggaaagcaatgttgatcccagggatgatgtatt

SEQ ID NO: 841081 - DNA, 100 bp, Homo sapiens
acggacactttcgcaacatcaagggagttttccggggccctctcagcaagaacgggaacaaaactctggattcagaatccatggctggaagaggtagtaa

SEQ ID NO: 841082 - DNA, 100 bp, Homo sapiens
tgcaattggtggctttgaaggcgcggcgagcgggaacagctcttgaggagtgagactgcaggagatgtgggccggctgcagagagactaagggcacttcc

SEQ ID NO: 841083 - DNA, 98 bp, Homo sapiens
gctggtttaaaggcaaagaattaaacctggtgtttggacttcaacttagcatggctagaattatttgggccaggcttagtcatctattggtatggatt

SEQ ID NO: 841084 - DNA, 99 bp, Homo sapiens
tgaaactggcctcccaagccctgataagtagtgtgccagtatttgaaaaatcccaatgtatctgattcactgctgctgcagaatattttccaagctctg

SEQ ID NO: 841085 - DNA, 132 bp, Homo sapiens
atggcaaggacagttgcatcatcaaagaaggagacgtggggtcactggtgtatgtcatggaaggtcactttcatgaattcaaaggcaatttaccagtgatttctgggtgctggggctgatattttttgtgca

SEQ ID NO: 841086 - DNA, 98 bp, Homo sapiens
ctgattttatgggaaaattaagcagatgctccagtttgagaaacctggatctgcgatctgtttgtggctgaagatccccccctttgagaaggcccgct

SEQ ID NO: 841087 - DNA, 100 bp, Homo sapiens
caggagtccctctccgcccagttacaaggtgatggatgtggacacactgtactaggccctgagagtggaacccttacatccataaactacccacagacct

SEQ ID NO: 841088 - DNA, 100 bp, Homo sapiens
agcgaacattatatccagaatcatggacggacagaggatgcacttgtccaatcctcaatcctgaagacaaaggctcaggtcccaatggtgctgactgctg

SEQ ID NO: 841089 - DNA, 100 bp, Homo sapiens
ttttcaagtacaatcgaaggcctgcagggtgggagactacactggaaaataaagagttagctccaaattctgacattcctgaggaagaaccagcccccag

SEQ ID NO: 841090 - DNA, 98 bp, Homo sapiens
gaagccccatcagacactgcaggaagacatcgagaacctcatccatgtgcagattgaagcaatgagaatgggaaaaggacagcacaggatgccctcca

SEQ ID NO: 841091 - DNA, 100 bp, Homo sapiens
ttaagtttggttctaatgtcaactttgttgttggcaacaatggaagtatgtttctataaaacctgataaccgaaaattggccaacggaacaaatgtcctc

SEQ ID NO: 841092 - DNA, 98 bp, Homo sapiens
cggctcctcggctggtggcaagtattgctgtgggtgctgggacttcccgtccgcggcgtggagggttgtcctttgtggagggtcttctcgaatcccaa

SEQ ID NO: 841093 - DNA, 98 bp, Homo sapiens
aaaaaccctaagtctttgccatgttattcatttctgtgcaaaacaggactggctgatactacatattccagatggaatgcccttcaatcagctgggca

SEQ ID NO: 841094 - DNA, 116 bp, Homo sapiens
caaagaatgaaactatagcccaggaagataaaatcaagttgctgaaagctgcctttctgcaatactgcagaatgattgaagatagtgggaaaagaggaaataccatggcagaaaga

SEQ ID NO: 841095 - DNA, 100 bp, Homo sapiens
gcagcagtgtcctgtgctgatggtgttggcaggagatctggaagccctcaaaaaggaaaccattgtgttaaaggaaggttctgaatatagagtcaaaatt

SEQ ID NO: 841096 - DNA, 99 bp, Homo sapiens
tggccgaaacctccatagtcaccacttcacttcacctctttctggaaaccaggagccagcaccgctctttgaccttgccatgcttgccttagatagtcc

SEQ ID NO: 841097 - DNA, 100 bp, Homo sapiens
tgaagagcaccattctgcctaatgtttctatgagtttggctactgtagatactttattcagaaattggctttggaaaaatggaaacctacatcaaattgg

SEQ ID NO: 841098 - DNA, 135 bp, Homo sapiens
gcatacaccgagagagtgaggagccagacgacaagcacacactatggcgctgaaacggattaataaggtgtcattccacacatccacaaatctctgattgggaagaaaggacaacagaagactgtctaaaggatg

SEQ ID NO: 841099 - DNA, 100 bp, Homo sapiens
tggttcttgcatcaagcagggatgataaccacctgcctcaaagataatctgctcaaaagacttccatttcattctccaccccaagaagctttagaaattt

SEQ ID NO: 841100 - DNA, 100 bp, Homo sapiens
cggcccggtttccctcggcgtgctactgtgcgctcgatccagcaccatggggaagcgggacaatcgggtgggacaagcagatcttttgaaatatgctaag

SEQ ID NO: 841101 - DNA, 100 bp, Homo sapiens
atggaatgtctctactatttcctgggatttctgctcctggctgcaagattgccacttgatgccgccaaactacgctgggagcggactcttggagctattg

SEQ ID NO: 841102 - DNA, 100 bp, Homo sapiens
acagacctctgctgccgccgcccccacggtgaatgtggacttccagaagcagacggtagatcctatgcaagtctcctttaacacatcagacaggtcccag

SEQ ID NO: 841103 - DNA, 100 bp, Homo sapiens
ttctgtttctgatagtaaatagtgccggtggtggtgtgcacattgagccccggtatagacagttcccccagctgaccagatcccaggtgttccagagcga

SEQ ID NO: 841104 - DNA, 100 bp, Homo sapiens
agcagtgcagggaacttgggagtactcattcctgtaatagctgtgaccttcactgcctggtgtaactcccacctaaggaaagccggcacccagattgaga

SEQ ID NO: 841105 - DNA, 100 bp, Homo sapiens
ggggatcctgaagataaaaagctttgaaaagtcgaattcatggtcgtggaagctgagcccatattaagagatgtcaggagccaaaaacctgtatatcatc

SEQ ID NO: 841106 - DNA, 100 bp, Homo sapiens
catcaacaacaagatcgagttctgacgctctgcaggggcgatacgcagctcctgaattggagatgagttgatccgggaggtcaccatcaactgtgcggag

SEQ ID NO: 841107 - DNA, 98 bp, Homo sapiens
caagctctaccctgcttggtgaagatgcagaggttgcagcagattttgatatggaaggtgtggatgaagcaaccatcattgacattctaactaagcga

SEQ ID NO: 841108 - DNA, 98 bp, Homo sapiens
ccaggccagaggaaagaacagctatgccctccagcggtgcagaaactgaagaagcttgcaagcaatactttgagaagtatccaggagaccatgaactc

SEQ ID NO: 841109 - DNA, 98 bp, Homo sapiens
tggcggacatcactttagaccctccacctaattgcaggtggaagatgaaactgttttacataacattccttatatgggagatgaagttttagatcagg

SEQ ID NO: 841110 - DNA, 99 bp, Homo sapiens
ctgaaggagttcaagaattcccagaagaggcagcatgcggaaggcattgctgggagcctgaaaactgtgaatgccagaaataagctggtgatgcagctg

SEQ ID NO: 841111 - DNA, 99 bp, Homo sapiens
ttccctcggtctgggcttctctgaggcggcgagagatggtcaggtctggagctcgaccgggccagatgtgtgcaacagcaccgatcttccggaagtcga

SEQ ID NO: 841112 - DNA, 98 bp, Homo sapiens
gggatggctgaagcagccggaggctggccaggtctacaacactggcccaagcacccttccagggtcatctgtcagcatctctttccctaatcgactct

SEQ ID NO: 841113 - DNA, 98 bp, Homo sapiens
aaacttaaagaaatatttaacaaagctttggttgatccaggaaagtacacaggaagatgctatgaaatttccatcttcccaatcttcccagccttcca

SEQ ID NO: 841114 - DNA, 100 bp, Homo sapiens
ctcagatcagggaccagcaaaaaggagagataagtggttttgatatagaaatctctactgaagaggaaaaggatactggagatctaaaagatagctctct

SEQ ID NO: 841115 - DNA, 98 bp, Homo sapiens
ctctagataatgctaacagccggctgcctgagttgaggagctcaagcttgggaaaatggtgtgcattccttgtatcgtcattccagttctgctctgga

SEQ ID NO: 841116 - DNA, 100 bp, Homo sapiens
caaataatcattttataacatggattttagatgctgatgattgtagaaggcatgaaacaaaaaatgtggagtattgaaaatattgccttcggttctggtg

SEQ ID NO: 841117 - DNA, 100 bp, Homo sapiens
ggtatcaatctcactgctgcagacacatggaatctctagcgttgtcactcatggctggcatggaacaaagttaaatgtcttcagcgtaataaatatctcc

SEQ ID NO: 841118 - DNA, 98 bp, Homo sapiens
ttttggaggccgtccacaacttccaggttcccatcctgcggatattggtgctggaaaaggcaaatactatgctgtcaattttccaatgagagatggta

SEQ ID NO: 841119 - DNA, 100 bp, Homo sapiens
ggcacagcttggagtccaagcatttgctgatgcgttgctcgttattcccaagaggcctaacatcgtgtcccagctcagccaagcctgcgatggagccata

SEQ ID NO: 841120 - DNA, 98 bp, Homo sapiens
gatataggtggacttttttacaggtccaccatggagcccttgtgtccactcctgctggtgggttttagcttgccgctcgccagggctctcaggggcaa

SEQ ID NO: 841121 - DNA, 100 bp, Homo sapiens
tggatcctgtccttcatgcagtctctcattggcttctttgagactgaaatggcaggttgttcctcaaagtcattcaagctgtactcgccgaaggagcccc

SEQ ID NO: 841122 - DNA, 100 bp, Homo sapiens
tgcaagagaaagagagagagtttcaagaagtgtaattgtggcttgtatcaacactgttactttcgtacattggtaactataactacccaatattgcagcc

SEQ ID NO: 841123 - DNA, 99 bp, Homo sapiens
atgaagatgaggagggagctacagcgttgaacaaccacagctctattcccatggacccagcacctgggctgtcccccatgcagaccctgaaggtttctg

SEQ ID NO: 841124 - DNA, 138 bp, Homo sapiens
tgtctgtggtgtggctgtgggacccgtgagcaagcagcgacgccagcggcggagaaccgacgaaaggaaggttgtgcaggaccagcgttccctgtgcaggcgccactgcgtttcctgcagattccgaccggcactgca

SEQ ID NO: 841125 - DNA, 99 bp, Homo sapiens
aggcgtccctggagcggccgccttccagctgtaaacaggaacatcgataagtagtgtaaaaacttgcacaatgaaatccgaagccaaggatggagagga

SEQ ID NO: 841126 - DNA, 101 bp, Homo sapiens
ctctataaataagccctttgcacagcagtgccaagacttggttaaagtcattgaggactttccagcaaagaatcagcatgattcttcagaggctcttcagg

SEQ ID NO: 841127 - DNA, 100 bp, Homo sapiens
ctgtgcatagcgggcgcggtctacggatgtcgcaggtcttgggtctttagccctctgacgtccatcatctctgcggtggttggcattctgctggtcgtgg

SEQ ID NO: 841128 - DNA, 117 bp, Homo sapiens
gctgaaggagcaatatgatgctgagttgcaggccctgagggagagtgtggaagaagcaaccaaggcaaatgtttgcagactacggctgaccgtacctcctgagagtccagttcctga

SEQ ID NO: 841129 - DNA, 100 bp, Homo sapiens
gcttgggaaaaagagaaacatgaactcggcctaatgaagctaaagaatcggtaatagttaacctcttctgtgagaagtcagaaggtgatctctttaatgc

SEQ ID NO: 841130 - DNA, 100 bp, Homo sapiens
gttttgttctgctccagctgttcgaaggtgatccaggtactctttgagcacatcaaattcttccattgccgctcttctctgtgccctttatccgcacttc

SEQ ID NO: 841131 - DNA, 98 bp, Homo sapiens
tcgcgtggagtgacggtcacaccgcggcgccacatgaaatgaagatcacctctgcctatctacaggacattgagaatgcctataagaaaacctttctc

SEQ ID NO: 841132 - DNA, 132 bp, Homo sapiens
gggcagcagcggcagctccgcggcggcgtctgcccagggcagggctcctaaggaaggacccgcctttagtgccggtggtggtgtgcacattgagccccggtatagacagttcccccagctgaccagatccca

SEQ ID NO: 841133 - DNA, 100 bp, Homo sapiens
cctgctgctgaccttggtggtgtttgtgtctgtgatctactcctgcgtaaaggttctcccacggcagacctgcggcctcttcacacacaccatcttctac

SEQ ID NO: 841134 - DNA, 99 bp, Homo sapiens
tgttccgcttctcagaggacgccttcaacaccaccttcatctccaccatcggtgaagctgtacttcacaaaaacagtagaggagccgtcaaatccagag

SEQ ID NO: 841135 - DNA, 101 bp, Homo sapiens
tgcagcatcaaagaggcaggaggaatactctgaagatagtaactccgagccaaatgtggatttggaaaatcagtactataattccaaagcattaaaagaag

SEQ ID NO: 841136 - DNA, 100 bp, Homo sapiens
gattttggtagagaagaatgaacattgtattgagaacaatatagatttgcaggagaaatggcttccctgaggcaagtgtaacctacattcccagcccacc

SEQ ID NO: 841137 - DNA, 98 bp, Homo sapiens
gtcaaaccgcaggcatttcaatcacattatgcaggggaacaggaacctgataaagaatcaggagcctcagtggatgaagtagcaagacagttggaaag

SEQ ID NO: 841138 - DNA, 98 bp, Homo sapiens
tcaagtcaaggcagccgggatttgtccacatcaccttcactgcctggtgtaactcccacctaaggaaagccggcacccagattgagaacatcgaggaa

SEQ ID NO: 841139 - DNA, 100 bp, Homo sapiens
cgaactgctttggagataatgatcctattgatgtttgcgaaataggctcaaaggatgtctaagcagggacgaacaatcatcttctccattcatcagcctc

SEQ ID NO: 841140 - DNA, 98 bp, Homo sapiens
gcagcccagtaccctcccacctttgaccgggtgcctgtggtagccatattgggttcaggtgggggtttccgagccatggtgggattctctggtgtgat

SEQ ID NO: 841141 - DNA, 100 bp, Homo sapiens
tcgattctcccctggagctcactacttgctaacaggctcttatgatatgaaaataaaggtgacagacctacaagccagaagatacctgaaattcctgcag

SEQ ID NO: 841142 - DNA, 100 bp, Homo sapiens
ccaacttaaaaaacagttttgcctcagcccttcgtggacttttaaaagctgaagagcacagctggtcccttgcggaattggtacatgcagtagttttact

SEQ ID NO: 841143 - DNA, 98 bp, Homo sapiens
cagagagactttcgaaagaatatgatcaactcctgaaagaacactctgaacttcaggtgctgaaaccaagaacctacagttactggttccaaaaactg

SEQ ID NO: 841144 - DNA, 98 bp, Homo sapiens
taagagctacattacagattttttcaacaggaagtatcacagtaacaggctttgtggatttgaccctccatgatcaggtccaccttctagaatgtgcc

SEQ ID NO: 841145 - DNA, 98 bp, Homo sapiens
gatcggcccaaggccagttctccgcagactttacaccaaatctcagaagattcagaacttagatgagtggggcccaggacaggaaccctggagccttg

SEQ ID NO: 841146 - DNA, 100 bp, Homo sapiens
tcaaatatgagaaagctaggccatctgaataactttactaagcttggcatggtggaatggattgaacctcctaaacgagaacgcaaagcaaactacgcag

SEQ ID NO: 841147 - DNA, 100 bp, Homo sapiens
agataatagtgaggacgctgatgaaataattcagtgtgacaattgtggcattacagtccatgaagggatttgtcttggctgttactatgacacgggaagc

SEQ ID NO: 841148 - DNA, 100 bp, Homo sapiens
ccagggagaggaattacgggaacagaaagaaaagtccgaaagagctgttcccattctgtgatggggctcacacaaaacataacgaagagactggagacaa

SEQ ID NO: 841149 - DNA, 101 bp, Homo sapiens
ggagagtttatcttccttcggcttaatgttcttcgtgagaagtctgggccaacggtcacaaaagttgtcactgttgtgacaaccaaaaaagcagttgtgga

SEQ ID NO: 841150 - DNA, 100 bp, Homo sapiens
caaaagagttcctcataccgtcttggatagacagccagcattgaaacaggggaccgtgtctggaggatgcctctcttcgaacattatacaagacaggttg

SEQ ID NO: 841151 - DNA, 115 bp, Homo sapiens
accatttcttttggcccttgtggtctgttctgtagtcagcacaaatctgaagatggtgtcaaagagaaattctgacgccttctggcaagaggggagagcctctggaacagtgtac

SEQ ID NO: 841152 - DNA, 100 bp, Homo sapiens
cgcccggctttggggtcaagcagattgaagttccacctggtgccaagcatcaacaccatgagtggcagtcaggagctgcagtggatggtacagcctcatt

SEQ ID NO: 841153 - DNA, 100 bp, Homo sapiens
cttctaccccacagagatcagctcatgagaatctcatggaagcaattcggggaagcagcataaaacagctaaagcggatcctctgccttgtcaatgttag

SEQ ID NO: 841154 - DNA, 100 bp, Homo sapiens
cgcctcaatgaccggattgagatgtggagttacgcagcaaagtttccccctttctagggtgaggatggttctacacagccacccggagttccttagttga

SEQ ID NO: 841155 - DNA, 99 bp, Homo sapiens
ccaaccaggacagaaatcattatcttagccaccaggaagatgagaatgtgcctactgctcctgatcctccaagtcaacatttacgtgggcatgggacag

SEQ ID NO: 841156 - DNA, 98 bp, Homo sapiens
tcaaaatgctttggtgggaagaagtagaggactgttattgcaaatagaagagtcttccaaaccagtgaggctatcacaacagctggacaaagttgtaa

SEQ ID NO: 841157 - DNA, 99 bp, Homo sapiens
gctgcgctgctggcctttgtgagcctcagcctgcagttctgggaccctcacaatgatcccaatgctcagggggatgccttcaagactctcttcgtggcg

SEQ ID NO: 841158 - DNA, 100 bp, Homo sapiens
ccagcaccgtgctctccaccacaggctgaccggttccctgatgtgttacctgcttctgctactgatccaaactgcagaacttctcattcatccccaaggc

SEQ ID NO: 841159 - DNA, 98 bp, Homo sapiens
ccactcagctgacatatgaaggactcattgatgaaatttatggcattcagaacatatcaaatcatgggtggataagatgcaagaagaccttgtcacac

SEQ ID NO: 841160 - DNA, 100 bp, Homo sapiens
caattcaagatcttgatctatatccatagattggaatattggtgggccagcaatcctcagacgcctcacttaggacaacttccttcaaaatgtctactgt

SEQ ID NO: 841161 - DNA, 130 bp, Homo sapiens
gaattcttggacacttgtcatctgtgtactgtgtaacttttgatcgaactggcagacggatatttactgttgctttcagctatgtaacgtttttcgatcccatgagatggaaatcgaccagtgcttgcta

SEQ ID NO: 841162 - DNA, 100 bp, Homo sapiens
agcatgcccaccactgccacaaacgccgcaccaggtcttgtagcagcgcctcctcgaaaatgcttggacagaagagatgagtactatttccactaaggcc

SEQ ID NO: 841163 - DNA, 100 bp, Homo sapiens
tacaaccttcaaaacaactggaatatttagcaaggattcaaggctttcaggacagaataacgggctcccagattcacaagccccaccaagaggatcaccc

SEQ ID NO: 841164 - DNA, 100 bp, Homo sapiens
attcacctgaggcacccgaagaagagaccatccatatttccagggtgagagtatggacaatttcaactggggagtgcgcagacgttctctggacagcctg

SEQ ID NO: 841165 - DNA, 100 bp, Homo sapiens
cagcttgtggctccttgagggaggagattcagcccggcgatattgtcattattgatcagttcattgacaggatttttagactctgaggagcagttggagc

SEQ ID NO: 841166 - DNA, 100 bp, Homo sapiens
gccgggagaaattgctgaagaactcgcaagctcctacgaaagaaagctcatcgaggttatttcacagttgaggattttgggcagatccataacagctggt

SEQ ID NO: 841167 - DNA, 100 bp, Homo sapiens
gcaccacattgccaatgccaacctcatgacacctgaaagaccccgccgtggcatcccagggcttcctgatggccgcttccatctgccgccccgaatccat

SEQ ID NO: 841168 - DNA, 98 bp, Homo sapiens
gaagtatttgatttcagaggaatgagattagattggtttaggttacaggagcatttcctccctctgctatttatacacggaaagacttactacagcga

SEQ ID NO: 841169 - DNA, 100 bp, Homo sapiens
agacccgctgtctgcgaaggcctaaaggcgcctgtgtctggcagagctggtgtgagacgagacaatcctgccccgccgccgggataatcaagagttttgg

SEQ ID NO: 841170 - DNA, 100 bp, Homo sapiens
tggtggaagtggttggaaatggcacctatggacaagtctataagaatggtgaggttctggagaattgatgaggattatccagtgcaagttgcacctttga

SEQ ID NO: 841171 - DNA, 99 bp, Homo sapiens
tgaaccggaactcaaaacagacccatctttggatcttcattcattaagcagtgcagaaacacagattgctgctaaaattgattcaattcctcacttgaa

SEQ ID NO: 841172 - DNA, 100 bp, Homo sapiens
gaaggaatataatgcattacatcaaagacacactgaggtacaccaggggttggaaaaaccacactaggcaaagaacttgcgtcaaaatcaggactgaaat

SEQ ID NO: 841173 - DNA, 100 bp, Homo sapiens
aggccgtgaatgagaaaaatggagaaaacaagacaagcccattcattcatttgagcatagcaagctgtggaaaatctctgttctcacaaagtctccccaa

SEQ ID NO: 841174 - DNA, 100 bp, Homo sapiens
tgatgtggatgatgccaaagttttattagagataattgacgaccttgccaacctagtggagaacacagatgaaaaacttcgcaatgaaaccaggcgggta

SEQ ID NO: 841175 - DNA, 100 bp, Homo sapiens
acacccaggaaaagactcaggacggacaagcacagtcttcggaaggtacttcaaaggctcatcaagtcccgaggaaagtctcagtccaaacacctcaatg

SEQ ID NO: 841176 - DNA, 100 bp, Homo sapiens
ctgaatagagttccagttggattttatcagaaagtatggaaagttttgcagaaggcatatactagtgtctcaaaggcttcacttggccttgcagatcaca

SEQ ID NO: 841177 - DNA, 98 bp, Homo sapiens
ttgaagaaacctcgcggaaagaaatgcttctttgtgaaattttttggaacagaagatcagtggattgctcaggtaatgacctggagcagttacacatc

SEQ ID NO: 841178 - DNA, 100 bp, Homo sapiens
tctgtacagcctgcagaactagtatgctcaggtaatcaaaatgttgggaaatggacgattggaagcattgtgttttgatggtgtaaagaggttatgccat

SEQ ID NO: 841179 - DNA, 98 bp, Homo sapiens
cacaggtcactcaaataggcagtgaatggtagtgtctagaaagggtatgtcccttcaagagagaggtgccaatgtccaaccggcctaataacaatcca

SEQ ID NO: 841180 - DNA, 104 bp, Homo sapiens
tgcatggtgttccacatcattgacttactgctttgtgaggtggaaatggatattgttgaaaaactggtgaaaatgataccttgtgagcatgaagacctgctgaa

SEQ ID NO: 841181 - DNA, 100 bp, Homo sapiens
ggagagctctgcgctgttctggacagctgcgacggcgcgctgggctggcgcggcctggctggagaaccggaaactgtgtgcctcctcgtgtgatgcagtg

SEQ ID NO: 841182 - DNA, 98 bp, Homo sapiens
ggattccgtatttcatgtcagaagaaacatctgccaaagaaggtctgctgctttggtgtcagaggaaaactgctccttatagaaatgtgaacattcag

SEQ ID NO: 841183 - DNA, 98 bp, Homo sapiens
tgatattcacgaaccacttcaactcctcatattcccagaagggactgatctcacagccaaagatgtaacttatatatgtccattcactggcgctgtac

SEQ ID NO: 841184 - DNA, 100 bp, Homo sapiens
ggagggcgaggaggacgagacggcggcggagtcggaggaggagccggactccagggaccagttactctccacaagaaaattcacacaaccacagtgctct

SEQ ID NO: 841185 - DNA, 99 bp, Homo sapiens
agagacaaaaatatcttcatgaggaagagaagatcgtcaagaagttgtggaagcggctcagccccagggcagcacatcagagacaccatggaacacagc

SEQ ID NO: 841186 - DNA, 98 bp, Homo sapiens
aacagtgcattagacataaaagttttgactcagccttcccagtcagctgtgagaggattgattatgtcaagtggccaggcatggaaggagcaaagaag

SEQ ID NO: 841187 - DNA, 98 bp, Homo sapiens
aaaatggagatattgttcgctttcacaggctgaaggttccccctactgagacagttcctcaggtcaaaaaagaaaaacatagcacacaagctaaaaat

SEQ ID NO: 841188 - DNA, 100 bp, Homo sapiens
ggaatctttagaatctcaaacaagacaacttgagctgaaagcgaaaaactatgctgaccagagaatgggtaccacagaccatgtcatcgtcctggcgtcc

SEQ ID NO: 841189 - DNA, 100 bp, Homo sapiens
aaagcacaacgatgatgaacagtatgcttgggagtcttctgctggaggttccttcactgtgcgtgctgaccatgatcactggcgatacatctacccactg

SEQ ID NO: 841190 - DNA, 100 bp, Homo sapiens
cctcctgatagcacacagaaaggcccggtacaagcagagccttgacccaactgtggatgaagtcaagaagctctgcacgtccttacgtcgcaacgccaag

SEQ ID NO: 841191 - DNA, 118 bp, Homo sapiens
aaaaagcagaaagtagatgaagatgagattcagaagatgcagcctactgaacttgacgcactggtatttggccatctatacaccattcttaccacacaattgacaaatgatgaacttt

SEQ ID NO: 841192 - DNA, 100 bp, Homo sapiens
ctttccagagggcagtgtagagacgaagggaacgtcatcgtttggaaagcgtcgcaataagacgcacacgttgtgccgccgctgtggctctaaggcctac

SEQ ID NO: 841193 - DNA, 99 bp, Homo sapiens
tggcacttcattggccacctacagaaacaaaatgtcaacaaattgatggatcccgtcgtcgcctcactggctcaggacatcttcaaggagctgtcccag

SEQ ID NO: 841194 - DNA, 98 bp, Homo sapiens
acattgccagtgtccgggaggccctgggggtggagtctcactactcaagtactatactggcaattgctggagaagattttgcaattgttgcttctgat

SEQ ID NO: 841195 - DNA, 100 bp, Homo sapiens
acgtcaccgccatggcaggcatcaaaggcccgatgagagaaagggaaagttaaggatgctggagcagaacaatggatttctctttctctttcatgcaagg

SEQ ID NO: 841196 - DNA, 98 bp, Homo sapiens
agatgctggggaatacacagctgtggtcgggcaattggaatgcaaagcaaaactgtttgtggagaatgagttatgctttaaaccatacaaacagaaaa

SEQ ID NO: 841197 - DNA, 100 bp, Homo sapiens
ttccagcccgtggtccttctccatattcgagttggtagcaagaccttccagtataaactatatggtggctcctgtaactggtaatgatgttggaattcgt

SEQ ID NO: 841198 - DNA, 99 bp, Homo sapiens
gccatcgttgctgccttcttcgtcaaggtatcaacttgaactgaaggatgactacatcattagaactaatcgactgattgaagatgaaaggaagaataa

SEQ ID NO: 841199 - DNA, 98 bp, Homo sapiens
tcacaattgcagcagatgaagatccattggtaaattgatcaggatttttggcctaccctccaaagaaaagaacatcagctttccaaaccagatgtggt

SEQ ID NO: 841200 - DNA, 100 bp, Homo sapiens
ccgccagcatggatgacatctacaaggctgcggtgccctgccagtcagcgtcgtcagcctctgccctgggcggtgtcaaagtggagaggcaggtctttgg

SEQ ID NO: 841201 - DNA, 100 bp, Homo sapiens
aaggaagaactttatccctcttggtctgtggaggtagttgctgagtggcactgggtaaaaaattaaacaaccaccatgtcgagcaaaaaggcaaagacca

SEQ ID NO: 841202 - DNA, 100 bp, Homo sapiens
gcagttggcacacatggttaaggaacaggaggaaaccattcagaggctgttataatggattagtttatgttctgaaaagtaatagtggagaaaaatactg

SEQ ID NO: 841203 - DNA, 98 bp, Homo sapiens
cttgagacatttaattctcgttggagggaactacatgaagaggtcggatcatgctaaaaggagataatattactctgctacaaagtgtctccaactag

SEQ ID NO: 841204 - DNA, 98 bp, Homo sapiens
aatagcaatcacagagactcggagagcatcactggactatgagagtaaattgcaggccttgcagaagcaggttgaaacccgatctctggctgcagaaa

SEQ ID NO: 841205 - DNA, 100 bp, Homo sapiens
ttcttactgcgcaccctctctgaagcacaaaaagttaatcactttcccagaagttgattcaagtcagttgagacgccagttgtgtggaggaagtcaggcc

SEQ ID NO: 841206 - DNA, 98 bp, Homo sapiens
aaaaatgtgcatactcacagagttagagagagggatggtggtttcagccatgccacagagctccggcagtcatgggcccgctatagcagcagttcata

SEQ ID NO: 841207 - DNA, 100 bp, Homo sapiens
acaatgttaatcgggcaacacaaagcgcaaaagaactggatgtgaagattaaaaatgtcatccggaatgtgcacaaaaataagacctactcatctgtgag

SEQ ID NO: 841208 - DNA, 99 bp, Homo sapiens
cataatactcaccctactattgaggactttgaagaatatcctgaacatagaacgaactttttcttactacttcaggctgtcaattctcattgtttccca

SEQ ID NO: 841209 - DNA, 100 bp, Homo sapiens
actcagttgttctgctgctttcagacccccgtccacagttttatgtgtgagcaagatggaggctgacctgtctggctttaacatcgatgccccccgttgg

SEQ ID NO: 841210 - DNA, 99 bp, Homo sapiens
tggatgaaaactacaaatcccaggagcacttcacgagatcatgatgcagccgtccttttggatttctttttaataatgtgtgacccttcacctttgatc

SEQ ID NO: 841211 - DNA, 100 bp, Homo sapiens
actgactcctacttcctctgtatagagcaactgttgaactcagctgcctgtagaacaagttgaaatcatcgcagaaggataaagttcgtcagtttatgat

SEQ ID NO: 841212 - DNA, 98 bp, Homo sapiens
tcattcttctctacagaagagcttctcctcatcaactggggatgattacagttcttcctaaaaaagccttacgaaggatgaatccaaaaggccaaagt

SEQ ID NO: 841213 - DNA, 100 bp, Homo sapiens
caagatgatgacttcatcaggcagatactgtgagggctacaagcttctaaataagcacaaaggaaatctactttcttcaatgtgttaaccaatagtcagg

SEQ ID NO: 841214 - DNA, 98 bp, Homo sapiens
gtggtgaagaaagtgagcgaggagtcagaaactcagccactggttgccttggtaggcaataaaagtccaaactgctttgcagaaaccgcggtgatccc

SEQ ID NO: 841215 - DNA, 100 bp, Homo sapiens
cgccccctccggcgtgttcatgcccccggggaccaagaatcgccttcagccctgtctggtgcatccttggcagaaagtgaggaggaaaacacccccattg

SEQ ID NO: 841216 - DNA, 98 bp, Homo sapiens
cgagaccgagtcagaacccgagtgctgcttggcggcgagaaaatgcttggacagaagagatgagtactatttccactaaggcctagaattgcctactg

SEQ ID NO: 841217 - DNA, 100 bp, Homo sapiens
gaatacagagagaaaattgagacggagctaagagatatctgcaatgatgtactgggaatcttttaactgagccagtcggctacttggaatcttgtttctc

SEQ ID NO: 841218 - DNA, 98 bp, Homo sapiens
cttggtctcactgagttctagaatgaagctgcagaccctcgcagtgagtgttacagctcttaaggtccagccctgctgggagttttctgccacacaga

SEQ ID NO: 841219 - DNA, 100 bp, Homo sapiens
caaggaccccaacaacagcctcaccctctgggtcatcgaccaagttgcaagatggtcgtctctccttcttcctgaataagacaacgtaccactgttataa

SEQ ID NO: 841220 - DNA, 100 bp, Homo sapiens
cgctacgagtcccagcggagcgccgcagcacagcgccatggacaaactggaattacagtttgaaaggctgacccgagagctggaggctgaacggcagatc

SEQ ID NO: 841221 - DNA, 100 bp, Homo sapiens
agacatggccaacatcgcggtgcagcgaatcaagcgggagttcaaggaggtgctgaagagcgaggagctaatgggaatgacagcaagaaatttaaacgag

SEQ ID NO: 841222 - DNA, 129 bp, Homo sapiens
cagtagcaaagtctatgattatgtaagaaagattcttaagctgcctcattcttccatcctcagaaccagctgcagctactggaggttctgttctcaatgttgctgccctgttggcatcaggaacacaag

SEQ ID NO: 841223 - DNA, 100 bp, Homo sapiens
gatgcccctgataaaggatacgttggatgtaaaagatgattatgtatttgaatgtgaagctggtactcagtatcagaaaacaaagctgaccatcttgcag

SEQ ID NO: 841224 - DNA, 98 bp, Homo sapiens
agctgattcagcgcatcggcagcggcacctacggcgacgtctacaaggcaggatggggaagcagaatagcaaactggcccctgaagtgatggaggacc

SEQ ID NO: 841225 - DNA, 100 bp, Homo sapiens
ccgagaaggtggacgtgctggtgtctgagtggatggggacctgcctgctggtcaaaatgcagatcttcgtgaaaacccttaccggcaagaccatcaccct

SEQ ID NO: 841226 - DNA, 100 bp, Homo sapiens
gaattcagaagagaagctggaacagagcaccatagtgaaagagcggggcactgtgtacttcaagatggtcagtaggacagaaggtaacattgatgactcg

SEQ ID NO: 841227 - DNA, 100 bp, Homo sapiens
agaatcagttgttggagaaaattaaagatggaacagattaaaagggccaataaactgtttaccaatgattgtatatttctgaagaaaactttgaacatcc

SEQ ID NO: 841228 - DNA, 100 bp, Homo sapiens
gtgtcatgagcaggaaggaaccgctggaaacactgaagagatgactaagaatggcacagtagaatcagaagaagccagcactcttacactggatgacatt

SEQ ID NO: 841229 - DNA, 100 bp, Homo sapiens
cggcagaagcttcaccacaaaagcgaaatgggcacaccacagtgccatcagctcacacttgcaaacctgtggctgttccgttgtagtaggtagcagtgca

SEQ ID NO: 841230 - DNA, 99 bp, Homo sapiens
gctctactgtgacttcagagacactgccaagcagccttagccctagtgtagagactgggacagggagaaattacttgaagcttggatgtccaacccgga

SEQ ID NO: 841231 - DNA, 98 bp, Homo sapiens
aactgaagtttgccataaaagttgatggagattacctttggccacagcagaacgggatctctccgcgcatgtttaaggcctttgtaagcaagagccac

SEQ ID NO: 841232 - DNA, 100 bp, Homo sapiens
caaagctacttatggaaatttcatgcgacaaagcaggtcctgcggaggtccctttgagagctggttcctgttcattcacttcggaggatgggctgagatg

SEQ ID NO: 841233 - DNA, 99 bp, Homo sapiens
tctggtcggatggggcaggatggctgcgttgacacgtcttatttaatccacatcataggactcccaaattcgtcagagcacagcttatagcttacatca

SEQ ID NO: 841234 - DNA, 98 bp, Homo sapiens
cgacaccggcctgacctcattgactactcaaagcttaacaagattatgtttgagaccttcaacaccccggccatgtacgtggccatccaggccgtgct

SEQ ID NO: 841235 - DNA, 100 bp, Homo sapiens
ttagcacgatgagctcaatcggcactggggccaagcagatagaacttcagttcactattggcgaagccattaccagtgctgcaataggaactagttctgt

SEQ ID NO: 841236 - DNA, 100 bp, Homo sapiens
ggggaagcatggactctttagccagcttagttctctgtggagtcagcttgctcctttctggtggacttaaatgaagaagaaactatattgatcatcaggc

SEQ ID NO: 841237 - DNA, 100 bp, Homo sapiens
gggcagcagcggcgccgtgctcgctccaggggtcttgctcctcagaacaaaccagaattgcagaaggtgatggaaaaaagaaaacgagaccaagtaataa

SEQ ID NO: 841238 - DNA, 98 bp, Homo sapiens
cgcactgagtcaacagactgagcgcgtccaggcctgacagctctgcggctcgggccctgaggttatgaagacagtatggagtttccagaccatagtag

SEQ ID NO: 841239 - DNA, 98 bp, Homo sapiens
aatcctgcggcagaagccgagttcaacatcctcctggccaccgactcctacaaggtggcacaagatctctgtaaagtagcaggcatagcaaaagttct

SEQ ID NO: 841240 - DNA, 98 bp, Homo sapiens
actgaagccacccaggtgtaccccaagctgtacttgtcacctcgaattgagcagctgcagttcatggagctcgtttcaaagggcaagatctaaaactg

SEQ ID NO: 841241 - DNA, 100 bp, Homo sapiens
ggaaaatgacggttataagaccatttatttctttggagacaaaactatgccaaaagcgtggatacccatcaacgaagttttgatattggaattcagattg

SEQ ID NO: 841242 - DNA, 100 bp, Homo sapiens
acagcaacctagtcagtctgcatttggctctggaacaactcctaattctaacatatctgaagagatggattaagaatgctttggattaaggattgtggag

SEQ ID NO: 841243 - DNA, 100 bp, Homo sapiens
cctgcatttccttggccccaacgcaggcgaagttactcaaggatttgctctggggatcaaaagttcagttctgcaagcaagtatgctgctctctctgttg

SEQ ID NO: 841244 - DNA, 100 bp, Homo sapiens
actttatggataccattctcctactaatagtgtgttttcacagtcctgtgtttggtatggagagtgtggaattgcatatggggacaagaggtacaattgc

SEQ ID NO: 841245 - DNA, 100 bp, Homo sapiens
cttgtcctctgctacccatgatgaggcggtgcaggtcctcaagaagacaggcaaggaggtggtgctggagggaatagccaggccagaagaaggaaggcct

SEQ ID NO: 841246 - DNA, 100 bp, Homo sapiens
tgtgaagctgggaatcatttcatcaatgtaatgttgtctcatcccaatcacacagcctttctgagaaaagtctacagcattctttctctgcaggttctct

SEQ ID NO: 841247 - DNA, 100 bp, Homo sapiens
agcaacaaaaagaaagctgcgttaatgtttgcaaatgcagaggaagaatttttctatgagggcttccgttacaagatgaggtctgtgtatgctcacttcc

SEQ ID NO: 841248 - DNA, 100 bp, Homo sapiens
tgacaaaggattttaggagagtggaaaatgcttatcacatggaagcagagctggaaaggcagctcatcatgcagagtgaaatgagggaaagacaaatggc

SEQ ID NO: 841249 - DNA, 100 bp, Homo sapiens
agcgagactccgtgggcgtaggaccctccgagccagtgttccttgcctgtatctccccttggttcaatagctaccagatttttggaagaggaggaactga

SEQ ID NO: 841250 - DNA, 100 bp, Homo sapiens
ctgtattctttacctgcttcccaatcccactgatgaggatcagcccatggttaaagatcgaggtccggaagccactaggagattttttaattggttttat

SEQ ID NO: 841251 - DNA, 100 bp, Homo sapiens
tcgatcagggcatacatctttcttcgacaaaggttgagccccatatgggggttggcaggcagcagagaggcccctttcaaggtgttcgggtaaagaactc

SEQ ID NO: 841252 - DNA, 98 bp, Homo sapiens
gcgatcccgggtcatctccagatgctagggttatggcaccctggaggggtattatgtggatgatgccttgcagggccagggagtttacacttacgaag

SEQ ID NO: 841253 - DNA, 100 bp, Homo sapiens
cacccgactctcatagaaaacgagagtatatgcgatgagtttggtgacttcatggtcatgacgattttcttcaatgtgagcaggcggtttggctatgttg

SEQ ID NO: 841254 - DNA, 100 bp, Homo sapiens
ggaggaggaagaagaggaagaggattatgaagatgacaaggatgatgatattagtgatactttctctgaaccagcacctgtggaatcctctcaagaggaa

SEQ ID NO: 841255 - DNA, 101 bp, Homo sapiens
ccccagcttcctccaaccggtcaccgtgcagctgcctctgccctctggcatcacaggcctacgtgagtgaaaaacatgaaggcaataagatcattgctttt

SEQ ID NO: 841256 - DNA, 100 bp, Homo sapiens
tcggcgctgcgatccgcgcatataacgtgcatttgattatgacacagaaaatatgaactctgaagatatttatagctctcttagaggtgtcactgaagca

SEQ ID NO: 841257 - DNA, 98 bp, Homo sapiens
aatttatactcactgtgtaagaagatagaacagtgtgactacccacctcttccttcagatcactattcagaagaaataaccatgatgactacacagac

SEQ ID NO: 841258 - DNA, 99 bp, Homo sapiens
agaagacagagggttttcttttgaggttgcaaaagcttctcatttcagagagatgccaggatcctaagtgcctgccaaacttaccaattctaaggaata

SEQ ID NO: 841259 - DNA, 100 bp, Homo sapiens
ctcaatgtacttaaatcagaacaggttgcctgtgatttgcttcggaggattattcgtatcttgaatctcagtaagagactccaaggacaactgcaagggg

SEQ ID NO: 841260 - DNA, 100 bp, Homo sapiens
aagtgggaaacctgtagggtatggtccagctgtgccgcaccgaggcgagcaggagcagggaacaggtaagaaggtgttttaccctgtggtgttcagtctt

SEQ ID NO: 841261 - DNA, 98 bp, Homo sapiens
aaatgagtccaggtggtcccagtgctattatgcctacttgactgcagacttcgacccccaccacttctggcagtggagcagcttctcggactacgtgc

SEQ ID NO: 841262 - DNA, 100 bp, Homo sapiens
taacccagaagtagctgaatgtgttactccattgctgaggagtggcactaacataaatagtgactctccagttggaaaaaagctgaccattcattctgag

SEQ ID NO: 841263 - DNA, 100 bp, Homo sapiens
gcacttaaatactcatctactaggcaagcatggagttggcaccccaaaagaaaggtttaccgacaagactgtgaaactttcgggatggtggtgaaaatgc

SEQ ID NO: 841264 - DNA, 100 bp, Homo sapiens
gattgggattgggccagtcttaaatatctacccatggaataaagagctgtatttgatcagaaaaggcaacagatggctccctgcaaagtgaggattggac

SEQ ID NO: 841265 - DNA, 99 bp, Homo sapiens
ggaggcttcgcccggctttgcagcggggacttcggcggcggcgcctcaggcacctcggcccggaatcatattctaagaactcagccactcaggtatcca

SEQ ID NO: 841266 - DNA, 100 bp, Homo sapiens
agcccagcaatctgtgtttcgcaaaccctccaggataagttctgaacgtcgaaaagaaaagtctcgagatgcagccagatctcggcgaagtaaagaatct

SEQ ID NO: 841267 - DNA, 100 bp, Homo sapiens
ctcggagctttcgtcacctgtccttctacattttcgatagagacgttttccggagggattccatcatagattgtaaaccatggctgtgtggatacaagct

SEQ ID NO: 841268 - DNA, 100 bp, Homo sapiens
gtctgccgcaagttcatgcaagatgatgccggctccaggagcagcagtggaggtcgggaacgcctcattgtggagcccccgctccctcaggagaaggcag

SEQ ID NO: 841269 - DNA, 98 bp, Homo sapiens
gcagaagtacccccaccacgcctctgcaatcatgggtcaccaagagaggctgagagaccagttgatgcggatgaaattaaaaggctaggaaagagatt

SEQ ID NO: 841270 - DNA, 98 bp, Homo sapiens
gcggccctgggcgggcgccgcgagccgggcagaagaaatccttagacaagagctggagaaaaaagaaacgcctagtttatactgcttgcttggagatg

SEQ ID NO: 841271 - DNA, 100 bp, Homo sapiens
gctgcatcacagaagctggaagttctgatgttccactgaaatcacaatggaaagtcttgacttgactgaattgccaagaagatgcttttagaagaaatta

SEQ ID NO: 841272 - DNA, 99 bp, Homo sapiens
aggaagatactgcagagatattctactccatctcattcattgtacagtatccggctgctttgatgaacctgggagccattctgcacctcaatggcagac

SEQ ID NO: 841273 - DNA, 98 bp, Homo sapiens
gctttttcggagccggcggagcaggttactcgcacgcggatttggctggcgtcccgcgtaattctgttccacaggatatctgctgtatggcagctgat

SEQ ID NO: 841274 - DNA, 98 bp, Homo sapiens
taaagttggtcagtctcgcactggtaacggcacagccaacaagatgaacggagctttggatcactcagaccaaccagacccagatgccattaagatgt

SEQ ID NO: 841275 - DNA, 100 bp, Homo sapiens
tcaagaggaacggcacatgacccaggcctatgccaatcagcatttcacattcctcatggttggttcaaagaaaaagcttgtggtgaaggggggcaaaaaa

SEQ ID NO: 841276 - DNA, 100 bp, Homo sapiens
cgacgtagctttaggcagcttacaactcacaagtgcatgggagattcctgcatcttttgcgctctcaagcctgtgcctactacactggcacaagtggata

SEQ ID NO: 841277 - DNA, 100 bp, Homo sapiens
tctggatgagcagctcaagcagcttggtaaaatgcggctgacaattccgtgtcgggcccttacatgttctcatctacaatgttttgacgcaactctttac

SEQ ID NO: 841278 - DNA, 100 bp, Homo sapiens
gatttccagccttccaagctctactgtgacttcagagacactgccaagcagccttagccctagtgtagaggctgaagccgacgtagcttctctgaacaga

SEQ ID NO: 841279 - DNA, 98 bp, Homo sapiens
gcttcagaggcagaaaggcagaagtggaagcaacttctatttagtgatcatgctcaccatgccttctcctatgcctgagtacctgaatgtgcactaca

SEQ ID NO: 841280 - DNA, 98 bp, Homo sapiens
tcaacctcttattggaagattatccaaaaggtacccgcaagatggagtacaagggcagcagctggcatgagacctgcttcatctgccaccgctgccag

SEQ ID NO: 841281 - DNA, 99 bp, Homo sapiens
aagggggagatatcatgctctggaattttggcatcaaggacaaacccaccttcatcaaaggggccaggacgactggaatgggaccaggccgtcgctgaa

SEQ ID NO: 841282 - DNA, 51 bp, Homo sapiens
ccagtgagaaaaagaaatttttgaacattcctgatgtagatgaagaaggct

SEQ ID NO: 841283 - DNA, 101 bp, Homo sapiens
tggaaatcctgctacaacctcaccaaccccagtacaagccagctgccatgttgtgagcacataccacatagctccatggagatgcccatgtgactgtgatg

SEQ ID NO: 841284 - DNA, 100 bp, Homo sapiens
agcaggaaatatgtgagcaactcaacatcaatcacatgatccaaaggatcttccttattactctggacaacacttcttggacacttaatgattgttggca

SEQ ID NO: 841285 - DNA, 98 bp, Homo sapiens
cattggaccctcctcccaactgtagagcccagcattacatcaacatgcccgtgcagttcaaaccgaagtccgcaggcaaatttgaagctttgcttgtc

SEQ ID NO: 841286 - DNA, 100 bp, Homo sapiens
accaccgaggctggagggggagaacacccagattcttattgccaagtcccctctggctcccttcacctcatttgtctacaccatcaaggaggaaggcctg

SEQ ID NO: 841287 - DNA, 100 bp, Homo sapiens
gacttttaactttcattgtcttttccgcccgcttcgatcgcctcgcgccggctgctctttccgggatcctaagcacttcaagtcagagaagacaggacgg

SEQ ID NO: 841288 - DNA, 99 bp, Homo sapiens
cctgtccagccagcatggaaccaaagcggatcagagagggctaccttgtgaagaagttgatgcggatgaaattaaaaggctaggaaagagatttaagaa

SEQ ID NO: 841289 - DNA, 100 bp, Homo sapiens
ctacttggattaaaaaccaagatgacagcttgactgaaacagacactctgatacatcgagatatttccaagcagaaggaatgaagttcgaacacatgtcg

SEQ ID NO: 841290 - DNA, 100 bp, Homo sapiens
catgaggaagaagcagctgaagacggaggcagctccacactgtgaactaacaatggctgccatccggaagaaactggtgattgttggtgatggagcctgt

SEQ ID NO: 841291 - DNA, 100 bp, Homo sapiens
agcaagaaaaagagcctttgactgtgaagagacatgagatggtgaatgaacccccaggtgatttcctaaaaactttggaagacccagatttgaatgtgag

SEQ ID NO: 841292 - DNA, 100 bp, Homo sapiens
gaaaaggagaagagaggagcagtattgacaacaacacaatatggggatgcttcctttggaaattgcacttacaatctcaccattctcgactgtttgcagg

SEQ ID NO: 841293 - DNA, 98 bp, Homo sapiens
ctctggaatgtcacccagacaagcatcctgaaaaccccaaagctggtctgatgttgtggtcctctgtttttcgattgctaatcccaattccctaaatc

SEQ ID NO: 841294 - DNA, 100 bp, Homo sapiens
tcctggggaggctgccgtggaggccatggagatccctgccccggagcccgagaagacagtttcattcattggctcccatgtactatcgaggctcagctgc

SEQ ID NO: 841295 - DNA, 100 bp, Homo sapiens
ccctgacagtgaagctgatagcatagacagtgatcaagaagatcccctaaagaacgtccttgtgaagacctttatctgagccactgtacttcgttatcac

SEQ ID NO: 841296 - DNA, 100 bp, Homo sapiens
atcgaatcaccgttccacttgtcagtgaagttcaaatagctcagttgcggtttcctgtaccaaagcttcttggacacttaatgattgttggcaagaaatg

SEQ ID NO: 841297 - DNA, 98 bp, Homo sapiens
aggaacttcggtacacaggcctttagtgatgtggtggtaagatgtatgtcacctggaacctctatgactccaagtagtgggtcctttcctagtgcata

SEQ ID NO: 841298 - DNA, 101 bp, Homo sapiens
aggcatgccaggtcctaggggaagccctggccctcagggtgtcaagggtgaaagtggtcccagcggccctgctggtcccactggagctcgtggtgcccccg

SEQ ID NO: 841299 - DNA, 98 bp, Homo sapiens
acacttttcaaaatgctttggtgggaagaagtagaggactgttgtggaggcctgaattttgatctatgttctacctacatccagctggctgaaagtac

SEQ ID NO: 841300 - DNA, 99 bp, Homo sapiens
tgcccttctctctcgagtgacagcatggcgtgacatgagggctctccagccatggccttgcagccctcttggatccctttgttgatctagcaagtggcc

SEQ ID NO: 841301 - DNA, 60 bp, Homo sapiens
gcagaccgtttggaacaagccaacagtggctgtggacatactcaagacagagcggctggg

SEQ ID NO: 841302 - DNA, 100 bp, Homo sapiens
gcttttcttcccctcggatatagaatagacattcccaagaatggcaagttaaacatacagtcgcctctgacaagccagggacgtccagatcggtgacatc

SEQ ID NO: 841303 - DNA, 100 bp, Homo sapiens
agttcaattaaggatcatccatggcacattcaatcctgctgtgctctcacaggagaagggtattgcagattccgtttcttctatatttgtgtgacatgtt

SEQ ID NO: 841304 - DNA, 100 bp, Homo sapiens
acctcactcaggaataccagagggagtcgatgcttattgatagtgattatagagcacaaatccatcatctgcccaggctataatgcggtgctgcatattc

SEQ ID NO: 841305 - DNA, 100 bp, Homo sapiens
atcacgcacacagaaccctggccaggatcatgaagggcgattgaaaagggaggtggggaagacagggctccagctaccacaggacgggctctgggtatag

SEQ ID NO: 841306 - DNA, 101 bp, Homo sapiens
catgattttaatactggtgaacttggccatgaccatctggattctcaaagtcatgaacttcacaattggtcctaacctgattataaaacaaccagatgagt

SEQ ID NO: 841307 - DNA, 108 bp, Homo sapiens
ctataaggatgaacagggcagacttctctgtgagctcttcattagggcaccaaagcgaagaacagctttgctgagccatcaaggtctaatggaagcatggttcggcat

SEQ ID NO: 841308 - DNA, 100 bp, Homo sapiens
gctggaaactgttctgagcaggaagggcagcagggccacactgcgttactgagcatgttctgaccgggccgtcttgggcatcacctgccattctcctgcc

SEQ ID NO: 841309 - DNA, 100 bp, Homo sapiens
aactagctcatctgtagagactgatttgcaacccttccgggaagccatagctctgcatgcagtagaagactcagaaagtggtgtttacatgcgattcatg

SEQ ID NO: 841310 - DNA, 100 bp, Homo sapiens
tatagtagagatggaaacctcatagcagctgcctgccagaatggaagcatacagatctgggaccgaaatttgactaaatttaaaagcctgttgattcaag

SEQ ID NO: 841311 - DNA, 100 bp, Homo sapiens
gttcgtgagatttcatgaagatggcgccaggacgaaggccctactgggcaaggttcgagaacttgtcttggacaattgcaaatcaaatgatggaaaaatt

SEQ ID NO: 841312 - DNA, 99 bp, Homo sapiens
agctttgataaatgaaatcttcctaagtatagtgtaataatccgatgaccaaagagccgaaactggaagcagctgtgcggattgtcccggagtggcagg

SEQ ID NO: 841313 - DNA, 100 bp, Homo sapiens
caccggcctcacgggccgcttctcgcgggccggggccacgctcagcgccgagggcgagatcgtgcaggattggagaatccatgttgaccaaatgcaccag

SEQ ID NO: 841314 - DNA, 100 bp, Homo sapiens
aggctcttcaggaaagccttccccctgctttgcatggctcccggggcgctgactgcgtgttaacatcagccgcggcgagtcctttgcacatgttggcaac

SEQ ID NO: 841315 - DNA, 98 bp, Homo sapiens
tgcctacgtgctcacggtcaacgagcggggcaaccactgcgagtactgcttcaccaggtggattctgaccaggaattacaaggctcttgccaaaggaa

SEQ ID NO: 841316 - DNA, 100 bp, Homo sapiens
aactggtgtcgagaagtccggaagcttgtggcgctgaaaacgaacgggtgcaatatgtgacttctgtgaagcttgggtttgccatggtaggaaatgtctc

SEQ ID NO: 841317 - DNA, 100 bp, Homo sapiens
tgtgcctgcttgtggtcgtggcggtggccataggctgggtgtgcagggaccgatgcctccaacacagctatgcagatggtgccaactggctgactttttt

SEQ ID NO: 841318 - DNA, 98 bp, Homo sapiens
ctgatgaagccgccgatctggaaaggcaaatagaaattgagaaagctgatgatcatctgcagcagcccttgcaaaaccaaaaaatactgaagaggacg

SEQ ID NO: 841319 - DNA, 113 bp, Homo sapiens
cgcgaccgagtctggcagatccagtcttgctcagctctcacaggagagggcgttcaggtgctgggactctggtgcccccaaccctgggcatcctcaggctttgaggagaatac

SEQ ID NO: 841320 - DNA, 100 bp, Homo sapiens
taactttgttttccattttctctttttactttttccatacagtgttgttacagatcttataacagtcggtttaaagatcagcttgaacgggtctttttac

SEQ ID NO: 841321 - DNA, 100 bp, Homo sapiens
agaggctgcgagccctcttttccatgggggctgcagttaagtgggcagaccaacatccacctcagcaaaaacttcttcctgacgaatcgcgccagggagc

SEQ ID NO: 841322 - DNA, 100 bp, Homo sapiens
cgccgccgggacccccaggacgacgtgtacctggacatcaccgggctggtggactaggcctcaattttgtcggtgccaatgttgttgtattatttgatcc

SEQ ID NO: 841323 - DNA, 100 bp, Homo sapiens
cgaattctgcacacactgctggcatcaggagaagacgcccttgactttactcaagaaagcgaggctcatcagattcaagagatgtttccccaggttccat

SEQ ID NO: 841324 - DNA, 98 bp, Homo sapiens
atttgacttggaagcaatgtttgaacaaactcgaagaacagctgtggaaagaagttgcaaaacactgggttatcaatactctggctgaccatcatcat

SEQ ID NO: 841325 - DNA, 99 bp, Homo sapiens
ggacactttcaaatcatggaagactcaaggttagggcttgacccaaaactactggctaaaatcctaaatatgagctcaggacggtgttggtcaagtgac

SEQ ID NO: 841326 - DNA, 99 bp, Homo sapiens
gccgaggccttcaagtgcatgatgtgcgatgtgcggaagggcacctccacccgacggtcctaaaatctctacacttgccaaaaaacaacagtctttatg

SEQ ID NO: 841327 - DNA, 98 bp, Homo sapiens
gacagcagcctgagagacacaatctgacgggtgtgctgatctgcaaaccctggacacaatgcagccaattgagaggaaaagacagggctatattcatg

SEQ ID NO: 841328 - DNA, 122 bp, Homo sapiens
cattacctagccactcctcgaatgcaccactttcccagaaactcctcctccacacagatgggagacatggtgaattatgatgaaatcaagaggttcatcagacaagagatcattaaaatgtt

SEQ ID NO: 841329 - DNA, 100 bp, Homo sapiens
ggcctggcgcctctgcacctctgccgcacggccgcctcgctcgggtttatcatttaaaagtgcctgtgtgaagtcacttttgctggaaaactgcagcttg

SEQ ID NO: 841330 - DNA, 99 bp, Homo sapiens
aagctgtacaatctgagggacctgaatcgctgcaccccagaggcattttgaaagcgaagcagaagccgtagaatcagcggcgagcctgttgaaagaacc

SEQ ID NO: 841331 - DNA, 50 bp, Homo sapiens
tggagctacaacttctgaaggatgtgtcttgctgaatcagggctctctta

SEQ ID NO: 841332 - DNA, 100 bp, Homo sapiens
caaactcctcagacccttctgctcccggccgccgctttccgccggggcgagacccccagatggcccactgcgtgaccttggttcagctgtccatttcctg

SEQ ID NO: 841333 - DNA, 98 bp, Homo sapiens
aggggagacctcatggtacatgcactgctctgagccacagagatagtgtgtgtaccatatcagtggcgtgtaactatgctcatcattgttcttgtcaa

SEQ ID NO: 841334 - DNA, 100 bp, Homo sapiens
ttcaaggaggccttccagctgtttgaccgaacaggttgaagaagcctcagcggaggcgatacggcctcctcgccaacactgaggaccccacggagatggc

SEQ ID NO: 841335 - DNA, 99 bp, Homo sapiens
gaggaggttcgaagctgagtatgtgacagggcccgatgatgcacaacaaaaaatagaacctcatcacacagcagtgcttggagaaggtgacagtgtcca

SEQ ID NO: 841336 - DNA, 98 bp, Homo sapiens
taccactggcaataaagtttttggtgccctgaagggagctgtggatggaggcttgtctatccctcacaggaagacttaaaggcagacgaaccatcaag

SEQ ID NO: 841337 - DNA, 98 bp, Homo sapiens
aaaattggacatgcagaacagccagactgctgtcagcctcagagaacttgaggaagagaacacgagcttgaagccccagcatgagaccagatgtaagc

SEQ ID NO: 841338 - DNA, 100 bp, Homo sapiens
gcacgtaaagtcagtgacatgcccatgcgagtacctgaggaaggtgtccatcctggtcagaagatgaaactctttgtgcccgcaatgttaacaatgaagt

SEQ ID NO: 841339 - DNA, 98 bp, Homo sapiens
atgtaaaatcaacagcatttaccttccggtcttccaagctcttggagtttgacaaggagttgtctgtctttaaggacagactgtatgaactggacatc

SEQ ID NO: 841340 - DNA, 100 bp, Homo sapiens
ctcaggatgtgtcaactgtctggagtggaatgagaaaggagagcgacattgactacagcaccgtgctcctcggcatgctggtgacgcaggacgtgcagct

SEQ ID NO: 841341 - DNA, 100 bp, Homo sapiens
gatgtgaaaaataccacgacaaaaccaccctagattcttacagaagcagagattgatgctcaccttgttgctctagcagagagagactaaacattgtcgt

SEQ ID NO: 841342 - DNA, 100 bp, Homo sapiens
aaaaacaatgtgagatgtctccagcatttttacggacccaatcatgagcactgctttaataggcaagatgagaagatgaagtgaatttatggattctggt

SEQ ID NO: 841343 - DNA, 100 bp, Homo sapiens
gttccacaccaagtgtgttgacaagtggttgaagagctgccatcagtcatgctcttaaacggggactgcccagagagcctgaagaaggaggcggcggcgg

SEQ ID NO: 841344 - DNA, 100 bp, Homo sapiens
gaacaccaaccaaattgtcgccattaagaaaggagaccagtgtaaatttgatcatgatgcagagatagaaaagaaaaaggaaatgtgtaagttttatgta

SEQ ID NO: 841345 - DNA, 98 bp, Homo sapiens
aagatatagatctcctcgcaaaaaatgccaaaacttataatgagcctggctctcaagtattcaagggtgaaggcaaatgtttgtcccaggagaaaccc

SEQ ID NO: 841346 - DNA, 100 bp, Homo sapiens
aggaagaggaagaagaggaagaggacgagccttcaggagccaccacaagatccaccaccagatcagaggctcagagaaaatatttacaccagcagctcca

SEQ ID NO: 841347 - DNA, 98 bp, Homo sapiens
agagcctgaatggatcagattatggaggaggaaacaggagggcgttagtggatcagaagtcatctgtcattaaacacagcccaacagtgaaaagagaa

SEQ ID NO: 841348 - DNA, 100 bp, Homo sapiens
cgagaagccccaacagcacggcgtggcctctcagcctcgattgtgccggctgcggaagagatatcaagaatgggcaggcgctgctggcgctggataagca

SEQ ID NO: 841349 - DNA, 100 bp, Homo sapiens
gcttagcagagagcctagcacctactgagcgctcagtaaaggttatcaatactctggctgaccatcatcatcgtgggactgactttggtggaagtccttg

SEQ ID NO: 841350 - DNA, 98 bp, Homo sapiens
tttagtattaaagcagtgccattccagaatgccatcttgaatgtaaaagaacttggaggtggcaaactgtggtcatatatcagtaaatttctaaacag

SEQ ID NO: 841351 - DNA, 98 bp, Homo sapiens
aaaaactacaatcataaagaaatccaacttaccttgtcactttggagtttaacccttctgccaatccagaggcaagcacaatattccagaggaactct

SEQ ID NO: 841352 - DNA, 100 bp, Homo sapiens
ctggactccagctatgtaacaaacaaacaactcaatatcacgatagagaaattgggccagatattcgaagcttacaacatggcagctttgtggaaattac

SEQ ID NO: 841353 - DNA, 99 bp, Homo sapiens
agcgaggcgccggcccagactccactccccagctgtgaaaggtttgtttcagtgttggaaggcgtgttgtctaagctgtcaaggtatgatgaaggcact

SEQ ID NO: 841354 - DNA, 99 bp, Homo sapiens
tatttagccggagtgagaagcaagaaggccctggacacagcaatatctctgggctttcacagagagttggaaactcaactattggaacaatgtactgtt

SEQ ID NO: 841355 - DNA, 98 bp, Homo sapiens
gtaatgtgtttgttcgtctgctgagactcggctccaaggtcacagctcgtaacactggttcttgattattacagacctctttctgaaaagcccggaat

SEQ ID NO: 841356 - DNA, 98 bp, Homo sapiens
cagactgacgcgagcagccaaggtgttggagcagctcacagggcagacccctgtgttttccaaaggtgcaggctgccccatggatgccacacgtggca

SEQ ID NO: 841357 - DNA, 98 bp, Homo sapiens
ggcagagcacgagcggatcctgcgagagatcgagagcactgacacggcctgcatcgggcccacgctcaggtatggcatttcaaatatagatacaacca

SEQ ID NO: 841358 - DNA, 111 bp, Homo sapiens
cccagagcacgtggagatggctttgctcagcaacatcctagcggcctattcctttgtctcaggtacatggccatcatacatcccctccagccccggctgtcagccacagcc

SEQ ID NO: 841359 - DNA, 100 bp, Homo sapiens
gtatgccaccaacagtgaagaggtgatggtgtttgtacatgctcgaaatgccactgtaagaacagctatgtctctaatagaaagagcaaaaaattgtggc

SEQ ID NO: 841360 - DNA, 100 bp, Homo sapiens
aggtaattgtctgccacgagtgcacattctgaaaacagttggtctcttcccatggcgatgtccatctgccaccgtggcactggtattgctttgagtgcag

SEQ ID NO: 841361 - DNA, 98 bp, Homo sapiens
cagaagcggcccctgtggctgtgtaagatctgcagtgagcaaagagaggggttccagaaactttagcagttgcagtgcagaggactttgagaagttaa

SEQ ID NO: 841362 - DNA, 100 bp, Homo sapiens
ccctggccgtgtgtttgatatgcttaaccggagatacctgtcatacttccacaggctgcactcgaggagatccacaaattctcaggaacctacacctgca

SEQ ID NO: 841363 - DNA, 100 bp, Homo sapiens
ttgcaattctgtccaactttccagagaccacttctccacatgaatattctgttttgctgcccgaagcttgatgagaactggactgatgaccaactgcttg

SEQ ID NO: 841364 - DNA, 100 bp, Homo sapiens
atcagcagttagctgatgccatagctgttatcaaaggaatgtaccaggaagatgagaatgtgcctactgctcctgatcctccaagtcaacatttacgtgg

SEQ ID NO: 841365 - DNA, 98 bp, Homo sapiens
aacccaactccatggacactgcaaatacctcacccttcaaagtaccagaatagccaggccagaagaaggaaggcctgtggtgagtgggacaggaaatg

SEQ ID NO: 841366 - DNA, 98 bp, Homo sapiens
tgaagacagggacagtggcattgctcgatcagcactattcctgatcagagaactccagttgcttcaacacacagtatcagtagtgcagccaccccaga

SEQ ID NO: 841367 - DNA, 99 bp, Homo sapiens
agatattttctgatctggatcctgatgtagtgtatttgatgctttctgaatgtgatttcaaagttgatggagtttgcactgtagcaaattgcgttggaa

SEQ ID NO: 841368 - DNA, 98 bp, Homo sapiens
cagaacagcacgtaccagaggtggaagtccaagtcaaacgcagaaggactgcctcactgagcaaccaagaatcacaaaatttgtccaggatagacata

SEQ ID NO: 841369 - DNA, 98 bp, Homo sapiens
gacgcgcagtccacgcaggagatccatgagaaggcgtttacgtgtgtgccaagtgtggctatgagctgttctccagccgctcgaagtatgcacactcg

SEQ ID NO: 841370 - DNA, 99 bp, Homo sapiens
agaattggaaataacgggagggaggacctggtccagcttcccttcctcaaataaggaaattgacacctggcgtggctaaagaattacctccaaagccat

SEQ ID NO: 841371 - DNA, 99 bp, Homo sapiens
agctgtcttgactggggtagctgaagctgttgtagctagtaaaaatgcgccccacagccagggcgaatacgacgtgtacagcactttccagagccacga

SEQ ID NO: 841372 - DNA, 100 bp, Homo sapiens
gatcctcaaagaactggtgatcgaattaggggaaaaggggcctcgtcggagagtagagtcaccaggagactaaagtccatcaaaaacatccagaaaatta

SEQ ID NO: 841373 - DNA, 124 bp, Homo sapiens
ctcaaatcagctacctggtggacaatttaaccaagaaaaattaccgagccagccagcaggaaatacagcatcaacatctgaatgaattgatgacgaagaagtggctattagggtcaaacgctgt

SEQ ID NO: 841374 - DNA, 100 bp, Homo sapiens
gaatctagtcgctgcatacctccttccctgtcctcaatcagtcggcagaaccaattgaaagaccaacagcaacagcaagtggtatcgttatgtcctgatg

SEQ ID NO: 841375 - DNA, 98 bp, Homo sapiens
ttggtggggagataaaatccattgctgctaagtactccggttcccagcttctgcaaaaggtatggcatttcaaatatagatacaaccattgaaggaac

SEQ ID NO: 841376 - DNA, 130 bp, Homo sapiens
tggagatgctgatgaagacaggcctttcctgctgagcccagcctatcttcgcagcctgctcaggttgtttttcaccattcagaacattgcctgaagcaggtccaccatgccgttagtaacgaggaacatc

SEQ ID NO: 841377 - DNA, 99 bp, Homo sapiens
aaccttcgatctcctgacgagaggagatgttaaagtaacccatcttgcaggacgacattgaagattggtcttctgttgatctaagatgattattttgta

SEQ ID NO: 841378 - DNA, 100 bp, Homo sapiens
cgtcccggccctgagcgcactctggagggattctggcatcagggaggctttcagccggagaagcgagtttcagctgaaaaagcttgtggtgaaggggggc

SEQ ID NO: 841379 - DNA, 100 bp, Homo sapiens
aagctttgataaatgaaatcttcctaagtataggaaaatcagaggctccttaaaaatatgttcaaaatcggtgatttttgaaccagattcaatatcccag

SEQ ID NO: 841380 - DNA, 98 bp, Homo sapiens
ccctgggagatttggtgggcgttatcagcatcgcttttcagatgccaacaatagccaaagctctagaggacaaaatcccagtccttggcacaaactca

SEQ ID NO: 841381 - DNA, 99 bp, Homo sapiens
tggaatttgattaactcattcaaggttacccagttggtggtcttcaagctgacagagaagctgacggaacagaaggagtggatgaagatataattgtga

SEQ ID NO: 841382 - DNA, 99 bp, Homo sapiens
cggcagctgcggatgctggaagttattgattctgcagaactgcaggcgtatccagcacttgtggtggagaaaatgttgaaagctttaaaattaaattcc

SEQ ID NO: 841383 - DNA, 100 bp, Homo sapiens
gctgcacttccagcagcaacagcccccttacccaggaatggaacaacctccacaccatccttactatcagcaccatgctccacctcctcaagctcatccc

SEQ ID NO: 841384 - DNA, 98 bp, Homo sapiens
tgatgttggtgtgttcacatttgatcatggcatggttctgactaataagaagacgaccttctttggtggcaattctatctctatgattgattacctca

SEQ ID NO: 841385 - DNA, 100 bp, Homo sapiens
gagaactggagagaactgctggaaggagactggatgatagaattgtttatttatgaaacagagcatcataatggcatagcagagttactggaaatattgg

SEQ ID NO: 841386 - DNA, 98 bp, Homo sapiens
gagctgaggaaccggaccccggcagctagtctgtagaagaggcgacaccagggcttccaaatgaacaaccgaaaggaagatatggaaatcacgtccca

SEQ ID NO: 841387 - DNA, 131 bp, Homo sapiens
catggtttcaactgtgcagaatctacaaattttgctactgtcagatggattgactatggaaaagttgccaaattgttacattacttcgttcagaaccatttcacaagtgcaagaatggctttgattggact

SEQ ID NO: 841388 - DNA, 100 bp, Homo sapiens
tgcacgcagggaaaacatccttgtaatgcgactagcaaccaaggaacaagagatgcaagagtgtactgattggtcttgatttgagcaatggtaaacctcg

SEQ ID NO: 841389 - DNA, 100 bp, Homo sapiens
tcgccgggaacccttgccgctgctgtcctgcgaccccaagcagagctcttcagtatccccatcagccagtttccgaggtgctgagaagcacagaaactcc

SEQ ID NO: 841390 - DNA, 101 bp, Homo sapiens
atttccctacgtacaaattccctgaacttcctgaaatccagcaaacttccgaagaagagaaaggatgcacgtcccaggagggaggaactactccaactttt

SEQ ID NO: 841391 - DNA, 100 bp, Homo sapiens
gaagattataaagcccttcagaaatacgaaaaggagaaatttgaagagatgattcaacaacttattgcaggagtgaccaggacactacctcctagaagta

SEQ ID NO: 841392 - DNA, 100 bp, Homo sapiens
gcgagggttgaagattgtgaagcaatagcctaagagttttgcggcctccaggtggtggatccaatttttcattaggttttgatgaaccaacagaacaacc

SEQ ID NO: 841393 - DNA, 99 bp, Homo sapiens
caggcttccagaaaaaaacaggagatcagtgagctagcagcagagaagccttcctggaaaagcaaaaaatcgtggaattgccattccagtggatttgga

SEQ ID NO: 841394 - DNA, 99 bp, Homo sapiens
gtgatggtacaggaagggaacgtggaaagcgcatacaggaccctaaacagctcctattaaggaaccaaaaaagttgatgcccaaaacatccctccccac

SEQ ID NO: 841395 - DNA, 100 bp, Homo sapiens
cagttggccacaacttcattgctgggaaaaggaaaagaaagctgttttgagagaataattcaaaggtttggaagaaaagtggtgtatgttgttataggag

SEQ ID NO: 841396 - DNA, 99 bp, Homo sapiens
cgccatcaaagaagggaaaaccagctgaggtgtccgtaaagattccagagaagcctgtgaacaaattgctctaggtcgtaaccagcctttgaaaaagga

SEQ ID NO: 841397 - DNA, 100 bp, Homo sapiens
cggagcaaccccaagtcaccacaaaaacctatcgttagagtcttcctgcccaacaaacagaggacagtgggcttcataaacttcacttaccaaatacttc

SEQ ID NO: 841398 - DNA, 100 bp, Homo sapiens
ggatttcctcccggacatgatggtcgagggccgcctgctcgttcctgacagaatgtccaggtcaagacctcgtctccgttctcatagtcgtagcagtgaa

SEQ ID NO: 841399 - DNA, 98 bp, Homo sapiens
ttccgtggccagtgttcagctacagcttccttaatggtccttcctgaagaaaaggtgactggtctcatgagccctgaagaatgaactcagaggaggtt

SEQ ID NO: 841400 - DNA, 100 bp, Homo sapiens
aaaacaaggatggcaaggtcaacatcgacgacctcgtcaaggtggctggtcattgaccgcaaggtttacaacatcaccaaatggtccatccagcacccgg

SEQ ID NO: 841401 - DNA, 99 bp, Homo sapiens
ggagatgtaaagcagctttcagaaatagtggcaatgagaagagctatctccaggaacactgccatgctcgtctgttctaccccacagtttcctcatggt

SEQ ID NO: 841402 - DNA, 99 bp, Homo sapiens
tgcttttgaaccactggaaagtgaggaattttgaagtacaccgtggtgacattgtatcattggtgtataccaagcttggctacgcaggcaacactgagc

SEQ ID NO: 841403 - DNA, 100 bp, Homo sapiens
gcaaacagattcagtggcctgcattggattgattcctaaagactcatgttacgtgaggaagcagctcagaagaggaaaggaaaggagccaggcatggctc

SEQ ID NO: 841404 - DNA, 100 bp, Homo sapiens
ggaagaagatttgtaaagaaaactcttagacggaaatggagagctggatttctccacttttctgaccattatgcacatgcaaataaaacaagaagaccca

SEQ ID NO: 841405 - DNA, 122 bp, Homo sapiens
ggcggctgatggcggatcaggatcggaagcctgcgtaactttctcccttgatccgggagtctttccactgggatgttaaagtctttagtgaagatgggacaagcaaagtggtggagattcta

SEQ ID NO: 841406 - DNA, 100 bp, Homo sapiens
ctcgtgctctgcatgggactctacctgctgctgtccaggctggagtatgccaggtgaaaggaagcatgtttacaccaatgccaaaaagcagatgctaatt

SEQ ID NO: 841407 - DNA, 100 bp, Homo sapiens
aactgtactacctcagctgggagaaatgttggaaatggtttaaacacattatcagatgacaagagcacctcaaaggcagcagcctcaaggagcagccatg

SEQ ID NO: 841408 - DNA, 100 bp, Homo sapiens
ggagaagttcatcaaattccttaataggaatgcctacatcatgagttgaagtattgataacaccaaggaactctatcacaatttgaaaagataagcaaaa

SEQ ID NO: 841409 - DNA, 121 bp, Homo sapiens
ctcaactaagaccaagtcctcgctggactgctcagggtgccagacctcatcctacctaggaggccaaggcgggaagattccttaagcccagaagtttgaaggtgcagtaagctgtggtcac

SEQ ID NO: 841410 - DNA, 98 bp, Homo sapiens
aagaaagtggtgaatcccctgtttgagaaaaggcctaagaattttggcattgaccgagacatgggtgcccggcaccgcgcccgagcccactccattca

SEQ ID NO: 841411 - DNA, 98 bp, Homo sapiens
gaacctgaaggctgcgcaggaggagtatgtcaagcgagccctgaacagcctccaagagctctactccctcctcagttttgtggagcctgatctctttt

SEQ ID NO: 841412 - DNA, 100 bp, Homo sapiens
ctttccttgaagtataagcaaagggtccgagtgattggaagctccacattggcactctgccacctggcctcaggggccgcggatgcctattaccagtttg

SEQ ID NO: 841413 - DNA, 100 bp, Homo sapiens
tcaacgaccaaccagcctccccctgaagattctgccgctgattgctatcacttctgcagaatccagtgggaaataatgcaaaaggtgtcccaaggctcct

SEQ ID NO: 841414 - DNA, 101 bp, Homo sapiens
gagcacggcgagcagtctcaggcctttagtgatgatggtcagttcaccgggacctggaggcccagattgcgatcgtgacggagaaccaggccctgcagcag

SEQ ID NO: 841415 - DNA, 100 bp, Homo sapiens
cgcgcccgcaggacgccccagccagatattgcaattgctgctccatatgggggtgaagataaaaaaggaattgtttatatcttcaatggaagatcaacag

SEQ ID NO: 841416 - DNA, 98 bp, Homo sapiens
cggcagcatgtcggtggcggggctgaagaagcagttctacaaggcgagccaggtgaccattgtgaggtagatattttgttctaattttccagatgagg

SEQ ID NO: 841417 - DNA, 98 bp, Homo sapiens
ggggtggaggtggtgcctctggcagtgacgaggacgaagtgtccgagaatacagattctgttcatcttgctctgaaattaaataattctgaactcatg

SEQ ID NO: 841418 - DNA, 99 bp, Homo sapiens
atggcgctcctgctcctccaggcgctgcccagccccttgtcagccagggctgaacccccgcagttattcaagcggagaaatgttgctacagcagaagaa

SEQ ID NO: 841419 - DNA, 98 bp, Homo sapiens
gccaatttcctttcttagttgcctctgcccacctcttctcttctgcttccatattacagagcattggggagtcagcaatgtccgttgtgttaaatcag

SEQ ID NO: 841420 - DNA, 99 bp, Homo sapiens
gattttgtcgctggacgtctagagatgtgggcatggcagacaaatctgtagatcttcttcagcagtatcgttctgctgtgtgcaaactagacagtgtga

SEQ ID NO: 841421 - DNA, 98 bp, Homo sapiens
gaagtgagaagcccaactaaagccccacatttgcagctcattgaaggaaaggaccctgatgctcccataagacagaaaatgccccttgatgatctgga

SEQ ID NO: 841422 - DNA, 98 bp, Homo sapiens
tttagttctggggagcgcctcgtcgacatgagtgatgtggaggaaaacaacttcgagggcagagtggaagttgatgggtcgaaactaaatgtgaccag

SEQ ID NO: 841423 - DNA, 98 bp, Homo sapiens
gcgatcccgggtcatctccagatgctagggttatgggtccaggtgcaggtacagcagtctccgcaacaggtctcggctcagctctccccacaactcac

SEQ ID NO: 841424 - DNA, 100 bp, Homo sapiens
tgggtctgttcctggagacagaattacttttgatgctttcccagtttgtggggacattcatggacaattctttgatttgatgaagctctttgaagtcggg

SEQ ID NO: 841425 - DNA, 99 bp, Homo sapiens
gcaacagctctgccggctggaaggcagaaggagaagacagcctgaagaagatgcagctgatggagcttgcgattctgaatggcacctacagagatgcca

SEQ ID NO: 841426 - DNA, 100 bp, Homo sapiens
gcagatcggtgacacagttcacatcctggagatgtacgaggctcaaagcttggattctgccgtgccactcacgaatggcgacacagaagacgatgctgac

SEQ ID NO: 841427 - DNA, 100 bp, Homo sapiens
aagaaaactggtctaagcatttctcatcagcagcagtgttgtactgctacttctataaacggacagccgtaagactaggcgatcctcacttctaccagga

SEQ ID NO: 841428 - DNA, 100 bp, Homo sapiens
gaatatccatgtcggcttgtagagagattgcagtatcagacttggtgataattctgaattatgaccgtgctgtagaagcttttgcaaaaggcggaaatct

SEQ ID NO: 841429 - DNA, 100 bp, Homo sapiens
cgacgcctgtgagcttggccttggagcgaggctatcacaagctgcaccagcttctaaccgattgcctgctaataaagatgcctttcgaaagacatggaat

SEQ ID NO: 841430 - DNA, 135 bp, Homo sapiens
tcagctacttgggactcctctctcaagagaagctgcaagagcaacatctttcctcaccccaagtctgctccatctggacacaagcatctgacggtagaagagttatttggaacctctttgccaaaggaacaacca

SEQ ID NO: 841431 - DNA, 98 bp, Homo sapiens
tggaagctaaagctaccaaagacgtagaaagaaatcttagcaggtgtgaggtgggcacagatagctggtcgcagtgcaatgacacacctgtgaagttt

SEQ ID NO: 841432 - DNA, 98 bp, Homo sapiens
cgccttgaagctgtattcccaagataagaccgggatggtggactttgctctggaatctggtgatgtgacatttgttgtgtcacctttcgaacacatcg

SEQ ID NO: 841433 - DNA, 100 bp, Homo sapiens
ttctccagaatttggaaactatttgaatccattacattgggcgtatggaagagggcagcattggccgttttatcttggaccagatcactgaagggcagct

SEQ ID NO: 841434 - DNA, 98 bp, Homo sapiens
ccgattcgtgaccctcagcgccggtgcatgtcgattgcacgtgccggaaggacatggtcaagatctccatggacgtgttcgtgcgcatcctgcagccc

SEQ ID NO: 841435 - DNA, 100 bp, Homo sapiens
ttagttacacaggtgatttccttaagaaaaaggtgagatctcagaccccttccgcttcaccaccttctacatccactttgccctggtactctctgccctc

SEQ ID NO: 841436 - DNA, 99 bp, Homo sapiens
gggtggtcaccatcggcaccgtgctggtgcccatcctgctggtcaccctggtcttcaccaagaacttcgcagtcaggatggctaaaggtgaccccaaga

SEQ ID NO: 841437 - DNA, 98 bp, Homo sapiens
tttattacaagactacggagcataggaggaaaattcatcatctggctgtgcatttggatcagctgctatttggcaatacgaatcactgaaatccaggg

SEQ ID NO: 841438 - DNA, 99 bp, Homo sapiens
gggaaaacactgtgaggatgggatctgcactgtaactgctggacccaaggacatggtggtcgggtctcgtctacagaggactggtctttcaatagcaag

SEQ ID NO: 841439 - DNA, 98 bp, Homo sapiens
accaacaaaaagatcctgtggtacagacggtactgcagggacaccagcaatatcaacgacgacaactgtggaaatccgcaaaagcagtgttatgacaa

SEQ ID NO: 841440 - DNA, 100 bp, Homo sapiens
gacgtcaccgccatggcaggcatcaaaggttagctttatacgtctacgaatatttactgcacgtaggagcacagaaatctgcacagaccttcttatcgga

SEQ ID NO: 841441 - DNA, 99 bp, Homo sapiens
agctcgatctaggttctgcggcacgggatggcggaggcgcctcctgtctcaggaatatgcactttctggttggaatttgaataacatgcctgtcctgga

SEQ ID NO: 841442 - DNA, 100 bp, Homo sapiens
aataacggctgcacctggagattgacgcagagtgggcggcggtggtggtagaagaagtatgtcttcctggaccccctggctggtgctgtaacaaagaccc

SEQ ID NO: 841443 - DNA, 98 bp, Homo sapiens
ggcggcgggcggcaaaggagcagccatgagggccgggcccagtcaccgaccggctggacatggaggaaggcaaggaaggaggcacatggctgggcatc

SEQ ID NO: 841444 - DNA, 98 bp, Homo sapiens
cacagattccatgtgatgagagagaaacatcctgaaaaattcaacagcaggaatacctccacgggcccattcccgagattctagtgattctgctgatg

SEQ ID NO: 841445 - DNA, 99 bp, Homo sapiens
ggattttgaggacacttgtggagagctcgaattccagaatgatgaaattgtatgtattgtagaaactgaaaatttagaagaaagagtagctgtggtgag

SEQ ID NO: 841446 - DNA, 98 bp, Homo sapiens
cacttcagagctaggagagatggaactgacttggcaggagatcatgtccatcaccgagctgcagggatgatgagatccgggacaaatgtgggggcgat

SEQ ID NO: 841447 - DNA, 100 bp, Homo sapiens
tgactggccagatggttcttacccaacgtttgatggctcatcaaactgcaatctggcagacttcagggaggtggtgtcgcagatgctaggcttgaacgtg

SEQ ID NO: 841448 - DNA, 100 bp, Homo sapiens
caaacattattgctatgggatttcctgcagaaagacttgaaggcgtatacaggaacaatattgatgatgtagtaaggtcagagcaagatgtgaagcccaa

SEQ ID NO: 841449 - DNA, 100 bp, Homo sapiens
tcaatgatgatgatattggtgacagctgtcatgaaggctttcttctcaaattgataggttatatgattggaaaaagagtcctgactctgatgtggctgct

SEQ ID NO: 841450 - DNA, 100 bp, Homo sapiens
tctttcgttaccgggtcctgttaggacacactttgatcctgatgttcatctgtttctccacagacactacccaaagcagtccttcactacagtggcagac

SEQ ID NO: 841451 - DNA, 100 bp, Homo sapiens
tggacagccagtggcgccagatagaaaacggcgagagtgggcgagaacgtccactgcgggccggcgaaagctggaagccagttgagggaagttctccatg

SEQ ID NO: 841452 - DNA, 98 bp, Homo sapiens
ctttttgactacaattctcaacaacagctgaccatgccactgcctcggtacggctccgggcagcagccactgatcctgccccagtctattcagctgcc

SEQ ID NO: 841453 - DNA, 135 bp, Homo sapiens
tggtgcctgtcggagaacatcgccaagcagcaacagctggcagcatcacccccggacagcaagatgttaaggacatgttcacttccagatctctcaaagctgttcagaacccttatggatgttcccaccgtagga

SEQ ID NO: 841454 - DNA, 98 bp, Homo sapiens
ggccatggtgctggaccagattgaggcggagctggagaagaggaagctggagaacgaggaaaacctacagagatttccgattgcaaggggtcctggac

SEQ ID NO: 841455 - DNA, 101 bp, Homo sapiens
ccgagatgccgggggagcggggccttccacaccccctccgtgggtgtgtgaggaggccgtcaatgaggtgaagcgccaggcgatgacggagctgcagaagg

SEQ ID NO: 841456 - DNA, 74 bp, Homo sapiens
cttctctcattttctttccctgcaccaactagcaggtttccacttgagcggcacagtgacagaacctgcaatac

SEQ ID NO: 841457 - DNA, 102 bp, Homo sapiens
caacaccacaataatccacagccaagaattaaacaaccaccatgtcgagcaaaaaggcaaagaccaagaccaccaagaagcgccctcagcgtgcaacatcca

SEQ ID NO: 841458 - DNA, 99 bp, Homo sapiens
acactaccagtggccttccttatccaagagcacccaataactatagaagtcccatctctaccagtcaacctaccaatcaatccatggatgatacaagag

SEQ ID NO: 841459 - DNA, 100 bp, Homo sapiens
ccgcctcgaagcatgcctacgtgccaaactctgccccatggaagccaatccggttacctggtgctcctggagctgttggtgggaatatacccctcagggg

SEQ ID NO: 841460 - DNA, 100 bp, Homo sapiens
aacatatgggattcagaggagtatgcatcagtcttgcagctgctgaggtattataaaaaagttgctgttaaagagaaacaaaaacgggatgcagatgaag

SEQ ID NO: 841461 - DNA, 100 bp, Homo sapiens
cagatgattgaagtggaaatatccaaacaggccctccagaatgagctggagagactgaaagagggcccagacagaagagaagagtcacatcatctagatg

SEQ ID NO: 841462 - DNA, 98 bp, Homo sapiens
gtggactcaacagtttgtggcaagacaagctcagaactgagaagctgtcaccacagagatgctgcctatggaagttgcaatttctacattacacttct

SEQ ID NO: 841463 - DNA, 100 bp, Homo sapiens
gctgcctgcttttgtggcgctcttgctcctctctccttggcctctcctgggatcggcccaaggccagttctccgcagtttctctgcaggtggatattgtt

SEQ ID NO: 841464 - DNA, 100 bp, Homo sapiens
ggatggacaacctgcattggacccagctattgctgcagcatttgccaaggagacatccctcttagatggcccgtccttaaaagaaacaacaggacccagc

SEQ ID NO: 841465 - DNA, 101 bp, Homo sapiens
ctgcgacctcttcattcccatgcagtttgggatcatccagaagcatctgaagaccatggatcacaaccggaaccgcaggattctcgctgaagtctgttaat

SEQ ID NO: 841466 - DNA, 100 bp, Homo sapiens
gttgggttcagttttcttcagaagaaggacttcggaatgcactacaacaggaaaatcatattatagatggagtaaaggcatcgttggcttcacagtatga

SEQ ID NO: 841467 - DNA, 98 bp, Homo sapiens
gagggcgaagacgagatccagttcctgcgaactcaaccactgtgattgctgtcaacctctacctggtggtgttcacaccatactggcctgtcactgtg

SEQ ID NO: 841468 - DNA, 98 bp, Homo sapiens
tcagtgaaataaaggagcaagaaatgttcaaaggaacaacatctttaccatctcatctcaagaatggaggggagattctggggggcccctggtctgtg

SEQ ID NO: 841469 - DNA, 100 bp, Homo sapiens
gtgtgagcgcgccggaccaagcgggcccagaagcgggagcatcagatccatgctgctgctgactcggagccccacagcttggcacaggctctctcagctc

SEQ ID NO: 841470 - DNA, 100 bp, Homo sapiens
tttttccagctcacccactgccagcagagacagccagctaaaggtgtggatgagcaaatacggctggagtgccgacgagtcggggcagatcttcatctgt

SEQ ID NO: 841471 - DNA, 98 bp, Homo sapiens
ggactggtgcgaggagaactactccgtgacctggtacatcgccgagttctagagaagtggagatcctgatgtttctcagtgccattgtgatgatgaag

SEQ ID NO: 841472 - DNA, 101 bp, Homo sapiens
ctggtattctgggtctccctggctcgagaggtgaacgtggtctaccaggtgttgctggtgctgtgggtgagcctggcagccctggtgaaaatggagctcct

SEQ ID NO: 841473 - DNA, 100 bp, Homo sapiens
attggaagacaagcggtaatatacagtaagcactatcctttgtactccctcaacgtggcctccatgtggttgaagctagggagactctacatgggcctgg

SEQ ID NO: 841474 - DNA, 100 bp, Homo sapiens
tcagatgccagctctgaaaaactcttcaacactgttattgtaaacaaaggggcctttacaacaactaaacggacaggcattccagccccacgggaatttt

SEQ ID NO: 841475 - DNA, 100 bp, Homo sapiens
gtcacttcatttaccaaccctggaaccgcagacctctgggcttcctgaattctaccaaatatctggctgggtagctgccctcgtcaggtggaacatgtaa

SEQ ID NO: 841476 - DNA, 100 bp, Homo sapiens
atacgatgcaaccatgatagaaataaatccaatggtggaagattcagatggagctggtgctggagaatctggtaaaagcaccattgtgaagcagatgagg

SEQ ID NO: 841477 - DNA, 100 bp, Homo sapiens
gtggagtcggctgagggaaaagcgaggcaaggcaggcgggactcgctcagcagcagcctgaaaacttgctacaagtatctcaatcagaccagtcgcagtt

SEQ ID NO: 841478 - DNA, 100 bp, Homo sapiens
gtttgggggccttcagacagttttggggtggtctttctcagaattaaacaaccaccatgtcgagcaaaaaggcaaagaccaagaccaccaagaagcgccc

SEQ ID NO: 841479 - DNA, 100 bp, Homo sapiens
ggatcattatgaaggagaagcagagcaccaagggaagacatctttggcacatcaatttgtggaaggcgagttctcggaaggctacgatcctacagtggag

SEQ ID NO: 841480 - DNA, 100 bp, Homo sapiens
accatcttaatgaacttcctgtacctgctgggagaagttctgaacaactatatctgggatacacagaaaattaagatccttctattctacgtaatatttt

SEQ ID NO: 841481 - DNA, 98 bp, Homo sapiens
gttggtgtctcacctttaactctccttatgctgggtgaaaacaaaggcacgacccctgacccgctacctgccaatccggaaggaggactttgacctga

SEQ ID NO: 841482 - DNA, 100 bp, Homo sapiens
aaaacttcatgactgttgatcaagatggaagtggcacagtagaacatcatgagttgcgtcaagccattggtcttatggcatactaaataagcttactcct

SEQ ID NO: 841483 - DNA, 100 bp, Homo sapiens
acagccccggaacggagcccttgacctccactgaccagaccttggagccccctggcccaggatatagcagatccattctttgcttattgtaagcaacatg

SEQ ID NO: 841484 - DNA, 100 bp, Homo sapiens
gctccatcgtggggccctatgatgaggtggtcctcccaccacagagccaggtaaatgccatctgctatggggccaagattatgcttccaggtgttcttcg

SEQ ID NO: 841485 - DNA, 100 bp, Homo sapiens
tgcaagctatatttaacggagatcctgatgaagttcgagcactaatatttaagaaagaagatgttaactttcagaccccagcagcgaccgccacggcccc

SEQ ID NO: 841486 - DNA, 100 bp, Homo sapiens
cgagagtgggcatggcgacttggtctcagccggactcggtattatgatgacacattcccctccatgaaggagcagatggttttcgagaaaaatgtcttca

SEQ ID NO: 841487 - DNA, 101 bp, Homo sapiens
atctcacactgcggcagctcgaccagcatcttgacttgctcaaacattcaaacttcctgggtgccttacttcgtccccaacaccccggcagcccgagccga

SEQ ID NO: 841488 - DNA, 98 bp, Homo sapiens
ctctcacaggtgaatctctcctttcttcattccatggacagcaataaggaacgaatgcaggaatttgggaactgagctgtgcaagtgctgaagaagga

SEQ ID NO: 841489 - DNA, 99 bp, Homo sapiens
gggccggctgcttcggcatcaagcagaagtctgaagaagaagtagaggaacctgaagaaagacagcaaacacctgaggtggtacctgatgattctggaa

SEQ ID NO: 841490 - DNA, 100 bp, Homo sapiens
catgtctgtccttgtgagataaaagcttccatgggagccttccttcctaatcaagagctctctttacgagaaaaggaagatcctggctggtcagcatgag

SEQ ID NO: 841491 - DNA, 99 bp, Homo sapiens
gtcttcagccagtataaaaacacagctcgacagtacgcctacttctataaagtcatccagcactttagaagtctggaagaaaggaaaaaacagcataaa

SEQ ID NO: 841492 - DNA, 98 bp, Homo sapiens
ggtcggcagatcaaaccttataccctcatgagcatggtggccaacctcttgtatgagaaacggtgaatgaaaactttgccattgatttgatagcagag

SEQ ID NO: 841493 - DNA, 98 bp, Homo sapiens
gggagaaagcagccagggagaaaaagaagaacgcgatgaggaggaaacatcaaatttggaccccttcaaccagtacactgaagaccagatttgggatg

SEQ ID NO: 841494 - DNA, 119 bp, Homo sapiens
catggtcatcctgctgccggatgacattgaggacgagtccacgggcctgaagaagatgtcaatgaagagcttccagccagaagaaaacgaaatcgtgaggatggggaaaagacatttgt

SEQ ID NO: 841495 - DNA, 100 bp, Homo sapiens
ttgatgcaaccctggagcatgtgcaggatcctcagaacactgttaaggtccaggcctggaagaaacgctggtttatcctgcggagtggccggatgagcgg

SEQ ID NO: 841496 - DNA, 152 bp, Homo sapiens
agactgtgaaagacgagggagaaatgttttgtttgactccagtgttaagagaagaaatgaggacatatcagtatcgaacagcacattagttccagaagaaagatggaaattctgaaaactgaatgtcaagaaaaggagtcaagaacaattca

SEQ ID NO: 841497 - DNA, 99 bp, Homo sapiens
gcctcaccgttctgcccccagaactagctccagtggctgttggacaattatgagacagcagaaggagtgagccttcccagaagcactctgtacaaccac

SEQ ID NO: 841498 - DNA, 99 bp, Homo sapiens
gggtgaggtacaggctcagtctgcggccaagactccgtcctgcaagcctattgaagagatgcgacacacgattgtagatattctaacaatgaagagtca

SEQ ID NO: 841499 - DNA, 98 bp, Homo sapiens
gtctgacatgtttgatcaaggtgggagctgaggctgatcagaactatcagaactacatcttaagggcactaagtcaggagattggaaaagcaaatgct

SEQ ID NO: 841500 - DNA, 99 bp, Homo sapiens
aaaaataaagtgttgagtaaacagaccaagttgggtgctggagaatctggtaaaagcaccattgtgaagcagatgaggatcctgcatgttaatgggttt

SEQ ID NO: 841501 - DNA, 99 bp, Homo sapiens
gctgcctggaggcggccgcactcggcttggtgatccagctatttttcctgccgtaattgtggaacatgttcctggtgctgatattctcaatagttatgc

SEQ ID NO: 841502 - DNA, 99 bp, Homo sapiens
agagcagtggatccgggccaagtacgagcgacaggagttcatctacccggagaagcaggagccctactcggcagtggatgatctcttcagggaagcaga

SEQ ID NO: 841503 - DNA, 100 bp, Homo sapiens
atattaagttccacttgtaccttgtccccagcgacgccttgctaacaaagtccctggtacgtgagcccctttcccggcgccggcagctgctccgggagaa

SEQ ID NO: 841504 - DNA, 100 bp, Homo sapiens
gagtttgagtaaaggtggaaacataatggaacagaattttgagatgtctttggtggacttgggaaagaggttgctagaagcagcaagaaaaggccaagat

SEQ ID NO: 841505 - DNA, 98 bp, Homo sapiens
ccagagctgtgcctcccagcaccacagtccttctgcagtccctcgtccagccacccccaggtggaattgagactggatctatcacagaaatgtttgga

SEQ ID NO: 841506 - DNA, 100 bp, Homo sapiens
gggatgagtatgcggaggacagctctgatgaggagcccagctcaacattggcaatgtgctccctgtgggcaccatgcctgagggtacaatcgtgtgctgc

SEQ ID NO: 841507 - DNA, 99 bp, Homo sapiens
gaggaagaacgcgccagagcaaaatgggacacactggaagatctggaagttactgtagctgatcacattcaaaaggtcatgaaactgaacttcgaagca

SEQ ID NO: 841508 - DNA, 99 bp, Homo sapiens
tgggatgctggaggacatctgggggccacaaatgctccttctcctggagacgcaactcaaggagagccagtgtaactccttcaagactggagtgacaca

SEQ ID NO: 841509 - DNA, 100 bp, Homo sapiens
tatcatttggatcaaaaaatagaacaatcggagttgcagccaaaaatcaggtttccaatacttatctacaggaatcgccatgaccccagctctgagggag

SEQ ID NO: 841510 - DNA, 99 bp, Homo sapiens
caactattcgcagtccgagcgatttgatggtagagtggtggcaaagcttccttttacccctctttcttacatccaaggactgtctcatcgaaatctgct

SEQ ID NO: 841511 - DNA, 111 bp, Homo sapiens
ccaaagttcttccagtcctcctaggcatcttattgatcctccagtcgaggtagatgatgagctggagatcaaggcctactatgcaggccacgtgctgggggcagccatgtt

SEQ ID NO: 841512 - DNA, 109 bp, Homo sapiens
cctggcaagattcttctgaattgtgctgccttggccaaaagagggtgtgggccgaagatatgctcatgtggtgttgaggaaagcagacattgacctcaccaagagggcg

SEQ ID NO: 841513 - DNA, 100 bp, Homo sapiens
aggcggttttggtgaataacatcaccacaggtgagaggctcatccgagtgctgcaagaccccaactgtaaacttgaagacaagactgaagatggagaggc

SEQ ID NO: 841514 - DNA, 99 bp, Homo sapiens
ttataaactgcctggccgaatcagccttttcacgctcaaggttttgcagacattgggtacagaaacttaccggcctagttctgcctcacagtgtgtggc

SEQ ID NO: 841515 - DNA, 98 bp, Homo sapiens
gctgctgtcttcgtgggaggcgccgtgagttcgccgctggtggctccgggaatagccaggccagaagaaggaaggcctgtggtgagtgggacaggaaa

SEQ ID NO: 841516 - DNA, 99 bp, Homo sapiens
cacagagacccagagctcaagtcacaggcggaacgactgtttaaccttgttcaccaggcttatgaaggtgcacacatcttgaccaactcagcagcaagg

SEQ ID NO: 841517 - DNA, 100 bp, Homo sapiens
aggccacattaaactcactgactacggcatgtgtaagcaacacagtcactcctggcggcaaaccaaacaaaaccagagtcatctggggaaaagtaactcg

SEQ ID NO: 841518 - DNA, 100 bp, Homo sapiens
gccccagccccctgtggctgaggctacaccccggagccaggagggaaggtgggagtcaatcattttgacaagtctcctgaaaggaacagctagcaggaac

SEQ ID NO: 841519 - DNA, 98 bp, Homo sapiens
tgaacagatgcgtctcgctcaagtgatctttgataagaatgattcagattttgaagctaaagttaagcagacctgctgaaactcagcctgctgggacg

SEQ ID NO: 841520 - DNA, 100 bp, Homo sapiens
gcacttgagggcattggaggggatggattttttaccatgaaatatgaggtggtcttcgagggatagcacgaggtggtctgacaggactaacacttaccag

SEQ ID NO: 841521 - DNA, 100 bp, Homo sapiens
gtgcagcaacccccacacccagcaccaggtgaaatgacaatggatgctctgttggctcgattgaaacttctgaatccagatgaccttagagaagaaatcg

SEQ ID NO: 841522 - DNA, 100 bp, Homo sapiens
actgaagccatggcgccagacatcttagccaggaagtgtgggaataagtatctttggaagaccaggcactttatgcagtattgagctcaggaggcagtga

SEQ ID NO: 841523 - DNA, 100 bp, Homo sapiens
gcagtcaactcctggaccactagtgttttaaaacatgaatcctacactcatccttgctgccttttgcctgggaattgcctcagctactctaacatttgat

SEQ ID NO: 841524 - DNA, 98 bp, Homo sapiens
gtggagctggccatgtttggcctgcggcacatggagcctgaccttagtgccagggtcaccatctaccaggcaacagcattattgagaaaagcccttac

SEQ ID NO: 841525 - DNA, 99 bp, Homo sapiens
tttatgaacgaaagataaaggagggaatggatatgaactacattatccaaaggaagaaagaatttcggaaccctagctgcaatccagaccacaagcacc

SEQ ID NO: 841526 - DNA, 100 bp, Homo sapiens
ttcggtctcctggggtcggcgccgagtgggaggatggcggaaatccagacatttaatgtggatgcaccatgccagaccgtggaagatttaacgaatgggg

SEQ ID NO: 841527 - DNA, 100 bp, Homo sapiens
ggatttgttaaggattccaagtaactcttatttggatcaactcactatcctgaaggtccattctcccaagaagaggggacagaaagacagatctatttgt

SEQ ID NO: 841528 - DNA, 98 bp, Homo sapiens
acacggttcagaggcgagtccggcccaagctccatgtgtttggtggaatccatgaagcggatctgaaaagaacaattgctgtccttctggatgacatt

SEQ ID NO: 841529 - DNA, 100 bp, Homo sapiens
atctgcaggtggaatgtgacagacaggtggagaaggtggtagacaagttcatcaagcaaagggactaccaccagcaggctaaagaattacctccaaagcc

SEQ ID NO: 841530 - DNA, 100 bp, Homo sapiens
aattcccaagccagagctttccaggatatggaatattatcttgtaaaatggaaaggatggccagattctacaaatacttgggaacctttgcaaaatctga

SEQ ID NO: 841531 - DNA, 99 bp, Homo sapiens
gatgatgttataatcagaatcaacacagatggggccgaatataacatagaggatcttatggttggtgatgaggcaagtgaattacgatcaatgttagaa

SEQ ID NO: 841532 - DNA, 100 bp, Homo sapiens
gaaaagcccatcttttcccttaataccgttgcaagtgctggtctcaccaacggctttgggggtgcgaggagcgagcaggagccgggcggcggcctgggga

SEQ ID NO: 841533 - DNA, 99 bp, Homo sapiens
tccattgagaagagagaagaacattctcgaatacctagaatgggggaaatcctcattgacgattcaatttgttgaaggccaatttgtggactcctacga

SEQ ID NO: 841534 - DNA, 100 bp, Homo sapiens
aacacataggccggccccacagcggcattggtcttctgcatggcctcctgcttgctgctttcaccattgctggtggatggcatctctgctgggacagagg

SEQ ID NO: 841535 - DNA, 100 bp, Homo sapiens
atctgtccagccacctacaggcctccaggaatggctaaaaatgtttcaggacagagctccggcagaaagcaggccatttgggacccttcctcccaggccc

SEQ ID NO: 841536 - DNA, 100 bp, Homo sapiens
aggatttggctatgacatgagcacacccaacgcacccctgcactactatgagaccgttcgcatggcagccatcaaagagccctaccacttatgtcttgga

SEQ ID NO: 841537 - DNA, 99 bp, Homo sapiens
aaaacctggaccttctggattacaggccaaattagcaagcattttgttcccaacatcacctttggtcaccctgtggtagaaagccttcgaaagcagcta

SEQ ID NO: 841538 - DNA, 100 bp, Homo sapiens
cccggacatgatggtcgagggccgcctgctcgttcctgacagaatgtataagtgtgctagcggagtgtctagattgtcctgaattgaaagcaactgcaga

SEQ ID NO: 841539 - DNA, 105 bp, Homo sapiens
tcctgcgtgatctcaagctgtgtcgctttgtcttcgctgaccgtgagagatctgggcttcaaggacctcacgctgcagccgcggggccctctggagccaggcccc

SEQ ID NO: 841540 - DNA, 100 bp, Homo sapiens
atctcaaacaagacaacttgagctgaaagcgaaaaactatgctgaccagaagcagcccgacggccatggaggctgaagagacgatggaatgccttcagga

SEQ ID NO: 841541 - DNA, 100 bp, Homo sapiens
agcggatcagacacctagatgacatggtgcattgccagcagaagaaagtcaagcagatggtcgaggagaagaagtaccgtcagcatccagatgctttgaa

SEQ ID NO: 841542 - DNA, 100 bp, Homo sapiens
gtacattctataatcaggcaattatgtcttctaaaaatattgcacagttttcagaagaaaatgcaagtaaaatgaagaaaatatatggagaattctgttg

SEQ ID NO: 841543 - DNA, 98 bp, Homo sapiens
atggacagtatggtggccgagtttttaaagaacagtaggatccttgctggggacgtggagacccatgactcagcccaggagagtgttattactcgaga

SEQ ID NO: 841544 - DNA, 98 bp, Homo sapiens
taaaaatgattcgggaatatcggcaaatggggagggatgctgtgcacactgtggaaggctatcattgactttcgaaacaaacagacttgactgttgct

SEQ ID NO: 841545 - DNA, 98 bp, Homo sapiens
agaaacccagcttgatatgttggcataatgattataaagtggtttctcctgctttgcgagctgtgggaaacattgtcacaggggatgatattcagaca

SEQ ID NO: 841546 - DNA, 98 bp, Homo sapiens
gacggctgctcaaacatcagggcatgtcagagcgggagcgacaggtgatgaagaagctgaaggaggtggtggacaaacaacgcgacgagatccgcgcc

SEQ ID NO: 841547 - DNA, 100 bp, Homo sapiens
atggaggattcctctgctgtcctcatggaaagcctaaaggggaaagcccgcagatccccgccagggcaccacaggcattgtgagggatgcttcaaccgcc

SEQ ID NO: 841548 - DNA, 98 bp, Homo sapiens
tcccagcagtactctactattgtaaagaccacacctgtgacaatgcaggttggagaaggtcagcaggtgcagattgtccaggctcagccacagggtca

SEQ ID NO: 841549 - DNA, 100 bp, Homo sapiens
tactgctgaggactggggcctcattttggatatctgtgataaagttggtcagtctcgcactggatttgaacatggaattcaatccttcagatcatcctcg

SEQ ID NO: 841550 - DNA, 100 bp, Homo sapiens
gcagcacctacagagcggtgattttcgacatgggcggagttctcattccttctccagggagagtcgctgcaggaaggaaaggaggtgagctggcctcagc

SEQ ID NO: 841551 - DNA, 100 bp, Homo sapiens
ggccacctgaactccaagctcttcctgaacgaagtggccaagaaggagaagcagctgcggaaaatgctagaagaaacttgaggagaggctggagttctgg

SEQ ID NO: 841552 - DNA, 100 bp, Homo sapiens
gcagatgctgatgggcaaactaggtgcagcggaactgctgcctgacgctctgcaacttcagcatccccgaggagctggaattccagtaccgccgggtcaa

SEQ ID NO: 841553 - DNA, 99 bp, Homo sapiens
gctcacctgtgcgggatggaacaaaaggccattggctgtggtattgtagaaagcatactaaactgggtgaagtttaaggcccaagtccagttaaacaag

SEQ ID NO: 841554 - DNA, 100 bp, Homo sapiens
gaagagcttcgtcagcggctcatcgagactgagctggctaagcaggtgctgcagacggagctggagcgaccgagagagttcactgagacttttttgacgg

SEQ ID NO: 841555 - DNA, 100 bp, Homo sapiens
gtttttatcaccacacgactgggtatatttcctctctggttggcgtgcagtggtgtgatctcagctcattgcaacctctgcctcccggactcaagcaatc

SEQ ID NO: 841556 - DNA, 98 bp, Homo sapiens
ctgcagccgcagccgcctccgaagatgggggatttctacgacccggagcacccgacccctgacacctgtggaatcctctcaagaggaacagtcattgt

SEQ ID NO: 841557 - DNA, 99 bp, Homo sapiens
ggatattcagttgcacatccccacatcaatgcactgccaatggtctttttgccattcctccaggacatccaccataaggaaaggagaccctggaccaac

SEQ ID NO: 841558 - DNA, 98 bp, Homo sapiens
ccgagatgccgggggagcggggccttccacaccccctccgtgggtgtgtgaacactctgctccagccaaggtggtgagggcagctgttcctaaacagc

SEQ ID NO: 841559 - DNA, 100 bp, Homo sapiens
caaaatggatgccattcaaggaattgatgatgatgctacaagccagcttgcaagaaattggggatcgggagtctccggtggactgcagcgttagcaaatg

SEQ ID NO: 841560 - DNA, 100 bp, Homo sapiens
tgctttccccaagtagtccgatggctgcggctgcgccgaggcgccctactcaggtatgcccaagaggacagagaacgaatgcacagaaatattgtcagcc

SEQ ID NO: 841561 - DNA, 139 bp, Homo sapiens
tatatgctcaacaactggtcaggcatggatatgaaaaaagccatcacctatattagaaggagtatgaaagctgatgtcctgaccactggagctggtaacccagtaggagacaaacttaatgttattacagtagggcccc

SEQ ID NO: 841562 - DNA, 100 bp, Homo sapiens
ttgatggagtgcagctttgtagttttgcgtgtgttgaaagtacaattctattgcacatcaatgatatcatcccagccaaaagaatgcaatggtgtaaaga

SEQ ID NO: 841563 - DNA, 100 bp, Homo sapiens
actggttctccaggaaccgaaaaggcgaggagtatagtacggcaaaaaactgtcgaaaatatttacaccagcagctccagttcataccaataaagaagat

SEQ ID NO: 841564 - DNA, 100 bp, Homo sapiens
ctacgaccgcgagggcttcaagaagcgggcggcgtgcctgtgcttccggagcgagcaggaggacgaggtgaagatgcaatgaccggggacacagacaaat

SEQ ID NO: 841565 - DNA, 100 bp, Homo sapiens
cgacaggcgcctccggcccatttacggtgcatggctgcctcctaatcccatagtccagaggaggcatccctaggactgcgggcaagggagccgggcaagc

SEQ ID NO: 841566 - DNA, 100 bp, Homo sapiens
tcaagatggcggtgcaggagtcggcggctcagttgtccatgaccctgaaggtccaggagtacccgaccctcaagtggaatttctgtggagccacacgacg

SEQ ID NO: 841567 - DNA, 99 bp, Homo sapiens
ttcagttgattatgccagccagatgcagcttccagaggcccttattagtccttgttgacagaaacatagatttggcaactcctttacatcatacttgga

SEQ ID NO: 841568 - DNA, 105 bp, Homo sapiens
atctttgcatccttcaatgacacttttgtccatgtcactgatctttctggcaagccgcattgacaggaagattgagttccccctgcctgatgaaaagacgaagaa

SEQ ID NO: 841569 - DNA, 100 bp, Homo sapiens
tggaacttctacccgacacttacatgccatggccttctacgttgtgaaaatgactctcaaagatgaagacttttgtaaacgtgtatctttggctactgtg

SEQ ID NO: 841570 - DNA, 100 bp, Homo sapiens
cacctcagtgctgaggtcaaggcaggtgaaagaaaatggcccgaaccaagcagactgctcgtaagtccaccggtgggaaagccccccgcaaacagctggc

SEQ ID NO: 841571 - DNA, 100 bp, Homo sapiens
tttcaggaaggagccattatttatgtcatcaagaagaatgacgatgattcgaagcttcttgagcctgggactgtatcttgatcattgcagaatccttgcc

SEQ ID NO: 841572 - DNA, 100 bp, Homo sapiens
cggagcccggccccggggaactagggagcgtctccggctgcacagcgctcagagtctcgctctctcgccaggccggagtgcagtggcactatctcagctc

SEQ ID NO: 841573 - DNA, 100 bp, Homo sapiens
caagtatcagagtcgggagagctttctggatgatgtaaaccttattctggccaacagtgttaagtataatggaggagacatcacagctttcccagatcgg

SEQ ID NO: 841574 - DNA, 100 bp, Homo sapiens
gcgatgctggccaacttcaaaccccggggctactctgagtgcatcgtgactgttggtggagaagagagagtctacccagaatggaatcctgacaatgata

SEQ ID NO: 841575 - DNA, 146 bp, Homo sapiens
gttgcaacttttttcgaaagctgggtttcccgggagatcccaggcggtgacagagtggagccatggctagagggggccgtggagcccatgcagatcgacgtggacccccaggaagacccgcagaatgcacctgacgtcaactacgt

SEQ ID NO: 841576 - DNA, 100 bp, Homo sapiens
ctgtataaagatgtcatgatggagaattatggaaacctggtctcactgggcacctgaatggacagaagaggacctcagccaactgacaagaagtatggtt

SEQ ID NO: 841577 - DNA, 98 bp, Homo sapiens
aaaagaagcctctcactttcagtccaagctaattacacctcctcctccaccaccctcaccagaaagacaaatttacatgtattggagaccagaccaga

SEQ ID NO: 841578 - DNA, 100 bp, Homo sapiens
tgaagtcatctacggaggcctctccagtttcatctgtacaggccgaagaacagttgagaattgttgaagaacaaagaaagattcatgaggaaaggatgaa

SEQ ID NO: 841579 - DNA, 99 bp, Homo sapiens
aacggctgaaggccctacgggagaaaaccgggcgcaagcaaatgaagctcgtgaccgagaacctgaaggaggaaccaatggaaagcgggaaggagaagg

SEQ ID NO: 841580 - DNA, 100 bp, Homo sapiens
atggctggagcatctcttgataaagtgcagtgtgccctgaaccgccctgccttctttgctgagaggctctactatgctatgaaaggtgctggcacagatg

SEQ ID NO: 841581 - DNA, 99 bp, Homo sapiens
tcagcggtattctggtgcttatggtgcctcaggtggtaaatgtgtcgaggctggagggagatgacaatccggtacagctcatctactttgtggaggatc

SEQ ID NO: 841582 - DNA, 51 bp, Homo sapiens
ggagtcagaaccctccgcagagtaaaggtctgaaggggcgtctcgattacc

SEQ ID NO: 841583 - DNA, 98 bp, Homo sapiens
aagaactcgtcatgctctttgtagcgtggtgcttctgttgctcacagctgacctgaataatgtcagattctcagcttataggactgccatgaaactcc

SEQ ID NO: 841584 - DNA, 100 bp, Homo sapiens
cctgtgagcagtgggaaaaatggaccaacttctttggcaagtggacattttactggctcaagtaccttgtggtctataatcctttagaacaagaccgaat

SEQ ID NO: 841585 - DNA, 99 bp, Homo sapiens
tgaggatgaactggcgggtgtggacgccactacagttcatcaacatcaactacgtccctctgaagatcactaaggaggaagagcgagagaagaagtttt

SEQ ID NO: 841586 - DNA, 99 bp, Homo sapiens
cctgctaccgccagagaggtggacccactccggattcctccacaccacccacacaccagtcggcagcctccctggccagtactgatgcaggcactgcag

SEQ ID NO: 841587 - DNA, 98 bp, Homo sapiens
tgtcaaaaagtggatcttcttggagcgagcagatgcaatctcttgtctcacatgctagcaacataccaggccggcgatgaatttgtggagaagaccct

SEQ ID NO: 841588 - DNA, 100 bp, Homo sapiens
aaaactacagttctgtcactcacttacacagtattgggaaatctgtgaaagggatccatatggctttggagacagtcgagattcaaggcgtgatcgatcc

SEQ ID NO: 841589 - DNA, 100 bp, Homo sapiens
agaaaatacactactcatcaaggaagaaccagaccggagaagagcagaaccaacttacaggaagaattgaaaatcctggtactggatggctgtgataagc

SEQ ID NO: 841590 - DNA, 98 bp, Homo sapiens
ggggtggctctttgctaagtgctgctgttgcttcccgtgtagaggcatcgttggcttcacagtatgactgatgatcctccaacaacaaaaccacttac

SEQ ID NO: 841591 - DNA, 100 bp, Homo sapiens
tggtgttagtggttcttcaaagatactgaagacagtgcagtatcaacaacctgcaggctgagttaaacaagatttttgccctgcggaagcaactggagca

SEQ ID NO: 841592 - DNA, 100 bp, Homo sapiens
tacttagctcagcaattcttacctttgacttttttgaacgaaccattctgtgcaacagccttgtgtggagttgtgctgtgacgggtagacctggactgac

SEQ ID NO: 841593 - DNA, 98 bp, Homo sapiens
ctgagctgacaggaccagacgatggcttttacttgtcattgcaatactactataattccttgacccagcagtacctttactgggatggggaaaaagag

SEQ ID NO: 841594 - DNA, 100 bp, Homo sapiens
tttgctgagtggactgaaatggcccatgaaagagtaccacggaaactcaaatgcaccttcacatctcccaagaataacaagcctttgtattcatttgaag

SEQ ID NO: 841595 - DNA, 100 bp, Homo sapiens
cgtgctggagagaccccgcggctgggcgttcatctaccacgctttcgtggaaaagaagatctcccggagcagtgccctgaaagtgctggaccatgccatg

SEQ ID NO: 841596 - DNA, 100 bp, Homo sapiens
ctctggaggcagggagactggggtggagacttcggagactgcagttgcaggtgtgactgcacagaaaagttacaaaacaaatttgactttttgcgctcac

SEQ ID NO: 841597 - DNA, 100 bp, Homo sapiens
tcaacaacgacgccgagctctggggcgtcttgcagccctatgagcatctcatctgcggcaagaacgccaatgtgttatagttttgccgctggactcttcc

SEQ ID NO: 841598 - DNA, 100 bp, Homo sapiens
gagacctctgcccagggattccgccagctgctggagctgaacctactggggacgtacaccttgaccaaggcttgtctgagacgacaggaatatagaagag

SEQ ID NO: 841599 - DNA, 100 bp, Homo sapiens
aagacagagggttttcttttgaggctctttggtgtaacgggaaactgcgctgcctgtagtaagctcatccctgcctttgagatggtgatgcgtgccaagg

SEQ ID NO: 841600 - DNA, 115 bp, Homo sapiens
tttgcaaactgcgcccattttgtggggctgaatccgcccgggctacgctcctccatcacgtgaacattctagtatgccagtagaaaaaaatatcactttagaaaggccttctaat

SEQ ID NO: 841601 - DNA, 100 bp, Homo sapiens
cgggttggaggaggtgtggggccgctgccgccagcccatctgctggcaaggctaagattagaacagctcataggagagtcatgattttgaatcacccaga

SEQ ID NO: 841602 - DNA, 98 bp, Homo sapiens
aaaaataaggaattgcagtgtgattttctttccccctttaacttagaggaacgaggattatacagaaatttgaaggctcagaatggaatgcctccaac

SEQ ID NO: 841603 - DNA, 100 bp, Homo sapiens
atcagccatgaggagcagaagtcagtccggctgccaaggttcagaaattgcctctcaaggacgggaactggctaatcatttccaaagtgaaggaactcca

SEQ ID NO: 841604 - DNA, 99 bp, Homo sapiens
gaagctcttagacaaatctatctctctggacttcattcctggaaaaagaagttcatcagattcaagaagctgctaacctgtgccaaacctccacggctg

SEQ ID NO: 841605 - DNA, 100 bp, Homo sapiens
atggaagagacgcccctgctaacgggaatgcttccctgtgggccttgctcagagcggagaaagcatttgtttgtacaagatccgcagacgtgtaaatgtt

SEQ ID NO: 841606 - DNA, 100 bp, Homo sapiens
caccggcggctaccggcggcggcgcgcagcgtgtcaggcggagagacccgccgccaggacaaaagatccttcatcaccgaagtgacgttttagaaacagt

SEQ ID NO: 841607 - DNA, 100 bp, Homo sapiens
cttgttgaaatccgaaatttcttgggtgaaaaatatatccgcagggttcggatgagaccagcactattcatggccgaattgatcaagtcaaccaactcct

SEQ ID NO: 841608 - DNA, 98 bp, Homo sapiens
agggacgtgttggacacgctgactttgtaggctccgccaagaggcgccgcaggaggtgatgatgaacagtctacacagatggctgcaagttgggaaga

SEQ ID NO: 841609 - DNA, 100 bp, Homo sapiens
cggatctggccaacaagacgcacccgtccatcttcgggatcttcgacgggcacgggggagaggtgtctttcctgaagactatcttcccgtctcaaaatgg

SEQ ID NO: 841610 - DNA, 98 bp, Homo sapiens
acctgggccgggccgtgcagctccaagagctgtggcccgggggcctcttctggaccaggaaactctccacaggcggatgccccaaaccttccgtgacc

SEQ ID NO: 841611 - DNA, 100 bp, Homo sapiens
agtgactggcgcgtacgagatctccgaccagtctgggggcgctggcggcctgcgcagccacctcaaggggtctccttatgccagggaccaggttacccta

SEQ ID NO: 841612 - DNA, 100 bp, Homo sapiens
ggaagaacttcttcagaattagaaaggagctgcttcccaataaggaaacagtggaatgaatcttacttgttgaatatcttctggttactagttggattca

SEQ ID NO: 841613 - DNA, 100 bp, Homo sapiens
gaacatggctagcaggaatgcttactgttgcgtggttcgttattaacagtacaaggcgagtggataattccaacacaagactggcagtccaaattgaaag

SEQ ID NO: 841614 - DNA, 100 bp, Homo sapiens
aaatctgatgactcatatctgcaaagaacagaccgttcagtatatactaactatggtggatgatatgctgcagattcctgggaacaccaccatggagggc

SEQ ID NO: 841615 - DNA, 100 bp, Homo sapiens
aaagagaattgcattatatattggaaatctaacatgggacaaaattcttctaagcagtggacgagatgcctctcttatggtaaccaatgatggtgccact

SEQ ID NO: 841616 - DNA, 100 bp, Homo sapiens
agatgcctccacacatctatgctatatctgaatctgcttacagatgcatgcttcaagggtggctttgcaaaatgttacgagatgacagatttgacaaata

SEQ ID NO: 841617 - DNA, 99 bp, Homo sapiens
gctcctggtcggcgcgtggctcaagctaggtacaccaggggttggaaaaaccacactaggcaaagaacttgcgtcaaaatcaggactgaaatacattaa

SEQ ID NO: 841618 - DNA, 98 bp, Homo sapiens
gactttggggcccgtcaccctcaggagtctttgttgctggctatgaaagcctgaaaaagaatgaaattcttcatctgaaattacctctcagactttct

SEQ ID NO: 841619 - DNA, 99 bp, Homo sapiens
ctcactgccctccatattgctacaatagctggccacctagagggcaagactggagagttaaatcagcttttaaatgcagttaaatcaatgcaggagaag

SEQ ID NO: 841620 - DNA, 99 bp, Homo sapiens
tcaggcccggcggccgggcggcatagatcgggcccagagcgtctttcctggggagatttcatgatcctttggctgcatggagaaaatgggacagggcct

SEQ ID NO: 841621 - DNA, 99 bp, Homo sapiens
ccaaatcaggaacactgaagagccctcccaaaggatttgatacgactgccataaacaaaagctattacaatgtggaggaggaagccaagaatctggtga

SEQ ID NO: 841622 - DNA, 100 bp, Homo sapiens
gggagattcctgcatcttttgcgctctcaagcaaatggttatgagccttagagtttctgaactccaagtactgttgggctacgccgggagaaacaagcac

SEQ ID NO: 841623 - DNA, 100 bp, Homo sapiens
cttctggcctctgggcatcgcagccttctacttgtcccatgaggctgtacatccttttgaaatcccagagatcttcagtctccctgtggattaaggagat

SEQ ID NO: 841624 - DNA, 98 bp, Homo sapiens
agaaaaacttctttcacatggtacaaatattgaagaatgcagcaaggcattctggaagttttacactgtgttttagtagaaagtccagaagctctaaa

SEQ ID NO: 841625 - DNA, 99 bp, Homo sapiens
ttgggcccagtttatggcttccagtggaggcattttggggcagaatacagagatatggaatcagacggcaccgaaagcgaaggaagctcctgctcctcc

SEQ ID NO: 841626 - DNA, 98 bp, Homo sapiens
ccgggagatccgtagctcagacgccaggacatcccggaagctgggaaatggatgtcatgaccgggccgtcctgctctatgagtacgtgggcaagcgga

SEQ ID NO: 841627 - DNA, 100 bp, Homo sapiens
ctgacagaaggtcagtgccagctggcctgactttacagtctgttagtccccagagcctccaagggaaaacgtgtaaacaggaacatcgataagtagtgta

SEQ ID NO: 841628 - DNA, 100 bp, Homo sapiens
gaggcgagccctggtggaggaagaggtgctttgaagaggaagccattatggatggatgaaggatagtaatgcaatacctccaccttaatttgggtgcatg

SEQ ID NO: 841629 - DNA, 122 bp, Homo sapiens
gctttaaccatagcagcagataaagggcattacaaattctgtgagcttcttattggcagatggggaaattgaggcagagaagccaagacatgtgctaaaggtcatgcaggctatgaatggag

SEQ ID NO: 841630 - DNA, 50 bp, Homo sapiens
tattaatccaccatgtgtgcctttctttgcgttttacgatgggataatga

SEQ ID NO: 841631 - DNA, 100 bp, Homo sapiens
ggtatcatcaaggccttcagaaacatccctggtgtggatgaagcaaccatcattgacattctaactaagcgaaacaatgcacagcgtcaacagatcaaag

SEQ ID NO: 841632 - DNA, 100 bp, Homo sapiens
atggaaatgagaaagaagttaaggagtatgcccaagttttccgtgaacatgccaacaaattgattgaggcttcaacggaccacaccaaaatgccatctca

SEQ ID NO: 841633 - DNA, 135 bp, Homo sapiens
agaagacttgtgtaatcacagtggcaaagaaacttggttttcattacagcctgttgactccaattcagaggttcaggatgaagatgatactatcaaattcctaatcaggaaaaaagctttctgctgtgttcccag

SEQ ID NO: 841634 - DNA, 101 bp, Homo sapiens
atcctcccgactctgcttaaaaccacgtggttcgatggctgccgcggctacgctgaggctctccgctcaggtcctcttcctgatggatgggaacaagccat

SEQ ID NO: 841635 - DNA, 98 bp, Homo sapiens
ttgattcatcagattttgcattggatattcgcatgcctggggttacacctaaacaggtttcaggctctgtataactatactcccaggaatgaagatga

SEQ ID NO: 841636 - DNA, 98 bp, Homo sapiens
aagccattgtcatgcaagccgtccagtggcaaacacgtctacaaaagaagatgggaaaggaatctgcaatggtggcttgctatccgggaaatggaaca

SEQ ID NO: 841637 - DNA, 100 bp, Homo sapiens
tgagagttcaaagattctttgtagcagacactgcaaatgaagctctcgaggctgctaagagactaaccacataaagaagatccctaatagtcatttctca

SEQ ID NO: 841638 - DNA, 100 bp, Homo sapiens
gggaagcgaagaggattccccagcatcctgggacccccacggagaccaagccgtcatgacaacagtgcaaattatggattggatatgtctacttctggat

SEQ ID NO: 841639 - DNA, 98 bp, Homo sapiens
gcattctcttcaatcatgagagtcccagaagaggcacattgcaagcaacccgtgccttgatggtggttggcatcctcctgggagtgatagcaatcttt

SEQ ID NO: 841640 - DNA, 98 bp, Homo sapiens
aagctgttctggccattgatgatgatatcattatgctgacctctgacgagctgcaatttggttatgaggtggagaccattggcgatgcctattgtgta

SEQ ID NO: 841641 - DNA, 100 bp, Homo sapiens
aggcctgatccctgcagcgcgggcaggcggcgtcgcagagcggagctagctggatgcgtccggactcctgcagacatcccagttaccagtgtccttgaat

SEQ ID NO: 841642 - DNA, 98 bp, Homo sapiens
tatgttttagctacaaacatttatctaagggagttctgggaaatcgttcattcatttacagatgaacagaaaagactcttcttgcagtttacaacggg

SEQ ID NO: 841643 - DNA, 99 bp, Homo sapiens
ggtctgagctacagcacaaataactccataatgtctgaaaatactgaaattgatagcagtttgaatggcagcctgcttctgcaaagtggtacgatcgaa

SEQ ID NO: 841644 - DNA, 100 bp, Homo sapiens
ccacagctgtggctcgaaaaacagggtttccggagataatcatgcctgttgttgacctcctgtactggagagacattaagaagactggagtggtgtttgg

SEQ ID NO: 841645 - DNA, 99 bp, Homo sapiens
accggggctgcggtcagcgcttcgatcctgagaccaattccgacgggcgcaccctacgacgcgcacaccaccggcatgaccggcgccatcagctaccac

SEQ ID NO: 841646 - DNA, 100 bp, Homo sapiens
acccacgctgagccagcatactcatgagcctggagacacaggccccatccttcccaatggggacacttcagggagcggctctcaggtcccgagaaagacc

SEQ ID NO: 841647 - DNA, 100 bp, Homo sapiens
gggatgcagcagccgccgccgccgccccagccaccgcccccgccccaagccggcctaccccagatcatccaaaacacctgttcttcccggagcctatcag

SEQ ID NO: 841648 - DNA, 100 bp, Homo sapiens
cttctatgggtcaagaaacagttgaaaagttccggcagagaattctggctccctgtaagggcttcataaacttcacttaccaaatacttcaagggattca

SEQ ID NO: 841649 - DNA, 100 bp, Homo sapiens
gagcttcattcagatgtggtggaatatgccaaggaaaaactggagagcttcatcaaaaatagtgatagctttgataagtctctccaggtgacactggatg

SEQ ID NO: 841650 - DNA, 114 bp, Homo sapiens
cagaagaaaatacactactcatcaaggaagaaccaggatttggaatgccctgacagataattatgggaatgtgatgcctgtagactggaagtcatcgcatactaggaccttgca

SEQ ID NO: 841651 - DNA, 100 bp, Homo sapiens
tgtgtgtaaacatgacttccaagctggccgtggctctcttggcagccttcctgatttctgcagctctgtgtgaaggcgtttaaacagaaatcaccttcag

SEQ ID NO: 841652 - DNA, 98 bp, Homo sapiens
ttgagcaatggtctttgctgtgccttctctactgatggcagtgttttagctgctggtatgattctgactgaaatggaaactcatgaggatgcatggcc

SEQ ID NO: 841653 - DNA, 100 bp, Homo sapiens
agagctgatcccgagcagcgtcatgtacccctatcttcatctgctggtggacgtggcctgcaagcaggagcgctttccaaaggaggaagaattaaaagag

SEQ ID NO: 841654 - DNA, 112 bp, Homo sapiens
gagagtcaccaacagataagaagcagaaagttgagcgcattgcatcacatgattttgaccccacagatgaagattatggaagagattcgggccctcccactaagaaaattcg

SEQ ID NO: 841655 - DNA, 98 bp, Homo sapiens
tctcgaattgtcaagatgtggaataagaactccgcaatggtggcttgctatccgggaaatggaacaggttatgttcgccacgtggacaaccccaacgg

SEQ ID NO: 841656 - DNA, 100 bp, Homo sapiens
gccccgctatgacgtgctgggggtcatcgacagctgcaaggaggccgtcaccttcaaggccgtcagacaagctcagagtcaagatctccactgaagttgg

SEQ ID NO: 841657 - DNA, 99 bp, Homo sapiens
tgaatgtgaaggacagaaatggaaagacgccccttatgattgtagaaggcatgaaacaaaaaatgtggagtattgaaaatattgccttcggttctggtg

SEQ ID NO: 841658 - DNA, 98 bp, Homo sapiens
agcaataccaccagcagcaccagcaacagtggcaatgagaccagtggaagcagcaccatcggggagacaagcaatcttactactttgaccgcgatgat

SEQ ID NO: 841659 - DNA, 100 bp, Homo sapiens
tagcgcgttccggaggcccggccacctctgagaagggagacgacgctgctgggtccgctgagcggggcgacccgagagcagttcagagccccagttgcag

SEQ ID NO: 841660 - DNA, 100 bp, Homo sapiens
gccaccactgcgtcgggctggtgcagccccgggccaggccgcggccggggcaggagcgcaggaaaccaacatgtctgacaaaagtgacttaaaagctgag

SEQ ID NO: 841661 - DNA, 100 bp, Homo sapiens
ctcgcagccgctttggatgctcttcggcctgcacgggaccatcacgcagatccgcatcctcgggttgagaatgcttgcaccaagcttgtccaggcagctc

SEQ ID NO: 841662 - DNA, 100 bp, Homo sapiens
gcagcgtgtagtgcgagtggggcggacgcgcgcagcccgcccgcccggcgaccagcaagattccagcaagattatggaagagcatagctacatacaaaag

SEQ ID NO: 841663 - DNA, 137 bp, Homo sapiens
tgagaagatgtatgaaaattcctactggacaagaatatgctgccaaaattatcaacaccaaaaagctttctgctaggggaactgcaagcacatgttgaccagataactgaaatggcagcagtaatgaggaaagccat

SEQ ID NO: 841664 - DNA, 98 bp, Homo sapiens
ttctgcaatccaagccgactgatgactggagaggatggctactatttcaccaatctgaaagagctatctggtcacaaaaatattgtgggctatttgga

SEQ ID NO: 841665 - DNA, 98 bp, Homo sapiens
aatagatgaatcttctgaattaagagttttggatataccaggacagacatgcgaggattcatgacagcgcatggacagccagaccagcctcgatctgc

SEQ ID NO: 841666 - DNA, 100 bp, Homo sapiens
agggggcagtacgcccgtcagcagcgccaatatgatgtcagatgatggtggtgctaccccagtacaggatgaacgggattcagggtcagacggtgaggat

SEQ ID NO: 841667 - DNA, 98 bp, Homo sapiens
gactccctcaagtacagtgacctgcagaacttagccaagagtctgggtctccgggccaacctgagggaaatattctgctgtacgtagagatggctctt

SEQ ID NO: 841668 - DNA, 100 bp, Homo sapiens
tctttaccttagatggagatatcaaattggaaagtgaagtcactgcttttgctgtcttggatcaagaccagaaagaaattattgataccaatggagctgg

SEQ ID NO: 841669 - DNA, 100 bp, Homo sapiens
taatgggattcattggcttctttgtgaaattgatccatattcctattaataacatcattgtacacatgaatgaccactacacaaacctctacccacagct

SEQ ID NO: 841670 - DNA, 98 bp, Homo sapiens
tcatcaagacttagatcttcttcagaagcttcaagtctcatctgcattaaagctctccattgaaccctctcacaaaaaaagctgtatgtgatggcttc

SEQ ID NO: 841671 - DNA, 100 bp, Homo sapiens
tggaactgtggtccatggtaaagttttacaggtgaatgaggcctctggggatggggatggagaggatgccgttgtgatcctggagaagacgccatttcag

SEQ ID NO: 841672 - DNA, 100 bp, Homo sapiens
catgtcgggttattcgagtgaccgagaccgcggccgggaccgaggttgctctaggtcgtaaccagcctttgaaaaaggagaaaccaaaatggaaaagcga

SEQ ID NO: 841673 - DNA, 99 bp, Homo sapiens
cagcgcccagagagacaccagagtattggtaaaggttttcaaggtgtcatgaaaagatggggatttaaaggccagcctgctacgcatggtcaaacgaaa

SEQ ID NO: 841674 - DNA, 100 bp, Homo sapiens
ccaagcaggcctgcgaaggaaacttacccaaagggaagtcttatttgataggtacaagagttacagcccttatgacatgttggaaagcatcaggaaagag

SEQ ID NO: 841675 - DNA, 100 bp, Homo sapiens
agaacctgatgaaaactcatcctctgtaacatcttgtcaggctagtctttggatgggaagctgtaagagctcattttggaggaataatggatgaaccatc

SEQ ID NO: 841676 - DNA, 114 bp, Homo sapiens
tactctgacagtccttagtaaccacgcgaatgagaaagtggagatgctactaggagctgagacgcaggcagccattctacaaaagtggaagctgtggtcagaactctgatgaaa

SEQ ID NO: 841677 - DNA, 99 bp, Homo sapiens
ggcggagccgctgctcgagctgctgctggattgaactcagagaagccgggacaagttggatggcttgaggactggtactaaaaggaaacgtgactggga

SEQ ID NO: 841678 - DNA, 98 bp, Homo sapiens
aacaaaactcgctgattttaaaagatctggaacatcgaaaggaccaagtaacacagctttcacaagagctggtcagtgagaaggtcggaggggccgag

SEQ ID NO: 841679 - DNA, 100 bp, Homo sapiens
cgcaggcactgcctgctctgaaaagatttcaaataccggaggagatgttaaagtaacccatcttgcaggacgacattgaagattggtcttctgttgatct

SEQ ID NO: 841680 - DNA, 98 bp, Homo sapiens
taatttccaaaatggaatagaatgtggtggtgcctatgtgaaactgctttctaaaacaccagaactcaacctggtttatgctaaaactatcgatgggc

SEQ ID NO: 841681 - DNA, 100 bp, Homo sapiens
aactgaagtccaaaagatgtctaggttttatggcaggaattcttcctatgttcatggtggagtagatgctagtggaaagccccaggaagctgtttatggc

SEQ ID NO: 841682 - DNA, 98 bp, Homo sapiens
cgaaaatggagcacgtccaggctgaccacgagcttttcctccaggcctttgagactccgctccatcccagtcaagggggctgaagatgatgaactaga

SEQ ID NO: 841683 - DNA, 98 bp, Homo sapiens
acgaagcttaagtagctacaggggaaaatattctgagccgtttccctggggagatggtaaccatactctattccataaccctcatgtgaatccacttc

SEQ ID NO: 841684 - DNA, 99 bp, Homo sapiens
ttgaagaaaagggtgaaggaggcgaattttcagttgatagctcctgtgtcctaccgacctctccactgtatctgggaattgccaaggagaagagtacca

SEQ ID NO: 841685 - DNA, 100 bp, Homo sapiens
gtgcattaccccctggaagctcggaaggatctgaggcggcccctatcagattgaggtccacatcgtggccaccggcacactccccaacggcaccctctac

SEQ ID NO: 841686 - DNA, 100 bp, Homo sapiens
cctcagcctcctaagtagctgggattacagcttctttatgaaaaaggcatcagcctcagggcctccttcatcttcatctctgtctgcagtacctggcatg

SEQ ID NO: 841687 - DNA, 100 bp, Homo sapiens
ttagtgtgctctgagggagggtccgagccagccgctgttttgccggaggagcccctcaggccatatccaaacacagcctgtgagcttctgacttgtgatg

SEQ ID NO: 841688 - DNA, 98 bp, Homo sapiens
gctgaaggctgcgagggactaagagcagacacccgacagctacaaagtgcaagataagaaaaatgcctccagccgccctgcctctgcaatttcaggac

SEQ ID NO: 841689 - DNA, 100 bp, Homo sapiens
ccacggagtgtatgaccacaaacagccatcaaggaggagatgttaaagtaacccatcttgcaggacgacattgaagattggtcttctgttgatctaagat

SEQ ID NO: 841690 - DNA, 98 bp, Homo sapiens
tttgtaactacctggcattgccttttgttgagatatgcacccaatgtccagggagcgtgcaaaatttgtcaaaagtggccttttattgtaaaacgaca

SEQ ID NO: 841691 - DNA, 98 bp, Homo sapiens
gcggcggccactgccacgtattcccggcagtggtggcggcggcggcggcggcgcccgcgggcagatggagaaggatgaaactgtgagtgactgctccc

SEQ ID NO: 841692 - DNA, 100 bp, Homo sapiens
atcacctgcagtcagtccagagctgcccattcctctgtgacgagggtgcaggtatctctggggactacatcgatcgcgtggacgagcccttgtcctgctc

SEQ ID NO: 841693 - DNA, 100 bp, Homo sapiens
ggtcgcctggaggaccagtatttcccatggagggccaaggacagcgatgatgatgatgatgtcgctgtcaccgtggaccgagaccgcttcatggatgagt

SEQ ID NO: 841694 - DNA, 100 bp, Homo sapiens
tcccttcatgtctgggtcatggagatctataaggacaggcagaaattctcagaacaggttttcaaagtggcctcctcagacctggtcaacatgggcatca

SEQ ID NO: 841695 - DNA, 98 bp, Homo sapiens
tttcctggagaaaaacagagacaccgtctatgacatgctggttgaaatcctgagagcaagcaagaatatccaagggactgagtgaaaagatatttgca

SEQ ID NO: 841696 - DNA, 100 bp, Homo sapiens
tgctaatccagtggaaatcaggagaggagctatcgaaaaaccttgaactgagtactaacagtttccaacgacagttgcttgctgaaaggaaaagggcata

SEQ ID NO: 841697 - DNA, 100 bp, Homo sapiens
gtgctggccaaggtgaagcgcgagcgcgacgagtataagcggagctcctttagcggcagagttttccgagtgaccttcttgatgctggctgtttctctca

SEQ ID NO: 841698 - DNA, 100 bp, Homo sapiens
cggaacttcagaaaaccactcattgttgcttcccctaagatgttactcaggctcccgacttggcatccagagatgagccccagaagttatctccaaaaag

SEQ ID NO: 841699 - DNA, 100 bp, Homo sapiens
aaagtaagcacagaaaatggagacgcacccagagaaagaggctcatcactgtcaggaaactggagcacccatcctaactgatgatgttagcctgcaggtg

SEQ ID NO: 841700 - DNA, 131 bp, Homo sapiens
ctcccagaagaggaaaaggagggcagcgacctgagaccagtggtcatcgatgggagcaacgtggccatgaggttgctatcaagatcatagataagacccagctggatgaagaaaacttgaagaagattttc

SEQ ID NO: 841701 - DNA, 100 bp, Homo sapiens
atggcatccaggagagcccatggcaggaccggcacggcgaaaccttcaccttcaggctggagcctccattccctgccttggtaccaaagtcttgcttggt

SEQ ID NO: 841702 - DNA, 100 bp, Homo sapiens
ctgacttgtgcttggcagcaacatgaagatcattttggacagaataacgggctcccagattcacaagccccaccaagaggatcaccccaggaacgcttgg

SEQ ID NO: 841703 - DNA, 98 bp, Homo sapiens
gagagtcaccgcggcggcgccgggtggtggttaaaccatgttaaggaggattttacagagggagtatccaacccttacaaccttcttcgaaggagaaa

SEQ ID NO: 841704 - DNA, 50 bp, Homo sapiens
aaggaatcgtgctggaaaaagtttttcggctttgtgagaaaccttaccat

SEQ ID NO: 841705 - DNA, 100 bp, Homo sapiens
aggaggagcagctgcgggagctgctggagcagcaggcggcctcggagcagcgcggccgccagcagcgggaacagccaagacaatgcaaactccagtgaac

SEQ ID NO: 841706 - DNA, 98 bp, Homo sapiens
gatacagaccatctgggccagaatgggtaccacagaccatgtcatcgtcctggcgtccacgaaccgagctgacattttggacggtgctctgatgaggc

SEQ ID NO: 841707 - DNA, 98 bp, Homo sapiens
aagaggtcctatgacaggatcaagaacactggagatgatcagacttcctgaatagagaaagcttatgtgctttgttacattggggaacaactgaagag

SEQ ID NO: 841708 - DNA, 100 bp, Homo sapiens
gtaaacccatgctaggagttatacataagccattttccgaatatacaggaaatggctagtgatgagctgaaagagatgcggaaaaacttgaccaaagaag

SEQ ID NO: 841709 - DNA, 100 bp, Homo sapiens
cgactatgtccaattttcatgctcagggtgctgataagactgtgaaaggcccagatggactgaccgcctttgaagccactgacaaccaggcaatcaaagc

SEQ ID NO: 841710 - DNA, 98 bp, Homo sapiens
gattctgaaacttcttgacaatttgcttgcgcttataagagcactgcagcctgtggtgttgaggctcacagcgatgccatccagccctgccacatcag

SEQ ID NO: 841711 - DNA, 114 bp, Homo sapiens
taataatttgcctcaggaagaacttttacagtggatcaaatacagtaccacatcagatttgcttggaacggtagaagaaatccttccaagcctctcagaaaatatcagtgtttg

SEQ ID NO: 841712 - DNA, 100 bp, Homo sapiens
gtgctgaccctgtaacccaaaggaggaaacagctggctaagctcatcattgttactgggaagatcagttttcctgccatccaggctgctccctccttcag

SEQ ID NO: 841713 - DNA, 100 bp, Homo sapiens
cctcggcgccggtgacgtccctcccgctggtcaccactccggcaccaggttagtggttacttggatgattgtacctgtgatgttgaaaccattgatagat

SEQ ID NO: 841714 - DNA, 99 bp, Homo sapiens
ccggctagaggaagaggcgttgcggcgaaaggaacggctgaaggccctacgggagaaaaccgggcgcaagggccggtgcataaacttctcccgagttcc

SEQ ID NO: 841715 - DNA, 100 bp, Homo sapiens
acagaagttacgcaatgtcctcctcgccttctcctggcggaatccagatatcggctactgtcaaggcctaaacaggttacctacctgggcaaagtctcca

SEQ ID NO: 841716 - DNA, 100 bp, Homo sapiens
ctgccgctatggatgatcgagaggatctggtgtaccaggcgaagctggccgagcaggctgagcgatacgacgaatctttggaagaactaccagaaacgag

SEQ ID NO: 841717 - DNA, 100 bp, Homo sapiens
aacccgccactccagaaatccaggagattgttgataagaagacaatagatgtgcatcttcaaatgcagcatcctgtgccaggtgccttgcgctgggtcca

SEQ ID NO: 841718 - DNA, 100 bp, Homo sapiens
accaggacctggtgaagctctgtcaaccggaggagattggacaggctggactccccattgcttttctaaaaatcttggaaactttgtccttcattgaatt

SEQ ID NO: 841719 - DNA, 100 bp, Homo sapiens
ccattatcataattcctgcagctaccacctctttaataaccatgcttaatgcaaaagaccttctacaggacctgaagaatctggtggacagtaacaaact

SEQ ID NO: 841720 - DNA, 98 bp, Homo sapiens
ccgtccccagaacgcagatcagaggtagtcggacctttcccgctggcgcgcagcctcagctagcccaccttgggacaccttgactccaagcccagcag

SEQ ID NO: 841721 - DNA, 100 bp, Homo sapiens
cccgaagccccctgcaggaactctacaacccaatccagagcagcccgacggccatggaggctgaagagacgatggaatgccttcaggagttccctgaaca

SEQ ID NO: 841722 - DNA, 100 bp, Homo sapiens
catggctacttcatattttggaaagcagtttttaagacaacgagcttgacatgatttccacaagggtgatggacattaagcttcgggaggctgcagaagg

SEQ ID NO: 841723 - DNA, 101 bp, Homo sapiens
gaacaatgggaaccagtctttcaaaattattggatacaaatgaccgatttctacgaaaaataaccatcgggcagggaaacacagagaagggccattaccgg

SEQ ID NO: 841724 - DNA, 98 bp, Homo sapiens
attgatttccatgctctgaaagacatccttgggcccccgatgtatgaaatggagggtttttcaggaaatgcaaatgcagacagtgttgtgtactatag

SEQ ID NO: 841725 - DNA, 100 bp, Homo sapiens
gagctcctagatccttgaagtgtgaacttcagcagctgagagttctgttcagaatagtgaacgtggcaaaaaaattggaaacgtcatggtcacaactagc

SEQ ID NO: 841726 - DNA, 100 bp, Homo sapiens
ctggactcatgccccaggaaatgtggaaaaatacagagttgtgtattatcctaccaggggtggaaaaccagacgaggtgtgacagtttgggagttgatga

SEQ ID NO: 841727 - DNA, 100 bp, Homo sapiens
cttatagacccaatcaaaaaagaaactagcaaactttttaatgaggaaagtgatcagcagctggactgtgccttggacctaatgaggcgcctgcctcccc

SEQ ID NO: 841728 - DNA, 100 bp, Homo sapiens
attaggaatgcagtggagatgatgattgcacggttagacacacagctgaagaataagcttataacactgatggtgctcaaagatccagacagcaatccat

SEQ ID NO: 841729 - DNA, 98 bp, Homo sapiens
agaacctctctgatggcgtttctcagacaaatgttgccagagtctgccctccgagacctcatcgtagccaccattgctgtcaagtacactcagtctaa

SEQ ID NO: 841730 - DNA, 100 bp, Homo sapiens
agatacgcggtgcagctgccgacaccccagcctgttgctgacactagtgatatggctttagttgcccctgaagctccttcagaacaagccagaagagttt

SEQ ID NO: 841731 - DNA, 98 bp, Homo sapiens
ttctcctgctctgcagcttctgttcagaattctaccaaatatctggctgggtagctgccctcgtcaggtggaacatgtaaccatcaaactgaagcatg

SEQ ID NO: 841732 - DNA, 98 bp, Homo sapiens
gaaaaaagtggaagcaccaccacccaaagaataactgaagtgaagtgatggactccgatttggagagtagtaagacgtgaaaggaatacacttgtgtt

SEQ ID NO: 841733 - DNA, 100 bp, Homo sapiens
ccatgcgggctggagtacagacaggtgatcgaatcatcaagggttcaagtaaagccagtggttccaagcagcaatggactaaaattctgtggtcttgtaa

SEQ ID NO: 841734 - DNA, 100 bp, Homo sapiens
cgtcactgaggttgcagttggcgtgaaggattcctacaggaagcaagtagtaattgatggagaaacctgtctcttggatattctcgacacagcaggtcaa

SEQ ID NO: 841735 - DNA, 100 bp, Homo sapiens
tgggaatcgtcaccttagaagatgtgattgaagaaatcatcaaatctgagattcttgatgaaacagatttatacagtcagaatggcggcagtggagcatc

SEQ ID NO: 841736 - DNA, 100 bp, Homo sapiens
tcagactcagaagccgacgttcgagaggaagattcttacctctttgatctcgacaataagggggggccctcagcctcttggccttgaacgggctgttcat

SEQ ID NO: 841737 - DNA, 100 bp, Homo sapiens
cagagatccaagtgcgcgccctggcgggtccggaccaagatatgaggccccaggattcctggcgaggtcctcctccccttttccagcagcaaaggtttga

SEQ ID NO: 841738 - DNA, 98 bp, Homo sapiens
aggagccgtgagagcctcaacgtggacgtggtcaagtacgagagtggccctgacggaggggaggaacgagaatataaaaagctctttgaggaaaacaa

SEQ ID NO: 841739 - DNA, 99 bp, Homo sapiens
agaggtgctaagtggatcctctggccagctgactgcacttcttttttgagaaaggaaggaatatatcctgactgattgagatccctgacgacatgggat

SEQ ID NO: 841740 - DNA, 98 bp, Homo sapiens
ttccgggattcctccaggctcactgacattgagagtactatactggcaattgctggagaagattttgcaattgttgcttctgatactcgattgagtga

SEQ ID NO: 841741 - DNA, 99 bp, Homo sapiens
tccagccaaagaaaataattcaggtatcaagttggactagctcagatgactacaaaatggtatcctggatacagccatcgttgatcgggggaggaatgt

SEQ ID NO: 841742 - DNA, 100 bp, Homo sapiens
ttatgtccattttcttcagtgtgcaaagatgtaatgcaacgttgtgatctggaggcacatctcaaaaacagggatagtaaagctctgaaggatgaaaatc

SEQ ID NO: 841743 - DNA, 100 bp, Homo sapiens
ggggtggcgggcgcagctgctgtgacaggaatgaggggagaatcatacttcatcggaatgaggagcccagggcagcagggacacgtccctgaagatggag

SEQ ID NO: 841744 - DNA, 100 bp, Homo sapiens
gagcagttgaaattcttaaggatgctttcaaatcaaatgactcacagcaggaatagcgggttttgcagcaattgttgcatatggattatataaactgaag

SEQ ID NO: 841745 - DNA, 99 bp, Homo sapiens
aaacagtgatatcttcagcgaaagtgaaaccaggttactccacaggatccgctgaacataggatgttgccacaaaatctacctcgtgtatttttctctt

SEQ ID NO: 841746 - DNA, 98 bp, Homo sapiens
tggggatgaacattgacattgccagcatcgatatggtttctgaagtcaatatgtaaaccggtccccttctcgctgcagtgggttgaatcgctctgagt

SEQ ID NO: 841747 - DNA, 100 bp, Homo sapiens
cttttctttataaattacccagtctcagtgaagtttagcaactgcaatggaaaaagaaaagtacaatatgagagcagtgagcctgcagattttaaggtgg

SEQ ID NO: 841748 - DNA, 100 bp, Homo sapiens
gcacgcgctcctacatggctgcagccaacatgcctgactctgagctattcgagctcatctctgagaaccgttccatgtctcggaagctggaagattacgg

SEQ ID NO: 841749 - DNA, 98 bp, Homo sapiens
tcctgagggtcccgcgctgctcttccctgagagtgaactttccatccggataggtagagctgggcttctttcagatatctcttccaaacgcatgatga

SEQ ID NO: 841750 - DNA, 98 bp, Homo sapiens
gtcatcaagacctgggattttggtgaacccagtgacttgattgtaaaaatttacagagcggaatcatatgctggtctccaagagtttaaagcagccat

SEQ ID NO: 841751 - DNA, 99 bp, Homo sapiens
tcacagagaacctgcccaaagctgcatcagagctggggcaacaacccatgactgcaggggaaatgctgtctgtagctgagcacttcctggagcagcaga

SEQ ID NO: 841752 - DNA, 100 bp, Homo sapiens
aatcttctgggagctgaggaaccagatatcttgaaaagctgccagaaaggctttgagcataagatcacagtccaggcctctccaactctggataagcgga

SEQ ID NO: 841753 - DNA, 100 bp, Homo sapiens
aaaagaagattgagcatggggctctagtgcatcacagtgccaaatttgtatcctactgtggggcttcaaacaccaggagaagtggtcgatgccaattttg

SEQ ID NO: 841754 - DNA, 98 bp, Homo sapiens
cggagttgcgtcgccttagtcctcctggctgccgccgtcagctgtgccgtcgcgcagcacgcgccgccggaatagccaggccagaagaaggaaggcct

SEQ ID NO: 841755 - DNA, 127 bp, Homo sapiens
aaaagtttttaagactctcaggcttactgtggatctggattctaaggcaacacttccttgaagaaacaagcttacagtccgatacatacttctgcatgtctatgcgaataccagtggatgaggaagc

SEQ ID NO: 841756 - DNA, 100 bp, Homo sapiens
catggcagcaggctccgaggcgaccactcctgtgatcgttgcggctggggctggaggggaggaagagtcatgtgctgttcctggggcttggatgatgtag

SEQ ID NO: 841757 - DNA, 50 bp, Homo sapiens
cagcggcacagaggtgcttctgccagccattccacagattttgaagtaca

SEQ ID NO: 841758 - DNA, 99 bp, Homo sapiens
caacatctgctacaatgtactggatcgaaatgtccatgagaaaaagcttggagataaagttgctttttactgaaagctgtatgtgatggcttctgtgtt

SEQ ID NO: 841759 - DNA, 100 bp, Homo sapiens
ctcaacctcctgagtagctgaaactacaggttgattcttcaccacactgaaaccattaggaaaaatccttgtggttaacagcagaggcttcagagtgtaa

SEQ ID NO: 841760 - DNA, 98 bp, Homo sapiens
gggcgagttcgaggagaggcaatcaggatacgaaccatgaagatgcgtcaacaagattgctgctaaaattgattcaattcctcacttgaataattcca

SEQ ID NO: 841761 - DNA, 100 bp, Homo sapiens
acaacaaacagagttggagtggatttcctctccacccaatggggaattacatgaacgacagccttcgcaccgacgtcttcgtgcggttccagccagagag

SEQ ID NO: 841762 - DNA, 98 bp, Homo sapiens
tatagacgagattgctcctcacatcatctattgttccatcacagcgtggggtagagcagcggctgccatgctcttctgtggcttcatcatcctggtga

SEQ ID NO: 841763 - DNA, 98 bp, Homo sapiens
agtctcaaaggtgttcctggatttggattccatatggctctcatatcattccattccatctctgccaagatttggataccgcaaaaatttgtgtttgt

SEQ ID NO: 841764 - DNA, 98 bp, Homo sapiens
ttcaggtgcctcattcacatacgtcaaggaaattgaggttgacatcatggacatatgtgagtccatcctggagaggaagcggcatgacagcgaaaggt

SEQ ID NO: 841765 - DNA, 100 bp, Homo sapiens
gcgagcgttgggtgtggaacatcattctcaccaccagtctcttctctggtacaggtttgcagattccgccagcagcacagcaagctctacagatgagtgg

SEQ ID NO: 841766 - DNA, 100 bp, Homo sapiens
ggtgcctaccaagaagtctcagatcttttctacagcttctgataatcaaccaactgttacaatcaaggtctatgaagaccatgctcgacagctgaccaag

SEQ ID NO: 841767 - DNA, 100 bp, Homo sapiens
ctgttgcctatccagaagaaaatacactactcatcaaggaagaaccagctagagttgggaagacatcactgattatgtctctggtcagtgaagaatttcc

SEQ ID NO: 841768 - DNA, 100 bp, Homo sapiens
ctgctgtgtttggtgccatcatctcttactttgaacagttttttgaaactgttggaatttctctggcaaatcaacaggagtaagtccatgagtgatgtca

SEQ ID NO: 841769 - DNA, 100 bp, Homo sapiens
aatgattgaatctggtgttatcaacttaaaagatgccacctctaaggctgggaagacgccgatggatctggtgctacactggcagaatggaaccaaagca

SEQ ID NO: 841770 - DNA, 100 bp, Homo sapiens
tttgtgaagcggcagctgaggagactccggcgctcgccatggccgacgaaaagcccaagatggtcatcatgggccagtgctactacaacgagaccatcgg

SEQ ID NO: 841771 - DNA, 100 bp, Homo sapiens
aaggacaatatatatctccatttcatgatattccaatttatgcagataaggtaacacaagtggcaagacagccgggaacccctaccccatccccttattc

SEQ ID NO: 841772 - DNA, 98 bp, Homo sapiens
cagtggtcgcttcttctccttgggttgaaaggaggagcaggaggtactgatggacaaggaggtaccttccggtacacctttcatggcgatcctcatgc

SEQ ID NO: 841773 - DNA, 98 bp, Homo sapiens
agttttggaactagcagatgctggcgacctatccagaatgatcaagtgtctttctcgagaagcaggtggaaacatgagcattcagtttcttggtacag

SEQ ID NO: 841774 - DNA, 98 bp, Homo sapiens
ggccgaagtggctaaccaagaaactaaagaagacttacctgcggaaaacggggaaacgaagactgaggagatcaacaggcacttgcatctatcctaag

SEQ ID NO: 841775 - DNA, 99 bp, Homo sapiens
gagcaggcagagagcagaagatattcacagacatgcggaatttgaggatcacctgctgttaccagctaccacccataacaagaccacaagaccaaaaat

SEQ ID NO: 841776 - DNA, 100 bp, Homo sapiens
accgtggatcacctgaaaatgctgcatacggcaggagggaaagctccatgttgttcactggaattcagacaaataccccagctttgttgaggcagctcat

SEQ ID NO: 841777 - DNA, 100 bp, Homo sapiens
aatgcacaattctatctcttgggcaatcttcacggggctggctgctctgtgtctcttccaaggggtggcctggaggccaagcagatgtggcagttctgca

SEQ ID NO: 841778 - DNA, 98 bp, Homo sapiens
agaaatggaaaaaggacggtgttcttggtcaactctggtttatgcatgtatgatggttttcttcttgagcaacatgattgagaaccagtgtatgtcaa

SEQ ID NO: 841779 - DNA, 100 bp, Homo sapiens
gcctttgctggacagatgaagagtgacttgtttctggatgattctaagaggaaaggaaacagattcattgtctgtctgaggatgagttaagttcttctac

SEQ ID NO: 841780 - DNA, 99 bp, Homo sapiens
ggaaactaaaaacgcatctatctaacgtttaccctagcaaaccagaaggaaaatcacctcggcagtgtttgaaggaaggatactgcaactctttgaagt

SEQ ID NO: 841781 - DNA, 100 bp, Homo sapiens
acgagtgcgggcagcagcagccccggggcccggagaggcaaaaactgattattccaagtggaagttgccctgttattctgaatacttacttttgtgagaa

SEQ ID NO: 841782 - DNA, 100 bp, Homo sapiens
cagatctccagctattgaagggaaattcagtgaacattatcactccttgtgtaaagcagtgcatcacctagcaactgttgactgcattttctccctggcc

SEQ ID NO: 841783 - DNA, 100 bp, Homo sapiens
ggatcactactcttggaatcaaagataaatccaaatactgcatatcagaaacaacagatatgattcatcaacttccactgttgacagaaaaacagtacat

SEQ ID NO: 841784 - DNA, 98 bp, Homo sapiens
ggctcccgctgcctgcaccatgtccgccagaggttggacacgagttgccgctggttgtccaaatcaacaaccaggtcgtccagctcctgctgaagcct

SEQ ID NO: 841785 - DNA, 98 bp, Homo sapiens
ctgcccaaccgcacggtcaccctgactcaaatggatgctaaaaagccaaggaaatgtgatttgactcccttcctggttttgaaagcaagaaagaaaca

SEQ ID NO: 841786 - DNA, 99 bp, Homo sapiens
aaaatgagcagatactgaatgtaaaccctgcagactgcttttggcttctggatgccctcctccagtacacatcgtatggggtgacaccgcctagcctca

SEQ ID NO: 841787 - DNA, 100 bp, Homo sapiens
atgcaactgatagcagctctgatgacgatttggatgaatatacccttagaaaaaatgtggcagttgcctacaccaactaatgttacaattgaatcctata

SEQ ID NO: 841788 - DNA, 100 bp, Homo sapiens
agctaaaattgcctttggacagtctatggatctacattataccaataacgagaagatgcaagtggaccaggaggaaccacatgttgaagagcaacagcag

SEQ ID NO: 841789 - DNA, 99 bp, Homo sapiens
actgccttgtcagtggagaagaccagcaagcgtggcggcaagatcatcgtgggcgacgccacagagaaaggacaatcagagatgacttggttgtagtgt

SEQ ID NO: 841790 - DNA, 98 bp, Homo sapiens
aggattccagtggcaatgaaacacattttactgggaacgaagttggttttttcaagcccatatcttgccgaaatgttgcatctgggggaggtgttgta

SEQ ID NO: 841791 - DNA, 98 bp, Homo sapiens
tgatagctgcagagaagaaatatttttctttaaagcctgaagaaaaggtgttccaagatgtacatgttatgatatttgttgggtttggcttcctcatg

SEQ ID NO: 841792 - DNA, 100 bp, Homo sapiens
tctaccacaacaactgctacttcagttgcgcagacagtatcaattgttgcgaagctctttggtgaataatagaactcaggccaaggtagcggaggagctg

SEQ ID NO: 841793 - DNA, 100 bp, Homo sapiens
ctaactctagaagaaatgaaaaaacaggctgctgtccagtgtcttcgatctgcttctgatgaacatcggcgtgtcataagatccatcacagctgcaaaat

SEQ ID NO: 841794 - DNA, 100 bp, Homo sapiens
caactcagagaacaacagaaaactcaaaaaccatctggtgctgtggattgcaaccttgaatatttgtgaagctgggaatcatttcatcaatgtaatgttg

SEQ ID NO: 841795 - DNA, 141 bp, Homo sapiens
tagccacggtgtggcagctgctctgaaccaggacctggacccggacccaaagtgccatgtctttaatagagatgcaggtcagctcctccagtaccacaacttctgagagtcaagatccgtcttctggggaccctgccgtca

SEQ ID NO: 841796 - DNA, 123 bp, Homo sapiens
agccatcaggtaggctgcgttgaggatctttgctcttccatccgcctttgatcgtcttcctcttcagccatccagtgttccttgcctgtatctccccttggttcaatagctaccagatttttg

SEQ ID NO: 841797 - DNA, 100 bp, Homo sapiens
gcctcccaaagttctgggattacagatcctcttctcatgtagacggctttcttccaagtggtggtgatgatggtggtggtagaaggagctttgtgaggag

SEQ ID NO: 841798 - DNA, 100 bp, Homo sapiens
gcaacaagtgtctttggttataaattatgatctacctaccaatcgtgaaaactatattcacaggttcttggtgagattcaggaaattgtgaaaacagggc

SEQ ID NO: 841799 - DNA, 98 bp, Homo sapiens
cagaaggattctcggacatctatctgctgtttactgtgtagcatttgataggacaggacatagaatctttacagattacaaggcagaggaagacccag

SEQ ID NO: 841800 - DNA, 99 bp, Homo sapiens
tttctgctatccatattgatcgcctggactgtgcagtatttccagtctgtctcaggttccccagcaccgccactgccatctgttatgtctcctagcagg

SEQ ID NO: 841801 - DNA, 98 bp, Homo sapiens
atctgtagagactgatttgcaacccttccgggaagccatagctctgcatgaatattccgtcaacctcaaggccacttgcttctgattggtgttagtgg

SEQ ID NO: 841802 - DNA, 98 bp, Homo sapiens
aataaacatgcaatgaacccaaaaggattgatgtacagctatatattttgtcctttctttcacctcatgatctgtgtcagttgggaagtacaaatcat

SEQ ID NO: 841803 - DNA, 100 bp, Homo sapiens
catggccgatgggggcgagggcgaagacgagatccagttcctgcgaactggtgagctccacaagtactgcactgcttgggatgaagctgacgtcaggttc

SEQ ID NO: 841804 - DNA, 99 bp, Homo sapiens
tgcagcgggcgcgtctgcggctggtgttggcgcatctctaggtgccaggtcgacctgtcagccctcagtagggaacagacgcacaagctggagttgcag

SEQ ID NO: 841805 - DNA, 100 bp, Homo sapiens
ccattcaatctccgcggcagccgagcgtcgggaacccaccaagaccaacctggtcacattcttccataccgacctcagcggttacctcccacagaacgtg

SEQ ID NO: 841806 - DNA, 98 bp, Homo sapiens
ggtgccgccctatggatgggagatgacggcaaaccgagatgggcgagactacttcatcaaatttcaagttattcaggaccttgttgtatcagtgttga

SEQ ID NO: 841807 - DNA, 100 bp, Homo sapiens
gagtctggagtttatctggagtgaggtggccggttcttggtgggatctgagcagtcgaggctgtctgtcaacagcgtgactgctggagactactcccgac

SEQ ID NO: 841808 - DNA, 100 bp, Homo sapiens
tgttatgtatcataggtactgggaagaatacagcaagggtgcagactatatggactgcttatatagtggctgcttcaacccccaactccactgctggtgc

SEQ ID NO: 841809 - DNA, 100 bp, Homo sapiens
ggtggacctcaggagcctcctaaaaccacaggcacgtgtggttctcaaatataggcattctgatgggaacttgtgtgttaaagtaacagatgatttagtt

SEQ ID NO: 841810 - DNA, 100 bp, Homo sapiens
tccagtggaggcattttggggcagaatacagagatatggaatcaggtcttgttgcagtaggagaaagagcacaaaagaggtctgggaacttctctgctgc

SEQ ID NO: 841811 - DNA, 100 bp, Homo sapiens
gagtttgagtaaaggtggaaacataatggaacagaattttgaggagaccaagacacattccaccccagtggggggtcccataccactcatggatctgaat

SEQ ID NO: 841812 - DNA, 100 bp, Homo sapiens
tcggcctcaacatgaatggctactttcacgaggagcaggtgcggacccacgaggccaagctgaaggccatggcaagtgagctgcgggagcaccgggccgc

SEQ ID NO: 841813 - DNA, 101 bp, Homo sapiens
cattcatcattttctaatcatcagcatttacatgacagaaatcacctatgtttacagcgacagactcagaaccgtgctgcatactatcctcctagccaaat

SEQ ID NO: 841814 - DNA, 100 bp, Homo sapiens
aggaaaatctactgccatagttcacatacagctaaaattttggtatcagatgatcttgcctcctcattttgataaatccaagaaatatcctctactatta

SEQ ID NO: 841815 - DNA, 98 bp, Homo sapiens
gccagcagccgtccggagccagccaacgagcgcccctctgaaatcaaagagatcttgcatctggctggactcaatgagctggaggtgattcccttggt

SEQ ID NO: 841816 - DNA, 100 bp, Homo sapiens
ctgtccaaggacaaactcttcaagccttcctttgatgtgaaggttgctccttgagggcaggacagttcttatggctttatccgttgcgtaagcacagaga

SEQ ID NO: 841817 - DNA, 98 bp, Homo sapiens
ccgagtgccggcttctcccctacgcgctacacaagtggagctccttttcctccacctaccttcccgagtgtgcattgacaacgtactcagaagattat

SEQ ID NO: 841818 - DNA, 100 bp, Homo sapiens
gatggcggccaatgtgggatcgatgtttcaatattggaagcgctttgatttacagcagctgcagatgaaggatttgggggcagagcacttggcaggtcat

SEQ ID NO: 841819 - DNA, 100 bp, Homo sapiens
agttaatccaggtgagactttcacaataagagcagaggatggaacacttcagtgcattcaaggtgttgctgcctatgttggctggcaaagctcctcaatt

SEQ ID NO: 841820 - DNA, 124 bp, Homo sapiens
tccgacgagcgctgcactaacgcaggatccggctgccgaaggtcctcgccaggtatagtagttgaagattgtttgattttgctccaaaacttattaaaaaacaacaactccaatcaaaattttt

SEQ ID NO: 841821 - DNA, 50 bp, Homo sapiens
atgccagcagcttgttgtacaagttggcgtggacctggatgaaaatctga

SEQ ID NO: 841822 - DNA, 100 bp, Homo sapiens
taaagcctgtgggctttcattttcagtctttagaaagaaggcctttccccctggtgctcttcatcctttaccaaagagacaagcacttgaaaaaagcaat

SEQ ID NO: 841823 - DNA, 100 bp, Homo sapiens
ccagtattatgatgctcaatgtcaagtcatctttggctcaactttagccacagtagaagacttccagattcgtccacatactctctatgtacattcttac

SEQ ID NO: 841824 - DNA, 100 bp, Homo sapiens
cgagatgacctctatgctgagcagggtcatcacactgaaacggtgttcaaccgggttttgccagggcctattgcaccagagagcagcaagaagcgggccc

SEQ ID NO: 841825 - DNA, 98 bp, Homo sapiens
tgtcgcctgcagctgctcgcctgtctccgtcggaagggagcccaagctttgcagagattgctagtcatagtggctatgtgcagattgactggaagaga

SEQ ID NO: 841826 - DNA, 100 bp, Homo sapiens
agagacatcaaaccagagaatctcttgaaagtctttatctcttgcaaggttcagtagtggcagatcatgactacattggattgcctgaaattccgattgg

SEQ ID NO: 841827 - DNA, 100 bp, Homo sapiens
tttatatatttatatttactatggtggaaaacaaaccattttgaaagtgcttacctttaactaggaatagatgcatttgctaaaaagtgaaacatcagta

SEQ ID NO: 841828 - DNA, 100 bp, Homo sapiens
tttagatatgaaagtgattttgatagaagactttcgagagtgtatacaaatgacagaaagaactctgcaacatgatacttgattgctgtgcccaacagag

SEQ ID NO: 841829 - DNA, 98 bp, Homo sapiens
cagaatcacgcggacatcgtctcctgtgtggcgatggtcttcctgctggggctcatgtttgaggctcagcctctgaggaaagaacctgaaataatcac

SEQ ID NO: 841830 - DNA, 98 bp, Homo sapiens
gaagtttgcccccaagggtcctgaggaggatcataaggcctgagctcaggccttacctcgtgcacatacctagacttaattcagtgcacaaatgagat

SEQ ID NO: 841831 - DNA, 100 bp, Homo sapiens
caggaacaggactgactccagtgatgacgcaggccttaaggagaaagtttcaggctgttgaaaatcctacagctacagagattcaagatgtatgttcagc

SEQ ID NO: 841832 - DNA, 98 bp, Homo sapiens
gcggcgacggtggtggtgactgagcggagcccggtgacaggatgataacgaaggaggcccaacttcattcaataaggagcctgacggatttatcccag

SEQ ID NO: 841833 - DNA, 100 bp, Homo sapiens
catgaaggctagtttggatgtggaggggaatagactccatctatccatatgaggttacaagatgttcacctaagattgagacctagtgactacatttcct

SEQ ID NO: 841834 - DNA, 98 bp, Homo sapiens
agaaggccctcaccagatgcagccctagactttggacttctcagcctttgtacctgctctttaagggtcacccagagactctggagaagtttgacaag

SEQ ID NO: 841835 - DNA, 100 bp, Homo sapiens
tttggtcagtacagaagaacatggttttatatcacaacaattgaagttccagattcttccattttgaaaaagcagcccatgacccatcgagaaactgcac

SEQ ID NO: 841836 - DNA, 100 bp, Homo sapiens
ggaggccgaatgtgcaggatcaccgaggggaaagtgagcttgacaggtgtggttacagaggaggctacatggaggtgatcaacctgcaccctgagatcaa

SEQ ID NO: 841837 - DNA, 100 bp, Homo sapiens
caggctcatcgagaaggcgtctgcgagaccatggagaacggtgacttttttgaacgaaccattctgtgcaacagccttgtgtggagttgtgctgtgacgg

SEQ ID NO: 841838 - DNA, 98 bp, Homo sapiens
cgctggaggagcgaggcagctgtactaggactgggaacggtgacaccacagccaaagccctatgggaagctttactgaacactaagcacaaagaggca

SEQ ID NO: 841839 - DNA, 99 bp, Homo sapiens
ctgagaatacttgctgaaaaggaagttttctggaatggaaaacattcagaactctcagaacttaatgtgaaagtgatggaggccctttccttatatacc

SEQ ID NO: 841840 - DNA, 99 bp, Homo sapiens
tttggactatgtttcaagctgctcaaaaactgggaggatatgaaacagtacaccagaggatcgcttcctggcagaatttgggagctgtttattgcagca

SEQ ID NO: 841841 - DNA, 99 bp, Homo sapiens
tgagaagcccggcgacggaggaacgcaggtctgctgccagattttctaccctagcaaggatggtacgaagattccaatgttcattgtgcataaaaaagg

SEQ ID NO: 841842 - DNA, 100 bp, Homo sapiens
cagcctctggttcagactgcagtaaccagcaccatactggacataccttttatgtgcactgggactttttatttaccagtcactggatgctattgatggg

SEQ ID NO: 841843 - DNA, 100 bp, Homo sapiens
ttcaactacactgaatgtggctcagataacaacgaacttgatgcaagtgataggtttgccaaggtcagacctctcatcatccggatgaactgcaatttcc

SEQ ID NO: 841844 - DNA, 99 bp, Homo sapiens
tgggattaatgctaaatttgtgaatgctgtgtatgataccttacttaatactttgattgcttatgcgtcaactgcagatggatattcagcagatctgcc

SEQ ID NO: 841845 - DNA, 100 bp, Homo sapiens
cgctcacttttacctgtttggattaatatgtctctgttcagggtatcactgggatacatcagattggatgccaagcgttcctctgccggacatacaagag

SEQ ID NO: 841846 - DNA, 100 bp, Homo sapiens
acctgcctggcagtttgcacacctgtaaactgaagctgcaggaggaccggcgacagcaagagccaagctggggatgccgcagttcctcagtggggaggca

SEQ ID NO: 841847 - DNA, 99 bp, Homo sapiens
caggattctggaaccgtggagacaccgagaaaccatgagtgtaaggttaccccagagtatagacagttttgagtatccgaggagcccaggaggaggaac

SEQ ID NO: 841848 - DNA, 98 bp, Homo sapiens
ttgcaagaaacctcaggacttgagtaacagcaacatgctatcagaggactcctgaaacctggagagctacctgctgtataaaggctggcctgagggca

SEQ ID NO: 841849 - DNA, 100 bp, Homo sapiens
cgaaatgctatcagagtcaatcctagacattataatgcatgccagttctggtgactcagtccgcagctatagttccagtaagaactaaaaaacgtttcac

SEQ ID NO: 841850 - DNA, 100 bp, Homo sapiens
cgttaaggtcattgatggcccccactcactcgtccgtagattggaatcgccctgaagatgtagaccctcaagggatttatgtcatatctgctccttccat

SEQ ID NO: 841851 - DNA, 99 bp, Homo sapiens
ccagagatggacggtcactcagcctatggagactggtcgaattgacaaatcttaccctacagtatgtggccacacaggaccagtgctggacatagactg

SEQ ID NO: 841852 - DNA, 98 bp, Homo sapiens
ctggacatgagcagcggctgccggtcctgggactaggccccgccattttggatccgctgacaggctagggaacctcgccctgcaccagccccaatcag

SEQ ID NO: 841853 - DNA, 100 bp, Homo sapiens
cagagtagacaagccctcaaggatgcccggtccccatcaccggcacacattgtcgcgttactacaaggagacctctggcctgatgctggacgttggtccc

SEQ ID NO: 841854 - DNA, 100 bp, Homo sapiens
cagataaatacctttgatctaagggttcagcctttcaatgtgacacaaggaaagtattctacagggaccagttactctccacaagaaaattcacacaacc

SEQ ID NO: 841855 - DNA, 100 bp, Homo sapiens
caccgaaacctcatccgcctctacggggtggtgctcacgccgcccatgaagatgtgtccttgaatccgacccctactttgggtttgaagaagcaaagagg

SEQ ID NO: 841856 - DNA, 99 bp, Homo sapiens
tcgtcctgagaggagtgaaggcggcaaaatggcggaccgcttctcccgcttcaacgaagaccgagactttcagaattctgcttggtcagaatcgtgatg

SEQ ID NO: 841857 - DNA, 98 bp, Homo sapiens
acttaatacagcaagaaagaccatcaagtttaccaccaacatcccatgcaccatcgtggagactggctggatgccctgtgctctatcagggcatgtca

SEQ ID NO: 841858 - DNA, 100 bp, Homo sapiens
gatcaagaaaccatggcatttgaaggtgtagaatgagccaaggagactcaaacccagcagctattccgcatgcagcagaagatattcaaggagatgaccg

SEQ ID NO: 841859 - DNA, 98 bp, Homo sapiens
gaggaggaggcggcgcccgcggacgcaggggcgttcaatggtatctcagatgaagacatcatcaacattactcttcctactggagtccccattcttct

SEQ ID NO: 841860 - DNA, 109 bp, Homo sapiens
attctgtgtgctgtcggacccagagggtgacggcgccgctaggatgaagctcgtgagggcatgaaaatcaacatggacaagaatcggaggcgaaagccagcaagcgact

SEQ ID NO: 841861 - DNA, 141 bp, Homo sapiens
tcgcgtacgggcttcccgagctgacgtggcttgaattgggaggggggcagctggagcctcaggcggcagcgcttctagtgccggtggtggtgtgcacattgagccccggtatagacagttcccccagctgaccagatccca

SEQ ID NO: 841862 - DNA, 98 bp, Homo sapiens
aatattgtcttcttcgctttagacaacctccaagtctattataaatagtatgctacgggacccttctcagattccagatggagttctagcaaatcagg

SEQ ID NO: 841863 - DNA, 100 bp, Homo sapiens
ccttcgcctcatcctaggagaggagcagctagaagggacttccaatagtagtcagacattatcatcctgtcatactatggagccatgtacatcagatgaa

SEQ ID NO: 841864 - DNA, 99 bp, Homo sapiens
gataaactgctgctggcctggagggaaatggagcaggctgtggagctctgtgggcggattggccgcgtaatccaggttgctgctgggagcagcaacctc

SEQ ID NO: 841865 - DNA, 98 bp, Homo sapiens
ggacacatggacgagtgtctcactgtcccttcaggagaacatggtgaagagcagcggagagccaaataccacaagttgaaatacgggacagaattgaa

SEQ ID NO: 841866 - DNA, 100 bp, Homo sapiens
tatactttggttacctatgtacctgttaccactttcaaaatttttgaaatcatgaatcctgtttatagtcctggatcttctggggttccctatgcaaatg

SEQ ID NO: 841867 - DNA, 98 bp, Homo sapiens
cctgaagacatccagatcattgcctgtccatctatggaacaggaacaggagtacagctgtgtagtaaagatgccttctggtgaatttgcacgtatatg

SEQ ID NO: 841868 - DNA, 102 bp, Homo sapiens
ttcgtccaaggccatgggcatcatgaattcgtttgtgaacgacattttcgagcgcatcgcaggtctagtgacggagcccgcgcgcggcgccaccatgcggca

SEQ ID NO: 841869 - DNA, 98 bp, Homo sapiens
ggcagcccttaaaaaaggaataattggaggagtcaaagttcatgtggatcgtctacagaccccaagactgcttctgagacagaaacagatatctgtgc

SEQ ID NO: 841870 - DNA, 99 bp, Homo sapiens
ttcaagggatatggacggataagagatattgatctgaaaagaggctttggttttgtgccgctttggcagagatcacggagatggtggcacagctccacg

SEQ ID NO: 841871 - DNA, 100 bp, Homo sapiens
ggcatctctcatcctcgtcttgaaaccctgaatctcaaaggaactccctcggccacagtctccctccgatctggatagcttggacgggcggagccttaat

SEQ ID NO: 841872 - DNA, 100 bp, Homo sapiens
atgtcctaagacgccaggaggagtttgagcataaggtacttcaggtcatgccttctgacagcttctttttttccattgtccgagacccagcggctctggc

SEQ ID NO: 841873 - DNA, 100 bp, Homo sapiens
gaggaatgacaaacaaccagctcttcagataagcatggattcctggttcattcttgttctgctcggcagtggtctgatatgtgtcagtgccaacaatgct

SEQ ID NO: 841874 - DNA, 98 bp, Homo sapiens
gcaaatggcggacttcgacacctacgacgatcgggcctacagcagcttcggcggcggcagagggccgtttgagcaaggaagacattgaacgtatggtc

SEQ ID NO: 841875 - DNA, 100 bp, Homo sapiens
tgaagatcatgacattgtagtacagtatccaagtggcaatagaatgctgcttctaaattacttgggcaaaattgggtccaaaacgcctttgatggcagct

SEQ ID NO: 841876 - DNA, 98 bp, Homo sapiens
cagtcgcaggacgaaggggccgacagcttccacagcttccaccaaagggaacgttggatagaagaattgattcggaaggccatgcagctaactttgta

SEQ ID NO: 841877 - DNA, 98 bp, Homo sapiens
gccgccgggcgcttctagtcggacaaaatgcagccgagaactccgctcgttctgtgcgttctcctgtcccaggccaccattgacttggtgatcggcta

SEQ ID NO: 841878 - DNA, 99 bp, Homo sapiens
gcgcacaatcggggcaccgagctcgttctttctaccacactcccgaggaagctcccatggacaaagccggataatccgaaaggcgtacctggaagactt

SEQ ID NO: 841879 - DNA, 98 bp, Homo sapiens
agacatcaagattcgagacgcttatcagatgctgaagaaacaagaggttcaagcagttcttctcactgacattttagttttccttcaagaaaaagacc

SEQ ID NO: 841880 - DNA, 116 bp, Homo sapiens
ggagggatttatttgcacatggggaaggcctggtaaagtggttcctgacggagacttcgcccttcatgtggtccaacctgggcattggcctagctatctccctgtctgtggttggg

SEQ ID NO: 841881 - DNA, 110 bp, Homo sapiens
gcaactggaaaatcatccgatcggaaaacttcgaggaattgctcaaagtgctggatagcaaaattactcagtgggaagacccaagactgcagaacccagctattactggt

SEQ ID NO: 841882 - DNA, 100 bp, Homo sapiens
gaagctggtgccaaagtggttgcgctcgaaagtgacaaaacttttattccacatttggaggtcactggagttctggatgattgcttgtgtgatattgaca

SEQ ID NO: 841883 - DNA, 98 bp, Homo sapiens
cacaagctgcacttcctgcacagctccctcgtgaaagatgcttctgttcctctgattgatgttacaaacctccctactcctcgaaaattccttgatac

SEQ ID NO: 841884 - DNA, 99 bp, Homo sapiens
gaagtcagttccttgtggagccggagctgggcgcggattcgccgaggcaccgaggcactcagaggagaaagctctgggtgtgcggcagtaccatgtggc

SEQ ID NO: 841885 - DNA, 100 bp, Homo sapiens
ttggagtgaaatcaggaacatctctttcaatgacaaaaagtttgtcattaaacccatcgacaagaaggcacctcttccaatcagaagactatacaacctc

SEQ ID NO: 841886 - DNA, 100 bp, Homo sapiens
ctaatttgaaccatgtttggattgaagccgcctctgtattacttaccaggaccaagaatcgccttcagccctgtctggtgcatccttggcagaaagtgag

SEQ ID NO: 841887 - DNA, 100 bp, Homo sapiens
atttccaagcctctcaaggaaaggggggaaaaaacctttctggggtcttcctatcactgggctctaatttcactttgcaactggtgactgtgatgcttgt

SEQ ID NO: 841888 - DNA, 100 bp, Homo sapiens
aggcggcgccatcttcgaacttagacttccggaaggactttggcgagggtaacggcgactgtgactgtggtgaatgtgtgtgcaggagcggctggactgg

SEQ ID NO: 841889 - DNA, 98 bp, Homo sapiens
gagccagcggctgaggaggggccccagcagcccccgaaggccctatcaggacatggagtatgaaagacgactagacgcttgaagcaaagctgccatcc

SEQ ID NO: 841890 - DNA, 100 bp, Homo sapiens
ctgggaaccttccccagccatggcttccctggggcagatcctcttctggaggaaggggagctttctggagggcagtgaggtccgaacgatcgtcattaac

SEQ ID NO: 841891 - DNA, 100 bp, Homo sapiens
tggaccctgcccagcagaatttgtatagagatgtgatgttggagaactacagaaacctggtctccctaggttttcctcctccaccaggcgctccacctcc

SEQ ID NO: 841892 - DNA, 100 bp, Homo sapiens
tccggcgtcgggaaatggcggcggggggcaggatggaggacgaaagaccacagcaagattctttcattcgtctcctcctagcctgggggaccaggctcga

SEQ ID NO: 841893 - DNA, 98 bp, Homo sapiens
tcgagccccatctattcattttctgagagtgttaatctgtctgaggctactaatgagggatccatgttatcagctgtggatcggtccgtttcatcaag

SEQ ID NO: 841894 - DNA, 100 bp, Homo sapiens
ccgacccttaccctcagcgagagaagtaaccacggagtctcactgtgttgcccaggctggagtgcagtggcgccatcttggctcactgcagtgcgcctct

SEQ ID NO: 841895 - DNA, 100 bp, Homo sapiens
aagaagctgcttatccaaattcttccctctttatgtttttcaagggacggatacaacgactagagattgtctttggctatagagtttttttttttaaaga

SEQ ID NO: 841896 - DNA, 100 bp, Homo sapiens
gttgaatgagaaccctacttgcctaaatgaggaatgtctttcctaccatctaaaatacgaaggtttctggctggatcctttctactgggtgagccctgga

SEQ ID NO: 841897 - DNA, 100 bp, Homo sapiens
ggctccttttaactggatatacctagaggatcaagacataatgggagcatttttagacaagccaaagatggaaaagcataatgcccaggggcagggtaat

SEQ ID NO: 841898 - DNA, 99 bp, Homo sapiens
tttcacagctgctggcagtaactgaagattacagaggtgatgacctgatcaagcagaacaagaaaatcaaagacaaacacttggagcaagcaatatgta

SEQ ID NO: 841899 - DNA, 100 bp, Homo sapiens
gaaaaataaagaagaggctgcagaatatgctaaacttttggccaagagaatgaagattgttgccaatgccaaaggcgctgtgactggggcaaaagatgct

SEQ ID NO: 841900 - DNA, 99 bp, Homo sapiens
tcatctggaattttgccgatttcatgactaaccagtatacttattgctgcctctgcaccaatatgctttccgaagtgctgttgtttctctctcaatatt

SEQ ID NO: 841901 - DNA, 98 bp, Homo sapiens
gaacgaaattatatgtaatgctctgcagagacagaaagagagattggaaggagaaaatgatgtatgatctcgtgaaatcttgagagaaactgaatgac

SEQ ID NO: 841902 - DNA, 98 bp, Homo sapiens
gcgagtatacatgcaaagcttccaatgagtatggcagtgtcagctgtacagccacactaactgtgacaggaagttatggttgctgatgatctggaaag

SEQ ID NO: 841903 - DNA, 100 bp, Homo sapiens
acttgaaggcgtatacaggaacaatattgatgatgtagtaagtttgcgtgtgaacttggacatgggcaaagcggtgtatggatggatgatgatgaaagat

SEQ ID NO: 841904 - DNA, 100 bp, Homo sapiens
cagcctctggttcagactgcagtaaccagcaatgagtttgtgcagcacaatacttggcagttaagccgtgtgtatcccagcggcctgaggacagactctt

SEQ ID NO: 841905 - DNA, 100 bp, Homo sapiens
gcctccacttagtgagcggaagaatgatgggagcagcctcccagagtgggtgacagacaacgctgggaccctgcattttgcccgggtgactcgagatgac

SEQ ID NO: 841906 - DNA, 100 bp, Homo sapiens
ctttcaccgcagtgggctaccataaacacatcaccttgatttttaatcccacggtgggcaaacgcagaggcgggaacaaactagccctcaagacgggaat

SEQ ID NO: 841907 - DNA, 144 bp, Homo sapiens
cccggcccgggcccggcaggtgggcgaggagggcgggcgcagtcgggctctgcaggagcgcgcggagaattaactcctgaggagagagcccaaaagattgccaaagccatgcgcaaacagtcttctgaagtcaaagaaaaatgg

SEQ ID NO: 841908 - DNA, 100 bp, Homo sapiens
atccaaaaggaccagcatggcttcggcttcacagtcagtggggatcgcattgttctggtgcagtctgtgcggcctgagaatggatcttggagaatgtctg

SEQ ID NO: 841909 - DNA, 99 bp, Homo sapiens
gcgggtttcccaggacctggaagtgctccctgcggtttctgagttctccaccagtgagaccatgggccactctgcagaccgactggccgctgcctttgc

SEQ ID NO: 841910 - DNA, 98 bp, Homo sapiens
aacaacatctcctgctattccttgggctgcctttcctgcaggaatgtatcctgtcaggtataatgtcagtgaatggcaagaaagttcttcatatggat

SEQ ID NO: 841911 - DNA, 99 bp, Homo sapiens
aagggggcaacgaggaagctcttaagagcgcggccggaaagcaggtgaaaatggttctttccaaattgtatgagaataagaaaatagctagtgccaccc

SEQ ID NO: 841912 - DNA, 100 bp, Homo sapiens
gcgaggagtccagggcggaacaggtcatcatcagatttgaaatatttaaagtggatacaaaactatttcagcaatgcagacaattaagtgtgttgttgtg

SEQ ID NO: 841913 - DNA, 99 bp, Homo sapiens
gccggctggaggcggtgctggcgagccgcagtgaggccaacgccgtgttcgacatcctggccgtgctgcagaggtggggctggtgtccgagcacttctc

SEQ ID NO: 841914 - DNA, 98 bp, Homo sapiens
gcctggaccaccccattgaggccaccgagagggtccagggtggcagaactatccagcacacggaagacatggagaacgagatcgacgagctgctgcag

SEQ ID NO: 841915 - DNA, 124 bp, Homo sapiens
gattatcccctccgacctcctaaaatgaaattcattacagaaatctggcacccaaatggtaatgcacaggtgacacaaacaaagtttctccccaatgctccgaaagctctcattgttgaacctt

SEQ ID NO: 841916 - DNA, 98 bp, Homo sapiens
aagaattcaagaaacttgctctggctggaatagacagcacccaagaaaacctcatttggctcgctgaaggatgaagaccggattttcaccaacctgta

SEQ ID NO: 841917 - DNA, 98 bp, Homo sapiens
cgatcgctgcccgccgccagcatgttgggcgccccggacgagagctccgtgcgggtggctgtcaggcaggaatgggccacttgtgtgtaacaaaagat

SEQ ID NO: 841918 - DNA, 100 bp, Homo sapiens
ttagcctcagtacaacatgtgaaaaatctgttacttgatgaacttcagaaggcattgcggcctcatttgctgtcaagcttttcaaagcatggatggcaga

SEQ ID NO: 841919 - DNA, 100 bp, Homo sapiens
gagcggaaacagcggcagccagagaactccatccggcacaacctgtcactgcatagtcgattcatgcgggtccagaatgagggaactggcaagagctctt

SEQ ID NO: 841920 - DNA, 100 bp, Homo sapiens
cagccacgaagtacagccggaggcgcagttgtgtagcagttgagtaatgctggttagctgttaaggtggcgtgttgcagtgcagagtgcttggctgtttc

SEQ ID NO: 841921 - DNA, 99 bp, Homo sapiens
ctcaagacacctgggcagacactgcaaggtcctgaggcacgtgaatggccaggatcagattgtgcccggcctgtacgcctgtggggaggccgcctgtgc

SEQ ID NO: 841922 - DNA, 100 bp, Homo sapiens
cgcgccccgaggaggagcggggcggcgcaggcgaattttgattctgacattagcagtgtgggaatagatggctgctggcaggcagacagccaaaggcttc

SEQ ID NO: 841923 - DNA, 98 bp, Homo sapiens
ttttcagccattccctcaagtacttggaattccagccagtcaggatggctaaaggtgaccccaagaaaccaaagggcaagatgtccgcttatgccttc

SEQ ID NO: 841924 - DNA, 100 bp, Homo sapiens
gaaacaccatggctgcggcggcccagctctctctgacacaggtgaaagaactcttttcttctttgggagtcgaatgtaatgtcttggaacttgatcaagt

SEQ ID NO: 841925 - DNA, 100 bp, Homo sapiens
caggagcgagagcctgttggaacatgctttcttcaagatggaacaaagactgttgagtatgctccatgtagatcactaccttccactggaagaatctcaa

SEQ ID NO: 841926 - DNA, 105 bp, Homo sapiens
tttcttcaagatggaacaaagactgttgagtatgctccatgtagatcacggctgtttaacgacccccaactccccatccatgcactcacgttctcttacgctggg

SEQ ID NO: 841927 - DNA, 100 bp, Homo sapiens
aaagataaacaagctattaatgaatatgaaaaatggctgacatcccagttaccagtgtccttgaattgatagtggcttctgtttgtcagtctcatataag

SEQ ID NO: 841928 - DNA, 100 bp, Homo sapiens
acatttgctgccatgagcaaagaggaggtcgacaggccagagatcctcagcaggagcctatggaagagatagaaaatttgaagaaacaacatgatttatt

SEQ ID NO: 841929 - DNA, 100 bp, Homo sapiens
caggcctgaagggaaggggcttctctgtgctccacacttaccaggaccacttgtggctcagcagggagctgcaggagaaggagaaagtgattgaagtcct

SEQ ID NO: 841930 - DNA, 100 bp, Homo sapiens
tcagattattcacgaagctctagaaagggcacgaccataataacatccctgacttctgtgctgcacaatgacaaagaattccccaacccagagatgtttg

SEQ ID NO: 841931 - DNA, 100 bp, Homo sapiens
agaggaccagcagatgaatggacaccttgaagcagaggagcagcaggaccagggtctccgtctctccaccgggggcttcatccttccagggaggagaaga

SEQ ID NO: 841932 - DNA, 100 bp, Homo sapiens
atgctggaaaatacacaattgaagctgaaaaccaatctggcaagaaatcagcaacagtccttgttaaagtctatgtgcccaccaaatcttcataagcaag

SEQ ID NO: 841933 - DNA, 98 bp, Homo sapiens
tgcctggggttacacctaaacaggatgacatctgaactggagagcagcctaacgtctatggactggttaccacagctcaccatgagagcagccatcca

SEQ ID NO: 841934 - DNA, 98 bp, Homo sapiens
gcccgaggcgaggaggagcgctggcggatcttcaagatgaagttcaaagggagaatactaatctgcaaaaactacaggcccagaaacagcaggtacag

SEQ ID NO: 841935 - DNA, 100 bp, Homo sapiens
cagcggcaggctcaggtgcagccgctgaaatcgagctatagcagattatcttcgttcaaatggctatgaagaggcatattcagtttttaaaaaggaagct

SEQ ID NO: 841936 - DNA, 98 bp, Homo sapiens
caaagcagtcgtaagaagaggtcccaatcccccactctttccgccctaatggaggtctccagtttcggtggatccataaagaacccagccaacccgca

SEQ ID NO: 841937 - DNA, 122 bp, Homo sapiens
catgtgtatatggcccttataatattgttgatccttacggaagatgatggcttcaacagatccattcatgaagtgaacactcgtgaaactgctcaggccatcaagggtatgcatatacgaaa

SEQ ID NO: 841938 - DNA, 100 bp, Homo sapiens
ggaaaccatcattctcagcaaactatcgcaaggacagaaaaccaaagaccgcatgttcttactcacaggctatgacttctgccaggtcctgcagtggttt

SEQ ID NO: 841939 - DNA, 100 bp, Homo sapiens
gagcgttgaggttacactgcatgtggcagctgcgttcctttgcctgcaacaggggtcaagatgagttttgcctgacttctttgatgtcctgaactttccg

SEQ ID NO: 841940 - DNA, 100 bp, Homo sapiens
ctcccaagcgactgcaggcagaagctgagacggctaaggtgttgactttaaggtgaaaacaatttcagtggatggaaataaggctaaacttgcaatatgg

SEQ ID NO: 841941 - DNA, 99 bp, Homo sapiens
agagagaaggaatccaccttcttacgctatggcaggtggagccgccaccaaaatgcagattttcgtgaaaacccttacggggaagaccatcaccctcga

SEQ ID NO: 841942 - DNA, 99 bp, Homo sapiens
ccctccatgtcggggagctatcgtcgtcttcaatggacagtttgcggttgtgaagaaatgccgtgagaaaagcaccggcctccagtatgccgccaaatt

SEQ ID NO: 841943 - DNA, 99 bp, Homo sapiens
tatcaattgctcctctcagccacctctgatcagccatggtatcggcaaggatgtggagtcctgccatgatatgattcctggattttgtgaagggggatt

SEQ ID NO: 841944 - DNA, 98 bp, Homo sapiens
cagttaaacctgtcgggtagaaacctcagtgaagatatgaaaactgcttcatcaacctcatccagaagtcacccttattctagtgacagtgaggatga

SEQ ID NO: 841945 - DNA, 100 bp, Homo sapiens
gatgcctctcagctgccacctgcctttgacctttttgaagcctttgcaaaactgttgcagctaattgcaaaatcccagttaacttcattgagtggcgtgg

SEQ ID NO: 841946 - DNA, 98 bp, Homo sapiens
ccagctgtgcggagctaggacgcggaacatcccagaggccagcatcaacatagacttttcttggtctcctggtggtaacataatcgccttctgggtgc

SEQ ID NO: 841947 - DNA, 117 bp, Homo sapiens
tcagctttggtccctcggggcgtctgggcagcctacgctttccgggcagactttgacgacactgcgacatactcagcagtggccaccaatgcccacggacaagtgtccaccaacgcg

SEQ ID NO: 841948 - DNA, 100 bp, Homo sapiens
gtcctgagcgtgtctgtgtgcgagtggccctgggcgctgcctatggcacagccaagagcggtaccggcattgcggccatgtctgtcatgcggccggagca

SEQ ID NO: 841949 - DNA, 101 bp, Homo sapiens
aaagaccagtggttcaagtgtgacgatgccatcatcaccaaggccagcatcaaggacgtcctggacagcgaaggtgtgttaacagggcacaaccattatgt

SEQ ID NO: 841950 - DNA, 101 bp, Homo sapiens
taagcctgcacagccgcggcggcagcagcagtgagagctggagcagttcaacatgatggagaacgccatcagctccagcagcctgtacagcccgggctcca

SEQ ID NO: 841951 - DNA, 98 bp, Homo sapiens
acacccctggtgtgcctgggacatctgtgaagaaaccaccatcatgggttcgggtcccatagaccccaaagaacttctcaagggcctggacagcttcc

SEQ ID NO: 841952 - DNA, 100 bp, Homo sapiens
caaggagagacgtcgctgaggggcttgcctgaagcgagggaatgtatgacaacatgtccacaatggtgtacataaaggaagacaagttggagaagcttac

SEQ ID NO: 841953 - DNA, 50 bp, Homo sapiens
tgggcccagaaaacaagccagtcagtgtgtactgtaagcacggtcacctg

SEQ ID NO: 841954 - DNA, 100 bp, Homo sapiens
gattttccggtcccggcgcccggcgagggcgcgcggctggtgtccgccccgcccgaaagaatcttttagctgaaaaagtagagcagctgatggaatggag

SEQ ID NO: 841955 - DNA, 100 bp, Homo sapiens
tggctgtagtggggaaaataaatcaagtgcttctgctcctgatgtggatgacccagaggcattcccagctctggcttaactggatgccataagacaaccc

SEQ ID NO: 841956 - DNA, 99 bp, Homo sapiens
aggaactctagatgtgtctttactgaataaacaaggagggatgtttctaacccgagcaatgtctggaaatctggcattttttaaagtttgcgccccaca

SEQ ID NO: 841957 - DNA, 98 bp, Homo sapiens
cgaagcccaaaaagctgaaggtggaggcgccgcaagcgctgaggtatctcattcagttgctaaacttatattagttaatttccactggcaagtttcag

SEQ ID NO: 841958 - DNA, 98 bp, Homo sapiens
cagagttcaaggaggccttccagctgtttgaccgaacagagttcaaagaggccttttcattgtttgaccggaccccgactggagagatgaagatcacc

SEQ ID NO: 841959 - DNA, 100 bp, Homo sapiens
gaactgggagggaaaagtccatgttatattgataaagattgtgacctggacattgtttgcagcggagcgtgctttggacaccatgaattttgatgttata

SEQ ID NO: 841960 - DNA, 51 bp, Homo sapiens
caccttttccacagggaattgagttggctcttgcagccaatgccggaacag

SEQ ID NO: 841961 - DNA, 100 bp, Homo sapiens
tcgacctgctaacagaactggaccttttcggtgtcagttgtacccgaggcgttctcagcagcagcaagtacctgtggtggatttccaggctgaactgagg

SEQ ID NO: 841962 - DNA, 100 bp, Homo sapiens
ggatcatcattttactcgaatcacttcagcctaacaaggttatctaccttgcctgctcctatgccacagtgtacctgatctacctgaaatttaaggcaac

SEQ ID NO: 841963 - DNA, 100 bp, Homo sapiens
ttttctgttttgcctgaatacatgatttaaacaagagatttccacagaagagaatggatcttggagaatgtctgaaagtccatgacctggctttaagagc

SEQ ID NO: 841964 - DNA, 99 bp, Homo sapiens
ggctctttgtgttgtagacttgctaaaggagaagtctggtgtaatacaagatgctttaaagaagaaagaagttttcccatttccagaagttagccaaga

SEQ ID NO: 841965 - DNA, 100 bp, Homo sapiens
cgaagcgctgcgctcgcgcccggatccctcaggtattgttgcagcatctggcagtgagactgaggatgaggacagcatggacattcccttggacctttct

SEQ ID NO: 841966 - DNA, 98 bp, Homo sapiens
gaaacttgggactctgcaatagatacatggagcccatcagaatggcagatggcttatgaaccacaggttctgtacagagtaatgagatgtgtgacggc

SEQ ID NO: 841967 - DNA, 100 bp, Homo sapiens
ggcaagatgtccagtaatgtcccggcggatatggtttgtgctttctggaaatctgcatggtggctcagtggtagcaagctatccttttgatgattctcca

SEQ ID NO: 841968 - DNA, 99 bp, Homo sapiens
ttttccgttgccggtgccggcctagcgtcctggaattacttcaatcaacttgtggagagactccagagcaaatacgagcaccaagtggcataatcacaa

SEQ ID NO: 841969 - DNA, 100 bp, Homo sapiens
aagaagaagaagattctggctgagaggaggaaggtgctggccattgaccacctgaatgaagatcagctgaggtggagcagatgttcgccctgacacccat

SEQ ID NO: 841970 - DNA, 100 bp, Homo sapiens
gtgaagtgccatcttcggctaggtcgtcacaggctccggctcatggcatcaagtggcatccatcataaggtagatcagaagttccaggggtcagtatcat

SEQ ID NO: 841971 - DNA, 98 bp, Homo sapiens
ctgtttcctgtggtaaacactcggctggtctgccatgtgaatctggaggggcagccgttctactccaagaaggacagacccctgtgcaagaagcacgc

SEQ ID NO: 841972 - DNA, 100 bp, Homo sapiens
ataagcaatttaaagaaaattttaaaaggaatcttggattataatcatgagattgaagataaaactttccaagtccttggtaatctttacagcgagggag

SEQ ID NO: 841973 - DNA, 100 bp, Homo sapiens
caacaatagtgatacactcaagctgttgaaaatgagcagctgtcctcatgtctctccagcaggctgtattcatcaccaaagaaaaaacttacaccaatgc

SEQ ID NO: 841974 - DNA, 99 bp, Homo sapiens
ccctctgctcgcggccgcgcctttgaggactttggagaggatgattccctgtacatcaccaaggtgaccaccatccacatgggcaattacacctgccat

SEQ ID NO: 841975 - DNA, 100 bp, Homo sapiens
aagcagcttcacggacgttttcatctctacacgttgaacgatggttcgatacaagaggctgttttcctagcgtggcttgctgcctttggtaagaacatgt

SEQ ID NO: 841976 - DNA, 100 bp, Homo sapiens
tagacaaggaagaaagcattatttcatcaagtccaatagaaatggtattcaaacaattggtttccccctttctagggtgaggatggttctacacagccac

SEQ ID NO: 841977 - DNA, 51 bp, Homo sapiens
tgactatggaaaagttgccaaattgaggttggcgatttgaaggagctgcag

SEQ ID NO: 841978 - DNA, 99 bp, Homo sapiens
tggtggtggctgccatgatgatttccattgtgggatgtgttttcgcattataacaaggacctgttgacagagcactgcacagaagcttcattccaaaaa

SEQ ID NO: 841979 - DNA, 99 bp, Homo sapiens
ccaactcttattattagtgtctccactggagacctgcaacagtctcagcaggagaagattgacagcattgcagaccatgtcaacagtgctgctgtgaat

SEQ ID NO: 841980 - DNA, 100 bp, Homo sapiens
ctactcgccgaccttcatccgcgcgggctgacgcacgaggcacacaggaaggaggtggagcaggtgtatctgcgctgtgcggcgggtgccgtggagtgga

SEQ ID NO: 841981 - DNA, 100 bp, Homo sapiens
cgatggctgggcccgcgtggatctctaagtgtccttgacctaaatgcatttgagcgacaaaacaaagctgaaggtcttgggatggtgacagaggaaggat

SEQ ID NO: 841982 - DNA, 100 bp, Homo sapiens
tgaggatcagcggacctccacctacaacggggacatcagggagaccaggacagaccaagagaataaggacccttcccagaaatcctggatagaaagcact

SEQ ID NO: 841983 - DNA, 109 bp, Homo sapiens
cgatgacgcagactggagggaggtgatgatgccctattcgacagaactgatattttatattgaaatggatcctccagggcatatctggaatctgaagttgctatatctg

SEQ ID NO: 841984 - DNA, 50 bp, Homo sapiens
cacagcccgcgaagccaacgagtgcgtggatgacttcctgaagccacaga

SEQ ID NO: 841985 - DNA, 99 bp, Homo sapiens
cagaagcagcagcagcaactcctgatttaggggcaatcgatgtacacactggcagctcaggacctggtgatgcgtgcccggggtgtgctgaaggacaga

SEQ ID NO: 841986 - DNA, 98 bp, Homo sapiens
ggcgcggtcggtcggcgcctgttctcgggctgtttggcgggttccccctaaaggactcaaaacgtctaatccaatggttaaaagctgttcagagggat

SEQ ID NO: 841987 - DNA, 75 bp, Homo sapiens
gaccccttctgcccggcgcttcggcccgggccgctcaggtgcagcaccagcaacaagtggtgcaggctgtggaac

SEQ ID NO: 841988 - DNA, 100 bp, Homo sapiens
cgctgttcgtgctgctgggattcgcgctgctgggcacccacggagcctccggggctgctggctggaggcgtgatcctgggtgtggccctgtggctccgcc

SEQ ID NO: 841989 - DNA, 100 bp, Homo sapiens
cactacctacagtgaaatagcatggatttcatccattatgctggctgttatgtacgcaggaggtactccaaagattcaggtttactcacgtcatccagca

SEQ ID NO: 841990 - DNA, 121 bp, Homo sapiens
ttatccttcagtggggctattggactgacttttcttatgctgggatgtgccttagaggattatggtgtgggccaaactgaaattgcagaaggcttcagaacgatggcagcctgacactgag

SEQ ID NO: 841991 - DNA, 100 bp, Homo sapiens
ctcccccagttctgcgctgtgagccggggcacaaagagccctctgcactagcgccgcaggaccgcggacccgagaggcggggtttcaccatgttgcccag

SEQ ID NO: 841992 - DNA, 99 bp, Homo sapiens
ctccggcaacgccaaccgctccgctgcgcgcaggctgggctgcaggctctcggctgcagcgctgggtgctggagaatctggtaaaagcaccattgtgaa

SEQ ID NO: 841993 - DNA, 98 bp, Homo sapiens
gtactggcacgctctatagccaaggaaggcttcgagaagattagcaaaggtgctaatccagtggaaatcaggagagattgaagatctcaaacagacaa

SEQ ID NO: 841994 - DNA, 100 bp, Homo sapiens
gaaacagaagtagaagatgatgaaggatgcttcctgtatccatggcaacctctgttttacacattgactgtaaaggaaccaatgtgaagagtggtgtttc

SEQ ID NO: 841995 - DNA, 100 bp, Homo sapiens
ggggagttcatcccagagaccagcgagcagtgcgttgagactgagctaaagttaatctgttgtgacattctggatgtactggacaaacacctcattccag

SEQ ID NO: 841996 - DNA, 98 bp, Homo sapiens
caagagcagcctcacatggtgtgggccgacatcaagagctgcgagatccaacagtcaagctgtattagtcgacaggaccatttacatttcaggacaga

SEQ ID NO: 841997 - DNA, 101 bp, Homo sapiens
ctcggggatctggctcaggcccacatacagcaacttagcgaagctgccggtgaagatgtctacatcggtaaactctgcaaaactccagcagttacagagcc

SEQ ID NO: 841998 - DNA, 100 bp, Homo sapiens
gggctatggcgccagtaagaagaaaaaagcgtccgcttccagctttgcgcagattgctgacttgacctctgaccttgccgatgagcgcttcaaaggtgat

SEQ ID NO: 841999 - DNA, 100 bp, Homo sapiens
cggcctacgtgaacaacctgaacgtcaccgaggagaagtaccaggaggcgttggccaagggatctactccaagtgaccaacagcaaaacaaattacgaag

SEQ ID NO: 842000 - DNA, 100 bp, Homo sapiens
aaaagagtaacggaaatccttgggtttgaagatgatgttgtgattgagtttatattcaaccagctggaagtgaaggagttttttgagaaccctgcttttc

SEQ ID NO: 842001 - DNA, 100 bp, Homo sapiens
ccatcttcggaccccccaacaccctctacgaaggcggctacttcaaggtcatgcgcatcgtggataatgttcgtcctgatcgacagacggttatgttttc

SEQ ID NO: 842002 - DNA, 100 bp, Homo sapiens
ttgcgaggagcccatgtcctatgactcagacctgggcacagcaaatgctgaggactcagaccagtctctgcaagaaccaccgctgaaacttcacttctac

SEQ ID NO: 842003 - DNA, 100 bp, Homo sapiens
ctgtaagaagaggaaagacttgtctcagggtttggattcaggatttgttcctagtgtccaagattttgataagaaacttacagaagctgatgcttaccta

SEQ ID NO: 842004 - DNA, 100 bp, Homo sapiens
gaagcacagccccgaggtgtgcgaagccaccaagtcctgggaactccaacaagggagcaaatcagagaaatgaacccaaactacacagaatttaaattcc

SEQ ID NO: 842005 - DNA, 98 bp, Homo sapiens
gaaggagctggcggacatcactttagaccctccacctaattgcaggtgactctgacatcattagaagcatgccagaacagactggtgaaaagtaaacc

SEQ ID NO: 842006 - DNA, 99 bp, Homo sapiens
gtgtgacaaacttgccaaagccccggcaaaaacaaccaggtcaatatccaacacagccaacctaccctgtgcagcctcctgggaatccagtataccctc

SEQ ID NO: 842007 - DNA, 100 bp, Homo sapiens
ctcaagccagccgtggtagagcggctccacctggctcttagacgggcaggtcctcagaatggttggaatgaccctccagctttgaacagagtacccaaaa

SEQ ID NO: 842008 - DNA, 100 bp, Homo sapiens
atggaggccagatagtaccatgatagctgtatcattaatgtccatcagtgtgttggcagtttctgcttggatgagggactacctaaataatgttctcact

SEQ ID NO: 842009 - DNA, 100 bp, Homo sapiens
caatgttcaccagtcagtgtttgaaggagaagagagcaagacaaggagccccaaactgtctcacagtcctcaaccacccagtctgggtgacccggtcgag

SEQ ID NO: 842010 - DNA, 140 bp, Homo sapiens
ggtctgcagcccagagggcaccttctgcaaacatgtctgtggatcccctatccagcaaagctctaaagctgttgagtggaatgtcatggccagctcctcggacagtgaagatgacagtttcatggctgtggaccaggaag

SEQ ID NO: 842011 - DNA, 100 bp, Homo sapiens
gcctcctgcaacacctgcggcctcactgggacccccaggaggtgaccctgcagacaaatggacacctaccagggaacggagatgtgtatcaagaaaggct

SEQ ID NO: 842012 - DNA, 100 bp, Homo sapiens
agacgctgcccttccgcagcgatggcatcccgggccacctcaccgatcagcacctggccgagttcctgcggcgctgcaagggcagcctccgccccaacgg

SEQ ID NO: 842013 - DNA, 100 bp, Homo sapiens
ctcccccatacctgcggaacctgtccagcgatgatgccaatgtcctggtgtggcacgctctcctcctacccgttcctaaaagtaaagctctagaggccgt

SEQ ID NO: 842014 - DNA, 100 bp, Homo sapiens
cttcacaacatgatagttgatctggataatgtggtcaaaaaggatctcacttgcttatctgaagaagattgtccaggctcatattgggaatgcttatgag

SEQ ID NO: 842015 - DNA, 98 bp, Homo sapiens
gctatgcttggcagcagaaggatttggcaacagactttgtttcttggagtccacttccaattccaagattatcttgacaatggtaataataaaatggc

SEQ ID NO: 842016 - DNA, 100 bp, Homo sapiens
ggaaactttagagaagttaagagaagaattagctatcaaatccggccagatgatgctggagggtcttgaaatctttacagtaaaacctgcaacttgaaaa

SEQ ID NO: 842017 - DNA, 100 bp, Homo sapiens
agtgcatattagtggacagcacttagtagttgctctaggtcgtaaccagcctttgaaaaaggagaaaccaaaatggaaaagcgattatcctatgacagat

SEQ ID NO: 842018 - DNA, 100 bp, Homo sapiens
attatggtggcccacttttcctcctgccagggcatcaagttatcagcagatgtcaaaccatttgtccccagatttgccgggctcaatgtggcatggttag

SEQ ID NO: 842019 - DNA, 98 bp, Homo sapiens
ggcatttggtggacacttttgcttgcagttaggtcaagtggaggggtcgggccccggctcagtggtcccaggcagctcgggtgtcggaacccccagac

SEQ ID NO: 842020 - DNA, 100 bp, Homo sapiens
ttagtgctggaccaggacgtgaagccagagatggcgatgctctacccggagctgtacaaggacctcaccaaggtccggcgccagctgccagtcgaggaac

SEQ ID NO: 842021 - DNA, 100 bp, Homo sapiens
aactagcagcaaactcctggagagagcccatggaattctcaccatgcagcagattggaataaatatgatgaccgattgatgaaagcagcagaaagggggg

SEQ ID NO: 842022 - DNA, 99 bp, Homo sapiens
tcggagaagccgctggcggcagtcacttgtacagcgccggtcaacatcgcggtcatcaagtactgatgaaaactttcggaagagaaagttgcctgtggt

SEQ ID NO: 842023 - DNA, 98 bp, Homo sapiens
gcggctggaaggagagctggatacagctcggagagagagagatgccctgcagctggaaatgagcttggtgcaggcatgaggagctcgaccgtctggcc

SEQ ID NO: 842024 - DNA, 98 bp, Homo sapiens
ccgggcggcgcgaagcgctggtggcgggcccgggctgcggcgtgtgcgcgcccgccagctgctccggagatacggcctgaccttcataagaagaccca

SEQ ID NO: 842025 - DNA, 100 bp, Homo sapiens
tgcagaagactttgtcctggtggcagaaacaaccatggccaggatacgaagtctgcgggccaggcatcgacatccgcaacgactatcagcagctgaagcg

SEQ ID NO: 842026 - DNA, 100 bp, Homo sapiens
gaagttgttaaaatgggcaagagtgctatgcaggcaaaagctgtgcctcacttctgcgggttgaaccctttgtatgtgcccagtgccgcacagatttcac

SEQ ID NO: 842027 - DNA, 98 bp, Homo sapiens
ttctcagaagacagagggttttcttttgagtgtggacgaatgtggaacctcgctctgtggctgtgttcccttggcactccttagtccccttcctggca

SEQ ID NO: 842028 - DNA, 100 bp, Homo sapiens
gtgtttgaaggagaagagagcaaggactcacaccacccggcaagaactgctcactacggctccctgccccagaagtcacacggccggacccaagatgaaa

SEQ ID NO: 842029 - DNA, 98 bp, Homo sapiens
ttccttccgctagtgatcctttgcaccctgcttggagacggacttgcttccggtcctcttcctgatggatgggaacaagccatgactcaggatggaga

SEQ ID NO: 842030 - DNA, 126 bp, Homo sapiens
aggcacccgaacttgcgacaagttgccggagccgcggggcgcgggcggcggacagattgaccttcagagcgaggaatgacatctttgtgttcctgttaagcacacgagctggaggactgggtatca

SEQ ID NO: 842031 - DNA, 100 bp, Homo sapiens
aaacgcgggagctggtgttgaagggcatcccggagagcatgcgtggggagctctggctgctgctgtcaggcttgaacatgacaagcagatttgggagtcc

SEQ ID NO: 842032 - DNA, 100 bp, Homo sapiens
tttactcatgttccaagagtggtgtgcttgtgattaattcagcatttccagtgacatccttctggctgtgcttcaaagggaagatgacgctagagctggc

SEQ ID NO: 842033 - DNA, 100 bp, Homo sapiens
ctcaccaaaaacaggagtattaaatgaaaacacagtttctgcaggaaaagatctctctacttctcctaaggaagaatccccagcacaagatagaatatag

SEQ ID NO: 842034 - DNA, 100 bp, Homo sapiens
accaaaggaggggatttgatgttggtccactatgaaggctacttagaaaaggacggctccttatttcactccacgtccatattcaagcctttcatctttg

SEQ ID NO: 842035 - DNA, 100 bp, Homo sapiens
ggcactcacgtggcatcagtccccactgcggtccacggccaggtgaacaatgggaaatcctcattgacgattcaatttgttgaaggccaatttgtggact

SEQ ID NO: 842036 - DNA, 98 bp, Homo sapiens
cctgtttctatagaaactgggttggaagtcagagctgcacaaagggaaagggagacagatgctgagcccttactgtgacacgctcagaagtaacccac

SEQ ID NO: 842037 - DNA, 124 bp, Homo sapiens
gccgccccctacaagtgcctcagcacagcaaatcaggagctgcagcagctcttctaccagtggaagagggatccagatctctaccagctgctccagagactcttcaaaagccactcatctctgg

SEQ ID NO: 842038 - DNA, 100 bp, Homo sapiens
caactgttgaactcagctgcctgtagttactgcaacaaggaggtatacaataaggagaatcttttcaacagcctgaactatgatgttgcagccaagaaga

SEQ ID NO: 842039 - DNA, 100 bp, Homo sapiens
ggtgacgggactcagggtgagggtcagacggaggctccctttggatgccagtgtcagttgtcaggcccttccttctaccatgattatagtagcagtttat

SEQ ID NO: 842040 - DNA, 100 bp, Homo sapiens
caggagtgtagaattggcaaagttattgccagcttcctgaacattctagtatgccagtagaaaaaaatatcactttagaaaggccttctaatgtaaatct

SEQ ID NO: 842041 - DNA, 100 bp, Homo sapiens
ggctcgcaactcggcagcctccacccaccggcccaccctacatttagcgcatcatgtgatccgggtgatatccgacatccaaagcacgtccaacagacgg

SEQ ID NO: 842042 - DNA, 100 bp, Homo sapiens
ggcaacagaacagtcgaacctttcccagagggaacacagatggctgtatttgagatcgcggattcaggtgtggctctatgagcaagtgaatatgcggata

SEQ ID NO: 842043 - DNA, 100 bp, Homo sapiens
tgagaagcggaccatgtcggcccagattgagggtggtgtccatggcctgcactcctggatctaccatgaaagacttgtgaatccaggaagagagactgac

SEQ ID NO: 842044 - DNA, 98 bp, Homo sapiens
tgtgcgcaatggagggcagatccttatcgccgacctcagggggtctgcttagtggcctatcttggcttgtttatgctttgtgtctcatatcaggttga

SEQ ID NO: 842045 - DNA, 100 bp, Homo sapiens
gaggtccctggagtttctgcttcctccagagccagtgctgcctggcctgccacaagaaatgtctggagacgctggccatacagtgcgggcacaagaagct

SEQ ID NO: 842046 - DNA, 100 bp, Homo sapiens
tgttaattttggaggccgtccacaacttccaggttcccatcctgcggttcaaaccttgtactactcagctgatcacaagctgcttgatgggaacctacta

SEQ ID NO: 842047 - DNA, 100 bp, Homo sapiens
cattcacacctagataccggaggaggatcttctgcggattgttggaatctaccgtcgcactggggcagtgttgtctggtgggtactggagaccttccgtg

SEQ ID NO: 842048 - DNA, 100 bp, Homo sapiens
gatcatggcggatggcccccggtgcaagaggcgcaaacaagccaatcccaggaggaaaaacggaaagaccacagcaagattctttcattcgtctcctcct

SEQ ID NO: 842049 - DNA, 98 bp, Homo sapiens
atcaatgcacatcttggtattgagcagagaaatcatttctaccagttcggagagatccggacgatcactgttgtgcagagacagcagtgtgctttcat

SEQ ID NO: 842050 - DNA, 100 bp, Homo sapiens
cagatctgaagacctattttactgataagaaaacacatctttacacactaaaaacgccacctcctggatatatcagtgaagatggagaaacaagtgacca

SEQ ID NO: 842051 - DNA, 100 bp, Homo sapiens
acagaagttcttcacccaggatattaatggaatcctattagaggcggactactggaagtcacagccaaagaaattctgtgattactgcaagtgctggata

SEQ ID NO: 842052 - DNA, 100 bp, Homo sapiens
ccagactggggaagcggatgctatcaggtagttcctgaaatgactgagatattgaagaaaaaatgaatcaggatcatgccttaaaaagaaaacttttgtt

SEQ ID NO: 842053 - DNA, 98 bp, Homo sapiens
gacgacatcatcgtcttcgcctatgcctgccaggctgctggccaatccggagccggcaacaactgggcaaaggggcactacacggagggcgcagagct

SEQ ID NO: 842054 - DNA, 100 bp, Homo sapiens
tgcaagttcttctacagccccagttatgtggacgagctgttaaaccagatgtacttgaaggatataatggaacaatatttgcatatggacaaacatcctc

SEQ ID NO: 842055 - DNA, 98 bp, Homo sapiens
tcagaaaaagcatccccgaggaggaagacgaatcgttaaacatcttaggtcagagtgcctggtgaagaatgtgatgggatcactagcatgtctgcgga

SEQ ID NO: 842056 - DNA, 98 bp, Homo sapiens
agtgggctgtgatcttctacccagatatcagacaccccgaagaactttctctcttaaagaaacccagagatccaacaaagaaaaaaaagaagaagcta

SEQ ID NO: 842057 - DNA, 100 bp, Homo sapiens
ttcttttcctcagaactactatattcagtggctaaatggctccctgattcatgagaagatgcaaccagttttgccattttccaagtcacaaacggacgtc

SEQ ID NO: 842058 - DNA, 99 bp, Homo sapiens
aaatatacaacaaggccattttctcaaacgagagtcagcctttaacgttattttaccaagaaaatggtttgcacgactttgaacatatactatccatgc

SEQ ID NO: 842059 - DNA, 98 bp, Homo sapiens
acacagctcatgtctcattaatcacaccaacaaaaagatcctgtggtacagatgatacttgttgatgccactgttatcatcctcctagcagaagatag

SEQ ID NO: 842060 - DNA, 100 bp, Homo sapiens
atcccgcgtccagcacctacgtcccgctgccgtcgccgccgccaccatgcccaagagaaaggtgaagttcatccacgaccagacctccccaaaccccaag

SEQ ID NO: 842061 - DNA, 99 bp, Homo sapiens
ttcttttaagatttactggaaacatatttgcttcaagtggcataacaagctgttcagatggtacaagtaaccgggacagctttcgactggatgacgatg

SEQ ID NO: 842062 - DNA, 98 bp, Homo sapiens
agcagagaactcggcgccgccaaacagcccagctcgcgcttcagcgtcccggcgccgtcgcgccactcctccgagaaatcttactgatgaggggcagc

SEQ ID NO: 842063 - DNA, 100 bp, Homo sapiens
ctcgagtcctgccgcctcccgggagtgccgtgcgccgcagcccgggcccaggccccggcagcgcctgggacaaggtaaaatctgtaaaaactgggtcagt

SEQ ID NO: 842064 - DNA, 98 bp, Homo sapiens
cccgtgtcggagaccccgcgccggaccctgaggcagcgagagaccagtatgatgtctgtgccatttgcctggatgaatatgaggatggggacaagctg

SEQ ID NO: 842065 - DNA, 100 bp, Homo sapiens
ggacgcgcccgggacgcgcggcggcaccgggaggccgggccgagcgaacaaaatccagtctcatagcagaggagaatataatgtttacagcaccttccag

SEQ ID NO: 842066 - DNA, 99 bp, Homo sapiens
tcctcttcacccaggccttgaagctcaacccccaggaccaccggttgaccagtatctctaccacatgcgcctctctgatgagaccctcttggagatctc

SEQ ID NO: 842067 - DNA, 100 bp, Homo sapiens
ctcaagcacgagctcatcagatgatgatgaagaggtttcagggagcagcaagacaatcactgcagagataccagctctggacttattggacaaaatgttg

SEQ ID NO: 842068 - DNA, 139 bp, Homo sapiens
atggaaatgaagatgcagtcagagagactttcgaaagaatatgatcaactcctgaaagaacactctgaacttcagcctgccacagtgactcaggtcactcaaggaactatccgaccagctgccaacttcgatgctataa

SEQ ID NO: 842069 - DNA, 100 bp, Homo sapiens
gggcctgagagttgctattggaccatgtagaatgttgcaatattgtttacagcccgtctgccgtttaagcgcctgaatcttgtcccaaaggggaaagccg

SEQ ID NO: 842070 - DNA, 98 bp, Homo sapiens
cagcccgtggtcctgatgccaacagtgtaccagcagggcgttggctatgtgcccatcacagcagtcctgcgttaactgcggccgggaggctatgagcg

SEQ ID NO: 842071 - DNA, 100 bp, Homo sapiens
ctcaaacatggtaccatccctaatgaagtcaacgggtccagcatgacaggatggaagtacaagtgtcagcacctatgtgctagtcctatgggagtaaatg

SEQ ID NO: 842072 - DNA, 100 bp, Homo sapiens
attcaactgtgatggcaagagcagaatatttcagaaatgtagactatcttctcatccacggaacagcagatggagttgtgaacagatgtgtgtacagcac

SEQ ID NO: 842073 - DNA, 98 bp, Homo sapiens
gatatgggatgctggaggacatctgggggccacaaatgctccttctcctggagacgcaactcaagattgtggtggtctgggtgggcaccaacaaccac

SEQ ID NO: 842074 - DNA, 100 bp, Homo sapiens
tggagtcttccatcaatcatatctcacaggccagttggacaaatgcgagtaaaaagcaacgtgaaaagctacttgagctgatacgtcgtcttgcagaaga

SEQ ID NO: 842075 - DNA, 98 bp, Homo sapiens
cgccttcgcggaccgagcctgacggagccggaggctgggagccgcggcggcctgggaggtggtttgtgctccccctactgcctatatcgacttcgccc

SEQ ID NO: 842076 - DNA, 99 bp, Homo sapiens
acgactactcagaggacgagggcgacagcagcgtgtccagggcggctgtggaggtgttcgggaagctgaagattcgtattttacatggagaagtgaaca

SEQ ID NO: 842077 - DNA, 100 bp, Homo sapiens
agcttctgtggcctcgttacctgcaggtattgggagatccacagctaagacgccaggacccactggaagcctagaaatgccgccccgtggtgcctccttt

SEQ ID NO: 842078 - DNA, 100 bp, Homo sapiens
tcttaatcagcctttggacaactattttcgtcatctttggaacaaaggtttaaaacctcaaaaaggcttttggatccactggaaactgaaagaactctcc

SEQ ID NO: 842079 - DNA, 99 bp, Homo sapiens
cggttggagtggacgtcattgccgggaacgagcgagtcgccgctgcagccctagtgactgcggcctgcatcccggatgaggatgggacagaagaggata

SEQ ID NO: 842080 - DNA, 98 bp, Homo sapiens
tggccgatgccacggagcaagtgggccagcatgttggcagataaattgaacatgactccagaagaagctgaaaggtggattgtaaatttgattagaaa

SEQ ID NO: 842081 - DNA, 98 bp, Homo sapiens
tccgacatcaacacctctaagactggagaagggtgccctgaaaaccttgaaggaattttaacgaacgatgttggaaagacaggcgagcctcagtcaga

SEQ ID NO: 842082 - DNA, 99 bp, Homo sapiens
gtccctcagcaaagatggtacaaaagagtctttggaggatgcggctttgatggctttagcgtcacctccctcactgggcagcatgggggagaagtcaga

SEQ ID NO: 842083 - DNA, 50 bp, Homo sapiens
cgccatggccgagccggcttcgatttggtgcttccagatgtgagttatca

SEQ ID NO: 842084 - DNA, 98 bp, Homo sapiens
aatcaggcaattatgtcttctaaaaatattgcacaggctggacgtaaagaaagaagtgatgcactcaattctgcaatagataaaatgaccaagaagac

SEQ ID NO: 842085 - DNA, 99 bp, Homo sapiens
gagatgcttcattggtttcgtgcagtagaatgttgtgtgagtaacattgagcagttttgctgttatttcaaagaactgcccgccgtggagttaaggaat

SEQ ID NO: 842086 - DNA, 100 bp, Homo sapiens
gaaattgatcagcaacaactaactcagcagcaacttaatggaaactagaggtgctgatactcaaagaaggtttaagttgtctgatctctctataaattcc

SEQ ID NO: 842087 - DNA, 100 bp, Homo sapiens
aagttgcaatgggagcttttgataaaaccagacctgtaatgtgtgagatgccagtaaacacaccagaaagtccctggaaggtgagtcctgaagaggaaca

SEQ ID NO: 842088 - DNA, 100 bp, Homo sapiens
gcagagtctagttgccaagtggaacattcttatgacccagcagatggctgggatgaacttctatggagccaatggcatgatgaactatggacagtcaatg

SEQ ID NO: 842089 - DNA, 99 bp, Homo sapiens
gcagtgcaagtcaaagagcagagcatcctggaactgggatctctcctggcaaagactggacaagctgcagcgtttgctgccaattgatggggcaaatga

SEQ ID NO: 842090 - DNA, 98 bp, Homo sapiens
ttctggtttgtggcggggatggaagtgttggctgggtcctctccgaaatcgacagcctcaaccttcataaacagagtgagcgattacagtctgacctg

SEQ ID NO: 842091 - DNA, 105 bp, Homo sapiens
tagacagtcgtggttcctgtgatctgtgtcctctttgcagaagtaactctcaggagccttctccgcagttggcttcctcggtagcttccacacggagcatgcccg

SEQ ID NO: 842092 - DNA, 100 bp, Homo sapiens
ggggtggccttcggtttacagtccctcatctccgggacactaagaaaaccatccagtttgacttccagatcctcagatggaccctgtgcagaaggctgtg

SEQ ID NO: 842093 - DNA, 128 bp, Homo sapiens
tctttgcagtggagctggccggtttcctctcaggagtctccatgttcaacagcacccagagcctcatctctgtgtgagccgctcccatccctggcagagtctagagccttggcccagctgtccctgag

SEQ ID NO: 842094 - DNA, 100 bp, Homo sapiens
ttcctgacaaaaaatcatgcaattttctctgaagaccttgaaaatctgaagaccagcaattctgtggtgttcttggtcacacatttatggagtttctgaa

SEQ ID NO: 842095 - DNA, 100 bp, Homo sapiens
aaaccgagacaagttcaccccgaagtctgccgcacagctgaaggtttaacaagaaaaaatatgtcagatgtcagtgggtggcaaacatttttacaagccc

SEQ ID NO: 842096 - DNA, 98 bp, Homo sapiens
caggagtcacagcacgaagaccaagcgcaaaggacacacaggcccagaaggccccctgtctgacactccaacacctccgctggagactgtgcaggaag

SEQ ID NO: 842097 - DNA, 98 bp, Homo sapiens
gtgactgaaggaatgaattgaatcttgagacgggtcctcaccaggcctagttccccgagagcgttcagacagtgggggctcaagctcagagccatttg

SEQ ID NO: 842098 - DNA, 100 bp, Homo sapiens
ttcctcctacagtctgaaaggcactttattatgcaggtggtctgtgaagccacacagtgtccagatacgagggcaaatcctgatcctaactgttgtcttg

SEQ ID NO: 842099 - DNA, 99 bp, Homo sapiens
tcaaaggctactgccccctgggtgcaaagggtacagctctgccggggggggaaaaagtggtaccattttgggcgttcttgagcttcagaatgcaaccag

SEQ ID NO: 842100 - DNA, 98 bp, Homo sapiens
gccctcaggtaaaggtggaagtaaatggccacgctgtattgacagagaccctacagcttggggcctgggctcctctgaccatcctcattgagaaagga

SEQ ID NO: 842101 - DNA, 100 bp, Homo sapiens
cggacctgcggcccgacgaggaagttttctactgtaaagtcaccaacgagatcttccgccactacgaaacaccttccaccatgaccacctcagcaagttc

SEQ ID NO: 842102 - DNA, 100 bp, Homo sapiens
gatgattctggaactgggagaagatggctttaaagaatacacttcaagaaagcaagtcttgctctaattcgaaaaatgattcatttttgctctgaagcac

SEQ ID NO: 842103 - DNA, 98 bp, Homo sapiens
aagcacctgtgtggcgactggttccccatcgaccaacagagacatggcatccatcgtgtctgagatcatgatgtatgtgctcattgtggtgttgacca

SEQ ID NO: 842104 - DNA, 100 bp, Homo sapiens
cctggatgggggactttgtcacagcttggatggaatccttcaactgctttctaccaagcgttccatttgaacacgttaaaggaatcaaagagcctctggg

SEQ ID NO: 842105 - DNA, 98 bp, Homo sapiens
acctgaacctgcggcacccctctgatgacccatttggattctctgatttcactgccaagattctcaatatcaatgaatgcttggaggacaagagtgtt

SEQ ID NO: 842106 - DNA, 100 bp, Homo sapiens
atgtagaagctgcttttcagacaattttaacagttgacggactggacaaagcttctatagcaaactcagatggccccacagcaggttcccaaacacctcc

SEQ ID NO: 842107 - DNA, 100 bp, Homo sapiens
cactgacctgtacagccccaaacggctcttttctctcacaggggatgactgcttccaagttggcaaggtgtcatggagaaactccagctgggcccagaga

SEQ ID NO: 842108 - DNA, 100 bp, Homo sapiens
aaggcttatgaggatggctgcaagactgtcgacctaaagcctgactggggcaaggagcagtttttgcaagaaaggatcaaagtgaacggaaaagctggga

SEQ ID NO: 842109 - DNA, 147 bp, Homo sapiens
gaagagggggtcgaggagagccggagtcggggacccaggagtttcctgtgtccagcgctgccggagccgcctgaggaggcagttcccatgttatacgcagcagatacttacggagcattgtaatgaagtgtggttctgtaaattctc

SEQ ID NO: 842110 - DNA, 100 bp, Homo sapiens
agaacatactagaagtcccttctgctaggacaacgaggaaaaagctcctcaatttctgaagagaaaggtgactctgatgatgagaaaccaaggaaaggag

SEQ ID NO: 842111 - DNA, 98 bp, Homo sapiens
cagtgtgtataatgggaaaggtggactgattgatgatattgctttgatcagatacgtaggtaacctttccagagatgtgacagaagtccttatacttc

SEQ ID NO: 842112 - DNA, 99 bp, Homo sapiens
ctgagtggggcgctgtgcttccgcctgactggctcatggagaaagcctacctaagaatgaagccgggacccggcagaatggctcctgtgaagaagggtg

SEQ ID NO: 842113 - DNA, 100 bp, Homo sapiens
gagacattgcttcccagaacatgatgcgagcagttgcaagacaagtctgtgaacaattgataagtggtcattgatgtccttcaccccgggaaggcgacag

SEQ ID NO: 842114 - DNA, 98 bp, Homo sapiens
tagcgctagccctgcagacagaggtgtgctgacgacctgctacaacagaagtcagctgttgccagcaaaccgcaatacaccaagtcccattgatcctg

SEQ ID NO: 842115 - DNA, 99 bp, Homo sapiens
gggttgctcacttacactggaaaaggctgaagaagagcaaacatgcccagtgccccaggaagaagaggaggaggtgcgggtactgacacttcccctgca

SEQ ID NO: 842116 - DNA, 100 bp, Homo sapiens
ccctggtcttgctcggccgatgaagtgcagaggtttttttctggaaacaagcctccaggtctgcttccccgcaaaggactatacatggcaaatgacttaa

SEQ ID NO: 842117 - DNA, 98 bp, Homo sapiens
gtggatcctctggccagctgactgcacttcttttttgagaaaggaaggaatatatcctgactgatttgctgggctttgacaaacttcctctgtggggt

SEQ ID NO: 842118 - DNA, 100 bp, Homo sapiens
tgatcttgtaactcgagagagactacttctggcatcctttaagaatgagggtgccgaaccagatctaatcagatcactttgggaagcagtgacatccaac

SEQ ID NO: 842119 - DNA, 99 bp, Homo sapiens
cctaatttgggaaaactgaacacaaatcaaaatagtttgggtccttgtcgtactggaagtaacctagttggtaggaggacagtttgatctggaaatgaa

SEQ ID NO: 842120 - DNA, 100 bp, Homo sapiens
tttgaagcaacaaatgaactcaggaaaatcagtcaggttgtctaccttcataacaacaatatctctgtagttggatcaagtgacttctgcccacctggac

SEQ ID NO: 842121 - DNA, 98 bp, Homo sapiens
ttcaggatgacaaaaaccaaagtctcttctgctgggaaatcccagtacagatccatgttacaccagacagctatattccatgccttgcagacctgtgc

SEQ ID NO: 842122 - DNA, 100 bp, Homo sapiens
tgccccatagatggccagctttcccccgagggtcaacgagaaagagatcgggcccggcaggaagatgggctcccgtggacagggactcttgctggcgtac

SEQ ID NO: 842123 - DNA, 98 bp, Homo sapiens
ccaccgcccctgtcctgggagtcccttggcccagacacccacctgacttagtggctcctctgcaggaaaggtaagaatgattgatgttggctgatatt

SEQ ID NO: 842124 - DNA, 100 bp, Homo sapiens
agtttgatgtgggagtggagtttgaggaggacctcaggagcgtggacggacgaaaatgccagatctcattcgtcggttcggatccaagccagttctgtgg

SEQ ID NO: 842125 - DNA, 98 bp, Homo sapiens
cgacgactaaatacccgtgtctgaagtcttcaggcgagctcaccacatgctacaggttacttgttggtttcagaaaactataagaaatttacaggaac

SEQ ID NO: 842126 - DNA, 100 bp, Homo sapiens
agctttgtcctgcacaccattggcaaaactgtggagtatctgcactcacagggggcttcatccctccacccctcatcttcggggctggcatcgactccac

SEQ ID NO: 842127 - DNA, 98 bp, Homo sapiens
tcagttacgacaagaagaaaaacggcaacgtgtaatcagaaggcacagattagaggaaggaagaggtccaaagtggtacccttctcgagttggtctgc

SEQ ID NO: 842128 - DNA, 114 bp, Homo sapiens
cgcctccgaagatgggggatttctacgacccggagcacccgacccctgaggtctccaactgaattccttgaagagaaaatggcctaccaggaatacccaaatagccagaactgg

SEQ ID NO: 842129 - DNA, 99 bp, Homo sapiens
tgaaaagtcgcagcgagctggagccgccggagactaaaatccacggagtcgggtttgtgaaaatccatgccccctggaacgtgctgtgcagagaggccg

SEQ ID NO: 842130 - DNA, 100 bp, Homo sapiens
cggtcccaacttcgcttctctgctgaccctctctcgtcgccgctgccgccgccgcagctgccaaaatattgtccgtgtggagcccttggtgaccatgggc

SEQ ID NO: 842131 - DNA, 100 bp, Homo sapiens
cgccatcatgagggaaatcgtgcacttgcaggccgggcagtgcggcaaccaaatcggcgccaaggcatgatgggcccacctcctggtatgagacctccta

SEQ ID NO: 842132 - DNA, 100 bp, Homo sapiens
gataaggagtccctcatattgcaggttactgaagatggagctgacccaaatccatatgtcaaaacatacctacttccagataaccacaaaacatccaaac

SEQ ID NO: 842133 - DNA, 98 bp, Homo sapiens
ccgccctggctgcaggacccggagctcatgctggccttgaaccggggcattgctgctgtcaaggaggatgcagtcgagatgctggccagctacgggct

SEQ ID NO: 842134 - DNA, 99 bp, Homo sapiens
aaccgtggctgctcgataaatcagacagaacagttaatcctcaatttaagcctgatctaacccctagaaacagtggacagtttgcggttgtgaagaaat

SEQ ID NO: 842135 - DNA, 124 bp, Homo sapiens
agagctggaatcgccagctcccggcactgctacctctgacccaaagcaggtgagtataggtgcttggagaggataaggaaatcaccctgatccaatagctggtaacctgcgaggtaagttgaag

SEQ ID NO: 842136 - DNA, 100 bp, Homo sapiens
aagagatgctggaacatgcagagtctgcacaagaggctgtgcagaaggtatcctgcagaccatgaactgagcactgttcccagaccgttcatgagcacag

SEQ ID NO: 842137 - DNA, 98 bp, Homo sapiens
aagctacaacttcaatatgaagtgtcctacaccaggctgtaactctctaggttgtttgctagatcccaatggagaaaagtgtgtaactgctcctcgtc

SEQ ID NO: 842138 - DNA, 99 bp, Homo sapiens
gtgattaacaaagacctcgcggaggaagaaaaggttaagaagttcttacaagagttctaccaggatgatgaactcgggaagaagcagttcaagtatggg

SEQ ID NO: 842139 - DNA, 100 bp, Homo sapiens
cgcacgccgagtcctactccagcggcggcggcggccagcagtgcgaggacgacgggcagacgttcttcagcctagatgacgggaacaccaaattctctga

SEQ ID NO: 842140 - DNA, 100 bp, Homo sapiens
aagcaagaacttgtggacttttggatggatttcctggtcgaggccacaaagacagatgttactgtggttaggtttccagactacagagacatcattgaca

SEQ ID NO: 842141 - DNA, 99 bp, Homo sapiens
agaaatcgtatacatagacggatctcaatggaggcttatcagtaacatcagaacaaataaatcctcatagtactggagctcggaagacagaaactagag

SEQ ID NO: 842142 - DNA, 98 bp, Homo sapiens
agccagccccctgtgtttggacagcaacctagtcagtctgcatttggctctggaacaactcctaattctattggtgtgaccccatatggttatgcatc

SEQ ID NO: 842143 - DNA, 100 bp, Homo sapiens
ccgccctgcactgccgcttcggtcactagcttttgaacacttgcagcaattagaattaataaagcccatggaaagaacttcaggaaattcacagagagag

SEQ ID NO: 842144 - DNA, 100 bp, Homo sapiens
cagtgagagatgctgccgtcgacactctctctggcaggctgccctgagcacgctcaaccccaaccccacggacagctgtcccctctacctgaactacgcc

SEQ ID NO: 842145 - DNA, 100 bp, Homo sapiens
aaggaaattcatttacgacttgggctcatgttcaaagtgaacacagactacaagtctagtttaaagatgggaatgatgaacaaccccaatccttatggtt

SEQ ID NO: 842146 - DNA, 101 bp, Homo sapiens
cggagagcggcaactcgcgcactcaaagttatctcagggatctccagaaccgattgagcccaactttttcacagcagattaccatttattacatcgttcat

SEQ ID NO: 842147 - DNA, 110 bp, Homo sapiens
attttgatgaacttgaaattcacccgatacatattgtccagttacaacacagggatcacaacaaacacaaccgccacagaagcactatggcattacttctcctatcagct

SEQ ID NO: 842148 - DNA, 100 bp, Homo sapiens
acgttcatcacctagaaagccttttggagcagaaggaaaaagagaacagtatgttgagagaggacgcacagacattcgggtgcttcagccagaacaaccc

SEQ ID NO: 842149 - DNA, 100 bp, Homo sapiens
tcttgggaacctacacctcttccatggctctgaaaaaattcaaaactagtccttattttccaaccacagtgaagtgccagcattataagaaaaaacgaac

SEQ ID NO: 842150 - DNA, 98 bp, Homo sapiens
aacatttgataacagtcaaaataataatccattggcattaatggcccagtaccaggccctgtgctagatgaaaggtcgagcaaaacagacacggccag

SEQ ID NO: 842151 - DNA, 100 bp, Homo sapiens
ctaacctcggggaccgagatgcaggcagcggcacggtggactttgatgagttcctggtcatgatggttcggtgcatgaaggacgacagcaaagggaaatc

SEQ ID NO: 842152 - DNA, 100 bp, Homo sapiens
gtaaaagttttggcatcaaggtccagaatcttccagtacgctctacagtccaacatgtttaccgtggctgatgtgttgagtcaagatgaactgcgcaaaa

SEQ ID NO: 842153 - DNA, 100 bp, Homo sapiens
aggcaagtgggactttgccttctcagcccaaagtcagctatttgtgtggaagtaatcgaaaagacaacatatttattgatcctggataccaaacatttga

SEQ ID NO: 842154 - DNA, 100 bp, Homo sapiens
acatggagaaaagctctacactggactaagagaagttgttaccgaacatctcataaataaggtaagaatgattgatgttggctgatattggagtgctcat

SEQ ID NO: 842155 - DNA, 134 bp, Homo sapiens
agcatctattgggatgtcgattgcactttactgggggatttgcctcagatggagttacaggacaatagccggaggcagaagcagttgttaaaccagaggtttgagagcctgtgcgcagtgctggaggagcgcaa

SEQ ID NO: 842156 - DNA, 100 bp, Homo sapiens
gggagataacccagcaagccatacatatgtcaggaataagataagagctgcctctgctgtagagacttgcagccaatacaggaagcaaacagcgtagtcg

SEQ ID NO: 842157 - DNA, 100 bp, Homo sapiens
ttcagaaactctctcgcctctttaaagaccagctggtgtatcctcttctggcttttacccgacaagctactcccgagcccggagaggacccacgcgtgac

SEQ ID NO: 842158 - DNA, 100 bp, Homo sapiens
cacatgaccaaagcattcctcttctatggcatttccggagagttcttttgaagtcacttcagaaggatctacatgaggaaatgaactacatcactgcaat

SEQ ID NO: 842159 - DNA, 100 bp, Homo sapiens
gaggctttcagccggagaagcgagtttcagctgagtcaactactggattttctgtctggcaaacagtatgcagtaggtgatgaaactgatctttctatac

SEQ ID NO: 842160 - DNA, 100 bp, Homo sapiens
cggctgtcacagtatcctaatgaaaatcttcacagtgctgttactaaagcctgcctttccagaaaacggtattttgtctccgagtacactcccatcgata

SEQ ID NO: 842161 - DNA, 100 bp, Homo sapiens
tcttgaaaaatgcaaagatgtagatgagagaaatgagacaacagttgatatttctacttggtgtgagcagtttgcaactttttgttcagagcaactggac

SEQ ID NO: 842162 - DNA, 98 bp, Homo sapiens
cagcctttgcagtggaacctcaggggcccgcgttagccgctgtgattggaaccaggctgcatgctgctgtggcaattgcttgtgttgtaatggccttt

SEQ ID NO: 842163 - DNA, 100 bp, Homo sapiens
aaacttgactgtatacagaatcttgaatcagaaattgagaagctgtgagaagcgccaccttcaagtgaacgtcaccaacccagtacagtgcagcctgcac

SEQ ID NO: 842164 - DNA, 100 bp, Homo sapiens
gttttccatattgggtcagatgaacatcaagatatagatgtagcaatacttactgcactgctaaaagctcagatttcttttatccaagatattggaaggc

SEQ ID NO: 842165 - DNA, 100 bp, Homo sapiens
gtaggttttgtcagttttgacagtcgctcagaagcagaggctgcaaagaatgctttgaatgactcgctcagcagcagcctgaaaacttgctacaagtatc

SEQ ID NO: 842166 - DNA, 100 bp, Homo sapiens
tcatcttctcagactgtgatatgaacaatgctgtaaagggggcgctgatggccaacttcctcacacaaggccagataatttgcggtaaaagcctttcagt

SEQ ID NO: 842167 - DNA, 100 bp, Homo sapiens
gccactgcttcaccaaggtctgatactagtaataaccacagtggaaggttgcagttacaggtaactgctatgctttatggaggccaggcactgtttatca

SEQ ID NO: 842168 - DNA, 100 bp, Homo sapiens
aagctttgcaggaaaagcttttagcgtctcagaaattgagagagtcagagacttctgtgacaacaggcctgcagataaaacagctaatgaaaagaacaag

SEQ ID NO: 842169 - DNA, 103 bp, Homo sapiens
gccatttcacccattgtcatctcgaacagtatcttcttcttcgctccctagcttagaagaggaggaggcaaaacagattcagaatctgcagaaagcaggcact

SEQ ID NO: 842170 - DNA, 100 bp, Homo sapiens
ccggcctctcggcctctgccggagaaacagtgagaagcgccaccttcaagtgaacgtcaccaacccagtacagtgcagcctgcacgggaagaagtgcacc

SEQ ID NO: 842171 - DNA, 100 bp, Homo sapiens
tttgcacttgctggaggcatgttcctctatatttctctggcagatatgggagtctgaagatacagtattgctcgtcctcaaagagatctaccaaacccag

SEQ ID NO: 842172 - DNA, 102 bp, Homo sapiens
ctcaaataatgaagaaggtgtaaagcttgttcgaatgtctgcaagccagttagaagccctctgtcctcaggctttctcctgggcttcagtgaccagtaaaaa

SEQ ID NO: 842173 - DNA, 100 bp, Homo sapiens
ggcagttctgtgatccgctgccacgtctatgaccgggcggcgcgggtctgcggctccagcgtgcagaaggtttcagaaggatcccacttggtcagagact

SEQ ID NO: 842174 - DNA, 100 bp, Homo sapiens
cagaagaaactgcaccggaaatgtgcctaccagccagtacaggctactctgtcatctttgaagatgttagatgtgggaaagtggccaattttttcccttt

SEQ ID NO: 842175 - DNA, 50 bp, Homo sapiens
ggccgctgcagatgaccattccagtcacttatataagaagaaccttgatg

SEQ ID NO: 842176 - DNA, 100 bp, Homo sapiens
aatctcccaagaggaatgacaaacaaccagctcttcaggtattgttgcagcatctggcagtgagactgaggatgaggacagcatggacattcccttggac

SEQ ID NO: 842177 - DNA, 98 bp, Homo sapiens
gagcgtctctccgccactgcgcacattttgcagcctgcaccggccaacgtatgactatgaatatgatgaaaatggtgacagagtcgttttaggaaaag

SEQ ID NO: 842178 - DNA, 99 bp, Homo sapiens
tgctcgataaatcagacagaacagttaatcctcaatttaagcctgatctaacccctagaaacagtgaacagcagagaatttcaaaggaccttgctaata

SEQ ID NO: 842179 - DNA, 100 bp, Homo sapiens
cagtgacgacaaaacaccagatgatgaccctgagcaaggaaaatctgaggctgttgaaggaggatgttcccatcttggtcagtcctatgcggatagagat

SEQ ID NO: 842180 - DNA, 100 bp, Homo sapiens
cgcgggctccggcggcgccctggaggaggaggctgaagccgacgtagcttctctgaacagacgcatccagctggttgaggaagagttggatcgtgcccag

SEQ ID NO: 842181 - DNA, 98 bp, Homo sapiens
ttgttttgccagcgggagcacttcatcagttgaatggatcgcagcagttaccattgctgctgggacagctgcaattggttatctagcttacaaaagat

SEQ ID NO: 842182 - DNA, 98 bp, Homo sapiens
gattacttaagatcattcttaaatgattctacaaactttaaacttatttacagatatgcgtttgactttgcacgggatgcagtgtcagccttacttgc

SEQ ID NO: 842183 - DNA, 99 bp, Homo sapiens
ggagatccggatgctcatccataaaactgaagatgtgaatactctgaggccacaagaggaagctgaatgaagaggacgccgccagcgagtccagcaggg

SEQ ID NO: 842184 - DNA, 100 bp, Homo sapiens
cccaaccctcgtgcctccctgaaccactccactgcctttaaccctcagcctcagagtcagatgcagggcaattaagttggaatatgcaaggttggttaag

SEQ ID NO: 842185 - DNA, 100 bp, Homo sapiens
caatgtccctcacaccccttccagctacatcgaaacagatgcccgagtggtaaaagacatggcaacaggaaagtctaagggatatggctttgtctccttt

SEQ ID NO: 842186 - DNA, 100 bp, Homo sapiens
ttttgtctgcccctattgtaagtgcagatggaacacaacagattcaagtcaatctgaaagtcccagccagccaagtgacgctgacattaaggaccagcca

SEQ ID NO: 842187 - DNA, 98 bp, Homo sapiens
ttgccggcttcagctcgcgcctcttcgccgtcatccgcttcgaaagcatcatccacgagttcgacccgtgggggaaatttgcagtggtgagaaaatgt

SEQ ID NO: 842188 - DNA, 99 bp, Homo sapiens
ttgctcctggagcagttgtatgtgtagaaagtgaaatcagaggagatgtaactatcggttcagccaatactatcttctgttccaacaacggaagtgtcc

SEQ ID NO: 842189 - DNA, 148 bp, Homo sapiens
aggaatgtcgctgccgccgccaccgccggggccgctgccgttgaggaggagacggaggagaccgacgttgttagctcttgaatgtcgtctctcaactagccaaacggaatctgcgactgctggtcctaggccggaagcacatgctaag

SEQ ID NO: 842190 - DNA, 98 bp, Homo sapiens
ccctgcattttgggaaactcgactttggagaaaccaccgtgctggaccgcttttacaatgcagacttcctttaataagtgttgcgctggttcaaggtt

SEQ ID NO: 842191 - DNA, 100 bp, Homo sapiens
ctatatgtatcaccacccaacatcagcagccagcatcttctttattgagattactcgagtggatggaaggaagttgcttctttatagggagcagcttgta

SEQ ID NO: 842192 - DNA, 100 bp, Homo sapiens
aacgtgagggtgtaacttacaaaaaggatgaggaagtacagacaattggtcagatagaactgtgcctcactaagcaagaccagcagctgcaaaactgcac

SEQ ID NO: 842193 - DNA, 98 bp, Homo sapiens
gggggaacaggagaaagcttcatggaagaggcaccgatgaagacgccattattagcgtccttgcctaccgcaacaccgcccagcgccaggagatcagg

SEQ ID NO: 842194 - DNA, 100 bp, Homo sapiens
cctccccagccatgctgaactttgtcatggatgcactggtagaagatgatatctgtattctgaatcatgaaaaagcccataagagagatacagtgactcc

SEQ ID NO: 842195 - DNA, 98 bp, Homo sapiens
taagagataaattgttggagttacatgtgaattattatgttttagaagaggcatggtgtgttgtgagaactaagctgtcacccttgacccaaactttc

SEQ ID NO: 842196 - DNA, 100 bp, Homo sapiens
ccaaggaaacaggatgctgatagtctccagcgggcctggactgtgggctggtgtgtggaactgcatgttcagctcttgacacaaatccaccttcttgcca

SEQ ID NO: 842197 - DNA, 104 bp, Homo sapiens
accactgaaactgatctcaaacagcgacgagagatccgtgcaggcacagccttttacattgatcaggtctcctttacagaaaggggcttggataaggaggaaag

SEQ ID NO: 842198 - DNA, 100 bp, Homo sapiens
aagcccaccaagctaaagaggctgcccagaaagcagttaacagtgccaccggtgttccaactgtttaaaaatccagactccaaaatgatgcaaatcaacc

SEQ ID NO: 842199 - DNA, 100 bp, Homo sapiens
caaggagcccctcaagaacctgaacagctgcctccagcagctcaaccaccggcatgttctttggttcagcacccagtcccatgggtggaatctctcctgc

SEQ ID NO: 842200 - DNA, 100 bp, Homo sapiens
tggactttgtttttcctgggaactgcaggtgactgaacttgaatgtgttagtagccaagcaaatgcagtacatactcataagacagaattaaatcagaca

SEQ ID NO: 842201 - DNA, 100 bp, Homo sapiens
aactcgtcatgctctttgtagcgtggtgcttctgttgctcacagagcttgtggacaaatgtataggatcaagaattcacatcgtgatgaagagtgataag

SEQ ID NO: 842202 - DNA, 50 bp, Homo sapiens
aactgagacgtttcgaattccaggaagcggtttgacagggctgaagcaga

SEQ ID NO: 842203 - DNA, 100 bp, Homo sapiens
cgcttctccaacgctgctccctgtctgcaactgacttaggaactctaatgatccaggacaaagaagttaccctggagtatgtatcaagcctggatttttg

SEQ ID NO: 842204 - DNA, 98 bp, Homo sapiens
tggacaacaccatggaaatatttgacattgagaggtcaaccagaatcaagatgtctgggactgaggaagcaattcttggaggacgtgacagccatcct

SEQ ID NO: 842205 - DNA, 98 bp, Homo sapiens
ttcaacatgcctctgacaatctctagtgtgcgcttcccttcccacttcagctctgacttgaaggacctgctgcggaacctcctgcaggtagatctcac

SEQ ID NO: 842206 - DNA, 100 bp, Homo sapiens
aaatactctgaggctctcaaagatgcccaggagaagctggagctggcagagaaaaaggccaccgatgatagaccatgaagctgaaggaacttgagcggcc

SEQ ID NO: 842207 - DNA, 100 bp, Homo sapiens
tgaggacggctctgccaaggcgggctccgactacgagtacaggtcctggctataagtcaccatggcacagcaagctgccgataagtatctctatgtggat

SEQ ID NO: 842208 - DNA, 100 bp, Homo sapiens
ggccatcacggcggccgcagtggcgtcctggagccctcctcagtgggtaattccagaattgattggccataccattgtcactgtattactgctcatgtca

SEQ ID NO: 842209 - DNA, 99 bp, Homo sapiens
taatatggaaactcagacaagttcgacatttaacagagattctctgggagacatacttctcttttgtaaaggagcagactcggcagtttttcccagagt

SEQ ID NO: 842210 - DNA, 99 bp, Homo sapiens
ggaggagagagcaagcagggaaagagagcgccaggtgcttagcaggtgctggagaatctggtaaaagcaccattgtgaagcagatgaggatcctgcatg

SEQ ID NO: 842211 - DNA, 100 bp, Homo sapiens
tactgtatatgcacatgctgggctaccctgctcactttggacaggagcggagggcacagtgttccctaaatctatagaaacacctaatgtcagggcagac

SEQ ID NO: 842212 - DNA, 98 bp, Homo sapiens
aaaaagcatttaggcaggtggctcccaaattaccggaaaggactgttcttgaggtattcagatttggagcaagaggtggtggtggccttcccccgaag

SEQ ID NO: 842213 - DNA, 100 bp, Homo sapiens
accccatatatgattttctttaaggatggtttagaaatggaaaaatgtttccagtctcatcagattttccatgtcctggtggtggcagcagcctttgtcc

SEQ ID NO: 842214 - DNA, 98 bp, Homo sapiens
ttcaaaggataaactacctacatagaggacatacctttggttaaaggagctgccgtcagactactgttttccaaagtgaagttgcagtcactctgccg

SEQ ID NO: 842215 - DNA, 98 bp, Homo sapiens
tccgagcgagcgagcggcgcccagcccagcgcctcggccgaacccctccgcagcagtttgtggagatgagtgcactggccttcttctcggtgacttgg

SEQ ID NO: 842216 - DNA, 98 bp, Homo sapiens
cagaatgaccttccttgggaatttatggtcgatcgtcttcctactgtcttgttttttccctgcaacaggacccattggtggtggaactttcaaggcct

SEQ ID NO: 842217 - DNA, 100 bp, Homo sapiens
tgaatttaaaggagcagccctggtgtcacctatcagtaaaagtttggaaattttagcattcaggtgccaggaatgcagatgggacagccagtgccagaaa

SEQ ID NO: 842218 - DNA, 98 bp, Homo sapiens
tggtggctttctatggatgcctcctggcagaagtgattccagtgcctatagaggtacctcttaccagaaaggcgtcacaatgtagcagggaccccagg

SEQ ID NO: 842219 - DNA, 99 bp, Homo sapiens
ggctgccagtgctaccctgagaaaggtggacgtgaagaattttaaatcgtttctccaaagacattggacacttggatgatttgctgccgctgacgtttt

SEQ ID NO: 842220 - DNA, 100 bp, Homo sapiens
aaattggataagcgtggttcccacaaagagtataagcgagggaagtcgtgcacgaacaccaagactccaagaactttcccctcagagcacaggtaacaga

SEQ ID NO: 842221 - DNA, 100 bp, Homo sapiens
tcccgggttcaagcgattcttctgcctcagcctcccaagtagctggggttaaaggtgatcagactctgagaatatgggatgtgaaggcagcaggagtaag

SEQ ID NO: 842222 - DNA, 100 bp, Homo sapiens
ttaaatcctctttacatcatagactttcagctacttgaagatagccatcagccgctacgtgactcttttctccagcttcttccagaccagctggtcttgc

SEQ ID NO: 842223 - DNA, 100 bp, Homo sapiens
atcatggataactgtgaggagctaatccctgaatatctgatcgttccccatcaggaagtcctcgcagaagtgcaagtcctgaaagaatggactgaagctc

SEQ ID NO: 842224 - DNA, 98 bp, Homo sapiens
aacaggatattttttgccatggtggattttgatgaaggctctgatgtatttcagatgaggacgattatttatcatttctactaaagcaggatctctag

SEQ ID NO: 842225 - DNA, 100 bp, Homo sapiens
acggataatatcaagtacgaggactgcgagagctaagcttgtctgctggatccctgcagctggagcgcaaaaggagagatttcacctcttctgggagcag

SEQ ID NO: 842226 - DNA, 100 bp, Homo sapiens
agaaattcgaatctcccaacatcctgcgtatatttgggatttgcattgatgaaacagtggacccatcaacttgtgccagtacagggtctgtgcagtggag

SEQ ID NO: 842227 - DNA, 98 bp, Homo sapiens
agcacgcgggctgctcatcgtcagcagggagaggctggagtatagcatcgtgatccagcagctctcaaatggcaaatgggtcccctttgatggcgatg

SEQ ID NO: 842228 - DNA, 117 bp, Homo sapiens
tgggcacctgtgttccatgtcaatgtaatggacacagcagcctgtgtgaccctgaaacatcgatatgccagggaagaactgctaaagctttgaggtcattacaatttacgaatccag

SEQ ID NO: 842229 - DNA, 100 bp, Homo sapiens
cctcgtcgcgcgcggggcctccgcgcccccggctgctgctcacgccccgcccgggagccaggctctgacgcccgctctgcggcttcggtgtttgaacagg

SEQ ID NO: 842230 - DNA, 99 bp, Homo sapiens
cggcgggccgcgcctggtgatcggctccttaccagctcacctctcaccgcgcatgtttggaggattcaggagcagttccagaaaaatcccgacagttac

SEQ ID NO: 842231 - DNA, 100 bp, Homo sapiens
agtcttgaatctctcaaagtcatccatgagggttggaaccaacatcttccaaactcctggctatttttatgattcccacaaatccaccaccaacattcag

SEQ ID NO: 842232 - DNA, 98 bp, Homo sapiens
gaccactgtcctgagaggacgtgggtgaggggcaggtgatttgatgaaggctgctgcaggagagttcgcagatgatccctgctcttctgtgaagcgag

SEQ ID NO: 842233 - DNA, 100 bp, Homo sapiens
ccgcaccccaggatggatcccccagaggtcctgctcaatctggaattttgtcagatcgtgaagtggtaaacctctttcttcattttactgtcaaccctaa

SEQ ID NO: 842234 - DNA, 100 bp, Homo sapiens
gaagacctaaaactgatggctactaaaaagcagagcatttctgattggcacttctctgtttgatgaagagggagccaagattgtcaaagacctaatgtcc

SEQ ID NO: 842235 - DNA, 100 bp, Homo sapiens
gacgacgaggactgctatggcaatatgataccacgagtcaacccaaaagttgctggggagaagttgctctttaatgaattgcatctcatgaatgtatcag

SEQ ID NO: 842236 - DNA, 100 bp, Homo sapiens
atggccacgcagtgctttgcaacgctaattagactcatgccacttgagaattctcccagtccttggctacatcagcccacccctgtgacctcagcagatg

SEQ ID NO: 842237 - DNA, 99 bp, Homo sapiens
ggagaggcgagctcgcgatgagtggtctcggcaggctcttcgggaagggtcagcgttgaagttttggtagagtatcctttttttgtgtttggacagggc

SEQ ID NO: 842238 - DNA, 100 bp, Homo sapiens
caaagatacagtgattatagtaggaccattcttagtggcactggggaaatcttggcacccagaagaattcaactgcgctcactgcaaaaatacaatggcc

SEQ ID NO: 842239 - DNA, 99 bp, Homo sapiens
tcccacctacatggacagcccacgaaaggtgacagagctgaatgaacctctctccaatgaagatcgaaatctcctctctgtggcctacaagaatgtggt

SEQ ID NO: 842240 - DNA, 100 bp, Homo sapiens
ctggaagtacgcagacgccggccatgtgtgccacctgtgccatccaaactgcacctacggggagaaaatccattacattcggactgagggtaatcacggg

SEQ ID NO: 842241 - DNA, 98 bp, Homo sapiens
acaatgttccgtgttgaatatgcatctaaagttgatgagaactttgactgtgtagaggtgcaaagttccccatcaagtggacggcccccgaggcagcc

SEQ ID NO: 842242 - DNA, 100 bp, Homo sapiens
gtccgtctggtggtctcgaacctgggactcggcgaatgcggattcgatcattcacatcggctttgaattgtattccatggtgccatctatttgtcctcta

SEQ ID NO: 842243 - DNA, 98 bp, Homo sapiens
ccaagcctgccttcctcgagttcctcaaggctctccaagtggcccggcagttcctgctgcagcaggcctcaggcctgagctccccagggaacaatgac

SEQ ID NO: 842244 - DNA, 100 bp, Homo sapiens
tggactcctgcgcctccatgtacagccgctccatccagggccaccatgtctgcctcctggtgaaaaagcccgagcgggaagaagttccgcagcaagccgc

SEQ ID NO: 842245 - DNA, 100 bp, Homo sapiens
cctcgacgccacttcatgttccagtgcctcgagcgctcaggatggaggaagactcgatccgcctgcctgcgcacctgcgggagccttagcatcatcaaat

SEQ ID NO: 842246 - DNA, 98 bp, Homo sapiens
caaagcttccaatgagtatggcagtgtcagctgtacagccacactaactgtgacaggagcttcagaaatacgagcagttcatctttgcagatcatacc

SEQ ID NO: 842247 - DNA, 98 bp, Homo sapiens
tgcccatgccaaccaaaaggcgatccacatttgttcagtctcctgcagatgcctgcacacctcctgttttctggatatgccgcagaaggatccgtgcc

SEQ ID NO: 842248 - DNA, 98 bp, Homo sapiens
cctgcagtaccccactctacgatcagcattgctattggaaatacttaatagtagatgaaggacacaggattaagaatatgaagtgccgtctaatcagg

SEQ ID NO: 842249 - DNA, 100 bp, Homo sapiens
ggattgtggacccttttgccagacctcgaggtcatggcaggaaagagctgtaggtaaaacttgcctactgatcagttacacaaccaatgcatttcctgga

SEQ ID NO: 842250 - DNA, 98 bp, Homo sapiens
tgatcctattaagaattgtccaaatgttggagcatttgattgaaaaatccttcttagccattttaaaggaaccaaagaggttgttgtaaatgtggatg

SEQ ID NO: 842251 - DNA, 121 bp, Homo sapiens
tcagatgggatctttccggatcaatccagatggcagccagtcagtggtggaggtggccaagactaagcagcagattgaggagcagcgggtgcaggtgcaggtggtggagcgggcccagcag

SEQ ID NO: 842252 - DNA, 98 bp, Homo sapiens
caatattagagaaaattaggaagactgaaaggcaaggccatttaaatgtgctcttcggcttcgtggcccggaagcagggcagcaccacggacaacgcc

SEQ ID NO: 842253 - DNA, 100 bp, Homo sapiens
ctactgggatgtgaagtagatgataaagatgatgatatccttctcaaccttgtgggatgtgaaaactctgttactgaagctcctctggtgcaagtgtggt

SEQ ID NO: 842254 - DNA, 98 bp, Homo sapiens
aaaactggatgttggtagaaaaagcaagagtttgttatatagcaatacctttgtctggatatggaggaacaagcaatcttattttggaaggcgttaaa

SEQ ID NO: 842255 - DNA, 120 bp, Homo sapiens
tgacatttaattttagggtcctttatatagaagggagagtaggtgttgctctcttgccattcgtggatgagcgaaggctacgagctgccctagaagaggtatacccagacctcactccag

SEQ ID NO: 842256 - DNA, 98 bp, Homo sapiens
ttccttattggagcaagggaaagaaccctggctggggaaaagggaagtgaaaagagatctgttttcagaaactggcagacctttcacttcgtatccaa

SEQ ID NO: 842257 - DNA, 100 bp, Homo sapiens
ggaatctatcaaaaaggaagcatgttggacgatatctaatattacagctggaaatagggcacagatccagatggcctgatatgaaggagtcacgcctccc

SEQ ID NO: 842258 - DNA, 99 bp, Homo sapiens
caagccctgtctttccttctcctcctgccactggggccagctcttccgaggctccagcctgcttttccgccgggtgtcatcaggatcatgctttgccct

SEQ ID NO: 842259 - DNA, 151 bp, Homo sapiens
aagctctgtcttggggagtacccagtggagcagatgacaaccatagcccagtgccaatgcatcttctgtactctgggagatgcagttaaagacttgatgcttcgctttctgggtgaaaaagctgcagcaaagagacaagtcctaaatgccg

SEQ ID NO: 842260 - DNA, 100 bp, Homo sapiens
gagagactctatatgaaaaggaactccctgacatccttggctgaagccgacgtagcttctctgaacagacgcatccagctggttgaggaagagttggatc

SEQ ID NO: 842261 - DNA, 100 bp, Homo sapiens
tcattgaaaacttcgaggcactcaagtcctggctcagcaagactctcgagcccatttttctgagtttaaccagtaatgccattcagttgccaatctcaag

SEQ ID NO: 842262 - DNA, 100 bp, Homo sapiens
gaaaagaagtcagctgttgcagataaacatgaattgctcagccttgccagcagattctggacaatcaggaagtccaagccacaatgatcctgccaagaat

SEQ ID NO: 842263 - DNA, 100 bp, Homo sapiens
tgtcctgggagaatgccccgaagtactgtttacagctcacgattcctgggggaactgtcttactgcaggtaagaatgattgatgttggctgatattggag

SEQ ID NO: 842264 - DNA, 100 bp, Homo sapiens
cagcccggccgagccgagggccaccccctggtcctctgccctcgcgccccgctagggccagagcttttcatcctactataaaggaggatttgaacagaaa

SEQ ID NO: 842265 - DNA, 116 bp, Homo sapiens
ttcgtctttgcagcgtagcccgagtcggtcagcgccggaggtaaaacctgtttcccagcctggtggcatcctgtggaaagttggtcagctgcaacctggggtgtgaaggactggac

SEQ ID NO: 842266 - DNA, 100 bp, Homo sapiens
caaattcacttggaacaattgtcagcagagaagccaaacttcagtttgcctcaactgcttcgagaacgacagcagatggccagccgtccctttgcttctg

SEQ ID NO: 842267 - DNA, 100 bp, Homo sapiens
cttccaatgagtatggcagtgtcagctgtacagccacactaactgtgacaggctgttcggctcttgaatcccagcgatgaaaccaggaactcactttccc

SEQ ID NO: 842268 - DNA, 98 bp, Homo sapiens
ggaactgtcaggtacctcaaagcttttgtcaaagcaacaggcttcacaagtcctggttaggaagcgtcgtgcaaattctttacttgaagaaaccaaac

SEQ ID NO: 842269 - DNA, 100 bp, Homo sapiens
gctgaagcattgcttcaaagcatggggctaactccagaatcccccattgacgaagttatacggaagcgtctcctcattgatggagatggtgctggagatg

SEQ ID NO: 842270 - DNA, 99 bp, Homo sapiens
gcaaattcacaaaaacttattccgacattcagagttgtttcctccatttgctaaaggaatagtgtttgtgtttcaggctgcatgtaccaagtagttcag

SEQ ID NO: 842271 - DNA, 100 bp, Homo sapiens
agcacgtgttggaatggacttcggaccctggcctcttgggatgcaaagtttgaaggatgacctctaggaagaaagtgttgctgaaggttatcatcctggg

SEQ ID NO: 842272 - DNA, 100 bp, Homo sapiens
gtcttctttccatcacttaaaccttcttccagtatagatgagagtccttataggacagttcttcgagataatgcaataccaacaatatttgatcttacca

SEQ ID NO: 842273 - DNA, 98 bp, Homo sapiens
aggaactgcgcagcctcttcgagcgccgcggacgcgtcatcgagtgtgacgtggtgaaaggttttagctaaagaagatactgaggcagctattcaatc

SEQ ID NO: 842274 - DNA, 99 bp, Homo sapiens
gacgctcttctccaccacaccgggagaaatgtctttcctccaggacccaagtttcttcaccatggggatgtggtccattggtgcaggagccctgggggc

SEQ ID NO: 842275 - DNA, 100 bp, Homo sapiens
ctgggacacacctccattggatttaaaagacagtcctcgtcagcactgactttcagctatggaatcggaaataatgaagatgtttcattttcaagaccag

SEQ ID NO: 842276 - DNA, 100 bp, Homo sapiens
ccttacgacgggttggggatggcgtgcagcgcaaccacgagacggccttccaaggaaaacctcctgatgagaattcacttccacattgctgatgaaacca

SEQ ID NO: 842277 - DNA, 98 bp, Homo sapiens
tttttcggatcatgtctggtggctccgcggattataacaggaaataatgaagatgtttcattttcaagaccagcagatcttgaccttattcagtcaac

SEQ ID NO: 842278 - DNA, 50 bp, Homo sapiens
ggacgtgcacccagaggaccaggcggcgatgggactgagtatgggctgag

SEQ ID NO: 842279 - DNA, 137 bp, Homo sapiens
atcacattggagtcacaatcaaagaactggatctttatctggcttactttgtccacactccggctggcagagtgagagacaaattccttttggggatgtccggctaccacctccagctgactataataaggagatca

SEQ ID NO: 842280 - DNA, 100 bp, Homo sapiens
agaagggagactacaaggacagcagcgactttggggcccgtcaccctcaggtctagcacataccgctccaagggctttgacgtcacagtgaagtacacac

SEQ ID NO: 842281 - DNA, 100 bp, Homo sapiens
aaaaagtcgtggaataggcactgttacttttgaacagtccattgaagctgtgcaagctatataatgctgacaaggtactggagctgatgaacaaactgct

SEQ ID NO: 842282 - DNA, 100 bp, Homo sapiens
ccagcaaccatgagtggttccatgatgggaagtgacatgaaggatgccctgcagtggtctcgccatccagctacagtggagggagaggagccagaggaca

SEQ ID NO: 842283 - DNA, 99 bp, Homo sapiens
cccagtcccacttcaaacattcgtctcggaaaccccgcctcttacagtcacgaggagaagtttttgcgatatgtggaagctgtgatgctttgggaaact

SEQ ID NO: 842284 - DNA, 99 bp, Homo sapiens
tctgaatggtttagcaactcagtgtattcactcaaggatctaaatttacttgatcgctgtataaaagaaacattaagacttagacctcctataatgatc

SEQ ID NO: 842285 - DNA, 100 bp, Homo sapiens
ctggaaataaagtttctgagcatccctgcaatgaagagaacccagggaagttcctttttgaagtagttccagatttcctttgacctcgctgagtacactg

SEQ ID NO: 842286 - DNA, 98 bp, Homo sapiens
acgatttggtgcagccggggtttggtaccgagcggagaggagatgcacacggcactcgagtgtgagttgtcgagatgtccacagaaggaggatttggt

SEQ ID NO: 842287 - DNA, 100 bp, Homo sapiens
ctgggcggccacctatgagacttcatctgtgtgcctgtggatgtggacaaagattcatccctagtgactctctgttatggactctgtgttctgggacgga

SEQ ID NO: 842288 - DNA, 100 bp, Homo sapiens
aaagattcagagttggataagcacttggaatcacgggttgaaggaatggcggcgctagatagtaaggcatcagggaagatgggaatgcgagctgtagtct

SEQ ID NO: 842289 - DNA, 100 bp, Homo sapiens
gcggtggatccggacccctgcccctgtctaatctgctaagatacctgtgttttgactctgttcctgtggatagctgcttggtctgaagttccagaaagga

SEQ ID NO: 842290 - DNA, 100 bp, Homo sapiens
tattctagcatccgtgaaggagcagcgttttaccaacgaggatcatttggctgtccataaacataaacatgagatgacactgaaatttggtccagcacgt

SEQ ID NO: 842291 - DNA, 136 bp, Homo sapiens
agcagtcagcagagcagccacgatgatgattctagcaggttcctgagtcctcgagcgcgggaagaaagaaactatgttccaacttcctgtcaacaatcttggcagtttaagaaaagcccggaaaactgtgaaaaaa

SEQ ID NO: 842292 - DNA, 98 bp, Homo sapiens
tgaatgtagccaccacgcctacctgcatgaccagttctggagctactggaatagatactattcgttacttgtccttgcatgacaacaaatacatcaga

SEQ ID NO: 842293 - DNA, 100 bp, Homo sapiens
gggaagacggtgagccggaggagtcagtcagaggggcgagcaggagcgattccgtcgccaaacagactcagcccacctgcacccaggtgaaataaacagc

SEQ ID NO: 842294 - DNA, 100 bp, Homo sapiens
tgcgaaggaagtacctgtaagcttaaatcatttgctgagtgtgcatatggtgactgttgtaaagactgtcggactttgagaatcactacaagaaaaactc

SEQ ID NO: 842295 - DNA, 147 bp, Homo sapiens
ctactgctaccgggcggccatcgggagtgtccggttcccgtggcggccggacagcaaggacatttccaagaatagccaggccagaagaaggaaggcctgtggtgagtgggacaggaaatgacatcaccaccccaccgaacaaggagc

SEQ ID NO: 842296 - DNA, 100 bp, Homo sapiens
cctcagtgtgatacagccaattgtaaaagactgcaaagaggctatgcctttctgctgttccaagaggaaagctcagtacaagctttgatagatgcctgcc

SEQ ID NO: 842297 - DNA, 100 bp, Homo sapiens
cagtacggtagtcaaacccccagaacgtggtgtagtatgggaagaaactattattttgcttcctgataacgtccactatgtctttctttcggctactatt

SEQ ID NO: 842298 - DNA, 100 bp, Homo sapiens
gcactcggcactggccacttgcaggtgcccctgagccagcctccagaggatgagctggataggctgacgaagaagctggttcacgacatgaaccacccgc

SEQ ID NO: 842299 - DNA, 100 bp, Homo sapiens
tgccgcaccaggctcatcctgtccatcgtgtgcctgatgatcacgcagctggctggcttcagtggaccagatggcacaacagcattattgaaagcagcca

SEQ ID NO: 842300 - DNA, 100 bp, Homo sapiens
tatgtttgtaaatgtgagtggaagccatgaggccaaaggcagttgtattgatgaatgaagaaatgctgtgccaagaatttggaagatttggaccgttagc

SEQ ID NO: 842301 - DNA, 98 bp, Homo sapiens
ccatttcctggggtccaagaagagagatgaggagccagcaccgctctttgaccttgccatgcttgccttagatagtccagagagtggctggacagagg

SEQ ID NO: 842302 - DNA, 98 bp, Homo sapiens
caggtgcagcagcaaggagaacattctcagagccaggtccttgtgctgcagaatcagaaccagctcttttgatagggagcaagcagttcgggctttca

SEQ ID NO: 842303 - DNA, 98 bp, Homo sapiens
tacccggagggcgtcaagcagcatgtgaaggagaccaaggcagaaatggtgcacagtgctttccaggcccagcgggctttccttctgatggcctctca

SEQ ID NO: 842304 - DNA, 99 bp, Homo sapiens
aaacgctgtgcatcaaaagtaccaagagactgccttggagaggttactttcaatggagctcttcagtgggtcatctgtgtgtcacagcctcagaagacc

SEQ ID NO: 842305 - DNA, 100 bp, Homo sapiens
cgctccacctcccatgtcggcacagctactccctcttgatgccctcccctttgcccctcactcaggatgctccagaccttgtatgattacttctggtggg

SEQ ID NO: 842306 - DNA, 100 bp, Homo sapiens
gtcaaagtcccccgtggtcacatctgggttgaaggtgatcatcatggacacagttttgacagtaattcttttgggccggcatcagatgccagctctgaaa

SEQ ID NO: 842307 - DNA, 100 bp, Homo sapiens
gtgcaacaggacagaatctagtcgctgcatacctccttccctgtcctcaatcaggtcaaaatgcagatcttcgtgaaaacccttaccggcaagaccatca

SEQ ID NO: 842308 - DNA, 100 bp, Homo sapiens
gccacctgcctttgacctttttgaagcctttgcaaaatttgtgaagtgtggatatgcaggctctaactttccagaacacatcttcccagctttggttgga

SEQ ID NO: 842309 - DNA, 131 bp, Homo sapiens
tagaacgactttccaagtttgaagttggagatgctgaaaatgttgcttcatatgagaaactaaatatattttgccaactttggaaaaagaattattcttggcagagcacagtgaccttgaagaaggtggac

SEQ ID NO: 842310 - DNA, 100 bp, Homo sapiens
ccatggaaacaggaggaagaattcccaagccaaagctttccagttgtggaagatatcaataagcgcagagagccgctccccagcctggaggctgtgtatc

SEQ ID NO: 842311 - DNA, 98 bp, Homo sapiens
taaacagcctgcctcacaactccaaaaacaaaagggagatactccagcttcagcaacagctgtggtgtgatttccacgctgagaagccgggaggaggg

SEQ ID NO: 842312 - DNA, 100 bp, Homo sapiens
ggagacacattcccgtcagctggctgatccgcgctctgttaggcaattttcttcagtggtatggcattttctcaaataaaactctgcaagagttatcaat

SEQ ID NO: 842313 - DNA, 99 bp, Homo sapiens
ttaattaagatctttcaagcatcaggtaaaaagggggcagtgcccaaaggaaatgccactaaagaattcatcgagagtttacagttgaagcctgggcag

SEQ ID NO: 842314 - DNA, 100 bp, Homo sapiens
ttcctgcttctagaaccacctcagacgcaaacatgcagatctttgtgaagaccctcactggcaaaaccatcacccttgaggtcgagcccagtgacaccat

SEQ ID NO: 842315 - DNA, 100 bp, Homo sapiens
aacggagggctgcagcgcccaccctgcgccagagaccagataaacactgaaagagaacagctcagaggttgtacagccttttttaatgggttgtggaacc

SEQ ID NO: 842316 - DNA, 100 bp, Homo sapiens
cccgtaaggagcagagtcctttgtactgaccaagatgagcaacatctacatccaggagcctcccacgaatgggaagcccggaagatggtgagatccatcc

SEQ ID NO: 842317 - DNA, 100 bp, Homo sapiens
gaataagagatgtgattaatgtattccaccacctccgccagttaagaggaaaaaggcttttaaagaagcagttttttcaccgagccctaaaagtaatgaa

SEQ ID NO: 842318 - DNA, 98 bp, Homo sapiens
gtggaggaagtacagccagcagactatggactacgtggcttcttccaaggtggcatcccccgagccctccgcagaactctaatggcagcaatggcgtg

SEQ ID NO: 842319 - DNA, 50 bp, Homo sapiens
cgggagcacgtcatctccatcgagggacatgaaagctatgtgaccttctg

SEQ ID NO: 842320 - DNA, 99 bp, Homo sapiens
tttgatgttggctatactcttgtacacttggctatacgttttcagaggcaggatatgctagcaatattgcttacagagctttctgagaccaagatcttc

SEQ ID NO: 842321 - DNA, 99 bp, Homo sapiens
tctgtgccacttagaggaagccaaaaggagattagcagaggcatttcatatcagtgaggattctgatcctttcaatatacgttcttcagggtcaaaatt

SEQ ID NO: 842322 - DNA, 100 bp, Homo sapiens
ggacttcattcctggaaaaagaagttcatcagattcaagactggcacagcctccaggttggcgggctcatctgcgctggggttctgtgcgccatgggcat

SEQ ID NO: 842323 - DNA, 98 bp, Homo sapiens
caccgtgaagcctggcccagggtctggcatacagatgccgtgtttgtaaggtccagacatcatctggtctccctgaacctgaaatcacaccatggatg

SEQ ID NO: 842324 - DNA, 131 bp, Homo sapiens
ctcaccacggctaatttgatggagaaggttcgaggcctacagaacctagcctatcagctggggctggatgagtatgtaggtgcaaaaaactacagacatctctgtgctgtttattacaacaagaatcctgg

SEQ ID NO: 842325 - DNA, 100 bp, Homo sapiens
tcgtgtggaacggcaactttgtcattgacaacccacagaacatccaggggtctgacaatgaatcagatgaagaagttgctgggaagaaaagtttctctgc

SEQ ID NO: 842326 - DNA, 101 bp, Homo sapiens
ccccgacgtacagcgggccgggaaaagtggcactgaggctctggaacttctgcccagctctccttgatgatggacctagccaaagtgagtctgctactgag

SEQ ID NO: 842327 - DNA, 98 bp, Homo sapiens
ctccgggtacacgatgaattccagcaacgtcagcctcgagtttgaccagcagcaggggtcggtgtgtccctctgaatctgagatctatgaggcaggag

SEQ ID NO: 842328 - DNA, 100 bp, Homo sapiens
tgtaactgaaagatacatggcttgcaaaaagtaaaccacgatcgttatgctgatgttgctaacaaccacaagcagaatttgatgacggtggcaaaccttg

SEQ ID NO: 842329 - DNA, 98 bp, Homo sapiens
aggtgaagatgatacctttctaacagcccaaagtaaacatcagtctccaaagataactacatcccttcttcccatcaacaatggctccaaagaaaatg

SEQ ID NO: 842330 - DNA, 98 bp, Homo sapiens
ttcgattcgagagacaagcagaagaattcctcaatgcagtcttttatagaaaagtcataccctatggtactgcagtatcgaccaagaattgatttcgg

SEQ ID NO: 842331 - DNA, 98 bp, Homo sapiens
agctcactatggccttgatcctcctgccttagcctcccaagcagctggtattacagggaagtgttcgccagttactacatgaaaagataagagatgct

SEQ ID NO: 842332 - DNA, 100 bp, Homo sapiens
ccgggagcggctcacggcggaggacgacgcgctcaaccagatcgcgcgggagtattaagggacatcagcgagagaggcagggatcttgagcagattttat

SEQ ID NO: 842333 - DNA, 100 bp, Homo sapiens
cacgtgtgctggcaccgcaacaccagcgtctccatggtggacttcagcatcgcagtggagccggtggacaaccagcaagccatggtgcgcagggagtctg

SEQ ID NO: 842334 - DNA, 98 bp, Homo sapiens
ggctccgtgaccagccggctgggctcggtattccccttcctgctagtcctggtggatctgcagtacgaagggaccttggggccagcttgcggtaagaa

SEQ ID NO: 842335 - DNA, 98 bp, Homo sapiens
gtccctgaaagcattaccgggttcgctaggctcacagagattctttgaaaaccttaaccccatgggaagtgcatctgaaaaagagtttacagattatt

SEQ ID NO: 842336 - DNA, 100 bp, Homo sapiens
agcaatctgtcaatcaccttgttaaagagaaggcagacggtaacaagtactccttgctggattgaacttcatctgaatggacctctacagtggttggaca

SEQ ID NO: 842337 - DNA, 98 bp, Homo sapiens
aggaggtggaggggctgcggagacagagccctccggccagcggggagtctacaaataagaaacctcgaaaatctccaggtgagaagagcagaattgaa

SEQ ID NO: 842338 - DNA, 98 bp, Homo sapiens
ggttttcaggccacaaatgctttcacaggaagtgcccaccgcgtgccccgattggagaggggaccttctgcaggttgtgcaagaggcctttgaaaaag

SEQ ID NO: 842339 - DNA, 100 bp, Homo sapiens
atgtcctggatcgctgatacctatgccagcaccatagggcactatccctcaagaacctcaaatgtagagagaaaagcatctcagcaacaatggggtcggg

SEQ ID NO: 842340 - DNA, 99 bp, Homo sapiens
cgagaagcgcctgctccagaagcagaaaggtaaatatgctgaagatatatttggagaattattcaatgaagcacatagtttttccttcagagtcaactc

SEQ ID NO: 842341 - DNA, 98 bp, Homo sapiens
ttaaatatgacggctccaccatcgtccccggcgagcagggagcggagtaccagcacttcatccagcagtgcacagggggaaatttgcagtggtgagaa

SEQ ID NO: 842342 - DNA, 99 bp, Homo sapiens
tggagaagccttggggtcaatttgttgtatagctgagatgagtgaccgaggaggtggcgttcctttgaggaaaattgacagacttttcaactacatgta

SEQ ID NO: 842343 - DNA, 100 bp, Homo sapiens
ggactctgcctgatgtgcttattatacatctaaagagatttcggcagcattcttcaggtcatctgaaccttctgagaaaacatggtcaacgtcttgaaag

SEQ ID NO: 842344 - DNA, 100 bp, Homo sapiens
cgacattctcggactgcagagagacagggacactggtaaaggtcatcaaccccatgggatgggatgcttttggattgcctgctgaaaatgccgcagtcga

SEQ ID NO: 842345 - DNA, 90 bp, Homo sapiens
gtgccccgccacgctgggggtctggcaggagcgaccaaggggggcctgcagggtgatcagcccatgacctaaacctccagacaaaataaa

SEQ ID NO: 842346 - DNA, 98 bp, Homo sapiens
ggagctcttacagatggacctgtacgcgctgctaggcattgaggagaaggcagcggacaaagagtgaacagcagagaatttcaaaggaccttgctaat

SEQ ID NO: 842347 - DNA, 98 bp, Homo sapiens
gtggtttgaacaccaaggggcaactgggccatgagagggaaggaaacaagccagagtcttgcttcgttgcccaggctggagtgcagtgatgcaatctc

SEQ ID NO: 842348 - DNA, 100 bp, Homo sapiens
aacatgccttcatcctctataacaagtatatcacacagctttattaaaccgcctggagcgaattttcgaagcatgttttccttccatacttgtccctgat

SEQ ID NO: 842349 - DNA, 100 bp, Homo sapiens
ccgagaggccgcgtcctcagctggtcctagacatgcgtggcgtcggggctgtggcacggtcgggtccgggctctaacactccaagaaaggctgtgtttgc

SEQ ID NO: 842350 - DNA, 99 bp, Homo sapiens
acaacattgttcctggaacgccctctttttaaaaaaggtggaattctactaagtatcagtcggccctacaagacaaagcccacccacggcattggaaag

SEQ ID NO: 842351 - DNA, 101 bp, Homo sapiens
tttacgccttcagacatgggacgaagcagtatttagggaaaagcttgatgtgtttgatgctgctgagcggtaccagcaggcaggccttcccctgatcgttc

SEQ ID NO: 842352 - DNA, 138 bp, Homo sapiens
catttctccagatgccaacattgacctcacaaccgagcaaattgaagagacgttaaaatacttcccctgattacatcaaccccagagccgtgcagctgggctcccttctcgtccgcggcctcaccactctggttttag

SEQ ID NO: 842353 - DNA, 136 bp, Homo sapiens
agcggctgaggaggggccccagcagcccccgaaggccctatcaggacatggagtatgaaagacggcaccatgctgggagataaggatccaacataagacaaacagtgctgatgcttttggaaagctcatattcaag

SEQ ID NO: 842354 - DNA, 99 bp, Homo sapiens
tgaagtagcaaaggcaagaaggcaacgacgttccatctgtggaaggacctaccaaccagcggagctgcccaagccctccatctccagcaacaactccaa

SEQ ID NO: 842355 - DNA, 100 bp, Homo sapiens
gccctgcagagtggtttacaagctgatcatcacttctacgatgagtccaagcctttcacctgcctggacggttcggccaccatcccatttgatcaggtca

SEQ ID NO: 842356 - DNA, 100 bp, Homo sapiens
tatcttctgggacattaaagaggaggtggaccccagtgattggattggactttatcatataggatcataagtttttactgccagtattgagaaattcgtg

SEQ ID NO: 842357 - DNA, 99 bp, Homo sapiens
tgaggagttcgccgagttccaggtgctgctcctctgaagattcaagcttatttcaatgagactgcagacctgccatgccaatttgcaaactctcaaaac

SEQ ID NO: 842358 - DNA, 99 bp, Homo sapiens
gaagactcatcggagcgtgtggatttgagccgccgcattttttaaccctagatctcgttctttaaggaaaaacagtagtgctctgcatagtttactgaa

SEQ ID NO: 842359 - DNA, 103 bp, Homo sapiens
tttctcagcaccttggcgaagccttgggtttctttcttaaaggactgatttttagaactccacatttgagagcaccatttaccgtggagagatgtgctttttt

SEQ ID NO: 842360 - DNA, 100 bp, Homo sapiens
agaacagaagctcagagaagtgaagcaacttgcccagctatgagagacagagccaggatttgaaaccagttggttctaaagagtggtgagtcagaagaga

SEQ ID NO: 842361 - DNA, 100 bp, Homo sapiens
gtccaacaaaacattgacattattggaaatgaggaaagtaatgtacaagccctggaaattctgtttacttaccatggttccgacctgcttcctcatcgcc

SEQ ID NO: 842362 - DNA, 98 bp, Homo sapiens
ccgacgaggatatcgtgtctggagcagtggagcccaaagacccctggagacatggtcgtcaaagtcctacattttagctttcagtgctgaacttcctt

SEQ ID NO: 842363 - DNA, 99 bp, Homo sapiens
aaagcccaggattcatcgctccacatgtaatgagggatcctgcaagcaaaagatcaagaggatttggttttgtaactttttcatccatggctgaggttg

SEQ ID NO: 842364 - DNA, 100 bp, Homo sapiens
ttttaatgaccacaacaagcaagcatgcagcttactgcttgaaaggtcgttccaggggtagaggaggcatgaaggatgaccgtcgggacagatactctgc

SEQ ID NO: 842365 - DNA, 102 bp, Homo sapiens
agacagtctccatttcatggcaaccatgcagctattaaccagtgtcagcccctcacaatctcctcaactgtttcatgatgacacccattcaagaatagaaca

SEQ ID NO: 842366 - DNA, 98 bp, Homo sapiens
cgccgaggaggccttcttccgtggggttagccaggaaatgggtcctgatgaatatgaagagatggaagaagaggaggaggaggaagaggaggaagacg

SEQ ID NO: 842367 - DNA, 100 bp, Homo sapiens
ctaaagacatagttcctggtgatattgtagaaattgctggagctttttagaaaagttcgaagtatcttaaataaattgacaccacagatgttcaatcaac

SEQ ID NO: 842368 - DNA, 98 bp, Homo sapiens
tcaagccacaatttccatcaaaaagtgattaagcagagaatggagaagaaggttgattccagctgcggtctcctgtttgataaaagaatattggccag

SEQ ID NO: 842369 - DNA, 98 bp, Homo sapiens
cataggtcaaagctgtttggagaaaatcagaagtacagttttatctagccacatcttggagagtcccaagagtggcccaaaagagagaatttatctag

SEQ ID NO: 842370 - DNA, 100 bp, Homo sapiens
attgataggcagcatattcctgatacatatctatgtgaacgttgtcagcctagtatatttgccttccctccatgatctccaacactatccgataaagtag

SEQ ID NO: 842371 - DNA, 100 bp, Homo sapiens
cctcagacagatcgccggggaggcagcgcgggatcccagcctcaggcgtgcgcggacggtgtgcggatggaacatcgacatcggaagaaagacaccccgg

SEQ ID NO: 842372 - DNA, 99 bp, Homo sapiens
cacaagcacccacaactggaagctgatttgtcagcagttagagagatatatgggccacatgcagtttctctcagtttcttcagatggaggtactgagcc

SEQ ID NO: 842373 - DNA, 100 bp, Homo sapiens
caaaaccctcctcatcatctactccttcgtcttctgggtgtgataaagcggaattgggaatatatatgtagccatgataaagaaaaaacgaagatcctag

SEQ ID NO: 842374 - DNA, 100 bp, Homo sapiens
ctgccacctacgttgccgaccagcgccacctccctggcctgtcaccgacgatgagggcgcacctgctgtcctggagcttccgatctctgttcggggaccc

SEQ ID NO: 842375 - DNA, 99 bp, Homo sapiens
cattgcattgattgtcttatatttcaagttaaggtccaaaaaaactccagctgtgaaagcaacataaatgggaacaacctatcttcagcactcgagctc

SEQ ID NO: 842376 - DNA, 100 bp, Homo sapiens
cttctggcggcaggactggtggcctgcttggcagcactgggcatccagtaccagacaagaggcaagtgaggcctatctggttggcctttttgaagacacc

SEQ ID NO: 842377 - DNA, 98 bp, Homo sapiens
aaggattaccttttgtgtgactacaacagagatggggactcctatagccacagcgtcctgtgtttactcatgaaaatattcaaggtgggggggaaccg

SEQ ID NO: 842378 - DNA, 100 bp, Homo sapiens
ttctcctgatattcaccctgtaggctggtgttcaaaaacaggacatccccttcagcctcctttgagaatcaaacttgacgtatggagccaagaaagccct

SEQ ID NO: 842379 - DNA, 100 bp, Homo sapiens
gcaagtctgtcagcaccatctttctaacagtgaccctgagagtgtggctggggagtatgggcggcactccctctacaaaatgcttggttacttcagcctg

SEQ ID NO: 842380 - DNA, 100 bp, Homo sapiens
tcagtctgggaatatcatatgacgacccaaagaaatgtcaatgttcagaatccacctgtataatgaatccagaagttgtaaatgaatactgcattgaggg

SEQ ID NO: 842381 - DNA, 99 bp, Homo sapiens
gggacaaagccgctccacctcccatgtcggcacagacttttggaaaagaatttgataaacattttgggaaaggaggttctaaactactgagaatgaagc

SEQ ID NO: 842382 - DNA, 100 bp, Homo sapiens
cctcagttgctgctccgacgcggaccccagtaccaagtttggcaatgaggagcagcagctggcgtgggccaagcgggagagcgagaaggcggaacaggag

SEQ ID NO: 842383 - DNA, 98 bp, Homo sapiens
cagcaggtctgtgccaactgggattctgcccaaccaaaagaaaactgctaacacctgcagaagaggtaccttctggatacctccacatggtccgagtg

SEQ ID NO: 842384 - DNA, 98 bp, Homo sapiens
gaacctcaggcagcaaccctgggaagtgcccttgatgagctggaggatgagactgtgatgcctggatgtacagccatctgttgaccataatactgaaa

SEQ ID NO: 842385 - DNA, 99 bp, Homo sapiens
aaggattctcgctgtgacagagacaacaccgagtatgagaaaccatggcaaaagttataaccaccgtactgaagttccctgatgatcagactcagaaaa

SEQ ID NO: 842386 - DNA, 100 bp, Homo sapiens
aaaaattgcccttagccgaagagttgaaaaacactggcggaaaaagctcctcaatttctgaagagaaaggtgactctgatgatgagaaaccaaggaaagg

SEQ ID NO: 842387 - DNA, 99 bp, Homo sapiens
cactattaagtctgatgtgtggtcctttggaatcctcctatacgaaattgtcacctatgggaaaattccctacccaggacgactgggtttggattcaga

SEQ ID NO: 842388 - DNA, 101 bp, Homo sapiens
cggcacgccttcacctacaaggtctatgctgacaagaggctggacgcacaaggcatctcgtccccggtgaagaagacagagatggacaagtcaccattcaa

SEQ ID NO: 842389 - DNA, 100 bp, Homo sapiens
ccccggcacacgcgcagccccggcctctcggcctctgccggagaaacaggtgaccagcgccatgtccagccaggtggtgggcattgagcctctctacatc

SEQ ID NO: 842390 - DNA, 100 bp, Homo sapiens
aacaaattgttggtagggaacaaatgtgatctgaccacaaagaaagtagtagactacacaacagcgaaggatgggcttctttctcaaggttattctgatt

SEQ ID NO: 842391 - DNA, 100 bp, Homo sapiens
acgccctctcatccaccccaccttgtatgcaacgccccccttcacacacagtaagggctacagaactggctacccttatcgataccctgctctgagagag

SEQ ID NO: 842392 - DNA, 98 bp, Homo sapiens
ttcgagtgaccgagaccgcggccgggaccgaggctcttccaccaaagccacctaagccaatgacttcagcagttccaaatggaatgaaggacagttct

SEQ ID NO: 842393 - DNA, 100 bp, Homo sapiens
gaggtacctcccataattttaaggggaatagccaggccagaagaaggaaggcctgtggtgagtgggacaggaaatgacatcaccaccccaccgaacaagg

SEQ ID NO: 842394 - DNA, 98 bp, Homo sapiens
cggccccggcgaggaggcgcggaaccatggccgatgggggcgagggcgaagacgagatccagttcctgcgaactaactgaaaaagctgtcacagcctc

SEQ ID NO: 842395 - DNA, 100 bp, Homo sapiens
aagccaagtgccatcttcaaaatttcaggtcttaaatctgaccacggtgtgaacacatgaacagaagacgaaaatttcttctagcctcagtacttgctct

SEQ ID NO: 842396 - DNA, 98 bp, Homo sapiens
agcgccgtccgcttgaccgagatgctgcgggcctgtcagttatcgggtgtgaccgccgccgcccagatgttcgaagaagaacaatttatgaataccac

SEQ ID NO: 842397 - DNA, 100 bp, Homo sapiens
aaggaggacctcacgcccttcaaggatgaccgctactacaggtatgtgaagacctacctgttgcccgacagatcctcccagggaaagcgcaagactggag

SEQ ID NO: 842398 - DNA, 100 bp, Homo sapiens
gcagtatcaacggagtctccgggcaaaccagtccagctacgggggcccagccagccagcagctgagtgggggttacggaggcggctacggtggccagagc

SEQ ID NO: 842399 - DNA, 100 bp, Homo sapiens
gaacaccatatggttacagcacagctgcccctgcctatggaaagaagattctatatgatatacttgcctttgccaaagaaagtgtgaattctcatgttac

SEQ ID NO: 842400 - DNA, 100 bp, Homo sapiens
gtgcacacccaggcagagaatgctgagttcatgaggaactttcagaagggccaggtgacccgagacggcttcaaggatcacagtcaccttctatatagca

SEQ ID NO: 842401 - DNA, 99 bp, Homo sapiens
ttttcttatgaagcttcttctggttggaaacttgtcaaatttcatcagtggtggtcgtggtgacaggactggccgctatggagccactgaccgctcgca

SEQ ID NO: 842402 - DNA, 100 bp, Homo sapiens
cctgcatcccccatagttaagaaaatcatcgaaaagatgctgaacagctctgtgacttcctggagactcacttcctagatgaggaagtgaagcttatcaa

SEQ ID NO: 842403 - DNA, 98 bp, Homo sapiens
gtctttctcgagaagcaggtggaaacatgagcattcagtttcttggtacagtgatcagaatcaagctttgcgactctgtctgggtagcactagtgttg

SEQ ID NO: 842404 - DNA, 98 bp, Homo sapiens
cgcctccaggatctgtcggcagctgctgttctgagtgcggagcttgttaacagacgtgcatgcctggcctgtggactgtgcagtaagtgttgaaaaag

SEQ ID NO: 842405 - DNA, 100 bp, Homo sapiens
tgtcgactccagaagtgctttgaagtgggaatgtccaaagaatgtgtcctggggaagtgtcgctacgtttactatgggaaaaactcagagggcaacaggt

SEQ ID NO: 842406 - DNA, 100 bp, Homo sapiens
agaaaagtgaatcagaaaattggaagctgtacacagcaagacgttgagttacatgttcagaagttcctcagcactttgtttgcccccttaaactttgtca

SEQ ID NO: 842407 - DNA, 100 bp, Homo sapiens
cggcggtagatttgaagcgcttcaaaggaccggacccagagaagaggaaaactctaccggtgcaggagctggaggatcttcagaagaagcctcccccata

SEQ ID NO: 842408 - DNA, 100 bp, Homo sapiens
cagttctttctcacatgctgcttagctttcagcattctccagaggcgttccatttgatccagctatgggacacagcaggacaagaacgattcagaaagag

SEQ ID NO: 842409 - DNA, 100 bp, Homo sapiens
tgatgggtcagctagtatgcaggctaggcaaactaatccaactgtaaaagatcttattggctttggtcttcaagtagccaaaggcatgaaatatcttgca

SEQ ID NO: 842410 - DNA, 99 bp, Homo sapiens
cgcgctacttctagagtcttccactcgggttaaaccgagcaaggcttggtctcattaccaggagcagcaggaggaggtgaggaagcgctgtgagagtgc

SEQ ID NO: 842411 - DNA, 123 bp, Homo sapiens
ggaaaggccgcgtcgtgatcgactcggacacagaggacagcggcagcgacgagaacctggatcaggagcatggggaagtgattgactgtgtgcaggagctgagccactccgtgaacaagctgt

SEQ ID NO: 842412 - DNA, 100 bp, Homo sapiens
tgttacgatccagttgaagattactggatgcacgtacagaatacattcagccgtcagtttgaaattggcacaatggaagaagctggaatttgtgggctag

SEQ ID NO: 842413 - DNA, 100 bp, Homo sapiens
gctgcggtcatggagggagcaggagctggatccggcttccggaagatcaagcttcaggagtctccggaagacatgcctgcagggcagacaccacacacag

SEQ ID NO: 842414 - DNA, 100 bp, Homo sapiens
cctgtccttcatgcagtctctcattggcttctttgagactgaaatggcagatcgtcacagctacctgtctctggggatccctagtataacacattcagtg

SEQ ID NO: 842415 - DNA, 100 bp, Homo sapiens
gtctggatggttccatcaagggagaaatccgaaaacaggcactggaccacttcaatgcagatgggtctgaggtgtggaggcacagttggtgctattttca

SEQ ID NO: 842416 - DNA, 99 bp, Homo sapiens
agcgagccagcgagccgccgacccgccgagcaaaatggctttaaactccagagaacctcatatgtgtttagtaagagatatttcaaactgctgggcccc

SEQ ID NO: 842417 - DNA, 99 bp, Homo sapiens
tcaaatgtaagacttaaaactaataaagaggttccgggattagttcatcaacccagagcaaatgagatggaagattttcgaggtatagcagaagaatca

SEQ ID NO: 842418 - DNA, 98 bp, Homo sapiens
gagaaggagaacaccccgagcgaggccaaccttcaggaggaggaggcctcaggagtgcaagtagctgatgaagtatgtcgcattttttatgacatgaa

SEQ ID NO: 842419 - DNA, 111 bp, Homo sapiens
ggtttgggaggagtatgccaaccagcatggccctggacagaaaaatggagtgctggcatacattgggaattttcgcctgcttgcagagctttccagcccgtttgtgaatca

SEQ ID NO: 842420 - DNA, 100 bp, Homo sapiens
accgctacttccaggacctgcattcgcccctgaagcccctcagcgactcagaccctgacagtgacaaagcctcctgacaaggtgatccgggcgggccccg

SEQ ID NO: 842421 - DNA, 98 bp, Homo sapiens
acgccgtggccagctccactgagagaaccccagggtgaaaatcctatttataagagtgccgtaacaactgtggtcaatccgaagtatgagggaaaatg

SEQ ID NO: 842422 - DNA, 98 bp, Homo sapiens
cggcatttcctccctgaagcctccaggcataattatgataagacatttctcatctggataaatgaggaggatcacaccagggtaatctcaatggaaaa

SEQ ID NO: 842423 - DNA, 99 bp, Homo sapiens
tcagcagagcatgcagaagtcctcgctggagtttcataaggatgggcaacactccagattcagcctcagacaacctcggtttccgctgtgctgcagacg

SEQ ID NO: 842424 - DNA, 99 bp, Homo sapiens
agctaagtccccagattggaggaggctggctctggtcttcgatgcacaggagtggccgttatggaacgcaggtggtgctagaaaagccaaatggcttta

SEQ ID NO: 842425 - DNA, 98 bp, Homo sapiens
aggttcgaggcctacagaacctagcctatcagctggggctggatgagtcattatgccagtacatacaggcttctaaagccagggatggtgccagccct

SEQ ID NO: 842426 - DNA, 100 bp, Homo sapiens
tctggatctctcattggactcaagccagcatggctcacaccacaaaggttaacggcagtgcctcagacgtgaagccctccaatatgctagtaaacacaag

SEQ ID NO: 842427 - DNA, 100 bp, Homo sapiens
tggcatttacagaaagagtcaacagcagtggcaacaggcaggaatttgtggatgcttatgtgaattatgtcttccaaatctcagttcatgaatggtacac

SEQ ID NO: 842428 - DNA, 98 bp, Homo sapiens
gagccaaccacctgggccagtattatcaggcatggagatgctactgatgtcaggcaatctgcagagcgctgtgtaagcacattgcttgatctaatcca

SEQ ID NO: 842429 - DNA, 99 bp, Homo sapiens
agatttgttggacagcaaaactttctgccgggctcagatctccatgacaaccaccagtcaccttcctgttgatgaatgatttcggaatcaagaatatgg

SEQ ID NO: 842430 - DNA, 98 bp, Homo sapiens
ggggactggacatggagacagatcgcgagcggctgcggaccatttataaccgcgacttcaagatcaggaaagcgttataatgttgcagatgtgtctgc

SEQ ID NO: 842431 - DNA, 100 bp, Homo sapiens
cctggaactgaccgaattaaaatttatacttcgcaaaactcagcaattttttgatgagtacaagttgtgcaaagtgaggaagattactgtgggagtgaag

SEQ ID NO: 842432 - DNA, 98 bp, Homo sapiens
aatgactccgattcgtgaccctcagcgccggtgcatgtcgatgttgcctgcctgattcgagttccatctgaagtggttaagcagagggcacaggtatc

SEQ ID NO: 842433 - DNA, 114 bp, Homo sapiens
atgagtgtaagtttcctgaggtctcccagtcatactgctggttaagcctgcagaacggagcggaccctgaggaaaccattctcaacgcattcaaagtgtttgaccctgaaggca

SEQ ID NO: 842434 - DNA, 99 bp, Homo sapiens
acagttcctgggaaggtggagccaccagcctctccttgattgtgcttcaagaagaccatagggaagaacgcattttcatcttgctgcaaaagttgcaat

SEQ ID NO: 842435 - DNA, 50 bp, Homo sapiens
gggggtgtgcaaacccgagagaactgggaataagacgagttggaagaaga

SEQ ID NO: 842436 - DNA, 98 bp, Homo sapiens
tcctgtgatccgcccaattatcgcgaccaacacataccagcaggtcctggtgaacgccatcatcaacagtggtccccgggaggactccacacgcattg

SEQ ID NO: 842437 - DNA, 100 bp, Homo sapiens
ctagactggatgcagagcatgaggctgacccgcggctgattgagtccctctcccagatgctgtccatgggcttctctgatgaaggcggctggctcaccag

SEQ ID NO: 842438 - DNA, 98 bp, Homo sapiens
ctgacttcaagaatgaagccgcggaccctcacgaaccaactgtgagagcggagctgatggaacaggtgcctcacatcgcactgttttgtcaagaaaac

SEQ ID NO: 842439 - DNA, 99 bp, Homo sapiens
acttttcttcagaagctggtcgccgccggcaggcaccacactgtaactcgaggcatcaccaaaggcgtgaaggaggactttcgcctggccatggagcgc

SEQ ID NO: 842440 - DNA, 98 bp, Homo sapiens
gagtggactcctgcgcctccatgtacagccgctccatccagggccaccatgtctgcctcctggtgaaaaagattatgtttgagaccttcaacaccccg

SEQ ID NO: 842441 - DNA, 100 bp, Homo sapiens
tcgggtggcggctcgggacggaggacgcgctagtcatgatgccttcttctgtagagtgggcgctttgcagaatacgtgttgaatgaaatcactgatctag

SEQ ID NO: 842442 - DNA, 110 bp, Homo sapiens
tcaactgccattctggattccagaagatttaactacgtggtccgggagatttactgaccttaagcactatagtgatgaactgcagtctgtcatctcacatcttcttcgag

SEQ ID NO: 842443 - DNA, 100 bp, Homo sapiens
gtgaatttccatgtcaacatagtccaggttcttgggtgtctctggggagtccctgggccagaccttcctccagactccagcccacctcttcggagcagct

SEQ ID NO: 842444 - DNA, 127 bp, Homo sapiens
ccttgactccatcgggcgcttctttggcggtgacaggggtgcgcccaagcggggctctggcaaggccccttcacagatgtagtcactacaaatcttaaattgcgaaatccatcggatagaaaagtgt

SEQ ID NO: 842445 - DNA, 100 bp, Homo sapiens
ttgatgggttgggcatcaacttgccgaacaagcaaccggaaaagcttaataggcaatgggcagtcaccagcattgcctcgaccacactcacctctctctg

SEQ ID NO: 842446 - DNA, 98 bp, Homo sapiens
tgaactgcagtgggagaggagaagagatgctggcgtgaaggggaaactggagcacccatcctaactgatgatgttagcctgcaggtgttcatggacca

SEQ ID NO: 842447 - DNA, 99 bp, Homo sapiens
gatggagaagagcgggaaagggggaagatttttttcccaggaagccatcccgtcagaggggttcaagtgatgaaagttggcaaactgcagctacatcaa

SEQ ID NO: 842448 - DNA, 100 bp, Homo sapiens
tttggctgccccagtgaggctgatgtcaacagtgaaaacgtgattggcaaaggcagtgaaaagtctgatgacaactcctatgatgagaagtacctgattg

SEQ ID NO: 842449 - DNA, 100 bp, Homo sapiens
cagcggcagagcacgagcggatcctgcgagagatcgagagcactgacacggcctgcatcgggcccacgctcaggccgcaccagcttctatgaggagtacg

SEQ ID NO: 842450 - DNA, 98 bp, Homo sapiens
tgcggcaaagagatgagcttattgaggaggagatgttaaagtaacccatcttgcaggacgacattgaagattggtcttctgttgatctaagatgatta

SEQ ID NO: 842451 - DNA, 100 bp, Homo sapiens
ccagatcctccctcccacggagcctcttctgaaagcatgcagcaatatgtcggacgccttggccaacgccgtgtgccagcgctgccaggcccgcttctcc

SEQ ID NO: 842452 - DNA, 99 bp, Homo sapiens
gtcactgaggttgcagttggcgtgaaggaatctttccctgaaattaacaaaggacgttgatcaagaagccaggtgttcccacatcagccgaatgcccaa

SEQ ID NO: 842453 - DNA, 100 bp, Homo sapiens
ctgccttccgggttcgagtaattctcctgcctcagcctcccaagcagctgggtctacagagaatgtaactggtcactacatttccccctttcatgatatt

SEQ ID NO: 842454 - DNA, 98 bp, Homo sapiens
cttgatgttaacaaatgtgagattgccagatgtcaggccaatgtgaccatcgggctgcccaccaagcagcccatccctgactgtgagatcaagaatcg

SEQ ID NO: 842455 - DNA, 98 bp, Homo sapiens
agggcttatccttttgtggcggatctagcttctcctcgccttcaggatgaaagctcagggggaaaccgagggacagagcgggatgccaccagcttgtc

SEQ ID NO: 842456 - DNA, 100 bp, Homo sapiens
aatgtggtctgagggacgatatgaatatgaaagaattccgagagaacgagcacctcctcgaagtcatcccagtgaacaggatctggacttggcacatttc

SEQ ID NO: 842457 - DNA, 99 bp, Homo sapiens
acaggtacccactgtatgtcattcccaaaacaaagcgaccagaaattgactgcactctggtggctaacagccaggtgtgaagtctggcaacaagaggtc

SEQ ID NO: 842458 - DNA, 98 bp, Homo sapiens
tttggtgaaacaccctcttgggacctagagcaaaaatattgccctgataatttggaggatgaagatttgataaagtggaaggcactgtttgaggaagt

SEQ ID NO: 842459 - DNA, 98 bp, Homo sapiens
tggagctactgtactggctattggaaggaggagattctgaagataaggagggttctgaatgagtttattatgaaaaaccctagtttggaaaataaaaa

SEQ ID NO: 842460 - DNA, 98 bp, Homo sapiens
gacagaagcgctggtcggcgtctggcgttccttggacacagcatgaatttgagttggcccaatgggccttccggaaatggaagtctcatcagtttact

SEQ ID NO: 842461 - DNA, 99 bp, Homo sapiens
gataagccacggcatatccagatgaaactagccagactggaatttgagtctttggaggcactcaagcagcaggcagagaagaggcgatggcggcgatgg

SEQ ID NO: 842462 - DNA, 98 bp, Homo sapiens
cggccttcgaggaggtcatgaaggacctgagcctgacgcgggccgcgcgggactgatcctttgaaatactccagccatgactaaaagagaagcagagg

SEQ ID NO: 842463 - DNA, 100 bp, Homo sapiens
gttttacataatctgaaggatcgctactattcaggactaatctatgatgctgctggcaaggtgctggaccgctgggccatcatgtctcgagaagaggaaa

SEQ ID NO: 842464 - DNA, 102 bp, Homo sapiens
ctacatgagggataatgaagatggccctcagcacacgttccaaagaactactggttcagattttagctcttcccaagttgtgaaaatagtgaaggatgctta

SEQ ID NO: 842465 - DNA, 100 bp, Homo sapiens
ccgacctgacgagcccctacctccccaacggatcgctctcgcccaccgcccgaacctctgaggaagatgatattgaaagaaggaaagaagttgaaagcat

SEQ ID NO: 842466 - DNA, 98 bp, Homo sapiens
aaaaaaccaacaccttcctgtgcagtcctgttggaatttgatgctgacctgttggatgttgaaagcaaacactttgaagacctggagttccagcagct

SEQ ID NO: 842467 - DNA, 99 bp, Homo sapiens
ctcaacaccagcaccgcagatgttgtcaaggtggcctaccaggaggccaggggtgtcgccatgctgtttgagctcttctctggcttcttgaaatacttt

SEQ ID NO: 842468 - DNA, 100 bp, Homo sapiens
actatggggtggagacgtggtactcagcaagctcgagttaaagttggatgtgctggaacaggcagcagtgaggatgccagagttcatgggtttctagaag

SEQ ID NO: 842469 - DNA, 100 bp, Homo sapiens
gagaccgtgaccgagagcgtgaccgagagcgcgaatatcgtcatcgttagaagagatagaatctcactatgttgaccaggctggtcttgaactcttggca

SEQ ID NO: 842470 - DNA, 100 bp, Homo sapiens
tttgcagaaaaattgtccagagagctgcaggtgctagatggggtttgtctgccattgtggatttcctgggcagagtggagtgaaggtgccaaaagccaag

SEQ ID NO: 842471 - DNA, 100 bp, Homo sapiens
agtgactgaacagagctcccttgatgacttccttgctactgcagaacttgcaggaacagagtttgtagctgtcacccacaaaagctgtatataatgccag

SEQ ID NO: 842472 - DNA, 100 bp, Homo sapiens
tgcaacgggcagctgggctgcagtgaccccgctttcctcacgcccaggatccggaaagtatggcagaggaggaagtgttcagtcaagaatgggattctga

SEQ ID NO: 842473 - DNA, 98 bp, Homo sapiens
gacgtccactgcaccctgcgcgagaagcttgcaagcaatactttgagaagtatccaggagaccatgaactcctttgggaagttgaaggtgttggacac

SEQ ID NO: 842474 - DNA, 98 bp, Homo sapiens
tgatcactgcccagggtcacccaatgataacatgcatgcatatggaacttgctgcatgccagcaccatggaagtctgttagaactgctgtgctgatca

SEQ ID NO: 842475 - DNA, 100 bp, Homo sapiens
gacagcataaggaagccaagttggaccgttctgatgtgactgagagagaaggtcaagtaacctggtttggttatgaaagtcctcgtagcttctgggacta

SEQ ID NO: 842476 - DNA, 98 bp, Homo sapiens
gtttcggagcatcggttaacagcctatgggtgaaatttggctttcattcatgaatgagatcttaccaatatatttgagtccttcctgcctcagttatt

SEQ ID NO: 842477 - DNA, 99 bp, Homo sapiens
gatgcaaaaccagcgtggcggccgcgctctcttccaggacatcaaggcctcaggcccaggcccaaggccaagtgagagagcccaggccacaggacatgc

SEQ ID NO: 842478 - DNA, 100 bp, Homo sapiens
gtggaacagacaacactgaaatctcagacggtggcccggaaccggagtggggtcacaaatgagctgaatgagcgctggcggtccctacagcagctggccg

SEQ ID NO: 842479 - DNA, 100 bp, Homo sapiens
agcctcttgagtagcctgagtagctgggactaaaggagagcttgtttcatatccatatcccactgtattcctgctaatctgctaatgcagtaaattggag

SEQ ID NO: 842480 - DNA, 100 bp, Homo sapiens
tgggatttaggagaggaggattgcagaagagaattcaaccagacagtccagagttctggaaatatgacagacaaaagcagtcaggatcagctgctgtttc

SEQ ID NO: 842481 - DNA, 99 bp, Homo sapiens
gctgcatgagttcactgatcttaatctcgtccaggcactacgttggataacagggcaagattcagaggaagaaaaggatattgatgcattatgttgaag

SEQ ID NO: 842482 - DNA, 100 bp, Homo sapiens
gatcgcagaagcctacgctaccaaaggctgccaggagatagcagaggaattccgtgcccaggaaatcgacgggcaagccctgctgctgctcaaggaggac

SEQ ID NO: 842483 - DNA, 100 bp, Homo sapiens
gcagccatggccctccacagcccgcagaggatgccagcccccatcagattgcgggagctgatccggaccatccggacagcccgaacccaagctgaagaac

SEQ ID NO: 842484 - DNA, 99 bp, Homo sapiens
cctgatggcctcagaggaggaggctgaggcctccgtagaagacagcgccttgcttatgcagaccttgatggaggccatccagatctcagaggctccacc

SEQ ID NO: 842485 - DNA, 100 bp, Homo sapiens
ggcccctacggtgtcccaaatcaatgcggagttcgtgacccagctctactgagatgaagaaagaaaaagaatacctgctcagctccagagacacgtaaag

SEQ ID NO: 842486 - DNA, 100 bp, Homo sapiens
tacagcgaaccaatgccactcagctttgaggaaaagccagtttatatccaagacttagatgagtttcttaaacaattaggtctacatcctaactggcaat

SEQ ID NO: 842487 - DNA, 99 bp, Homo sapiens
ccgaatcgtggcggggcatgagcctgaaagaacaaacgagctgctccagataattggaaaatgctgtctcaacaaggtcctggatgcctcatcccttag

SEQ ID NO: 842488 - DNA, 99 bp, Homo sapiens
aacgacgccgaattacatctgtccagccacctacaggcctccaggaatggctaaaaatgtttcaggtcagcgtctacttgcagaattggtctcatgtgc

SEQ ID NO: 842489 - DNA, 100 bp, Homo sapiens
accccctcggggcgcaaggcggcagggcgcacaactacgggattggcgccgccgcctgcgtgtactttggcatagcggcctccctggtcaagatgggccg

SEQ ID NO: 842490 - DNA, 98 bp, Homo sapiens
ctggtccacaacgtcaaggagctggaagtgctgctgatgtgcaacaaatcactcctttattgtacagatcaggaaaaaggatttagtactgctatgct

SEQ ID NO: 842491 - DNA, 98 bp, Homo sapiens
tagcctcgaaattctgggccgaaatgatccgcctgcctcagcctccaaagtagctgagactacagattcattccacttaaaacctgaaaacattggac

SEQ ID NO: 842492 - DNA, 101 bp, Homo sapiens
ggcgcggcggccccgggaccaaggagtttcactgttacatgccttgaagtgatgaggaggtttctgttactatatgctacacagcagggacaggcaaaggc

SEQ ID NO: 842493 - DNA, 100 bp, Homo sapiens
ggtaaagaaatggattagtgataactcaagtttcatcacctggactttgaacatgtcggggatcgccctcagcagactcgcccaggagaggaaagcatgg

SEQ ID NO: 842494 - DNA, 100 bp, Homo sapiens
cccaatccgcatgagcgtcctttcggatgcttggatattaattcatctgtgaaaggggctcgttttgtcagattctgtgatgcattcaatattccactca

SEQ ID NO: 842495 - DNA, 100 bp, Homo sapiens
ttgcaagttcccatcgtcccaggaactagaggatgcctcctgctgttctcttaagaaagattccaacccaatgtggtcaagcagaggatgcagatgtaca

SEQ ID NO: 842496 - DNA, 51 bp, Homo sapiens
gaatggtgttgtaaaagatcagccttcagaaaaatggctacaaacttccta

SEQ ID NO: 842497 - DNA, 100 bp, Homo sapiens
ggaaaacctaaccatgaagacttgaacttaatacagcaagaaagaccatcaagtttaccaagacccaagaagccaccgcctccatccgctcctgtcatca

SEQ ID NO: 842498 - DNA, 98 bp, Homo sapiens
agctggcactgcagtgaaagatagcccagagatcgaacgagtgaagaaaaatcagcagaatattagttcagaatgtatcctgtcaggtataatgtcag

SEQ ID NO: 842499 - DNA, 98 bp, Homo sapiens
ggtagtccaaagagccctgaattctgcggctaacaacgtgtatcagtatggacgagaatggataactcacaagatcgaaagctgctttgcgtcgcagt

SEQ ID NO: 842500 - DNA, 100 bp, Homo sapiens
ctcccaccttcagcagcacacccggtgaacctatgggtcgtggaacaaaagttatcctacacctgaaagaagaccaaactgagtacttggaggaacgaag

SEQ ID NO: 842501 - DNA, 98 bp, Homo sapiens
tgggtcagtccgccgctcaccccgcggccgcaccttcccgccttctcaggacggcatcagaattaatgtaactacactgaaagatgatggggacatat

SEQ ID NO: 842502 - DNA, 100 bp, Homo sapiens
aggaacagtgccaagttagatgccgattacccacttcgagtcctttattgtggagtgtgccccctaccaccggagccagagaatggtggctacatctgcc

SEQ ID NO: 842503 - DNA, 100 bp, Homo sapiens
ttggaaattttcaagcttttgatgaggacactggactaccagcccatgcaaggaagatgagaatgtgcctactgctcctgatcctccaagtcaacattta

SEQ ID NO: 842504 - DNA, 100 bp, Homo sapiens
aaacagattgagccagaaggaagacaatgctgcgggtccatatggaatatttgctggtagggatgcctccagaggactggccacattttgcctagataaa

SEQ ID NO: 842505 - DNA, 100 bp, Homo sapiens
aatctcctgaagtctttggaaaggatgttaaggacatgttcacttccagatctctcaaagctgttcagaacccttatggatgttcccaccgtaggagatg

SEQ ID NO: 842506 - DNA, 100 bp, Homo sapiens
ctcgaattccagaatgatgaaattgtatgacccggtcctaggcagggaccaaaattccttgtcagctgaggaagtcctgaagaaacatcctgaagatgat

SEQ ID NO: 842507 - DNA, 109 bp, Homo sapiens
agcaaatcaagagcccttgaacatttcccaatgctccagaaggacaaactggtaggagcaattgtctactatgacgctcaactgagaagtcatttccttggagatcaac

SEQ ID NO: 842508 - DNA, 100 bp, Homo sapiens
caccagaccttcgccaggacttcaacatgatggagcaaaagaagagggtgtccatgattctgcaaagccctatggagtctcgctttgtcgcccaggctgg

SEQ ID NO: 842509 - DNA, 108 bp, Homo sapiens
gcagctgatgctccgggtcaatgagtaccgctttgcttgggtggaagcagatggggtaaattgactttgagaatcactacaagaaaaactccttgtggtgaaggttct

SEQ ID NO: 842510 - DNA, 100 bp, Homo sapiens
atacagaaccacagtttatcatcccttccttcaccaggagactaaagtccatcaaaaacatccagaaaattaccaagtctatgaaaatggtagcggcagc

SEQ ID NO: 842511 - DNA, 98 bp, Homo sapiens
agtctaccagcaccttcagtaacacacctggaacaggaacccagcaacaattcttctgccaggaaacaattctggtgaaatgtgatcgtcctggccac

SEQ ID NO: 842512 - DNA, 100 bp, Homo sapiens
taaaaagaggcgaaaggaagcaagcagttcagaagagccaaggaataaacatgcaatgaacccaaaaggtggaatctctagcgttgtcactcatggctgg

SEQ ID NO: 842513 - DNA, 100 bp, Homo sapiens
accagctcacctctcaccgcgcatgtttggagtgacgagtagcacagcccctctatggtttagatggcagtgctgcaaaggaggcaacagaggagcagtc

SEQ ID NO: 842514 - DNA, 100 bp, Homo sapiens
gtctggacaccatgattcaaaccgccaggttaccatgaggaggatttctggccttcgagaattggaaaccttttctctgctcagtaacggcactgcggct

SEQ ID NO: 842515 - DNA, 98 bp, Homo sapiens
ggcagtagaacactctctccccagaaatccaacttctcaaggaaactctgatgaggaagaaagtgcttcagaatctgaactttggaagggtccactac

SEQ ID NO: 842516 - DNA, 100 bp, Homo sapiens
ggtctattatatcatttaaaccacatggctatctaaagaggatggtgatgggaatctttgcaaattgtatcttctgtttgaaagtgaagtacttacctca

SEQ ID NO: 842517 - DNA, 115 bp, Homo sapiens
actgtgaggaagttggctctgcgggtgctgcctacgcagctgccgccctgggatgcaaaatcggatggtgattttactttgtaacctgaaacctgcaaagatgaggggagtatta

SEQ ID NO: 842518 - DNA, 98 bp, Homo sapiens
agaaaacgagaggctcaccgcagtcgtgcaggatctgaaggaggtgactgaaaactcctgaggcatttcctggactagaatgggtagtgaagacccat

SEQ ID NO: 842519 - DNA, 99 bp, Homo sapiens
tcatcccttatttattccaatctcttgtgtggggtgttgcggggagctttggagatgggcactttaagagtgctgctggttcttttgcatgatttccca

SEQ ID NO: 842520 - DNA, 98 bp, Homo sapiens
gtctgaggacaacatgacagacatggtgacccacatgcctgaccgctacaagatcgtggagacactgatccagcaccctcaagtactacagccttcca

SEQ ID NO: 842521 - DNA, 98 bp, Homo sapiens
tgaaatgccagaggacatggagcagatgtgaagttcatttccaatccgccctccatggtggcagcggggagcgtggtggccgcagtgcaaggcctgaa

SEQ ID NO: 842522 - DNA, 98 bp, Homo sapiens
ctggccccgcggccgctcaaggagggctccatcacgcaggccacacactctgcatccgacacccaccccctctttgtgtacttcagtcttggagtttg

SEQ ID NO: 842523 - DNA, 100 bp, Homo sapiens
gctgcagaccctcgcagtgagtgttacagctcttaagacccctcctcctgtagagagtggtgctgccctctcgggatgtacctgcaggtggagacccgca

SEQ ID NO: 842524 - DNA, 99 bp, Homo sapiens
tcagttataaatatacctcaagatatgtgctgaaggcaggccagactgttacagcaagtaaagattgagatggatcagtacaaagaagagctgtctaaa

SEQ ID NO: 842525 - DNA, 98 bp, Homo sapiens
agcaaatcacagaaaaccttatcaagaaatatgggacacatttcttgctatctgctactctgggagatattgtggaagggaaggtcaacaaaggcatt

SEQ ID NO: 842526 - DNA, 100 bp, Homo sapiens
tgtcattccacccaccagtgccacaatgggtcagctgtaccaggtcaacagtgtggggctagaggacgtcatgcatgaagatgctgtggcagccctgaag

SEQ ID NO: 842527 - DNA, 99 bp, Homo sapiens
aagactacggagcataggaggaaaattcatcatctgaggtgctgatactcaaagaaggtttaagttgtctgatctctctataaattccactgaatgtct

SEQ ID NO: 842528 - DNA, 100 bp, Homo sapiens
caaagcgctggaattacaggcaacctgctaaggccatcaaacctattgatcggaagtcagtccatcagatttgctctgggccggtggtactgagtctaag

SEQ ID NO: 842529 - DNA, 100 bp, Homo sapiens
ctcagagtagtagctcagtccaccaatagtgaggaaatcattgaaggagaatataatacgcttcttggacacttaatgattgttggcaagaaatgtgctg

SEQ ID NO: 842530 - DNA, 98 bp, Homo sapiens
gctgtgactgggttgcctgaatttgtgggagacccgtgatcccatcccagagtgtgcgggggacggagcttcttccagaccagctggtcttgcttctg

SEQ ID NO: 842531 - DNA, 99 bp, Homo sapiens
tcagatgctgccagggtccctgaagagggaagacacgcggaaacagggcaagtgtccagagaatggctgggatgaaagtacacttgaactctttttaca

SEQ ID NO: 842532 - DNA, 100 bp, Homo sapiens
aggtgaaatgttcactgttaaagaggattctaccatcagaaaagaggccaaacttctatcatcatggtggatgtgaagtgtctgagtgactgtaaattgc

SEQ ID NO: 842533 - DNA, 99 bp, Homo sapiens
cctgagccagaatttccaggtcatgtgatactggagcagtatcaggctaatgcgctggttttcaatacagaataatcagttggtttaccagaaaaaatt

SEQ ID NO: 842534 - DNA, 100 bp, Homo sapiens
tcccgcctaccaccgctgtgtccgccatcccgtcaagctccatccctttgggcagacagcccatggcacagaaccgtctactacatgggctacaggcagg

SEQ ID NO: 842535 - DNA, 100 bp, Homo sapiens
gagacaggaggcagtagccaaacacccagtggagatggagtctcactatggtgcccactctggtctcgaactcctgagctcaagcaatcctccctccttg

SEQ ID NO: 842536 - DNA, 98 bp, Homo sapiens
ccatcctttcaaaatcaacttagaatcagaaccacaggttgtaaagctctctgaaatagtgaccttagcgaagcaagcacatgtggatgtgaaatttc

SEQ ID NO: 842537 - DNA, 100 bp, Homo sapiens
gaattcttccctcctcgaactgctgagggagctgtcaatctcatctcaagataattgtatggaagagatacagtgattttaagaaactacacaaagaact

SEQ ID NO: 842538 - DNA, 100 bp, Homo sapiens
ttgatcaggatgagagtgggaaccggacttcagtggatcttcggatacgaagaacccagttcactttatccaaatgcatagatgccgtgatggtgctggg

SEQ ID NO: 842539 - DNA, 100 bp, Homo sapiens
ttatttctggagtacagcccagtaacccggtatattctggattccagcagtatcctcaagggctatctgatgggttagagtgcctttgagaagaaatcag

SEQ ID NO: 842540 - DNA, 100 bp, Homo sapiens
tcaaagagaaagtaacaagaatcattcttgcagcatttcgtggggattcccgaagtcttccgttttctgagaatgtgagtgctgttcaaaaattagactt

SEQ ID NO: 842541 - DNA, 99 bp, Homo sapiens
aaatttactgaaacattagttaagctgatttctcaactcattggatgctaaagaaatatatttggaagtaatacataatcttccagattttgaactact

SEQ ID NO: 842542 - DNA, 100 bp, Homo sapiens
ttggaagaatgctggaacgagttataggaagatgtagtccaacccacatcagcaggatgaggaagatggagagaatgcccacccatatagaaacagtgac

SEQ ID NO: 842543 - DNA, 100 bp, Homo sapiens
ggatgctcacccgaaggctgattactttggtatattgaagcaagtcaaagattacattaaacagtgtagcaaatgccaggagaaactagatcgatcccgt

SEQ ID NO: 842544 - DNA, 100 bp, Homo sapiens
gcaagatcaagcactggaaccgcttccgagacgagctggtggtggctctgagtcatcttgtggttcagtatgaaagcaatttctgcaccgtggccctgca

SEQ ID NO: 842545 - DNA, 100 bp, Homo sapiens
aggaccttctgattagtccacagtcttcctctataggtgggatgtgtgtgggctgaaattccgagctgcggttgtgcatgagaatacacccttcgtggta

SEQ ID NO: 842546 - DNA, 101 bp, Homo sapiens
cgagtgtccagtgctgtgaaggcggaacttcgacattacgccccatggtgtccatcctgccagcagactgattcagaatgggaggcttttgcaaagaatgg

SEQ ID NO: 842547 - DNA, 100 bp, Homo sapiens
actatgggaacctaccatggtatgacactgaaatctgtaacggaattgagttcttctcagactttatcacatgatggaggattcttcaatagactggaag

SEQ ID NO: 842548 - DNA, 100 bp, Homo sapiens
gcccactgaggagtccaacatcaccatgcaggtgatgctgaacaggagcttggcccccctccatctgtagatgaggcagcaaacacactcatgactcgtc

SEQ ID NO: 842549 - DNA, 100 bp, Homo sapiens
ttggtggctttgaaggcgcggcgagcgggaacagctcttgaggagtgagactgcaggagatgtgggccggatggcatagtcaatccaacaataagaaaag

SEQ ID NO: 842550 - DNA, 100 bp, Homo sapiens
ggaagatggcggcgccgctcatccccctctcccagcaggaatagccaggccagaagaaggaaggcctgtggtgagtgggacaggaaatgacatcaccacc

SEQ ID NO: 842551 - DNA, 98 bp, Homo sapiens
aaagagtgctgagcttggaaacaagacttcgtgactgcatgaaaaagctaagtcgagtctatgctgtcttgtcaaagagagaaggtcgggtacttcaa

SEQ ID NO: 842552 - DNA, 100 bp, Homo sapiens
cgatgttaatggggaggccaaagagacacagcccatttttttagcacctgttcttcccggagcctatcagcaaagccattcccaaggctatggctacatg

SEQ ID NO: 842553 - DNA, 100 bp, Homo sapiens
ttctgaacaaatgcctcctgaggatttctgtgcctggaaaatatctgttaacagactgcttttacacctacggcttcgtgctgtgtcactccatcgctgg

SEQ ID NO: 842554 - DNA, 98 bp, Homo sapiens
gcggcggcggacgagggccccgcccgagaggaggtttgggagcagcagcaacaccacatccttcggcacgctcgcgagtcagaatgcccccactttcg

SEQ ID NO: 842555 - DNA, 98 bp, Homo sapiens
gggcaacttttattgacttctcagtgtacaacgccaacattaacctgttctgtgtggtcagacgagttatttcctttgaggagggaggaattgagtta

SEQ ID NO: 842556 - DNA, 99 bp, Homo sapiens
cctcattcacctggagcatctgggaatatggagagaatcactagtcctgtgctcatggggagtctcactgtgttgcccaggctgaagcagcctcaaact

SEQ ID NO: 842557 - DNA, 100 bp, Homo sapiens
gcctgcccagaggccacccagcctcctagacaggtgaaatgacaatggatgctctgttggctcgattgaaacttctgaatccagatgaccttagagaaga

SEQ ID NO: 842558 - DNA, 100 bp, Homo sapiens
gctgtgctcagggctcgcgggtgaccgaaaggatcatgaactagtgacctggaaagttggtgtgaccccatatggttatgcatcccggtttgagatccac

SEQ ID NO: 842559 - DNA, 99 bp, Homo sapiens
tcacggatcggattcctcagctacgaggaggcgctgaggagaggtccacgctgcttttatgagctgtaacactcaccgcgaagatctgcagcttcactc

SEQ ID NO: 842560 - DNA, 99 bp, Homo sapiens
ggtatccaagggttgtatcgaggctataaaagcacagttttaagagagggcctgtgctttaacggcagtgccttcgtcttgtacctctctgccgctgtt

SEQ ID NO: 842561 - DNA, 98 bp, Homo sapiens
ccggtgccagcacctttcggcttctgagacggcggcagcagcggcattcagtatattgagaacttgtggatcacactgtatttgaaattattaatgct

SEQ ID NO: 842562 - DNA, 98 bp, Homo sapiens
aaatgcattgagcttgggtcaggacaattccatttggggaccagagatggacggtcactcagcctatggaggacatgtctcaggaaggctatggaact

SEQ ID NO: 842563 - DNA, 100 bp, Homo sapiens
ttattcatcagtttgttgtgcttgtcaagatcagtggaagcatcagttcacagcagtaatgcacactgtacagataagacaattgaagctgctgaagccc

SEQ ID NO: 842564 - DNA, 98 bp, Homo sapiens
agagtggtaggagtgacccagcctcgaagagtggctgctgttacagtggctatggcggttccagcagcagcagtagctatggcagtggcagaagattt

SEQ ID NO: 842565 - DNA, 99 bp, Homo sapiens
tgagacgatcttcactgtgcctgaaaggagagaggcattttgctgaaagtgaagaagaaacacctcttacagtcatctgcaggggattctccaaggaca

SEQ ID NO: 842566 - DNA, 100 bp, Homo sapiens
cctcgtgtcctaaaccaccgggcgcaccatctttccttcatgctacccaccacctcagtgctgaggtcaaggcagactctccagaaagagcaacagtaat

SEQ ID NO: 842567 - DNA, 100 bp, Homo sapiens
gccacccatctctccaggaaggtactcaccaattccaaagcacatgcttgttgacgacgactacaccaggccacagaaacactattcagaatgggtgtag

SEQ ID NO: 842568 - DNA, 100 bp, Homo sapiens
tggtcaccaggtgctttagagatcacttctttgatagggggtactatgaaggtgccttgtactgtctccttggaaatcacagtggtgtgtgcttggcaaa

SEQ ID NO: 842569 - DNA, 100 bp, Homo sapiens
ggtggtcccagtgctattatgcctacttgactgcaggtcttgagtcaccacgtccgaatataattcttgggttagtaatctgccaaaaaatcaaacgtcc

SEQ ID NO: 842570 - DNA, 100 bp, Homo sapiens
agtgtccaaccagggctacatgccttatttaaacaggttcattttggaaaaggttccagcaacagatagaaatgctttaagttcactctggggaaagctg

SEQ ID NO: 842571 - DNA, 100 bp, Homo sapiens
atttcagatgaaacaagagttttccgcttattaggatcagacagggtaccagaacatctcgtgaagagcataacttggcagacactgcaagctgtaaatt

SEQ ID NO: 842572 - DNA, 100 bp, Homo sapiens
ctgaactgggtgctttatataggagaaaccctaaagcaggcagcagctcagaagtcccagcagctttcagcgttgcaagaagagaacgttaaacttgctg

SEQ ID NO: 842573 - DNA, 100 bp, Homo sapiens
accttgtcaagcaagctgggatctatgagtggaaaggtgaccaagcccaaagaggagaaagatgcttctaaggaattgaagatgttcctgctccttctac

SEQ ID NO: 842574 - DNA, 100 bp, Homo sapiens
ggatactatggtgctccatttgaacataaggactatgacttgagccagctgcagcagcctgacactgtggagcctgatgccatcaagcctgtgggaatcc

SEQ ID NO: 842575 - DNA, 100 bp, Homo sapiens
cgccgtggagaaggtgaacatcaagccgcaggttcttttttcgatcggggaaacagacctagatccaaggccacaagtaaggctatggctctgattctag

SEQ ID NO: 842576 - DNA, 100 bp, Homo sapiens
aaagctgttgtctcagggagcacagaactcttccacattgactttggacatattcttggaaatttcaaatctaagtttggcattaaaagggagcgagtgc

SEQ ID NO: 842577 - DNA, 99 bp, Homo sapiens
gttctgtctgcagaagcccattatggctgtaactggagatgacacagaatatcctccgaatcctaaatctagagctccaaggatgctggtcattaagaa

SEQ ID NO: 842578 - DNA, 100 bp, Homo sapiens
aaaccacgatcgttatgctgacatgcagccagtaaagatcccagagaagttcgagaagctagagatcataaggaaccaaaagaggagatcaacaaaaaca

SEQ ID NO: 842579 - DNA, 100 bp, Homo sapiens
gcggcgccgcaactttaaagtcatgatctaccagagtcatcttagtgggatttggggaagcaacagggctgtgtggggtaacctgccacctttaagtgga

SEQ ID NO: 842580 - DNA, 98 bp, Homo sapiens
gggtcccttttgcctcagatactattttgaagccaagaaggatcaagaaggtggagaagaaaagaaatctgtgcaaaagaaaaaagtaaaagagttaa

SEQ ID NO: 842581 - DNA, 98 bp, Homo sapiens
caagggttcaggtgcaagcagatgctgactcagcctgttccattaagactgtgccctgtccacggtgcctcctgcatgtcctgctgccctgagctgtc

SEQ ID NO: 842582 - DNA, 98 bp, Homo sapiens
ggagcggggaaccaacgatggcacgaacattgatttgaggaggatgcttcgcagtttacgaaaggcggccttagcaacatgctgttccagtgctccct

SEQ ID NO: 842583 - DNA, 100 bp, Homo sapiens
aaattgtgacatatgatcttctgtcagtcatttgccatcatggaactgcaagtataaataacagatgcgggtgaaagatccaactaaagctttacctgag

SEQ ID NO: 842584 - DNA, 98 bp, Homo sapiens
aagatagttgacagtgggcctgcagccaaggaaggaggcctgcaaattcatgacaggattattgaggcagggcaagaatcctttcgttccatcacaag

SEQ ID NO: 842585 - DNA, 100 bp, Homo sapiens
attgaagctgactactaaggagaataaggaatactgtatgtctgagtatttgagaatgagtggcatctattggggtctgacagtaatggatctcatggga

SEQ ID NO: 842586 - DNA, 100 bp, Homo sapiens
gtcaaaggcatcgatgaggatgatcttctcgaaggtgtgcaggcgactgggaatcatagaagttgactattttggactgcagtttacgggtagcaaaggt

SEQ ID NO: 842587 - DNA, 100 bp, Homo sapiens
tactgacgaagcttggaagttgcagaaggtcgcgtggggcaggcagtggcgctgcgggccaaggccttcggcttcaacgtgctcttctacgacccttact

SEQ ID NO: 842588 - DNA, 98 bp, Homo sapiens
gcgctacatcaacggccttgaccgaaaccgtatcacccaaaactggaagctttcattagtcacatgtcaaaaggatccggagcctctttcgaaagccc

SEQ ID NO: 842589 - DNA, 100 bp, Homo sapiens
ccagcgtagctgaatccagtaccaaaaacgtcaacaacagttttacggattacatgcagaatgttcatggtaaggagattgaccttctgagaaccactgt

SEQ ID NO: 842590 - DNA, 98 bp, Homo sapiens
tcgtgcccgttctgggccggctcctcggcagtgctgagccctctcatagccatcgcactgaaaatatcccagattcatgagagaactggccggagggg

SEQ ID NO: 842591 - DNA, 100 bp, Homo sapiens
gccaagatggagaacttgcgagctgcagtgccaggtcaacccctagctctgatgctacagtcactcacaatgtctgtgaacagaagatggaaaatgtcca

SEQ ID NO: 842592 - DNA, 99 bp, Homo sapiens
tcagagtgatagatcattcacaatatctgtgtcgttcttggcagaaattatattttccagcccgtgtctgcaggtaacccaggcctgcacagtcccatg

SEQ ID NO: 842593 - DNA, 99 bp, Homo sapiens
agagatacacgtgccatgtgcagcatgaggggctacccgagcccgtcaccctgagatggagtacaggtttgcagattccgccagcagcacagcaagctc

SEQ ID NO: 842594 - DNA, 100 bp, Homo sapiens
agatccagagaagctcttcacagatctcagagaaattggccatggaagctttggagcagtgtattttgtggacccccaaaagtacaagggcatatttaac

SEQ ID NO: 842595 - DNA, 100 bp, Homo sapiens
ggcgagtatacatgcaaagcttccaatgagtatggcagtgtcagctgtacagccacactaactgtgacagtttgcccgaccatctgtaagtcacacggct

SEQ ID NO: 842596 - DNA, 100 bp, Homo sapiens
caaatttctgttggaaagaatcgcacctgtgcacattgattcagaagccataagtttgcatttatgtcggatcctcagtgaaaataaaagccatgatagt

SEQ ID NO: 842597 - DNA, 100 bp, Homo sapiens
gaggacacttgtggagagctcgaattccagaatgatgaaattgtgtttggtgcaagtgccaaagttgtgcatttcctgggacgagtcaaaccatggaatt

SEQ ID NO: 842598 - DNA, 121 bp, Homo sapiens
agattgcaaggtggcaaggagcagaagcagcccttacaagttgcaaagcacagtattgctatgcagaatgggaaagtggatggaagtaacttggaaggtggttcgcagcaagcccccttga

SEQ ID NO: 842599 - DNA, 100 bp, Homo sapiens
gctgaagccgctgcccctgctacagcaatggctgccatccggaagaaactggtgattgttggtgatggagcctgtggaaagacatgcttgctcatagtct

SEQ ID NO: 842600 - DNA, 98 bp, Homo sapiens
ctgaaagatacttgaaatcaacaggaaagagaggttcttgatcgctgcagcaaatggcaacttgtgcagctctcttcaatctaattcccgtgggcctg

SEQ ID NO: 842601 - DNA, 98 bp, Homo sapiens
atagcaatgatcccaatttccagatgccttgttcaacagaacctatgagaaccccaaagacattaaagattgctgaaatacaggcaagacggattgct

SEQ ID NO: 842602 - DNA, 100 bp, Homo sapiens
aggagagacacttgtgaacattcaagtgaagcaaaagcctttcatgattatatcgtcagtatttaaacagatcacatcatgcgtgagtacaagctagtgg

SEQ ID NO: 842603 - DNA, 100 bp, Homo sapiens
aattagatgcttcagaatcactgagaaaagaagaagaacaagctacagagacacaacccattgtttatggtacagagcatgccagcgcctcagctaatgg

SEQ ID NO: 842604 - DNA, 100 bp, Homo sapiens
acgatctgcacttcgcattttggcattgacatttaattttagggtcctttatatagaagggagagtggtagaggacattgaatacctgaagttcgataaa

SEQ ID NO: 842605 - DNA, 99 bp, Homo sapiens
ccaagaagcagagcctgctcgacaaaggtgtcatcattaacggtaagagtaaagtctccaccagaagctggtacccagttaccaaagatcatcttcagc

SEQ ID NO: 842606 - DNA, 100 bp, Homo sapiens
gcagattctggcagcgatttctgaactgaacgcaggcaaggtatggagaatacagaatcccaaacaaggcaatgaacaaagaagaccattatgtgggcca

SEQ ID NO: 842607 - DNA, 100 bp, Homo sapiens
aatacagattctataagcagttaggatctggagctgggctcaaaatgcagagaactcaaagatattcatttcggccagtgttacaagatctcagatgaag

SEQ ID NO: 842608 - DNA, 100 bp, Homo sapiens
aacaaaaaacaccacagtactatcgtctatcattggatgaagtggctccggagatagaaatcttttggaagatgattcagatgaagaagaggactttttt

SEQ ID NO: 842609 - DNA, 99 bp, Homo sapiens
gtagatctagaagtcactttggaagaagtatatgcaggaaattttgtggaagctaaagaattacctccaaagccattgtcaagaccacagcagtcatct

SEQ ID NO: 842610 - DNA, 98 bp, Homo sapiens
ctcctgcgccggccttgcctcggctggatgactgtactctgcagctctctcacaatggcgcctacctggatttggaggccaccctggcagagcagcgg

SEQ ID NO: 842611 - DNA, 99 bp, Homo sapiens
gctcttgaggttcacagatgatacgtttgatccagaacttgcagcaacaatagggctccagcggggccccacagacgagcaggatgcctgtccccatga

SEQ ID NO: 842612 - DNA, 100 bp, Homo sapiens
ctcctgcccccggggtgacgcgcagctcccagccggaacaagatcactcaaggtgaaggataatctactaataccagcactttgaatgaaaatttgtttc

SEQ ID NO: 842613 - DNA, 100 bp, Homo sapiens
tcttgggagaagaaggaagaaagtgaaagcgatgtggtccttcttagtcccaaggaccctgacaggaagttaaatgaagttcgaaagagattgaatgagc

SEQ ID NO: 842614 - DNA, 100 bp, Homo sapiens
accatacaccagttaatgaaaatgtggaactggaacattctaccaaggttctttcagaaaatgtagataatggggtaggtgagctcgtgaaacaatatga

SEQ ID NO: 842615 - DNA, 100 bp, Homo sapiens
gccatcattgccctttccaattacagacttcacatcaagttcaaggagtctcttgttaatcttgcaaaccatactgggtacatcaaagttgactggcaac

SEQ ID NO: 842616 - DNA, 99 bp, Homo sapiens
cagcctcgacacagattccaccaaaagctcaggcgccaagcccatctttgtgtgcttgcatccaactgtgatgagcctatgtatgtcaagttggtggag

SEQ ID NO: 842617 - DNA, 98 bp, Homo sapiens
aatacttcaccacactcagtgatctgaggaagcacattcgaactcatacaggggaaaagccatttcgggttctctccccttgccaccatgagcgagtc

SEQ ID NO: 842618 - DNA, 100 bp, Homo sapiens
gctgcttgaatgtctgccgaaatgttcaagtttaccaaaagagaggcaccgctggaacactaatgaggagtccaatgtgctgattgctgctaacagtcag

SEQ ID NO: 842619 - DNA, 99 bp, Homo sapiens
gctcggccccaggagccaataacctgcaggagtcccgacctctacatgttgtgctgggaaatgaagcctgtgatttggactccacagtgtctgctcttg

SEQ ID NO: 842620 - DNA, 113 bp, Homo sapiens
cgaacggggcgagcctggaggattgtcactccaacctcttttcgctgatcgacccatctgagcaaaagactctggccaatctaccgtggattgtggagccgggccaagaagcc

SEQ ID NO: 842621 - DNA, 100 bp, Homo sapiens
atatgttggcttgtcataactattggcactgggctttatatctgattgagaagctgtgcaagctgagaacctcctacattcatgccatcaccagctaacg

SEQ ID NO: 842622 - DNA, 100 bp, Homo sapiens
agtccagtatatttgaagagatttccaaaaaaaaccccagctgcgaggtccaccaggagccggtgacatacacagctattgaccctggcctgcaagatgc

SEQ ID NO: 842623 - DNA, 121 bp, Homo sapiens
ccgtttcctccaggacagcacctagtcgtggccggaggagtctcagagctgtcagaaaggaatgtatcctgtcaggtataatgtcagtgaatggcaagaaagttcttcatatggatcgaaa

SEQ ID NO: 842624 - DNA, 100 bp, Homo sapiens
ccaaacctttccaccccaaatttatcaaagaactgagagtgattgagagtggaccacactgcgccaacacagaaattataccatacccttttgtgttatt

SEQ ID NO: 842625 - DNA, 98 bp, Homo sapiens
gcgcgctggctggccgcggccttcgggctgacgctgctgctcgccgcgctgcgcccttcggccgcctacttcggccgccccgtggtgcctcctttgat

SEQ ID NO: 842626 - DNA, 108 bp, Homo sapiens
ccgcctcacctggggtatggagaggaaggaagagggcaggagcgatttggcaacatgacccgagtatactacaaggaagctgttggtgcttttgtagtctttgatata

SEQ ID NO: 842627 - DNA, 100 bp, Homo sapiens
gtgaagatcatggactatgaaggacatgatccacatcgcggacaccaaggtcgccaggcgttatggggatttcttcatccgtcagatccacaaatttgag

SEQ ID NO: 842628 - DNA, 100 bp, Homo sapiens
attacacaggggacaaagcaagtccagatcagaatgcttcaacccacacacctcagtcttcagttaagcttgtcagctcatttgcagcttacatttttgg

SEQ ID NO: 842629 - DNA, 100 bp, Homo sapiens
actgtttctcatcatcaccaaacgggatgcttgaagatggaaagaaatttgattcctcccgggacagaaacaagccctttaagtttatgctaggcaagca

SEQ ID NO: 842630 - DNA, 100 bp, Homo sapiens
gcataattgaaaacctacagtctcagctaaagctaagggaaggggaaatcactcatttacaggctactgttggattgattcgaaatcttgccctttgtcc

SEQ ID NO: 842631 - DNA, 99 bp, Homo sapiens
tctcacagctcttgcagctattggaccaaggaagaagagaccactagaatctggaattgagttcacaaagatgtccaaaactaatggcttatcagaaga

SEQ ID NO: 842632 - DNA, 100 bp, Homo sapiens
catcctttgcttggcacactgaagacatggacctctacagcatcaactacctgcactttggagaaccaaagtcctgaaggcgacccaaataagtagcagc

SEQ ID NO: 842633 - DNA, 98 bp, Homo sapiens
cgggcgccaggacaccgaggagaatatcttgctgggagtggacttttccagtaaggaaaggaatacaggagtttccagaaaatataaaaaattgtaaa

SEQ ID NO: 842634 - DNA, 100 bp, Homo sapiens
caaaagtgcgagatcaacttggacaggaattggaagaactcacagctagtctatttgagcttgaattcggagtgatttaccactgcacagaggagcggct

SEQ ID NO: 842635 - DNA, 100 bp, Homo sapiens
cagaatcaaccaggattatatccgaacgttttgcagatttattgctaaacatgggtgcatttttggataaacccaaaactgaaaaacataatgctcatgg

SEQ ID NO: 842636 - DNA, 100 bp, Homo sapiens
gtatgatgggaaagttgatatttggtcacttggcatcacttgtattgaattggggggtccctcccttctctctgagcccatgaagacttgcttcactggg

SEQ ID NO: 842637 - DNA, 100 bp, Homo sapiens
caaggaggttcagtggacccttggagccatcctctacaggacccgctttctaccattaaggtaaagtgaacagagttatctgtgacattccatcaggcac

SEQ ID NO: 842638 - DNA, 100 bp, Homo sapiens
gccacctggtattaaacctaccatccaaatcaaacaggagtcagacctcgaagtagggggaaaactgcagtggaagatgaggacagcatggatgggctgg

SEQ ID NO: 842639 - DNA, 99 bp, Homo sapiens
gagcttgctcacccaccagaggagtggaaatgctacaactgtggtggccttgatcatcatgctaaggaatgtagtctacctcctcagccaaagaagtgc

SEQ ID NO: 842640 - DNA, 98 bp, Homo sapiens
ccctgttcgccaacacctgcgaggagtgtgggaagcccatcggctgtgactgcaaggagcagtttttgcaagaaaggatcaaagtgaacggaaaagct

SEQ ID NO: 842641 - DNA, 100 bp, Homo sapiens
gtcctctaacacattcagactacaagtccagacccaggagagcaaggcccagaaagagaaagttcaggagccctggaaaggagaaggaataagacggcag

SEQ ID NO: 842642 - DNA, 100 bp, Homo sapiens
gcgggccagcctgaaaagggggaaacagtgaccccgagccgctctccttggagtagcctctcgggaggactggccaaccaagcgcaccaggtgacacttc

SEQ ID NO: 842643 - DNA, 100 bp, Homo sapiens
tcccaagctcactgcactcctagacaagcagaatgatgtggagatcccatctcctacccagaaagacagggagaaaaagaaaaagcagcagctcatgacc

SEQ ID NO: 842644 - DNA, 99 bp, Homo sapiens
ggaggagtacatccccacacaggagatccaggtcaccagcatccactggagctacaagaagtactgggatttaatgaatttgtctgaaaaacatgataa

SEQ ID NO: 842645 - DNA, 100 bp, Homo sapiens
gatgaatcctcaagaatgtctgcctgtcattctggatgtgggaaccgaaaatgaggaagacaatggtgtaaaattggttgatcctttgggtgaaatgttg

SEQ ID NO: 842646 - DNA, 99 bp, Homo sapiens
ggaggggtggtgaccatcgaaaggagcaagagcaagatcaccgtgacatccgaggtgcctttctccaaaagtcgagtaatcctgcctgtgtctgtagat

SEQ ID NO: 842647 - DNA, 98 bp, Homo sapiens
gggaaggacaggcagagctaaacaagagccaaggagcaataactgaacgtttaagaagcttcagtatgcatgatttaacaactatccaaggtgatgag

SEQ ID NO: 842648 - DNA, 98 bp, Homo sapiens
cgtcggacccatggtttccagtgcagcgcggagtgggcgatgccagcgtgccaggtgctggagaatctggtaaaagcaccattgtgaagcagatgagg

SEQ ID NO: 842649 - DNA, 100 bp, Homo sapiens
aaggatggaggagagaaggctgagagcgaagctggaaaaggagtccccggcgtgcagtggagcctcgctgggggaaatgacagcttggaccatgggcgcc

SEQ ID NO: 842650 - DNA, 75 bp, Homo sapiens
agttaatcctcaatttaagcctgatctaacccctagaaacagactggattatggacagaacttggaaatattgag

SEQ ID NO: 842651 - DNA, 98 bp, Homo sapiens
acgactatgtccaattttcatgctcaggtagcaaaccatgtgatttcttctgactctatttcctcttctgccagtagtttcctgagctcaaactctac

SEQ ID NO: 842652 - DNA, 99 bp, Homo sapiens
cggacccagtggcctcggcgattatggacccggccgaggcggtgctgcaagagaaggcactcaagtttatgttggaggctggcagcgaagaagatcgaa

SEQ ID NO: 842653 - DNA, 100 bp, Homo sapiens
acagctggataatgtccaccccgagccgattcaagaaggacaaagagatcatagccgagtatgaaagtcaagtcaaagagcagtatagctgtgactatgg

SEQ ID NO: 842654 - DNA, 100 bp, Homo sapiens
accaaaggaggggatttgatgttggtccactatgaaggctacttagaaaaggacggctccttatttcactccacgaactgtggctgcaccatctgtcttc

SEQ ID NO: 842655 - DNA, 124 bp, Homo sapiens
aaaagtttgatttgatctggaaccgggctcagtcctgtccaacatttggggattctcagcagttgcggctggtccgtattctgcgcagcaccgtgatggttcgcgttggtggaggatggatggc

SEQ ID NO: 842656 - DNA, 99 bp, Homo sapiens
aggaggagctggatgccgaagtcctggaggtgttccacccgacgcatgagtggcaggcccttcagccagcttattcagctgattctgaatcatcttaca

SEQ ID NO: 842657 - DNA, 100 bp, Homo sapiens
aatgctggaattttctatgaagcacaatacaaagaagtaaaagtggtggctaatgattgatttccagagacttatgttacttgaggaagacaccaagaag

SEQ ID NO: 842658 - DNA, 100 bp, Homo sapiens
tgtcatgtagccaagactggagaaacaatatttccatggagaatgattatctgggacctcgaagaattgagagtctacaaaaagaagatgctgattggca

SEQ ID NO: 842659 - DNA, 100 bp, Homo sapiens
tctgctcaagtcctgtcctcttctgaccaaagatgctgtccccggcataggtccatctctgcagaagccatttcaggagtacctggaggctcaacggcag

SEQ ID NO: 842660 - DNA, 100 bp, Homo sapiens
agctcccggcgtgccaccaaagcggctccccgcgcggacgaaggctcagatgcagtacctctttttctgagacttcttcgttcaccacatcagaatgttt

SEQ ID NO: 842661 - DNA, 100 bp, Homo sapiens
agcctagtgcttcgttttgtgaaaggccaatttcatgaatttcaagagagtaccattggggtgcatctgggggaggtgttgtagccattgacaacaaaat

SEQ ID NO: 842662 - DNA, 99 bp, Homo sapiens
tgagggaaaggacaagatgaagtggaaggcgcttttcaccgcggccatcctgcaggcacagttgccgattacaggatcagattttattaagacctctac

SEQ ID NO: 842663 - DNA, 100 bp, Homo sapiens
gctaaaactcaggctatacttttggagatgagctggactggccattatggaggaggagctgcagcattcccattgtgtgaattgtgtcagtagacggtgc

SEQ ID NO: 842664 - DNA, 98 bp, Homo sapiens
gactcctacctgaaacatacggagattgacaatcaatgggccatcttggacggctccgagctctgtccagtggtgggagtattacatcccctcctctt

SEQ ID NO: 842665 - DNA, 99 bp, Homo sapiens
tctaacagaattaaaacagacggtgctggatataagtatccagtatatggtgtccagtggcatccagagaaagcaccttatgagtggaagaatttggat

SEQ ID NO: 842666 - DNA, 128 bp, Homo sapiens
aagagttggtgggagacgggtgaggtacaggctcagtctgcggccaagactccgtcctgcaagcactgctcagcacgcaggcatgtgaggaagctgggcttaaaggagactccagcaaatggagagac

SEQ ID NO: 842667 - DNA, 100 bp, Homo sapiens
cagtatctcacctccctaaactggttaatagtggcatggaagatccatttgtcccatgaagctgaggtcttgaagcagctggctgagaaacgagagcacg

SEQ ID NO: 842668 - DNA, 100 bp, Homo sapiens
aaagaaaataattcaggtatcaagttggactagctcagatgactacaaaatgggttacattccgaaaagcaaatgggagatggacacatctgaggcaaag

SEQ ID NO: 842669 - DNA, 99 bp, Homo sapiens
caatgttggagccgtctgcaaagtgtccccggcaagaagatggtctgtcttctgctgatcccaactctgattggaatgcaccagcagaagagtggggca

SEQ ID NO: 842670 - DNA, 100 bp, Homo sapiens
tctaaagtctttccaaaaggtcaaggttcacaagttgttataccacatttgcataagttagccttggtgaacaacttacagattgtggattctaaaagac

SEQ ID NO: 842671 - DNA, 98 bp, Homo sapiens
aggccgccctgcaccttcagcggatttggggattaggctcttttaggaaagaccacagcaagattctttcattcgtctcctcctagcctgggggacca

SEQ ID NO: 842672 - DNA, 98 bp, Homo sapiens
atcatgtcagagagagagcttggttaacttgggagaaagtttcatctgtggatggagtattgtcttcaggcagtgacagtggtgggagcagcagcagc

SEQ ID NO: 842673 - DNA, 100 bp, Homo sapiens
gaaaagccttttcagtgtgatatgttgatggcatggacctgggcaaaaaggtcagcatccccagagacatcatgttggaagaattatcccatctcagtaa

SEQ ID NO: 842674 - DNA, 98 bp, Homo sapiens
tgctcgagtggtgccgcagcaagacgctgggctaccagaatcagttcttcattagctgctcagatgggcggacggttctgaacaaggtgggcgatgag

SEQ ID NO: 842675 - DNA, 100 bp, Homo sapiens
ccgtggctcaagcaggacaatcgcactttataccacctgcgattacttaacaatttggacaagacagcaaatgctattgtcgaagttttctaaagaagaa

SEQ ID NO: 842676 - DNA, 100 bp, Homo sapiens
tcgacaaagggaccatgcggaggatggcgctgtccatgatcgactttgtgacaacaaactgtgctctgcagttttcatcccgtggaatccgacccggcct

SEQ ID NO: 842677 - DNA, 99 bp, Homo sapiens
gtgagaaggcgctgcgcaggcaggcggaggagatcctgatggccagtgctacggtggtgtcgcttctgcccaagatgaggagcccctggcctgcccgga

SEQ ID NO: 842678 - DNA, 98 bp, Homo sapiens
ttcaggccaagtaaagaccaagtgctttgaaatgacgattccacagtttcagtttcttaaacaattaggtctacatcctaactggcaattcgttgatg

SEQ ID NO: 842679 - DNA, 98 bp, Homo sapiens
tcggtctctccctgaagcccaccggtccccaacgcatcatgccagggagccaagcgtcctgcccggccttttcggctttgtgagaaaccttaccatca

SEQ ID NO: 842680 - DNA, 99 bp, Homo sapiens
tatcttaaaatgtatccagttttatgctgatgagagctataacttaatgagaacagcccatcttcaccacccgagcgcatgtcttccagattgacccca

SEQ ID NO: 842681 - DNA, 100 bp, Homo sapiens
gaaaactgggctgaaggaatgctggcagacaaaataggaatatttccaatttcatatgttgagggacgcgcatgaaatttggtgccgtgactcggatcgg

SEQ ID NO: 842682 - DNA, 100 bp, Homo sapiens
tacagtcctcttgagtttttacgaagggaggaggaagccaagaatctggtgagcgaagccatcgcagctggcatcttcaacgacctgggctccggaagca

SEQ ID NO: 842683 - DNA, 99 bp, Homo sapiens
aaataaattgcaagcattctatccaaatggagcttgtacctccaggcccatacatccttccaaagctcccaactaccctacagagggaaaccaccgagt

SEQ ID NO: 842684 - DNA, 100 bp, Homo sapiens
ctctgcgaacattccttttaacctatgtcttacaaaggcccaacactattcatggccgaattgatcaagtcaaccaactccttgaactggatcatcagaa

SEQ ID NO: 842685 - DNA, 98 bp, Homo sapiens
ggtgtggccctgaagcagggttctttaagaggaagtatcattctgcaaaggaggcatatgaacaacttttgcagacagaaaaccttcctgcacaagta

SEQ ID NO: 842686 - DNA, 100 bp, Homo sapiens
agaactcccccagtgtttctgcaggaatttatcatggcatccagcattgaccactacaagtaaaatgcgaattccacattctcatgcatttattgatctg

SEQ ID NO: 842687 - DNA, 100 bp, Homo sapiens
gtggtgtgttcttgactccgctgctcgccatggcactgtacaaaacgagttaaacagacatggcccttgccccctgggagttttcagtctaagatgatgc

SEQ ID NO: 842688 - DNA, 123 bp, Homo sapiens
aatccatgcactagataagcaaacatttaaaggactcatatctttggaacatctatgctgtcttcgcaggtgccatgcctacaatggcaagcgtcaagctgtctacacttcatcccattgtga

SEQ ID NO: 842689 - DNA, 99 bp, Homo sapiens
aacgcttgttatgttttcatcacttctctccagaagggttttttgattaactcaaaaccagagaatgcctgtgaacccatagtgcctccaccagtaaaa

SEQ ID NO: 842690 - DNA, 100 bp, Homo sapiens
tgtacatcctctgccacatcttcctgacccgcttcaagaagcctgctgagttcaccacagggaagacaccctctctggacccccatcagaccaaagagca

SEQ ID NO: 842691 - DNA, 100 bp, Homo sapiens
agccacctacaggcctccaggaatggctaaaaatgtttcaggaagatgtctcaggagccatatcacatctgtcccttggggagatcccagctatggcaca

SEQ ID NO: 842692 - DNA, 99 bp, Homo sapiens
tggcacctgcgcgaagctggccaaagcctgcccagacggctcacctgtgcgggatggaacaaaaggtcagcacctcatctatgggcactttaccaaagc

SEQ ID NO: 842693 - DNA, 100 bp, Homo sapiens
gccaaagacaagacgcaggagaaaatcgagacctcaagtaatcattcccaaggggacttgatctcatcttcatgccaggccttgggtttgacaaacatgg

SEQ ID NO: 842694 - DNA, 100 bp, Homo sapiens
agccagccgggacggacatgcgcgggagggcgccgcggggcagccgccgctcctccgggagtaagagggaccatctcctcatgaacgtcaaatggtacta

SEQ ID NO: 842695 - DNA, 98 bp, Homo sapiens
aaatctttgcaaattttaacagaagagtcgaagctctgcgagacccaatatttgccaataagaatggttatgatcagggtgttgacagaaagtatgtt

SEQ ID NO: 842696 - DNA, 100 bp, Homo sapiens
taaaggctggtcctgccactgggacagtcaatcaccttctgctgcttggatgggtggatttggtgctcagcctccccaaggacaagctcctccccctgta

SEQ ID NO: 842697 - DNA, 100 bp, Homo sapiens
gaggagcagttccagcagggcaagcttcttgatcctaaatgagattgagctgcaccgagacctgcagcaccgccacatcgtgcgtttttcgcaccacttt

SEQ ID NO: 842698 - DNA, 100 bp, Homo sapiens
ctacttgtgtgtgaaagtagataggactccgaaaggcacccagttcctccaactcctctgccaaccaatgatgttgatgtgtatttcgagacctctgcag

SEQ ID NO: 842699 - DNA, 100 bp, Homo sapiens
cggatattcagttgcacatccccacatcaatgcactgccaatggttctgaccacatccgtgagaaagatggactgtgggctgtccttgcctggctctcca

SEQ ID NO: 842700 - DNA, 98 bp, Homo sapiens
gggccaaagatagagattccggtacattatgcaggtgatgatgaacagtctacacagatggctgcaagttgggaagatgataaagttacagaagcatc

SEQ ID NO: 842701 - DNA, 100 bp, Homo sapiens
cggagcaacttgctaatggcaggcattttacaagagtgcttgtgcacagagctcgaaaactagctcaacaatactatcttgtgtaccaagaacccattcc

SEQ ID NO: 842702 - DNA, 98 bp, Homo sapiens
agaggacgagccttcaggagccaccacaagatccaccaccagatcagaggctcagaggatcacagaagaactgcagcttcctggggagcagtttcacc

SEQ ID NO: 842703 - DNA, 100 bp, Homo sapiens
ggaaaagatatcctggaaatgtttactattagtgtaagttttctggatatgccgcagaaggatccgtgccagaagcaagcctgtgagatacagaaatgtt

SEQ ID NO: 842704 - DNA, 100 bp, Homo sapiens
aggagactgcaggctacctcaggggccgtccccaggacactgtccggatcttccctccctgccaaaagaatgcaatggtgtaaagattccagttgatgcc

SEQ ID NO: 842705 - DNA, 100 bp, Homo sapiens
ccaccgctgccgaaatgaagtataagccctggaaaggaaaatatctatgaggcaaagcagagaagagctgataaagcgaggagtcctgaaggaaatctat

SEQ ID NO: 842706 - DNA, 98 bp, Homo sapiens
tgattcagcctaatatctcagccctggagagtgaatttgtttcctgccagcttcaccaatggattgatctcatttttggctataaacagcaaggacca

SEQ ID NO: 842707 - DNA, 98 bp, Homo sapiens
tgcgacgttcacagaggaacactgccggggcccaaccacaagacgactcaataggaggaagtgtcttgggacaaggtgcgcattcctggtgtgctgca

SEQ ID NO: 842708 - DNA, 100 bp, Homo sapiens
ccgaaggaagaggaatgggatccagaatataccccaaagagcaagaagtacttcttgggaagtcgagacaacatgagtgtgattttgatctgttttccaa

SEQ ID NO: 842709 - DNA, 98 bp, Homo sapiens
ggagaatgaactggaggctgctcagcttcttgacctgagcaatggagaacctaccaggaaacttcctcagggtgttgtttatggtgtggtgcgaagat

SEQ ID NO: 842710 - DNA, 130 bp, Homo sapiens
ggggaaatcccatcacctcagctaaccagaccgaagaagagaattggacggccgatggtggcctctcctaaccagagagaacaccacagttttctcaagctgtgcctgaagctactttcaaatcaccttg

SEQ ID NO: 842711 - DNA, 100 bp, Homo sapiens
accgtgatgagcccctgtggaggtgaagacattgtgggcatttccggagagttcttttgaagtcacttcagaaggatctacatgaggaaatgaactacat

SEQ ID NO: 842712 - DNA, 100 bp, Homo sapiens
caaggtggccacagaactgcagccctcccagcgtcgttaactttccgggccaggcattgattcatgaagagggtgaggtgttccagacagacagactcgg

SEQ ID NO: 842713 - DNA, 98 bp, Homo sapiens
ggaggcagcacgttcagctgtgcctgcctgcctggttatgccggcgatgggcaccagtgcactggactattccttttccagtgttcgagtggagacgc

SEQ ID NO: 842714 - DNA, 100 bp, Homo sapiens
ggagaaggatgtggactgcagtgctgcagtgccagaaacaagtgttgaaaatgttaaaggctgtgctgaagaagagccgagagggaggaaagggaggcaa

SEQ ID NO: 842715 - DNA, 100 bp, Homo sapiens
ggaggagaaaacagataatgctaccttactgcgcctgttagaggaaggagaaaagttaattggcatgctgctggcctgctgtctgtcccggttcatcacg

SEQ ID NO: 842716 - DNA, 100 bp, Homo sapiens
tggaaggctggtgctgccagatggacaaggagaccaaagagaacaacctctctgaagaagcccgacggccatggaggctgaagagacgatggaatgcctt

SEQ ID NO: 842717 - DNA, 98 bp, Homo sapiens
cgacaccgaaaactccaccgtagcccttgccaaaggctggctacagcaaacatcattcaagatgtccagcaaagggagcagcacagatggcagaacag

SEQ ID NO: 842718 - DNA, 99 bp, Homo sapiens
ccctccatgtcggggagctatcgtcgtcttcaatgaaattggagcgatttgaaattccaatcaaggttcgattaagcccagagccatggacccctgaaa

SEQ ID NO: 842719 - DNA, 100 bp, Homo sapiens
ccctcacgggcaccagggcttcgccagcgggccagcaacaaagtgcaagaatatgcttttaaggctattaaccagggtggccttacatcagtagctgtca

SEQ ID NO: 842720 - DNA, 100 bp, Homo sapiens
ggagcccatggaatcggtcctggaggacagaccaagatcactccatggatgaaatgacagctgtggtgaaaattgaaaaaggagttggtggcaataatgg

SEQ ID NO: 842721 - DNA, 100 bp, Homo sapiens
agagggtcaactcgttacataccctttaccttttgagtttagagctatagaagcactcctgcaatattgggtggagaaacaggtgaatgatgccgtttct

SEQ ID NO: 842722 - DNA, 100 bp, Homo sapiens
cttcacggccactggccagaggtacttcctcaagattgccaaggatccaagatttgaacgattaccatgtacacacaaaggaacctatgcagatgactgc

SEQ ID NO: 842723 - DNA, 100 bp, Homo sapiens
gctgggcagaaaggctaccatcaccgcactgagatcaacaagaagcgacatctcgaatcagcgatgcacacttggcagacacaatgattggcaaagcagt

SEQ ID NO: 842724 - DNA, 100 bp, Homo sapiens
tggagctgaaggcggcggcagagaacttgccggtgccagctgagaaagtatgctgaggccttggattaccaccgtcaggcactggtgttgattcctcaga

SEQ ID NO: 842725 - DNA, 100 bp, Homo sapiens
tgctggaggacatcgtgtaccggcagctgaatgttgcattaaaatcctcccctactgaaagaaacggaggccaggataactgtagagcagcaaatttcag

SEQ ID NO: 842726 - DNA, 99 bp, Homo sapiens
gtaggctccttcaacccgtggctgatagctgaaaggggtgctacatccattgtgtacagatgcaaacagaaggggacccagaagccttatgctctcaaa

SEQ ID NO: 842727 - DNA, 98 bp, Homo sapiens
cttctacagcctggactacaccgagaaggtgagctccctggggaaggactggcacaagttctgcctcaagtgcgagcgctgcagcaagacgctgacgc

SEQ ID NO: 842728 - DNA, 100 bp, Homo sapiens
ggtgacagaatatgctagtggaggggaaatatttggtgccttggaacactatgttaattgcctggatctggtaaacaagaggctaccttatggccttgct

SEQ ID NO: 842729 - DNA, 100 bp, Homo sapiens
gttggtgagcagcgctctggggctcgccttgtatctcaacaccctgagtgcggatttctgctatgatgacagggagcttcactattcagaatgtttttcc

SEQ ID NO: 842730 - DNA, 98 bp, Homo sapiens
ggcgcccctcggcctcggagcaacgagcgcagcgccggggagagaccattctaacacaggtaccgtccagacagtgcctctgagaaagggaacctaaa

SEQ ID NO: 842731 - DNA, 99 bp, Homo sapiens
catgttctcctgccctgaagcaggtcgaatgagtgatttgagtgtaattggtcatccaatagattcagaatctaaagaagatgaaccttgtagtgaaga

SEQ ID NO: 842732 - DNA, 100 bp, Homo sapiens
aagatttaatgacctcaggtttgtcggtcgaagtggaagagcgtgacgacagcatgtacgatccctgaatgggcccgtgggcatatttagtcattcattt

SEQ ID NO: 842733 - DNA, 99 bp, Homo sapiens
agacacgtacgtctactacccttgttagaaggaagctttggatcttcggtggacgagctcatctgcgcctttgtttagaacgcttaaaagttctgattc

SEQ ID NO: 842734 - DNA, 100 bp, Homo sapiens
accctgatggtttggaagttgtgcagtttcttaacaagcagacaggaatgaggggagaatcatacttcatcggaatgaggagcccagggcagcagggaca

SEQ ID NO: 842735 - DNA, 98 bp, Homo sapiens
cttccggccaacttccattgaacttcccagcactcgaaagggaccgaaatggagagcaaagtccctctgtcgtgaaatcaagcaacgacgtcgaggag

SEQ ID NO: 842736 - DNA, 100 bp, Homo sapiens
tccaagccttttatttagtcagtcatccaaatgaagtgtcttggccaatggcttctctaattattgttctgaaacatgctgttgatggagtaatgaatgg

SEQ ID NO: 842737 - DNA, 100 bp, Homo sapiens
cagaaatgaccaacagataactgaggacaatggacctgcctgggcatagacttccttaagatattgatgatgttaagaagttcaaaccgggttacctgga

SEQ ID NO: 842738 - DNA, 99 bp, Homo sapiens
tgctgtcgccatgcatgttgctgccaactctatccaaaacaggcagatccagttcctaatggtttgcgagctttgccagttttctatgcctgcacagtt

SEQ ID NO: 842739 - DNA, 100 bp, Homo sapiens
aagctggcagctctctgtaagaaatatgctgatcttgtactagcaaaggccagacgtcttactcaacaacttccctgccaccacctccaccatcccatcc

SEQ ID NO: 842740 - DNA, 100 bp, Homo sapiens
cagaaaaaacttcagcatgtgccaggaacacaacctcaccttgatcagagctggaagtcgagtgtgctactcaactcaggagatttggagacaaactgaa

SEQ ID NO: 842741 - DNA, 99 bp, Homo sapiens
cagtctctccagacactgggtctgactatttctgaacaacaagcagagttgattcttcaaaggaaaatgttggggcttttcaggaagcataataagatt

SEQ ID NO: 842742 - DNA, 100 bp, Homo sapiens
taaacagaaagacttgaccctcttaggtgtcatacctaagtccccacagccaaggaaaatcatttgtatgtccagagaagacttcacgcagaagatgaca

SEQ ID NO: 842743 - DNA, 100 bp, Homo sapiens
cgcgaacgagcgacggcggaacccgtgggcctgtggactgcagcctcggcggtcagcaggttctggctccttggcagcaatggctgtatttgaagataag

SEQ ID NO: 842744 - DNA, 100 bp, Homo sapiens
acctcgtgaagatccgcttcgccggcatgctggaagatggactgccctccaatggtgtgccccgatctacagccccaggtggaatacccaacccagagaa

SEQ ID NO: 842745 - DNA, 100 bp, Homo sapiens
gagtttctctgccttgctgatctgagctcagacctgccaatttaccagagataattgataacaccctgtaacagctgacgggacgaccctgggacagtct

SEQ ID NO: 842746 - DNA, 100 bp, Homo sapiens
cttctgtgatcactgcggggagatgctcttcggcctagtgcgccagggcctcaagtgcgatggactcagtggcctctgaggatgtggctgtgaacttcac

SEQ ID NO: 842747 - DNA, 100 bp, Homo sapiens
ggcgtccctcttcagttctctggagccccagattcaacccgtgtacgtgcctgtgcctaaagaaccctaaggactctgcaatatgaataattccctagag

SEQ ID NO: 842748 - DNA, 100 bp, Homo sapiens
aggacctcaaagtgggacaatatcctctgtggagaacacccccccatggaggcgaggtagagttggggtcgcagggaccgtttggagggagccattcacc

SEQ ID NO: 842749 - DNA, 100 bp, Homo sapiens
tgctttgatatgattgaagaagcatacatgacaaaatgtggccacagcttttggttcgaaaacatggccaaaagaaatgccgagaaggaactgacagata

SEQ ID NO: 842750 - DNA, 99 bp, Homo sapiens
cagcctattttgagagccttctagagaaaagagagagattggaacgagttactatgctgtttctgggattgcataatgttcgtcagacctccatgttcc

SEQ ID NO: 842751 - DNA, 99 bp, Homo sapiens
tcttacctgaagcccatgttgcagcgggactttattaccgctttaccagttggtccaggcgcaatgttcagcgtatttgaggaaatcacaagaattgta

SEQ ID NO: 842752 - DNA, 98 bp, Homo sapiens
tggcatcttctgcctcgtcctgacacccaccaggcttgcagggtggcccccgctccgacttcgacatggcctatgagcgtggccggatctccgtgtcc

SEQ ID NO: 842753 - DNA, 100 bp, Homo sapiens
gaagaagccacccgagcggactcccgagcctcccctggtgaagacacaaactgtcaccatctcagataatgccaatgctgtgaaaagtgaaatcccaacc

SEQ ID NO: 842754 - DNA, 98 bp, Homo sapiens
gggcccgggccgccctctctcggagttggcaggaagccaggttgcagggtgtccgcttcctcagtactaaggctcgtacgtctgcatcgattatctta

SEQ ID NO: 842755 - DNA, 100 bp, Homo sapiens
tcaactattacaatcgcttgtacaaaggagagtttaaacagccaaaacagttcattcatattcagcgaggaatgccagctcctgagcaggcctcattggt

SEQ ID NO: 842756 - DNA, 100 bp, Homo sapiens
tttttataatgcatcattgtgcgtccctgtatgcatactaccttgtactgattgcttccaagtatgatcatcaggcagaagaagatcttcgcaattggat

SEQ ID NO: 842757 - DNA, 98 bp, Homo sapiens
caacaccaccaatgttatgggtacctctcttactgttaggaggacagcacctacgatgagtacgagaacgatctggggatcacagccgtcgccctgta

SEQ ID NO: 842758 - DNA, 100 bp, Homo sapiens
catcgtggtagttattgtaagggaacaagctggaggagcaggaccctagacctctgcagcccataccaggtctcatggaggggaacaagctggaggagca

SEQ ID NO: 842759 - DNA, 100 bp, Homo sapiens
tcacatatactgatgaagagccagtaaaaaaattgttagaaagcagataccatcaaattggttctgggaaggatgtctccccgttcaatgttgtggcctg

SEQ ID NO: 842760 - DNA, 98 bp, Homo sapiens
atgatgaagaagatccttcaaaattaaaagaggagcagcatggcatttcagtcactggtttgcagagtccaggtataagtgtgctagcggagtgtcta

SEQ ID NO: 842761 - DNA, 99 bp, Homo sapiens
tacaccttcgccacccactattggaccagcctatttcaatgatattgctgtaggtgcagtatgctgtagggtggatcattcacagaatcagaagagact

SEQ ID NO: 842762 - DNA, 100 bp, Homo sapiens
tgtaccttagccacaatggcatcgaggtcatcgagggcctggagaacaatggaaaggtggcccagacagcgtgtatgtcagcttgcaagcatttagccac

SEQ ID NO: 842763 - DNA, 98 bp, Homo sapiens
caccagctggagccccaccagatccaggggatggattttattcacatatttcctgttgttcagggctctgtgaatttcaagtttggggttctttttgc

SEQ ID NO: 842764 - DNA, 98 bp, Homo sapiens
ggattttcactggacttccacaaggacagccatgggaggatgctccagaccttgtatgattacttctggtgggaacgtctgtggctgcctgtgaactt

SEQ ID NO: 842765 - DNA, 99 bp, Homo sapiens
tctagggacacaagtatccagcctatattgttacaattttttttcaagaactgccgtcttctttgcctgcactaatggcagcgagtatgacgaggagga

SEQ ID NO: 842766 - DNA, 100 bp, Homo sapiens
gaagagtatgataacgaaccacaaatacctggctatattgtcgatgattcagtcagagaatgtcatacccaggctatcccccaacaggctacccaccttt

SEQ ID NO: 842767 - DNA, 100 bp, Homo sapiens
atcagctgaaatttccagtaaaggattatttttacccaagatacttaggtaagtctcaattacttctctactctggttgtcgtagaggcatagttggggg

SEQ ID NO: 842768 - DNA, 99 bp, Homo sapiens
cttgactaaaccgacttctgatccatggatgccatcaggatgaaggtttaaggctcagaaaggtagcacattcggataaacctggatcaacctcaactg

SEQ ID NO: 842769 - DNA, 100 bp, Homo sapiens
atctttttctggatgaacctgggcggatgtcagaccagagaagagcacagaatgtaccagagaggctgagaatcaggctgaaagccgggcagcagtggag

SEQ ID NO: 842770 - DNA, 100 bp, Homo sapiens
aactgaagccttttgagaccctgctgtcccagaaccagggaggcaagaccttcattgtgggagaccagccaaggccacctttgatgccatttctaagacc

SEQ ID NO: 842771 - DNA, 100 bp, Homo sapiens
cagctcgggcaggccttccgagaggaacctctatgccgacatcgacgccgcctggcaggccctgcgcaccagatagattctgttgctgttaacatttcaa

SEQ ID NO: 842772 - DNA, 100 bp, Homo sapiens
ccgggacaccctggaagccaggaaatgattcacttgtcatggattagtgactggtcagagttatattttccgggtcagagcagtcaatgcagctggactt

SEQ ID NO: 842773 - DNA, 100 bp, Homo sapiens
tgtggccaaggctggcttggtggatgactttgagaagaagccccaactggaccctaggcaaaagtgagtggcactcctctgccaggactccaggcaagcc

SEQ ID NO: 842774 - DNA, 100 bp, Homo sapiens
tggtgagagcggtgactttggaggtcaacaccttcatgtccttcatattccccatggtggtcatctcggtcctgaacaccatcatcgccaacaagctgac

SEQ ID NO: 842775 - DNA, 100 bp, Homo sapiens
gaaaactctcagtccagaaatgcagagctttgtgagataccacccacttctgatacaaagtcagatactgcaacagggtggttctcttcccaaagtggaa

SEQ ID NO: 842776 - DNA, 100 bp, Homo sapiens
cacccctcgagctctgcatcagaaccaagcccagtctgactctgtctgtaatacctgattgcattggagaactctagacacgcataaacatggacagttt

SEQ ID NO: 842777 - DNA, 100 bp, Homo sapiens
aatactactctgaggggcttagaaattaacagggtgttaagtgtgatgcttccataatacatttggatgctgtcagctaagttcacttctgaactaaggg

SEQ ID NO: 842778 - DNA, 100 bp, Homo sapiens
gggtaaatggctgggctaccctattcctccgaaccagcatccccaccatcaacatggagaacaagaccacgtgggtatgtccagagcctcctggacatca

SEQ ID NO: 842779 - DNA, 98 bp, Homo sapiens
aagacggaagctagaaaaatcagagaagttgcggaatgaactccggcagaacacagatctgctagaaagcaagatatgggtaagtgtcaccttaccaa

SEQ ID NO: 842780 - DNA, 99 bp, Homo sapiens
cgggattggaccgacgcagccatgggctttgaccagcttcgacttgaaggattgctttgtgatgtgaccctgatgccaggtgacacagatgatgctttc

SEQ ID NO: 842781 - DNA, 99 bp, Homo sapiens
gaaaataagaacacagtggatgtcgagaacggtgcttctatggcaggatatgactgccaatctggctgaagccaatgcttctgaagaagataaaattaa

SEQ ID NO: 842782 - DNA, 100 bp, Homo sapiens
tgccgtctgggctgtgctggccgccatcctgcagctgggcaacatctgcttctcctcctcagaggagaggcgggagatttttgagcagcacctgaagagc

SEQ ID NO: 842783 - DNA, 100 bp, Homo sapiens
agaggtctgaggccagaggtcatctgtccttgtgcaagttctcctgaggcgctgactgtcgccatccgcaggttgagttgttacaacaaaagttgagaga

SEQ ID NO: 842784 - DNA, 99 bp, Homo sapiens
ttgaataagtgttttaagaaagtggacaaagagaggagtcagatgacaagagcacctcaaaggcagcagcctcaaggagcagccatggccccagacttg

SEQ ID NO: 842785 - DNA, 98 bp, Homo sapiens
gaactatagagtttgtggacagatttatattggtgaagtacaaggaggattatgagagatccagagggaagctcattggggcaaaagatgtacaggga

SEQ ID NO: 842786 - DNA, 100 bp, Homo sapiens
ccactacagggaagtgcatcacatgtcagggttttttatcagcaattggacaccctttccccaaaatgatttttaatcatggaaggaaaaagagaacttg

SEQ ID NO: 842787 - DNA, 99 bp, Homo sapiens
gaagatggaagccaaagttcatcagagtccaaaatggtgatcaggaaggtatagttaataaagtgtcttctagccacattggctgtttagtacatgggt

SEQ ID NO: 842788 - DNA, 100 bp, Homo sapiens
aatggcaatggcacaaagttctctcgatcagggcatacatctttcttcgacaaaggaaaaacgtttcttcatttcaactcaaacttgctgctaaagcgcc

SEQ ID NO: 842789 - DNA, 99 bp, Homo sapiens
gagaagcacccacaaaactagcatcctcctggaggagctcggggggtgaatctctacattaagaacttggatgacactattgatgatgagaaattaagg

SEQ ID NO: 842790 - DNA, 100 bp, Homo sapiens
aggaaatacgtcagcagatcctggatgaaaagcccaagtgtaaacaggaacatcgataagtagtgtaaaaacttgcacaatgaaatccgaagccaaggat

SEQ ID NO: 842791 - DNA, 60 bp, Homo sapiens
tagggggcggctaccccgtggggaggtcttgctggagttgctagaacaatgtgtggatgg

SEQ ID NO: 842792 - DNA, 99 bp, Homo sapiens
acgggagatggaaccaaggagaaaccatttaaaacaggtctaaaggtaactttcgaccgactttccccaagagaaaattcctagaaattgaacaaaaat

SEQ ID NO: 842793 - DNA, 98 bp, Homo sapiens
tgtgatgacatcctcattgatgttaatgaatggtgctatacttgaattttctaaggtgtcattagtataccaacagatgttttaaagattgtgtattc

SEQ ID NO: 842794 - DNA, 100 bp, Homo sapiens
cgttatgacaggaagcagagtggctatggtgggcaaactaagccgattttccggaaaaagtctatgcagatggtagtatatgtctggacatacttcagaa

SEQ ID NO: 842795 - DNA, 98 bp, Homo sapiens
cgagatgtctacttcgaagactggcaagcacggccacgccaagctctacctacaaggactccaacactctgcacctccctacggagcgtttctcccct

SEQ ID NO: 842796 - DNA, 100 bp, Homo sapiens
caaacgtatgggcatcatcgtgcgggaatgatgagaagacagcagctgattacaagattttaggtggttcagtccttcacctggtgttggctctgagagg

SEQ ID NO: 842797 - DNA, 100 bp, Homo sapiens
taacactcttctccaaaaggacctgccagagactgggagtgttgactgctgcaaggaccaagatattcgggacagtgggggtcccaaaccagtgatggtg

SEQ ID NO: 842798 - DNA, 100 bp, Homo sapiens
gggtccaggtggtggtagaccttggccaaacccaacaaatgccaattcagactgttctgatggctacatgtgcaaaatacactttcaaattaagaatggg

SEQ ID NO: 842799 - DNA, 99 bp, Homo sapiens
tccatgttcacactgggtgaaggaagctgaaaccacagacatgactgagtcctccatgaagacttcgagagctgtgcccaggagtgaacaaccagccct

SEQ ID NO: 842800 - DNA, 99 bp, Homo sapiens
catgctccgccagatcatcggtcaggccaagaagcatccgagcgtcccagcacacctggaaagttctgcaaggcctcagctacagaaagcccagagaca

SEQ ID NO: 842801 - DNA, 99 bp, Homo sapiens
tttactaagaacatggagtctcccttatgcaatgaagccctggtagatcaactttggaaacttatgaattctgatgacaaatcctctgagggaaatcga

SEQ ID NO: 842802 - DNA, 51 bp, Homo sapiens
gctggagctggagctctcggaggtggaagatagatgataagcctgtaaaaa

SEQ ID NO: 842803 - DNA, 98 bp, Homo sapiens
gaggacccacctgtgggtgtcagtggcgcaccatctgaaaacaacatcatgcagtggaatgcagttatatttggagctcccagctcctccagcagccg

SEQ ID NO: 842804 - DNA, 100 bp, Homo sapiens
agattggggccatgccaaggactatgtggaggctctcaaaattagagagatgtgtaattgtccaccactgtctaatccagaccctcgattactattcaaa

SEQ ID NO: 842805 - DNA, 100 bp, Homo sapiens
gaccccgcggagacccttcgagaaatctcgtctcgaccaagagctgaagctgatcggtatctagaagagcagaagacagagaatggaaaagataaggaac

SEQ ID NO: 842806 - DNA, 100 bp, Homo sapiens
tctgatttcgtcctcggggagaagagaccccaagagtgttgagcagcccatcgtgcttaaagaagggtggctattatcatggaaaactaatttttcccag

SEQ ID NO: 842807 - DNA, 98 bp, Homo sapiens
cttgtcgccttacttcctgcttaagccagcacagaagtgtctggagtggttgattcacaggagctttattgcagaaatgaccatttatatcaagcagc

SEQ ID NO: 842808 - DNA, 100 bp, Homo sapiens
aagacgacgagtttgaagagttccctgccgaaggatatgaacgagactgccaaacaagaagatattttggaatccacaacagatgctgcagaatggagcc

SEQ ID NO: 842809 - DNA, 100 bp, Homo sapiens
caccgaaggaagtggtcccagaaaagaaagtaccggtgcctcctgccaaaaagccagaagctccacctcctaaaggtgttacagttcgagtgcctcaaac

SEQ ID NO: 842810 - DNA, 100 bp, Homo sapiens
ttgtgaaaggagagacagttccacttgatgtcttgcagatcaagctttctctcctttgaaaacactaagaataatgtcactgcatcagtttttactagag

SEQ ID NO: 842811 - DNA, 100 bp, Homo sapiens
cgtacaggcgcagcggccgcagcagcagcggcagtcacaggcacatcagcaaagagacaacaagggaggtgtcacagttttccatttagatcaacaactt

SEQ ID NO: 842812 - DNA, 99 bp, Homo sapiens
cccgggcggcgggcggagacgtgggcgccctccccgccaaggcccgtgcgagaaagcatgtacctacatcagatctaaccttgatcccagcaatgtgga

SEQ ID NO: 842813 - DNA, 100 bp, Homo sapiens
acaaggagaagaaccatggagactggaggaagaattcccaagccagagctttccaggttttgcactgattgcaaaaataaagtcctccgagcatacaata

SEQ ID NO: 842814 - DNA, 118 bp, Homo sapiens
cgcggggcgaggtcgccgccatggcccgctggatcccgaccaagaggcagaagtacggggttgcgtgctgatgacatcacaagtttagtaacagatactacacttcttgtacactttt

SEQ ID NO: 842815 - DNA, 100 bp, Homo sapiens
agaccaacgttcaagcagttggtagaagacttggatcgaattctcactctcacaaccaatgagaacaccttccaccatgaccacctcagcaagttcccac

SEQ ID NO: 842816 - DNA, 98 bp, Homo sapiens
agaagaccttgtcacactggcaaaaacagcaagtggagtcaatcagcttgttgatagacctcatccttcaacagctgaatcaaaggctccaacaccaa

SEQ ID NO: 842817 - DNA, 51 bp, Homo sapiens
gaccctgaacctctacgacacggccgctggatctaccatgaaagacttgtg

SEQ ID NO: 842818 - DNA, 100 bp, Homo sapiens
ctgaaggcaaagtgacctgtgcccagctcctagtggagacagacaccttcggtagtcaagtccggatcaagggcaaggagacggaattctacctgtgcat

SEQ ID NO: 842819 - DNA, 98 bp, Homo sapiens
ttcgaaaagctgccaagttgaaaatggacgagtaatcgcctgctttgattcattgaaagcagcttggatcttaaaagcaagagcgctaacagaaatgg

SEQ ID NO: 842820 - DNA, 98 bp, Homo sapiens
actgagcggagcccggtgacaggatggcaattaagttggaatatgcaaggttggttaagttggcccaagaagacaccccaccagaaaccgattatcgt

SEQ ID NO: 842821 - DNA, 100 bp, Homo sapiens
ggagttttcactcttggaagatgccatcggatgcatggaggccaaccaggaaaggcagcaacaggtggaagctgttgagttggaggctaaagaagttctc

SEQ ID NO: 842822 - DNA, 98 bp, Homo sapiens
cctcactgccctccatattgctacaatagctggccacctagaggggctgattcaggagatcaatgatttgaggttaaaagttagtgaaatggacagtg

SEQ ID NO: 842823 - DNA, 99 bp, Homo sapiens
caggtactgacagatccgtagggaggacaccgtgacttcccggacgctgggaaatgagtatcctgagctccagctggaccctaaattggatcctcttcc

SEQ ID NO: 842824 - DNA, 100 bp, Homo sapiens
ggtgctaaagaaattattcttgatgatgatgagtgtcctttacaaatcttcagggaatggccaagtgacaaagagtccatgttgtacttagatgggcagc

SEQ ID NO: 842825 - DNA, 109 bp, Homo sapiens
actcgtcatgctctttgtagcgtggtgcttctgttgctcacagacaatgcagatcttcgtgaagactctgactggtaagaccatcaccctcgaggttgagcccagtgac

SEQ ID NO: 842826 - DNA, 98 bp, Homo sapiens
gaagtggaagttcacaggctgctcagctcttccaccaaagccacctaagccaatgacttcagcagttccaaatggaatgaaggacagttctgtttctc

SEQ ID NO: 842827 - DNA, 116 bp, Homo sapiens
attctataagagcttgaccaatgactgggaagatcacttggcagtgaaggtccctccttgtggtccatttctgggcaccatgggctccacagtgtgcacagatgaacgaagttatg

SEQ ID NO: 842828 - DNA, 100 bp, Homo sapiens
ttttccaagagcttgtccaaagtgcaacattcatttcaatcttttggatcctttgaaaaatcacatgaagtaggataagttctgaacgtcgaaaagaaaa

SEQ ID NO: 842829 - DNA, 100 bp, Homo sapiens
caggagacacaagaagcggatccaggttcatatccagctttcagagtggcaccgtgcaatttttcttccacaggcctggcttgcatacatgaatcgagct

SEQ ID NO: 842830 - DNA, 100 bp, Homo sapiens
gaatatgaatttgaagaaattacactggagaggcctttcagtgggatctacctgaataacaaggaagcaggaatgtatcattgcgtgtgctgcgacagtc

SEQ ID NO: 842831 - DNA, 98 bp, Homo sapiens
gaaaagaagcttatccaacgccaaccaaagatttgcatcagccatctcttagtccagcaagtcctcatagccagggttaaccagcttcgtggcatcct

SEQ ID NO: 842832 - DNA, 100 bp, Homo sapiens
ttttgcagatcttcaacaagaggacccaggagaaattcgccctcaaagaagatgagaatgtgcctactgctcctgatcctccaagtcaacatttacgtgg

SEQ ID NO: 842833 - DNA, 128 bp, Homo sapiens
cagttccaggtagacatggaggccgtcggggagacgctgtggtgtgactggggcaggaccatcagcaccaccatctccaccctgtgatatcacctgtcttgaaagttttcgtgactcaatggttcttg

SEQ ID NO: 842834 - DNA, 99 bp, Homo sapiens
tactgcagtggagcttgactcttaatggttatggtggagaattcagactttaccccctcacaagtaggatgtctctttaccttccttgctcggcagctt

SEQ ID NO: 842835 - DNA, 100 bp, Homo sapiens
gacatcctggaagctgggaaatggtaaatgccatctgctatggggccaagattatgcttccaggtgttcttcgatatgaggacggcattgaggtcaatca

SEQ ID NO: 842836 - DNA, 129 bp, Homo sapiens
aaaagagcgtcttgcagctttttatggtgtttaatctaatacacttaagctgcagtcccaaaattagggtggtggctgaatacattttggaagagagtttttcatcttagagattggtgaacaagtgtg

SEQ ID NO: 842837 - DNA, 114 bp, Homo sapiens
ggacatccaggaagaggagccgagcatctgggccgagaccattccgtatggagagccgggaacgccccatgtgtctggtgggaagatgctcagtgctctggagtccacggtgcc

SEQ ID NO: 842838 - DNA, 100 bp, Homo sapiens
aaaataccgagtttgtaatgtgactagacggccagccagtcatcaaacttggataacagggcaagattcagaggaagaaaaggatattgatgcattatgt

SEQ ID NO: 842839 - DNA, 100 bp, Homo sapiens
tcattcatttgagcatagcaaactgggacagggagaaattacttgaagcttggatgtccaacccggagaactgctgccaacgatcaggtgttcaaatgcc

SEQ ID NO: 842840 - DNA, 100 bp, Homo sapiens
acttagaaccgcagcagggacgtcggtttgctatcgggactcggcgaggacgttgatgcggatgaaattaaaaggctaggaaagagatttaagaagcttg

SEQ ID NO: 842841 - DNA, 100 bp, Homo sapiens
gcccggaccctgctggctatcctgcgcctttccactgctctggaggaggtgcgccagtctgtaactcctgccgagccagtccagtactatttcacgctgg

SEQ ID NO: 842842 - DNA, 100 bp, Homo sapiens
ctgagagtctgctttggcatccccagcatttggcctctgctcagaacttggagcgtgatgcccagaagtgtgtgaactggtctgtgaccacaaagatgag

SEQ ID NO: 842843 - DNA, 100 bp, Homo sapiens
gagaggctggaaaggtcatctcggagactagaggctggataccaaatagcagtggaaaccgagtctaacgtgaagacattttgctccaagaatatcctag

SEQ ID NO: 842844 - DNA, 100 bp, Homo sapiens
tttgtcctgtcctggatcagtttctttgtcatgtagccaagactggagaaacaatttattccaatggaaacagctggagaacttatatttccgtgagaaa

SEQ ID NO: 842845 - DNA, 98 bp, Homo sapiens
gagcactacgttatttagaaacaagacgagaatgtaactccgttgaagcaacttaattcagtgcacaaatgagatgaatgtgaacatcccacagttgg

SEQ ID NO: 842846 - DNA, 98 bp, Homo sapiens
gaaatccagcctattgggaactgtgaaaagaatgggggtatgctacagccacctcttggagcattccggaagagtttttcgactacagtttgatgaat

SEQ ID NO: 842847 - DNA, 100 bp, Homo sapiens
agtatggcagtgtcagctgtacagccacactaactgtgacagggtttggagaacattgattaaggaagcattttcctgattgatgaaaaaaataactcag

SEQ ID NO: 842848 - DNA, 100 bp, Homo sapiens
cgagaaggagggaggggaaacacaaagccggctacgcgctgcgaggtgttggtaaatcatgcttattgctacagtttacagacaagaggtttcagccagt

SEQ ID NO: 842849 - DNA, 100 bp, Homo sapiens
gatgcaatatcctacatgcagatatcaagccagacaatatcctggcttgaattctacacttaaagatcatattatgtcccatccagcattacacgatgca

SEQ ID NO: 842850 - DNA, 98 bp, Homo sapiens
atcgcttaccctccgggggtaaaagagatcaccgacaagatcaccacggacgagatgatcaaacgcctgaagatgggaaccaacaaatgtgccagcca

SEQ ID NO: 842851 - DNA, 100 bp, Homo sapiens
tcctggacccagcctgggagaagcagcagaggaaggctgaagccgacgtagcttctctgaacagacgcatccagctggttgaggaagagttggatcgtgc

SEQ ID NO: 842852 - DNA, 100 bp, Homo sapiens
cctggagctctacgcctcctacgtttacctgtccatggctcttgtcaggatggtgaagctgttcatcggaaacctgccccgggaggctacagagcaggag

SEQ ID NO: 842853 - DNA, 98 bp, Homo sapiens
tgcacacgccctgcatcgagcagctggagaaggtactctttgagcacatcaaattcttccattgccgctcttctctgtgccctttatccgcacttccc

SEQ ID NO: 842854 - DNA, 100 bp, Homo sapiens
cccttacgtcagttgtaaattacagagaacctaagtctgtttgcaaagcacctgaactggttggccttgccatcaaaccaggaacctcagttgagtattt

SEQ ID NO: 842855 - DNA, 100 bp, Homo sapiens
attcacattccattgcctcctaagattgacccaacagttaccatgatgcagataatgctcggaatatttttcaatgtccattccgctgtgttgattgagg

SEQ ID NO: 842856 - DNA, 100 bp, Homo sapiens
ggcggacagtgcggaactaaagaatgaaactagtgatcgagaagatggcctccccaaaggacatcatgtgacagactctgagaacgatgagcccttaaat

SEQ ID NO: 842857 - DNA, 100 bp, Homo sapiens
cctaaacacagagggttctttccattgtgtctgccagcagggtttctcaatctctgcagatggccgtacgtgtgaagccttgtccagacgaagtgacgtt

SEQ ID NO: 842858 - DNA, 98 bp, Homo sapiens
ccatagaaaggattcataaaactctaatgcacagtgtggatacaagtccaggatatcatgagtcagattccaagaagtctgaagatctatccttgtgt

SEQ ID NO: 842859 - DNA, 148 bp, Homo sapiens
tggttacaaccgcagcagtggtggctatgaacccagaggtcgtggaggtggccgtggaggcagaggtggcatggggacatggatttgattgacatactttggaggcaagatatagatcttggagtaagtcgagaagtatttgacttca

SEQ ID NO: 842860 - DNA, 99 bp, Homo sapiens
agcttttggcagcatgaaagttagcagctatgaccagggccagagcactcagatctcagtcagaggagtctgcttctgcctttagtgctgatgacctta

SEQ ID NO: 842861 - DNA, 98 bp, Homo sapiens
agatccttcgggccattgggaagggcagctttggcaaggctgaccccgcactacatctacccaccagccatcgtgcagcccagcgtggtgatcccagc

SEQ ID NO: 842862 - DNA, 100 bp, Homo sapiens
cagcctcctgagtagctggtattacaggtttatttgcaagatgggtttgagggaattaaggataaagtctgctgaaagtagcaccagcctctggattaaa

SEQ ID NO: 842863 - DNA, 98 bp, Homo sapiens
gagtttatctggagtgtagagtcactggaaaccccactcctcgagtcagtattgctgacagacagaacgccttggaggctgagtggaggacggtgcag

SEQ ID NO: 842864 - DNA, 100 bp, Homo sapiens
caccatggaaaaagtgacttgagcagggtttgtggatgcacttagatgtttgcaatgagcactgtggctggcatgccccagtgttttggataccaatgca

SEQ ID NO: 842865 - DNA, 100 bp, Homo sapiens
cacggctaatttgatggagaaggttcgaggcctacagaacctagcctatcagctggggctggatgagttgaagtacatgcgagaagccacgccctatgtg

SEQ ID NO: 842866 - DNA, 100 bp, Homo sapiens
agaagccagtgttcatatccaactggaaggccggccatccattttagaaatggcctatatgaacccaatagcaatggcgagatcaaggggtccaatccag

SEQ ID NO: 842867 - DNA, 98 bp, Homo sapiens
gtggtccgcgcccttcctcggcgggccggactggtgatgaaggtggagaatcagaacttcttggagaggatcttccacttgaaccttctgtcaccaaa

SEQ ID NO: 842868 - DNA, 100 bp, Homo sapiens
aagacgtggacactgagccccagaaacgaaatacagaggagtcatcctcacctgttaggattgctgtgctaaggagacagcaacgtatgataaaaaatcg

SEQ ID NO: 842869 - DNA, 100 bp, Homo sapiens
taaaagtagatgcccaatttggaggcattgatcagagaaagattttcacctttgcagagaagtgttgctaaagattatgtgcgactgatgaagtatggcg

SEQ ID NO: 842870 - DNA, 100 bp, Homo sapiens
acaagtaagcctgctacacttacaacaactagtgcaaccagtaagttgatccatccagatgaggatatatccctgatggagtctcgctctgtcacccagg

SEQ ID NO: 842871 - DNA, 100 bp, Homo sapiens
ggcatggagttcatggtgttagcgcaaaagttctgaatggcatccgtcctaccggaaacctaggaaaagctctattatcaagtcctaaattttggaatga

SEQ ID NO: 842872 - DNA, 100 bp, Homo sapiens
ggcccaggaccccacctgcaaaacctaagatgggcttaggtcacgagcaaggatttggagccccttgtttaaaatgcaaagaaaaatgtgaaggattcga

SEQ ID NO: 842873 - DNA, 100 bp, Homo sapiens
gtccacctggtccagcaggtatcccaggtccgtcagggaagagaggtccacggattgtgattgctagcattatgtgcagttacaataaaaatgactggac

SEQ ID NO: 842874 - DNA, 99 bp, Homo sapiens
aagctctcaagtttgaaactcctgcaccaaactattacaatgattcactccttctccagttgcacagccacacccttcagctggccttaatgttgactt

SEQ ID NO: 842875 - DNA, 98 bp, Homo sapiens
actggccaatgacgactggatgaaagacccctcggctcagctgcccaccggcatgctgctaggactacgcccaagcaaggtttgatgcctatttccac

SEQ ID NO: 842876 - DNA, 98 bp, Homo sapiens
gagcccaacgagtacatccattatgacctgctagagaagaacattaacattgttcgcaaacgatgaccttccatcagtgcccgtgtttgacagaactc

SEQ ID NO: 842877 - DNA, 100 bp, Homo sapiens
gttggtacagggctccagaaattatgttgaattccaagaataataataacctggatgcctgctgtgctgttctctctcaggagagtacaagatatcttta

SEQ ID NO: 842878 - DNA, 98 bp, Homo sapiens
cggccccccaaagggagatccttctccagcctggagagttcactggaccggaggtcagattgtcaagcatggagatatcaagtgtgtactaaatgaag

SEQ ID NO: 842879 - DNA, 100 bp, Homo sapiens
gagaggctgggatgaaaatgtctactatacagctctcgtgggcgcctgcggtgggaactactcagccatgtcttctgtggtctattcccctgacttcccc

SEQ ID NO: 842880 - DNA, 100 bp, Homo sapiens
atcggcgccatccttcagaatgcaggacactttacttcggccgaagacttaaacctgttgattgccaaaaacacgagattagagatctatgtggtcaccg

SEQ ID NO: 842881 - DNA, 100 bp, Homo sapiens
ggttatctctccacctccttttgcaccttcaccaaccttgcctcctacctttcatccggaagaatatttgattttcatcaagcagctgatggtatccagg

SEQ ID NO: 842882 - DNA, 98 bp, Homo sapiens
aatcggggagcgtccggagctagctggatcctctaggcaggagtggcaaaattctattcagaagaatgcaggccttgcttttatcgaacttgtcaatg

SEQ ID NO: 842883 - DNA, 108 bp, Homo sapiens
caatggaggctgaagtttgtgaaaaaattgggtgtttgcaaagatttaaggaacggaaaacagttcttccttcaaagcatgcagtacctgaagtaatagaagactttc

SEQ ID NO: 842884 - DNA, 98 bp, Homo sapiens
ccgtaatacctttgctcaataccaatatcaacatcagaacagatctgagcagatggacttgggcattccagcaatgacaaagtgctgcaaccagctgg

SEQ ID NO: 842885 - DNA, 98 bp, Homo sapiens
cagtggctggcagtgccagatgaggaagaaggacacattcagctaacgtattttagcaggtggagtgaggttgaagattcctgtgacagcgatgccat

SEQ ID NO: 842886 - DNA, 98 bp, Homo sapiens
ctgaagcgactgagtccgcgatggaggttcagcagctggacatggagaaccaacgctcatcacctctgtcgttccccagtgttccacaagaagaaacc

SEQ ID NO: 842887 - DNA, 100 bp, Homo sapiens
ctagaacgtgtttttcgggagagcaaaggctgtgtctacggcagcctggggatatactgacctcaagagaatttgcaagacaatagttgaggctgcaagt

SEQ ID NO: 842888 - DNA, 100 bp, Homo sapiens
cagtcaccggagtgcccgagggggaagcacgatttacggaaggatcaaagttctgatcgtaccagtctttcttcagtgggagcccaggattctgaatcta

SEQ ID NO: 842889 - DNA, 100 bp, Homo sapiens
gggagaacttgggtggatagcaagccctctggaaggagggatgcttcttcagctccctcctcttcctccatgggcggtgcttgcagctcctttaccacct

SEQ ID NO: 842890 - DNA, 100 bp, Homo sapiens
taattcaggagaactaccttctcaattctgtgcaaggacaacaagctggtgagcagcctcagcctgcctcctttgttccatcagagatgctcatgtcatc

SEQ ID NO: 842891 - DNA, 98 bp, Homo sapiens
attgcttgcggagtttgcttcacgacagaaaagctttatggaaactgcaatggatgttgtgcctgagattgtgagggagacccaggacctaattgaac

SEQ ID NO: 842892 - DNA, 100 bp, Homo sapiens
cacacagactcggcggtaccccagctccatctcttcatcaccccaaaaggacctgactcaggcaaagaagtggtccaaaggcaaagttcgggacaagctc

SEQ ID NO: 842893 - DNA, 99 bp, Homo sapiens
tctagtcctgagcttcccaccgaagatgaacagggttcctggggcatcgacgatctccatatttcattgcaaggtgccttagctggaccaattattgtg

SEQ ID NO: 842894 - DNA, 100 bp, Homo sapiens
gtggagaaggtagaggatggagttgcagactctacaggaggctcttaaagtggaaattcaggttcaccagctttgacagatccaaatgcttctgctgccc

SEQ ID NO: 842895 - DNA, 98 bp, Homo sapiens
acggcgtccctgcctcaggcctgcccggacggtgtgcgggattatagctggacagacatccgctgcccctttgaaaaacgaagagatgcagcatgcgt

SEQ ID NO: 842896 - DNA, 98 bp, Homo sapiens
agagaacgaagaagaacttttcctcatacaggatcagcagggcctcatcacactgggctggattcatgttcttttgaagtaaccagtgatcttttttg

SEQ ID NO: 842897 - DNA, 100 bp, Homo sapiens
ggatctacagctttcactatggggtggagacgtggtactcagcaagctcgagttaaagttggatgtgctggaacaggtttgttggcatccaaagctgttg

SEQ ID NO: 842898 - DNA, 99 bp, Homo sapiens
cccaacaccacgacaatccagtttcctgctaatttgcagcttcctccagatgttggatgacaataaccatcttattcagtgtataatggactctcagaa

SEQ ID NO: 842899 - DNA, 100 bp, Homo sapiens
cggagatcagctgatgccagtcagagaagtttggcatataatcgaatagttgatgccctaaatgaattcagaaaccaggttgttgcaagaggtcttcttt

SEQ ID NO: 842900 - DNA, 123 bp, Homo sapiens
atcaaaatcaccaaccaaaagattcacctttggatttcatcgcttagacttaattcagtgcacaaatgagatgaatgtgaacatcccacagttggcagacagtttatttgaaagaactactaa

SEQ ID NO: 842901 - DNA, 98 bp, Homo sapiens
aaagggtcagaggcttcctaacgcagactcgagtgcgaagcgcgcagtcgccggtattggtaaaggttttcaaggtgtcatgaaaagatggggattta

SEQ ID NO: 842902 - DNA, 100 bp, Homo sapiens
agcaacccaatggacatgcctggaagagagctcaatgaggacagagacagtggcatagcacggtctgatttctttatgaggcacagtgttgctgtcatga

SEQ ID NO: 842903 - DNA, 100 bp, Homo sapiens
tggatatgttcgtggagacactgtggaaagtctggaccgagctcttggatgttcttggacttgacgcaaagtggaagatgctttctacaaaggtgaactc

SEQ ID NO: 842904 - DNA, 100 bp, Homo sapiens
cagagatggaagatcaagtggtgacaccagctctgaagtaagcacagtagaactgctgcatctgcaacaacagcagctattaattgatggcaaagttatt

SEQ ID NO: 842905 - DNA, 100 bp, Homo sapiens
aatgagcgccatgcccgggcagctgtgctgggagagaatgggcgggtgctggccgggcagaccctggataaggagggttcctgcccccaggtgaacatta

SEQ ID NO: 842906 - DNA, 98 bp, Homo sapiens
aagtgctggccagtgagcccatcccgttctctgatttgcagcagaggacagtgctgctgtgagtttgacgaagtggacatcacctgcagtcagtccag

SEQ ID NO: 842907 - DNA, 99 bp, Homo sapiens
tggagggctcgtcctgctacagacagctttgatgactacccacctagaagaggtgatgatagctttggagacagcatcaacttctaactcatctcgcca

SEQ ID NO: 842908 - DNA, 100 bp, Homo sapiens
gcttgggtcaggacaattccatttggggaccagagatggacggtcactcagcctatggagagccagtcttggtgctctgtgttcacctggttcatctgag

SEQ ID NO: 842909 - DNA, 100 bp, Homo sapiens
gatgtccagtaatgtcccggcggatatgttacagcaattggaacttgcacagatacagcatagagacgctaatctcacagctcttgcagctattggacca

SEQ ID NO: 842910 - DNA, 100 bp, Homo sapiens
attggcactgaaggaggaggcatggaccagtctatatcatttcttgcagaagaaggaactcttattgacatgtgtgtgcagaactgtggtccaagtttcc

SEQ ID NO: 842911 - DNA, 100 bp, Homo sapiens
aagcttcaccgaccctgggatcctgccccgggccactgtctgtgaagcagccgccctggagaaacagatcggtcctggacccaagccagaagcctctgca

SEQ ID NO: 842912 - DNA, 100 bp, Homo sapiens
atatatcagtgaagatggagaaacaagtgaccaacagttgaatcaaagtatggacacagtttggatgctcttccaagagtcacatgtccaaaccatccag

SEQ ID NO: 842913 - DNA, 100 bp, Homo sapiens
cagcaccctcatcatgcagttgcttagagacaacctaacactggaagatgagctggtgtcactgcaaaagaaactcaagggcaccgaagatgaactggac

SEQ ID NO: 842914 - DNA, 124 bp, Homo sapiens
cccaatggagatcgtggtggatattttccgaaagctgggactgaggcagtgccttgtaactcacaatggataattctgaaataatcagcagaaacggaatggaatgccaagaatctgcattgag

SEQ ID NO: 842915 - DNA, 98 bp, Homo sapiens
aatgagccagagggacacgctggtgcatctgtttgccggagggtcctgggaactccaacaagggagcaaatcagagaaatgaacccaaactacacaga

SEQ ID NO: 842916 - DNA, 100 bp, Homo sapiens
tacatgtaccaactcttagatgattacaaagaaggcgaccttcgcattatgcctgattccagttgggggccgtcccgctcctaaggcaggaagatggtgg

SEQ ID NO: 842917 - DNA, 100 bp, Homo sapiens
ttggcatcgactgtttgcacaaggggacaaatgggcttcgtgggacacatatgcaacatgcctatgatttttacaagcctgatatgctatctgaatatcc

SEQ ID NO: 842918 - DNA, 98 bp, Homo sapiens
gctggaggtgggatccacacagctcagaacagctggatcttgctcacactctttcaagagaagcttccttgtctctgctttctatccgtcaagatgat

SEQ ID NO: 842919 - DNA, 100 bp, Homo sapiens
tttaccagagataattgataacaccctgtaacagctgagcattacagcagaagttctggtggtgacctctttcgatgaactgcagagaagggcctcagaa

SEQ ID NO: 842920 - DNA, 98 bp, Homo sapiens
cggcgcgggcccggcggcggcggcagcggggtccgggtccggagcgccacagactacaaagctgatgaagacccagcattattccagtcagtcaagac

SEQ ID NO: 842921 - DNA, 100 bp, Homo sapiens
gggaggtgaaggaccggatcctggagaacatctcgctgtcggtgaagaagcttctgcagaaagccgtcattacacctgattttgaaaaaaaccactgtgt

SEQ ID NO: 842922 - DNA, 100 bp, Homo sapiens
tttctcttccggatgtcccggagcaagattgactggggcgactttggggtagaggcagtgtctgaggggactgactctggcatctctgccgaggctgctg

SEQ ID NO: 842923 - DNA, 99 bp, Homo sapiens
gccactgctgccgccgcccccggagctgctggtttcattcgaggtttcgggccggtcaccatcagaaaagctaagtttgctgtatagtgaggatcagga

SEQ ID NO: 842924 - DNA, 98 bp, Homo sapiens
ccggcagctggcgctggggatccctgctcttcgctctcttcctggctgcgtccctaggacatcaatagcctcaacaaacaaattgctcagctccagga

SEQ ID NO: 842925 - DNA, 98 bp, Homo sapiens
agcattggtgcacgatgtactgttcctcagcactttgtttgcccccttaaactttgtcatggagaaagtggagagcatcctcccatccagtctgtggc

SEQ ID NO: 842926 - DNA, 100 bp, Homo sapiens
aggaggtgcaggcgagggtgcagagcctggagagcatgccccggccccctgagcagggttcagccgactcctacaccagccgcccatctctggactcaga

SEQ ID NO: 842927 - DNA, 98 bp, Homo sapiens
gcatttgactcttcctcggcagtcttccttattattaaggatgcagcagtctcggccctggctgctctatgcagtgaatattacatgaaggagccggg

SEQ ID NO: 842928 - DNA, 100 bp, Homo sapiens
actggtctaggtgctgctcctgaacttggtctctgagccatggcttcccatagacactcagatttgggccaggcttagtcatctattggtatggatttat

SEQ ID NO: 842929 - DNA, 98 bp, Homo sapiens
tttggtttctcgcaggcctctgccgcagacatggagaaactcagcagggagagcaacaagccccggccctcagagctcagccggatgagcgcagccca

SEQ ID NO: 842930 - DNA, 100 bp, Homo sapiens
tggccaaactctgctatgacccagattttgttacctctggaacctccaagtgaaacttgagcccatagtaaatctcttaccagacaaaggaagactcatg

SEQ ID NO: 842931 - DNA, 99 bp, Homo sapiens
tgaagaagatggaagccaaagttcatcagagtccaaaatggtgatcaggaaggttcagaatctcccatgatgattggtgagttgagaagtgaccttgat

SEQ ID NO: 842932 - DNA, 98 bp, Homo sapiens
tactttggttacctatgtacctgttaccactttcaaaaactgcgccatggggctcagcgacggggaatggcagttggtgctgaacgtctgggggaagg

SEQ ID NO: 842933 - DNA, 100 bp, Homo sapiens
gtcaccctggggaacccagacgtcctcgtgggttcagcatgccagccagaggcccaggaaggaaccctgagccccccaccaaagctaaagatgagtcgct

SEQ ID NO: 842934 - DNA, 98 bp, Homo sapiens
ctcactccccgagtccccgaccctccccaagcaaggcaagagtttgtcgatgcttatgtggattacatattcaataaatcagtggcttccttatttga

SEQ ID NO: 842935 - DNA, 100 bp, Homo sapiens
caggacaaacagtgcttccttctctctggtaatgcccaggaaaccagaaagatggatgatgatgacgacgacgatgacgtaggagatcatgacgatgacc

SEQ ID NO: 842936 - DNA, 100 bp, Homo sapiens
gttctacctttttgcctgtgtttggggcacattcattctcatctctatcgccacatcacagaatcgtatctatctcacagctgacaaccttgtgctgaac

SEQ ID NO: 842937 - DNA, 100 bp, Homo sapiens
tggcactctcggcagcatacggcgaagcagagggtccttgacattgatttggtgcttccagatgtgagttatcaggtggaatccagtgaggaggatcagt

SEQ ID NO: 842938 - DNA, 98 bp, Homo sapiens
ctgacggcgtgaccgacccgagccgcggagcgtgctttggacaccatgaattttgatgttataaagggcaagccagtacgcatcatgtggtctcagcg

SEQ ID NO: 842939 - DNA, 100 bp, Homo sapiens
aggatcttgatgctcaattgagaagaacacttagtccagagatgatcacagtgacttctgcggttggtttatttctcaaactctgaggctgcggagttca

SEQ ID NO: 842940 - DNA, 98 bp, Homo sapiens
gaaaatcagcagcagatgttggttgccaaggttttggggaaggatcaccccgatgttgccaagcagttaaataacttggccttactgtgccagaacca

SEQ ID NO: 842941 - DNA, 130 bp, Homo sapiens
cccaacatggtcttcattggaggtatcaactgtaagaagaggaaagacttgtctcagaaaggtgggagacaatgccttggagctgcaaatcttctctgagtctgaagcatcctgcctgacgcgtttgctc

SEQ ID NO: 842942 - DNA, 98 bp, Homo sapiens
cagactccacctgggatgttggctctggacaacatgctgtactttgccaagcaccaccaagatgcctacatccggagttcagatcattcaggatcaac

SEQ ID NO: 842943 - DNA, 99 bp, Homo sapiens
cctgccctcccccttgtcccgggatcgctccgtcgcacccaccatgatggaagacgacgggcagccccggactctaatgtctactagagtccttttagc

SEQ ID NO: 842944 - DNA, 98 bp, Homo sapiens
gaggggcaagtcggggcagggctactacgtggagatgaccgtgggcagccccccgcagacgttggtgcttcccgtgctgctgttgatgctggctttgt

SEQ ID NO: 842945 - DNA, 99 bp, Homo sapiens
tcagagccgaacgcgagggcggcgcccggggactggagctgcgcgcaatagatgaaggatttgggggcagagcacttggcaggtcatgaaggggtccaa

SEQ ID NO: 842946 - DNA, 100 bp, Homo sapiens
cccggaacctctcgtaaaccaggtgcttttgaagatgatgatatcacgcacgttgaaggaagtgtagatcctattcgagatatagaaataatacatgaag

SEQ ID NO: 842947 - DNA, 100 bp, Homo sapiens
ttgagccctagggaaatacaagaaaatactttctcacttcaagcaggtattttggcctctccccagtctgctcctggaaacttggacaatagtaaaagtg

SEQ ID NO: 842948 - DNA, 100 bp, Homo sapiens
gcaagatgttctacctgctcaagaccgccttccccagcgtccagatgttctcagtgcagctgagtcttggtgagcagacatgggaatccgaaggcagcag

SEQ ID NO: 842949 - DNA, 99 bp, Homo sapiens
tccgatttaaagctgagctgcgaggaaaatggcggcgggagaacccttaggagaaatcttgagagtggacagcaattgtgaagatcgccagagagttct

SEQ ID NO: 842950 - DNA, 100 bp, Homo sapiens
ttctcccctaggaattctcttccacagcacctgaaagagggggtggcccgattctacaggtcacggaaaaagcacttgatcaccacccagacagaacaca

SEQ ID NO: 842951 - DNA, 100 bp, Homo sapiens
gcctacgtgaacaacctgaacgtcaccgaggagaagtaccaggaggcgttggccaaggcccagctgcagctccagcaggtggcgctgcagcagcagcagc

SEQ ID NO: 842952 - DNA, 98 bp, Homo sapiens
cggctgtaccggcagatcctcaggggcaagtacagttactctggggagatctgccttctggagactgcgccgtcctcccgggagagccagaaagagga

SEQ ID NO: 842953 - DNA, 112 bp, Homo sapiens
cttctttcattatggagggaggtttggcagatggagaacctgatcgaacttcgatacgtcggtaacctttccagagatgtgacagaagctctaattctgcaactctttagcc

SEQ ID NO: 842954 - DNA, 100 bp, Homo sapiens
atcgtgtgcctgatgatcacgcagctggctggcttcagtggaccaggttttcaaggaccacgtcaggttccaaagaaaatggttattatggaaagtggtg

SEQ ID NO: 842955 - DNA, 100 bp, Homo sapiens
ccatgatcttgcccttgcctgtaaattggattatgatgaagatgctagtgcaatgctgaaagaagttcaacctaggagctccgaccagccagcctggtgg

SEQ ID NO: 842956 - DNA, 100 bp, Homo sapiens
atcactagcccctaccaaaggcttgttaaatgaaccaggacaaaacagctgctttcttaatagcgctgtacaggaaatgacccattcatggccgcctcct

SEQ ID NO: 842957 - DNA, 98 bp, Homo sapiens
gagtatctggtgaagtggaaaggatggcccccaaagagaagggagcactggctttgctttcatcaggccaaagatgcctttctttgggaatacgttca

SEQ ID NO: 842958 - DNA, 99 bp, Homo sapiens
gagctggagctggagctctcggaggttttaggaatgctgaagtcattacaccaacttcaagttgaaaaccgaagattagaggaacaaattaaaaacttg

SEQ ID NO: 842959 - DNA, 99 bp, Homo sapiens
gaaacccagagctcctgtcaaccagccaggacaacttgcctttgatgattttcaagagagttgtgctatgatgtggcaaaaggtaatggaatgttccag

SEQ ID NO: 842960 - DNA, 100 bp, Homo sapiens
ggcaccgggatcgtgaccgagaccgtgaccgagagcgtgaccgagagcgcgaatatcgtcatcgttagaagctaaacaagcattgaggaagcagcaaaca

SEQ ID NO: 842961 - DNA, 100 bp, Homo sapiens
aagaacatccgagggtgcctgggaatcggtcgcctggaggaccagtatttcccatggaggcaaaaccatattcctgctgctgtcagttttgatgcactga

SEQ ID NO: 842962 - DNA, 98 bp, Homo sapiens
aaagagatgtggggggattctcgacctgctaacagaactggaccttttcgatacacaccatctcagcaaggagtggcattcaactctggagctaaaca

SEQ ID NO: 842963 - DNA, 100 bp, Homo sapiens
aacatgcatacaaaggacacacagggattttgaaaatgctgcacatcccttaatagtcatctacatagcctgcaagtattcctgccacaagaaatgtgaa

SEQ ID NO: 842964 - DNA, 98 bp, Homo sapiens
cctcgggatgggaaagatgccttcaaaatcgaatgcatgggaagaaacttccatgaaaattgctacaggtgtgaggcccaaaacatgctgaagaaggt

SEQ ID NO: 842965 - DNA, 99 bp, Homo sapiens
cagctgcagttccaagctagagagtattctggagcaccttattcccaaagggcagaggagatatggaacagaatgactctgacaaccgtagaataattc

SEQ ID NO: 842966 - DNA, 101 bp, Homo sapiens
ggctgagtaccgcggcgggcgcgagcgaggcgccctagacatcttctccctcccttgcctcagctcctactcagactgttactctggtgacacaacctgtg

SEQ ID NO: 842967 - DNA, 98 bp, Homo sapiens
acatgcctctgacaatctctagtggttacacatcattttggaatgactgtatatcatctggattacgtggctgtatgttaattgaattagcattgaga

SEQ ID NO: 842968 - DNA, 98 bp, Homo sapiens
aaagtccgattgtagtggtgctcagctgctttcaaaattgtgaaaacctggcttggtccagaagcagtgagcttgttgaagtttacaagcaaaaatga

SEQ ID NO: 842969 - DNA, 100 bp, Homo sapiens
cagcatgcctcaccaagtcacatgacaagcattactccacaggatccgctgaacataggatgttgccacaaaatctacctcgtgtatttttctctttcac

SEQ ID NO: 842970 - DNA, 98 bp, Homo sapiens
gcaagctctgcagaaagacttaaacctcatggccccaggtctcactatacaggttaccaaagtgacccaggtagatggaaacagccccgtcaggtttt

SEQ ID NO: 842971 - DNA, 100 bp, Homo sapiens
gccaggacggcgagggggacacgaggaaagactagtcgagagacagaccccccccggaattctgagcaccaaaaggttccgtggggaccccactgcctgg

SEQ ID NO: 842972 - DNA, 100 bp, Homo sapiens
gaaaacctttgaccatgaagagaaatgagatgatagccaaaccctcaggtacctcaataataatgagttgacagcggtaccatccctgggcgctgcttca

SEQ ID NO: 842973 - DNA, 98 bp, Homo sapiens
gatgtgactcgtcggcgaatgcaattaggaactgttctgccggaatttgaaaagtgcctattgtgaatcggcacggtcctgaggcagacaggcattta

SEQ ID NO: 842974 - DNA, 98 bp, Homo sapiens
gaggagcgcggccagccctgctcgcagaattaccgcctcttctttagcagtggagctactgctgtggttcaggcagccctatgcaaacccaggcaaga

SEQ ID NO: 842975 - DNA, 101 bp, Homo sapiens
agctcttgggtttagcaaaagttcatctccttctgcatccttaactgagaatgagggattaaagcctgtggtttccacagaagcaccacctatcatatttg

SEQ ID NO: 842976 - DNA, 100 bp, Homo sapiens
gagagcaccccttttaccactgcctggttgcagaagtgccgaaagagcactggactccggaagaatagcattcctttcgaacaccacggcaagtagctgc

SEQ ID NO: 842977 - DNA, 99 bp, Homo sapiens
ggatctggacacccagcggtctgacatcgcgacgctgctcaaaacctcgctccggaaaggggacacctgctctactgagatgaagaaagaaaaagaata

SEQ ID NO: 842978 - DNA, 99 bp, Homo sapiens
accgttgtcctacttccagaatgcacagatgtctgaggacaaccacctgagcaatactgtacgtagccagaacattcagaagattctcggccttgcccc

SEQ ID NO: 842979 - DNA, 100 bp, Homo sapiens
cctacgatgagaactggttctacacgcgagctggtccttccatagtgacgccccccaaggacatctggaatgtcactggtgcccaggtgtacttgagctg

SEQ ID NO: 842980 - DNA, 100 bp, Homo sapiens
aactggctcccaatgatagatgttgccgtgtgtgtggaaaaataggccactacatgaaagactgccctaaaaggaaaagcctacagggagcccttcgagc

SEQ ID NO: 842981 - DNA, 100 bp, Homo sapiens
atggattgtaccgctgtgagaagtgcgacaccgaatttcccaatttcaagtaccgcatgatcctgtcataagcgcaaagcctcagaagacctggaacaag

SEQ ID NO: 842982 - DNA, 98 bp, Homo sapiens
ggaggccggccttcgggctccatggacgggcgccgcgtccctgcacagcccgccgcagaggcagtggctctgccaatgatcctgtgagtattcaggaa

SEQ ID NO: 842983 - DNA, 98 bp, Homo sapiens
cggaagggtctttgttccctgcagccctcccacgtttgatggtgacagtgcctacgtggggatgagtgacggaaacccagagctcctgtcaaccagcc

SEQ ID NO: 842984 - DNA, 100 bp, Homo sapiens
tggccctggagcagtatgccagcaagaaagctgtatgtgatggcttctgtgtttgtctgtctactcctttctggattggctgtgtttttccttttccctc

SEQ ID NO: 842985 - DNA, 100 bp, Homo sapiens
agctaccaccgctacctctgtttgcccttctcctttcaaaatgaagcccataggacttcaagagagcaattttccagattattcaaagtatcaggatggg

SEQ ID NO: 842986 - DNA, 101 bp, Homo sapiens
aaaagatacccagaatgcagagatttgagcagctgcaattctcattgcaagatcatcgcctccctggtttatagtagacagaccttttctgtttttcatcc

SEQ ID NO: 842987 - DNA, 99 bp, Homo sapiens
gtaaaacagggtgatttcaagagacacagctcttgaatcagccagtcagttggtgtaaagttgaggcaatggctttgaaaccagacctggtgaatgtaa

SEQ ID NO: 842988 - DNA, 105 bp, Homo sapiens
cagagacattgccagagcaaacaagaacagaaatacaaatggagaactggtcaaaagtgaattttgaagattgcaccggtcgacaaaggacagcctatttttccc

SEQ ID NO: 842989 - DNA, 98 bp, Homo sapiens
aacagatgactacccagggagaggaattacgggaacagaaagaaaagtccgaaagagctgatgtaaggctacgaaaacttgctggagagaaggaagaa

SEQ ID NO: 842990 - DNA, 98 bp, Homo sapiens
gctgatgctttgggaagtatgttaatttcatggtacatgagtggctatcatactggctattatatggaaattcgaaatgagtcccatgactatcctca

SEQ ID NO: 842991 - DNA, 100 bp, Homo sapiens
caaaggaagacttgtaacctggagaagaggcaaaaatctccagccctacagagactgagcggtgcatcgagtccctgattgctgtcttccagaagtatgc

SEQ ID NO: 842992 - DNA, 98 bp, Homo sapiens
ggccggggcgccgctggcaggagcgcttggggatcctccaagggatcgcttacacctgagacgaactacagaacagcacgtaccagaggtggaagtcc

SEQ ID NO: 842993 - DNA, 100 bp, Homo sapiens
ctttgtggaagttttagatgagtatttcagccgagtggcgagacttgaaatctgtgctttgagggacactgtggctgtttacctgacacccgaaagcaag

SEQ ID NO: 842994 - DNA, 100 bp, Homo sapiens
tagattcatcagcaactcctataaacacagtggacgtcaataatgaaagctcttcagagatggagtcctcctctgtcacccaggctggaacgcagtggta

SEQ ID NO: 842995 - DNA, 98 bp, Homo sapiens
acgtcccgctggatctgacccgaggaagaaggtagataatgactataatgcccttcgagaaagactcagcaccttgcctgataaattgtcttataata

SEQ ID NO: 842996 - DNA, 100 bp, Homo sapiens
aaaagaaaaggtccaaactcctatctccttacagcccgcagacacaagctaacaacacagatcccatgtagttggagaaccaaaggccacatacatgaca

SEQ ID NO: 842997 - DNA, 99 bp, Homo sapiens
cgaagttggaagtgtctcttagcagcgcgcggagaagaacggggagccaggcaagccggtatattcggggcccaggagcaaggaaaagtggccttttgc

SEQ ID NO: 842998 - DNA, 98 bp, Homo sapiens
tcactgcaccttaaaaacaaaagattgagctgcactgtattcctttctgccacagaaagggatgaatggctagaagcgatttccagggcaatagaaga

SEQ ID NO: 842999 - DNA, 100 bp, Homo sapiens
tgatgcatccagaagactctgtggtttcctcaaaagtcttgtctgaagctggaatgtgagaaactcgccagtgagaagacagagatgcagcggcattatg

SEQ ID NO: 843000 - DNA, 100 bp, Homo sapiens
ggtggtgtccacggagatgcagagctccgagagtaaggacacctccttggagactagacgccagttagccttgaaggagtctactcttcatcttgtgttg

SEQ ID NO: 843001 - DNA, 98 bp, Homo sapiens
ctggagctcataacccctactccacagctgtgagtacctcagctattgacctgaaaagtggttctggaaaagtgtaccaaggccctgcaaaaggtgct

SEQ ID NO: 843002 - DNA, 100 bp, Homo sapiens
ttcaagcccagctagaatcagagaaaaataggctgtgtaaactggaggatgagaacaataggaaacagagcaaatgcagcgttacaatcaaagacttatt

SEQ ID NO: 843003 - DNA, 100 bp, Homo sapiens
gttattttcccaatttttgctatactcctgttctggggacagtttggtattaaaatattgactcggagacaaaaagaggccaagaccaagagtgacagtg

SEQ ID NO: 843004 - DNA, 98 bp, Homo sapiens
ccgaccaatacactgaggccctggcccagagggacaagtgctgtgaacctccctgctgcagccttggggatgctgtttggaggaatcctcatgaagcg

SEQ ID NO: 843005 - DNA, 98 bp, Homo sapiens
tgaagcgctacatcatagaacacattgaccttggggcctattattaccgcaaattcttctatgggaaagttctactcagtgaatgtggattacagcaa

SEQ ID NO: 843006 - DNA, 99 bp, Homo sapiens
ctgaaaaaggatcctgactgaaagctagaggcattgaggagcctgaagattctcaggaagggaaaaggccgaggcatcagcgtgtgaagaccgcaaaga

SEQ ID NO: 843007 - DNA, 100 bp, Homo sapiens
ccatggctctggtgctctgggaaatgacatctcgctgtaatgcagtgggaggtcgttgaggacttccacatggagattggcacaggaccagactcaagac

SEQ ID NO: 843008 - DNA, 100 bp, Homo sapiens
accgtgttcttcgacattgccgtcgacggcgagcccttgggccgcgtctcctttgagggtgtgggccgaagatatgctcatgtggtgttgaggaaagcag

SEQ ID NO: 843009 - DNA, 98 bp, Homo sapiens
ataattttgatgacatcaagcacacgactcttggtgagcgaggagctctccgagaagcaatgaggtggccatcaagtcaatccggaaggacaaaatca

SEQ ID NO: 843010 - DNA, 100 bp, Homo sapiens
tttgcttcagactttgaaggcattgcagacatgccatctgattttgagaagggtacgaaaccgggaagaatgacatctttggggagcctctgaacctgta

SEQ ID NO: 843011 - DNA, 100 bp, Homo sapiens
agatgcaaaacccaaagatgttgtggcagcagggagtgtggaaatgatggtgtttgtggtggcgctggtgggcattgcccgggccgtggtatccatgacg

SEQ ID NO: 843012 - DNA, 98 bp, Homo sapiens
gggagccgagtttatctggagtgtagagtcactggaaaccccactcctcgagtcagggctcgtgcaatccgcttcagacaggatggtaacgaagccgt

SEQ ID NO: 843013 - DNA, 100 bp, Homo sapiens
ggtactgtccaagaagctggaacattattatccagcaagaatgttcgtgtcaactgtttggacgagacttcctgggaatgaaaatggttggtgagctgct

SEQ ID NO: 843014 - DNA, 98 bp, Homo sapiens
aatgccagcaaccagaagcagacttatacagagattcagttgtggaaattctttttgaacaagataatgaagagcaatcagttgccactttaatattg

SEQ ID NO: 843015 - DNA, 100 bp, Homo sapiens
gttcacagacctcagtctctacagtggcatattgaatgttcatcccagttgcctcccgagatggcgtggcccagcccctgtaatccatacagtgcttcac

SEQ ID NO: 843016 - DNA, 100 bp, Homo sapiens
gtcggtggagagcgcggggacgctgccgtgcgcgccagagatcccagactgcgtggagcagctgaatatctgtattctacacctgaacagctttcaaaaa

SEQ ID NO: 843017 - DNA, 100 bp, Homo sapiens
ggaaaaaaagaagaagcttatgagtttgttcgtaaaggacttcgtaatgatgtcaagagtcatgtctaaacttttcagagtcattgctcctcctctgaat

SEQ ID NO: 843018 - DNA, 127 bp, Homo sapiens
gcacgattggatttgccgaagattaggaagaatccactgatagaaatcatttccatcaataccggggaaacagtgcttcttagtcctacgtcagcagcagtttaatgtccaggctcttgtggcggtg

SEQ ID NO: 843019 - DNA, 100 bp, Homo sapiens
aggactgcctcactgagcaaccaagactggttcctatgtagctctcactgttcagggacgcccacctgggtcgccccagattccacttgccgactctgaa

SEQ ID NO: 843020 - DNA, 100 bp, Homo sapiens
tggagctgtgccagcctgacatggcccggaagcaggagatcattaagaccacggagcagctcatcgaggccgtcaacaacggtgactttgaggcctacgc

SEQ ID NO: 843021 - DNA, 100 bp, Homo sapiens
agaaccatgctcaccgaccctggtcctgaggacaccgtgagccagccaggcctggccgctgggcctgaccggccccccagcccctacaccccgcttctcc

SEQ ID NO: 843022 - DNA, 99 bp, Homo sapiens
cagcggcgcccctgaaagtgtgcatcgtgggctcggggaactggtacagagtgaagacagtgtcctcctgtttgttattgcatggacgatcacggaaat

SEQ ID NO: 843023 - DNA, 98 bp, Homo sapiens
cggatcggattcctcagctacgaggaggcgctgaggagaggtgtacaacccgagaataagagcaaactcgctcgtcatgcagcccatcagccagagcc

SEQ ID NO: 843024 - DNA, 98 bp, Homo sapiens
ccacgctcagcagcatcagacacatgatccgcaagaacaagtaccgccccgacctgcgcatgagggctctgaactcctacttcgagcctccggtggag

SEQ ID NO: 843025 - DNA, 100 bp, Homo sapiens
gctgaggagccgctgctgggagacagcgcagccatagaggaagtggctcccagccccattgccaataccttcctccactatcgaaccagcaaggtgaggg

SEQ ID NO: 843026 - DNA, 99 bp, Homo sapiens
ttttgtctgcccctattgtaagtgcagatggaacacaacaggaagctgtagagaaatatgaagaagtgctacataatttggaatttgccaaggagcttc

SEQ ID NO: 843027 - DNA, 98 bp, Homo sapiens
cggcgcccggatgggcagctgagatcacccggaagttcaggctgaattctgaaggcaaacttgagcagacggtctccatggcaaccacgacacagcca

SEQ ID NO: 843028 - DNA, 100 bp, Homo sapiens
actcaggattgtttctcttctgttagtagagcaccaaaagagtctcctgcaatgattcagacttggctttactggcttcttccatagataagcaccagcc

SEQ ID NO: 843029 - DNA, 100 bp, Homo sapiens
aggaaagcaaaggagtcagggatggctcttcctcagcaccttgcagagtgaagtcaagcccatcctagagaagctgacccaggaccaggatgtggacgtc

SEQ ID NO: 843030 - DNA, 98 bp, Homo sapiens
taaggctgaaatcattgaagtgcttggagtgcagaactgaaagagctgatgaacttattagtcctaaagacattgatcctgtccagcgctatgtccca

SEQ ID NO: 843031 - DNA, 98 bp, Homo sapiens
acacagagattcagatgcaagtgagacagtctgcctgtgtaaccacttcacacactttggagttctgatggtactttttgatcatatgggatgtctga

SEQ ID NO: 843032 - DNA, 100 bp, Homo sapiens
gatgggatctgcactgtaactgctggacccaaggacatggtggtcggggacacacaaatgtctgatggtggcccaggagggctgtcactcagaatcaggc

SEQ ID NO: 843033 - DNA, 100 bp, Homo sapiens
atgagtgatgacaaaccctttctatgtactgcgcctggatgtggccagactcaccccacacagaccgcgtttctctccagtgtcgacctacacactcact

SEQ ID NO: 843034 - DNA, 100 bp, Homo sapiens
agctcagcatggtcatcctgctgccggatgacattgaggacgagtccacgggcctgaagaaggattggccatttgatgatggagctccaccccctaatca

SEQ ID NO: 843035 - DNA, 98 bp, Homo sapiens
tgaaggaagagtctgtcttccgggaaagtatggaaaacccaaattgcctggtgtgtccgtttctctggtgaatccccagccatccaatggccacttct

SEQ ID NO: 843036 - DNA, 98 bp, Homo sapiens
agggattaagaaagttctcggagtacctttgcaagcagctggaagatgagctggtgtcactgcaaaagaaactcaagggcaccgaagatgaactggac

SEQ ID NO: 843037 - DNA, 99 bp, Homo sapiens
ttcctcccagcagctgttccagatcgagatgggaattccaatttggaagaggcaggaaagcagcctggccctcgggaccaaggatcacgtcatgactcc

SEQ ID NO: 843038 - DNA, 100 bp, Homo sapiens
ttatgtgaccaaaaaaagaaacaactagaagatctcagttattgtcgagaagagagggctcgtcggaaaaaaagttctgctagaaaatttggtctacaga

SEQ ID NO: 843039 - DNA, 100 bp, Homo sapiens
gcaaaggacaaaagatctttctcgggtgtttcattcttacagtccatatgatcacaaggtccaagcagctcagtctgaggctaaggttgtatctcagtat

SEQ ID NO: 843040 - DNA, 100 bp, Homo sapiens
tctgcagggcctgggccgccgctgctacctgcagcgccgtgtggcacgacacaaaaatcagaatccacattcatctcaatggaaggatcctgccttaagt

SEQ ID NO: 843041 - DNA, 98 bp, Homo sapiens
ctatcttctgagcgtgtgccagaagatccagctttgttgaaaagcgaagccgttagtcccttaatacaaaggttatggagaaaacttgtatagatgca

SEQ ID NO: 843042 - DNA, 98 bp, Homo sapiens
gtcagagggcttttactcctacctgtgtaccgagccagccttctactagtcgaaagcggccccgtgaaggggaagccgagggtgccgagaccacaaag

SEQ ID NO: 843043 - DNA, 100 bp, Homo sapiens
aaggcaacctgcagcgaaagcaaggactcagggaaccggcagacacaagcaggcaagaaattatagagcagcttctatcaaatattttccacaaggagaa

SEQ ID NO: 843044 - DNA, 98 bp, Homo sapiens
gaagccatatgctgggattctctctgaaagtatgaagcaggttatcaatactctggctgaccatcatcatcgtgggactgactttggtggaagtcctt

SEQ ID NO: 843045 - DNA, 98 bp, Homo sapiens
gaagaaaataagcagcaacccaaatcctgttgtccagatgtcagttgggcacaaggcccaggagagcaagggactgttgacattcagggatgtggcca

SEQ ID NO: 843046 - DNA, 100 bp, Homo sapiens
tcatagattgtgtaggcgttggtcttctgatagcaactttaatgtgggacctccgaaacaatcttattagtagtatagatccaggtgccttctggggact

SEQ ID NO: 843047 - DNA, 100 bp, Homo sapiens
ctcttggtcatgtgaactgcacgataaaggaactcaggcgcctcttcttagttgatgatttagttgattctctgaagggctgtacaaaaggtagacataa

SEQ ID NO: 843048 - DNA, 100 bp, Homo sapiens
cttctggccaggcgtctgcgaaatcatatggctgtagcattcgtgctatccctgggggttgcagctttgtataaggaaatgaatggggtgctgaaaggaa

SEQ ID NO: 843049 - DNA, 100 bp, Homo sapiens
aaaattcaggcaacgcctcgcgttgaaaacaaccctttttgctgcacatgtaagtggagctgtgcttacctttggtatgggctcattatatatgtttgtt

SEQ ID NO: 843050 - DNA, 102 bp, Homo sapiens
tttgtgaacgacattttcgagcgcatcgcagatgaggcctgcctgtgttaatacacctagtgaggagtggagctgaatttgaatgcaagccttggcacctta

SEQ ID NO: 843051 - DNA, 99 bp, Homo sapiens
gaacacaacctgttcaagcaacgactagataaagatggcatccccgtgagctcagaggctgagcggcatgatgaggacggggacttggttgccttttcc

SEQ ID NO: 843052 - DNA, 100 bp, Homo sapiens
ttcaaaaggacattaaggatctgggagggaccttgccaccatggaagaaagagtacaaagacgatattatgaaaagctgacggaatttgtggcagatatg

SEQ ID NO: 843053 - DNA, 100 bp, Homo sapiens
tcaaaactgaaggagcagaggcaactcctggagctcaggttgcatctggaggtggtggggttggagatggtgttcaagaaccaaccacaggcaactggag

SEQ ID NO: 843054 - DNA, 100 bp, Homo sapiens
tccctgcggatgctttcactctcagcaactttgccaccagcagccacaacagatcagctctttcgacgtgtagcagcagctttgccgggaatggaaagca

SEQ ID NO: 843055 - DNA, 100 bp, Homo sapiens
aggccgggacttggccgagcggatcctaataaggggaaaatggctcacagaacatttcctgcctgttgctcacactctgttgtccacagcatacccgcac

SEQ ID NO: 843056 - DNA, 99 bp, Homo sapiens
aacaatgatagcaaaggctttggccaatgagagtggactgaattttctagctataaagtttgtggggacattcatggacaattctttgatttgatgaag

SEQ ID NO: 843057 - DNA, 100 bp, Homo sapiens
gtacctgttggtctcagatctcctgaacctgtttctgctcagattgaggaaacaatggaagagggtatgggatgatgggatcattgatccagcagacacc

SEQ ID NO: 843058 - DNA, 100 bp, Homo sapiens
ggcggggcccaggtgagaaaggcccacctgtgtcctggttgagggtctccagggttctttggggcccgagttaataacgacatgatagtcactgacaaca

SEQ ID NO: 843059 - DNA, 99 bp, Homo sapiens
ccccaaattctcgtttcttttcggaggcgaattctacagttactacaagtgcaagctggcgctggagcagcagcagcgggcttgcttctgacatgtctg

SEQ ID NO: 843060 - DNA, 99 bp, Homo sapiens
ccagaggtcgtggaggtggccgtggaggcagaggtggcatgggctttgcatgttcaactgtcgttcgagcctatgtgctgctactaaggagctaccagc

SEQ ID NO: 843061 - DNA, 100 bp, Homo sapiens
ttacttcttcccgtaatacctttgctcaataccaatatcaacatcagaacagatctgagcaggactttggcattatgttcctgcaccaccttgtatctat

SEQ ID NO: 843062 - DNA, 99 bp, Homo sapiens
gagagtgtgcggctccaggtgggctcacgcgaaggagctggcaaacagccctgactgtccccagatgtgtgcctataagctggtgaccatcaaattcaa

SEQ ID NO: 843063 - DNA, 100 bp, Homo sapiens
ccagagctgaggactgcctgtttgcagctcaacgggacccaggtggagtctgtacagctcaaagtcaacatagcccgaaaacagcccatgctggatgccg

SEQ ID NO: 843064 - DNA, 103 bp, Homo sapiens
ctggcgctcggcgttccttgtctgcctcgctttctccttggccaccctggtccagcgaggctttcctcggagacgggtggcatggggagcagctagaacaatg

SEQ ID NO: 843065 - DNA, 100 bp, Homo sapiens
tttatccacctttgacttcatccttagaagatttttgttcttctttaaattcattttcaatgagtgaatccaaacgagctggattgccttttgcaattct

SEQ ID NO: 843066 - DNA, 98 bp, Homo sapiens
ttcacggagctctggagaaacatgaagttcgggactatcttctgagtaatcaagtcagaggattatatgacttttatctgcctagagaagaactatgg

SEQ ID NO: 843067 - DNA, 100 bp, Homo sapiens
tagaagagaatggaattgaagtttcaaaaaaacgcacacaatcagatactgaatggactgctgaattatgaagtatttcagacccagtagtagaacatca

SEQ ID NO: 843068 - DNA, 98 bp, Homo sapiens
tcagcacaatgacattgacaaacgggctctccaggcagcaagacaacttcttttacagcagcaaacaagtggattgaaatctcctaagagcagtgata

SEQ ID NO: 843069 - DNA, 100 bp, Homo sapiens
acctgcctgggcatagacttccttaagccaatatatcaattgtagatatagatactaatcaggaggagaatatagcaacttcgtcttctggaaacaactt

SEQ ID NO: 843070 - DNA, 98 bp, Homo sapiens
tccatcaagggagaaatccgaaaacaggcactggaccacttcaatgcagatgggtctgaggtctgccatgtgaatctggaggggcagccgttctactc

SEQ ID NO: 843071 - DNA, 98 bp, Homo sapiens
gacatgcatgaaaggcacctgaaagcgtctctagcagctgatatccccagacttggatatagttcctcatcccatcacaagtacatcccccggagggc

SEQ ID NO: 843072 - DNA, 98 bp, Homo sapiens
agcactcaagcagcaggagcagcccgcggcgaccaagatcaggaacctgccctgcacgcactcctggctttaaagtttatacttgcatttgccatacc

SEQ ID NO: 843073 - DNA, 99 bp, Homo sapiens
tttaacatttgataacagtcaaaataataatccattggcattaatggcccagtaccagcttgataaagatgacatggtatacatggaagcatatgataa

SEQ ID NO: 843074 - DNA, 99 bp, Homo sapiens
gcagcccccagccttgcgcgtcgtcgctacctcctcggacaggggacaagggcctgtccgacacgccctacgacagcagcgccagctacgagaaggaga

SEQ ID NO: 843075 - DNA, 100 bp, Homo sapiens
tccgatgcaccctttttgtcagattatcaggatgagggcatgaacaaccgggaggtgctggagcaggtggagcgaggctacaggatgccctgcccgcagg

SEQ ID NO: 843076 - DNA, 100 bp, Homo sapiens
ataacctgaggagccgggggaagctggccttggggagaccagcgcagcggtggggtcactgaggccagcagcctcctggggggctccccgaggcgtccct

SEQ ID NO: 843077 - DNA, 99 bp, Homo sapiens
ggtgaccatcaaatctgtctgcactccaattctaccaggatggctctcttcgctggtggcaaactgggtggtgacttcacacgccataatggcactggt

SEQ ID NO: 843078 - DNA, 100 bp, Homo sapiens
cctccgcagcgacaacatggaggccgtgaagaccttcaatagcgagcaacatggccaatctttcctaagctgctcagcttacaagaaaaggaatcatact

SEQ ID NO: 843079 - DNA, 100 bp, Homo sapiens
attgaatttaaaacacgtctgggtgccatttcaaaattaaaaagtcaacaccaagaggacccaaataacacttcacttctaacaaacaaaccagcacttc

SEQ ID NO: 843080 - DNA, 124 bp, Homo sapiens
ccgcgtcccgctcgctgggagagaggtacctctccttttccctctccctttccctaagctccttccagggagatactacagcaaaccttttgttacatttcatcaaatcaatgcctttgaggac

SEQ ID NO: 843081 - DNA, 98 bp, Homo sapiens
gtgtgtattccatgtgaggggaagggtccaacagtcctggtcattcagactgcagttccccagcaagatggattctggatatactctgagtattgtaa

SEQ ID NO: 843082 - DNA, 100 bp, Homo sapiens
agacagctggtgtctgaagccgctcgcgcccaggacaaatatacgtgtatgttcacttacgcctctcaaggagggaccaatgaggtgagttgttcaaaat

SEQ ID NO: 843083 - DNA, 100 bp, Homo sapiens
gctggagcctgtccgaacgctttgggctgttaggggaaaatatctaaatgtggtcagagagtgtggccatgacgtcacctgcccggtggctaaagagatc

SEQ ID NO: 843084 - DNA, 100 bp, Homo sapiens
gcaggaccgcggggagctgaagctgctgcttttgggtgaaatgacaatggatgctctgttggctcgattgaaacttctgaatccagatgaccttagagaa

SEQ ID NO: 843085 - DNA, 100 bp, Homo sapiens
ggccagcccaagtcggcccattccccgtttgcctcggaagtgagcagctactcttacacattggggctttccagctctcacagaaccttcagcatcccca

SEQ ID NO: 843086 - DNA, 100 bp, Homo sapiens
cggcgtacgccctcatggggaaaatctccccggtgactttcaggttgttcctggtcattgagtacgtcaacggcggggacctgatgttccacatgcagag

SEQ ID NO: 843087 - DNA, 100 bp, Homo sapiens
aaccgacctggagacagaattcttgacatagttgagccccatatgggggttggcaggcagcagagaggcccctttcaaggtgttcgggtaaagaactcag

SEQ ID NO: 843088 - DNA, 128 bp, Homo sapiens
cgcagccgagcggccgtgggcccgggcggcgggcggagacgtgggcgccctccccgccaaggcccgtgcgagcacttgctgtcacctcagcgggccccagagaggcttattcagctggcagagggcaa

SEQ ID NO: 843089 - DNA, 98 bp, Homo sapiens
tccggccaacttccattgaacttcccagcactcgaaagggaccgaaatggagagcaaagtatggtttgaagtggtgaacatggatttttctcggcttc

SEQ ID NO: 843090 - DNA, 98 bp, Homo sapiens
caaataaaatagccatctcacctttgaaatcgccaaataagctaaaagatggcggcaaggcagcccaggcaaatgtaagaataggcgatgtggttctc

SEQ ID NO: 843091 - DNA, 100 bp, Homo sapiens
ctgaagaaggccgcctatgacatcgaggtcaacacccgccgagcacaggctgacctggcctatcagcttcagatctggtgctctcatgaaaatctacatc

SEQ ID NO: 843092 - DNA, 100 bp, Homo sapiens
gtgaacttttcgaggcatttgacttgtttgatgttcgtgactttggaaaggttattcaagaagcccaagcgaaagacctgctgagaagaccatttgattt

SEQ ID NO: 843093 - DNA, 100 bp, Homo sapiens
aacttcccaaggaaagagaacgaatcgaaggacttggtgggaggaggcaagtgaggcctatctggttggcctttttgaagacaccaacctgtgtgctatc

SEQ ID NO: 843094 - DNA, 100 bp, Homo sapiens
cagagccatccttcgggagaggatatgtagcgaggaggaacgcgctaaggcaaagcacctggaacaagactgccaatggagactgccgcagagacccccg

SEQ ID NO: 843095 - DNA, 99 bp, Homo sapiens
agctagccatacccaaccccaggaaggaaggccttggatggaccctcagattgaaggacccggtggaccttgggaagtagaagcatttagcccatccca

SEQ ID NO: 843096 - DNA, 100 bp, Homo sapiens
ctctaatagaaagtggatgggcacaaaatccagatgaaagaccatctttcttaagggtggcactgaatcaacaagacaagcaactcaattgattaatgct

SEQ ID NO: 843097 - DNA, 98 bp, Homo sapiens
actgaggcatctacttgtgagtaatgtgggaggagatggagaagagattgaaagattctttaaattacatcagtcggatatgttgcggtcactatcta

SEQ ID NO: 843098 - DNA, 101 bp, Homo sapiens
cacaggaggctgtgcgggccccgctccgcttcgaatggatggagaacatcattgcaacagtaagagattccaacctcaagctgacccttgctttcgggata

SEQ ID NO: 843099 - DNA, 100 bp, Homo sapiens
gaactgtgagggtgtttgatctcatgggaagtgaactctttgtcatttccccggataaaaactttgaatctggtcctaggattaaaaagagcactggaat

SEQ ID NO: 843100 - DNA, 100 bp, Homo sapiens
gcagcgacggcgtcgggagagcgcgcctagccggctcgcgagttttcaaatggaacattttgatgcatcacttagtacctatttcaaggcattgctaggc

SEQ ID NO: 843101 - DNA, 101 bp, Homo sapiens
agtgaccgaaggctccgctcacgcccggatacactctgtgcagttttagagagagacacactcagtattcgagaaagtcgactttttggagctgttgtacg

SEQ ID NO: 843102 - DNA, 100 bp, Homo sapiens
tttagaagctggggcagatcctaatgcaactactttagaagaaacgacaccattgtttttagagtcaagaattgaaggttggctttcagtaccaaataga

SEQ ID NO: 843103 - DNA, 100 bp, Homo sapiens
tctccccttgtggaattacaagagatttcgactgtggaaggggactcattctcacagttccggtttgctgaggagaaagaatgggatagtgaagcttctt

SEQ ID NO: 843104 - DNA, 98 bp, Homo sapiens
aagtctttcctggcagatgccggctatggcgaacaggaactggatgccaactctgcccttatggaattggacaaagcttagaccatgctcagcctcca

SEQ ID NO: 843105 - DNA, 100 bp, Homo sapiens
tgttaaccaaagccagcctggcatactttgaagatcgtcatgggatcgaagccgcggtcaaggccgccagagaagcctttcccagctggtcatcccgcag

SEQ ID NO: 843106 - DNA, 100 bp, Homo sapiens
ggctcaagcagtcctcctgcctcagtctcccaaagtgctggaattacagggccagcgtcccatgctcggtggccccagaaaagtcagtgtgtaggcctca

SEQ ID NO: 843107 - DNA, 99 bp, Homo sapiens
cttccccagccacgtggaactattggtgctggtgaagagaagcaaaaggaaggaggcaaaaagaagaacaaagaaggatctggagatggaggtcgagct

SEQ ID NO: 843108 - DNA, 98 bp, Homo sapiens
caggaccaggcaccttctgtggaagatgccttcaattaagttgcagagttctgatggagagatatttgaagttgatgtggaaattgccaaacaatctg

SEQ ID NO: 843109 - DNA, 98 bp, Homo sapiens
aggcatggagggaggtgcttcaggaaacctgcattctcgaaaacttgttagctttacattgtcagtattgaaatggctgatggcaagtgcaggaagat

SEQ ID NO: 843110 - DNA, 98 bp, Homo sapiens
ggatgggggaagtggaagtgaaattggaatagccaggccagaagaaggaaggcctgtggtgagtgggacaggaaatgacatcaccaccccaccgaaca

SEQ ID NO: 843111 - DNA, 100 bp, Homo sapiens
cctcggtggcttccccgggtcgagcaaacaggtgcaatggatgagcttcatagtctggatccaagaaggcaagagttattggaagctagatttactggag

SEQ ID NO: 843112 - DNA, 100 bp, Homo sapiens
cttaaaaatcaccagttactttaatgactggttcgatgcccagaactgaatgctgtgctccagctgtggcctcaccggtgctgaatagagaggaagagcc

SEQ ID NO: 843113 - DNA, 98 bp, Homo sapiens
gccagttggagttgcggcggcgggaacgattgggctgagcagaggacgacatgttgcttttcgtggaggatagatcactgcgaccagaggaaattgaa

SEQ ID NO: 843114 - DNA, 134 bp, Homo sapiens
aaaaggatgccagtgtgatgtatcagtggaagacctcaccccaccacttaaaactgtcattcgagctatcaggtattctttaggtgatgctagaaggcctcttcatgaaacagcagttttggtagaagatgtgg

SEQ ID NO: 843115 - DNA, 135 bp, Homo sapiens
cgcgtccaggtggtgcctgagagcgacgtggtggaagtctacctgcaccctggagccgtggtgtttgggcggcctaataatatgtggattcgagaccatgaggatagtgggtctgtacatttggggaccccaggt

SEQ ID NO: 843116 - DNA, 98 bp, Homo sapiens
ctcaagatggcggccaatgtgggatcgatgtttcaatattggaagcgctttgatttacagcagctgcagaataatccagaatggctactctgatctat

SEQ ID NO: 843117 - DNA, 100 bp, Homo sapiens
ctcagttgacactgcagactgtctgtttgcttcacaaagtggaagtcacaattcagatgtgcagtgtaacgaaacctcattcttttttgaagctcggagt

SEQ ID NO: 843118 - DNA, 100 bp, Homo sapiens
caggagtgcattctcctggttacacaacgcataaccaaatacccagtgctggtggagcgcatcatccagaacacggaagcaacatctgaatgaattgatg

SEQ ID NO: 843119 - DNA, 100 bp, Homo sapiens
caggctcagaactggctttcaaggactttgatgttggcgatgatggagtctctctgtcacccagactggaatgcagtggcatgatcttggttcactgaaa

SEQ ID NO: 843120 - DNA, 100 bp, Homo sapiens
gtctggcaccttttaaaggtctgatcatcaattgtctctctgggcggccacctatgagacttcatctgtgtgggatccatatggctttggagacagtcga

SEQ ID NO: 843121 - DNA, 100 bp, Homo sapiens
tgcacccgaggggcgatacaagcaggatgtgtacttgcttcctaagaaaatgggcccatgaagcttcccatcaccaacagcaggcagcacagaacagctt

SEQ ID NO: 843122 - DNA, 98 bp, Homo sapiens
agagatggcttcatcgacaaggaagatttgcatgatatgcttgcttctctaggggtctcgggaacagcttgcgattgcagagtttgcaagatcacttc

SEQ ID NO: 843123 - DNA, 99 bp, Homo sapiens
caaactggaggatgcctatgtattccctggggatggcgcatcacacaccaaagcccccaaatacatcaagatgtttgtactggatgaagctgacgaaat

SEQ ID NO: 843124 - DNA, 98 bp, Homo sapiens
catactgaagtggtttgcaacatccttcttctggataacactgtacaagctttcaaagtcaatgttggtcaaagaaaaagtgatgtatgaaaaagagg

SEQ ID NO: 843125 - DNA, 113 bp, Homo sapiens
agggagttcctctgcatgggggtgatgaagacagaccctttccagggtcctatccttcccccaaagctggagcaactctggtcgtgtacaaggacttgctagtgctgtttggt

SEQ ID NO: 843126 - DNA, 100 bp, Homo sapiens
agtggagtgacccgttgccagagtgcagagagctggaagtcgagtgtgctactcaactcaggagatttggagacaaactgaacttccggcagaaacttct

SEQ ID NO: 843127 - DNA, 100 bp, Homo sapiens
aaagaagatgatgctccaagaacaatagcttgccctcataaagtaagaaacggttgaactggatgcaatttttatcacagcttgtgtaagactgcctctg

SEQ ID NO: 843128 - DNA, 100 bp, Homo sapiens
gaaagtctgaaagtggatgagcatctggccaaacaagatgcccagatgttaaaacatggccgtgctggagttccaatggaagttatgggtttgatgcttg

SEQ ID NO: 843129 - DNA, 100 bp, Homo sapiens
agatttatgtaatgtcaactttactgagaattttccacctcctgacacaacaccactcatttccacgggctcccttgctcagcagtatgcgcaccctaac

SEQ ID NO: 843130 - DNA, 98 bp, Homo sapiens
ctcttacttgaagcatgtctttcagagcccggcaccacccatcttgagtatctgattgctcgctgtaagcagctcatctgtgaccccagctacgtaaa

SEQ ID NO: 843131 - DNA, 98 bp, Homo sapiens
tttagactatttacatcgtgggttacaaccaatgaaaagaaacatttgtttgcataggaattcatgaaggcgacccaacctggaaaaagaactattca

SEQ ID NO: 843132 - DNA, 100 bp, Homo sapiens
gctggtccccgggagaccctgtgcccctaaatcgcggtccactgcgcgcgtcaggtggatggtcaaaccggagagaatgacatgaacaaacggagacgga

SEQ ID NO: 843133 - DNA, 100 bp, Homo sapiens
aggccgttcctggctttgtagctcgctcaagatggcggcgcagccaccccgcgggatacgcctcagcgcggtctcctctgagcctccggcctccataaga

SEQ ID NO: 843134 - DNA, 98 bp, Homo sapiens
tgagcgatataccattttgcaccagaactgcctgctggttgggaaaagattgaagaccctgtctatggtatctactatgtagagtaagtgcccattca

SEQ ID NO: 843135 - DNA, 100 bp, Homo sapiens
cggggcaggaggagtacctcggccaagaaaattatgcatgcgttagggaagctctgagagaatggctgtggaagcacttgctctgaaatttggggactga

SEQ ID NO: 843136 - DNA, 100 bp, Homo sapiens
tacttgaaaaatttgtgcttcatctcactgaaagcccatctgaatgctacttcccttcagtggagtatacaggtggtgcccaggcaacatgggtgactgg

SEQ ID NO: 843137 - DNA, 100 bp, Homo sapiens
acttggagaacgaacagccagtgcatttggttcccgatggccctgtgggagaacagcccttgaagaaagctgttaggatgatgggagcacctaacctaat

SEQ ID NO: 843138 - DNA, 100 bp, Homo sapiens
tgtacctacctggtgtccttgtggtctttctcaggatggcttccttctcaactgtgacaagtgcagggcccgggcatcctcctctctgaagacgactccc

SEQ ID NO: 843139 - DNA, 99 bp, Homo sapiens
ggtttggtagagtgacttctattcactaaaaccatgtgtctgaactgaagaagcttgggctcacttccacaaatttggtattgacaaagcaccaaaatg

SEQ ID NO: 843140 - DNA, 100 bp, Homo sapiens
tcagcgtgtctcatggagaaccactctgttgttagaactgtggccagagtcagccccaggtcagaatgctggtcagcagcagactcacatcccagcccta

SEQ ID NO: 843141 - DNA, 98 bp, Homo sapiens
ggcttctctggaaacctggaaggagaaggcttcatccttgggggagttttcgtggtgggatcaggaaagcagttgtggtcagaaatgagaagacatga

SEQ ID NO: 843142 - DNA, 98 bp, Homo sapiens
gtacctcccaaagtctctcacattacttttgctcacgaagttggacataactttggatccccagtggtgaagaaggtgaagtccatgcagatgttcca

SEQ ID NO: 843143 - DNA, 99 bp, Homo sapiens
gaccacttaatagtgagtcttccaaccagagcttgtgtagcgtcagatccttgagtgataaaggagtagaggttttttgtgacatcgtaaacatgagcc

SEQ ID NO: 843144 - DNA, 100 bp, Homo sapiens
gctgctccttacagatggggttggccgccgtgagaaaggatttcagatgcagtggtttgtttacggtgaagatgcaatgaccggggacacagacaaatat

SEQ ID NO: 843145 - DNA, 100 bp, Homo sapiens
atggacggagattcttcactttacagatgctccaagtcatagaaatgggaaaagcaaatggtcattcctgttcagtttgacagacctgaaatcaatcaag

SEQ ID NO: 843146 - DNA, 100 bp, Homo sapiens
ctgaacaatgccttcgaagtggctgagaaatacctcgacatccccaagatgctggatgcagagggaggacacgctctcttcatgggccatgcccggtgac

SEQ ID NO: 843147 - DNA, 98 bp, Homo sapiens
tggatggctgttaagtgtgtacaccgaacacagcagcaaatcacagatgaaggtctcattactatatgcagagggtgccataagttacaatccctttg

SEQ ID NO: 843148 - DNA, 98 bp, Homo sapiens
gtaatttcacctggcccatcaaaattcaggccgagacagcggctaacaggatatgtaaggttcttgctgtgaatcaagagaatgagaggctgatggaa

SEQ ID NO: 843149 - DNA, 100 bp, Homo sapiens
cctcagacagatcgccggggaggcagcgcgggatcccagcctcaggcgtgcgcggacggtgtgcgggaaacctaaagatttttcatgatgatggtgtatt

SEQ ID NO: 843150 - DNA, 100 bp, Homo sapiens
agcctgaggcctcggagactgaggagcagaggtctcggggtgtgaccgacaccagagaggaaatcagtacgctgaggggccaagtgggaggccaggtcag

SEQ ID NO: 843151 - DNA, 100 bp, Homo sapiens
gctcattgtagcctcaaactcccaggctcaagcagtcctaccatgtcagccttcccagtagctgggaccacaggcaaaatcctgacagatgactttgcag

SEQ ID NO: 843152 - DNA, 100 bp, Homo sapiens
tgaagaattattttgcaccactggatgttgtttactgcagcaaaccaaatcccaaccaaatatccactagtaatgggaagcctggtgctgtgaatggagc

SEQ ID NO: 843153 - DNA, 99 bp, Homo sapiens
tttgaacgcagtcgccctacagccgctgattccccccgcatcgcctcccgtggaagcccaggcccgcttcgcagatgtatcggaacagtacaacatcta

SEQ ID NO: 843154 - DNA, 100 bp, Homo sapiens
ctctgagccagtccagtatcattcatcagcagaattgggtaacctgctgactgttgaagagggtatgatctcgtgaaaccttgagagaaactgaatgacg

SEQ ID NO: 843155 - DNA, 100 bp, Homo sapiens
tgaggagcgcggccagccctgctcgcagaattaccgcctcttctttactcctcagaagaaatatcacgttaccaagaaatgattcagaaacttcaaaatg

SEQ ID NO: 843156 - DNA, 100 bp, Homo sapiens
acacacctccgacttccgcacggatgactcccagcccccaacgctgggccaggagatcctggaggggaggaagagatagtcgctctggatcacccatggc

SEQ ID NO: 843157 - DNA, 99 bp, Homo sapiens
acagcggtcgcgccggcaagagcagcgggagcggcgcggggaagggggcggtgtccgcagagcagccattgactgggttcagattgatgccaattcctc

SEQ ID NO: 843158 - DNA, 98 bp, Homo sapiens
atgattataatggacaagccaagggtaagatgatcatgcaggataaactggagaaggagcggaatgatgctaagaacgcagtggaggaatatgtgtat

SEQ ID NO: 843159 - DNA, 100 bp, Homo sapiens
gaccaggtctcatgcttggtgcctggtgccagggtgcaggagccgtgggcggacagagccagggttctctccctgttagaagtctgcgcccaggcctcag

SEQ ID NO: 843160 - DNA, 98 bp, Homo sapiens
cagcaggacaccaggacctggcctgaagacatttcctctcctcccctctggatttctcagagttcgatcctttggtacagaagacagaccgacagatc

SEQ ID NO: 843161 - DNA, 100 bp, Homo sapiens
gggccaggagagcgctcggcggggcagctgcaatgactctccgcacggtattattgtcattgcaagcactattggcagctgcagagccagatgatccaca

SEQ ID NO: 843162 - DNA, 99 bp, Homo sapiens
cagcccgggatatgagcctgtttctggggcaaaaacattcaagaatgagagcgagaacacctgtcaaggacaaaactttcggtttgaagaataagaaag

SEQ ID NO: 843163 - DNA, 100 bp, Homo sapiens
aagaaggccctgagtcaaagaagatgcctcgaactaaacaaattcatcccagaaatctaagagatctccaagaaggagaagcttctctcgcagccggagc

SEQ ID NO: 843164 - DNA, 100 bp, Homo sapiens
aagatgtccagtaatgtcccggcggatatggccaaaatagaatctgatcgagtcattggatctgtaggcaaaaaagtagtacaggagactggaataaaag

SEQ ID NO: 843165 - DNA, 108 bp, Homo sapiens
tgcggggcgctgctggcgtgtctcctcctagtgcttcccgtctcagaggcaaacttttctgtagaaaatgtttcctgactgcaatgagggaaagcggagcacattgtc

SEQ ID NO: 843166 - DNA, 99 bp, Homo sapiens
atccaacatcaagtaatgatgacagtaaatctatacttacaaggagattacgatttcggttggaacgtgcacctggtgaaactgcattgattgacagga

SEQ ID NO: 843167 - DNA, 100 bp, Homo sapiens
tctcaaagatttcatgagacaagctggggaagtaacgtttgcggatgcacaccgacctaaattaaatgaaggacttcacagagaatgcagttgtcttgac

SEQ ID NO: 843168 - DNA, 99 bp, Homo sapiens
aagttgataaagtaacagagagggcaacattaaatatcattcacagtgttgttctctcagttcttgacaaaaaccaaaggactagagaattggaagaga

SEQ ID NO: 843169 - DNA, 98 bp, Homo sapiens
gtggggtgagtcatccctactcccaacatctggaggggaaagggaaaagagtgcaaattcggaaagcacctcaagctgtttcagatacagttcctgag

SEQ ID NO: 843170 - DNA, 100 bp, Homo sapiens
catggataagcatgccctgaaaaagtatcgtcgagaagcctatcatcggttggacgtgataagtatgagcctgcagctgtttcagaacaaggtgataaaa

SEQ ID NO: 843171 - DNA, 50 bp, Homo sapiens
gcctgtggaactccaggctatgtcgatgcatcatcccattcagatgaaac

SEQ ID NO: 843172 - DNA, 100 bp, Homo sapiens
ccaggagctaaacatggaaatattcaagtgggatgtgtagactgttcaatgcaacaaggcaaggttgaatgcctttgagaacttgatgcataaaatttgc

SEQ ID NO: 843173 - DNA, 98 bp, Homo sapiens
gagtaccatcagtctatcctggcaaaacagcagaagaaatttggagaagaaattgcaaggttacagagggctcacagctcctgatgctgaaatgctgt

SEQ ID NO: 843174 - DNA, 100 bp, Homo sapiens
actacgagatgtcctacggcttgaacatcgagatgcacaaacaggctgagacccgagcagagtttgccgagaggtctgtggcaaagttggagaaaaccat

SEQ ID NO: 843175 - DNA, 100 bp, Homo sapiens
tcagggaatgtcagtgacttggcgcagactgtcaaaacctttgataaccttaaggatgagaacaagttgagcagtgccaacggccatgaagaacgtagca

SEQ ID NO: 843176 - DNA, 100 bp, Homo sapiens
cctgtgtcacctgccggacccccagaaggggtccctgaggaggctcagcccccacggctgggccaagagagagggaagaaggagaaagggccaacccctg

SEQ ID NO: 843177 - DNA, 100 bp, Homo sapiens
actcactctcccagccatctgcctccactctgcttaggaccgcagactgatacctcaggagtctagacccacggaatctctattgacctgaaaagtggtt

SEQ ID NO: 843178 - DNA, 100 bp, Homo sapiens
accggctgttcgaggccttgactgtaggtctcctctgagcctccggcctccataagacccaaaacagatgacacctcttcccagtcccccgcgccttccg

SEQ ID NO: 843179 - DNA, 99 bp, Homo sapiens
aaactgaagcagctccagcccatgtttctgaagggttaccgctgacaagaagcacagaagaccccagctcaggaatgtaagccagctgattttgaagtc

SEQ ID NO: 843180 - DNA, 100 bp, Homo sapiens
ttccttctgtgctcctggagcgccagggcgaagtacattagcagcattgatagcggctcaacgtgtgatattaaggctaagacatactgcatttgtaata

SEQ ID NO: 843181 - DNA, 100 bp, Homo sapiens
caagcccatatcttgccgaaatgtgcccaggcgagagcgggaagagcaccttcatcaagcagatgcggatcatccacggcgccggctactcggaggagga

SEQ ID NO: 843182 - DNA, 98 bp, Homo sapiens
ggaaacgtcctagtcaggaagaggacacacagagtattggtcctaaagtccagagacagagcactaattagggacctgttgcaatgagagtggcaaaa

SEQ ID NO: 843183 - DNA, 100 bp, Homo sapiens
attaatgttgaagattttcaaggagtgggagaatctgaacctaatccttacttctatcagtgccggatggagtgctgtgatgtgccagccgagacactct

SEQ ID NO: 843184 - DNA, 100 bp, Homo sapiens
gaggaaggagcggtgtcctcttaagaaaatggactccctggaggaaaagcggaagcggcagcggtctgaacgcctggaacggattttccaacttagtgag

SEQ ID NO: 843185 - DNA, 142 bp, Homo sapiens
gcgcacggcgggcggacagcatgctgagcctcctcgtctggatcctcactctctccgatactttctcccaagcaaatgaagctcgtgaccgagaacctgaaggaggaaccaatggaaagcgggaaggagaaggcaacctgag

SEQ ID NO: 843186 - DNA, 100 bp, Homo sapiens
atctccctgaagattatccagtggtcaaaaaaatgcttcatagactgacagagatcctgaaggagctagacgagtgctacgagcgcttcagtcgcgagac

SEQ ID NO: 843187 - DNA, 100 bp, Homo sapiens
tactttaaggaatagaccaaaaagcacagtaaatacccactatttctccatcgatgaggagctggtctatgaaaacctcaaggaataggttctcctagtg

SEQ ID NO: 843188 - DNA, 100 bp, Homo sapiens
ccagaagtccagagctgaggactgcctgtttgcaggtgtatgtgctcaagaggccttatgtggatgagttcctgagacgcatgggggaactctttgaatg

SEQ ID NO: 843189 - DNA, 98 bp, Homo sapiens
cggcggagcggccgtctcaggagccgcagcgcccgcgggcccgggtgcgggcccggcgccgcaccagcagaacgattctggacaatcaggaagtccaa

SEQ ID NO: 843190 - DNA, 136 bp, Homo sapiens
agcagttcgacttcaacgctgagccaccttgggaacctagctgatgataggggggttccatctcccaacttgtccatgagtctatggtgatgtacatcgagtgaagattatgtttaataagaaagaaaatgccttg

SEQ ID NO: 843191 - DNA, 100 bp, Homo sapiens
gcttcctgacgcagccgcaggtggtggcgcgcgccgtgtgcttggaggctggtggcatgttgtcctcaatctcgacactactatcgccatcacccaaaat

SEQ ID NO: 843192 - DNA, 99 bp, Homo sapiens
ttgttcttttcttttccatgatatcattatatggacagtttaggtactactgctaaagtgcagcagaggctgataggattcatgcgtcctgaaaacgga

SEQ ID NO: 843193 - DNA, 110 bp, Homo sapiens
caagcttgggtccccggcctcgcgcccaccttgctgttcagcctgctggctggcccccaaaagcaagagtgagccatggagctacgtgtggggaacaagtaccgcctggg

SEQ ID NO: 843194 - DNA, 100 bp, Homo sapiens
ttcagccaagcggcctaaactctcatctccggccctctcggcgtccgccagcgatggcacaggttaaagctgaagctcaacaaagatatagtgatctctg

SEQ ID NO: 843195 - DNA, 138 bp, Homo sapiens
ccttacacagtaccatggaggatccttaccaaatgtgagccagctgcggagcagtgcgtcagagtttcagggaaatcctcattgacgattcaatttgttgaaggccaatttgtggactcctacgatccaaccatagaa

SEQ ID NO: 843196 - DNA, 100 bp, Homo sapiens
ggagatgacccagaggatgccaaggcaaagctggatgaaaaagaaagtcggcgtctgttccaacagatcctttctggtgtggattattgtcacaggcata

SEQ ID NO: 843197 - DNA, 51 bp, Homo sapiens
cctgaacggagtgtgcgacggattgggagggatcccaacggcttcaatgac

SEQ ID NO: 843198 - DNA, 100 bp, Homo sapiens
caatagactgtctacaccaatagcaggattgatggagtcgggtggtacagttttgagtaccaactggtctgatgtaggtaaaaggaaagttgaaatcaat

SEQ ID NO: 843199 - DNA, 99 bp, Homo sapiens
ttgacaaccaagggcctccgtctggatttccaaggaagaatttcctctgaagcaccggactcctcctattttgaggacttctccaacatctccatcttc

SEQ ID NO: 843200 - DNA, 132 bp, Homo sapiens
ggcttcaagaagacgataaaaacattggacaatcgaattcttgttattacatccaaagcagtattctaccttgtaaatactgttatttgtatatactgtaaatgatgacatcggtgggcactaaccgagccc

SEQ ID NO: 843201 - DNA, 99 bp, Homo sapiens
aagcactctaagtttgaactcggagtcaaccagctctagacataatagtgaaagtgaatctgtgccatcgaatgatgaggagtctgatgaggaagctgt

SEQ ID NO: 843202 - DNA, 100 bp, Homo sapiens
caattattgacttatatgaagaaatggggaaagtcaagaaaatagatgcttctaaatctgttgatgaagtggacctgcccatgggtggagtgaaggcttt

SEQ ID NO: 843203 - DNA, 100 bp, Homo sapiens
cacacctggcctgaatggatccctctgcctttcagagatgggagcttgcctgattgtcaacccatcggcctggaccccagagcccacccagttgagcgtg

SEQ ID NO: 843204 - DNA, 100 bp, Homo sapiens
atcctggacttccagagccggaacgtcatccctgatatccctgaccacttcctgtgtctgtgggagcactgtgagatggaattggctgctctagaaaaaa

SEQ ID NO: 843205 - DNA, 100 bp, Homo sapiens
cagccgacggacactccctacgagtgggacctggacaaaaaggcttggttccccaaggtctggctagtttctgtggtgcagtttttcgtaaatatccaat

SEQ ID NO: 843206 - DNA, 100 bp, Homo sapiens
gatataatacctgaaactttactgttgcttagccagacaatgaaggatcatctagtaagagtagcaaatgaagctgaatttatcctgagcaggcagagag

SEQ ID NO: 843207 - DNA, 100 bp, Homo sapiens
cgtgatggaacgctgcatccacttgttgtcagataaaaatctgcaaatccgcctgaaggtcctaatctacccatggctacagttgatataaaaaatccag

SEQ ID NO: 843208 - DNA, 100 bp, Homo sapiens
aggatcgatattttgtcgaagaaactgtggaagtcattaggaacaatggtgcaaggtgaaaacttttggcccgtttggaagcggcagccaggacaacctg

SEQ ID NO: 843209 - DNA, 100 bp, Homo sapiens
accatttggtttggtcatcaatctgaactacaaagatttgaacctctggattaatcgaattacagctgctagccaggaacatggactgaagtatccagcg

SEQ ID NO: 843210 - DNA, 99 bp, Homo sapiens
tccccggcgcgaagaggctggactcggattcgttgcctgagccttggtcatctataatttcctgagcctgtgctatgagtacctaggaggagaaagttc

SEQ ID NO: 843211 - DNA, 100 bp, Homo sapiens
ttttgggaaactcgactttggagaaaccaccgtgctggaccgcttttacaatgcagcacaagtgaagctgatgtggaggctgtcatggataagttgtttg

SEQ ID NO: 843212 - DNA, 100 bp, Homo sapiens
attactcctccaacaccaatcatcccagacgtatggtggtgatattacccgaaaaatgaagcttttgaagagacaagcagaagggaaaaaaaagctgagg

SEQ ID NO: 843213 - DNA, 98 bp, Homo sapiens
aagctttctgcccagagctcctggaccaatgcatcttcccaccaccttaaaccactgggggaagacgttttcatcccgctaatcttgggaataagagg

SEQ ID NO: 843214 - DNA, 98 bp, Homo sapiens
gacatcctgaagccaatcctgtgtgacaagtacaagactggagttattgatgggcctgcatgtaacagcctttgtgttacagaaactctttactttgg

SEQ ID NO: 843215 - DNA, 100 bp, Homo sapiens
caatgatcctgaaaacagaaggaaattgaaggaacttggagttaatggtctaatttatgataggttagcatggcctcattgaaagaactagatcaaagac

SEQ ID NO: 843216 - DNA, 100 bp, Homo sapiens
cggtactatagggcaccagagttgatctttggagccactgattatacctctagtataggagtgatgggtgaatatgagcccaaaatagaagtgcagttcc

SEQ ID NO: 843217 - DNA, 100 bp, Homo sapiens
tgatgatccattcccacttactgaatagaatctgtcttgaactatcgtttcgatcctctcggcattgttgatggttttactgccgaggtaggggcaagtg

SEQ ID NO: 843218 - DNA, 100 bp, Homo sapiens
gtgacagcacaggtcacagtaaggccaaaaatgtgcatactcacagagttagagagagggatggtgataacgaaggaggcccaacttcattcaataagga

SEQ ID NO: 843219 - DNA, 100 bp, Homo sapiens
aagactcagtataaccaagtaccaagtgaagactttgaacgcactcctcagagtccgactctcccacctgctaagttggtgagtttgtaagtgatgccct

SEQ ID NO: 843220 - DNA, 100 bp, Homo sapiens
tggaaaacgcccagagatttaatcagcaaatggttatgagccttagagtttctgaactccaagtactgttgggctacgccgggagaaacaagcacggacg

SEQ ID NO: 843221 - DNA, 99 bp, Homo sapiens
ctgaggaagcagccaagaaaaaaagacgaaagaagaagaagagcaaagggccttctgcaggttatgatgtgattgctcaagcccaatctgggactggga

SEQ ID NO: 843222 - DNA, 100 bp, Homo sapiens
ggccgcgctctgctgcttcctcgtcctagtgatccacgcgcagttcctcaaagaaggtttacccaaggtccagcctagcccctaggcaccatgtcggaca

SEQ ID NO: 843223 - DNA, 100 bp, Homo sapiens
gcaactccagcctgtccggctcgtcggtgtcctccgccaaagaaactctccctgatttggtttccatcattcctgacacagtcccgagtactgaccttct

SEQ ID NO: 843224 - DNA, 100 bp, Homo sapiens
tgccagaggagccacagcgtctgctggtagctacagcaagctgggtagcaggcagatccaaaggatatcatgaagtttccagggcctttggaaaaccaga

SEQ ID NO: 843225 - DNA, 98 bp, Homo sapiens
gttgcagcgagccccagattattgcccagagacaatgcttgcacagaagatgggatttccacctaatattgtggaatcagcagcagaaaacatggtca

SEQ ID NO: 843226 - DNA, 113 bp, Homo sapiens
agaagcccagcttttccatcctggagatctacaggatttatcaaatcgagtcactgtcaaatacagaagtttacggtgagttttatcccgtgccacctccctatagcgttgct

SEQ ID NO: 843227 - DNA, 98 bp, Homo sapiens
caggctctgttcctctcccggcatttcctccctgaagcctccaggatacctgcccactatgtctatccgcaggcttttgtgcagccgggagtggtcat

SEQ ID NO: 843228 - DNA, 100 bp, Homo sapiens
gacctctacctgatcccgctgagcgcccaggaccctgttccatccaaactcttgccctttgagggaccagtgagctttctcttaagtgtgccaagctgcc

SEQ ID NO: 843229 - DNA, 100 bp, Homo sapiens
cgatgggactaatgtgcggacgccgggagcttctgcgcttgctacagtccgggcgtcgggtccaagacaagctgctgctatctgcgtgccacttactggt

SEQ ID NO: 843230 - DNA, 100 bp, Homo sapiens
acaagagatgcctgggcgtcaccatgccacagctacccacttgttgccaccagtgtggccatgaggtctgccggaagtgacttgttggtgttatctcctg

SEQ ID NO: 843231 - DNA, 100 bp, Homo sapiens
ggagccgtctaccagatcaacgtcctccgggaccggagtcagaaccctccgcagagtaaaggttcttagactctgtgagtaaagacagcttcatcttccc

SEQ ID NO: 843232 - DNA, 98 bp, Homo sapiens
tgggtcactttcagtgagtcatcgctgacagctgaggaagtctgcatccacattgcacataaagttgcgtcactggtgtaccgcctgccccagtcgtg

SEQ ID NO: 843233 - DNA, 98 bp, Homo sapiens
gggattgggaaaatctcttcaggtttcaggcgacctccaagaagggtatcagtcgactggataaacagatgagaaagttcacagatataaggaaaaaa

SEQ ID NO: 843234 - DNA, 99 bp, Homo sapiens
ctcatttcactacagacgaaatccactaggccaaatttgagtttcatcatggtgactatgaaaaacagtttctgcatgtactgagccgcaaggacaaga

SEQ ID NO: 843235 - DNA, 154 bp, Homo sapiens
cacgacaaatgtgtgcgatcggaggaatgcctgagcgggacatggactcaacagatctgtctgcctgcaatctacaagttgatattatggattcccataaggattcatgtcttctattcactttaatgaacagttgttgggcaacaattctaga

SEQ ID NO: 843236 - DNA, 98 bp, Homo sapiens
tatggaactcagcaacatcacatacagggctttgtgccttgggcaaagggcagcttactcctggaagaggactgactcaaggaccccagaaccccaag

SEQ ID NO: 843237 - DNA, 98 bp, Homo sapiens
tgattaacactttacacaaatacgggatacctatcggagcaaagcctaccagtgtgcagctggcaaaggaggaatctggaaacatcaaagctggatta

SEQ ID NO: 843238 - DNA, 98 bp, Homo sapiens
ctaaatttgcagttaaggctactggagaaccccggccaactgccatctggacaaaagatggaaaggctggagtgcagtagcatgctcacggctcactg

SEQ ID NO: 843239 - DNA, 100 bp, Homo sapiens
tagcatgatcccaccactgctcctcaacgtgcggcctcatcataagttccaggatacatgtgcaggatgtgcaagtttgctacatgggtaaatatgtgcc

SEQ ID NO: 843240 - DNA, 100 bp, Homo sapiens
caccccgtgaccatgcgcaccatcacctatagcatcaacttcttctccaaggtaagaatgattgatgttggctgatattggagtgctcattcacatgaag

SEQ ID NO: 843241 - DNA, 98 bp, Homo sapiens
ccgaggcccccctgaaccccaaggccaaccgcgagaagatgacccaggcaaataccacattcagtttctcgtcctctgagaagtcaagattctgtctt

SEQ ID NO: 843242 - DNA, 100 bp, Homo sapiens
tgaatgtgtcagtgttctcaactcccacacacaggatgtcaagcatgtggtttggcacccaagtcaggagggtcctgatgaagaagctgttgtggatctt

SEQ ID NO: 843243 - DNA, 100 bp, Homo sapiens
tggcggatggccccaggtgtaagcgcagaaagcaggcgaacccgcggcgcaataacggttcgctttgtgaacagcacatggatatttgggaagggcatgt

SEQ ID NO: 843244 - DNA, 99 bp, Homo sapiens
gaacactcaagtgaagcaaaagccttccatgattacgtatctagaagagcagaagacagagaatggaaaagataaggaacagaaacaaacaaataccga

SEQ ID NO: 843245 - DNA, 100 bp, Homo sapiens
gcagatgtggcccggccagataagatttcaggagctgatattaactccatctgtcaggagaaaaacctatacctgctgaacgccaccgagggtcaagtca

SEQ ID NO: 843246 - DNA, 100 bp, Homo sapiens
ttacagcaacctggtttcaatggctcctgcccctcctaaagctgaagccaaagcgaaggctttaaaggccaagaaggcagtgttgaaaggtgtccacagc

SEQ ID NO: 843247 - DNA, 99 bp, Homo sapiens
gggatttttagcccagcccatgaagttccatactaccatcttgcaagtttccatcccttcattattgccagcaactgtaagcatggaaacttctgaaaa

SEQ ID NO: 843248 - DNA, 100 bp, Homo sapiens
gcctgacaggaccgtggccgaccggcagctggtttgtctgccattgtggatttcctgggcagagtggagtgaaggtgccaaaagccaagaagacactgag

SEQ ID NO: 843249 - DNA, 100 bp, Homo sapiens
gattctgttccagaacactcccaaccgcacctgggactgcgtcctggtcaaccccaggaactcacagagtggattccgggatcatgtaccgcaagtcctg

SEQ ID NO: 843250 - DNA, 99 bp, Homo sapiens
gaacaacccgttcttgcctcaggccagtcgcctccaggccaagagggatccttcacccgtgtctggttatgccaaggacgccctgaatctggcacagat

SEQ ID NO: 843251 - DNA, 100 bp, Homo sapiens
gcgcacgctctatttctgctgttaaaatcattcctgtgaagacagtgaaaaacgcctcaggcctagttctccctacagagcgtcatgaacaggatgcacg

SEQ ID NO: 843252 - DNA, 98 bp, Homo sapiens
gaatggcagatggcttatgaaccacaggtaacaaatcggaagtacccaaaactgaaagaagtggatgatgtgcttggtggagcagctgcctgggagaa

SEQ ID NO: 843253 - DNA, 98 bp, Homo sapiens
gcggtgtagaggcggcggacgggccggagggaggatgttaaagccccgcgttgaaggagaagagccaggcgtgcggagggaacttggggtccattgaa

SEQ ID NO: 843254 - DNA, 100 bp, Homo sapiens
tttggatcctttgaaaaatcacatgaagagaatggatcttggagaatgtctgaaagtccatgacctggctttaagagcggattatgaaattgcatccaaa

SEQ ID NO: 843255 - DNA, 100 bp, Homo sapiens
agcacaccagtggggcagtgcctcggaaactggagaggcgtggctggaccaagacctccccccatgtgagcaggcttcctcctcccccaacaaccgttgc

SEQ ID NO: 843256 - DNA, 100 bp, Homo sapiens
caggtccgacctccgggccgaaccagggccctacccttcccagcggcacattcctgcgccacggagtggacatccgccataacaaggaccgaaaggttcg

SEQ ID NO: 843257 - DNA, 100 bp, Homo sapiens
ggtggtggagctgcagatccgggcggaggataagatcaatgccctcattaaagcagccggtgtaaatgttgagcctttttggcctggcttgtttgcaaag

SEQ ID NO: 843258 - DNA, 100 bp, Homo sapiens
tagaggacatacctttggttaaaggagctgccgtcaggcatgactccacagtttctgcaacaacagagccggggaaaggaggacgcagcaagcgctgaat

SEQ ID NO: 843259 - DNA, 100 bp, Homo sapiens
ctcctgagtagctgggactgcagggtcatctagtagcaggcacccaaatcaggcaactcccaagaaaagtggtttaaagaatggccagatgaagaataaa

SEQ ID NO: 843260 - DNA, 99 bp, Homo sapiens
gggaagggacccgcacgccgggctttgttgtggaaatcccggttacctgatcagcttgaacgggtctttttacgacttggccatgctgaaacagatgaa

SEQ ID NO: 843261 - DNA, 99 bp, Homo sapiens
cggaaagtccgtgacttgcaagaggcagatctggaccttttgagaggtgtggatgaggtcaccattgtcaacattttgaccaaccgcagcaatgcacag

SEQ ID NO: 843262 - DNA, 99 bp, Homo sapiens
attggatgagctggatggtgtgaaagcagcatgcccctgcccacagagcagccccccagaacagaaagagtcatcttggccaagtatggtctggacgga

SEQ ID NO: 843263 - DNA, 112 bp, Homo sapiens
tagaaggacaaggacagaatcaccagcactggctgaagtcacagaagatcttattagacggaatgctgaacacaacgactgtgtcattttttccctggaggaactctcgttg

SEQ ID NO: 843264 - DNA, 100 bp, Homo sapiens
gccaccaaagaaccagaagccaaagataacacctgtgacagttaaagctcagactaaagcccctcccaaaccagccctgggcgctgcctatggcacagcc

SEQ ID NO: 843265 - DNA, 98 bp, Homo sapiens
ttgtagttttgcgtgtgttgaaagtacaattctattgcacatcaatgatatcatcccagttcgagaccgagttcggacaaaaatggaacgtgatatct

SEQ ID NO: 843266 - DNA, 98 bp, Homo sapiens
atcagcacactgaccgccctgggccccttcccggacacacaggatgacttcctcaaggacagtcattttgtttactcattcagccctgttgcaggtcc

SEQ ID NO: 843267 - DNA, 99 bp, Homo sapiens
acacttgcactaagccttacaatacctctgtccataatagctgacatgtgtatgcaaaaggactggtgaccagttagaaacatggagcagctctacctg

SEQ ID NO: 843268 - DNA, 99 bp, Homo sapiens
ccatgaaaccaccaagcattattctcctaacggaactgtggctgcaccatctgtcttcatcttcccgccatctgatgagcagttgaaatctggaactgc

SEQ ID NO: 843269 - DNA, 51 bp, Homo sapiens
agagtagaatgaattttataagtgtcaagaactgtataatgatgactgcac

SEQ ID NO: 843270 - DNA, 100 bp, Homo sapiens
ataattctttttatgtgcgaacatgtaacaagaatccaaagaaaacaaaatggtggtatcatggcatggattccgtgaaggaacaacacctaaacccaag

SEQ ID NO: 843271 - DNA, 98 bp, Homo sapiens
caggtgcatttcacagcactctgggcgaaaattggatgtgaaaatgaagccagaccgagtcagggtgaccgtcgatgccatctctgtggaaactccgc

SEQ ID NO: 843272 - DNA, 100 bp, Homo sapiens
gaggaattcctcaagacaccattccagatgacttcctgctgtacctggaccctcactactgccagcccactgtggatgtcagccaggccgacttccccct

SEQ ID NO: 843273 - DNA, 100 bp, Homo sapiens
ctgaggtagaacagaggagagagcagttagagaagtacatgcaagctggccctgggaggagcggggacactgaggacctctctccaaattggcctctcaa

SEQ ID NO: 843274 - DNA, 100 bp, Homo sapiens
ggttgtcatgtttatcacactccttggatgatttccgaaggggctatctgatgggttagagtgcctttgagaagaaatcagtggatactggatttgctcc

SEQ ID NO: 843275 - DNA, 100 bp, Homo sapiens
cactgcggcgctctcccgtcccgcggtggttgctgctgctgccgctgctgctgggcctgaacgcaggatgtgggctctcttgatgagaagatgaagagct

SEQ ID NO: 843276 - DNA, 99 bp, Homo sapiens
gcggcttcagctgtcaggaggacgatttcctggggggcatggagtgcaccctggggcaggacttggatgttgtgggtgatggtatgcagtgtcctcctt

SEQ ID NO: 843277 - DNA, 100 bp, Homo sapiens
tacaaactggccaagaagggccttactccttcacagatcgaaaccagactgtgatgactgggagagcgggctgaatgcaatggagtgtgcattacatttg

SEQ ID NO: 843278 - DNA, 100 bp, Homo sapiens
ccccgagcacgagcggatcttgcaggagatcgagagcaccgacaccgcctgtgtggggcccaccctccgttgcagcatgagaaagccgaactagaacagc

SEQ ID NO: 843279 - DNA, 100 bp, Homo sapiens
gtgaatggctggtacccattggcaactgcctatgcaacgctgggcatgaggagcggagcggagaatgccaaggctgacagagtacttcttggtggtcctg

SEQ ID NO: 843280 - DNA, 98 bp, Homo sapiens
cttgctgctttttctaactatttcaagatgatatttattcaccaaacaaggcctgggcccctcactgctctctccgtactcagacgaggacactaccc

SEQ ID NO: 843281 - DNA, 98 bp, Homo sapiens
tcgcgtacgggcttcccgagctgacgtggcttgaattgggaggggggcagctggagcctcaggcggcagcgcttctagcatatgtaagtggaactcag

SEQ ID NO: 843282 - DNA, 74 bp, Homo sapiens
ccgccgcccccaacgtccatgcctgaagtgcaaattcacctgcaccagtggtaaatgcttgtatcttggttcgc

SEQ ID NO: 843283 - DNA, 98 bp, Homo sapiens
aagttccaaaagaagttgttccagaaaagaaagtagctgttcccaaaaagccagaagtcccaccagcaaaagtgtatcggatctgtcgttctggaaag

SEQ ID NO: 843284 - DNA, 120 bp, Homo sapiens
gtcttcatgtggacagtctcagggacaccatgtagagaattttggtctcgattcaggagaagtttcggtgtccgacatccctgtctgttgttaaagacagaaacctaactgagaaccaag

SEQ ID NO: 843285 - DNA, 100 bp, Homo sapiens
tggggatgagtgaaaattcccaggaatcagacgtcataaaagtgcaggccgcactcagtacagcctgactatttggactggaaaaaatgataactattcc

SEQ ID NO: 843286 - DNA, 100 bp, Homo sapiens
ctcacctgggtcctctcagtgaagccagggtggccgccccagcagacagtgctacagagccaactcctgacaggaggaagatgaaggctcgtgctccccc

SEQ ID NO: 843287 - DNA, 100 bp, Homo sapiens
ggcaaagaccaccccacggccgccaccaagatgagcagggcccttgcggagttccgcgtccgaggtgtgaaggttattcagcttctcaaggctggaaaag

SEQ ID NO: 843288 - DNA, 100 bp, Homo sapiens
gccgacatgaagaaagacgtgcggatcctgctggtgggagaacgctctgaccacctccgagagaaggatggcctgtgggctgtcttggtctggctctcca

SEQ ID NO: 843289 - DNA, 100 bp, Homo sapiens
ctagaatatacaaagacaaaaggagattctgatgaagaagttattcaagatgaatgcctaccgcaggaatgggatggcttttctagcctgctgatgtgac

SEQ ID NO: 843290 - DNA, 98 bp, Homo sapiens
tttcagaagcggctgcgcacggactgctggagatggtggagtccgtcagtcctgaatctgtgcctccttcccttcttaaagtagtgatgaaacccata

SEQ ID NO: 843291 - DNA, 98 bp, Homo sapiens
agtcccgaggtgtgctcgccagaatggagtacaaaaagctgctggaacgtagatcccagaaaacctgcagagagaagcagcagctggacctcgggatg

SEQ ID NO: 843292 - DNA, 124 bp, Homo sapiens
gaatttatgcttagacggtggcttgttgcagatcctgattgtaggtggtgtccagctccagactgtggggtgataaaagaaaatgtggctgaagttacccgaagttcagcttgcagtgtaattc

SEQ ID NO: 843293 - DNA, 98 bp, Homo sapiens
cctaggccccttcctgcccctgtcgtcagcaggaaacaagcctccaggtctgcttccccgcaaaggactatacatggcaaatgacttaaagctcctga

SEQ ID NO: 843294 - DNA, 98 bp, Homo sapiens
gtggagccaccagcctctccctggattctggactctacttataatatccctaactgctggattctcctgttgcagcttttcttggacagtgacttact

SEQ ID NO: 843295 - DNA, 98 bp, Homo sapiens
cctggacacagcaatatctctgggctttcacagattacaggctgtgccagccctggaaaaacagttacaattgttgttcgtggttctaacaaactggt

SEQ ID NO: 843296 - DNA, 100 bp, Homo sapiens
ctggcacccagcacaatgaagatcaagaaaactacccctgagtgtggtcccacaggatatgtagagaaaatcacatgcagctcatctaagagaaatgagt

SEQ ID NO: 843297 - DNA, 98 bp, Homo sapiens
accgagagcggattatcgcagaatgcaacgccattcgccaggctcttcaggatctgctttcagagtacatgaacaactgggttgtatcccctgcagaa

SEQ ID NO: 843298 - DNA, 100 bp, Homo sapiens
ttctctgtcagtactatattggaaaaacctcaaaatatgatggtggttggacagtcagcatttgcagactttggaggatcagctgatttattcggaggat

SEQ ID NO: 843299 - DNA, 98 bp, Homo sapiens
aactgcgctatcttccctggatttttcttcaccttttccttactcatgagccaggactttccttatcccagttgattgtgcagaatacactgcctgtc

SEQ ID NO: 843300 - DNA, 100 bp, Homo sapiens
gtgcctaattcaaatgggagcagcggtggaagcgaagaatatatacagccctgctctgggacacacctccattggatttaaaagacagtcctcgtcagca

SEQ ID NO: 843301 - DNA, 98 bp, Homo sapiens
catgggaacccagaagaggtgacggaagagagaagggcacagttacctaagtatcaacgtaatcttcctcggccaggacaggcccccatcggtaatcc

SEQ ID NO: 843302 - DNA, 51 bp, Homo sapiens
tcaaaatggccctatgcttagggctatggagttactagtagagaaagcaat

SEQ ID NO: 843303 - DNA, 98 bp, Homo sapiens
tttcttcaagatggaacaaagactgttgagtatgctccatgtagatcactgctgaagctgctgaaagatggcagaagaagtggtggtagtagccaaat

SEQ ID NO: 843304 - DNA, 100 bp, Homo sapiens
tcggattggcaggacctggggccaaaagccaaggttttgactggatcatctcgtcaaagttattcacctggctatcaggatttcagtaagtgggaatcaa

SEQ ID NO: 843305 - DNA, 99 bp, Homo sapiens
gaataaacatgcaatgaacccaaaagggtggtgatggcacttctcaaatactggccaaagactcacagtccaaaagaagtaatgttcttaaacgaatta

SEQ ID NO: 843306 - DNA, 98 bp, Homo sapiens
tcggctttgcttggtggacatttggcaaacgacaatggaggcaaagaaacctctctgcatccccaaacctgtgcacaccgatatgaggcaaggcagcg

SEQ ID NO: 843307 - DNA, 100 bp, Homo sapiens
caggagcaaaggtcctggccctcgttcctggaacacagagagacaagagagacacctccaacttcgacaaagagttcaccagacagcctgtggaactgac

SEQ ID NO: 843308 - DNA, 98 bp, Homo sapiens
aagtagatgtggatgactgtcaggtaacaaacctgaatttggcaactggcatcataaacagaagcagtgcttcagctcccccaaccctccgacccatc

SEQ ID NO: 843309 - DNA, 100 bp, Homo sapiens
cacctggtacatcgcctcagggcattcatttcaggctccttctaaatggccaaggtgacgatggcttaatagaatttaccacagttactttagagtctcc

SEQ ID NO: 843310 - DNA, 100 bp, Homo sapiens
actattttggcctcgagtttcctgatcacaaaaagatcacgaggcatttcatccttcatgaagccattcaggattttgaattgcatatgagtgcttggct

SEQ ID NO: 843311 - DNA, 98 bp, Homo sapiens
ggaaatctgggattcaggaccgtccaccaccacctcccacccgctgtgtaaacctgggaagcggggagaggtggtgagagatgacccctgttgaggat

SEQ ID NO: 843312 - DNA, 100 bp, Homo sapiens
aggattgtcttttcttaacctgggaagtggaaccggatatttaagtacaatgacatatctgaagagatggattaagaatgctttggattaaggattgtgg

SEQ ID NO: 843313 - DNA, 100 bp, Homo sapiens
aggtgacctctgaagacctgatcttaattggaaatgaactagaccttgcgtgtggagagagaattcgactggagaaggcctcctgccagaagagatcctg

SEQ ID NO: 843314 - DNA, 98 bp, Homo sapiens
tcagccgcttcgtgtggttcttttctggcatcgtaggaggtggcctgctgcatccagttttggatgaaccaatagcagaagctgtctgtattatagct

SEQ ID NO: 843315 - DNA, 100 bp, Homo sapiens
cagcagcaccagcaacagtggcaatgagaccagtggaagcagcaccatcggggagacaagcaagatggccaggccatgttatgggatctcaacgaaggca

SEQ ID NO: 843316 - DNA, 98 bp, Homo sapiens
ggcgctgctcccgggggcgacggatgccttcaattaagttgcagagttctgatggagagatatttgaagttgatgtggaaattgccaaacaatctgtg

SEQ ID NO: 843317 - DNA, 98 bp, Homo sapiens
gatgtcttggaatgcactgtatctcatgcagtagaaaagataaatcctgatgaaagagaagaaatgaaagtttctgaggatgtaggaagaagctggtc

SEQ ID NO: 843318 - DNA, 100 bp, Homo sapiens
tcccaccgccagctggaaccctggggactacgacgtccctcaaaccttgcttctaggagataaaaagatcatggaagggaagtggttgctgtgtatgtta

SEQ ID NO: 843319 - DNA, 99 bp, Homo sapiens
ttcaagctctacctgaccatcatcctgctcctgggtgccgtggcatgtcgatttgtccttcactacaggatgaaactgattccaagacagcctccccgt

SEQ ID NO: 843320 - DNA, 98 bp, Homo sapiens
tctgaagaattgtggctcagttttcttggaaactacttgtaatttcatgctcccaaaatgggacataaagtggttgtcttcgacatttctgtcatcag

SEQ ID NO: 843321 - DNA, 100 bp, Homo sapiens
taaagttattgctaagtgtgggaattttagctaagtctggctctgggagaggagtggacagcagctggttgagatacatccccatctggagacaggactg

SEQ ID NO: 843322 - DNA, 100 bp, Homo sapiens
aacttgttcctggttataagaaagttattaagaagcctatggatttttccacaattagagagaaactaagtagtggacacctccttttagaggactcaga

SEQ ID NO: 843323 - DNA, 100 bp, Homo sapiens
ctcctaccactgccagcttcacacgtggttgtgtcaaaccgattggtgacatctccatgctgtattgtcacaagcacatatggctggacagcaaacatgg

SEQ ID NO: 843324 - DNA, 99 bp, Homo sapiens
ttctcccaaggaatttccacggagtgtgaggaagaggctgtctgtgtcattatgtgtgcgtcggtcaagtataatatccggggtcctgccctcatccca

SEQ ID NO: 843325 - DNA, 100 bp, Homo sapiens
aggcttttatcttgagaacatggtgtctggagttaaagaggcatttcatccttcatgaagccattcaggattttgaattgcatatgagtgcttggctctt

SEQ ID NO: 843326 - DNA, 100 bp, Homo sapiens
cggaagctggttttcaggccacaaatgctttcacagttggaatcgaagcctcttaaaatggcagatgacttggacttcgagacaggagatgcaggggcct

SEQ ID NO: 843327 - DNA, 100 bp, Homo sapiens
cttgccttggcctcctaaagtgctggaattataggcgtaagctactgtgcccagatctaatgaggcgtcaagaagaactcagacgcttggaagaactcag

SEQ ID NO: 843328 - DNA, 100 bp, Homo sapiens
ccgcggtggcggcgctgccgcctgaagtgcgggcgcagctggcggagctggagctggagctctcggaggataactgtgtccagaggacccccaggccatc

SEQ ID NO: 843329 - DNA, 98 bp, Homo sapiens
aaggaacggctgaaggccctacgggagaaaaccgggcgcaagcaccaaggatgacattgatcttgatgccttggctgcagaaatagaaggagctggtg

SEQ ID NO: 843330 - DNA, 99 bp, Homo sapiens
ttttggagcagttggagcactgagtgtgttctaagaacggaagcatctgggctggatggaatttagcatcaagcagagtcccctttctgttcagagtgt

SEQ ID NO: 843331 - DNA, 100 bp, Homo sapiens
ccttggggatcaaaaactagttgagaggcttcatatgatcctgtgaagccacctggcagctctttacaagcaccagctgatttacctttagctataaata

SEQ ID NO: 843332 - DNA, 98 bp, Homo sapiens
cgggtcgggcgtctccgccggctactgccgcttcagttctcccggtgtggccacgagtcgggagttgctctgaaacctaccgcatgccagtgatggag

SEQ ID NO: 843333 - DNA, 100 bp, Homo sapiens
aaggagagaattcagctccagttcaaaagcctacaaaatctgagactgtcattgcttttataaggttagctccattcagaaccaaatgcagtccaaggga

SEQ ID NO: 843334 - DNA, 98 bp, Homo sapiens
gaaatccggcatgtggaaaagaagagccactcgtaacagcgaacggtcagtcaagcaactcttctgacctctgggactactgcaacagtagccctatt

SEQ ID NO: 843335 - DNA, 99 bp, Homo sapiens
cgtgctgaagccatcaaaaaacaaaacagaaaaaaacctctaggaaatgatctaggaaaatgcatagggctactttcaaatttgaatcaacagatgaag

SEQ ID NO: 843336 - DNA, 100 bp, Homo sapiens
aacacctatgaacagtctggccacctctgtattcagcatagctattcctgttgatggtgatgaagacagaggctgctattccaaaaagctttcaactctc

SEQ ID NO: 843337 - DNA, 100 bp, Homo sapiens
cttcaagaatttctgaggacaggagctcacatctggaagttacagaatgtctgaaggggacagtgtgggagaatccgtccatgggaaaccttcggtggtg

SEQ ID NO: 843338 - DNA, 100 bp, Homo sapiens
ggacctgttgaactatcagtacttggacaagatgaacaacaatatcggcattctgtgctacgaagccttcaaatgtttatctggtgtgactgtattatgc

SEQ ID NO: 843339 - DNA, 100 bp, Homo sapiens
ggagcttcagtagtcatccaggactgtaagtgtgaaagccatgcactgagagtggtggaacagaagactgaagttgctgaagatcctcaacaagtttcaa

SEQ ID NO: 843340 - DNA, 100 bp, Homo sapiens
tcaaggagaaggcagacctgggatgaaacgaggaggaagagatagtgaccgtaattcatcagaagaaggaactgcagagaaatccaagaaactgaggact

SEQ ID NO: 843341 - DNA, 100 bp, Homo sapiens
gccgcgtcctcagctggtcctagacatgcgtggcgtcggggctgtggcacggtcgggtccggggtcatctcgatgcactcctgaggggcttggttctggg

SEQ ID NO: 843342 - DNA, 100 bp, Homo sapiens
ccctcgcctgggcctccctgcccctgctggggcctccagcctgcgcgctctgcgaggacacgctctgctgcggagacaagttggatggcttgaggactgg

SEQ ID NO: 843343 - DNA, 99 bp, Homo sapiens
aacaggaacaggactgactccagtgatgacgcaggccttaaggagaaagtttcagaagttgggatatctaaagcagaagccttagaaactctgcaaatt

SEQ ID NO: 843344 - DNA, 126 bp, Homo sapiens
attccttagatgtggtgaacaaagatgatataatagagtggatttattccctgcaggtccttcccacagaagacaccatacacactgctgctatggatatgctgggaggacctggtatcgaaagcc

SEQ ID NO: 843345 - DNA, 100 bp, Homo sapiens
gacactgtggccaacattcagcagcgtcagaagaaaccaatagagccatggcgactccctctgctgccttcgaggcccttatgaatggtgtgacaagctg

SEQ ID NO: 843346 - DNA, 100 bp, Homo sapiens
gctgtcatcacaaaagagttgattgaaattatctctggtgctgcagctctagatttaccgcattgtttctcagaagcaaatgtcagacagacgcgaaaat

SEQ ID NO: 843347 - DNA, 98 bp, Homo sapiens
tgcttgccctgggaactctggcaccttgggctgtggaaggctctggaaagtatatggagtctggagaacggttaccatcctcagcagcctcctctact

SEQ ID NO: 843348 - DNA, 101 bp, Homo sapiens
atccgccatgggctactcagtttacagccactgcagtatcacagccagccatcatcgtctacagactgccgtggacctggaaatgcagcaagctcctgatg

SEQ ID NO: 843349 - DNA, 98 bp, Homo sapiens
tcatcgtgctattcctggtctacatcctgcgggtgcctttgaaaatcaacgacaacttgagcacagaacaaattggagctctggcagatcagcatatc

SEQ ID NO: 843350 - DNA, 99 bp, Homo sapiens
cagaagtggctgaaagtcatccttttagctgtcacaggcactacaagggcccccagggatggagaagtaccaggagtggattataatttcatttccgtt

SEQ ID NO: 843351 - DNA, 98 bp, Homo sapiens
ccagctccttcattccccagcagggagtgtttgccattgtggagatgggggacgtgggtgctcgagaggctgtcttgtcacagtcccagcacagcctg

SEQ ID NO: 843352 - DNA, 132 bp, Homo sapiens
cggccacctctgagaagggagacgacgctgctgggtccgctgagcggggcgacccgagcatgactttgttcgacgagaccggccactacgtgtcctcattgacctcatacagaggacaaaagatgcagttcg

SEQ ID NO: 843353 - DNA, 100 bp, Homo sapiens
aataagacctactcatctgtgagaacagaagctttatctgtgatagaattgctgcttaaaaaacttgaaggagtgacactgctgatcctgtaacatggag

SEQ ID NO: 843354 - DNA, 100 bp, Homo sapiens
aattctcatctttgaaggattttgtcaagcattttgcaaatcagcctttgattggaagcgagacagaccccaagactgcttctgagacagaaacagatat

SEQ ID NO: 843355 - DNA, 98 bp, Homo sapiens
ccagcaaaatgaaactgagcctaatcagcagactccaagccccctgatccttgatcagaactacattaacaccaaaaatcaagttatcaaagcagaga

SEQ ID NO: 843356 - DNA, 100 bp, Homo sapiens
acgctgacattaaggaccagccagaaaatgcacgaaagcaagagattatcaaagtcactgaacaactgatcgaagctatcaacaatggggactttgaagc

SEQ ID NO: 843357 - DNA, 99 bp, Homo sapiens
gcaaataaaagagccctgcaatttgaagatacatgagacagcagccaaacccccagtgttctaagaacggaagcatctgggctggatggaatttagcat

SEQ ID NO: 843358 - DNA, 99 bp, Homo sapiens
gagccctgcatatgattggctctttagctgaaatacttctgaagcttgacagagccaattcgctattaaaccagactcaacagccttacaggtatctca

SEQ ID NO: 843359 - DNA, 99 bp, Homo sapiens
gaacaggacagcttgggagcgtgcttcaaggatgcagagtatagtacgaatgtgaagaatcttttacgaccctaaacgtagacattagaaatcaccaaa

SEQ ID NO: 843360 - DNA, 100 bp, Homo sapiens
tgaactgtacagttacctccgtgtgtcacaggaagactcttaatccacattcatctcaatggaaggatcctgccttaagtcaacttatttgtttttgccg

SEQ ID NO: 843361 - DNA, 99 bp, Homo sapiens
ggacccactcagtcaagatcacaggttgagaagctgatgtctcctcgacttccaactggaaccttgaacccccacatttctggaccttgagcattcctc

SEQ ID NO: 843362 - DNA, 98 bp, Homo sapiens
cagaaatagcgaccatggcgagagctggaagtcgagtgtgctactcaactcaggagatttggagacaaactgaacttccggcagaaacttctgaatct

SEQ ID NO: 843363 - DNA, 100 bp, Homo sapiens
cctatactcagagtgctacttacagtaccacagcagttacatattctggttcctggaaggtgacgtgaaagatcactgtgcagcagcaatcttgacttct

SEQ ID NO: 843364 - DNA, 98 bp, Homo sapiens
tggcctgactttacagtctgttagtccccagagcctccaagggaaaacgatatgggataaaaccagcctggaatgtttgaaagtgttaacaggacaca

SEQ ID NO: 843365 - DNA, 147 bp, Homo sapiens
cggatctataccaacgccaaacgcacgagtattacccctatctcagcagtgatggggagagccatagcgctcagccccctgtgggagcagcctaccaggacagcccaggagagcagaaaggaattaaaaccacatcttctgtctgga

SEQ ID NO: 843366 - DNA, 100 bp, Homo sapiens
taaggagaaagtcctacaacagtttggcgtgcaacatggggcttgagaaaggagtctcacattcccagtcaggaggtcccaggcacccaggtgggacaag

SEQ ID NO: 843367 - DNA, 51 bp, Homo sapiens
ctggacaatacatggactatgggctaagacagtgcctgtccctgaaaagtg

SEQ ID NO: 843368 - DNA, 95 bp, Homo sapiens
taaagtctgagagagggaagtcgcctctgtgctcgtcctggtgcttgatggtcgaggccatctcctgggccgcctggcggccatcgtggctaaac

SEQ ID NO: 843369 - DNA, 100 bp, Homo sapiens
gcagattggaaagactggaagcttcttcaggggatgtatggcattgagaatgaagtcttcctgagccttccatgtatcctcaatgcccggggattaacca

SEQ ID NO: 843370 - DNA, 100 bp, Homo sapiens
actcaagcaacccccgcttggcctcccaaagtgctgggattagaggcgtgagccactgcacctgacctaagaatgcagtaatagtggccttgtcttcaaa

SEQ ID NO: 843371 - DNA, 100 bp, Homo sapiens
catgtccaatgttaccttgagaaaaatgtctcccacaggaaatggtgctggaggccacagctgccctgtacaaccaggacctatcccagctagagctgct

SEQ ID NO: 843372 - DNA, 98 bp, Homo sapiens
ggccctttacaaccggactcgtcgtatttctcagacaagccagtgtggtgctcaccttgggcacatttttgatgatgggcctcgtccaactgggaaaa

SEQ ID NO: 843373 - DNA, 98 bp, Homo sapiens
ccgggccctgtatgactatgaggggcaggagcatgatgagctgagcttcaaggctgatggatttgcagccgctgcaagtgtgtggaagggccgtgttc

SEQ ID NO: 843374 - DNA, 100 bp, Homo sapiens
gagatcaaatcagcaaatatgcaaggagattcttccatcacttgctcagttggttgaatctggcgatgtggaacccatggatatggagggctgactatat

SEQ ID NO: 843375 - DNA, 100 bp, Homo sapiens
gttcctgccgtctgctcttctgcctcttgatctccgccaccgtcttcaggccagacatgtcatgctgcccaaggacatagccaagctggtccctaaaacc

SEQ ID NO: 843376 - DNA, 99 bp, Homo sapiens
gccatcgttgctgccttcttcgtcaaggtgaaatgtatagatgttgttcaggcttatatcaacagaatcaaggacgtgaacccaatgatcaatggaatt

SEQ ID NO: 843377 - DNA, 99 bp, Homo sapiens
gacaaccaagcattttcatgaaacaaccccaaataaaggaagtggaaccacttcaggttcaaaccttgtactactcagctgatcacaagctgcttgatg

SEQ ID NO: 843378 - DNA, 116 bp, Homo sapiens
gtccctgctcccagtcagctcccagcttcaagcccaaccaagtgcgagatctgcgtgaaaaatggtgagaacaagaccaagattggaaagccagcttcagaggagggaattacagc

SEQ ID NO: 843379 - DNA, 100 bp, Homo sapiens
gcggcaactacctcttctccactagtgcaatctgccgatacacagatgctaccagcaaatatgaatctgtcatgaaaacagagccaagcattgctgaata

SEQ ID NO: 843380 - DNA, 100 bp, Homo sapiens
acctggcactcctggacaggatggattgccagggcttcctggcccgaaaggagagcctgagtctactcttcatcttgtgttgagacttcgtggtggtgct

SEQ ID NO: 843381 - DNA, 100 bp, Homo sapiens
ggagcatcggctgcaggggtcagtgatggagctgcttcagatgttcctcctgctgatcaagagaagctttttatccagaagttacgtcagtgttgcgtcc

SEQ ID NO: 843382 - DNA, 100 bp, Homo sapiens
gcttggagatgccagaaaccatgtgaaaaggcaccttgggatgagggaatacaagtgtcatgtctgtggtgcacaagggtctggatccctgaccctgatg

SEQ ID NO: 843383 - DNA, 100 bp, Homo sapiens
gcggcagcagccgctctgagggcgcctgctcagatcagcggtttgagtgctacgtttgcagaaattttcttggaaataatccaaagcagtcttcctgaag

SEQ ID NO: 843384 - DNA, 99 bp, Homo sapiens
agagtcagcacgcggtggcctgcagcccccaggtttccctagatgacaaataaacattccttttcctgcgtgaagatagtctgtggaaaccttggccat

SEQ ID NO: 843385 - DNA, 100 bp, Homo sapiens
caatctcctttctgggcaaacgttccaagcctgcctagggtagttaaaagacgagtgaatgctctcaaaaacctgcaagttaaatgtgcacagatagaag

SEQ ID NO: 843386 - DNA, 98 bp, Homo sapiens
ggcgcgctcccgcggagccggagccgcagaggctcccgggctggactcaggcttctcagagacacctatggctgccgatgaaggctcagcagagaaac

SEQ ID NO: 843387 - DNA, 98 bp, Homo sapiens
aagatcggacactacgtgctgggcgacacgctgggcgtcggcaccttcggcaaagtgaagagatgctgacagacagcaccaagaagtaattgcaattt

SEQ ID NO: 843388 - DNA, 100 bp, Homo sapiens
tgacaggacaactggatcagtttcattaaaaagaatccacattcatctcaatggaaggatcctgccttaagtcaacttatttgtttttgccgggaaagtc

SEQ ID NO: 843389 - DNA, 98 bp, Homo sapiens
gactgtgcctctgagaagtatgtctgatccagaccaggactttgacaaagaggagctcccagattcattgaaggagcagacacacctgagagaatggt

SEQ ID NO: 843390 - DNA, 100 bp, Homo sapiens
aggagtggccttggccaaacccctccccaggacccctgagcaggagagctgcaccatcccagtgcagacacatcatctcagagttggagcacctgacgtt

SEQ ID NO: 843391 - DNA, 100 bp, Homo sapiens
aagaaggcaggtcctacgatgaggccatcctgcacctcgtagtggcagatcctgtctcagaaagaagagtgggagagcaggactcagcaccaacccagga

SEQ ID NO: 843392 - DNA, 100 bp, Homo sapiens
cactgacccagattaatgtccactatggaggtgtacagaatctctgcagtagactgaaaacctcccctgtggaaggagaactgcaacatgtttctgtttt

SEQ ID NO: 843393 - DNA, 99 bp, Homo sapiens
cacacagataccgtttattaaaagagctgtggctgctcgtggtcccaagaagcatctgaagcgggtggcagctccaaagcattggatgctggataaatt

SEQ ID NO: 843394 - DNA, 100 bp, Homo sapiens
ggcagggtcatccttgcccttgtcctcccctttcatccctatgtggaaaacgaaagcgtggatacccatcaacgaagttttgatattggaattcagattg

SEQ ID NO: 843395 - DNA, 100 bp, Homo sapiens
agcaagggctgtatgagctctcagcaagcaactttgagctgcacgttgcacaaggaagcgccgcggagccatcaacagcaagcagctcacctacctggag

SEQ ID NO: 843396 - DNA, 100 bp, Homo sapiens
gagaattctataagagcttgaccaatgactgggaagatcacttggcagtgaaggtctgggatctcctggctgttgctgtcttctgctctcatcctgcagg

SEQ ID NO: 843397 - DNA, 100 bp, Homo sapiens
catgcctttgagaacctagaaatcatacgcggcaggaccaagcaacagtcctggacccaagccagaagcctctgcaaagcttccttccagacctgcagat

SEQ ID NO: 843398 - DNA, 100 bp, Homo sapiens
attggcaccaagaatgtcattgaaacttgcaaagaggctggggttcaggttcgttccaccagtcataaaccagatgaaatctatggcatgattgaaagac

SEQ ID NO: 843399 - DNA, 98 bp, Homo sapiens
tacatggtcttccctaggctgttcacctgccctacactggagaccaccaacttcaaagtgggtatttaccttgctgtggattgctgactggatggtcc

SEQ ID NO: 843400 - DNA, 98 bp, Homo sapiens
cattgagatcaacctgaatgaccaggtgtaaagtgcaagagtaatatgctatgactgagcctccagggtcgtatagacctccccctcctatgggcaaa

SEQ ID NO: 843401 - DNA, 100 bp, Homo sapiens
atgtgggcccagaaaacaagccagtcaggaagtgtttggattgtgagctatttcagaactgttctcaggactcattattttaacatttgggagaaacaca

SEQ ID NO: 843402 - DNA, 136 bp, Homo sapiens
aacacctgtaaaatgagggaggagctaggagaactatcagagcagttttacaaatatgcagtacaagagtctataaagcatcaactcaaagtgacaagaagtggacacatattctaagggagctccccaggacaaa

SEQ ID NO: 843403 - DNA, 100 bp, Homo sapiens
agtatgggatccgctgtcaacgacgccttgaagcgggacaaggacgcgatctatggtgttatagttttgccgctggactcttccctcccttcccccaccc

SEQ ID NO: 843404 - DNA, 98 bp, Homo sapiens
aggacccgaggccaggagccaggggcccagaaggtcaacattggcatcctcatcgctgtgaccagagtcatctcacagatcagcgccgacaactacaa

SEQ ID NO: 843405 - DNA, 100 bp, Homo sapiens
tctgcaagaacagctcagcaggaatactcataaagagactgagcctgtgtatgagagggctcacgtggaaaatgaagagcagtacacccaggctctggag

SEQ ID NO: 843406 - DNA, 71 bp, Homo sapiens
aaagagaaagatggagctgaagatgggcaggtggaagaaactaaacttcagtggctctgtgaggaactgaa

SEQ ID NO: 843407 - DNA, 100 bp, Homo sapiens
aaaacgacttaaggattcagagaaagagaactctttgttaaagaagagaataagatttttggaagaaaaggcaggtaaagtgaggaaacatgcaactgaa

SEQ ID NO: 843408 - DNA, 98 bp, Homo sapiens
gctctgcggctggtccaggccttccagtacacagacgagcatggggaagggtgtccgcaatgttgccagtgtctgtctgcagattggctacccaactg

SEQ ID NO: 843409 - DNA, 98 bp, Homo sapiens
accatcgtcgtgaggatcgtgtgcattacaggagtcctccacttgccactggctgctcagatggaagataaaaagccctttatcctgtcttccatgag

SEQ ID NO: 843410 - DNA, 98 bp, Homo sapiens
tccccctgccccgttcacaatgtgaatgaaaactttgccattgatttgatagcagagcagcccgtgagcgaggtggagactcgggtgatagcgtgcga

SEQ ID NO: 843411 - DNA, 100 bp, Homo sapiens
gtagcaatttggagcggtaagcccccaatatgtgaaaagattccttcagtcgaatgagccttcgcaaaatggatctctaaactgaatgcacttgttttat

SEQ ID NO: 843412 - DNA, 99 bp, Homo sapiens
ttacccagaagtagtccatatggtacattttgaccaatttaaagaagcattaatactcatcttgtccagaactctgtcaaatgaagaacactttcaaga

SEQ ID NO: 843413 - DNA, 99 bp, Homo sapiens
tttgttaaagaagagaataagatttttggaagaaaagatgctcctgccagcatttgtcttcattgggctggaacaggatgactgctgtggctgctgtgg

SEQ ID NO: 843414 - DNA, 100 bp, Homo sapiens
gaaaagcacatttacagcctaatgcgtgtctgacttccagcaactgctggcctgtgccagggtgcaagctgagcactggagtggagttttcctgtggaga

SEQ ID NO: 843415 - DNA, 98 bp, Homo sapiens
tctctttactgctgaagctttacttcgagctcatgttgaaaaagcatcagaatctgaggagtcagatgaggatgacggtcctgcacctgttatagtag

SEQ ID NO: 843416 - DNA, 98 bp, Homo sapiens
gtggcttcatttcttctgtggccttcagcactgataagaatctattattgtatgaaaagacacagactgtactctcagaactgaagttgaagtttgaa

SEQ ID NO: 843417 - DNA, 100 bp, Homo sapiens
gccggccgacccttcctgtcgctgacggcgactgcgggaggccaggtaacacaagtggcaagacagccgggaacccctaccccatccccttattcagcac

SEQ ID NO: 843418 - DNA, 144 bp, Homo sapiens
gaacactggatcgatcgggggatctaggcgacatggagccattgaagggaacaacacccttgatgagtttcactctatcacccaggctgtagtgcagtggtgccatctcagctcactgcaacctctgcttcctgggctcgagcc

SEQ ID NO: 843419 - DNA, 98 bp, Homo sapiens
ggacactgaggctcaaggcatttttatagacttgtctaagatctggctttgagttacacaggtagccacatgaaagtccacttacccagtttagtaga

SEQ ID NO: 843420 - DNA, 100 bp, Homo sapiens
actgctcagcgcttggctgatgagatcctcctgctgggctccgagatcaacttggtgaatgcatcgccctgagcaactggtggtttgtggcccacctgac

SEQ ID NO: 843421 - DNA, 98 bp, Homo sapiens
ttccaacatggacatcctgaagccaatcctgggtcagtatagaccttctgatttgctgtgccctgagacatatgtttgggtacccattgagcaatgcc

SEQ ID NO: 843422 - DNA, 100 bp, Homo sapiens
tcatgacacctttgactcttctactgtctcagaccttagatatttggtttccaggcaggactgacgtctttggattgcagtggatcttactgcttacctg

SEQ ID NO: 843423 - DNA, 99 bp, Homo sapiens
cctcggccccgcgcccgcccaggggtcgctgtcgcctgctgctggctcctcactgcatgtcagtgaaaaaaccagtgaatcgccttccaaaccaggaga

SEQ ID NO: 843424 - DNA, 100 bp, Homo sapiens
gatgctgctgtttaaaccattggtccttcgccgtcagtatttgaggagaaagcatttgactgatgtcctcaagtgtgtggtcagcacagaccctggcctc

SEQ ID NO: 843425 - DNA, 98 bp, Homo sapiens
attcgtgaagaatcagcatcatgtttggcagctgagtattggagccaggagcctgccatgaggacaagggctcagaggactggacgtgctcagacatc

SEQ ID NO: 843426 - DNA, 100 bp, Homo sapiens
accaaaaatcaacagctgagggaacagcagaaagtccttcatgaaaccattaaagttttagaagatcggattctgaaaccttccttgtatccctcctgag

SEQ ID NO: 843427 - DNA, 99 bp, Homo sapiens
ccccagcgcaggagccgcgcccggacccagggttcaatttcagaagcttcagcaactgcgccttacacagtaccatggaggatccttaccaaatgtgag

SEQ ID NO: 843428 - DNA, 100 bp, Homo sapiens
ctcctggaagatgacagtggcatggaggtgtctgaatctccctggctccatgccccatctctgaagaccagctgtgaatacgtgagcctctaccaccagc

SEQ ID NO: 843429 - DNA, 100 bp, Homo sapiens
cagagacctggcaaatgacatcatgacactgctggtcagtgagaaggtcggaggggccgaggggaccaagctggatgatgacttcaaagagatggagaag

SEQ ID NO: 843430 - DNA, 99 bp, Homo sapiens
ggcgctggcggcggtcgagccggcctgcggcagccggtaccagcagtcactgcttcaaccacctgtgagaaattagaaaaagccaggaatgagttacaa

SEQ ID NO: 843431 - DNA, 100 bp, Homo sapiens
tctcagcacagagtggggactgccttccattgtgaagtcttgaagcagccgacacgagtcgttgttcataaaacagcttttgaaagttgagagcacaccc

SEQ ID NO: 843432 - DNA, 100 bp, Homo sapiens
tgggcaatgagaacagcacctcggacaaccaggcgcatattaaatttcctattgactacccctattcaccacctaccttcagattcttgaccaaaatgtg

SEQ ID NO: 843433 - DNA, 100 bp, Homo sapiens
tcacattcccgtccgacgaggatatcgtgtctggagcagtggagcccaaagacccctggagacatggccagcggagcctgcaccaccgtggagacaacct

SEQ ID NO: 843434 - DNA, 98 bp, Homo sapiens
aaggacctgccagagactgggagtgttgactgctgcaaggaccaaggtgtttaagatagaagtgctaatgaatggaagaaaacattttgttgaaaaga

SEQ ID NO: 843435 - DNA, 100 bp, Homo sapiens
tggttcaagaaccttgacaagctcatccggctggtaaatgcgcagatggccgccctgctcccccaatgaaaggccagcttcgaagaaaagctgaaaggga

SEQ ID NO: 843436 - DNA, 100 bp, Homo sapiens
agcctcagagagggatgggttacatgcccaagaggggacttgatgttaacaaatgtgagattgccagggccatccaggagagcctcctcaccagcacaga

SEQ ID NO: 843437 - DNA, 100 bp, Homo sapiens
ctgccgcgcagagcccggattccgcgactgccggggcaccgcaggttttggactcgctgaagcgaagagttaccttgtacatgcccactatgtacctcag

SEQ ID NO: 843438 - DNA, 99 bp, Homo sapiens
catcccggaggaggaagaagaagtgttatatgtcctaaagtaaggtttcaggtattgtcaatatggactcgccatatggttctgtaacaccttcttcaa

SEQ ID NO: 843439 - DNA, 100 bp, Homo sapiens
cagctttggtccctcggggcgtctgggcagcctacgctttccgatgcacccactgggcctatgtaataacaatgacgaagaggacttgtatgaatatggc

SEQ ID NO: 843440 - DNA, 116 bp, Homo sapiens
agcgagatccgggccgtgaacgaaagcagtgacggaggagcttgtaccaccggcagttgcagtggtgcagaatggctgacctcagtcttgcagatgcattaacagaaccatctcca

SEQ ID NO: 843441 - DNA, 100 bp, Homo sapiens
cgatcatactgggagatgcggggcaatgcactagaaaagaagtctaactatgaagtattagatttgcaggtcgaagtaagaaggaaaccaaatattctct

SEQ ID NO: 843442 - DNA, 100 bp, Homo sapiens
tctttgtacagaaattgaaaggcttcaaagctagcagtgccggtggtggtgtgcacattgagccccggtatagacagttcccccagctgaccagatccca

SEQ ID NO: 843443 - DNA, 100 bp, Homo sapiens
aacaaatcaactgtcattgactcctcctgtgttccagttaataaagcatctacaaatgaggcagcctggggcaggctattactccaaagcgactcctcac

SEQ ID NO: 843444 - DNA, 100 bp, Homo sapiens
cattgggagaaatccccactcctccaagaaccaacccccaaattggctgggacaggtttctagagaggaaggatctccccagctgtcttcagcaaggccg

SEQ ID NO: 843445 - DNA, 98 bp, Homo sapiens
acgccattatcgcatctccccgacaaacaccacgagaattccgcagcccacacggctccatctactctttgaagcttctgcccagcttgcattgtttc

SEQ ID NO: 843446 - DNA, 100 bp, Homo sapiens
ctggtatcggtgttcccctggtttaactagcctgtttgacttacagattccagtctgctgttagatgattattcatccaagttgagccccaaaccaaaga

SEQ ID NO: 843447 - DNA, 98 bp, Homo sapiens
acgagcctacttcaagagaaataaggatgataatgaagataattcaaatgatgggacccagccatccaaaaggaggcgaatgggctcaggagatagtt

SEQ ID NO: 843448 - DNA, 100 bp, Homo sapiens
gaaggagagtgggcgtctggcggggtccgcagtttcagcagagccgctgcagccatggccccaatcaaggtgtgggcccatcgctggatggatctgtcag

SEQ ID NO: 843449 - DNA, 100 bp, Homo sapiens
attgtgaactaaggccccctgcccccttttcctggtgcatgtgaagttatcaaaaacagagccagcccctgggcaacaaagtggaaatggagattgtgag

SEQ ID NO: 843450 - DNA, 98 bp, Homo sapiens
tacaacacatggtggaatgtatccgggaggtcaacgaggtcatccagaaatgcactcggtgatggaaagagagccactattctgaagaacacttggcc

SEQ ID NO: 843451 - DNA, 100 bp, Homo sapiens
cccccaaccccctgagcaagatttcctgggtcaacaggttacatttggccaaaatcggactccgtacggcttcaggtccagagcgtggagaagcctcagt

SEQ ID NO: 843452 - DNA, 98 bp, Homo sapiens
gccagcacgagcaactcctcaacaacctgtgtgctcggtacgatgaaaacctgatcacagatctctatagggatcgatttgcttagtggtataatacc

SEQ ID NO: 843453 - DNA, 98 bp, Homo sapiens
tggatcaatatataataaaacgctttgatggaaaggagagtgggcgctccctttctcttcctggaagatcagtcccaccccccatttctacatctcct

SEQ ID NO: 843454 - DNA, 100 bp, Homo sapiens
cttctgcatgaacatctccagccagggagtccagattacatcctaccctgcagtcctggatggcgcctccgacttgcagcttccttcctgctttccgtct

SEQ ID NO: 843455 - DNA, 98 bp, Homo sapiens
gatgcccaggttgctcctgcaactgaagaggttcatatccagctttcagagtggcaccgtgcaatttttcttccacaggcctggcttgcatacatgaa

SEQ ID NO: 843456 - DNA, 98 bp, Homo sapiens
tttcttaacagccaaactgaatgcagaaaagctcaaagatttcaaaatcaggctaccacatactgttgattgtgatgaaatgccagttgaagcacctg

SEQ ID NO: 843457 - DNA, 100 bp, Homo sapiens
agaatcctatagaccagtgtaataccctgaatccctcgaggctttgggcaatccaactccctcccgacggctggctctgtgggcggtggcatgggcagac

SEQ ID NO: 843458 - DNA, 98 bp, Homo sapiens
gatttgcctttagaaggagctaagatggggaaattgaggcagagaagccaagacatgtgctaaaggtcatgcaggctatgaatggagctggaatgtga

SEQ ID NO: 843459 - DNA, 100 bp, Homo sapiens
cctttttggttctttcagctaccataaataacccaaatcttctcaccaagagtccttcaataatgttaaacagtggctgcaggaaatagatcgttatgcc

SEQ ID NO: 843460 - DNA, 100 bp, Homo sapiens
caggacagcacctagtcgtggccggaggagtctcagagctgtcagaaagggggcagctggcattttatgctatgtgggagcctatgtcttcatcacttat

SEQ ID NO: 843461 - DNA, 98 bp, Homo sapiens
gacaaaatcaatgaaggtgacctaattgcagaggttgctgaaaagccaggagtcaaaatgactgagcgctttgactgccaccattgcaacgaatctct

SEQ ID NO: 843462 - DNA, 100 bp, Homo sapiens
ctttgatcccacacagtgatcagagattgcgccctcagcgaacgatctaggggtgtttattcctgctcctatggctcaagggatgagaagtgacttcttt

SEQ ID NO: 843463 - DNA, 134 bp, Homo sapiens
cagagtggacgaaccgccagcatggggagagaccagcgcgcggtggccggccctgccctacggcgcaattctgtggtgttcttggtcacacatttatggagtttctgaagggcagtggagattactgccaggca

SEQ ID NO: 843464 - DNA, 100 bp, Homo sapiens
gctgaaatacggtgatgcctgggtgaagaagtatgatcgctcctccctgcggaccctggggtcagctcctttagcggcagagttttccgagtgaccttct

SEQ ID NO: 843465 - DNA, 98 bp, Homo sapiens
gaattagaaaggagctgcttcccaataaggaaacagttaacagaaccttctggatatttaacagatggcccaattaactataaatataaaactaaatg

SEQ ID NO: 843466 - DNA, 98 bp, Homo sapiens
tgaaatgaaaggagattccaacctacttcaggtgaacaaatagaagctgagggtgaaggacctacagctgtcaccttcatctcttctcaacactgcca

SEQ ID NO: 843467 - DNA, 99 bp, Homo sapiens
tcatctgggccatgtgcatctctgtgaaagaggttgcacactgggccacagaggatccagcaaggatgaagaaatggagcagcacagacttgggggcag

SEQ ID NO: 843468 - DNA, 98 bp, Homo sapiens
gtgagcacgagcaacacagtcacggcagcccacatcaagaagttcaccttcgtctgcatggctctgtcactcacgatagaatgagtccatttaagtcc

SEQ ID NO: 843469 - DNA, 100 bp, Homo sapiens
ccattgggcagtgcctgtgccaggcaggctacgagaaggtggaggatgcctgccaggggaatgaaagctactggttgattttaaagtgcctgggcctcac

SEQ ID NO: 843470 - DNA, 100 bp, Homo sapiens
gaaggactcagtcagggtgcagcgccttacaaacctccccatcaacgccaggaggaaaagctttctcaggaaaaaggtgttctgaagacgcagatcccga

SEQ ID NO: 843471 - DNA, 100 bp, Homo sapiens
catcgcccgccgagccacagccacgatgatcgcgggctcccttctcctggagagataccagaaggagcaggacaagctgaaagaagagtgggaaaaggcc

SEQ ID NO: 843472 - DNA, 98 bp, Homo sapiens
aacccaggaggagactctccctggaaaacttcccttccctttcgagtttgccagatccggcccggtgcctgggttccaggaggacacgctgcagttgg

SEQ ID NO: 843473 - DNA, 98 bp, Homo sapiens
tggaacagctttgagaagagcaaggtcctgaacgaggctgtgggggccctgatgtaccacaccatcactctcaccagggaggacctggagaagttcaa

SEQ ID NO: 843474 - DNA, 98 bp, Homo sapiens
aagcccgaccaatacactgaggccctggcccagagggacaagaagatgagaatgtgcctactgctcctgatcctccaagtcaacatttacgtgggcat

SEQ ID NO: 843475 - DNA, 100 bp, Homo sapiens
gctgctgcagcggattcctgagttcaacatggcagccttcaccacaacattacagaaccttcaaagagactgttacactgacgtggccctccctctttat

SEQ ID NO: 843476 - DNA, 100 bp, Homo sapiens
cgccagggcctcccaggcccagagaagctgccgggctccttgcggaaggggattccacggaccaagtctgtaggttcgaaaacatggccaaaagaaatgc

SEQ ID NO: 843477 - DNA, 100 bp, Homo sapiens
agcatttgctgcagaagcgtagtcggccagaggtggcgctcaggcacgaggatggcgatgagaccacggagccaccccccagtgggtgccgggaccggag

SEQ ID NO: 843478 - DNA, 100 bp, Homo sapiens
gaaagtattgggaataatgctgccctcccatcctcaagggccagtgggaactctaatattggtttccacttgagcggcacagtgacagaacctgcaatac

SEQ ID NO: 843479 - DNA, 100 bp, Homo sapiens
aactatacggaaaacattacgcctctggatggatgatgttaatgagcaaggtgtccgcaatgttgccagtgtctgtctgcagattggctacccaactgtt

SEQ ID NO: 843480 - DNA, 100 bp, Homo sapiens
gaacagacacgggtgaatgctgctaaaaacaagactggggctgctcccatcattgatgtggtgcgatcgtcttaggaaaagtcctcagtgctgtgggcag

SEQ ID NO: 843481 - DNA, 99 bp, Homo sapiens
ttggtttgtagccaaaaacttgctggaaaccctgaaaggccatttcataattctgaatcatgtctgataacggagaactggaagataagcctccagcac

SEQ ID NO: 843482 - DNA, 100 bp, Homo sapiens
caaacatcaagcagaatgtgatttgcttgaagatatgagaagagacggaggatgcaaatgaagaagccccattgagggaccgctcccacatcgagaagac

SEQ ID NO: 843483 - DNA, 98 bp, Homo sapiens
gacttcagattgtgtttgtgatcaggagagcagtcttctgaagaattgtggctcagttttcttggaaactacttctattgagaagggcaaaggcaagg

SEQ ID NO: 843484 - DNA, 100 bp, Homo sapiens
atagtagctgtacctctggtgctgaacaaaatgatggccaaagtattagaaagaaacgaagagccactggagaggagatgttaaagtaacccatcttgca

SEQ ID NO: 843485 - DNA, 100 bp, Homo sapiens
cgccgccgtgcacgagcagcaaatggatgacaatgaaatcaaaaccttcatgccgattgcatgggcagcagcttatgagatggggttttgccgtgttgcc

SEQ ID NO: 843486 - DNA, 100 bp, Homo sapiens
gctgggtcagctctacggctgcgaggctgaagccgacgtagcttctctgaacagacgcatccagctggttgaggaagagttggatcgtgcccaggagcgt

SEQ ID NO: 843487 - DNA, 100 bp, Homo sapiens
gaagaaatgcaatttgctgttggctggagtggttccttaaatgtcgaagaaggttttttgctccactcaagcctgttagaatcaccatggaatacagctc

SEQ ID NO: 843488 - DNA, 100 bp, Homo sapiens
agctacttggagtagggacaaaatatcttggctcacgtatttaagagcctgaatattccaggcccagctagaaaaaaagcgggatgacttttgtaaacag

SEQ ID NO: 843489 - DNA, 100 bp, Homo sapiens
tgttcttggggaggaacagcttttggcaatattggctcatatgaatggggagaggtaaacgcaaagcactgaagttgaattttgcaaatccacctttcaa

SEQ ID NO: 843490 - DNA, 100 bp, Homo sapiens
gattgcaaagcgaactacatatggaggagtgtctggtggccaccgagtactaaattcacttgggaataaaagaaaaacataagaaaattataagagaaag

SEQ ID NO: 843491 - DNA, 100 bp, Homo sapiens
tctgaatctttgtgtttggctgcccaggctcgcctcgactccaaatggttgaaaacagatatacagggagaactaatgccgacgtgatgaccgccctgtc

SEQ ID NO: 843492 - DNA, 98 bp, Homo sapiens
caatgctgctttcaatgacctctggagacttgacctaaacagcaaagagtggatccgacctttggcttcaggaggaataaacatggtgtgtctcgaaa

SEQ ID NO: 843493 - DNA, 100 bp, Homo sapiens
cccatctgtaccctgaagaacttccctaatgccatcgagcacaccctgcagatgatggtggctgatgtcttcagtcaccgcttctataagctctatcagc

SEQ ID NO: 843494 - DNA, 100 bp, Homo sapiens
atgacgaaatccaggactatgacttcaagactcggatatgcaaaaaagtctgtggccactacactcaggatgtagatatgatggatcagaatggaatgac

SEQ ID NO: 843495 - DNA, 101 bp, Homo sapiens
agaagacaaggaaatggctgatttcctgagaatcaagttaaaacctctagacaaagtaaccaaatctccagccacggatgtgatgctggtacaacccagag

SEQ ID NO: 843496 - DNA, 99 bp, Homo sapiens
ggtgtatgtgttcatcaaggacaattgcatgcacttacagagcctgctcaggaagaactcagagaagatccagattttgaaattaaggaaggagaagga

SEQ ID NO: 843497 - DNA, 100 bp, Homo sapiens
accccagacaacatgtgcatggggaggaccagtcgtggatgttcacggaagaccagggtgtagatgacaggctgctctatgacattgtattcaagcactt

SEQ ID NO: 843498 - DNA, 100 bp, Homo sapiens
cctctgaggcgctatggggcggtggaggagacggcttggaaaacggagagactggggagaagcaacagcattattgagaaaagcccttacagaagagtgt

SEQ ID NO: 843499 - DNA, 100 bp, Homo sapiens
ctgactgagaagatgcatgccagagacttcacagtttctgctctggtgtgatgaatgcagactctgctaccattttggctgtttggatcctcctttgaaa

SEQ ID NO: 843500 - DNA, 99 bp, Homo sapiens
ggaaatctggaaccgggatggcgacgtctacactgagtcggaggcgaagatcctattaggaatacaggaacttctaaatgaaccaaatatccaagaccc

SEQ ID NO: 843501 - DNA, 98 bp, Homo sapiens
gtggctgtcctgctctacgcctccatccacaagattgaggagggccatctggctgtgtactacagctcagcctccaggaccctgctggttttgccttg

SEQ ID NO: 843502 - DNA, 100 bp, Homo sapiens
aatttgataaacattatgagcagcaaatgaaggaatctacactgaagtttcgaactgagatctaagaaggtactgctgatgcagcaaatgtcacaagcac

SEQ ID NO: 843503 - DNA, 100 bp, Homo sapiens
tgtagccatgagcaggctcttggtgctaactatggagaaaagtgcctctacaactattggaattgattcggaaggccatgcagctaactttgtagaaaca

SEQ ID NO: 843504 - DNA, 100 bp, Homo sapiens
agagacgtccaacctcgtgcgcatgcgcagccaggccctgggccagtcggcgccctcgctcaccgccagcctggctgaccggttccctgatgtgttacct

SEQ ID NO: 843505 - DNA, 99 bp, Homo sapiens
tcagccgggaactctgaacctcaataacgagattccagaggggtgactaccatattgatgtctgtatcaatgactacctggatgttttctgccctcact

SEQ ID NO: 843506 - DNA, 98 bp, Homo sapiens
ggaaggaaagccaagaactcatagtgcagacagatgaagaccgcattggaggtgatccttttaatggaacagattttattgactgcctcgaaatcttt

SEQ ID NO: 843507 - DNA, 98 bp, Homo sapiens
gacataccactatatcagataagcttgacattacagccaagatggtgctgtcccagagacaacgagatgaactcctggtctgccacctcagaactttt

SEQ ID NO: 843508 - DNA, 98 bp, Homo sapiens
tcgagggcaaccgcatcggccacgtgggccccgaggccttcctcagcacaccccgcctgcgtgccctcttcctcagatttctcaaggggaagataaaa

SEQ ID NO: 843509 - DNA, 98 bp, Homo sapiens
aaagacgttgaactctcagtggtcctacctggggatattatcaaatctactactgttcatggcagaacccctgaacagtgcccaagtgttgtctcttt

SEQ ID NO: 843510 - DNA, 100 bp, Homo sapiens
gaggcctctgtagggcctggggaggcacctgcggggccgccctcacaggaacctccatctctcaggggccttggacaagttgttactgactatgttcatg

SEQ ID NO: 843511 - DNA, 100 bp, Homo sapiens
atgctttcgaggaaacttgctcaacttcctgatagatgtacactgaaaactggacattataacattaagatgtggagagcatcttgtgcgcaccatactg

SEQ ID NO: 843512 - DNA, 74 bp, Homo sapiens
gcagctagtaatttgccttctggattgaacaattggcttctttgcatgcttttggtttgttaccaaaatataca

SEQ ID NO: 843513 - DNA, 100 bp, Homo sapiens
aaggacagaaaggagaaccagcagtggttgagcctttgagacatttgggaaatgatgaagtgcacattgtttggtcagagcatactagagactacaggag

SEQ ID NO: 843514 - DNA, 100 bp, Homo sapiens
cagcctcaggcgtgcgcggacggtgtgcggggatgccaaggcctgcgtgatccacggcaccgacctcaaggacttcacctccgagcaaatcgacgagatc

SEQ ID NO: 843515 - DNA, 100 bp, Homo sapiens
tcccgaaagagctaagccgagcctgcgccggacgggtgggctggactgagagagacggggtttcaccatgttagccaggatggtctcaatctcctgacct

SEQ ID NO: 843516 - DNA, 98 bp, Homo sapiens
ggatttactcccttgatggaagcagctgctgctggccatgagataatcgtgcagtattttctgaatcacgtattacatgaaacctttcctaaacatac

SEQ ID NO: 843517 - DNA, 98 bp, Homo sapiens
ccaccgtttcctccaggacagcacctagtcgtggccggaggagtctcagagctgtcagaaagttccacgcactctcctctcctcagtctcctttcccc

SEQ ID NO: 843518 - DNA, 98 bp, Homo sapiens
cgccagccccatccaggatgcggtcctgaagcgcctgtcgctgctggaggacatcgtgtaccggcagctgaatgtgttttacctcaatcatatatcca

SEQ ID NO: 843519 - DNA, 98 bp, Homo sapiens
tctggtgagaaggtggtgaggcttcccgtcatattccagggctctgcttcaaaaacaacgaccacctcaggtaggaatatatccaagcctgactcctg

SEQ ID NO: 843520 - DNA, 99 bp, Homo sapiens
tcgtcttccacttgcacgaaagctttcctaggccaaaaagagatgcaggacagctggagcacacattgatgaatcattgttccctgcagctaatatgaa

SEQ ID NO: 843521 - DNA, 99 bp, Homo sapiens
tttatttgatgtccacaatgagaacccctgaacagtgcccaagtgttgtctctttgttgtcagagagttacaaccctcatgtgcgctacggagctgcaa

SEQ ID NO: 843522 - DNA, 100 bp, Homo sapiens
attacatcgcagaacagccctgaggcaagagaagaaagggaataccttggcaagcagctccagtccgagcagccccagaccgctgccgcccgaagctaag

SEQ ID NO: 843523 - DNA, 101 bp, Homo sapiens
cagccttggaaagtcaggaccgcgacggcagcagagcaaccagagtgaactccgagcaggaacacttcctcattgtcccttttgggcttctttacagtgaa

SEQ ID NO: 843524 - DNA, 99 bp, Homo sapiens
gagaagatcattcgaacgcgaatctatgagtccaagtactggaaagaggagtgctttggacttacagaatattccaacccgggaccggctagagggcat

SEQ ID NO: 843525 - DNA, 98 bp, Homo sapiens
aatgcttgaggctccttacaagaaggacagtggagcattgttttcacatgtgtgatagaatggttatctatttcttcattgctgcttcttatgctcca

SEQ ID NO: 843526 - DNA, 98 bp, Homo sapiens
gataatattttaaaatatgatgaagaaggtggaggagaagaagaccaggtgaatcagttcagacagctgtattccaaagtcatcaatgataagcatga

SEQ ID NO: 843527 - DNA, 99 bp, Homo sapiens
caagaagccaacagcgaggctttcagttctttggaattccattcttttccttattcttctgatgtggatccaggtgtggagatgcttgtatctgggacc

SEQ ID NO: 843528 - DNA, 100 bp, Homo sapiens
ctccaagcagaagagcttcatgaaaaggccctggaccctttcctgctgcaggcggaattctttttggaagatgctggctcaagtagtttagataatctac

SEQ ID NO: 843529 - DNA, 99 bp, Homo sapiens
tgcaagaccagtccatttggggaaatccttcggatggtgaactcattagaattggttcaccctattgtctgcatcttcgagttaagttttattcctcag

SEQ ID NO: 843530 - DNA, 100 bp, Homo sapiens
ggcttctctctctcgaatacctttaacatttatcgccttgttagtctccacatccacctccgtgaaaggtatgccaatgtcttcctgcagcctgttacag

SEQ ID NO: 843531 - DNA, 100 bp, Homo sapiens
ctcatcagctacctctctgagcaagacttcggcagctgtgccgacctggaaaagaggccagtcaccactgcacattttgggacaatatggcaaggagaat

SEQ ID NO: 843532 - DNA, 100 bp, Homo sapiens
ccagggccactggagctggtggaaaaaaacattcttcctgtggattctgctgtgaaagaggccataaaaggatttaagtgccctgtatgctcaaaatttg

SEQ ID NO: 843533 - DNA, 104 bp, Homo sapiens
ggaatcccaatttgcctccacttagtgagcggaagaatgctgatgtagcccagcagttccagtatgctgtgcgggtgattggcagcaacttcgccccaactgtt

SEQ ID NO: 843534 - DNA, 99 bp, Homo sapiens
ctgcccagacggctcacctgtgcgggatggaacaaaaggtggcccacatgaagagcaaagacaatcggatcaagctgatgaacgaaattctcaatggga

SEQ ID NO: 843535 - DNA, 99 bp, Homo sapiens
acagccccacgcgcggggccatgcaggaattcactatgcatgataccattggatgttacctggatatagataagggacatgtcaagttctccaaaaatg

SEQ ID NO: 843536 - DNA, 99 bp, Homo sapiens
tccactgaaaaattcttcagattggaaaataccacaggatggagactacgagttttgtcctgggacaatttttggcacattggaaatgttcagccaaat

SEQ ID NO: 843537 - DNA, 100 bp, Homo sapiens
agcgcggggcgacgctggctgcagggacccggtgacagcgtgagagccgtgctatcaagactaatcaggaccttctcccagaaactccatggacgcacat

SEQ ID NO: 843538 - DNA, 100 bp, Homo sapiens
gaagttcctcgagcgatctggacccttcacacaccctgatttcgaaccgagcactgaagtcactctggaatatagacccgtgatcgacaaaactttgaac

SEQ ID NO: 843539 - DNA, 98 bp, Homo sapiens
agccaccggaccctgtcttacagccgctggagctatgacagcacacgacggttctgccctttatattaatcgagatgaggacatcgcaccatcagtat

SEQ ID NO: 843540 - DNA, 99 bp, Homo sapiens
tagccttggaccgagacatgatgaagaaagatgctaatcctgaggtgacgatgacaatgcttcgctggatctatacagatgagctggagttcagagagg

SEQ ID NO: 843541 - DNA, 100 bp, Homo sapiens
gcagcagctcaccgaggacggggactcgtggaaagccagatgacatcaccgtccttctttcaatagtggctgagtatacagactagctgaggtgtcaagt

SEQ ID NO: 843542 - DNA, 98 bp, Homo sapiens
ccaccggtgttccaactgtttaaagaggagatgttaaagtaacccatcttgcaggacgacattgaagattggtcttctgttgatctaagatgattatt

SEQ ID NO: 843543 - DNA, 112 bp, Homo sapiens
gatgtctacttcgaagactggcaagcacggccacgccaaggttcacccaagcagcactgactataacctaatgtggacaggatcccacctgaagcccttcttactgcgcacc

SEQ ID NO: 843544 - DNA, 100 bp, Homo sapiens
ccggcaacatggtgcggtcggggaataaggacttcttaattactcaaatgactggaaaagagctctttgagatgtggaagataataaatcccatggggct

SEQ ID NO: 843545 - DNA, 100 bp, Homo sapiens
gctgttacaacttggttataaagcatccactaatcttcaggatcaacttgagaagatctttctctggaatcaaaggactccagctgaaagttaacctcca

SEQ ID NO: 843546 - DNA, 98 bp, Homo sapiens
ggtgcccaggccagctgtgctggaccctgcactttgcacggccacctcttggtcgttcatgcccaacttggtgcctcccaagatccccgatggagaga

SEQ ID NO: 843547 - DNA, 100 bp, Homo sapiens
gttggaaagaaccttttccagctttatcctgtggataaacgcagagtgaacgagtttggggagtcctacgaggagaaggccacgcgggcgccccacacgg

SEQ ID NO: 843548 - DNA, 100 bp, Homo sapiens
tggctgctgcagtgacccagaccctctcctttccctttgagaccgtgaagagaaagatgcagtgtttgctttcacaaccaaagttctgggccattcagac

SEQ ID NO: 843549 - DNA, 98 bp, Homo sapiens
catctgccagttcaccagttccttctaagagaacttgttcaaactgctcaaattcaaacacactccaccaggtggcatcatacctctgcttgttgcca

SEQ ID NO: 843550 - DNA, 99 bp, Homo sapiens
agcgagctgagtggttgtgtggtcgcgtctcggaaaccggtagcgcttgcagcatggatccaaggattctgtagctacaatgttgtcaagactttttcg

SEQ ID NO: 843551 - DNA, 98 bp, Homo sapiens
ctcggaaccccttggaagagctcaggcctagccctaggggtcaaaatgtggggcctgggccccctgcccagacagtgctctgcctggcccagaccatc

SEQ ID NO: 843552 - DNA, 98 bp, Homo sapiens
agggcgaagacgagatccagttcctgcgaactaattcctagaggacctgtgcaacaacctcttgaggatcgaatcttcactcccgctgtctcagcagt

SEQ ID NO: 843553 - DNA, 100 bp, Homo sapiens
accagcgccgggacgggggtggccgtgcaggctgctgagaactagccctagacctctgcgtgagggttcttctgccgaagacatcaccagtgtgtggagc

SEQ ID NO: 843554 - DNA, 100 bp, Homo sapiens
cgatctaaactattggataaacttcagatggatcaatcttcctgtcctacaactgacaaaggatcccctaaagacccctggaaggctggaccatggcaca

SEQ ID NO: 843555 - DNA, 98 bp, Homo sapiens
ccatctggagcaaggaaaaaaaccttcgactatgcagagacatgagatggtagccaacccctcagcttggatttacactgggcaacgtggttggaatg

SEQ ID NO: 843556 - DNA, 100 bp, Homo sapiens
aatccaagtgatggagcagcattttcaggttaaagtattgcacaatcagctggtccttttccacaatgccattgccgcttactttgctgggaatcagaag

SEQ ID NO: 843557 - DNA, 98 bp, Homo sapiens
gcagtacagctgatggcggaggccgagaagcgagtcaaggcctcccactccttcctccgagggctgtttggtgctgaagctgctgaaagatggcagaa

SEQ ID NO: 843558 - DNA, 99 bp, Homo sapiens
ttccaggggctctgggagtggctgccaggtgagaattatgaagatgatgacctagtaaattctgatgaggttatgaagaaaccatgtccagtacagatt

SEQ ID NO: 843559 - DNA, 98 bp, Homo sapiens
ggcaagcctgggccttctggtcaacctggccgtccggggcccccaggccccccacctgcaggtgtatgcaacagcgttattgcaacaggctaacgaaa

SEQ ID NO: 843560 - DNA, 100 bp, Homo sapiens
agattggacgtactcatactcaggatgctgttccacttactcttgggcagaaacatctgccaaagaaggtctgctgctttggtgtcagaggaaaactgct

SEQ ID NO: 843561 - DNA, 100 bp, Homo sapiens
tcgctgtagtgggcggccagagcgccggcaagagctcggtgctggagaacttcgtgggccgtttccaacatggctagatccatcagaaactgaagccgtg

SEQ ID NO: 843562 - DNA, 100 bp, Homo sapiens
tcgccaaggactgcttccccgagagccccggagctatgtggagtctgtggcacggacagcggtggctggaccccgagctcaggactctgagcccaagagc

SEQ ID NO: 843563 - DNA, 110 bp, Homo sapiens
cggcagtcggatagacaataccacaacaacacattttgcagagttaacaagcacaagccctggctggagcccacctaccacggcatagtcacagagaacgacaacaccgt

SEQ ID NO: 843564 - DNA, 100 bp, Homo sapiens
cctgtctggtgtttcattgcctatgggtatttacgaaaactagatccagtgccctacctgccaattcgtctggtgttttaagtgccactctccttggcat

SEQ ID NO: 843565 - DNA, 99 bp, Homo sapiens
gattctggccaatggtgttctttcgagggagtggtgcccaggcaacatgggtgactggagcgccttaggcaaactccttgacaaggttcaagcctactc

SEQ ID NO: 843566 - DNA, 98 bp, Homo sapiens
gtaatagatgtctgacaaactaaagaaagacttgtgttactgccctataaggactgccaggcaataatgaaggttcttttactgaaggatgcgaagga

SEQ ID NO: 843567 - DNA, 100 bp, Homo sapiens
ctcctgagtagctgagactacaggatcaccacgatgaatgacacggtaactatctggaccaggaagttcatgaccaatcgaccgctccagaggaaacaaa

SEQ ID NO: 843568 - DNA, 98 bp, Homo sapiens
cgtgtattccactcataattatgggaccactcagaggcatgggtgtcgaggactgccttatgctctcagtgcacctgtgcaacaactccatccagaag

SEQ ID NO: 843569 - DNA, 100 bp, Homo sapiens
agaacaatgagagatcagcgagccatgatgatccaaacaccttggccaatccgccatggtatagttgaagattgggacttaatggaaaggtttatggagc

SEQ ID NO: 843570 - DNA, 100 bp, Homo sapiens
ccggcccgagatgaatcctgcggcagaagccgagttcaacatcctcctggccaccgactcctacaaggagcatcagatccatgctgctgctgactcggag

SEQ ID NO: 843571 - DNA, 100 bp, Homo sapiens
ttagcgacatcaggaagaacagggtcgaggatcgaggctgtattcatcaccaaagaaaaaacttacaccaatgcagaaatcggttagtccattagtttgg

SEQ ID NO: 843572 - DNA, 100 bp, Homo sapiens
tcttcactcgctgccaagggctacagaagtgtgcatcccaaccttccttctgacaagtcccagatactggctccaatactacagaatgaatagaaaaaat

SEQ ID NO: 843573 - DNA, 100 bp, Homo sapiens
gcggcgccggggcgatgctgtgggtctcgttgggcgccggtgtcctggcctcttcctcagagagattggaacaattatcaggtcattaggatgctgtcct

SEQ ID NO: 843574 - DNA, 131 bp, Homo sapiens
cgggagaagtttcccagaaaaaatgcccagcgcggcgcggggctgcggagtcgtccggagccgctgcgcggttgctcgtgggggccccgcgggcagaagcgcttccactgcagagagccaacagaacggga

SEQ ID NO: 843575 - DNA, 100 bp, Homo sapiens
acgccttgttgcccagttccccagttctggcagattctggaaactgtacattgaagcagaggatcgtctttggaggaaatcccgttcaccccataataat

SEQ ID NO: 843576 - DNA, 100 bp, Homo sapiens
ccatttctgctctttcggctagcagccgtgtggctagaactacctctgatcatctttgtctattatcctcccagtccacaacgctgaaccgtggctggac

SEQ ID NO: 843577 - DNA, 100 bp, Homo sapiens
gttcggcagcttcagacactaaaagacaacctgcagctgcctctacagtttctgtccaggttagatggagtcagatttgaaaatgaaaaaattaatgtta

SEQ ID NO: 843578 - DNA, 98 bp, Homo sapiens
cggtgttgcatccttggagcgagctgagagctcgaggcgatgctgaagaccaaccgaggtactataggaggcttcttcctcgctggtcgtgatatggc

SEQ ID NO: 843579 - DNA, 129 bp, Homo sapiens
agacagcaggctctgtgcggggtggagatgaagtttatctgctttgtgacaaggtgcagaaagccctgggcgctgcctatggcacagccaagagcggtaccggcattgcggccatgtctgtcatgcggc

SEQ ID NO: 843580 - DNA, 100 bp, Homo sapiens
ccagtgtaaccaccatcaaaaccattgaagaaaattcttttgggagccaaacccacggattggattcagcatcaaaatacatctactcatattgagagct

SEQ ID NO: 843581 - DNA, 99 bp, Homo sapiens
gattgcgaatcctccgctgaggtgatttggatatccctagaacgttgagggcacgagtcgggtcctgagaccagggaaaaagacctcgatgaagttctg

SEQ ID NO: 843582 - DNA, 100 bp, Homo sapiens
gagtttgatgaggatttcgaggaggaacccacatcccccataggtcactgtgtggccatctaccactttgaagcatttcttgaagcccctgcaacggttc

SEQ ID NO: 843583 - DNA, 99 bp, Homo sapiens
gaaggccgctactccgaggcggtgttttattacaagtgctctgccaatggatttatgacccaaactaccaacaactctagccaaggtttttgtggtact

SEQ ID NO: 843584 - DNA, 100 bp, Homo sapiens
gtggcactgaggctctggaacttctgcccagctctccttggttgtggcagcactgcctgaaggtatgagaccagattctaatctttatggttttccatgg

SEQ ID NO: 843585 - DNA, 99 bp, Homo sapiens
tgtacaagtaccccttcgagcaggtggtcgccagctttctccgaaagttgcagaatgaagaagagtctggagaacctgaacaggctgcaggtgatgctc

SEQ ID NO: 843586 - DNA, 100 bp, Homo sapiens
catttggctgcaaagaaatctgcttggaagaaggggttacgctgtttggccgggttctggctccttggcagcaatggctgtatttgaagataagtttagg

SEQ ID NO: 843587 - DNA, 100 bp, Homo sapiens
gttagcttcagagttctttgtggatggacttgattctgatgagagagtacccaaaggcaagtggaacagctctaatggggttgaagaaaaggagacttgg

SEQ ID NO: 843588 - DNA, 100 bp, Homo sapiens
tgccggttgcgccttcttcctggacatgaccaactgtgccggtggtggtgtgcacattgagccccggtatagacagttcccccagctgaccagatcccag

SEQ ID NO: 843589 - DNA, 100 bp, Homo sapiens
caactatctgggggggacattcccaggtctcctcatttaccacatcccccaggttgaaccacgggaccttgacttcagtacctctcatggggctgtgagt

SEQ ID NO: 843590 - DNA, 98 bp, Homo sapiens
ctgtattcagatcttcatgtgtctcttctaagctgaataaagctgttttggaactgtcaggtacctcaaagctgtgacatttgtatgtgcagtatctc

SEQ ID NO: 843591 - DNA, 98 bp, Homo sapiens
tgatcccctggccgttggaggagcagttagccaacattactcagagccgcagttcccactccttgaacaaacagctcatcattaacatggaacccctg

SEQ ID NO: 843592 - DNA, 98 bp, Homo sapiens
tcagttcgatcagggcaagttcatccccggctccttctcggccactgtgggcatcggattcacgtgcaagaactatatcagccagtattctgaaattg

SEQ ID NO: 843593 - DNA, 100 bp, Homo sapiens
atccgcaggttccctacacggtctcctgggtcaagggaatggatttgtaaactcaagagcttctccaaatttgattggagctactggtgcaaatagctta

SEQ ID NO: 843594 - DNA, 100 bp, Homo sapiens
atggcttccccaatgagtactggggctggggtggcgaggatgatgacatcttcaaccgttgagccccatatgggggttggcaggcagcagagaggcccct

SEQ ID NO: 843595 - DNA, 100 bp, Homo sapiens
agctgctcttctggggtatcgcgatccacttaaggatgaggcagacttggtgacaagctggtctgagcaggcaccacctgccctggtcagctccagccag

SEQ ID NO: 843596 - DNA, 100 bp, Homo sapiens
tgtccgtcagtccctaggtatccgcactgctcaggggaagcggctcagccccagggcagcacatcagagacaccatggaacacagccattcctctgccgt

SEQ ID NO: 843597 - DNA, 100 bp, Homo sapiens
gcggagtggagctcagccaggggcagccggctctggtgctcccagaagaggtagctacagcaagctgggtagcaggcagatccaaaggatatcatgaagt

SEQ ID NO: 843598 - DNA, 100 bp, Homo sapiens
attatagcctcaaactcccaggctcaagcaatcctaccatgtcagccttcccagtagctggaactacagtgggcaatgggctggtggctggcagctctga

SEQ ID NO: 843599 - DNA, 100 bp, Homo sapiens
tgtagtgaccttagaacagcctcccatgtctcgactgcattgtgagagtgaatctttcaagatggatctaatcttagatgtaaacattcaaatttaccct

SEQ ID NO: 843600 - DNA, 140 bp, Homo sapiens
acccgtgtgtgtctcatcccagaaagagaagactttaaccactgtgatgcctgagaatccagtgctagaaagcttcaagatcatggattatagccttctgttgggaattcatttcctggaccattccctcaaagagaaag

SEQ ID NO: 843601 - DNA, 100 bp, Homo sapiens
aagaatttgacaaagatggtgatggagaaagtacctggcaaagaattctgcaactttgttcagtgccagcgattatgaagtggctcctcctgagtaccat

SEQ ID NO: 843602 - DNA, 99 bp, Homo sapiens
gcgcgagctttcccgggataagtagctttagcgatcgggagacagccgggcgctgcaagtgaagcagagatggtttctgccatcaagcctcctcgtgaa

SEQ ID NO: 843603 - DNA, 99 bp, Homo sapiens
ccgcgttcctgctgctctgcctgctccacaagcggcgccgcgccctcggcctgcacgggttggatttggtctagggagtcccagaaagaagtagaaaaa

SEQ ID NO: 843604 - DNA, 98 bp, Homo sapiens
tgggaaaggtggaaaccagctgcgctgtcctaaatgtggcgacttgtgcacacatgtagagacctttgtatgccatcatctctcagcaaggtgacata

SEQ ID NO: 843605 - DNA, 99 bp, Homo sapiens
ttgaacttaatacagcaagaaagaccatcaagtttaccagccacagaaacactattcagaatgggtgtagcaagaggaaccatcacaacattaagaaat

SEQ ID NO: 843606 - DNA, 99 bp, Homo sapiens
atgcctgtcctgggatttggcacctatgcgcctgcagaggaagctgaatatggtgggcatgatcagatagatttgtatgacgatgtcatatctccatct

SEQ ID NO: 843607 - DNA, 50 bp, Homo sapiens
ccagtacacggcccacgttgccaggagcatattaatgaaaagtgccataa

SEQ ID NO: 843608 - DNA, 98 bp, Homo sapiens
cgactttcagaaacaatcacatgaagactaaagcatctgtcagaaaacttggcagcccacaacagaaacccaagcgtctgcgcctggtggtagatgtg

SEQ ID NO: 843609 - DNA, 98 bp, Homo sapiens
catttgctgctcaaagccatggaacattttcccaatcaccagcagagagctgatatagctgttgctccactcactataacattggtccgtgaagaagt

SEQ ID NO: 843610 - DNA, 100 bp, Homo sapiens
aagaagctgaaagactctctgaaagccttaaattaagggtatacctcagttaccatgtgccaaagcattatacaactatgaaggaaaagagcctggagac

SEQ ID NO: 843611 - DNA, 100 bp, Homo sapiens
gtgaataatctgcaccctcgagtcactgaggaggacattgttgtcctggatgcctcatcccttagtttcaacaccagattgaaatggtttgccatctgct

SEQ ID NO: 843612 - DNA, 99 bp, Homo sapiens
aacgactgtggggacaacagtgacgaagagaactgtctcctggtgaccgagcacccgcctccgggcatcttcaactgtgtcttacaagtatcaagaact

SEQ ID NO: 843613 - DNA, 98 bp, Homo sapiens
aaggggattcaaacttcaacagaatgtggcaaccaggcattgcttctatgacagtgccagtgtacattgcggaggtctcaccacccaatttaagaggc

SEQ ID NO: 843614 - DNA, 100 bp, Homo sapiens
tttgcattggtttggctttggctacacagcactggttgtttctggtgggatcgttggctatgtaaaaacaggaatacaaacagaagcttgcacgagtaac

SEQ ID NO: 843615 - DNA, 100 bp, Homo sapiens
gcggaacgcaggagacacaagaagcggatccagttggtggattcaaagtgggattggaccttcttgtagaatttgaattccgcacaactacaacgactgg

SEQ ID NO: 843616 - DNA, 100 bp, Homo sapiens
agcagttctgcatcccaaggcctcacaaggtgtaaactgttttacaagaaagacaatgagtttaaagagaaaggcataggtactctgcatttaaaaccta

SEQ ID NO: 843617 - DNA, 100 bp, Homo sapiens
ggcagcattggcctttgcagcggcggcagcagcaccaggctctgcagcggcaacccccagcggcttaagccatggcgattgtgcctctactcctgcttgt

SEQ ID NO: 843618 - DNA, 100 bp, Homo sapiens
agaggccgttggacagtccaggggacgaagacagaagaagtagagaggcagggccgtgcttcccatcgacggtcagtgcgcacgttgtaatcagctgagg

SEQ ID NO: 843619 - DNA, 99 bp, Homo sapiens
gccgcggactccggagccgcacaaaccagggctcgccatgaagccaggctgaccggttccctgatgtgttacctgcttctgctactgatccaaactgca

SEQ ID NO: 843620 - DNA, 98 bp, Homo sapiens
gagccagcttctttgtcttacttgtcatttgaaggtgcaactaaaagaaacagaccaaatgtgcagcacacggaccctgactactcggctgcctatgt

SEQ ID NO: 843621 - DNA, 144 bp, Homo sapiens
aagacatcaatgacaatgcaccagagtttcttaatggaccctatcatgctactgtgccagaaatgtccattttgggtggaagattgctctgctgtgaatcgtgcccagcttccttccacccggaatgcctaagcatagaaatgc

SEQ ID NO: 843622 - DNA, 100 bp, Homo sapiens
ttaactagtaaagcagtacaagaggaattccagagacgctgtaacactctgatttcattgattgagaaagaaaatatggaaattgaggaaagagagagag

SEQ ID NO: 843623 - DNA, 100 bp, Homo sapiens
gcgaaaattggatgtgaaaatgaagccagaccgagcaatggcaccagcatgatatcattgatcattcctcccaaagaccagatttcacgagtggcaaaaa

SEQ ID NO: 843624 - DNA, 100 bp, Homo sapiens
gagcggctggctgaaaccgaccggcacaccttcctggctggggtggcctcactgtccgagcggttgcccccaagtttcctggcagtgtgtgatactgagg

SEQ ID NO: 843625 - DNA, 121 bp, Homo sapiens
agaggtccctcagcaaagatggtacaaaagagtctttggaggatgcggctttgatggatactggtagacacagtctgggccctctcttaccttactgatgctggcaatgaacaaatacaga

SEQ ID NO: 843626 - DNA, 100 bp, Homo sapiens
ccccatcgagcagagctcacatcctgtgcgcagcatcttctgtcccctcatgtccttccgccagggggcctgcgtggacggagtctcgctctgttgccag

SEQ ID NO: 843627 - DNA, 74 bp, Homo sapiens
tgtcttacgcaagctgacagtggatgtgcaattcttaaagaatgggcaggcccccgatttctacgttgagatga

SEQ ID NO: 843628 - DNA, 98 bp, Homo sapiens
cacagcgttgtgcaaatgaatgccttccactgaaccgaggattgattatgtcaagtggccaggcatggaaggagcaaagaaggttcactctgacagca

SEQ ID NO: 843629 - DNA, 98 bp, Homo sapiens
atcaaaaagatgctgtaaatgatgatgattttgagccatacttaagtagccagacaaatcaggcttccgaagatcttctcaaggaacactacgttgac

SEQ ID NO: 843630 - DNA, 98 bp, Homo sapiens
ctccaaggccaggatggtttcccagcgtcttcccaggaagacaagagggggcagcactgaaatacttaccaacgatcgtcaacgatgtgaaattggtg

SEQ ID NO: 843631 - DNA, 100 bp, Homo sapiens
aaacctcaggacttgagtaacagcaacatgtactatactggcaattgctggagaagattttgcaattgttgcttctgatactcgattgagtgaagggttt

SEQ ID NO: 843632 - DNA, 105 bp, Homo sapiens
tgatttgcgccatcatcctcatcatcatcatagccctgggcgctgcctatggcacagccaagagcggtaccggcattgcggccatgtctgtcatgcggccggagc

SEQ ID NO: 843633 - DNA, 100 bp, Homo sapiens
aaatcctgctgtcacagaagctaatggacatatccattttgataatgtcagtgtggtatctctacagggaatgcagagagcaaccaatgtcacctaccaa

SEQ ID NO: 843634 - DNA, 98 bp, Homo sapiens
agagagccactattctgaagaacacttggccaaaggctaatagctcgtcagcttgctaaaatccatgctattcatgcacacaatggctggatccccaa

SEQ ID NO: 843635 - DNA, 115 bp, Homo sapiens
aggaagttgtggttggtacagataaacttcgagtaactgggcatgatgccattgtcacactcctgaagcattataagagaccacaagatgaattgccctgtaatgaatattctca

SEQ ID NO: 843636 - DNA, 100 bp, Homo sapiens
ctggggagtctgattcagatgacaactgtacagatgtcactgctattgagaagggcaaaggcaaggccaagaaaggctcgtcctttcagactgtgtcagc

SEQ ID NO: 843637 - DNA, 98 bp, Homo sapiens
tttgaaacgtaactggttccctgaccagcattaaagctaggtcctgaatcattcaagtttgatggtgcagtggaggctgtggctgtccggcaggctga

SEQ ID NO: 843638 - DNA, 98 bp, Homo sapiens
gctgtacagccacactaactgtgacaggtaatgttgttaatggaacgattggcaaacagatggtggatatgcttgtggaatcttccaacaacgtggag

SEQ ID NO: 843639 - DNA, 100 bp, Homo sapiens
agaagaaatctggctatcatagtcaccatcagaaaagctaagtttgctgtatagtgaggatcaggagatctgatcctgattgcagaaccttccctgatta

SEQ ID NO: 843640 - DNA, 99 bp, Homo sapiens
ttcttggtctcactgagttctagaatgaagctgcagaccctcgcagtgagtgttacagctcttaaggcagaatccagagaccacatttgaagtatatgt

SEQ ID NO: 843641 - DNA, 100 bp, Homo sapiens
agaatttcgatctccgccctggggtcattgtcagaagctgaacatggttatgcctccatgttaccatacaataacaaggacagagatgccttaaaacgga

SEQ ID NO: 843642 - DNA, 100 bp, Homo sapiens
ctagccaagctgtcctgcctggaaaagaggcacagttagatgaagaaggacagtttcttgtcagaataatatatgatgactccaaaacttatgatttggt

SEQ ID NO: 843643 - DNA, 100 bp, Homo sapiens
actgcggtttcaaattccctaaacattttagatgatgattataatggacaagccaagcaatgttcacagcatctttaccgggagcagattccatctcaag

SEQ ID NO: 843644 - DNA, 99 bp, Homo sapiens
gaaggggaggcgccgcggactgtcctttcgtggctcactccctttcctctgctgccgctcggtcacgcttggatggaaaggcagatgtaaagtccctca

SEQ ID NO: 843645 - DNA, 100 bp, Homo sapiens
tagcagcaaggatcccatcgatgtcaactatgagaagctcaaaactgacattaagggctccttcactgaagtggtttccatcagtaacttgggaatggca

SEQ ID NO: 843646 - DNA, 99 bp, Homo sapiens
tcaaggctgcctataatcaagtaaaaacaatagctcaaggaaacctttccaacacagatgtccaagctgccaatgtgcgtgaaggaaaattggagcata

SEQ ID NO: 843647 - DNA, 100 bp, Homo sapiens
atcggagcgtgtggatttgagccgccgcattttttaaccctagatctcggcaagcacgaggagcggcaggacgagcatggctacatctcccggtgcttca

SEQ ID NO: 843648 - DNA, 100 bp, Homo sapiens
gcagcagtagtaccagcagtgacaggtgtacaagggagaagaagccacattccaaatctcaggcctccagaccaacacagactacaggttccgcgtatgt

SEQ ID NO: 843649 - DNA, 100 bp, Homo sapiens
ccaggttgatgaagctaatttattgacttggcaagggcttattgttcctacacttcgtgtatgatcatgtgttcgctgagaagatcacttccttgcaagg

SEQ ID NO: 843650 - DNA, 99 bp, Homo sapiens
gactgtttacgggagatgctgctcttcccttacgatgactttcaggttggaaaagagactgttcaaaccactgaggatcagattttgaagagagatatg

SEQ ID NO: 843651 - DNA, 99 bp, Homo sapiens
aacaaactcgaagaacagctgtggaaagaagttgcaaaacactgggtttatgctaaaactatcgatgggcaacagactattattgcatgtattgaaagc

SEQ ID NO: 843652 - DNA, 100 bp, Homo sapiens
aaaagaaagtaccggtgcctcctgccaaaaagccagaagctccacctcctaaaggaattagcagttcacaaagcacattcgcatataagggcttgttttg

SEQ ID NO: 843653 - DNA, 105 bp, Homo sapiens
catggggagaaactcagaagtggagagaacgtctgaggctacatagccagtacaaagatttaagtgccctgtatgctcaaaatttgtatcctcagatgaaatgga

SEQ ID NO: 843654 - DNA, 98 bp, Homo sapiens
gaaaagaatgaacactgtccttcaaaacgagggctttgttatgcacctaaagccatattggaagctccagaagaaagagcaccccccggaagtcagca

SEQ ID NO: 843655 - DNA, 100 bp, Homo sapiens
ggcgaagtccccggagaactctaccctggaggagattctggggcagtatcaacggagtctccgggacttacagattccagtctgctgttagatgattatt

SEQ ID NO: 843656 - DNA, 60 bp, Homo sapiens
tcaccgttatgtgggaagcgaatccaatgagtgaccgaggaggtggcgttcctttgagga

SEQ ID NO: 843657 - DNA, 99 bp, Homo sapiens
ttttcttcaatttgtatcattcacttccaccactactatctcagttagtttgacatctacaggaaggtgcccaaggaccttacgcagccaacgtacacc

SEQ ID NO: 843658 - DNA, 100 bp, Homo sapiens
ctgttatgttctgggataccttctcacttggaaattaatactaactttcttcaaagctgcatcatcacagggcgacatggagtccaatgggaaatacatc

SEQ ID NO: 843659 - DNA, 99 bp, Homo sapiens
ggagcttcacttggacaacaacaagcttaccagagtacctggtgggctggcagagcataagtacatccagaaatcacctgctaagaagctgactaatgc

SEQ ID NO: 843660 - DNA, 98 bp, Homo sapiens
caccaagaatggccacagccttgcactattcctgatcagagaactccagttgcttcaacacacagtatcagtagtgcagccaccccagatcgaatccg

SEQ ID NO: 843661 - DNA, 98 bp, Homo sapiens
tccgatttgaataccaacaatttgctcttcaaacctcctgtagagaacctcagaggatccagaacggcagctggtccttgctggactgttcctgtcca

SEQ ID NO: 843662 - DNA, 100 bp, Homo sapiens
tcagccatcacgaggatgatttcggaacctggagaaaatgaagcggctcagccccagggcagcacatcagagacaccatggaacacagccattcctctgc

SEQ ID NO: 843663 - DNA, 98 bp, Homo sapiens
gaggggaagtgatttgcctcagcttgtactgtgaggaattttaaattggaacaagagcaagaaaaaaacaaaatcttgtcagaagcactggagacgct

SEQ ID NO: 843664 - DNA, 100 bp, Homo sapiens
cgtggccttagctgtgctcgcgctactctctctttctggcctggaggctatccagcgggctaagtgatggatcttgtactccgtgttgcagattactatt

SEQ ID NO: 843665 - DNA, 100 bp, Homo sapiens
agactagccactttgcattgactggaaacaatggcatttacagaaagagtcaacagcagtggcaacagctactgtgtgaagacattcacaggacacagag

SEQ ID NO: 843666 - DNA, 100 bp, Homo sapiens
aaggaggcaccaagtgcatcaaatacctgctgttcggatttaacttcatcttctggattgatttcctaaattcagtaatagtggaccttcaaaggaagaa

SEQ ID NO: 843667 - DNA, 100 bp, Homo sapiens
gacagcacaggtcacagtaaggccaaaaatgtgcatactcacagagttagagagagggatggtgaagacaatagatgtgcatcttcaaatgcagcatcct

SEQ ID NO: 843668 - DNA, 100 bp, Homo sapiens
gaagatacagatcaccagcacactgcaagccatggggaggaagaagttcaaacttctcatggaacatctggaccctgatgaagaagaagaagaaggggag

SEQ ID NO: 843669 - DNA, 99 bp, Homo sapiens
gagaccaggacagctgctgagacctctaagaagtccaggctcttgtcaggatggtgaagctgttcatcggaaacctgccccgggaggctacagagcagg

SEQ ID NO: 843670 - DNA, 142 bp, Homo sapiens
agattcccctacctcactggacagatggcaaggatttatggagctgttgggcatgtggatgaactcatgtgctcctcggtgcagaaggccttgtttgaggaggaggaccacgtcaagaaactgcagcagaaagtggccaccc

SEQ ID NO: 843671 - DNA, 100 bp, Homo sapiens
cggaacagcaggcccgagcccaccgcgccgggccccggacgccgcgcggaaaaggtgagctcctgggtgacatggctgatcctcacggcaggctccatgg

SEQ ID NO: 843672 - DNA, 100 bp, Homo sapiens
tccaggagaccaagtttcagatgttccagctaattgacattgcccggcagacggctcagggaatggagaagcctggaagcacgcaatccagaaggccaag

SEQ ID NO: 843673 - DNA, 98 bp, Homo sapiens
tagaggctttatatcctaaacttttcaagcctgaaggaaaggcagaactgcctgattacaggagctttaacagattccagaggggtgactaccatatt

SEQ ID NO: 843674 - DNA, 100 bp, Homo sapiens
aaagaggactggagtggtttgtctgtgatggctggaagttcctctgtaccagaagactgtgcagtctttgtaactgatgaagagcaaggctttgtctcta

SEQ ID NO: 843675 - DNA, 99 bp, Homo sapiens
agctggtggcctcaggtgaaaatgaaactgcttttggttacaagggtctaaagatcctgttatactatattgctggtagcctgtcaacaatgttccgtg

SEQ ID NO: 843676 - DNA, 99 bp, Homo sapiens
gtctcctccacttacgtggaggagctcaaggggatgtcgctgctggttcgggcagagtccgacgcattcctctgaatattgatttgctgaatagcccag

SEQ ID NO: 843677 - DNA, 100 bp, Homo sapiens
gtcgatccagctgccttgtgaccaggacacttagaagaagcatggaccctgcaagaggattacgatgaggacctggtgcaggaagcttcatctgaagatg

SEQ ID NO: 843678 - DNA, 100 bp, Homo sapiens
ctttttccagagaagagaagctttactggtgttccagccctaagcaatacgtttggtttaatattggcagtgtggacacctttgaacggaatctggaaac

SEQ ID NO: 843679 - DNA, 50 bp, Homo sapiens
ctctctgccgtgataaacctctgcgttatctatgtcaagcagtagccgca

SEQ ID NO: 843680 - DNA, 100 bp, Homo sapiens
tgtttgactatgaatgtttcgttataactgcctggaaggttagcgtcaaagaagttgagtactatactggcaattgctggagaagattttgcaattgttg

SEQ ID NO: 843681 - DNA, 98 bp, Homo sapiens
acccaatacctggggccacagcattaccactggttgtaaggtcgtttatacgcaatgcagactggaatgaagatcgatagtaaaactcctgaatgtcg

SEQ ID NO: 843682 - DNA, 98 bp, Homo sapiens
tgacctcggtttcctggacccattccgactcagaaagtgacttcagtgatgattttagtgatgattttgtagaaactcggcgaaggcggtcaaggaga

SEQ ID NO: 843683 - DNA, 100 bp, Homo sapiens
ctttagtagatcgtgaggttggttactgtcaaggaagtgcttttatagttggattgttgcttatgcagggcactccacagaaggatgttattatcaagtc

SEQ ID NO: 843684 - DNA, 100 bp, Homo sapiens
ctgggggcgagctgagcacctgtagtcaatcacacgcagcgagtaaccagctcataaatcacatcgaacagtttttggatactaatgaaacaccgtattt

SEQ ID NO: 843685 - DNA, 99 bp, Homo sapiens
tgcagctgagctcccatgggctgtaaaagaaaatcaggaaaatgtttccaacctggtgattgaggacacagagctgaaacaggtggcttacatatacaa

SEQ ID NO: 843686 - DNA, 100 bp, Homo sapiens
atgctgtctctgacatcaagaagtcgccggagtggacgcttctcttgtgagccagctggaggtcttacctctttgactgaaccacccaagggacctggat

SEQ ID NO: 843687 - DNA, 98 bp, Homo sapiens
ggcagggcggagaggagcggccggagtcagcgatggtgcccggcgaggagaaccaactggtcccgaaagagaactctaagaaggagctgatgtggagg

SEQ ID NO: 843688 - DNA, 98 bp, Homo sapiens
ataggtcccggttggtagagggtttgagtccgcatcgccacagctgaaggctgcgagggactaagagcagagttgtatccacgccatgcaagtgcgct

SEQ ID NO: 843689 - DNA, 99 bp, Homo sapiens
accagttgaagcagcatgtcatcgatggagaaaaaaccattatccagaatcccacagaccagcagaaacaattgcagcatgactttcccagggccctga

SEQ ID NO: 843690 - DNA, 100 bp, Homo sapiens
gaagaaagaatgcaggcaatgctgaaaactgctgagagaagccatgctgtgacctacaagcaaactaaatagccaacatttctgaacccctaagtctcct

SEQ ID NO: 843691 - DNA, 100 bp, Homo sapiens
aaaacattcctgctctgaaagctcttcttgaaaaatgcaaagatgtagatgagagaaatgaggcatgcttctgacggccaatgaaacccccaagatgggc

SEQ ID NO: 843692 - DNA, 101 bp, Homo sapiens
gggaaggccaggacatgcaaaaactctctgaagaggatgatgaaaggttcaggataagtttgaggtgctgaattacacaagcattcctatctttctcccgg

SEQ ID NO: 843693 - DNA, 100 bp, Homo sapiens
gttagaccaaagccattgcttttgaagttattaaagtctgttggtgcacaaaaagacacttatactatgaaagagaatccacattcatctcaatggaagg

SEQ ID NO: 843694 - DNA, 119 bp, Homo sapiens
tttataccaacgttgagcaagatgcagaaaccaacagacaatgccaatttacgtgtcattatggaactacttatgagcagtctcctgggttaggcaggcctatctggctccagattgcc

SEQ ID NO: 843695 - DNA, 100 bp, Homo sapiens
ctgtccacgcacctggacgacgcccggcgccagcacatcgcagtaccaaatatgccccaacagcggcaagaccagcatcatcagagtgccatgatgcacc

SEQ ID NO: 843696 - DNA, 100 bp, Homo sapiens
accaggctgagttaagtgggactgccctgggcagacctacctactagagcaggtttacttagagtcattgagagttatatgccttcgggccacctgacag

SEQ ID NO: 843697 - DNA, 100 bp, Homo sapiens
tgaattgggaagttacagttctcgggatccttctgtcatagaaactcacatgagacaaatgcgctcagcttcaattggagtggtaaaatttcagccttcc

SEQ ID NO: 843698 - DNA, 100 bp, Homo sapiens
agcgacctatcttgaactccacagccttgatgacttctacataggaaagtattttggaggagtgacttcacagagaatgcagttgtcttgacttcaggtc

SEQ ID NO: 843699 - DNA, 100 bp, Homo sapiens
acagttgtccaattgttcggcataacaaaattcatgatggccagcatggtgggatttatgtgatgagctttgatccaaaccttctccacaacaatggaca

SEQ ID NO: 843700 - DNA, 100 bp, Homo sapiens
ttgttgaagagttcaactttcccagaagttgttctaacgctgcctttgctttaaaacagtattacttgcggtgtgacgtttctccagatacttcatgctg

SEQ ID NO: 843701 - DNA, 99 bp, Homo sapiens
cgctgtgctatatcacaagatgaacaatgagaagcaggcagaagattgcatcacacgacatgcacatgatggtgtccaagccagaacagtgggtaaagc

SEQ ID NO: 843702 - DNA, 99 bp, Homo sapiens
atgacccgcagaccaccaacctcctgtatctggagctgggagacaagcccgcgcccaacaccttctatgtagatggcatgatcaacattgacatgactg

SEQ ID NO: 843703 - DNA, 98 bp, Homo sapiens
aaaacgctggagaacaaacactcgccctctaccaggtgattttaccaaatgttgcaagaactctggagttcttatggtagtaaaatgccggaaagaaa

SEQ ID NO: 843704 - DNA, 100 bp, Homo sapiens
ggaaaagtgggcaaattggtcaatcaatcatatatgatgtcacaaaataaaggaaatgttgttaaggggaagaattttttgtactgaagtcatttttctc

SEQ ID NO: 843705 - DNA, 98 bp, Homo sapiens
aaactgccagtagtagaaaaattcttgtcagacaagaacaatccagatgtttgtgatgaggatgttttcactccagaatgcaaattcaaggaatctgt

SEQ ID NO: 843706 - DNA, 98 bp, Homo sapiens
tgcctttgctttaaaacagtattacttgcggaatcccagtcagaagttccagcctgccactgttctctgatgccatgccagcaccaactcaactgttt

SEQ ID NO: 843707 - DNA, 99 bp, Homo sapiens
ccgtggcagaagatggctgtggagagcccgtccgacagcgctgaggaggaggtgcgccagtctgtaactcctgccgagccagtccagtactatttcacg

SEQ ID NO: 843708 - DNA, 100 bp, Homo sapiens
catcctgccccatatccagaatgaaatccatgctcagagatgccaagaagaatctagacagacaggcctttctagaagcatcaagtgtacctgatttgtg

SEQ ID NO: 843709 - DNA, 98 bp, Homo sapiens
ctcgggccgctcatttccgggctcggctttgcaaggccgggtgagagcaaaactttcagcaccacttgctggcatgggaaatgccaaggcagattcta

SEQ ID NO: 843710 - DNA, 100 bp, Homo sapiens
aagaaatacaggatgcctctcagctgccacctgcctttgacctttttgaagcctttgcaaaagtttactcctggcttgggggcattaggaagcactggag

SEQ ID NO: 843711 - DNA, 100 bp, Homo sapiens
tgcctgcattattgcttactggcgatatggttcatggcttggggcaatcagttgtccaatctgtagacaaacgttagagatgtttatgattacttccgag

SEQ ID NO: 843712 - DNA, 100 bp, Homo sapiens
gggcggcggcggcggccgcggcggcgaatctgaatgcggtgcgggagaccatggacggtcctggcattgatgtgcctgctccagacatgagcacaggtga

SEQ ID NO: 843713 - DNA, 100 bp, Homo sapiens
ataaccacgtatccaagtactgtgcctccttgggacacaaggcaaatcactccttcactccaaactgcatctacgatatcttggagggacggtttgaaga

SEQ ID NO: 843714 - DNA, 100 bp, Homo sapiens
atttataatggaattggagtcagcagaactgaaataggaaccatgttcagcaatctcggggtatggaaagaaaattgacaagtccattaaaaaaggcctt

SEQ ID NO: 843715 - DNA, 98 bp, Homo sapiens
gtgcccagaacaagaagaagaagaagtctggaggcttccagtccatggatgcacgaaggagagagagtgagaagtctctagaaaatgaaacactcaat

SEQ ID NO: 843716 - DNA, 98 bp, Homo sapiens
acccccagcccttctgctgaggcccagagacctgagcagctctgcaaggttctaacaggtgacttaagagattaaaattaatttggttgctgttggtt

SEQ ID NO: 843717 - DNA, 99 bp, Homo sapiens
ttcaagagtcttcaacctgttctgcttatatggaaatattgagaagattcaagatggaaaaggtgatgtaaccattacaaatgatggtgctaccattct

SEQ ID NO: 843718 - DNA, 100 bp, Homo sapiens
ggaaccattgccaagtctggtactaaagcattcatggaggctcttcagagaatggccagtgggagattatccacaagccctctcggctaatccagcctcc

SEQ ID NO: 843719 - DNA, 98 bp, Homo sapiens
caaaaccgggcaatattagaccatcaacagtttgactacataataaggatgatgaattgtactctacaggatacctgcccactatgtctatccgcagg

SEQ ID NO: 843720 - DNA, 99 bp, Homo sapiens
tggacacggccatcgggcagtggctccgctgggataagctcgaattacatctttacaagaggaggtgaagcatctcaaacataatctcgaaaaagtgga

SEQ ID NO: 843721 - DNA, 99 bp, Homo sapiens
caacttgtgattggcggtgaccggatattcagttgcacatccccacatcaatgcactgccaatgaagttcatctggacccctaccgaacatggtgtcct

SEQ ID NO: 843722 - DNA, 100 bp, Homo sapiens
tacattacctgctatatctgtaaagggtatctgatcaagccaacaacagtgacggaatgcctccatacatggctatttaatctccgaggatcagatgtgg

SEQ ID NO: 843723 - DNA, 98 bp, Homo sapiens
atgaacccaacctagtgggtgtaatacatcatgaactgcagggactacaggaatatgtggaagctgtctcttttcaacacttcatcaaaacacgatca

SEQ ID NO: 843724 - DNA, 98 bp, Homo sapiens
tgcagccttaaacgacttgttctctatcgaacaaaagtagagcaagttgtcctcgaagaaggtacaattgcttttaaaaattgggttaaaacaggcac

SEQ ID NO: 843725 - DNA, 99 bp, Homo sapiens
ctaaaccaaccactgccacaacctgcgcagcagacagaaactgaaggctcagaagaggatgataaagaaaatgataagaccgaagaaatgccaaatgat

SEQ ID NO: 843726 - DNA, 98 bp, Homo sapiens
cgcgcgggtgtcgctgggctgtcggcctggaccttgcagccgcaatgatcatcaatgctgtggtactgttgattttattgagtgccctggctgatccg

SEQ ID NO: 843727 - DNA, 100 bp, Homo sapiens
cggctccggaggcttggtgactccagtggcccagaatcatattctaagaactcagccactcaggtatccaccatggtgctgggtcctgaacagaagatgt

SEQ ID NO: 843728 - DNA, 100 bp, Homo sapiens
tgaggatcctcaacaatggtcatgctttcaacgtggagtttgatgactctcaggacaaagcagctaggtcttgactccactaacggggacttctcatacg

SEQ ID NO: 843729 - DNA, 100 bp, Homo sapiens
ctggaaagctcgggacaggatggtactctcgcctccgccagtggaacaccctctatctgtgtgggacagatgagtatggtacagcaacagagaccaaggc

SEQ ID NO: 843730 - DNA, 100 bp, Homo sapiens
ttcatcatgggcatagatggaggacttggtggcacaaaatacatctcctttgaggaacggcagtggcataacgactgctttaactgtaagaagtgctccc

SEQ ID NO: 843731 - DNA, 99 bp, Homo sapiens
tgcggggcgccctccgccacgcagccggccaccgccgagacccagcacatcgccgaccaggaccaggaatcaccttcaagcctatgtcgtgaggctttg

SEQ ID NO: 843732 - DNA, 100 bp, Homo sapiens
acgaaacagaaatttcatgttgcaccctgctgcacatggtccgtctaatgctgttggagagattactgcagaccctgcctcaattacgaaacgttggcgg

SEQ ID NO: 843733 - DNA, 116 bp, Homo sapiens
aagaagctgtctctgctgatagactccttccagaataactcaaaggtctacaactcgaacaaagacagccagagtgaagggagtaagtacgatgcttgggtaaccttctacagcca

SEQ ID NO: 843734 - DNA, 100 bp, Homo sapiens
caagaaccgtggagtcagaatgcctgcatgcagatctcatcaccatggtttcttaaacaattaggtctacatcctaactggcaattcgttgatgtatatg

SEQ ID NO: 843735 - DNA, 100 bp, Homo sapiens
gaggtgtccatcctgctattgctctgagggagtatcgaaagggtcaatgcaaccaacttcatggaggcaggagccccagttatgtggaatgggcacagag

SEQ ID NO: 843736 - DNA, 100 bp, Homo sapiens
tttataaccgcgacttcaagatcagtaatttctatgcagcccccgacccagagccgagctccacttctgctccggctgcccccgaaggcgctgcccaccc

SEQ ID NO: 843737 - DNA, 100 bp, Homo sapiens
gtctaccgcccagtcactcaaatccgtggactacgaggtgttcggaagagtgcaggggttctatggcctggatgagtctgacctcgacaaggtcttccac

SEQ ID NO: 843738 - DNA, 100 bp, Homo sapiens
aggggaggggttacagactgtggtgcctacccccatcactgcttccctcagccataacaggttgtaaagctctctgaaatagtgaccttagcgaagcaag

SEQ ID NO: 843739 - DNA, 100 bp, Homo sapiens
gcattggggagcctggttagaactctgtaacctgatcacagacaaagagatgttgagcattatgaaagatgagccagaagaggctgagttaattttgcat

SEQ ID NO: 843740 - DNA, 98 bp, Homo sapiens
gcattgaaaaagttggcaaagacacttggttaccaagaagccatacatggtgactgctacattgagaaacttggttgattcatcattagtaagaagta

SEQ ID NO: 843741 - DNA, 98 bp, Homo sapiens
gaagaggacctccactcagatcagaacgtgaagaaggtagctacagcaagctgggtagcaggcagatccaaaggatatcatgaagtttccagggcctt

SEQ ID NO: 843742 - DNA, 123 bp, Homo sapiens
actaatgagcgctttggggacctcctcaatatagacgatactgcaaaaaggaaatctgggtcagagattatgtttgagaccttcaacaccccggccatgtacgtggccatccaggccgtgctg

SEQ ID NO: 843743 - DNA, 99 bp, Homo sapiens
agaaaatgaaaccagcagacagaatttgtcagacccagtggcttattggctcaggaacgcaagctttgccgagatctagtccatagcaacaaaaaggaa

SEQ ID NO: 843744 - DNA, 134 bp, Homo sapiens
cagggaatccgggtgtccctgtacctgcagctgctgcagctgctgcacagaaattaatgcgaacagacagacttgagaatctccagaatctggtctccagaaacattattctaatctgtgtatggaaaaatccc

SEQ ID NO: 843745 - DNA, 98 bp, Homo sapiens
cactggccaggaaagcctcgaggccgtggcccagaggctggagctgcgggaggggctttgttatgcacctaaagccatattggaagctccagaagaaa

SEQ ID NO: 843746 - DNA, 98 bp, Homo sapiens
cattcaagaggccaagcaggccctgattgcacctggagatgcagagcgtcaacaaagactggctcaggaatccttcaactgctttctaccaagcgttc

SEQ ID NO: 843747 - DNA, 100 bp, Homo sapiens
gggaccagcagaggtgttggctttgcaagtactaaggctcgtacgtctgcatcgattatcttacgtggggcaaatgatttcatgtgtgatgagatggagc

SEQ ID NO: 843748 - DNA, 100 bp, Homo sapiens
acccagaactcaagtaggtagtgaataccgggagtcctggccccctaactcaaccggatgcgcagtgatggttttgatgaagaaagtcaaagatactatt

SEQ ID NO: 843749 - DNA, 100 bp, Homo sapiens
tactatgtgactatcattgatgccccaggacacagagactttatcaaaaacatgattacagggacatctcagagtactttgagcataacagttttgaaca

SEQ ID NO: 843750 - DNA, 98 bp, Homo sapiens
cacgtgatcattggggggcacgattctccctctcctagaggcgatgcagtggcagaacgtggagcacgttggtgaccagagcccctacgtcacctctg

SEQ ID NO: 843751 - DNA, 100 bp, Homo sapiens
ggctacctatttccccagtttccaggctctagaggacaaaatcccagtccttggcacaaactcaggaaatggaagccggagtctgttttttgtggggctg

SEQ ID NO: 843752 - DNA, 100 bp, Homo sapiens
ccgtgaggcagcatctcaatctaaacaacgcggagcagctgtgcagatatatgtatctacgggggcctggggctgggcgggctcctgcttctggcagtgg

SEQ ID NO: 843753 - DNA, 100 bp, Homo sapiens
cgccggggaggcagcgcgggatcccagcctcaggcgtgcgcggacggtgtgcgggaacaagatcactcaaggtgaaggataatctactaataccagcact

SEQ ID NO: 843754 - DNA, 98 bp, Homo sapiens
aaatgtaatttataaacgtgatgttggactgtgctccattgaagtgacttgtgaatcagccagtgtgatggctgcgacactggctaatggtggtttct

SEQ ID NO: 843755 - DNA, 100 bp, Homo sapiens
gctgggggatgatgtggagtacgcacccctgcaaatacttccctggacaagaaagccagatgaaactgatctaccagggccgcctgctacaagacccagc

SEQ ID NO: 843756 - DNA, 100 bp, Homo sapiens
tcctcttaaatgaatctttagaacttggcaagtctcactagataccttcaatcatcattttgagctcaaagatcatcaatgctgtggtactgttgatttt

SEQ ID NO: 843757 - DNA, 99 bp, Homo sapiens
gaaccctgaagtcggtgtctgctgcgttcacggcaggattcggttagatccgatcacataggacagtatgcaccttaagatcctgaagaaacggcacaa

SEQ ID NO: 843758 - DNA, 98 bp, Homo sapiens
tgcccgttcctatgtcctgcgggcacagtcttttgctgagcgcctgcgcctgggaattgcagtgattcatggagaggcgcaggatgccgagtcggact

SEQ ID NO: 843759 - DNA, 100 bp, Homo sapiens
gaaactaggagaaataagaatggctgtagaggaacttcagtctataataaagagatgtgtagctacagcaagctgggtagcaggcagatccaaaggatat

SEQ ID NO: 843760 - DNA, 100 bp, Homo sapiens
tttccccccacctgaacagaaaactgcatttgacaaggtgacgagtaaaagtcgttctgaattaccagatgtgaaacaaggtgaggccaatcttaaagag

SEQ ID NO: 843761 - DNA, 100 bp, Homo sapiens
agtggccggagagttctgcatgttgattcgcgtgcagtatggtgaatatgttaataaccaagctagctccgcaccaactcccttgtcatcaacttccgat

SEQ ID NO: 843762 - DNA, 100 bp, Homo sapiens
gtccctggagctggtgcacaggttccaggtccccagtctatgtgaggatctcctgtcttctgttgaccagccactgaaaattgccagagacaaggtggtg

SEQ ID NO: 843763 - DNA, 100 bp, Homo sapiens
ctccccgtggcaaggacccgctcatgtacttcattgagaaggtgcagcaggagcgggacgagctctatcggaagttcaccgcagccatccaggaggtgca

SEQ ID NO: 843764 - DNA, 100 bp, Homo sapiens
gagaatgctctgcacccgttgatggcacacgtgtttcacgttgacaggtttgcttgggacgctagtaaccatgggcttgctgacttagccaaagaagagt

SEQ ID NO: 843765 - DNA, 110 bp, Homo sapiens
tgtctgggacgctccccaaggatgaactggcagagctcaagaagaaagtcacagccaaaattgatcatgggaacaggtttttaacatgtggaactaaacttctatatctt

SEQ ID NO: 843766 - DNA, 99 bp, Homo sapiens
ctgcagcaaataattgtcagtctaacagaatcctgtcggagttgtagccatgccctaggtgaaaacagctactattgccactgaaaggaatgggaaacc

SEQ ID NO: 843767 - DNA, 100 bp, Homo sapiens
gacgaccaatagctcagatcctttccttaacagttccttccattcccttggacgttctttcagcatcgaactcctcttctcagttaatcgtgaagtggaa

SEQ ID NO: 843768 - DNA, 112 bp, Homo sapiens
cgatgtgtagtgccttccatagggctgagtctgggaccgagaatgtcgtactctcaggaggctccaccatgttcagggatttcggacgccgactgcagagggatttgaagag

SEQ ID NO: 843769 - DNA, 100 bp, Homo sapiens
cgcggcgacccggccgcctagcctccctcgctcaggcgcgaccgcggcgttctctgagaaagtttacaaagaggattttgagaaggagattaaaggaagg

SEQ ID NO: 843770 - DNA, 98 bp, Homo sapiens
cattgtgtcccgcattgcccgcatctgcaagttgagcagctttgatctccggagccgcctgtgccgcatcatagctgaggctccccaagaactggcct

SEQ ID NO: 843771 - DNA, 98 bp, Homo sapiens
tactaaccacgaccatcaaatccgtgtcggagtccttacaggctcccagaaccctggccgaagctcacctccccctggctatgttcctgagcggcagc

SEQ ID NO: 843772 - DNA, 100 bp, Homo sapiens
cagaatcaaaagcagacctcattttgattgtagtagcagtggagggccgttgctccagggagaactgcaaatatcttcatccacccccacatttaaaaac

SEQ ID NO: 843773 - DNA, 100 bp, Homo sapiens
acatggccatgaatgcccaacaagataatcagttggggaggagatgactgcattgtgaaaaacctccagactgcctgtctgcattggctgttgagaagta

SEQ ID NO: 843774 - DNA, 98 bp, Homo sapiens
tggcaacagactttgtttcttggagtccacttccaattccaaggtgaatgaaaactttgccattgatttgatagcagagcagcccgtgagcgaggtgg

SEQ ID NO: 843775 - DNA, 98 bp, Homo sapiens
tgacacagaaaatgttgttgtatgccaatatgataagaacatcgtagctgtgggagctgggttctgcgacggcctccgctgtggagacaacaccaaag

SEQ ID NO: 843776 - DNA, 100 bp, Homo sapiens
ggatcgagtgaacgctgctgatgggagataccatgtcctgtttctcggaacagtgttctaagaacggaagcatctgggctggatggaatttagcatcaag

SEQ ID NO: 843777 - DNA, 100 bp, Homo sapiens
gttccgggaacaaatgctagatacgacaaggagagcatccagcgagtcctgcaggctgtggataaagccaatggatactgtttcagagcccaagagcagc

SEQ ID NO: 843778 - DNA, 98 bp, Homo sapiens
aagatacaagcactgagttcactgacagtattgaggaggaggctgcacaccatagtcaccagcaatttaacccagaactggtgctggtctcagctggc

SEQ ID NO: 843779 - DNA, 100 bp, Homo sapiens
caggagctggcatgacgtgcaggtctctagcgcgcccggaggctgtttgatgtcctgcacgagcccttcttgaaagtaccctgatgaccccagctgccaa

SEQ ID NO: 843780 - DNA, 100 bp, Homo sapiens
gggatagagaggagaaacaggatgtggacgttgatctctcagccaaagttccagtacaatggtcagatatggtcactttgaaagccaggatgacaaatta

SEQ ID NO: 843781 - DNA, 100 bp, Homo sapiens
gctgtcacagagctccagctggctgcggtggaaacgctgataggaagatgtcttcaggaaatgctaaaattgggcaccctgcccccaacttcaaagccac

SEQ ID NO: 843782 - DNA, 98 bp, Homo sapiens
aacatgacgcaggtgcaggtgtctcttctcgccctggcggggaagcagtcctgcgttaactgcggccgggaggctatgagcgagtgcaccggctgcca

SEQ ID NO: 843783 - DNA, 98 bp, Homo sapiens
atcatgtcttgagaattcttcccgacccaccagtactatatgggttagcatgctggcaagaggaggacagcctacaacacagcagtcccctcaggatg

SEQ ID NO: 843784 - DNA, 98 bp, Homo sapiens
cgatgctcctgatcgggacagtgtctttccacctttggatccgcagaaatcgagattacttctctaacaggatcaccagtttgctccacaaagcacaa

SEQ ID NO: 843785 - DNA, 99 bp, Homo sapiens
cggggacagcgacgacgcggaggcagagaagggaacgcccggcccagccccgcagctggctaagagtcttgggcaggctggtgaaattgagcctgaaac

SEQ ID NO: 843786 - DNA, 98 bp, Homo sapiens
gcggaggtgcggagagactccttgggggtcgagcacataacggggttcgggtgtctcgtgtgtgaacatcacaggaaccaaccggtgagccctctcct

SEQ ID NO: 843787 - DNA, 100 bp, Homo sapiens
gaatgtggcaaaattactgtatatgcacatgctgggctaccctgctcactttggacagactctaaaatagagctcaagcttgagaagagagaaccactaa

SEQ ID NO: 843788 - DNA, 99 bp, Homo sapiens
gttgatggcagttttttggcaaggcctagtaaaagtaaccctggagacttcacactttccgttagctacattgtcacaggtgacattaaggggaacatt

SEQ ID NO: 843789 - DNA, 100 bp, Homo sapiens
cacaaggtgctggtacttattgccccggggcccagcgacctgacagttacaggactgaagtctttctccagcccctccctctgcagcttgaacaccctgc

SEQ ID NO: 843790 - DNA, 100 bp, Homo sapiens
gccgctagcgtcagcgccagccagtgggccccatgctgattgagtttaacatgcctgtggacctggagctcgtggcaaagcagaacccaaatgtgaagat

SEQ ID NO: 843791 - DNA, 100 bp, Homo sapiens
aggaaatcatgagagtagacagataacacaggtctatggattttatgaatatgtgtcatcacattggcagaatctcatccagttcttcaaagtggaaaaa

SEQ ID NO: 843792 - DNA, 98 bp, Homo sapiens
ggcttggtccatgtgaagcaatgcatcgtggctcatcctatgtctcacgcagccaccagtgccttctgccgttccattaagctgcagtgtgaacttta

SEQ ID NO: 843793 - DNA, 99 bp, Homo sapiens
gttaagaaagctatatatgccatggttgagggagactgtgatgagagtaatcaagtcagaggattatatgacttttatctgcctagagaagaactatgg

SEQ ID NO: 843794 - DNA, 98 bp, Homo sapiens
agagtctactaccagtgatgagaaggtacaactgtaactgctttaagattatttaagaatctacctgtaagaaagcagttttactcaactgcaaaaaa

SEQ ID NO: 843795 - DNA, 100 bp, Homo sapiens
tcttcgtaccaagagcaccggtggggcccccaccttcaatgtcactgtcaccaagactgacaagaaccctagtgcctctaacggagggggcagcccagcc

SEQ ID NO: 843796 - DNA, 98 bp, Homo sapiens
cgcaggcggccgcacaggttccaggtctttaacgtgagcccgctgcaggtgtgcggcccagtccgagacagcaggacccagccgccgcctccatctct

SEQ ID NO: 843797 - DNA, 100 bp, Homo sapiens
cctgcttcctctgctcgcggttagcccgtcagtccctgctctgtgcgcgcctccatctgggccatggatggggccaattcctgtccccccagcagcatgg

SEQ ID NO: 843798 - DNA, 100 bp, Homo sapiens
cttaatccacagcaagctcccttatatttgtcgagatgtccacagaaggaggatttggtggtactagcagcagtgatgcccagcaaagcctacagtcgtt

SEQ ID NO: 843799 - DNA, 100 bp, Homo sapiens
gcaaccaatgtttgcactcgatttgaagactctccatcgtgatcaagcgtgctttccttatcgaggagcagaaaatcgttgtgaaagtgttgaaggcaca

SEQ ID NO: 843800 - DNA, 100 bp, Homo sapiens
gtatctgtacagcagtttcctcatccctgcagctgtgtttgaacagttccaggaagaggccgactcagtcagccagaccctggcgaagctcaactccaac

SEQ ID NO: 843801 - DNA, 139 bp, Homo sapiens
cttccacgaggctgctgaccagaagaggtttagtgccctcctgagtgactgcgtcaggcatctcaatcatggttggatggagtactgctcgtgattattacacgtttttatggtcccctatgcctgaacattatgtgga

SEQ ID NO: 843802 - DNA, 103 bp, Homo sapiens
cgacttcgaccctgcccagcacgaccagctcatgcagccgacaactgccccttcaaactcttccagcctcaccctgtcaggtatcaaagaagacaacagcttg

SEQ ID NO: 843803 - DNA, 98 bp, Homo sapiens
aagaagctactggacctcgttcagcagtcatgtaactataagcagcttcggaaaggagccaatgaggcatgggtggtaaagtaccacctgctactcag

SEQ ID NO: 843804 - DNA, 99 bp, Homo sapiens
gagttacgagtcggcgaaagcggcgggaagttcgtactgggcagaacgcgacgggtctgcggcttaggcattcaacagaaggtgtcaaattgacagctc

SEQ ID NO: 843805 - DNA, 100 bp, Homo sapiens
gggaaactaggtcgatggtcggcggcgcccggatgggcagctgagatcatgtttcaggcatatggagacaaacagggaccactgcatggaatgttaatca

SEQ ID NO: 843806 - DNA, 100 bp, Homo sapiens
ggtgtggggttggtgtgattagcttcgcagtctggaaagctttaggagttcacagtcatcctgaggttagcattacacttctcccagtggagcccatgac

SEQ ID NO: 843807 - DNA, 99 bp, Homo sapiens
gcaaatccagacagaacctttgacttggtgttgaaagtgaaatgtcatgcctctgaaaatgaagctacatctacatccaccactgggacaagccatctt

SEQ ID NO: 843808 - DNA, 98 bp, Homo sapiens
gagatccagcagctgaccaagagcgtcagtgaccgcagcagcctcaacaaggtacttcaagaaggacaaagcagtttggtacttttccaggcaactat

SEQ ID NO: 843809 - DNA, 98 bp, Homo sapiens
ctcgctgccgacagggaggctgggcaggtgattccgtgaaggcttcgaaatcacagattctgctggccatattctctactccaaagaggatgcaacca

SEQ ID NO: 843810 - DNA, 100 bp, Homo sapiens
tttcaatagacagtgttgaggaccatcttgcctggagcaaggtatcctacagcttcttcagtcaagaacatcccgaaaattcctagcatgtcgtctaacc

SEQ ID NO: 843811 - DNA, 98 bp, Homo sapiens
agctgtcagtgttttcctgagaaaggagcgagaaattggcttggaaacgaaattgaggttatggtcagtactgaggaagccaaacgccatctgaatga

SEQ ID NO: 843812 - DNA, 98 bp, Homo sapiens
ccatgatggaatgcttgacagagatgagtttgcagttgtgagaattatgaagatgatgacctagtaaattctgatgaggttatgaagaaaccatgtcc

SEQ ID NO: 843813 - DNA, 98 bp, Homo sapiens
ttcagagcgtcacggcgtacgccctcatggggaaaatctccccggtgactttcaggttttgggtcctgctcctcggtggtgttccttcttagacaact

SEQ ID NO: 843814 - DNA, 98 bp, Homo sapiens
cagatggcatggtgaagatccttgggcagaaatcgacagacagagtactgggagcacatattcttggaccagaacgggaaatggaagccaaaaaacga

SEQ ID NO: 843815 - DNA, 100 bp, Homo sapiens
cgacctggcggtggggctgcggcgcctgggactgcaccgcaccgagggcgagctccaggtcattcaagacacagatatgcacttatacccataccattag

SEQ ID NO: 843816 - DNA, 99 bp, Homo sapiens
cacctttcctcaggagtcatttctgttccgcacaggcctgctgaactgggtgctttatataggtgaaactggaacgccaagctgaagaagaacgaatac

SEQ ID NO: 843817 - DNA, 98 bp, Homo sapiens
cgagggtgaagctcctcgacaccatggtggacacttttcttcagaagctggtcgccgccggcagccaataatttctgaagatcagacagcagccctga

SEQ ID NO: 843818 - DNA, 114 bp, Homo sapiens
cttattgaatccatgttgaaaaatctatccaggattcatcccgtgtcaacaatggtaaaggtattctctactgccgctgatggtcaaacgcaagtggaaattaaagtgtgtcag

SEQ ID NO: 843819 - DNA, 100 bp, Homo sapiens
gtatcgaagtgatagccaagatgaagttgaaaaaggaattccaaagtctgaatcagaggccacctcagagagagtgttgaggcgtggagctatttcctat

SEQ ID NO: 843820 - DNA, 100 bp, Homo sapiens
attgccaaaaccctggcccagctgaaccccgagtcctccctgttcatcattgcctccaagaattaatcatcacagctggtggggagaatgtgccccctgt

SEQ ID NO: 843821 - DNA, 98 bp, Homo sapiens
gcagctgtactaggactgggaacggaagctgacgggtcgcctcatgctggccgtgggaggagcagtgcttggctccctgcagtttggctacaacactg

SEQ ID NO: 843822 - DNA, 98 bp, Homo sapiens
aagtctgggggccgagaccacacagccttaatacagatattggcagctgctgcagctgagcgagatgtggtttatttcacctttggggactcagaatt

SEQ ID NO: 843823 - DNA, 100 bp, Homo sapiens
ttgtggagtgcatcgatcataaagcaagttgattcaagtcagttgagacgccagttgtgtggaggaagtcaggccgccatagaaagaatgatccactttg

SEQ ID NO: 843824 - DNA, 98 bp, Homo sapiens
caggctctttgaatatgactctgcaaaggaatgaattcttccaaaacaaaactagaactgcaaaagcacctgacgacattaaccaatcaggagcaggc

SEQ ID NO: 843825 - DNA, 98 bp, Homo sapiens
gggaaaagcgaggcaaggcaggcgggtgaatgaaaactttgccattgatttgatagcagagcagcccgtgagcgaggtggagactcgggtgatagcgt

SEQ ID NO: 843826 - DNA, 100 bp, Homo sapiens
ttgttagtgctgtgtgctggagggcactaccagatgggatgcctttgagtaatggacagatgggccagcctctcaggcctcaggcaaattatagtcaaat

SEQ ID NO: 843827 - DNA, 75 bp, Homo sapiens
atctaaaaagccctcagtaccagagacagaagcagatggattcgtccttttaggcctatatgaacccaatagcaa

SEQ ID NO: 843828 - DNA, 99 bp, Homo sapiens
gagaatggaaaaaattgtgaccagagacgtgtagcaatgaacaaggaacatcataatggaaatttcacaggttctgtacagagtaatgagatgtgtgac

SEQ ID NO: 843829 - DNA, 100 bp, Homo sapiens
atggagatgggcagacggattcatttagagctgcggaacaggacgccctctgataactttgaaagtgatgaagtagaactctcgtatgctaagaatggac

SEQ ID NO: 843830 - DNA, 100 bp, Homo sapiens
ctctggaggatgcctggccagggctgaatgctcagaaatggaagggaaagctcaggagattatcactgaatcagtgttgggctggatcttgatagcagtt

SEQ ID NO: 843831 - DNA, 100 bp, Homo sapiens
cagaagcagctgtccccacaaaaagtgacgctttacctgcgaccagatcctggtgaagaccatgatacgtaaacgctcctttgggaacccattcgagggc

SEQ ID NO: 843832 - DNA, 100 bp, Homo sapiens
ctgaggagctcgcctgctgccctcttgcgcgcgggaagcagcaccaagttcacggccaacgccttggcactaggaatcggcaaggttggaaaccagaagc

SEQ ID NO: 843833 - DNA, 100 bp, Homo sapiens
cttgccacgcatcagtctgaaggtaacattgtataacactgatcaggatggtagtgatagcccacgcagtagccttaacaacagtctctcagaccagagt

SEQ ID NO: 843834 - DNA, 100 bp, Homo sapiens
aagtaatgaaaaatggctgtgaatctaaagagctggtctacctcgtgcagattgcttgtcaggttgtctgcattcaaaagagcattctattaaagctacc

SEQ ID NO: 843835 - DNA, 100 bp, Homo sapiens
aagcaaccagcatttagagctgtttatgaagcactgagaaatgacgagattgaggagctgcgggccgagatgctggagatgcgggacgtctatatggagg

SEQ ID NO: 843836 - DNA, 98 bp, Homo sapiens
tccggcgtctgcgcttccccatggggctggcctgcggcgcctgggcgctctgaggagaatcttatttatactgctgatccagaatcctttgaagtaaa

SEQ ID NO: 843837 - DNA, 100 bp, Homo sapiens
gaatatttaaagattttatgcatgtgcttgaggttacagattatgccattgccaggcgcatagtagatttgcattcaagaattgaggaatcaattgatcg

SEQ ID NO: 843838 - DNA, 100 bp, Homo sapiens
ggaggtcgagtttgatgcttccaagatcaagattgcagatctgactcagaagatctttgaccttcgaggcaagtttaagcggcccaccctgcggagagtg

SEQ ID NO: 843839 - DNA, 100 bp, Homo sapiens
tgttaattttggaggccgtccacaacttccaggttcccatcctgcggtctccagaaatgctttgggttcatctttcattgctgcaaggaacttccatgcc

SEQ ID NO: 843840 - DNA, 124 bp, Homo sapiens
ccgagtcatgttctcttcgtttggacagattgaagaatgccggatattgcggggacctgatggcctgagccgaggcatgtgggcacattccatgacagtacaggattatcaggatctcatagac

SEQ ID NO: 843841 - DNA, 100 bp, Homo sapiens
caactcgaagtggacaaaatgggaaccaaacttggagagctgaatgtggcttcggctatggggaggatgcacagtgtgtgacgtgccggctgcacaggtt

SEQ ID NO: 843842 - DNA, 100 bp, Homo sapiens
acttctgggtaaactggagaagagcttcaactctgttcacctgcttgcagactattgcccagaagaaaagatgtttggttttcacaagccaaagatgtac

SEQ ID NO: 843843 - DNA, 98 bp, Homo sapiens
ctgacaagaggaccccgctgctaactcggctacaacatttggcagagttaataaaggtatccatggagaacactgaaaactcagtggattcaaaatcc

SEQ ID NO: 843844 - DNA, 100 bp, Homo sapiens
tgatctaccatgcattgtctcagaaagaggcgaatgactccgatgtccagggccgctgggatcggcatcctgacagtgatcctgggagtcttactgctca

SEQ ID NO: 843845 - DNA, 99 bp, Homo sapiens
ggccatggaggacgaggagagacagaagaagctggaggccggcaaagccaaggtactaggttttgacaagcttgcatcatgcgtgagtataagctagtc

SEQ ID NO: 843846 - DNA, 98 bp, Homo sapiens
ggcatccgtcctaccggaaacctaggaaaaggttagtcatattgatgtgatcacagcagagatggccaaagactttgtagaagatgataccacacatg

SEQ ID NO: 843847 - DNA, 100 bp, Homo sapiens
gaaggcagaagagaacaaaggaaggagaaagtaacttgtggaatggtgagaaagcacactagcaacttcagacgtcagcaggcggaaatggctgattcca

SEQ ID NO: 843848 - DNA, 99 bp, Homo sapiens
ggcagcgacctgagaccagtggtcatcgatgggagcaacgtggccatgagaacttgaaggtgcacattcttgatactgaaagttttgaaactacatttg

SEQ ID NO: 843849 - DNA, 100 bp, Homo sapiens
ggagggacttagcagtagacttcattttttgtttagttttagttgaagttctaaagcagcatggactggaggaaacagctgccaaatgcaagggactggg

SEQ ID NO: 843850 - DNA, 100 bp, Homo sapiens
gcgccctcaacctgctttacaccgaaatttatcagtggtgtggttcctcgtgcaacaaatatgaacgtctgaaggcaaaccaggtagctactggcattcg

SEQ ID NO: 843851 - DNA, 99 bp, Homo sapiens
cgagtgatacccgggagactagcttggccacaggagacaacgttgaggtacagacagatggaagacgtcatagcacggatgcaagatgaaaaaaatgga

SEQ ID NO: 843852 - DNA, 98 bp, Homo sapiens
gctgcccacgggggctccgcggcgtcctcggcgctgaaggggttaattcaacagttcaccaccattaccggtggtggctaatgccgtagcggcattat

SEQ ID NO: 843853 - DNA, 134 bp, Homo sapiens
cagccttcttgtttggtgggacgaccgtcggttctgtccgggaggaatgacggggtcaagaacaagttgaaatcatcgcagaaggataaagttcgtcagtttatgatcttcacacaatctagtgaaaaaacagc

SEQ ID NO: 843854 - DNA, 100 bp, Homo sapiens
catcgcagttggaagcccatggggcagatcaatgtccgagttaccaccatggatgcagagctggagtttgcaatccagccaaatacaactggaaaacagc

SEQ ID NO: 843855 - DNA, 100 bp, Homo sapiens
tgatagaagaggccaagactgcgttcctgctcaacatccaggcaagataacccctgtgacagaaggctactgttgctgtaacaaagggcatacatacatt

SEQ ID NO: 843856 - DNA, 101 bp, Homo sapiens
tgaaaccctccgagcttagcaaaggaggcacacaccatatggcaaccaaactgactacagaatatttgagcttaacaaacggcttcagaactggacagagg

SEQ ID NO: 843857 - DNA, 98 bp, Homo sapiens
gcctggtgcctcccgcctccgtgtgccctggttgtgagaagacgtctgtgtcgtgcggtgaggaagatcttctcagtcctccccaggacacaagcaca

SEQ ID NO: 843858 - DNA, 100 bp, Homo sapiens
ggaatacatcctcactgacatacggaagggacacatgtgcaatgcaaagctcctgagaaacatgccagtggacagaggactgcagaaaatcaacctatcc

SEQ ID NO: 843859 - DNA, 100 bp, Homo sapiens
tgccactgcttttgaaggacatatgttactgtctgatcaggatctaagggatttaaatggacagaatgctttctgacatcttggatcatctgaagaaaag

SEQ ID NO: 843860 - DNA, 100 bp, Homo sapiens
aagcaacagagtgagctccagagtcagcgtccgtctccaagagagtatgaagagagtgcgtctgtagggcagggaagatggcggacaagcgcaaactcca

SEQ ID NO: 843861 - DNA, 99 bp, Homo sapiens
ttcagaaagcctccggaatctaaaaagccctcagtaccagagacagaagcagatggattcgtccttttaggaagggaaaaggccgaggcatcagcgtgt

SEQ ID NO: 843862 - DNA, 98 bp, Homo sapiens
ctcggttggatgcgaaggagctgcagcatccagaatctccctggaaaaggagacatgaatgtctgcaatgatacttcctgacaagaagttgatacaag

SEQ ID NO: 843863 - DNA, 98 bp, Homo sapiens
ccagactcctttacatgatagtcttcctatcacgggcactagtgtggctctcctgttccagcaattggtactatactggcaattgctggagaagattt

SEQ ID NO: 843864 - DNA, 98 bp, Homo sapiens
ggactgccagaggtggaggggaggattttgaggacacttgtggagagctcgaattccagaatgatgaaattgtgctgggaagacgccgatggatctgg

SEQ ID NO: 843865 - DNA, 98 bp, Homo sapiens
gcgaatatcgtcatcgttagaaggctttcatctgagtggcacagtaactgagctggccactgcctctgaaccagcagtgacttataaagttgcaatca

SEQ ID NO: 843866 - DNA, 100 bp, Homo sapiens
atatgaccagcagtctaggcgttcaagaggatttgcctttgtatattttgaaaatgtagatgatgccaaggaagaattacatgaatgacagtcttcgaac

SEQ ID NO: 843867 - DNA, 106 bp, Homo sapiens
ttgcagtgggggctgccagtgctaccctgagaaaggtggacgtaatcttgcctcctggaatccttcaaatcctgaatgtctcttacttgtggtgaaggaacttgtg

SEQ ID NO: 843868 - DNA, 100 bp, Homo sapiens
gattgctgccacagtgccagcagctccagatgttcttcctcttgcttgccagagtcgtggcattcctggtggctttccatcagaacaagcagctcatcgg

SEQ ID NO: 843869 - DNA, 98 bp, Homo sapiens
gaagactattgtggaagaagcatccattaaggagcagtgaggagaatgaataccttccaagaccagagtggcagctccagtaatagagaacccctttt

SEQ ID NO: 843870 - DNA, 100 bp, Homo sapiens
tgtgcttcctgctggccgtgctgctgcagactaaatgtgttaaatgggcttgccaacaatatggatgatttgaagataaacaccgatattactggtgcta

SEQ ID NO: 843871 - DNA, 100 bp, Homo sapiens
gggaggaaggaacgaggcaaggagctaaagcagcgtgcgttcagccctgggcctaaacccaccaagggacgaatgcgcatccactgcttagagaatgtgg

SEQ ID NO: 843872 - DNA, 99 bp, Homo sapiens
actattcacgggagccctagagaggacaccgggacacccagaagccgggaaatggcatccgtgtcattctggaccttactcccaactaccggggtgaga

SEQ ID NO: 843873 - DNA, 99 bp, Homo sapiens
agctttttgcttagcactgaaaattctggataatggtgaatggtgccgaaaacatttgaagagtcggagattagtcagtgcaaaacagcttggtgtgga

SEQ ID NO: 843874 - DNA, 100 bp, Homo sapiens
aagcaactggattttttaactgaagatagtgcctttcagccctaccagggaactgctcgcagaaagaagaaggtggttcatagaacagccacagcagatg

SEQ ID NO: 843875 - DNA, 100 bp, Homo sapiens
ttttcagaagcggctgcgcacggactgctggagatggtggagtccgtcacacctgttcttcccggagcctatcagcaaagccattcccaaggctatggct

SEQ ID NO: 843876 - DNA, 98 bp, Homo sapiens
gaggaggcggcagcggcggaggaaggcggcgcaccccgagagcaatttcctgctgcagagagcattttaagaaaggacagcattcctgtgacctctgc

SEQ ID NO: 843877 - DNA, 100 bp, Homo sapiens
aagaactacctgagctacctgacagccccggattattctgcctttgaattggtgtaatacggtgcccagtatgccgccaagaatgcagacagatagacct

SEQ ID NO: 843878 - DNA, 100 bp, Homo sapiens
caaagaaccaactgataatcatcatcataaaattcctggattttgtgagaatgagaaaggtgttgtcccttgtaacattttggttggctataaagctgta

SEQ ID NO: 843879 - DNA, 98 bp, Homo sapiens
agtggtgcactgacagtgcttatgaaggacgcaatcaagcccaatctcatgcagacactggagtttcagagcatctccttacggaagatccagtttaa

SEQ ID NO: 843880 - DNA, 98 bp, Homo sapiens
tccccgagctgctggagaactgaaggcggacagtctcctgcgaaaccaggcaatgggtgctccagtgaaccacccagggaatgacgaggtggcgagtg

SEQ ID NO: 843881 - DNA, 100 bp, Homo sapiens
gacctgaaggaggccggtgactttcacttccagccagctgtgaagaaggcagttgcagtggtgcagaatggctgacctcagtcttgcagatgcattaaca

SEQ ID NO: 843882 - DNA, 100 bp, Homo sapiens
ccccccccgcccagagtcatggcggcagcagccgctctgagggcgcctgctcagaattgaccttgctgttctgctggggaagacaccatctacaatggag

SEQ ID NO: 843883 - DNA, 100 bp, Homo sapiens
gtctacactgagtcggaggcgaaggaagggatgagaccatgcagcctgcgaaaccatcctttcttgaatattttgaacaaaaagaaaaggaaaaccagat

SEQ ID NO: 843884 - DNA, 99 bp, Homo sapiens
cccggcgctttccccgcaagatggacggtttcgccggcagtctcgccataccatgtctgaatatgggaggatgacagacacagaacgagaccagataga

SEQ ID NO: 843885 - DNA, 100 bp, Homo sapiens
agatgaatgaacaagacatacgatatcgggacactcttggtcatggcaacggaggcacagtctacaacatcagcgagagctttctaactgtcaaaggtgc

SEQ ID NO: 843886 - DNA, 100 bp, Homo sapiens
gttttggaactgtcaggtacctcaaagcatggagctgaaaagtggaatattgaccttccggttaaataccagtcttgcctttacacaagtggatctattg

SEQ ID NO: 843887 - DNA, 100 bp, Homo sapiens
ctacggacatgccatattgctgcgccattcctatagtggcatggtgaaagaaaagatgttgtcccggttaagagtagtttccaccacttgtactttggca

SEQ ID NO: 843888 - DNA, 100 bp, Homo sapiens
accaagaagctgtgcattgttggtgggattctgctcgtgttccaaatcatcgcctttctggtgggaggcttgattggttgcagtattttacagagctagc

SEQ ID NO: 843889 - DNA, 98 bp, Homo sapiens
caattgtctgtgacagtaacagtacttgggatcccccagttccaaagtgtcttaaagggcaggctgtccctgcaggatcccacgtacggctgaatctt

SEQ ID NO: 843890 - DNA, 100 bp, Homo sapiens
ccagccctgccacatcagagaggccattcgacgctacagccacaggattggcccactttccccattcacacaagaggtggaaacatacagaagaagcaag

SEQ ID NO: 843891 - DNA, 100 bp, Homo sapiens
aagtctccctcaggatcagaccgtagcccttccggaaacctccatggtgggctgggggccctgactggacctggcctggccagcttactggggagcagtg

SEQ ID NO: 843892 - DNA, 98 bp, Homo sapiens
tgagctttacatgcacttgaacagactagaaattgcaccacagatatatgggttcaaaaaatcccagaagtgggatgaaatgaacatcttggcgacgt

SEQ ID NO: 843893 - DNA, 139 bp, Homo sapiens
atggagaataagattagcaccattgaaagaggagcattccaggatcttaaagaactagagagactgtagtgggcagcagtcagtgacaggtgtaacctctgtggatgacagcaacagttactggaggatacgggggaag

SEQ ID NO: 843894 - DNA, 100 bp, Homo sapiens
accaggccgccgggggcctgctgcgcccgggactacgcccaagcaaggtttgatgcctatttccaccagaagaggaagcttggggtgtgactgtggggag

SEQ ID NO: 843895 - DNA, 100 bp, Homo sapiens
aaccatggatttgagacagtctatgagcttacaaaaatgtgtactatacgtatgagctttgtgaagggaggtcacaatcacattgagccaaaacgcatcc

SEQ ID NO: 843896 - DNA, 98 bp, Homo sapiens
ttcaccagtcagtgtttgaaggagaagagagcaagtctctggctgatgaacttgctcttgtggatgttttggaagataagcttaaaggagaaatgatg

SEQ ID NO: 843897 - DNA, 100 bp, Homo sapiens
aaggaaacagttgggcttgccccaccagagacgaggaggaaactttaaatctaaatccaggttagagcagccagcgggtacagaatggattttggaagag

SEQ ID NO: 843898 - DNA, 98 bp, Homo sapiens
aggcaactggagcgaaaccagcgacagactccagcgggaggaagaagaggcctttgccagcagtcagagcagccaaggggcccaatccctcacattct

SEQ ID NO: 843899 - DNA, 98 bp, Homo sapiens
gtacctcacgtattgtgccaatcacccttctgcagtgaatgtcctcacggaacacagagccaagattttcttcttcactcctcgcttggtggctccca

SEQ ID NO: 843900 - DNA, 98 bp, Homo sapiens
catcagaagtgaaccgactgctggccgagctgcctgcctctgtgcatgccctcacaggcgtggacctgtctaagttccagggtcacccccgagaggac

SEQ ID NO: 843901 - DNA, 100 bp, Homo sapiens
gccttcatcgacttgagacaaaaagcggcagcccagaatctcgtgttaatgcgatccatttcttggtacacaaactgccagagaagaataaagagatgtt

SEQ ID NO: 843902 - DNA, 100 bp, Homo sapiens
ctgtttgtgagcctgtggcgcggcttctgtgggccggaaccttaaagcaattctgtggtgttcttggtcacacatttatggagtttctgaagggcagtgg

SEQ ID NO: 843903 - DNA, 98 bp, Homo sapiens
catggttccccttctactacatgctgaaggcaagaaactatattcagtctttgactcagatgccgaagatgaactttgcgaatgtatttattggtgcc

SEQ ID NO: 843904 - DNA, 100 bp, Homo sapiens
aggatgccgaggagaaaacagcaggcacccaagcgggcggcagatgcagatggaaacctgtgtcgaagtaaccaactgttgcaagtcatgctgaccatgc

SEQ ID NO: 843905 - DNA, 99 bp, Homo sapiens
cacagctaagacaccgggacctcctggaagccaaaaatgtgttttaactcaaatgggtgatgaaaaggactcttggaaagtgaaaactttagatgaaat

SEQ ID NO: 843906 - DNA, 100 bp, Homo sapiens
cgattaatgataaaatttcatggagaagaaggccttgactacggaggggttgccaggtaatcacagggcctcagattcgccctggtatgaccgtgattag

SEQ ID NO: 843907 - DNA, 100 bp, Homo sapiens
agagacactgatatggatggggttggagatcagtgtgacaattgccccttggaacacaatccggatcagatgacggtcgaaccaaacccattccaaagaa

SEQ ID NO: 843908 - DNA, 100 bp, Homo sapiens
tggcgcctaaagtctgagagagggaagtcgcctctgtgctcgtgagtgcatggggtataaggggatggtttagacaacagtgtagcttcacctggtacag

SEQ ID NO: 843909 - DNA, 100 bp, Homo sapiens
agaagaagtttagccgcccacttctgcctgccactacaacaaaactgtctcagaatgtgacagtgatgataacatgggtgccaaaaatacttcaatagga

SEQ ID NO: 843910 - DNA, 100 bp, Homo sapiens
ggaagatgcctttgggaagcatgtcaccaacccggccttcaccaaactccctttttatcttcaagacactaaaagtagtaatggtacttttataaatagc

SEQ ID NO: 843911 - DNA, 100 bp, Homo sapiens
aggtcttatatctgaaacagttccactgtcttccataactttcataactttgaacattttggttgctccttgagggcaggacagttcttatggctttatc

SEQ ID NO: 843912 - DNA, 100 bp, Homo sapiens
gccaaaagaaagggggaaaaactccacatttttctcaaatactgagtttcatgaaggtcacattcactaaatgtctatatgcacaattggtgcaacaaag

SEQ ID NO: 843913 - DNA, 100 bp, Homo sapiens
tggattttcctgtagaactgagggcaggtacaccaggggttggaaaaaccacactaggcaaagaacttgcgtcaaaatcaggactgaaatacattaatgt

SEQ ID NO: 843914 - DNA, 98 bp, Homo sapiens
agcgagatccgggccgtgaacgaaagcagtgacggaggagcttgtaccaccggatcttcagcctgttaaacaagaaaacgaaaaaccccttccagaaa

SEQ ID NO: 843915 - DNA, 100 bp, Homo sapiens
agtcattttggcgacaaacaagataagaaacttactcaagtttatagaactcttcatggagcttacacaaaaattctggaagttatgcatacaaaaaaga

SEQ ID NO: 843916 - DNA, 100 bp, Homo sapiens
ggtgacggtggtggtagtggatgacggagtggaacacaccatccaggacattgcacccaactatatatggcgagagcttttttccccacttcatgcactg

SEQ ID NO: 843917 - DNA, 99 bp, Homo sapiens
tcccatcgcaaacccaaagatccccgttcctggagattctgattgagattagtaaagcacatgttccctcttggaagatgactctgctaaatgtttgca

SEQ ID NO: 843918 - DNA, 100 bp, Homo sapiens
gtgaaacagattgagccagaaggaagacaatgctggtggaagtttagctgatgctataagtgaaaactacagaatcatgagttactttaaagaagcagag

SEQ ID NO: 843919 - DNA, 100 bp, Homo sapiens
cagggtggacctcaggagcctcctaaaaccacagcctacgctcactccccaacccatcccaacattgacatgctatctgtggacaaatagcagttctcag

SEQ ID NO: 843920 - DNA, 100 bp, Homo sapiens
gatcgagaaaaatcacgggctgtccaggaactgtcggaacagaaccaaaggctattggatcagctcagcaggcccgtgcagcctgccaggactcttccag

SEQ ID NO: 843921 - DNA, 100 bp, Homo sapiens
gacttactgaaagatatgaatcagagttcattggccaaggagtgccccctttcacagactctttttgatcagaacaatgctgcaaaaaaagaagagtcag

SEQ ID NO: 843922 - DNA, 100 bp, Homo sapiens
ttccgccggagcttgaatcgttttccctgggcgctgcctatggcacagccaagagcggtaccggcattgcggccatgtctgtcatgcggccggagcagat

SEQ ID NO: 843923 - DNA, 100 bp, Homo sapiens
acctcctctggcccccggaaaacctaaccatgaagacttgaacttaatacagcaagaaagaccatcaagtttaccaatcatgtatcagttggaggacttg

SEQ ID NO: 843924 - DNA, 100 bp, Homo sapiens
cgacgctgaccacccagacatccaccctgccggctggtgctccaagacaggacatcccctgcagcctcctctcggctcctctgcacccgagcactctccc

SEQ ID NO: 843925 - DNA, 100 bp, Homo sapiens
tctttggactgctccagatttcttgtggaggccccccatgactgggatttagaggagaaagaagacatagctcatccagcaagccgcctttggccgttcc

SEQ ID NO: 843926 - DNA, 100 bp, Homo sapiens
ctttggcatcactgcagctagtaatttgccttctggattggatgtcctttaactccattgcctccagttagtattgctattcgatttacctatgtacttc

SEQ ID NO: 843927 - DNA, 99 bp, Homo sapiens
aaaggattgtgacatatcgttggacccagaattgaggcaatgttgtttaatgtagaaaatggaaccccagcttcacgtgaagccttgtggttgagtgag

SEQ ID NO: 843928 - DNA, 100 bp, Homo sapiens
catgagcaacgatgacgctgtgcgggtgctgagggacattgtgcacaagcctgggtcttgccgccttggtagcttgctcctggtatggccatcagattgt

SEQ ID NO: 843929 - DNA, 100 bp, Homo sapiens
cgaagaggagagagcgcgggcctctaggaagtgtgccccctaccaccggagccagagaatggtggctacatctgccacccccggccctgcagagaccccc

SEQ ID NO: 843930 - DNA, 98 bp, Homo sapiens
gaaagtgctgaaggagcaagagacagtcctgcaggctcagagcaaaggcacaacaccacttgctccaccacctaaacctgttcgaagaagattaaaat

SEQ ID NO: 843931 - DNA, 100 bp, Homo sapiens
tggatcaaacatgtcacaagagtcggacaagctgcaagaaagcgtaagattgccattcgaaaagcccaggggaaaaatgtggaggccattcgggagctga

SEQ ID NO: 843932 - DNA, 98 bp, Homo sapiens
ttgtcaccaatttcctgcccgggatcccagagctacccttcttggagcccacagggttttcggctttgtgagaaaccttaccatcaaacacgatggcc

SEQ ID NO: 843933 - DNA, 100 bp, Homo sapiens
agtctacaagcgatcactcacaggtccctcgtctgagctggctcactcgcccaccaacagcgggaagaagctctttgctcccgttccgtttccttcaggc

SEQ ID NO: 843934 - DNA, 100 bp, Homo sapiens
ttttacttcatcctccaaggagttcaatcacttggcgtgacttcactacttttaagcaaaagaagtccacctgcaaagaatcacatcaagcaactttctt

SEQ ID NO: 843935 - DNA, 98 bp, Homo sapiens
gattggaaattaattgctatcaatgcgaatgatcctgaagcctcaaagtttcatgttttgattacgaagatgcaggctaccagactgcagaacttgta

SEQ ID NO: 843936 - DNA, 100 bp, Homo sapiens
gaggaacccacatcccccataggtcactgtgtggccatctaccactttgaagtgcttaattcaccattatgagaaatgcttccagtcacaaaaatgcagc

SEQ ID NO: 843937 - DNA, 99 bp, Homo sapiens
gcccagtactattttaagtgcaaactgtgggatgaagcttcaacttgtgcacaaaagtgttgtgcatttaatgattgggctcgggatgagtttgaaggc

SEQ ID NO: 843938 - DNA, 100 bp, Homo sapiens
gcctggtcaatttgtacctgcaggcctcctacacctacctctctctgacgatgtacctgtcccagctccagccggtgaccagaaggaggtggacacttca

SEQ ID NO: 843939 - DNA, 100 bp, Homo sapiens
aaggagcgcgcccgcctgcagctggagctgagcaaagtgcgtgaggagtttaaggagctgaaagcgcgcaaaatgatgcttcaacacccaggccaggtct

SEQ ID NO: 843940 - DNA, 100 bp, Homo sapiens
tctccggaccgtgaaccgaaccgtcatttccatgggacgagattctgaactcattccaaatttgtatcctactgtggggcttcaaacaccaggagaagtg

SEQ ID NO: 843941 - DNA, 100 bp, Homo sapiens
gaagataaaccattgtttggtcctttaccttgcagactgctcgatcaagtcatccgccaaagaagcctgtccagtttggaactgttcctctcctgtgcac

SEQ ID NO: 843942 - DNA, 100 bp, Homo sapiens
tgtgggaggaaggaacaagctgaaaaagatactcgacaagactcggatcagtatcttgccacagaaaccatacaagtaaaactgccattcaatgcacaac

SEQ ID NO: 843943 - DNA, 98 bp, Homo sapiens
cgccgaccgcgttcctatggacagacgcacagacacctgcagcaactccgatccaatatccgagaaattgagaaactttgtttgaaagtccgaaagga

SEQ ID NO: 843944 - DNA, 98 bp, Homo sapiens
tcttctaaaccggggagctgctgtggacttcacagccagggttttatggcaattggatatattccgacgaagcttgcgggttttgactggacatgttt

SEQ ID NO: 843945 - DNA, 99 bp, Homo sapiens
tcagaatctcagtccaacaaaagaatttgcggaggatgactccagcagagcttgcaaatatggagcatttatatgaatttcaccctccagtttggatta

SEQ ID NO: 843946 - DNA, 50 bp, Homo sapiens
actaaatgcctttttgtgtataaagaattggcagagggggtcgatttggg

SEQ ID NO: 843947 - DNA, 99 bp, Homo sapiens
gagagagcgcgagagatggagatgggcagacggattcatttagagctgcggaacaggacgccctctgatgagaggcagatgcgaaccagaacaatggga

SEQ ID NO: 843948 - DNA, 100 bp, Homo sapiens
gagactgaccgcaacggcagggcagtctgggctcttggcaacattgctggagatagtaccatgtgcagggactatgtcttagactgcaatatccttcccc

SEQ ID NO: 843949 - DNA, 100 bp, Homo sapiens
ctgtggaaccgttgccgactgcacatttgaagagctgtgtgagagagtcgtagttcccccgctccctgggaaagcgtttttgcgtcagcttccttttaga

SEQ ID NO: 843950 - DNA, 98 bp, Homo sapiens
acagaataatcggagccatggccatattttttcaatttgaaaaagtaccagaaggtcctatccctccatctacaccaaagtttgcatatggaaaggtc

SEQ ID NO: 843951 - DNA, 100 bp, Homo sapiens
gcgtgaccgagagcgcgaatatcgtcatcgttagaagctgatacccaactcttgtgcaactcatgccttgctgagcgtgctcctgaactgcagcagcgtg

SEQ ID NO: 843952 - DNA, 98 bp, Homo sapiens
tgccagcaaacgtctacactgtacatgctttttattacaagactacggagcataggaggaaaattcatcatctggggcgtggttgctctccagaccct

SEQ ID NO: 843953 - DNA, 100 bp, Homo sapiens
ttcacaacctctgcaactctctctccattaaagtcgaggaaaggacgtgttggaacacctcattttatggcaccagaagtggtcaaaagagagccttacg

SEQ ID NO: 843954 - DNA, 99 bp, Homo sapiens
tgccggcctgtgtggtggactgtggcacgggggagtgcatccgccccaacccttttccccctcgtctcctgtgagaattccccgtcggatacgagcagc

SEQ ID NO: 843955 - DNA, 100 bp, Homo sapiens
atattccactgattacaaattgcagcagcaagatcagaatcaagctttgcgactctgtctgggtagcactagtgttggaggtcagtatggcgctatctct

SEQ ID NO: 843956 - DNA, 100 bp, Homo sapiens
atgaaaggagacgtcagaacgtggcttatgagtacctttgtcatttggaagaagcgaagaggtcaaggtcagcatctcctcgacgatcaagatctatctc

SEQ ID NO: 843957 - DNA, 100 bp, Homo sapiens
aaagttttccttccatctctgctgctctctcatttgctggccatcggattgggggctgttgataatcaggtgtatgtggccacagcctctcctgcccggg

SEQ ID NO: 843958 - DNA, 100 bp, Homo sapiens
ggaggaccaataggcaggccgagctctttgccctttacccatcagtggacgaggttgaatgcctttgagaacttgatgcataaaatttgcatgactcctc

SEQ ID NO: 843959 - DNA, 98 bp, Homo sapiens
aattgaaattaacctcagtgagaaacacaagttcctgagaagaaaaaaggaatcttcaggagagcctatgacctattttgtgggctagagcagcacgg

SEQ ID NO: 843960 - DNA, 100 bp, Homo sapiens
tggcttctgtccctgctcagtcggccaagaagccctgcccaggataaaagaatcagagtgtctcaacccttgacaagaggaccaagtgcctttattccag

SEQ ID NO: 843961 - DNA, 100 bp, Homo sapiens
ggttgacacctttacacagagcagttgcatcttgtagtgagaccaactgccagagttttctctgggtgttaacagcggttggactacagacaattgcttc

SEQ ID NO: 843962 - DNA, 98 bp, Homo sapiens
atggatttgtttctcattctcatatttcaccaataaaggttcaaaccttgtactactcagctgatcacaagctgcttgatgggaacctactagatgga

SEQ ID NO: 843963 - DNA, 98 bp, Homo sapiens
agaagccacgaaggctgcaagagaggcgctgttgagttctgcagttgatcatggattcacttgtcatggattagtgactggtcagagttatattttcc

SEQ ID NO: 843964 - DNA, 100 bp, Homo sapiens
cctgcagcggcgtgtagaagacgaagtcaacagtggagtgggccagttgatattcactgatggactccaaagaatcattaactcctggtagagaagaaaa

SEQ ID NO: 843965 - DNA, 99 bp, Homo sapiens
tgacgtttacaaaactacagaagctcacaatgtctctctgcaccaagctccatgactcaggatttgcctggagttcctgggaaagaccagttgttttca

SEQ ID NO: 843966 - DNA, 98 bp, Homo sapiens
aataaaaaatggcagtaaccctgagacaaccacttctggtggttgccactcacctgaggatgtggccaaacaggagaagaagaagaagaagacaggtc

SEQ ID NO: 843967 - DNA, 99 bp, Homo sapiens
tggtcttacattgctgcatcaagaaacccaagctgctgaggtcttcagaactactagcagataatttggggggacttcatattcagaagtctatataaa

SEQ ID NO: 843968 - DNA, 100 bp, Homo sapiens
ttcttttaaaaaactgagctctatctgtcctgattcctggtgctgcttcagtgtctggaggtcgcagccgcctgcatctcattgatctcggcagctgtgt

SEQ ID NO: 843969 - DNA, 100 bp, Homo sapiens
gtacctgcaggcagaaagtcttcctacgaccgtcttttcccttagaggcaccaggctctagaccaagatagaacagcccttcagaaagtgaagaagtctg

SEQ ID NO: 843970 - DNA, 100 bp, Homo sapiens
acctcggggcagatccggaccaagtcctattttgtaacggattatgatccaaccattgaagattcttacacaaagcagtgtgtgatagatgacagagcag

SEQ ID NO: 843971 - DNA, 99 bp, Homo sapiens
tctgttccaaatgctttgctgcacaaccagtgtctctgaagaagatgtctcaagtagatattctcgaacagatagaagtgggttccctagatataacag

SEQ ID NO: 843972 - DNA, 98 bp, Homo sapiens
aatacgtgtttcatgaactcagctattcagcgccatggctacttattctgccacatgtgccaacaatagccctgcacagggcatcaacatggccaaca

SEQ ID NO: 843973 - DNA, 99 bp, Homo sapiens
gaccgcacggcaggagaccaaggaaatggcccgtggacgtgatgctgaatccaggcagtgccacttcgaatgttgctatttctgtggatcagagacaag

SEQ ID NO: 843974 - DNA, 99 bp, Homo sapiens
cttttcattcctggttgtaaaactccggaccagttgaagaaggaagattcacactgtaacattattcacactgaggcacgtgtggttctcaaatatagg

SEQ ID NO: 843975 - DNA, 100 bp, Homo sapiens
gtgagaatccctaaggcggggaaccgcagcgcagtgacagtgcagaaccccggcgcggcccttgggcttcaagcagcaagctcttacagtatccacagat

SEQ ID NO: 843976 - DNA, 100 bp, Homo sapiens
cgaaggccacctacaaatagcaggtagaacttccagaattctcccaaaggggtctagtggggatgagcgggcaatggctaaggagctggccagccttctc

SEQ ID NO: 843977 - DNA, 101 bp, Homo sapiens
agaaaacatggtattttgaaatatgattaaactcctgatgctgcagcagaggctaagaatattaatggccagatctagtgcccttggtttctagaatatgc

SEQ ID NO: 843978 - DNA, 98 bp, Homo sapiens
tgtccttcctgtttcgcagatgaggaaactgaggcttagagaagtttggcaaattggctaagttcctacagctaccctttctaaggcacaaaatgatg

SEQ ID NO: 843979 - DNA, 100 bp, Homo sapiens
cgctctcggagggagcgcgctttctttggagtcggcgaaacccggggcaagaggattatgacagattacgaccgctgagttatccacaaacagatgtatt

SEQ ID NO: 843980 - DNA, 101 bp, Homo sapiens
gtcgagatcacaagttgcatgttgactttaggcaaacggggattcagcgtccgatcctttggaacagggactcacgtgaagcttccaggaccagctcccga

SEQ ID NO: 843981 - DNA, 100 bp, Homo sapiens
aaattttagaagttcatattgacaaagggttggctagtggatcttctcaacaaatttggcactttaaatgggttccagattttgcatgatcgttttatta

SEQ ID NO: 843982 - DNA, 100 bp, Homo sapiens
cctggactgtctttcagggatttactaccggcttccgggacttgagcaagtcttgaatacgcagataaccatctcttagagaaggctgagctgctggaca

SEQ ID NO: 843983 - DNA, 99 bp, Homo sapiens
tgcagccctagtgactgcggcctgcatcccggatggacaaccggaaattttctacacattttggaattcagttactcaggcactttcttctcaatttca

SEQ ID NO: 843984 - DNA, 100 bp, Homo sapiens
tccctttcactgaagaagtggggaaaacaaggctcagacagggatgctttgttcttcctgaaggatttcttcacaagtctttctgcagaagtagagcttc

SEQ ID NO: 843985 - DNA, 100 bp, Homo sapiens
caaccctaaacagtggactcaacttcaaagacgttctcaaggagaaggcagacctggactctcagcgttctcatctctcttccttcaccatgaagctgat

SEQ ID NO: 843986 - DNA, 100 bp, Homo sapiens
gtgtgccctggcactgagcggccgcggccatggcgtacgcctatctcttcaagtacatcataatcggcgacacagtcctggtacctgggataaaagttgc

SEQ ID NO: 843987 - DNA, 100 bp, Homo sapiens
ctgggatccaagcacagcaatttctttatttttcttaaggtatccagcttgttggaatctaagatctgcgaagaaggagatccggttggcagctaaaccg

SEQ ID NO: 843988 - DNA, 100 bp, Homo sapiens
tgaggttggctgtagcagcgcggaaggtgcatatgaagaggaagtactggttctgtcaacagattcagtccccagtcctccttctctgagcagacctctc

SEQ ID NO: 843989 - DNA, 100 bp, Homo sapiens
ctccagtctgcagctcccagcgtgatcgacgcagaagacaggtgatttctgcatttccgactgagaacgacctgcagcaataccattgacctgccgatgt

SEQ ID NO: 843990 - DNA, 98 bp, Homo sapiens
cagcttccgtgtttgctgcgcccgcactgcgccaggactcctcacttcctgcggattcagaatgtggaagttaatgctggccagtttgctaccttcca

SEQ ID NO: 843991 - DNA, 100 bp, Homo sapiens
ttccaagctggccgtggctctcttggcagccttcctgatttctgcagctctgtgtgaagggaagaaacccttttttcttggagccagcaataattatcac

SEQ ID NO: 843992 - DNA, 100 bp, Homo sapiens
gccaccctcggggcgccgacggtcacggccaggtcagagcagcccaccatgggatggggagggggtggaggctgcaccccgcgcccacccatccaccagc

SEQ ID NO: 843993 - DNA, 100 bp, Homo sapiens
ccacatcttccggccaacttccattgaacttcccagcactcgaaagggaccgaaatggagagcaaagagttttccgtctgatgaaggttggccatttgca

SEQ ID NO: 843994 - DNA, 98 bp, Homo sapiens
acgcctccaggatctgtcggcagctgctgttctgaggatcttagtaagagccctaagaccatgaaaaagctgctgcccaagcgcaaacctgaacggaa

SEQ ID NO: 843995 - DNA, 130 bp, Homo sapiens
agcttccagattgaagccttcggctccaaattcattcttgacctcatactgaacaagttgttcgctcagcagctacaagtggagctggtagcactacctctggtgttgtgtctggcagcctcggctctcg

SEQ ID NO: 843996 - DNA, 98 bp, Homo sapiens
aaaatcagagaagttgcggaatgaactccggcagaacacagatctgctagaaagcaaggtggatcttatatgggaggatgcactgttcatgtttgagt

SEQ ID NO: 843997 - DNA, 98 bp, Homo sapiens
catgaactagtgacctggaaaggctcgtcctttgacacgctacctgcctgtccggaaggaagactttgatttgcggagccatgtagagactgctggcc

SEQ ID NO: 843998 - DNA, 100 bp, Homo sapiens
ttcagagttggataagcacttggaatcacgggttgaaggtccagcagtttaagcaggatccacgcccaacaacatgtcttcactctgttttcaatgtgca

SEQ ID NO: 843999 - DNA, 100 bp, Homo sapiens
attgcttcgctgaagaagcattgaaatatattggtttcacctggaaaagtataaggatgcatttatgaaagcaaatcctggctacaaatggtgtcctacc

SEQ ID NO: 844000 - DNA, 128 bp, Homo sapiens
aacagcctggtcaatttgtacctgcaggcctcctacacctacctctctctgcttatttcaacaattccaactagccgtttaaaattcctcaaagaagctggtcatggaacacaaaaggaagaaatacc

SEQ ID NO: 844001 - DNA, 100 bp, Homo sapiens
accctgagaatgggtggactcccggagaggattcctaccgagagtggatacaggtatttgtaggcaaaataccaagggatttatatgaggatgagttggt

SEQ ID NO: 844002 - DNA, 100 bp, Homo sapiens
cggaagccctgaccacagagacgcgtccaggttggtcaaagaaaaagtgatgtatgaaaaagaggcaaaacaacaagaagaaaagattgaaaaaatgaga

SEQ ID NO: 844003 - DNA, 98 bp, Homo sapiens
atgctgttgataacaaaaaaaacacacccttgcactatgctgctgcctcagggatgaaagcctgtgtagaggtgcacacatcttgaccaactcagcag

SEQ ID NO: 844004 - DNA, 98 bp, Homo sapiens
tggaccagttgctggccaccaccagatgccaagagttcaaactcaacaatattatccccatgcacgtgggaaaaagcgccagataggctggttcccag

SEQ ID NO: 844005 - DNA, 100 bp, Homo sapiens
caagattcgtatcattatggcagagcccctgtaaaataaaacagggtctgttacctagcttggaagatttgctgttctatacaattgctgaaggacaaga

SEQ ID NO: 844006 - DNA, 100 bp, Homo sapiens
gaattatgacacaacagaatccaagctccggagagagtttgaggtgtacggacctatcaaaagaggtctggatggtattattgaatatgatgatttcaaa

SEQ ID NO: 844007 - DNA, 98 bp, Homo sapiens
aagggaatgctgaagggcttgggagacatgttcagggcatcttctctgcattcagtttcatccaagtcattccgggatttcttactagaagaaaaaaa

SEQ ID NO: 844008 - DNA, 100 bp, Homo sapiens
agatgcaagccaaagaggaactggaacagaagtgcaagttggcgttgcaaacgctatggtcaccgaacgggtgacaaagaatgccctttctttatcaaag

SEQ ID NO: 844009 - DNA, 100 bp, Homo sapiens
aagaacctgaacgaggacacgaccttcctgcccttcacgctccaggagctagcacaggaagtcctggagaacctgaaggaccgctggtaccaggcggaca

SEQ ID NO: 844010 - DNA, 100 bp, Homo sapiens
cgctgcgccgggccccgggccccgatggccccgaccgcgtgctggagctcttcgacccacccaagcctttagaagaagccacactctctgaattaaaaac

SEQ ID NO: 844011 - DNA, 99 bp, Homo sapiens
cggtagcatctctcaaggcaaatggcgtgcaggcacagatggctaagactctttttgatcagaacaatgctgcaaaaaaagaagagtcagaaactgcca

SEQ ID NO: 844012 - DNA, 99 bp, Homo sapiens
gcgggacccggaacagaccgccgtgagagaggaggggtgccggccgggattcgcggcccggagctcgggaccgctggtgctcaagaccgaatcggctgg

SEQ ID NO: 844013 - DNA, 76 bp, Homo sapiens
ataaagaagtggagcgtgtcctgaaggagttccaccaggccgggaagcccatcggactgtgccctgtccacggtgc

SEQ ID NO: 844014 - DNA, 98 bp, Homo sapiens
tgcccaggaggcgccggggaactgcagggcgctcgaggccagctgatgtagcccagcagttccagtatgctgtgcgggtgattggcagcaacttcgcc

SEQ ID NO: 844015 - DNA, 100 bp, Homo sapiens
cctctctctttgcctccaagaagtgtaaccgccttgaagagctgatgaaggctcaaagtgctgacaaataaagcttctgtgatgctctttatgaaaggaa

SEQ ID NO: 844016 - DNA, 100 bp, Homo sapiens
gaggttgtagggcccattacttgcatcgattcttatggacaacctgatgttggagaaggcctgcatggcagtggaagaggcagctaagggtgggggcgtg

SEQ ID NO: 844017 - DNA, 100 bp, Homo sapiens
agcgccctgtaaggtatattcggaaacctatcgattacacagttctggatgatgtgggccatggtgtcaagtgccttaatacgtcctggtcgttttgaca

SEQ ID NO: 844018 - DNA, 99 bp, Homo sapiens
tcattgcctttcttcgtagcacctttgctgtattcacacaccttcctaattgcctgaggttctgtccattgaggaggaagtggaagaaacagagtcttg

SEQ ID NO: 844019 - DNA, 100 bp, Homo sapiens
tagcacatgcagatgagaagtccttagtcaacgcaaaatcatgctgccgtgttccgtgtgggaagcttgttgcaagaaggttgtgggaaaatcagcaagc

SEQ ID NO: 844020 - DNA, 98 bp, Homo sapiens
ggactatggcatctatgttatcaaccaggctgaagccgacgtagcttctctgaacagacgcatccagctggttgaggaagagttggatcgtgcccagg

SEQ ID NO: 844021 - DNA, 99 bp, Homo sapiens
gtgtgtctccccggacgcgagcccgctcccctgagagtcatactccatgggtttatgtgataaatgatcttggcatagaagagaatttaaagaatgatg

SEQ ID NO: 844022 - DNA, 100 bp, Homo sapiens
catacacagatgaaggtgggaaggatggtccagaattcacttttactaccccaaagtttggtatcctggatacagccatcgttgatcgggggaggaatgt

SEQ ID NO: 844023 - DNA, 117 bp, Homo sapiens
cgaaactcctgcacctgtatatagggccaagtcaattctggagacctgggtgtgggtcaagcaaccagagtcaagaaacttttcttttgagctattgacagcttttaacaagttatt

SEQ ID NO: 844024 - DNA, 100 bp, Homo sapiens
gccatccccggctccagcttcctggaagaagaccagctacaaggaaatacttctgaaaaatcactctgaaccccaagctggagtgaatcttctcctgagc

SEQ ID NO: 844025 - DNA, 98 bp, Homo sapiens
gcggacaacgagaaactggacaaccaacggctcaagaatttcaagaacaaaggccgcgacttggagatgagttttgatcatcctgagaaaaatgggcc

SEQ ID NO: 844026 - DNA, 99 bp, Homo sapiens
aaaatatttgggagggggtcccgccagcgccgtgacgtggactacagtgacgccctcacggagaagcagtggctaaggatattgtactccaagatactt

SEQ ID NO: 844027 - DNA, 100 bp, Homo sapiens
gaaactaaagcatttgaagcacttctttccaacattgtcaaaccagtggttgtaaagctctctgaaatagtgaccttagcgaagcaagcacatgtggatg

SEQ ID NO: 844028 - DNA, 100 bp, Homo sapiens
cttacaccaattacacctttgatttcaaaatattgatgatgttaagaagttcaaaccgggttacctggaagctactcttaattggtttagattatataag

SEQ ID NO: 844029 - DNA, 100 bp, Homo sapiens
aaatggcggcgcctgaggagcgggatctaacccaggagcagacagagaagctgctgcagtttcagctcttgaggctagtgcgcctctaggcaagatgtcc

SEQ ID NO: 844030 - DNA, 98 bp, Homo sapiens
gctggtgcatctgtttgccggaggaaatgctgctcatggattctcccttattcaggtggacaacacaaaggttaccatgaaggaaatcttactgaagg

SEQ ID NO: 844031 - DNA, 100 bp, Homo sapiens
tgaacccacatgcctctaccaatggacagctctcagtccacactcccaaaagggaaagcattcctctgaatattgatttgctgaatagcccagacttatt

SEQ ID NO: 844032 - DNA, 100 bp, Homo sapiens
atttaaaggtgaaattgcagtcaatgcattatggcctaaaacaggctgaccggttccctgatgtgttacctgcttctgctactgatccaaactgcagaac

SEQ ID NO: 844033 - DNA, 100 bp, Homo sapiens
agtcacagggctactgttttccaatcctcagtcttactactttgaccgcgatgatgtggctttgaagaactttgccaaatactttcttcaccaatctcat

SEQ ID NO: 844034 - DNA, 99 bp, Homo sapiens
tctgcggaagtgcagctgcctcagttcttagcgcagggtgcaaaaatgcagagtaataaaacttttaacttggagaagcaaaaccatactccaagaaag

SEQ ID NO: 844035 - DNA, 98 bp, Homo sapiens
aggctgtagcaggttccggcggacggcgttgcgaagctgatggtgagaccattctaaaaggcctccagtccattttccaggagcaggggatggcggag

SEQ ID NO: 844036 - DNA, 100 bp, Homo sapiens
aggcctcgggggcgtacaggcgcagcggccgcagcagcagcggcagtcacaggcacatcagcaaagagatgagtttgatgcctacatcattgtgtctttc

SEQ ID NO: 844037 - DNA, 100 bp, Homo sapiens
tcacccagcatttcatccctcgtcgaaaggattggattggcatctttagactgcgagcaagtcacaccagcctacaagccagatataatgaagccaagaa

SEQ ID NO: 844038 - DNA, 98 bp, Homo sapiens
gccctgcctggagggagccctcctggctgggggcaagattccgagtccgaaaggtccctgagtagattggaagcagtgacagcacgctcctttgaaga

SEQ ID NO: 844039 - DNA, 100 bp, Homo sapiens
ggcacagtaaagaaggagatccattagtgtttgcaactgtaggaagcaacagagcaattaagttggaatatgcaaggttggttaagttggcccaagaaga

SEQ ID NO: 844040 - DNA, 100 bp, Homo sapiens
cgaggaatttcagcagctctatgtgaagtggctggcaaacccttctaatgatatgtatgcagatacagtaacaactgtgatattggaagttcagtcaaat

SEQ ID NO: 844041 - DNA, 100 bp, Homo sapiens
ctgccgcattgatgatgagaacctctctgggttctcagattttacaggtgatgatgatgaaattcctcaggaactgctcttaggaaaacatcagcttaat

SEQ ID NO: 844042 - DNA, 98 bp, Homo sapiens
cctttccagtcggagacctctgccgcaaacatgctccgccagatcatcggtcaggccaagaagcatccgagcgatagatcactgcgaccagaggaaat

SEQ ID NO: 844043 - DNA, 98 bp, Homo sapiens
tggcgccccggcgcttgcaccaacatcaccatgggtgtcgtctgcaagcttcctcgtgacacagctgtgatcagtccccaggatcccacgcttctcat

SEQ ID NO: 844044 - DNA, 100 bp, Homo sapiens
agtactaaagaggaggtggaaatgaattgggacatggtacaggtatggcaggaggaaaatatcgttcgtttttaatccatgtcaaggcagtgaatgaaag

SEQ ID NO: 844045 - DNA, 99 bp, Homo sapiens
tttctggtcactccccaggattatgcgcggtgctatgacaagcgtctgtggcctcgaatggacctgagccggcggaagtcactgaccccgcccatgctc

SEQ ID NO: 844046 - DNA, 50 bp, Homo sapiens
agcttcctctggactatgccaaggacccatggatgaaggaccagatcttg

SEQ ID NO: 844047 - DNA, 98 bp, Homo sapiens
gcggcggccgacggcgacgactcgctgtaccccatcgcggtgctcatagacgaactccgcaatgaggacgttcagccttacgacagtctgcctacctc

SEQ ID NO: 844048 - DNA, 98 bp, Homo sapiens
cttcagtgtgttctgacggagccgaagtacagaaaccatatttacaggtgagcgtccctatcaatgtccttactgtgaaaaaggattcagtaaaaatg

SEQ ID NO: 844049 - DNA, 98 bp, Homo sapiens
agaagagaaagccagttatccacggactggaagatcaaaagaggaaatgcactcggtgatggaaagagagccactattctgaagaacacttggccaaa

SEQ ID NO: 844050 - DNA, 99 bp, Homo sapiens
ttgaaggcacttgccacttctgcctttggacatcttgaagaagcttagggaagaaaggctcccgggacatgagagatggctttagaagaaaaagtttct

SEQ ID NO: 844051 - DNA, 100 bp, Homo sapiens
tgcctgcagtttttcaccctcacgctgatgaacttgtacttcacgcaggttgattcttcaccacactgaaaccattaggaaaaatccttgtggttaacag

SEQ ID NO: 844052 - DNA, 99 bp, Homo sapiens
gatgacaccggagtttgacgaagaggtggtttttgagttttcagatgcttcaagtgttgtgaacagagacttgtttggattatgcatttctcagctaga

SEQ ID NO: 844053 - DNA, 99 bp, Homo sapiens
agttttcatggattctaatggaatcaggcagttttgtgtccatgtgaacaactgtggtcctggctctgccatatgacacccccgtgcccggctacatga

SEQ ID NO: 844054 - DNA, 98 bp, Homo sapiens
gggctgtagtgaggaaggacctgctgatgaatattacatcatataccgaaatgtttttgataagattctgaacacaaactcgagacgagttcaggaag

SEQ ID NO: 844055 - DNA, 100 bp, Homo sapiens
ggatttggcaacagactttgtttcttggagtccacttccaattccaaggagatgggtctcactctgtcacccagactggagtgcagtgagtggtgcgatc

SEQ ID NO: 844056 - DNA, 99 bp, Homo sapiens
tcatctgcaaatatttcaataagtacccaaaagctgatgttctaatcatgtcagataaagatgatattgagactccactgctaactgaagcagccccca

SEQ ID NO: 844057 - DNA, 98 bp, Homo sapiens
atatgctgtggtccactgtacaggatacatcaaggcctggccaccagcagattgcagtgcttttgtccacaaaggctgccgagaaagtctagcctcct

SEQ ID NO: 844058 - DNA, 50 bp, Homo sapiens
gtgcccacgcagctgcctggacaagtcgagtctatgctgtcttgtcaaag

SEQ ID NO: 844059 - DNA, 98 bp, Homo sapiens
aaatagtatgggaattcctattatggtcaaaatgcagatcttcgtgaaaacccttaccggcaagaccatcacccttgaggtggagcccagtgacacca

SEQ ID NO: 844060 - DNA, 101 bp, Homo sapiens
acagggggatttggaaatgtcatccgatggcacaatcaggtttttcttcccccagtccctcagctgctgctgctgctcaggaggtcagatctgccactgat

SEQ ID NO: 844061 - DNA, 50 bp, Homo sapiens
cggctcacctgtgcgggatggaacaaaagtgaatttaggaggacttttac

SEQ ID NO: 844062 - DNA, 100 bp, Homo sapiens
gcaattccttcctccacaaactgtgctctgatccaaggattaatgtcgtgcttgctggtggccacgttgtgccccgagatgagatccggaagctgatgga

SEQ ID NO: 844063 - DNA, 100 bp, Homo sapiens
agtgctaaaatgctgggaggtgtctttaaaattgactggatttgcagatgtatgattatagcttggacatgtggagtttgggctgtatgttagcaagcat

SEQ ID NO: 844064 - DNA, 98 bp, Homo sapiens
ggaaaaactgggcgtctgcttgggaatctattgtggaaacccagaagaatcctgcaaaaatgtctctctatccatctctcgaagacttgaaggtagac

SEQ ID NO: 844065 - DNA, 100 bp, Homo sapiens
gtcttcacgctgagccccagcccccaggactggcgtgacacccttttctatggggtcttcacttcccagtggtttccaccgtgcacattatgaagaaaag

SEQ ID NO: 844066 - DNA, 98 bp, Homo sapiens
tgggcctcctggaccagacaaaaaccaccttctggcagatggagggagctttggagactgggcatccactatctggtgagcgacctgctggaattctg

SEQ ID NO: 844067 - DNA, 100 bp, Homo sapiens
gtgactgatcaggctgaggccgagaagcagtacgaagactcctgccgcgtataccaggcatccagccccgatgaggactcacaccacccggcaagaactg

SEQ ID NO: 844068 - DNA, 100 bp, Homo sapiens
catggatatactggacaaagcggtgattcataccctaggcgggacagagcacgatggtttcaagtgccccatttgctccaagtctgtggcttctgacgag

SEQ ID NO: 844069 - DNA, 99 bp, Homo sapiens
gctgggcacgttgcacccccgcacctccatcaccgtggtgctgcaggttgtcagcgatgccggctctctctccagggcacaccgtattcagctctgagc

SEQ ID NO: 844070 - DNA, 100 bp, Homo sapiens
atgatgtttaaaaaggggagctttgaaattggaggaaccatacatccagttgcaattaagctttcaccaacaatcaccagtggtttacacaacattgcaa

SEQ ID NO: 844071 - DNA, 100 bp, Homo sapiens
agaacatccagtttgatgtttactacaaggagacgcaggtcagaatggaaatgggctgcagaccgggcagctattgtcagccgctggaactggcttcagg

SEQ ID NO: 844072 - DNA, 98 bp, Homo sapiens
agataccaactagagataaaaataccagaaacatacccatttaatccccctaagatgagctgaagcacattattggggctgagacaacacggaaaggt

SEQ ID NO: 844073 - DNA, 100 bp, Homo sapiens
cccaagatgctcttcatactgtagaaaaatattcctttgaagagattctcagagagagttcaacagcaggccaggtacaggatacgtacctgtggagttt

SEQ ID NO: 844074 - DNA, 98 bp, Homo sapiens
agcggccccgagtatgcttcgtttttcgccgtcatgggcgcctcggccgccatggtcttcagcggaatcttgtcgattggcctggctgctgcctacta

SEQ ID NO: 844075 - DNA, 119 bp, Homo sapiens
ctttccggacagacaggagagggatttgtcatcagcgtgtctcatggagaaccactctgcatcagaagagctaacaattgctggaatgacctttacaacttttgatcttggtgggcacg

SEQ ID NO: 844076 - DNA, 100 bp, Homo sapiens
tatctttgccagtttagctggatgctcattcagaagcccccgagcgcccacagcatgaaggaggaggccttcctccggcgccgcttctccctgtgtccac

SEQ ID NO: 844077 - DNA, 99 bp, Homo sapiens
attgaactcctgattttgtcagagtcaagcaaagcattgtattcctgagaaaaatcacactctccaagcagactcttattctcctaatttaccaaaaag

SEQ ID NO: 844078 - DNA, 100 bp, Homo sapiens
ctgcaccagaagaatggcttcacatgtatgctcatcggggagatctttgagctcatgaggcagcctggaaggtgacagatgaatgcatccaaatcatggg

SEQ ID NO: 844079 - DNA, 100 bp, Homo sapiens
cgtgcattcgtgaagaagcccatcagtatttcttgaataccagcatcaacaaagagagcattgtggatgtagaaggtgttgtgagaaaagtgaatcagaa

SEQ ID NO: 844080 - DNA, 98 bp, Homo sapiens
agccgtcatgccggggatagtggagctgcccactctagaggagctgaaagtagatgaggtatgtcctctaccctctggatctgtacaacgacagcgcc

SEQ ID NO: 844081 - DNA, 100 bp, Homo sapiens
agaaagaggataaggaggcggtggggctggagaacccgaagcacctcccggcgccgggacgcttcttctgttcgtcacaaggcatcgcagaaggtttatg

SEQ ID NO: 844082 - DNA, 99 bp, Homo sapiens
caacattacagaccggtggatcctgtccttcatgcagtctctcattggcttctttgagactgaaatggcagggtgttggaactcgccataaggcattga

SEQ ID NO: 844083 - DNA, 100 bp, Homo sapiens
gcatctgtgacaacttgcttcatctactgccgaggatgttccaagccgctgtgctgctcgtgcgcgctccttgacagcagccacagtgagctcaagtgcg

SEQ ID NO: 844084 - DNA, 99 bp, Homo sapiens
gtctgtatgatgaagcaatacggcatttttcaacaatgcttcagaaatcctgccagaaacctgtagacaaatatatcgagtatgatcctgttatcatct

SEQ ID NO: 844085 - DNA, 100 bp, Homo sapiens
catgagcatgaagataaaagtcctgaaacagttttgcagtcgccccagagttccaaaagttggtttgcatggacagattcagagcagtcccacagagccc

SEQ ID NO: 844086 - DNA, 100 bp, Homo sapiens
gtctacagccacgaccctctttcacagtctgccattgctcaggagtaccttagatccacagaagatgctcttgtcatgggatggaggggaaagtaggagt

SEQ ID NO: 844087 - DNA, 99 bp, Homo sapiens
tggcacctgcgcgaagctggccaaagcctgcccagacggctcacctgtgcgggatggaacaaaagtgattttggctactaccgtccagaaaatgactcc

SEQ ID NO: 844088 - DNA, 98 bp, Homo sapiens
tgttgcctgggggcacacaggtgctggatggtacctcggggttctctcctgcccccaagctggggaagaaggagaaagggccaacccctgaagaagca

SEQ ID NO: 844089 - DNA, 98 bp, Homo sapiens
gtggctgaagaaggaaatgataaatggctctctcttgatttggagcaggtagttagaaacaaacctgtggcaaggcaggctcctggcaaacggaagtg

SEQ ID NO: 844090 - DNA, 98 bp, Homo sapiens
aaggatttgattatggactcggaaatagcaaaggagttcccaaaagtcgacgaggagaaatttggcagtttctggctttacagtaccgactcagacac

SEQ ID NO: 844091 - DNA, 100 bp, Homo sapiens
ccttttggctttcttggcctgatgctgaactctcgagggagtaagtccatgagtgatgtcagcgcagaagatgttcaaaacttgcgtcagctgcgttacg

SEQ ID NO: 844092 - DNA, 100 bp, Homo sapiens
ccaatcaaactgctacaagacaacaccctgatctggcatggacatatcttggcatatacagaagggctgcatggaaaatggctgttcacagagatacgat

SEQ ID NO: 844093 - DNA, 100 bp, Homo sapiens
cccgttctccccggcacccgggagtcatcttcaaagccctgaagccttcggattctgtgagtacaaggagccagaatctaccctccgtgcactcagatta

SEQ ID NO: 844094 - DNA, 100 bp, Homo sapiens
ccaagatctcctcatgagctttggtatccttaaacctgacttaaggattgtctttgtacataacaagatcaacagtacaaattctgaagtttgtaaactt

SEQ ID NO: 844095 - DNA, 98 bp, Homo sapiens
ctggggatgattacagttcttcctaaaaaaggatgtacagttacccagcacgtgtacctcctcctcctcctattgctcgggctgtagtgccctcgaaa

SEQ ID NO: 844096 - DNA, 100 bp, Homo sapiens
ctctgcaatcacaccaatgtgtgaagtgacaggcggctaatagctcgtcagcttgctaaaatccatgctattcatgcacacaatggctggatccccaaat

SEQ ID NO: 844097 - DNA, 99 bp, Homo sapiens
aaaggtctggacactgaaaccaccgtggaagtcgcctggtgtgaactgcaggaatggaacattactaaactttcaattgagtatgattctgagcccttt

SEQ ID NO: 844098 - DNA, 100 bp, Homo sapiens
tggagcacaaaagagtctccgcggtggaggtctgcgttgctcttgcttttcctcgctggggtgtacgatatggctcgtggacagcagaaaattcagtctc

SEQ ID NO: 844099 - DNA, 98 bp, Homo sapiens
agccgccgcgcgctgcagctctccgggacgcccgtgcgccagctgcagaagggcgcctgcccgttggtgtcgcagccccaggctgctcccagcccgct

SEQ ID NO: 844100 - DNA, 90 bp, Homo sapiens
tccggaggcggcgggacagagcgcctgcgaccccagtcggtgctccggggaggtcacctgacgaggagggctgtcaggggtggattcagg

SEQ ID NO: 844101 - DNA, 100 bp, Homo sapiens
agtggaagccttactccccccgtgaccccacccatcaccccctcctcttcattccgcagcagcactccgacagggctgatcccttatccaacatggttct

SEQ ID NO: 844102 - DNA, 98 bp, Homo sapiens
tgaaggaaacgctcagcctcactgtagatgccaagacagagactgcggtcttcaaaagatatctaactgattttgagccaattcaatgcctgggacgt

SEQ ID NO: 844103 - DNA, 98 bp, Homo sapiens
agtgatgctgctcaccatcagtgaatttaagcccacatatcaggaccgagtggccccgccagactacaaggcttttgaagaagcagctgaacacttcc

SEQ ID NO: 844104 - DNA, 100 bp, Homo sapiens
acagggttcctgacagaatatgtggccacacgttggtacagggctccagaaattatgttgaattccaagattctctttgtggccagatgggtttgtatgg

SEQ ID NO: 844105 - DNA, 98 bp, Homo sapiens
agtaccttcgccggtcaccggctcctgcaggcctggagtactcgggtactttgagttcagtggctcaccccagcctcctggttatttgaccttcttca

SEQ ID NO: 844106 - DNA, 99 bp, Homo sapiens
aggatttcttgcgtgcagtttgtgaagaaaaaattagaaaaggaagatggcgccatttctaccatagtacttcgaggctctacagacaatctgatggat

SEQ ID NO: 844107 - DNA, 100 bp, Homo sapiens
agatggcggtgagggatcgctgcaacctttagactaatgactgtccgaaacatcgcctccatctgtaatatgggaccttaccaggacacattagaatttt

SEQ ID NO: 844108 - DNA, 100 bp, Homo sapiens
ctatgttactgcaatggcatgaaaagaaacacatttactccccaataattgtacgggaggtgatcgaggaagaagaaccaagtgaaaaatcagaggccac

SEQ ID NO: 844109 - DNA, 100 bp, Homo sapiens
ggtggcatcgacaaaagaaccattgaaaaatttgagaaggaggctgctgaggctgtgctactcatggacgccgaaaagcgtatccggttactgcagtttg

SEQ ID NO: 844110 - DNA, 100 bp, Homo sapiens
tggaagcattcatatttgagacccaggctccttgaaggaggagagcaccctgcaggagctgctgctgtccccttacctgtgggtgctctccactggttac

SEQ ID NO: 844111 - DNA, 98 bp, Homo sapiens
gttcaggtggtgcaagcacagctggcaaaaggtcttgtttaagtgaccaagaatatggcccaggtgaccaaagccctggacaaggccctgagcaccat

SEQ ID NO: 844112 - DNA, 98 bp, Homo sapiens
gagtggctggaggcctccagaggttgaaccatgattccggtgacagagctccgctactttgcggacacgcagccagcataccggatcctgaagccgtg

SEQ ID NO: 844113 - DNA, 98 bp, Homo sapiens
cttattttttctcatggatgttcttcttcgagtatttgtagaagggttgcaaaagcttctcatttcagagagatgccaggatcctaagtgcctgccaa

SEQ ID NO: 844114 - DNA, 100 bp, Homo sapiens
accaactctactggcagacatctatatggactcagattacagaaaacaatgggaccagtatgttaaagcccagaacgtcatggccgggaatggccggggc

SEQ ID NO: 844115 - DNA, 98 bp, Homo sapiens
aaaagagacctctacttagctcagcaattcttaccttgtaaacactacacgtgaagagtggtgaaagggaacattgattactgaagtgccctggagag

SEQ ID NO: 844116 - DNA, 100 bp, Homo sapiens
ctcggaagagcgctcccaggagaaacaagaatgatgagaagacagcagctgattacaagattttaggtggttcagtccttcacctggtgttggctctgag

SEQ ID NO: 844117 - DNA, 98 bp, Homo sapiens
atatggaactggccaagatcaagcaaaaatgcccactttatgaagccaacggacaagctatgatagtgaaatgtttcgagggtgaaggaggacattca

SEQ ID NO: 844118 - DNA, 99 bp, Homo sapiens
ttgcgagagaggctgcagggggagcacagccagaatggggaggaggagcctgagcaggatcctaaggcctttgtagtccttcagccactgtgggccctg

SEQ ID NO: 844119 - DNA, 99 bp, Homo sapiens
gcagtcagagtcaaaacagagcttttggaatctgaacaaggggcaattaagttggaatatgcaaggttggttaagttggcccaagaagacaccccacca

SEQ ID NO: 844120 - DNA, 111 bp, Homo sapiens
gaattaaaagatgatgagaaataaggacaaaagccaagaggaggacagttcgctacacagcaatgcatcgagctatccagtcagttcgctgctattcccatgggtcacagg

SEQ ID NO: 844121 - DNA, 117 bp, Homo sapiens
ggccttggaccccgcggcgcccctcggcctcggagcaacgagcgcagcgccggtctgccatcatggatgttctcgcagaagcaaatggcacctttgccttaaaccttttgaaaacgc

SEQ ID NO: 844122 - DNA, 99 bp, Homo sapiens
gaagattgtaattttgcaaaaattttgttgaagatgatgtagctttggttcagagattacttagtaatggaactgatggatgccaacttatgtcaagtg

SEQ ID NO: 844123 - DNA, 100 bp, Homo sapiens
tactaatttacatgaagtgccttatcctgatgcaagaattgtttttggctttcacccccaaccagtgaccaaagacttgaccactcaaagtccagctccc

SEQ ID NO: 844124 - DNA, 99 bp, Homo sapiens
tgagattcccacagaccccagtgaagatgatggacttccaaaaccagaactaatatcctggattgaacacgggggagagcccttcaggaaatggagaga

SEQ ID NO: 844125 - DNA, 99 bp, Homo sapiens
tcctacctgaaacatacggagattgacaatcaatgggccatcttggacggctctgaaaattggaaaaccaagaaggttttgatgttttgtgtgacgcca

SEQ ID NO: 844126 - DNA, 98 bp, Homo sapiens
caaggactcgccctccgtctgggccgccgtccccgggaaaacgttcgtcaacatcacggagcatcagatccatgctgctgctgactcggagccccaca

SEQ ID NO: 844127 - DNA, 117 bp, Homo sapiens
agcgctgctgtagttgccttccatggatctataggagagcaagtcctccagattatgtttgagaccttcaacaccccggccatgtacgtggccatccaggccgtgctgtccctctac

SEQ ID NO: 844128 - DNA, 100 bp, Homo sapiens
cggactacatgtcggaggagaagctgcaggagaaagattgtagaaggcatgaaacaaaaaatgtggagtattgaaaatattgccttcggttctggtggag

SEQ ID NO: 844129 - DNA, 99 bp, Homo sapiens
gaagctggccgcctgcggcatcgtcctcagcgcctggggagtgatcatgttgtgtccacatagaccatggccagacagacaatggggattatgcatctt

SEQ ID NO: 844130 - DNA, 98 bp, Homo sapiens
atcaaaaagagagtggttgtgatgcagtggcagaacgtggagcacgttggtgaccagagcccctacgtcacctctgtcattctgcacatcaagcagaa

SEQ ID NO: 844131 - DNA, 98 bp, Homo sapiens
ctagagttgttcagaatcctccaaaaccagtcatgaccactagacccacagctgttaaagcaacaggttcatgttgctgaggaggcagagggctgagt

SEQ ID NO: 844132 - DNA, 98 bp, Homo sapiens
ttcaagccctggctcaaaataaactcccccactggaaaggattctgaaagaaatgaagtcagccctcagaaatgaagttgactgcctgctggctttct

SEQ ID NO: 844133 - DNA, 99 bp, Homo sapiens
aaggacttcggaatgcactacaacaggaaaatcatattatagatggagtaaagggaccagaggaagaccgagaggcagaatccgagttaacagtaacac

SEQ ID NO: 844134 - DNA, 100 bp, Homo sapiens
cctcgccccagagacaccagcttcagtggcctgtcgttggaagagtacaagctgatcctgtccacagatgctaatactggagaccgtggacagaccaata

SEQ ID NO: 844135 - DNA, 100 bp, Homo sapiens
tggacctggagaatgacaagcagcagctggatgagcggctgaaaaaggagaaagcccaggagctgtcggactggatccaccagctggagtctgagaagtt

SEQ ID NO: 844136 - DNA, 100 bp, Homo sapiens
acaagcaagtcagaaagcgatttgatagggtggctttgcaaaatgttacgagatgacagatttgacaaataacaaagtctacgccgcaaaaattattcct

SEQ ID NO: 844137 - DNA, 100 bp, Homo sapiens
agatcatgggcaaaggacagatccagcttcggcttcattaacgccagatttcttatctccaggaagttcaaatgtctcttctcccttaccttgttttgga

SEQ ID NO: 844138 - DNA, 99 bp, Homo sapiens
ttgctgaccaggggcttgagagctgggttctattttccctcctcaaactgactttgcagccacggagaggggtgagcttatggaaccaaggaagagctg

SEQ ID NO: 844139 - DNA, 100 bp, Homo sapiens
cttcatttgggacacacgttttctttatccaaatgtgaggggatcccaacaagccctcaggattcagaagtgttaaagctcctgtcactaaagtggctgc

SEQ ID NO: 844140 - DNA, 99 bp, Homo sapiens
ctaggcctctgaggaggcgaatccggcgggtatcagagccatcagaaccgccaccatggtggagtgcaactcaaaattggacccaacaaagaccactct

SEQ ID NO: 844141 - DNA, 116 bp, Homo sapiens
taatcctggcgttccaccagcaaccatgagtggttccatgatgggaagtgacatggatcctaaggcctttgtagtccttcagccactgtgggccctgcctctgcctgttcttctgg

SEQ ID NO: 844142 - DNA, 100 bp, Homo sapiens
gggaagctctagaggcgttttttggccaaggggtgaatggagtgaggccctttacccgctgctgaccactctcaccgactgcgtggccatgatgagtgac

SEQ ID NO: 844143 - DNA, 100 bp, Homo sapiens
cacatcgtactgatggatttgctgaagcaattcagattaaactgcaaatatctcatgaagctgctgcctgtatcactggtctccgggcagccatggaggc

SEQ ID NO: 844144 - DNA, 100 bp, Homo sapiens
tttattttcctgtaatatatctgtatcatcggagttatgtgtctcggtaccacgtgaaagactcctcacgccacgtcatcctaggcacccagcagttcaa

SEQ ID NO: 844145 - DNA, 98 bp, Homo sapiens
cctgggggaggcccttatcaatggaggtgtcttggctgggcatgacaaccgcgtcagctgcctgggcgtgactgacgatggcatggctgtggcgacag

SEQ ID NO: 844146 - DNA, 122 bp, Homo sapiens
ggtgaatggctggtacccattggcaactgcctatgcaacgctgggcatgaggagcggagcggagaatgccaagcctttctgagaaaagtctacagcattctttctctgcaggttctcttaac

SEQ ID NO: 844147 - DNA, 100 bp, Homo sapiens
ttaagtcaaaacggtcatattccaaaggaaagaaaactttctttacccacttataaacagaagactgtgacaagaaggccaattatttccatcgctgaag

SEQ ID NO: 844148 - DNA, 100 bp, Homo sapiens
ggaggaatccgccgtgcaaatctgtccgcccccttggccactgatcccccgaagagcttctgtcgccgctctaggggagaactaatgccgacgtgatgac

SEQ ID NO: 844149 - DNA, 100 bp, Homo sapiens
agagaacaccacagactgcctcagcacaatgacaagtgtctgtaaagtcatgctggaaactccacttgtgtatgcggatacctgcttcagtaccatcaag

SEQ ID NO: 844150 - DNA, 153 bp, Homo sapiens
accccgggagccaaaatattcatccaataaagaagaatggatcagcttggcctatagaccattccttgatgcttctagccacagctccggagcaagccccagccccggcccggccataccagggcgtccgtgtgaaggagccagtgaaggaac

SEQ ID NO: 844151 - DNA, 99 bp, Homo sapiens
ccagacgggcgggcagggccgggctccgcagagttttccgtctgatgaaggttggccatttgcaaagtatcttggagcttgtggaagaatggtggctgt

SEQ ID NO: 844152 - DNA, 50 bp, Homo sapiens
ggtgatttctgcatttccaactgagctgctgtttccggagttgccccttc

SEQ ID NO: 844153 - DNA, 100 bp, Homo sapiens
tcacgtgctcttgctaaagaggtagcaagaaagaaaattagagtgaatgtagttgcaccagatggcaagtttggggcctacatgcaggtgcacattcaga

SEQ ID NO: 844154 - DNA, 98 bp, Homo sapiens
gcacgtaccagaggtggaagtccaagtcaaacgcagaaggactgcctcactgagcaaccaagagtggggaccaaggcatactgaacacattttttagc

SEQ ID NO: 844155 - DNA, 99 bp, Homo sapiens
cctggaatcccatttgtttggggttggtagaaggtgttattgggaaaattcaacttcattcagttgaaaacaatcctcgaacaggaaatcttggtgcac

SEQ ID NO: 844156 - DNA, 100 bp, Homo sapiens
cagaggagaaagttgcagtgccagttcctgtcgctaagaaagctcctcctccccgaggtctggccgtgggcctgggcttcggggcactggcagaggtcgc

SEQ ID NO: 844157 - DNA, 100 bp, Homo sapiens
ctcagctcgggccacggagaggagcagcccccggagacagcggcacagaggtgcttctgccaggtcctactgctctgttggctcatgaaataggttttgg

SEQ ID NO: 844158 - DNA, 100 bp, Homo sapiens
ctgtagcctcgaaattctgggccgaaatgatccgcctgcctcagcctccaaagtagctgagactacagcaagccagggctgagcaggaagaagaattcat

SEQ ID NO: 844159 - DNA, 100 bp, Homo sapiens
tccagtactcattttgctacacttacagcaaggatgttaatagccttggataagtacccaagatattgtatttggagaagtagatcggtgagcaggggag

SEQ ID NO: 844160 - DNA, 100 bp, Homo sapiens
ctaccactatgggtgtggttgctgggatcttagtacaaaacgtgttaaaagcaagctataccagagaatcagatagcaagccctccctcagaggccaagg

SEQ ID NO: 844161 - DNA, 100 bp, Homo sapiens
aatagctcagatcctttccttaacagtgctgtccccggcataggtccatctctgcagaagccatttcaggagtacctggaggctcaacggcagaagcttc

SEQ ID NO: 844162 - DNA, 100 bp, Homo sapiens
cttgcgccgctgacttctccactggttcctgggcaccgaaaggatgatgcacgccaactctttgtgctagctggagctgctgaagaaggctttatgactg

SEQ ID NO: 844163 - DNA, 98 bp, Homo sapiens
tttgaaattctacaggagcgtcaacctgatcttaccaggaatcactcactcagatttgaaggccatatagagatctgcccaccaggcatgagccattc

SEQ ID NO: 844164 - DNA, 100 bp, Homo sapiens
gcctccccaagctgagttccagtcatacagcaggacatgctacgacagtgaagattcagttttccaaagaaattagaccattttcttcgtgagaaagaaa

SEQ ID NO: 844165 - DNA, 98 bp, Homo sapiens
tgcgtccatgtgaagcatcctcataagagtacagaattttctgagacgccttctcccgacagtgactcagtgaactccgtggaaggacactctgagcc

SEQ ID NO: 844166 - DNA, 100 bp, Homo sapiens
tgaatgccacagttcagtgtattcgttctgtgcctgaactcaaagatgcccttaaaaggtgtaacctggccagtgtgatgcttcagcttctagcaatgaa

SEQ ID NO: 844167 - DNA, 100 bp, Homo sapiens
gaagcagagccgcctgtgcatggtcaggccttgcgaagctgacctggaagagaacattaaggtgtggaatatcaaacaaatgattaagttgacacaggaa

SEQ ID NO: 844168 - DNA, 100 bp, Homo sapiens
gccagggccaccccgaaaccctgagggtgatgaaaactttattaccatgcattcatgttctattaatggaaaatactttgattggattctcatctcgagg

SEQ ID NO: 844169 - DNA, 100 bp, Homo sapiens
tcatgtatcctgtgtttaatgagtgtaaacaggaacatcgataagtagtgtaaaaacttgcacaatgaaatccgaagccaaggatggagaggaggagagt

SEQ ID NO: 844170 - DNA, 98 bp, Homo sapiens
cctaagttcctcaccagaagcagaggctggcaccatgtttgttatgcagcctgcagaaccgattggtccaaaggaagattttttccattgtttgaaat

SEQ ID NO: 844171 - DNA, 100 bp, Homo sapiens
cctcgacgccacttcatgttccagtgcctcgagcgctcaggatggaggaagactcgatccgcctgcctgcgcacctgcggtttggagttgaaaatatggc

SEQ ID NO: 844172 - DNA, 98 bp, Homo sapiens
tggaagtcgcctggtgtgaactgcagggagtaactattcccagtcagaggcgctatgtgtattattatagctacctgttaaagaatcatctggattat

SEQ ID NO: 844173 - DNA, 100 bp, Homo sapiens
ccactggaaagtgaggaattttgaagtacaccgtggtgacattgtatcattggtgtggcctttttgaagatgtaactattagagctgggcattctcctcc

SEQ ID NO: 844174 - DNA, 98 bp, Homo sapiens
ccagtgtgaactgtgtgttaagtcatttgttaccaaacggagtcttcaagaacatatgagtattcacacaggacagagcgggatgccaccagcttgtc

SEQ ID NO: 844175 - DNA, 100 bp, Homo sapiens
tgaacgtcaccgaggagaagtaccaggaggcgttggccaagggttgcgagttataaggactcagcatcatgtagaagcacttgtggagcatcagaatggc

SEQ ID NO: 844176 - DNA, 100 bp, Homo sapiens
aaatcgacttcggtttcagttggagttggaatttgtgcaatgtttagccaacccaaattaccttaattgtgcctgtcctgagacccatggacctgatggt

SEQ ID NO: 844177 - DNA, 100 bp, Homo sapiens
gttgactgcggcgagtatacatgcaaagcttccaatgagtatggcagtgtcagctgtacagccacactaactgtgacagatcaggcctttgtgacactaa

SEQ ID NO: 844178 - DNA, 100 bp, Homo sapiens
tgaccgctcagtacatggagcggctgaacgcgcgccacggcggtgccttgtgggacattgagactgggcagcagaagactgtatttgtgggacacacggg

SEQ ID NO: 844179 - DNA, 125 bp, Homo sapiens
aaactttgtgattcaggagaactggtcgccatcaagaaagtattgcaggacaagagatttaagcaatctgcacatcgtgctgccacacgaggcttcattcgttatggctggcgctggggttggag

SEQ ID NO: 844180 - DNA, 98 bp, Homo sapiens
tgaagtacaaagcagtgagtgtcaacgaaggctataaagtctgtgagagggtggaagaccatgacgatctcatgccaatatttatgcgctatgacaca

SEQ ID NO: 844181 - DNA, 100 bp, Homo sapiens
accatccataatgaagctgagcttggcgatgatgacgtttttacaacagctttattaaaccgcctggagcgaattttcgaagcatgttttccttccatac

SEQ ID NO: 844182 - DNA, 98 bp, Homo sapiens
tccgggcgcagaggcctacatcccacagagatacccagacaacaggatcgtctcgtccaagtgaggactcagaagacaaagatgtgaagaccaagaag

SEQ ID NO: 844183 - DNA, 100 bp, Homo sapiens
cagcccatggaggagatcggcctcagcccccgcaaggatggcctttcctaccagatcttcttcagcagtatcgttctgctgtgtgcaaactagacagtgt

SEQ ID NO: 844184 - DNA, 98 bp, Homo sapiens
aactgcacagtggaaggcactttccatgaatactgagaatgccaaagtaaccagatctaacatgagaccagcatctcagacatgtcgaaaaagatgtt

SEQ ID NO: 844185 - DNA, 100 bp, Homo sapiens
ctggggttttattttctctcagctgcaacaacttcaatgcagtctttagtcgcatttctaccagagtgaagatagtccaagtcctaagagacagcgcctc

SEQ ID NO: 844186 - DNA, 100 bp, Homo sapiens
cagcagcagcggctccggcagcggtagcacgagtgcgggcagcagcagccccggggcccggagagggttttttgattaactcaaaaccagagaatgcctg

SEQ ID NO: 844187 - DNA, 98 bp, Homo sapiens
ctgtcttgactggggtagctgaagctgttgtagctatgctgatgcagagattgaaggagccccagctgctcccttggatgtgaagtgcttggaggcca

SEQ ID NO: 844188 - DNA, 99 bp, Homo sapiens
tgaatttaaactcagcaaagtctggcgtgatcaacattttgttaagattcaggtcaaagacagatatgggcacggttatgaaatattttgtgttacttg

SEQ ID NO: 844189 - DNA, 100 bp, Homo sapiens
tgggcctttccagcccgtggtccttctccatattcgagccttatgtttgatcatcggccaaggtcctggcgagaactgcctctgcggctagctgattttg

SEQ ID NO: 844190 - DNA, 100 bp, Homo sapiens
acaggaactgtgagggtgtttgatctcatgggaagtgaactctttgtcatttccccggtcagattgtcaagcatggagatatcaagtgtgtactaaatga

SEQ ID NO: 844191 - DNA, 100 bp, Homo sapiens
caggacatcaaggagcgccgagcagtcatcatcctcaggaacatcatcctggacgtcaaccaggaccgcctcacccagagggccatcgaggcctccaacg

SEQ ID NO: 844192 - DNA, 98 bp, Homo sapiens
cgcaagatggcagccaccacgggctcggaaccccagctcaaagggattgtgacaaggttattcagccagcagggatacttcctgcagatgcacccaga

SEQ ID NO: 844193 - DNA, 50 bp, Homo sapiens
gacgcccggcgccagcacatcgcaggacacattggcgtgagacctgggag

SEQ ID NO: 844194 - DNA, 99 bp, Homo sapiens
aatactctgctctttcaagtgaaccaaacctatcaaacctgtttagaaaataaaccagcaaagtgtgggatgctgtctcaggagatgaattgatgaccc

SEQ ID NO: 844195 - DNA, 100 bp, Homo sapiens
gcccttgccctctccttgccatcatgaacatcctctttcttcagtggaagctactccctcttgatgccctcccctttgcccctcactcaggatgctccag

SEQ ID NO: 844196 - DNA, 99 bp, Homo sapiens
ccacctggcattgaggccagtcctgacaaaatgcttcaggatacaacttcagtattaaaggaggaacatgttacaacctttgaagatgaaggatcctat

SEQ ID NO: 844197 - DNA, 98 bp, Homo sapiens
aaaacgagaaattcaaaatctaaaactctttcgtcatcctcatattatcaaactatgctaatactggagaccgtggacagaccaataatgctgcttct

SEQ ID NO: 844198 - DNA, 98 bp, Homo sapiens
cggaagattgaggcctacatggaagggaaggatggagacgctgaaggataagaccctgcaggagctggaggagttgcagaatgactcggaggcgattg

SEQ ID NO: 844199 - DNA, 100 bp, Homo sapiens
gaaaaagaaggccctgagtcaaagaagatgcctcgaactaaacaaattcatcccagaaatctaagagatgttgtaaattttgatgacatagcttcctcag

SEQ ID NO: 844200 - DNA, 98 bp, Homo sapiens
tttggttacctatgtacctgttaccactttcaaaagtttctggcacagccctgagtgtgaatttgtccgccactgcatcgccaagtcccaggagcgag

SEQ ID NO: 844201 - DNA, 99 bp, Homo sapiens
agcctcccgcgcctcgctcagctccaacatggtttgtcctggttgtggtcaagactggatgatgtaactggctctctaggaagcctcacttggccgtaa

SEQ ID NO: 844202 - DNA, 99 bp, Homo sapiens
aagcaaacagaaaattgtggaggttttgttggagagaaggatattcctggactgactgatactacagtgcctcgccgcctgggccccaaaagagctagc

SEQ ID NO: 844203 - DNA, 100 bp, Homo sapiens
gcaacgtggacagggtcctctgcagcttcaagatcaatgactcggtcacactcagcaaaaactgattattccaagtggaagttgccctgttattctgaat

SEQ ID NO: 844204 - DNA, 98 bp, Homo sapiens
tgggccacatgcagtttctctcagcccagtggttcccagacacaggtaatcttgggcacctccaagagcaaagtttaggagaagagggaagtcatttg

SEQ ID NO: 844205 - DNA, 99 bp, Homo sapiens
ttggaaaagagccgagtggactaagattcaacaaactatttttgaatgaagatgagtcatttgatgtggtcacaaaatgtgtgagtttcacactaactg

SEQ ID NO: 844206 - DNA, 100 bp, Homo sapiens
cttcttacgttggaagtgttcgtccgcttgtcactgaattggttatcaatactctggctgaccatcatcatcgtgggactgactttggtggaagtccttg

SEQ ID NO: 844207 - DNA, 99 bp, Homo sapiens
gagagagagccttgggacggcagggatggcgagccaagttctatagaaattttagagtattcatcagatagtgaaaaagaagatgatttggaaaatgtc

SEQ ID NO: 844208 - DNA, 100 bp, Homo sapiens
agctttggcaagagtgtacctggtccactgaaaaattcttcagattggaaaataccacaggatggagactacgagtttggataaagtaattcctaataaa

SEQ ID NO: 844209 - DNA, 99 bp, Homo sapiens
ggactgcagcctcggcggtcagcaggcaggtgacagcagggacatgtctcgggagatgcaggatgtagacctcgctgaggtgaagcctttggtggagaa

SEQ ID NO: 844210 - DNA, 98 bp, Homo sapiens
ttcaaggaggccttccagctgtttgaccgaacagccgcagggccgtaggcagccatggcgcccagccggaatggcatggtcttgaagccccacttcca

SEQ ID NO: 844211 - DNA, 99 bp, Homo sapiens
aggactccagccaggcaattcctctggtggtggaaagctgtatccggtttatcagcagacacggttggaaactctttctgcagaatctgcaaagaaata

SEQ ID NO: 844212 - DNA, 100 bp, Homo sapiens
gatgagatctgggaaaaaatttgtcaggacccggtcagcccaaggagcaggggtccagcagctctgcggaggcatctggaacagaggaggaggaggaagt

SEQ ID NO: 844213 - DNA, 99 bp, Homo sapiens
gaggattgaggaggatcagatcaataatggaggcaatgctttatttgaaggtagacgcatcgaatttgcagaacaaataaataaaatggaggctaggcc

SEQ ID NO: 844214 - DNA, 100 bp, Homo sapiens
agatcgcaggaccgtggagaagacttggaagctcatggacaaagtgagctgtaggtaaaacttgcctactgatcagttacacaaccaatgcatttcctgg

SEQ ID NO: 844215 - DNA, 100 bp, Homo sapiens
cttggtgttgaaagtgaaatgtcatgcctctgaaaatgaagatcactgtgtccactactatgatcttcgtaacactaaacagccaatcatggtattcaaa

SEQ ID NO: 844216 - DNA, 101 bp, Homo sapiens
ggaacatggcgttgctggtgcgagtccttactataatgtaactgcaaactccaagctggtcattatcacggctggggcacgtcagcaagagggagaaagcc

SEQ ID NO: 844217 - DNA, 100 bp, Homo sapiens
cagaagtcattggagtgttggcacaagccaaggacgactggagtgagcactggcctgggagtctgaagattgtgccttcagacctacttcgtcacttact

SEQ ID NO: 844218 - DNA, 99 bp, Homo sapiens
acaaggaatgcaagggccacctgttcctcagttccaaccacaggtgagaagccttataagtgctcatgggagggatgtgagtggcgttttgcacgaagc

SEQ ID NO: 844219 - DNA, 51 bp, Homo sapiens
ggcaagcgcagcaacaacagagagcacgtgccccactgcaggccccaccat

SEQ ID NO: 844220 - DNA, 100 bp, Homo sapiens
ggctgccctgtggcctcgctcctcggaggaggctgcctaccacaaggactttagcttactttttaaagattgaagaaaaaaaagaagacagaaaaagaag

SEQ ID NO: 844221 - DNA, 100 bp, Homo sapiens
ctccgggcctggaatccctacgcgtccctttgggtttagcacgatgagctcaatcggcactgggcgggtcacagaaagtcgagagagccaaatgacgatt

SEQ ID NO: 844222 - DNA, 100 bp, Homo sapiens
gtcactaaccttcctctttgatctctttgtaggctgaccaactgactgaagagcagattgcagagcagtatagctgtgactatggatctggcagattctt

SEQ ID NO: 844223 - DNA, 100 bp, Homo sapiens
acaccttgcattccctatttagaggtactcaagacaattgacgagggagatgccgatgaggtgacgaagcagaggattcatgatggaaaagagaagccag

SEQ ID NO: 844224 - DNA, 98 bp, Homo sapiens
aggctcgcgggcggcgggcccgggaccgtggcaaggaggtgtacagccctgactttcatagcctcggaggagaaggtcttggtggccgacaagtctgg

SEQ ID NO: 844225 - DNA, 100 bp, Homo sapiens
cgcctgctttgattcattgaaactggtatgaatatgagcccagtctctcgactaaaaaaaacttgggccaaagtgaagactgcaaaatttgacattcttg

SEQ ID NO: 844226 - DNA, 100 bp, Homo sapiens
catctgaacttgatatgtctgaaagcaaaacaagaagtggaaaagtctttcagaataaaatgacacgaatgcagagtttgagtccagatcccaaagccca

SEQ ID NO: 844227 - DNA, 98 bp, Homo sapiens
ggagggccgcttccgcatccccttcttcatgtctcaagggacagtttccggatctttcagaagctgtcagagatcttctcagatgagaacaactactc

SEQ ID NO: 844228 - DNA, 100 bp, Homo sapiens
caaatgcagcatttttgataggtgcctatgcagactacaggaatatgtggaagctgtctcttttcaacacttcatcaaaacacgatcattaattagtatg

SEQ ID NO: 844229 - DNA, 98 bp, Homo sapiens
cagccccttgtcagccagggctgaacccccgcaggttgctgaaaagccaggagtcaaaatgactgagcgctttgactgccaccattgcaacgaatctc

SEQ ID NO: 844230 - DNA, 100 bp, Homo sapiens
gcacgttggaaccgaagagagctctgttgttgcacatgtttttggcccagaggagcctctgctctcttagcggtagagcaaaattcctgaagacaatttc

SEQ ID NO: 844231 - DNA, 99 bp, Homo sapiens
agctaccgcagcatgagcgaaagctacacgctggagaaacagaagcctatcagttgctgaagaaggccacccttcaggataatacaaatcaaactgaaa

SEQ ID NO: 844232 - DNA, 100 bp, Homo sapiens
tttctaatgatgtatgctcaagaaaagggcatatattacattcaggaataagtttgtggagtttgacatgaagccagtctgtaagaagtgctatgagaaa

SEQ ID NO: 844233 - DNA, 100 bp, Homo sapiens
gtggctgttcttgtagttttctgcatagataaggtctttttggagttcctgagctgagtgccccagaaggatttcatattgcacaagaaaaagccttgag

SEQ ID NO: 844234 - DNA, 100 bp, Homo sapiens
gagcaagctgtatgcatccaaagcacacatgaactcagtgctcatggggatgaagaaccagctcgaagagaagctgaatttggacgacagccagtgggag

SEQ ID NO: 844235 - DNA, 100 bp, Homo sapiens
ctgaggcaccacgtctctaccgagcacaaactccacgaagccaacgcccagtccggatgctgctgatagcacgtctttcgatgtccagctaggagacatt

SEQ ID NO: 844236 - DNA, 100 bp, Homo sapiens
atggttttgaaaagttcatgctgtcccttcattgaattttaggttttgttccaactctgggtggcacagagttcagagttcttcagacggttagccctat

SEQ ID NO: 844237 - DNA, 98 bp, Homo sapiens
aatgaaaccattcagtggctgtacactctcattgggtcaaagcccagaagaatcagtgcggtttctgtggcagagcgagttgcatttgaaagaggaga

SEQ ID NO: 844238 - DNA, 100 bp, Homo sapiens
gcgcacgttggaaccgaagagagctctgttgttgcaaactcccccactggaaaggattctgaaagaaatgaagtcagccctcagaaatgaagttgactgc

SEQ ID NO: 844239 - DNA, 100 bp, Homo sapiens
atccataaaactgaagatgtgaatactctggaaccctctggatattgatgcctcgggtgtggttggactgtcatttagtggacaccgaatccagagtgcc

SEQ ID NO: 844240 - DNA, 100 bp, Homo sapiens
agtccggaagcttgtggcgctgaaaacgaacggatttttagactctgaggagcagttggagctaatccacattatggaaatggaaaccaccgaacctgag

SEQ ID NO: 844241 - DNA, 99 bp, Homo sapiens
ctttggggaccgggaccgggatcgtgaccgtggagggtgtctttcctgaagactatcttcccgtctcaaaatggacatgatggatccacggatgtacag

SEQ ID NO: 844242 - DNA, 100 bp, Homo sapiens
gtggaggtttgtggcagccctgcatggagcaagtctgtcagcaccatctttctaacaagcttactcacatagcatattggtatatcaaaatgaaatgcaa

SEQ ID NO: 844243 - DNA, 110 bp, Homo sapiens
gtacctcttctgcaggtactggaaacccacaggcacacccaaataacgaaggaggcccaacttcattcaataaggagcctgacggatttatcccagacggtagaacaaaa

SEQ ID NO: 844244 - DNA, 99 bp, Homo sapiens
gcgtctactgggctacggggtgcaccgtggagctgcagcaccaaagactctgcacagaagcagaagaactcgcctctgttgagtgtaagtagccaaaca

SEQ ID NO: 844245 - DNA, 100 bp, Homo sapiens
ggcggcgcccccgcagcccgtcacccacctcatctttgacatggacggacttcttctggattttccgcagatttccagtggccccactgatcccttatcc

SEQ ID NO: 844246 - DNA, 100 bp, Homo sapiens
ccgcctggtcatggcgcagccgggcccggcttcccagcctgacgataacactgaggttgcatatttaaagacacttaccaaggaagatatcatcaaattc

SEQ ID NO: 844247 - DNA, 98 bp, Homo sapiens
agaaagtggagtccgagctgagatccatctgcaccacggtgctggtgtcatttaggtaccactgtcgattgtacaacgagtggcgtcggaccaatcag

SEQ ID NO: 844248 - DNA, 100 bp, Homo sapiens
ggggtccacactgcaatgtttttgtggaacatgtaatccagtccctcatagcactggtgaatgacccccagcctgagcacccgcttcgggctgacctagc

SEQ ID NO: 844249 - DNA, 100 bp, Homo sapiens
gaaaaattaaagactgcacaactgatgctttgcaaaagggacaaaccttaatcagccaagtagactcctgcagattaaaaatgtgttacactcagccagg

SEQ ID NO: 844250 - DNA, 100 bp, Homo sapiens
gttccaagtctgaaggcgaaagtgaagtagaagcactatttaaaggagataatttaccaaaatttataaactgtgaatttgcatataatgataattggtt

SEQ ID NO: 844251 - DNA, 98 bp, Homo sapiens
tggcagatgttgttgaagataaagacaagaccttcactgcctggtgtaactcccacctaaggaaagccggcacccagattgagaacatcgaggaagac

SEQ ID NO: 844252 - DNA, 107 bp, Homo sapiens
gatagggatgcagaggatcagaaccggtacctggatggcatgcaccagacatgttggcatcatctcttagttgggccatgtggccagggaacccttcatgaaaccac

SEQ ID NO: 844253 - DNA, 98 bp, Homo sapiens
ttggtgcaggagtaataggtgtagaattggctattcatgctcttatggaaaatgctgtgcaacccttactcacttctgtgggagatgctatagaggcc

SEQ ID NO: 844254 - DNA, 100 bp, Homo sapiens
aaacaactgatgagagcctgaggagccattttgagcaatggggaacgctcacggactgtgtgagccacactcaagaatgggaagaaagcttgtctcaacc

SEQ ID NO: 844255 - DNA, 98 bp, Homo sapiens
gcaaacttgacactcaccctgaccgagaatctggacgaggctagagaacagaaagaaaagagtcctccagaccagcctgcggtcccccacccgcctcc

SEQ ID NO: 844256 - DNA, 126 bp, Homo sapiens
ttcagtggtgaaatgcacttctatgagcttgtggaagacacaaaagatggcatctggctggttcagcatgctacaagtgaaaactgatgagaaactgaatgtgtctgatgagaatacagcaagttg

SEQ ID NO: 844257 - DNA, 98 bp, Homo sapiens
cggtgcccacaaggactgtgaggtggccccactgcccaccatttacaaacgccagaagctgctaatcactggcacagagcagttcaatcagaaaccaa

SEQ ID NO: 844258 - DNA, 100 bp, Homo sapiens
ggcggctgccgagaaggagggaggggaaacacaaagccggctacgcgctgcgaggactattcttgataagaaagagctcttggagtttgctcaacttggc

SEQ ID NO: 844259 - DNA, 100 bp, Homo sapiens
ggcccggaccgtgtcgccgacgccaaaggggacagcgagtcggaggaggacgaggacttggaagggatcatggcccaagttgcaatgtccaccctccccg

SEQ ID NO: 844260 - DNA, 98 bp, Homo sapiens
caaatcataatccctcgaaacacaacctttaatgttgagtctaccaaaaagaatgaaccgcttgcttcttatttagcctctacagctttacgttccag

SEQ ID NO: 844261 - DNA, 100 bp, Homo sapiens
atattaaatcattcatcacaagtattgcaaacaaggagcaatttacagcaatgagggatttatacatgaaaaatggacaaggatttgcattagtttattc

SEQ ID NO: 844262 - DNA, 98 bp, Homo sapiens
aaaaggagaacaacaacccattagttccccttgggatgtagtttttggaacatcaggttataatcaccaacagatgagtgaaggacacaggcagaaat

SEQ ID NO: 844263 - DNA, 98 bp, Homo sapiens
tcagaagaaaaaagaaataattgaacaaatggagatgaaattggatactggcattgataggtgggaaagcagtgccactctccgcttcacagatgccc

SEQ ID NO: 844264 - DNA, 100 bp, Homo sapiens
cactgccatggcccctgtgctcagtaaggactcggcggacatcgagcctcaaggaataggttctcctagtgtctatcatgcagttatcgtcatctttttg

SEQ ID NO: 844265 - DNA, 98 bp, Homo sapiens
ctttttatggctgtgagacacgttaaaatttcagggcttcagtgtcatttgaggacgtgactgtggacttcagcaaggaggagtggcagcacttggac

SEQ ID NO: 844266 - DNA, 99 bp, Homo sapiens
aagatattatccttgcatctgatgtgttctttgaaccagaagcctgatagcgcatatcaaggtggagtcttctttctcactgtacattttccgacagat

SEQ ID NO: 844267 - DNA, 98 bp, Homo sapiens
caggcccgagcccaccgcgccgggccccggacgccgcgcggaaaaggttggggcaaacacaatggataatcctttgttgaaatacagtgcaaaggatt

SEQ ID NO: 844268 - DNA, 100 bp, Homo sapiens
cacgctccgtttctctgttgttaaacggggcagaaagaaactcctgtatatattcaaacaacatcttaccaatatatttgagtccttcctgcctcagtta

SEQ ID NO: 844269 - DNA, 100 bp, Homo sapiens
gacaaagccgctccacctcccatgtcggcacaggagaaggaagccaacatccttttggagccatgaatattgtccgaactccatctgttgctcagattgg

SEQ ID NO: 844270 - DNA, 100 bp, Homo sapiens
cggctttggagcaggcgctgggcgagccgtgcgatctggacgcggcgctgctgaccgacatcgaagagtacagtccctgacatcacacactgcagagatg

SEQ ID NO: 844271 - DNA, 98 bp, Homo sapiens
gctatctgcagtggtgctgaaacgaccggagatactgacagatgagctcctctctgctatatgaaatatgggagacgacagaccgtttgtgtgcaatg

SEQ ID NO: 844272 - DNA, 75 bp, Homo sapiens
cctgcagccgcggaccgaggcagcggcggcacctgccggccgaggtttcatggggaagggtatcgggaaggctat

SEQ ID NO: 844273 - DNA, 100 bp, Homo sapiens
tttcttcaaagaagaaagaagcctctctacagtttgttgtagaaccaagtgaagccacaaacagatcagggggaagttgctgaagttatatttgtaggtg

SEQ ID NO: 844274 - DNA, 98 bp, Homo sapiens
agaagagcacagaagagggagaagtggctgctctgcgcctcacggccagatcccagatgttgtgactgtgacagactcactggggtttgtacatgctg

SEQ ID NO: 844275 - DNA, 100 bp, Homo sapiens
aaccctacttgcctaaatgaggaatgtctttcctaccatctaaaatacgaaggtttctggctgggcctactgaacttgacgcactggtatttggccatct

SEQ ID NO: 844276 - DNA, 100 bp, Homo sapiens
aatttgtacctgcaggcctcctacacctacctctctctggggctaagccagctctaccataaccagagtcagggactcttatcccagctgcaaggacagt

SEQ ID NO: 844277 - DNA, 100 bp, Homo sapiens
ccgaggggctcctgctggacgccgacaccttcagcgccctggtcaagacgctgcagcgggactgcctgccgctgccatggcccagacactgcagatggag

SEQ ID NO: 844278 - DNA, 138 bp, Homo sapiens
agggtccgagacccatggggaaactggtgtgatgcaaaggacttagaaggacaaacgtttgaggggttggagtgcttagcggacagctgtacgccacaggtgggcatgatgggcctttggtgaggaagagcgttgagg

SEQ ID NO: 844279 - DNA, 98 bp, Homo sapiens
ctgtcccccgcccgatggcaaagccgtgcggattggcagcccccctcttcctcaggcgaagtcctcggctccggcacgaaatccgaaagccacgccac

SEQ ID NO: 844280 - DNA, 99 bp, Homo sapiens
ttgtacagcaatctcctcctccactgccactacagggaagtgcatcacatgtcaggtctatgaaaattatcctacttatgatttaactgaaagaaaaga

SEQ ID NO: 844281 - DNA, 100 bp, Homo sapiens
ctgttggctttgtatgaaagagatctcagacttgcattacctcagaacatccagtcatggataaaaatgagctggttcagaaggccaaactggccgagca

SEQ ID NO: 844282 - DNA, 115 bp, Homo sapiens
cggggccaggaagtcggagtttgagccccggaggcagagcggctgccatggttatgaaggacagaatctggcaaagatcctcaaggatttagagatgagtaaagtggtacatatg

SEQ ID NO: 844283 - DNA, 100 bp, Homo sapiens
atttgaagatatcatgaagcgaaacagagcaatttccagcagtgccatttccaaagcagtatctggagccagtgcagtttgagattacgggaaatgatga

SEQ ID NO: 844284 - DNA, 100 bp, Homo sapiens
cagttattcaactgagtacagatgtttcacagcctccacatgtttatcttctggaagatggtttagaattatgatagaagagtgatggatgtcatttctc

SEQ ID NO: 844285 - DNA, 100 bp, Homo sapiens
aaggcagcaagagatgcacaggagatacactctgtgcagttttagagagagacacactcagtattcgagaaagtcgactttttggagctgttgtacgctg

SEQ ID NO: 844286 - DNA, 98 bp, Homo sapiens
gccgtgctccaaagtcatcgtccggtttctcactgtgatgatgaagcatgatcttgcttctgaaatatctacctgggatggagtgatagtaacacctt

SEQ ID NO: 844287 - DNA, 100 bp, Homo sapiens
aaggcaagcgacaacagcttgacgagcagatacttctgctgcagcattccaagatttgtgaagctgggaatcatttcatcaatgtaatgttgtctcatcc

SEQ ID NO: 844288 - DNA, 99 bp, Homo sapiens
cagactcttcaaaacgcactcattcagtttgctactagcttttccagaagcctgttaaaagcaaggtctccccacaagcaacttctctgccacatcgcc

SEQ ID NO: 844289 - DNA, 99 bp, Homo sapiens
agctccaagatatggcagctaggcaacagcagcagattgaaaatcagcagcagatgttggttgccaagatcatggagctttgtggtgcaacaagacttg

SEQ ID NO: 844290 - DNA, 100 bp, Homo sapiens
atctattaaagggagcattccgatcatctgaggaacagcagatcagcccggaggaagaggagcgccgccgagtaaggcgcgagcggaacaagctggctgc

SEQ ID NO: 844291 - DNA, 99 bp, Homo sapiens
aacctgaagtagcaaaggcaagaaggcaacgacgttccatctgtggaaggacctaccaaccagacatatgtagagtgtgtcggtcagaaggaacacctg

SEQ ID NO: 844292 - DNA, 98 bp, Homo sapiens
ggtaccggccgtggaagcggccaccgactactgtcagcagctgtgccaggttattaatgctgcactggctttagcagcaaaaccacagagtaaactgg

SEQ ID NO: 844293 - DNA, 100 bp, Homo sapiens
ggcttgtacaaagaaggccagaactggctggaaaagaaggacgtggtgggaagagcaagagggggcctttacaacaactaaacggacaggcattccagcc

SEQ ID NO: 844294 - DNA, 98 bp, Homo sapiens
tgttgttttgcggggacatttatgttctattgtgcgcactggcaaacgtatgtttctggaacattgcgatttggaattgcatttgcacagtataactt

SEQ ID NO: 844295 - DNA, 100 bp, Homo sapiens
tcctacgtttacctgtccatggtatatgccctcattttgcttaagacctctggccagagcagggcatggaagattccttttaaaaagtaatactgagaag

SEQ ID NO: 844296 - DNA, 50 bp, Homo sapiens
gacgcccctaccttggtctttcaggtacctccctgcacttggctattcaa

SEQ ID NO: 844297 - DNA, 99 bp, Homo sapiens
ccaacatcctcatttgaaaccgtccagatcaacgttatccccacctctgatgattcctcagggggccttgtgtgccgggctctgctttctgtcatggat

SEQ ID NO: 844298 - DNA, 99 bp, Homo sapiens
aacaagaataaatttgttccatatcgtgactcagttctcacttggctgctcaaagcgggctggtccgagtctctgttttggaagctcaaccagtggctg

SEQ ID NO: 844299 - DNA, 100 bp, Homo sapiens
tatacctgtgtttaaagctatccagccggagatggagtcgggtggtacagttttgagtaccaactggtctgatgtaggtaaaaggaaagttgaaatcaat

SEQ ID NO: 844300 - DNA, 98 bp, Homo sapiens
gaataagattcctcaatcctgagagagagaattaaagtctaactctccaaattgtgtttcctgtaacaaatcgttcaagaaactctggtcccttcatg

SEQ ID NO: 844301 - DNA, 98 bp, Homo sapiens
ttgtgaaaaaattcaaagtcgaatatcatgctggtggctctacccagaattcaattaaagtggctcagtgccgccaagctcctggacaagaacccatt

SEQ ID NO: 844302 - DNA, 100 bp, Homo sapiens
gaaagtagtattcattggaaagagactccaagaaaatactcgaagacatcaaaagctggattcgaggagttactggaggtgaactgtttgaagacatagt

SEQ ID NO: 844303 - DNA, 100 bp, Homo sapiens
gaaagccaacggcgaggactgcctcaaccaggtgagctgtcagggagaaatgtcgaaacaggtcaagagatgttctgctcaggtttccagacatgtgccc

SEQ ID NO: 844304 - DNA, 100 bp, Homo sapiens
ttttagaaccaacaagggtctcaatgcccacagaaaatattgtttgccaaggcacgagtaacaagctcacgcagttgggcacttttgaagatcattttct

SEQ ID NO: 844305 - DNA, 100 bp, Homo sapiens
ctggaaaaactccaacagcttcatatggacagatggacttcaaatgctgtttgtattccagagactagactgcttttggcttctggatgccctcctccag

SEQ ID NO: 844306 - DNA, 100 bp, Homo sapiens
gcttctcctgttattaaagcagttacaaatttcaagcaggtttaccgacaagactgtgaaactttcgggatggtggtgaaaatgctgattgaaaaagatc

SEQ ID NO: 844307 - DNA, 100 bp, Homo sapiens
actctcagtggtcctacctggggatattatcaaatctactactgttcatggcagctatttgaactgctgggacctgaaggacttgaacttattgagaaac

SEQ ID NO: 844308 - DNA, 100 bp, Homo sapiens
ggaaagtttttaccaagagatgataatgaaaaaacgtcttgaagagtttcaacttatgagagcccacccttggccactccccagcccccacctgcagtgc

SEQ ID NO: 844309 - DNA, 99 bp, Homo sapiens
tttatcaaggctgtcacacatcaagttaaatttggtcaacaaaatccacgtcagagaggaattcatagcagtgtgcagtgcaaactgcgctatggaatg

SEQ ID NO: 844310 - DNA, 98 bp, Homo sapiens
gaccacactacatttggagtgcagaggcagcagcggtaagaaatgccaaggagccgcagttgtcacggttcagacccctgaatggttggacagtgatt

SEQ ID NO: 844311 - DNA, 100 bp, Homo sapiens
ctagcacgtggaattcgcgaagctgccaaagccttagacaaaaacctctgtagaggagcaggatgcaaccgacaggctgtggccggacagctgctgccca

SEQ ID NO: 844312 - DNA, 98 bp, Homo sapiens
atctgacagatgccagcgtagctgaatccagtaccaaaaacgtcaacaacagttttacgaaactgccagaggcatgcagcattggtgatggaaagccc

SEQ ID NO: 844313 - DNA, 100 bp, Homo sapiens
agcagatccgtggttccctgcagactggcaggagcagattccaaaggcacaggaagaagcttgcagtatacaattggaccgtggatgaggtggtacagtg

SEQ ID NO: 844314 - DNA, 98 bp, Homo sapiens
tggcctgtgatgtctgcctgtgtccctacacctcccatggtcactgcggtgtcatcaggtccctgcagccagcgaagttcccctgatggaggactcaa

SEQ ID NO: 844315 - DNA, 98 bp, Homo sapiens
gaaactagagcaaataaccgttttgaaattgtgcacttacagagtgctacgatgaactggggaacagatatcagcttccagtgtattgcttggcaccg

SEQ ID NO: 844316 - DNA, 100 bp, Homo sapiens
tggcgatgccaatgccgctggtgcttattatcaggtggaagatggatgcctgaagtgtagactgctgctagctgaataccatctgggagcataaaggtga

SEQ ID NO: 844317 - DNA, 101 bp, Homo sapiens
gaaatcagtccttcctttccgacttagtcctcgggaagaagtttcagactacaaggtctattctggataagcaggttttgtgaagacatttattctttctt

SEQ ID NO: 844318 - DNA, 98 bp, Homo sapiens
aaaatgggatctctttggtaattgctacagattattgaagactggaattgaacatggagccatgccagaacaggtgtcatggctgggtgaagagcctg

SEQ ID NO: 844319 - DNA, 98 bp, Homo sapiens
cacttggtggcgtctgatgctgaactggatgctaaacttgagtgtatgtggtagaagaccaaagaagagatgagctaggaccatccacctgcctcaca

SEQ ID NO: 844320 - DNA, 100 bp, Homo sapiens
agctaaatgcatcgttaacaatgtttcagcagaaactgtacaaactgtcagatacaatgcatcagagaatttagatgagctgtcttcctccagtagctgg

SEQ ID NO: 844321 - DNA, 100 bp, Homo sapiens
gcctaacctgatcgcaattgggtctagtgaatctgcacagaaggcccttaaggtatggtgtggtggactttctttgagtactgggatgcaggttccaagt

SEQ ID NO: 844322 - DNA, 100 bp, Homo sapiens
tgactaaggagctgcagcagcatgtaaagtcagtgacagccccatgtgctgccatgcttactgagtcccttctctctccttctctatcatcttccatcag

SEQ ID NO: 844323 - DNA, 100 bp, Homo sapiens
tgttaaatagcaatcctccccccatcataaagcctttctgagaaaagtctacagcattctttctctgcaggttctcttaactacagtgacttcaacagtt

SEQ ID NO: 844324 - DNA, 100 bp, Homo sapiens
cgtgaaactcaagctttgatcttggctcccacaagagagttggctgtgcagatccagaaggttctaaatggcttctaagaagttgggtgcagattttcat

SEQ ID NO: 844325 - DNA, 100 bp, Homo sapiens
tggataaatattccgaggacctgaaggacgcgcaggagaagctggagctcacggagaagaaggcctccgacgaatcaagtactggaaatgtttgatcatg

SEQ ID NO: 844326 - DNA, 100 bp, Homo sapiens
ccccctttattaccctttgtgtcatcctccacagctccagggaaggcactcaaaagtggggggcaggaaaggtgccctgtcatggctggtggattgtttt

SEQ ID NO: 844327 - DNA, 98 bp, Homo sapiens
aggtggcaaggagcagaagcagcccttacaagttgcaaagtggctcaagcatgttgatgatcaaggtagacaatattactacagtgcagacggatctc

SEQ ID NO: 844328 - DNA, 98 bp, Homo sapiens
aacaccgcagtattgtccaaattatttatgatgagaatcgggagttcatgatcaagtgttgcccacaccaaatgcttcatccagagtcatagtacatg

SEQ ID NO: 844329 - DNA, 100 bp, Homo sapiens
gtaatcccagcactttggaaggccaaggcaagcgcctccaggagtggtgctctgtgatcctgtgcttcagcctcatcgcccacaacctggtccatctcct

SEQ ID NO: 844330 - DNA, 100 bp, Homo sapiens
gcactatacacagctggcaaccagtcacatgcttgaactcagcatacaggatgtacaggacttgtcttacaaggaccggcactggcatgaagcctgtttc

SEQ ID NO: 844331 - DNA, 100 bp, Homo sapiens
agtgtcagagacgcagcactgggagaggaggacatcgtcaggctggcccaggaccaggaggagatgaaggaagaaatgttggctatttggcgatgagagg

SEQ ID NO: 844332 - DNA, 100 bp, Homo sapiens
gctaaggaattcccggcccctcagggccacggctttagcggtgtcttttgcgttgccgaacaagcaaccggaaaagcttaataggcaatgggcagtcacc

SEQ ID NO: 844333 - DNA, 100 bp, Homo sapiens
cacatagtcctcgagtccctgaagagagaaggcaaagaacctctggtgttgaaaggtttctatgcttgagtctgctcaacagcaggcagccagtgtccca

SEQ ID NO: 844334 - DNA, 98 bp, Homo sapiens
tgacataaggatgtttccaagaggaggcaataaagtgcatggtggttggttctagctattgccatggtacgtttttatatggaaaaaggaacacacag

SEQ ID NO: 844335 - DNA, 98 bp, Homo sapiens
gagatcttgacaaagcctcttctgtttccaatggggaacgagatacaagttcagtggccgtgaatctgcctgtgcccagtggtgttgctttccctgct

SEQ ID NO: 844336 - DNA, 100 bp, Homo sapiens
agagaatctgcttccgggaacacctgattttcatacaatcccagcatttacagggaaaaatgcattttttgtgggagatcttggaaagattgtgaagaaa

SEQ ID NO: 844337 - DNA, 100 bp, Homo sapiens
ctggcccagcaactttcccagaacgcaccgcaagctccctcctcgtggagagactttgctaaagaagtggatgggttacttcgaattggagctgttaact

SEQ ID NO: 844338 - DNA, 98 bp, Homo sapiens
ctggccccggaagcccccacgggctctacctgaccctgcaggaaatgggtcctgatgaatatgaagagatggaagaagaggaggaggaggaagaggag

SEQ ID NO: 844339 - DNA, 98 bp, Homo sapiens
gataacattaatggatgttccagtatttaaagctattcaaccagatcaatgtctcaggctgtgcagacaaacggaactcaaccattaagcaaaacatg

SEQ ID NO: 844340 - DNA, 100 bp, Homo sapiens
agatggtttaaagcttgaaactgaattactggatggaaaaaccaagctaatattgtctccatatgatgtgttcagagcaacattgttttgttgacacaag

SEQ ID NO: 844341 - DNA, 100 bp, Homo sapiens
cagcaaggactgtttcctcaaaggactcagcccaaaaccatgtttgcccaagttgaatctgatgatgaggaagcaaagaatgagccagaatggaaaaaac

SEQ ID NO: 844342 - DNA, 100 bp, Homo sapiens
gcagagaccatatagctgccctcagctgcactgtggcaaggcttttgcttccaaatacaagctgtataggtcatgcagaaggcttttgtatgatgtgtac

SEQ ID NO: 844343 - DNA, 75 bp, Homo sapiens
agaatggcagtgctcaaactcaccgaccaggtggatggaagcatgcctaggggaagatctgcctcccaccacaga

SEQ ID NO: 844344 - DNA, 60 bp, Homo sapiens
tattatttgtgatcttcagcctcaacagaagcctaaagaaactgttccaactcttgctcc

SEQ ID NO: 844345 - DNA, 100 bp, Homo sapiens
cgggagcgcggttcggggccgcagagggtcatcgagcagctcggtgggaagcagctggtcatgaaccacatgcatcatgaagaccagcaggtccgctata

SEQ ID NO: 844346 - DNA, 98 bp, Homo sapiens
cagcctggggactctgcctcgtgccgctgagcctggcgcagatcgagctgacatcgcgctgatcggattggccgtcatgggccagaacttaattctga

SEQ ID NO: 844347 - DNA, 100 bp, Homo sapiens
aattcgagtttctaggcattaatagacaatccatctccaactttcatgtgctgctcttacagactgaggagtctgatgatgaagaaaattttattgatgc

SEQ ID NO: 844348 - DNA, 98 bp, Homo sapiens
ttacactttcttgtacaaagtggaatttcctactgtatcatgatcatcataggagtggagaacatgcacaaaccagcatctcagacatgtcgaaaaag

SEQ ID NO: 844349 - DNA, 100 bp, Homo sapiens
ctgtggctgaggctacaccccggagccaggaggaccatggtgaatccgggcagcagctcgcagccgcccccggtgacggccggctccctctcctggaagc

SEQ ID NO: 844350 - DNA, 128 bp, Homo sapiens
ctggttctatcggtggacagtgggacattctgaagggaggcaaggaggcggactgagcgctcccaattggggacggggaggtttactgcatcgacgcgcggttctacgggaacgtcagccggttcatc

SEQ ID NO: 844351 - DNA, 100 bp, Homo sapiens
ctttccagcccaagcagctttccctcaacagacagctttttctcaacagcccaatggccctagactggagctggttacagacggaagaagaagagcacag

SEQ ID NO: 844352 - DNA, 99 bp, Homo sapiens
ctctggccccgagatcagaatgccgctatttgaactgctgggacctgaaggacttgaacttattgagaaactcctccagaacagaattacaattgtgga

SEQ ID NO: 844353 - DNA, 98 bp, Homo sapiens
gtgattatctcgagcaaattaagcactataaacaagctggaggcacgcctgaggcaggcagggtgtacagatgttagaggggttccaaggaaggccga

SEQ ID NO: 844354 - DNA, 100 bp, Homo sapiens
ggcagccggcacctgacggcgtgaccgacccgagccgatcactgtgtccactactatgatcttcgtaacactaaacagccaatcatggtattcaaaggac

SEQ ID NO: 844355 - DNA, 98 bp, Homo sapiens
cttctttaagggctacgggaagatcctggaggtggatctgaagaacggatggggtcgaggatttggtcttttgggttccatttttggaaaggatggtg

SEQ ID NO: 844356 - DNA, 98 bp, Homo sapiens
aagatggtcgaggtgatgagaaacggaaaaataaaggcacttcgatcgggtgctaccaaggttttgcttttgcatggaaatgtctactgcacagttgc

SEQ ID NO: 844357 - DNA, 98 bp, Homo sapiens
gtgatctcctgtttgttatgtttgccgtggtttttatcaccacacgactgggtatatttcctctctggctttggggtgaacctgttaatctccgtgaa

SEQ ID NO: 844358 - DNA, 100 bp, Homo sapiens
tacgccagttacatcagtcgtgccagctaattgcagagacgacatgacctgtgtgaaggaagagatctttgggcctgttatgtccattttatcatttgac

SEQ ID NO: 844359 - DNA, 101 bp, Homo sapiens
ggtgacttcacttttgagtgcaactgccttccagacatacaacagctgtgccagactctgcttaaaccaagaaacagtatgtttagcaagcactgctatga

SEQ ID NO: 844360 - DNA, 100 bp, Homo sapiens
agaacttcgtgaagctctggagatctcccccttcttcaagacccacgaggctaacagagaccctgatgctggaattgatgaagctcaagttgaacaagat

SEQ ID NO: 844361 - DNA, 100 bp, Homo sapiens
ctaagagcaaggccaagaggaagaatccacattcatctcaatggaaggatcctgccttaagtcaacttatttgtttttgccgggaaagtcgctacatgga

SEQ ID NO: 844362 - DNA, 100 bp, Homo sapiens
tgggaaatgcacagaaattgccaaaaggttccaatgattttggttggcaataaatgtgacctggaagatgagcgagtagttggcaaagagcagggccaga

SEQ ID NO: 844363 - DNA, 100 bp, Homo sapiens
aagaactcaagaatgttactaacaatctgaaatctctggaggctgcatctgaaaagcttgtagattttcagtggaaactgggtatggctgtgagctcaga

SEQ ID NO: 844364 - DNA, 98 bp, Homo sapiens
agcagcagcagccagtattcgggaaaggcagacaggtactactgagcgagtgtgcttgatccagggaacggttgaagcactgaatgcagttcatggat

SEQ ID NO: 844365 - DNA, 100 bp, Homo sapiens
ccaaggacaactgcaagggggaagtagagagataacaaaagctgctcagagtctcaatgaacttgcttagcagtgtctgcaaaaacgaatcttttcctac

SEQ ID NO: 844366 - DNA, 98 bp, Homo sapiens
atgctctgtgtgcgtgcaagatccttcagccatggccatgcagaaaatctttgcccgggaaatcttggactccaggggcaaccccacggtggaggtgg

SEQ ID NO: 844367 - DNA, 98 bp, Homo sapiens
cccaacctcaccaagaagatgaagaagattgtggatgccgtgatcaagtacaaggacaggtcgtgatgtctcgggagtcggatgttgaggctcagcag

SEQ ID NO: 844368 - DNA, 98 bp, Homo sapiens
cagggagctggaaaactacactgactgcccagaactggttggaagatgctttctggagaggaaaccagactgtgatgactgggagagcgggctgaatg

SEQ ID NO: 844369 - DNA, 100 bp, Homo sapiens
agcagcccccacctggtgaaggcacctgggaaccagaacacacaggaggatcaaatctaaatcgctgtggtttccgaggctcttcatacctgggtattcc

SEQ ID NO: 844370 - DNA, 100 bp, Homo sapiens
tagacatggcgagcgactccccggctcgaagcctggatgaaatagatctctcggctctgagggtatgatctcgtgaaatcttgagagaaactgaatgacg

SEQ ID NO: 844371 - DNA, 100 bp, Homo sapiens
ggctagagctggagtcgtgagcgcgcgcccgccccgctctgggaggaccgcgaggtatccaagcccaccaatgggatctgtctcagcacccaacctgcct

SEQ ID NO: 844372 - DNA, 100 bp, Homo sapiens
tcctcatcttcctgctgctggccgtgctgctctggaaggaaggatctgagtctctccctgcggagacagccctgaagaactcctgtaacgtcaagctggc

SEQ ID NO: 844373 - DNA, 100 bp, Homo sapiens
tcgaaatggaccaagatcccatgaatcattccaagaaatggatcttaatgatgactggaaactctctaaagatgagggtctcgctctgttgcccaggctg

SEQ ID NO: 844374 - DNA, 100 bp, Homo sapiens
caattttggttttgttgtgtttgatgattctgagcctgttcagaaagtccttagcaacaggatcccaagcagtattgaagatatatttaatgatgatcgc

SEQ ID NO: 844375 - DNA, 100 bp, Homo sapiens
tggagcatatccggacgaccaaggtatttcaggacagccaggagggggcgcacatccgccgcgaaactgtgagcaagagcgtctgtgctgaaccatggcg

SEQ ID NO: 844376 - DNA, 98 bp, Homo sapiens
gggagcacggacaacccctacccatgaggccctgatggaaaacacaaaggatctggggaacccagtgcacctaagctcgaagggcagatgggagagga

SEQ ID NO: 844377 - DNA, 98 bp, Homo sapiens
tttatagaagtacgtccaggaatagaagtgacctgctttttcgcaagattctcaaagttggattggtggaaacaatgaaccattgacaggctttacat

SEQ ID NO: 844378 - DNA, 100 bp, Homo sapiens
tgagcacagctcagcagaacaagctgaagcatcttaccatcgtgagcttggcatcaagaatgaaggagttcaaagaaggacgcagagccagccacacagc

SEQ ID NO: 844379 - DNA, 99 bp, Homo sapiens
gccggacgcacctctgtttgggggtcctcagtgaatctgcatgtcggttttatagtcagcaaatgaaggggaaacaactagcaatcaagaagatgaacg

SEQ ID NO: 844380 - DNA, 100 bp, Homo sapiens
tgaagaacgggatcctctgctgcatagtttcggtcatctaaaggaggttttaaacagtataacaggaatagccaggccagaagaaggaaggcctgtggtg

SEQ ID NO: 844381 - DNA, 99 bp, Homo sapiens
gagtctccaccaggactgaccgctgccgcccagcacgtccaggtatagtggaggattacaagccaccgttctacgatgtggttcccaatgacccaagtt

SEQ ID NO: 844382 - DNA, 100 bp, Homo sapiens
gcttggagaaccaccgcatcaagagcttcaagaacaagggccgcgatgtggaaaattcagaaggagctggcggacatcactttagaccctccacctaatt

SEQ ID NO: 844383 - DNA, 98 bp, Homo sapiens
caagtctgcctcttaatcttccacagattcctaacatttctactgcttcgtggatgccttctttatatgagtccacgagcatccccccggtccttcag

SEQ ID NO: 844384 - DNA, 100 bp, Homo sapiens
gcttcctgaggaagcgcgggcggacgacagaggatgccgaaccactccagagtctgaatatgtttcagctcatcttcatgaatggatagatctgatcttt

SEQ ID NO: 844385 - DNA, 98 bp, Homo sapiens
gtgcgctcagcaggacgtgggaggctccggcttcaaggtcggtgctactgaaagggagcggtggaggggatgccctggagttcctggggtactgccct

SEQ ID NO: 844386 - DNA, 100 bp, Homo sapiens
attggaaatggcgagatcaggatggcagcccacagggagaaggcactgtcacaggagaactacacaatgttcttcaccaaaggacatggatgaaaatgaa

SEQ ID NO: 844387 - DNA, 100 bp, Homo sapiens
caccagcgccaacgacagtgagatatccagtgatgcgctgacggatgattccatgtccatgacggacagcagtgtgaggaatatagaactgaaggtatca

SEQ ID NO: 844388 - DNA, 98 bp, Homo sapiens
ccgaaagcagctggaggccgagaagatggagctgcagtcagccctggaggaggccgaggatgggaaggccattgtgactatgtggtgattacagttgt

SEQ ID NO: 844389 - DNA, 100 bp, Homo sapiens
aactgagccgagtaattaccttggaaccagatcgtccagaggtatttgagcagcgagcagaaattgactggggcgactttggggtagaggcagtgtctga

SEQ ID NO: 844390 - DNA, 100 bp, Homo sapiens
tttttttctcagtgcaataagaaagatgacttacttcacaagttgtctttaatggccaaactttctagcatgaaaatcaaggtgggtcagatgcagtatg

SEQ ID NO: 844391 - DNA, 100 bp, Homo sapiens
ggcagctcgctctgggagcctagaatgcatcagtgcccttgtggcgaatggggctcacgtcgatgaagggagcaacctgacccctgctcatcactacaat

SEQ ID NO: 844392 - DNA, 100 bp, Homo sapiens
gcggatgcggtcgtgaagataggattatatgcgtcaggcaggagaagtgacttatgcagatgctcacaagggacgcaaaaatgaaggggtgattgaattt

SEQ ID NO: 844393 - DNA, 100 bp, Homo sapiens
agctgcttgaatgtctgccgaaatgttcaagtttaccaaaagagaggcaccgctggaacactaatgaggccaagaagcttgagagaagaaaaatttcaga

SEQ ID NO: 844394 - DNA, 100 bp, Homo sapiens
ctggccgtggctctcttggcagccttcctgatttctgcagctctgtgtgaaggtactaaccaggcctgaccctacttagcttccaagatcagaggagacc

SEQ ID NO: 844395 - DNA, 99 bp, Homo sapiens
gaagtgctggcttctgatttggtggtcaaaaattaaggagaagtatcctcaaacatttgatgacatatgcctttactctgaggtttcccatttgctgtc

SEQ ID NO: 844396 - DNA, 99 bp, Homo sapiens
gaaaacaagcctggttcagttaaacctactcaaactattggtgggaatggaagtggccccacatctcaaagaaaccctaaataagaacttttttgactt

SEQ ID NO: 844397 - DNA, 98 bp, Homo sapiens
tttgggacaagtggattcttcagatgaggtagctgcaatcaacccaaatcaccctcttgctcagatgcctttgcctccgtcgatgaaaaactgcatcc

SEQ ID NO: 844398 - DNA, 98 bp, Homo sapiens
gcaatgaaggccttggtggtatagatttcagtagctcctcagataaaaagagagtggacgcttctcttgtgagccagctggaggtcttacctctttga

SEQ ID NO: 844399 - DNA, 108 bp, Homo sapiens
ggccgcccgggggaaaacatggcgtctgccctggagcagttcgtgaacagtgtccgacagctctcagctcaaggaagaattgtatttgcaacgggtagcagaattgga

SEQ ID NO: 844400 - DNA, 100 bp, Homo sapiens
tgccagaggagtgtgccatattccaatggctgagccgttttgccccaaaacgagagagttgagccccatatgggggttggcaggcagcagagaggcccct

SEQ ID NO: 844401 - DNA, 98 bp, Homo sapiens
ggggtgctcttcgtgtccatgctggaaaccttcggctccaaagacgatgacaagatggtctttaagacagacttaattcagtgcacaaatgagatgaa

SEQ ID NO: 844402 - DNA, 99 bp, Homo sapiens
ctgacaacacatgcataccttggtggtgtgtaagaagtaccggggattcaccatccccgaggccttccggggagtgcatcggtacttgagcaatgccta

SEQ ID NO: 844403 - DNA, 98 bp, Homo sapiens
tttccagatcgagaccactttggccgtacattctataatcaggcaattatgtcttctaaaaatattgcacagattggggaccacaaattcagtgccca

SEQ ID NO: 844404 - DNA, 98 bp, Homo sapiens
cgcctctttgggttcgtgagatttcatgaagatggcgccaggacgaaggccctactgggcaagggtgcctctgccaactggtggaatcatcgccactt

SEQ ID NO: 844405 - DNA, 100 bp, Homo sapiens
atggaaccgaacattgtggttgacccagaaatagaagtgggaactgctcgcagaaagaagaaggtggttcatagaacagccacagcagatgacaaaaaac

SEQ ID NO: 844406 - DNA, 100 bp, Homo sapiens
ttaatccaggtgagactttcacaataagagcagaggatggaacacttcagtgcattcaagcagaagatttagcaccactatctccgttccatctgggctt

SEQ ID NO: 844407 - DNA, 98 bp, Homo sapiens
tgggcttccacacaactccagtgctaactcaacaggtaaagtcagtgataaatcttttgtttgctgcatatactggagatgtgtctgcacttcgaagg

SEQ ID NO: 844408 - DNA, 98 bp, Homo sapiens
tcgaaccagtggagcgcactcgtaacctggatcccagaaggtcgcgaaggcagtaccgtttcctcagcggcggatggctgatcactgggaaactgcac

SEQ ID NO: 844409 - DNA, 100 bp, Homo sapiens
gcaagaaccggggcaagaggaaagctgatgccacttcttcccaagacagtgaattagaaagagcccgagcccagcacattgtgccctgtactatatctca

SEQ ID NO: 844410 - DNA, 100 bp, Homo sapiens
cacttccgaaagcacaccggggccaagccttttaaatgctcccactgtgacagtccaacgtggagcacctgacggagaaaatgaagaccaccatccagag

SEQ ID NO: 844411 - DNA, 100 bp, Homo sapiens
gtggctaccatcaacacagtaggagattttatgttattccttggcaaggtggtcgttctcgttaccggaccacttcttcagccaacaatcccaatctgat

SEQ ID NO: 844412 - DNA, 99 bp, Homo sapiens
cgagaatgaggaggacaacagctacaaccgggggtgttgagccagtgcaggttcaggaaactgtggaaaatcacttgaagagtttgctgatcaaacatt

SEQ ID NO: 844413 - DNA, 99 bp, Homo sapiens
tgacacctgctctcccggcaaggaaacttcgcaggctgggagagtcccgtattctcagagtaaaagttgtttctggaattgatctcgccaaaaaggaca

SEQ ID NO: 844414 - DNA, 100 bp, Homo sapiens
accgttgattggagatatgcccttagttggagctttgtctatcttcttccttaggaaaccagttgagcaatgtttaaagcgtttgaaaaacatgaatttg

SEQ ID NO: 844415 - DNA, 50 bp, Homo sapiens
ctactggatttccgtagtattgatgctggtaagcgggcccctcagtgcta

SEQ ID NO: 844416 - DNA, 98 bp, Homo sapiens
gtttcttactaaggacgagctgatcaagtatatgactgaagaagttgtcgagatgtccacagaaggaggatttggtggtactagcagcagtgatgccc

SEQ ID NO: 844417 - DNA, 100 bp, Homo sapiens
cagagcggagacaacagcagtgagcaagcctccaagtctattataaatagtatgctacgggacccttctcagattccagatggagttctagcaaatcagg

SEQ ID NO: 844418 - DNA, 98 bp, Homo sapiens
gttacctgcaggtattgggagatccacagctaagacgccaggacccactggaagcctagaaatggtggagccgccaccaaaatgcagattttcgtgaa

SEQ ID NO: 844419 - DNA, 98 bp, Homo sapiens
aacctgagtttgagaagttttccatggaggtgaaaagttcagttgagaaacaagggctcaatatggaggattacgtgttacagttcgagtgcctcaaa

SEQ ID NO: 844420 - DNA, 98 bp, Homo sapiens
gagggcacaaaataaccacttaccccttctcaccgaggaagagcgggagaaagggatgacccctccggcgaaggtgtcctgccctcggcccgcggccc

SEQ ID NO: 844421 - DNA, 100 bp, Homo sapiens
attgaagtcaaagaattgaaaccctccaaaccacgtcatctgattcaaaagtactttgactcaggagactacaacatggccaaagccaagatgaagaata

SEQ ID NO: 844422 - DNA, 100 bp, Homo sapiens
agaaatggagatgctgctgaatgagaaaggattatttgcatgggtgcaaaagaaaatggtttgccgctggagtatcaagagaagttaaaagcaatagaac

SEQ ID NO: 844423 - DNA, 100 bp, Homo sapiens
ctgggatggaaattttttgatcatgcggcacatcttgggggagctctttttggaatcgtttagtgggctacagatggcatggcatctaaaaccttacaat

SEQ ID NO: 844424 - DNA, 100 bp, Homo sapiens
tccttcattttcctgtatattctctgtactatgtcgattcgacaggatgaaacaagtgaagatgctaactgtcttgctttgagtggacatgataaaacag

SEQ ID NO: 844425 - DNA, 100 bp, Homo sapiens
tgcttcggcgccgccaggctcctgtatccccgtttccagagccgcggccctcagggcgtggaagacggggacagtaccttccactggaagaatctcaaac

SEQ ID NO: 844426 - DNA, 98 bp, Homo sapiens
ggagcgaaggctgaggtggcagcggcaggagagtccggccgcgacaggacgattactgatctctcattacccaactatctgatggcatcttcggttgg

SEQ ID NO: 844427 - DNA, 100 bp, Homo sapiens
aaaggtgtcaagaagctcagaatgtttcaagtgtcgtcagatgtatcacgcacccacagactgtgccacaatccggaaatggctcacgaagtgtgcagac

SEQ ID NO: 844428 - DNA, 99 bp, Homo sapiens
aatgatttaattgaatcaagctgcaaagtaactagattcgttgggcttttgccagctctttttagattgtcctcttgagacctgtttacagaggaatgg

SEQ ID NO: 844429 - DNA, 100 bp, Homo sapiens
aggatttctaagcaggaactccccagacgatcattcccgagtgaggctgcagacaatagaaggagacacaaactcagactatatcaatggcaattatatc

SEQ ID NO: 844430 - DNA, 107 bp, Homo sapiens
caaatgcctcgggcaggagggtgagctagctgccgatcctgctctgctcctgggtttgctgtgtggcccttgataacggcaaaagcttctatcatttttgttactct

SEQ ID NO: 844431 - DNA, 100 bp, Homo sapiens
gtcttgcagctggaaaaggggtgattgttgcaaagagcaaagaagaggcctgcaaagctgtacaagagatcatgcagggagagtcccgtattctcagagt

SEQ ID NO: 844432 - DNA, 100 bp, Homo sapiens
aaccaaggactacaaagaaggagacaagagcctacagctcagactggaggatgaaacggttttaccaattcttgagattctgtatcatgttgaagaaagg

SEQ ID NO: 844433 - DNA, 99 bp, Homo sapiens
acttcctgggcggcagacaaaccaaagagcggaaattcatgcaatttgaatcaacccatagaagtgacagcgctgtattcatttgaaggacagcagcct

SEQ ID NO: 844434 - DNA, 98 bp, Homo sapiens
ccagagtgccaatgagaagaataaactggagatgaataaagtccagttctggctgccaataccaagttcctcctctccatctcacattcaaagagcac

SEQ ID NO: 844435 - DNA, 100 bp, Homo sapiens
gttagcgttgtatcttgggagaaagacacagtctccatcatcccagccatgaaccagagaatcagtcagagtgctccagtgaaacagccaccacccctgg

SEQ ID NO: 844436 - DNA, 100 bp, Homo sapiens
gagaccttgaggaatatggtcagaaaccgaagctgaaagactggcatcctcctgggggctttattctgggattatgggcacttattatcatggttttctt

SEQ ID NO: 844437 - DNA, 98 bp, Homo sapiens
cccagtaggagaatgactccgattcgtgaccctcagcgccggtgcatgtcgatggtgatgaagaggccagccttggattacccataagccccttcatg

SEQ ID NO: 844438 - DNA, 98 bp, Homo sapiens
tccataccttcaatgatgtgtgcaataatgaatcattagtatcggacacagaaacgctctttattgagaaactaccaaaacatcgagattacaaatct

SEQ ID NO: 844439 - DNA, 100 bp, Homo sapiens
ctgtattaaacaccgtgctgaggcggcttcctatgctatctctcttccgaggttctcacagagttcaggatattccccgagtccctccggtggctaatgg

SEQ ID NO: 844440 - DNA, 100 bp, Homo sapiens
ggagagcccttcagcgaggaagctacacttttcaccaaggaactggtgctgcagcgagagctttctaagaagtatggagtacatgtttgtggagaaggtg

SEQ ID NO: 844441 - DNA, 98 bp, Homo sapiens
acctcggagcttatactcctcccagtgacgggtctggagtgcgtgggggaccggctgttggcggccaacactgaaaactgtagttacgagtcaatggg

SEQ ID NO: 844442 - DNA, 100 bp, Homo sapiens
agtgcatcgccaaccaagttcagctcttctacgctactgatcggaaagagacctacggccgagagacacacaagattgcagtattttatgttgctgaagg

SEQ ID NO: 844443 - DNA, 98 bp, Homo sapiens
gacgttcaccgtgaggatcgtcaccatggacgccgagatggagttcaattgcgaggccgtggaggagctcctggagaccctggatctggaaaagaagg

SEQ ID NO: 844444 - DNA, 98 bp, Homo sapiens
gccgagaagccagtcacgccgggagctggtacacagcctcagttgacatcacttgttagaagagcaactctgaaagaaaacgagcaaattccaaaata

SEQ ID NO: 844445 - DNA, 98 bp, Homo sapiens
cgtgagagcctcaacgtggacgtggtcaagtacgagagtggccctgacggaggggaggaagtagttggcaaaaaaggagaaagccactaaggtacaaa

SEQ ID NO: 844446 - DNA, 99 bp, Homo sapiens
tgctgtaaggagtgcatgctgtgtcttggggccctttgggacgagtgctgtgactgtgttgaacaccaatcagggtcttcaggcctggaagattgaaga

SEQ ID NO: 844447 - DNA, 110 bp, Homo sapiens
tgacaaaggctttgccgcagttcatcttcctccctgtgtactttccatttgccttcctggtattctgacaagtccctgtacacccagctgtgcttttaccggtacatttt

SEQ ID NO: 844448 - DNA, 98 bp, Homo sapiens
acaatcggcaaggggaattttgcaaaagtaaaattggcaagacatatccttacaggcagagaggaaacctgtccagtttaagtcgtcttggtctgaga

SEQ ID NO: 844449 - DNA, 98 bp, Homo sapiens
gaaagacagtatgcaagatgagtcaagtcagacttcattacagaaaggcctaatgggattgtttgaaaaacgtcgcttcaggaaattcctagtgtatg

SEQ ID NO: 844450 - DNA, 100 bp, Homo sapiens
cgagttgctgcagcagcaggaggaggaccgcagcaaggctctttggtgtaacgggaaactgcgctgcctgtagtaagctcatccctgcctttgagatggt

SEQ ID NO: 844451 - DNA, 98 bp, Homo sapiens
gcccaccacccttccctctgccacgcaggtgccgatggaagtccttaagacgagctgtacgctcagaaactgaagtacaaagccatcagcgaggagct

SEQ ID NO: 844452 - DNA, 99 bp, Homo sapiens
ctcaacagaatggggaaggggagcctgtcacattatttgaggtggtgaaactggggaaaagtgcaatgcagcctctgcgacttgatatcaaaagaaagc

SEQ ID NO: 844453 - DNA, 98 bp, Homo sapiens
tgcaaagcttccaatgagtatggcagtgtcagctgtacagccacactaactgtgacaggtaaaatctgtaaaaactgggtcagttttttggacaatgt

SEQ ID NO: 844454 - DNA, 98 bp, Homo sapiens
acaatctgctgaccatcgtgggtgcactcataggctcgtctggtgctatcctgtcatacatcatgtgtgtgattgattataccggaacagagccttcc

SEQ ID NO: 844455 - DNA, 100 bp, Homo sapiens
atggctagccttcctcaaaagtctgatgctagtcatctcggaaggcctcagaaaaagccttaaagcattgatatgaaccatggacaagtatattctgctg

SEQ ID NO: 844456 - DNA, 98 bp, Homo sapiens
ccactggccagaccgggctcaccaccctggcgcaggcggtgcaagcaggatactgaggaagatgaggaggaagatgagaaggacaaaggaaaactgaa

SEQ ID NO: 844457 - DNA, 100 bp, Homo sapiens
tgaagacaatcgtcacttatacaggagaaagaagcatgccattcatagtagtgacacaacttcttctgatgaggaacgctttgaaagaaggaaatcaaag

SEQ ID NO: 844458 - DNA, 100 bp, Homo sapiens
tttgctgcgccctctcagcttcccaagaaaggagcgagctggacgccactgtggggctctgagagtcctgaattcttactgggttggtgaagattccaca

SEQ ID NO: 844459 - DNA, 100 bp, Homo sapiens
atttacacctggccagagaagacacgaataatctgttcagggaagacaaaggcgctttggctaagctggtggaagctatcaggaccaattacaatgacag

SEQ ID NO: 844460 - DNA, 100 bp, Homo sapiens
tcaggtggactgaaggccgctatgatcgaattggtggaaaggttgaagttcaagagctcagaccctaaaactaagcctggagtaattcgcccagtacctg

SEQ ID NO: 844461 - DNA, 100 bp, Homo sapiens
ggaagatgcaagcggtttgggaccttgaacaaggcaaatatggttttggttgtccgggtgccaaaaagcatgagtttctgaccagcgttctggacgcgct

SEQ ID NO: 844462 - DNA, 105 bp, Homo sapiens
ctaaatttctcaacaccacagtcagctaagatgagcccattattgaagagccaagccgcctccaggagtcagtgatggaggccagcagaacaaacatagatgagt

SEQ ID NO: 844463 - DNA, 100 bp, Homo sapiens
ggcgccaccctggaaaccctgcattttgggaaactcgactttggagaaaccaccgtgctggaccgcttttacaatgcagaagccccatgtgccactcccc

SEQ ID NO: 844464 - DNA, 98 bp, Homo sapiens
acagtttggcgtgcaacatggggcttgagaaaggttcagctctggactgttggaaactatcactggtatctcaagcaaagtttatccttcagcacctg

SEQ ID NO: 844465 - DNA, 98 bp, Homo sapiens
tatttccttctaattttgtgactgcagatctcactgctgaaccagaaatgaatctttccctagatcattctgacctagttgcagagttgttgaaggag

SEQ ID NO: 844466 - DNA, 98 bp, Homo sapiens
actattcgttacttgtccttgcatgacaacaaatacatcagatactttcctggacatagcaaaagatactttcattcagaaaaccaagaagctctaca

SEQ ID NO: 844467 - DNA, 98 bp, Homo sapiens
agcagttccagtccgttgctttactttttgcttcaccgacatagtcattatgccgaagagaaaggtttgtggaatcttgcttcccttttttccaacct

SEQ ID NO: 844468 - DNA, 50 bp, Homo sapiens
ttcagccgcatccacgagatccagatctttataaacaacgagtggcagaa

SEQ ID NO: 844469 - DNA, 99 bp, Homo sapiens
tgccccaatggttcgatattcaaagattctcaaagttggattggtggaaacaatgaaccattgacaggctttacatggcgaggtggctgtgaaagagaa

SEQ ID NO: 844470 - DNA, 100 bp, Homo sapiens
gataaaacaacatttagagatttgatgagtgtcacccacacatcatccggtgggcacaggagagcagagacagcatgcgcacacggtcctgtcctcccca

SEQ ID NO: 844471 - DNA, 98 bp, Homo sapiens
ccaccgaatatactgggcctgagagttacgtggcagaaatgatcaagcttttgcctaccaaaaagttttgggaacctgatgattcaacaaaagatgga

SEQ ID NO: 844472 - DNA, 100 bp, Homo sapiens
ctctaacatcacctgcttcatccttgtttaatgactttggtgccctcaacatctctcagagacgaaagcattctgtgtctggctgactctgccgggagct

SEQ ID NO: 844473 - DNA, 100 bp, Homo sapiens
agcccccagccctggagaagctcaaaggcaaaggtgtttcccatgatgaattgcttgacttagcaaagtttcatttcggtgactctttatgcacacacaa

SEQ ID NO: 844474 - DNA, 100 bp, Homo sapiens
gcaacccagttttccagccaccagtgggatgatggatgaagatttgataaagtggaaggcactgtttgaggaagtccctgagttactcactgaggcagag

SEQ ID NO: 844475 - DNA, 98 bp, Homo sapiens
gccgactctcatacaggcgggcgccagtgcatcttctagcaaagagcccagccaacagcgagtaaaaagatggggcttctctttcgatgagatattga

SEQ ID NO: 844476 - DNA, 101 bp, Homo sapiens
cgagggcaaagagctggtggcctcaggtgaaaagtcgtccttggtggaaggaaccatgaactggcatctccccctcttcctcttggcctctgtgacgctgc

SEQ ID NO: 844477 - DNA, 98 bp, Homo sapiens
caggagaagcagttcctgccggcgctgctgagtttcttcatctacaacccgcgcttctggccgcgggaaggagagttcacagacattgggaccttcga

SEQ ID NO: 844478 - DNA, 100 bp, Homo sapiens
ctcatctcgctcggctgcgggaaatcgggctgaagcgactgagtccgcgatggagagatgggtgtaatgcctgagattgcacaagctgtggaagagatgg

SEQ ID NO: 844479 - DNA, 100 bp, Homo sapiens
agaaagacccggtgccttacatctgtgccgagcccctcccttcgaatattctcgagtgatcaatgttctgcaggccaagaagaagtttgagatcctggac

SEQ ID NO: 844480 - DNA, 100 bp, Homo sapiens
tctactgtgacttcagagacactgccaagcagccttagccctagtgtagagctgatgactatcagccagttcgtctgctcagtaaacctggggaactgag

SEQ ID NO: 844481 - DNA, 100 bp, Homo sapiens
aggataagggcgacagcaacagctctgccggctggaaggaaatagccctcaagatagtccaagaaatttctcccccagtgcctcagcccatttttcattt

SEQ ID NO: 844482 - DNA, 100 bp, Homo sapiens
caactgcgctatcttccctggatttttcttcaccttttccttactcatgagccaggttattgcagctgactgcaaaagggtcacagtgctgaagtatttt

SEQ ID NO: 844483 - DNA, 101 bp, Homo sapiens
ggacaggctgccccgctgacggccagggtgaagcatgtgaggagccgccccggagccaagcaggagggaagagctctacgtctcctccgagagccgcttca

SEQ ID NO: 844484 - DNA, 98 bp, Homo sapiens
cgagctgagtggttgtgtggtcgcgtctcggaaaccggtagcgcttgcagcatgattcctcacctattcctacctcttggccttcaatgtgtggcttc

SEQ ID NO: 844485 - DNA, 98 bp, Homo sapiens
cggcggccacggcatcctgtgctgtgggggctacgaggaaaggtgtcagcagttgagtctttggagggccccctgctccaggtggaaggactgagtga

SEQ ID NO: 844486 - DNA, 98 bp, Homo sapiens
ccgactcggtgattgaggacaagaccatcgagctcatggccaaatttgagtttcatcatggtgactatgaaaaacagtttctgcatgtactgagccgc

SEQ ID NO: 844487 - DNA, 100 bp, Homo sapiens
accccgacactctgatttaattgggctgcagtgagaacagagcatcaatttaaaaagctgcccagcaactggatgatgctcgcaacaaagctgacaatca

SEQ ID NO: 844488 - DNA, 100 bp, Homo sapiens
cctggcgacccattcaggcacttatggccatttcagccagttcacaatctatacagttgcataaaagtagcagaagactttgtatctccagaacatgtaa

SEQ ID NO: 844489 - DNA, 99 bp, Homo sapiens
cacatttgagactcagtcactcaaggcagtagacagcagggactccctggccatggctctgtatgcgtgctgctttgagtgggtaatcaagaagatcaa

SEQ ID NO: 844490 - DNA, 100 bp, Homo sapiens
atcctggaatatataaatgtgttgtttgtggaactccattgtttaaggcattgtctaaatataggagcagatctgcagatggggccaagaattacttcga

SEQ ID NO: 844491 - DNA, 100 bp, Homo sapiens
agagacgaagagacagctggatgaagcctatgaaaggaggttccctacatgtcctttgattccgatgttcgtgggcagtgacactgtgaatgaattcaag

SEQ ID NO: 844492 - DNA, 100 bp, Homo sapiens
ccagcaacaaatggcccatgggtggtagtggtgtcgtggaggtccccttcctgctctccagcaagtacgagtggcagaatttagtgacatttggaagctt

SEQ ID NO: 844493 - DNA, 98 bp, Homo sapiens
tgctggctttgtgagcatttcacaatattgtctggagctgtttggcttatagaagagggaaggtactatgaggggaagatgatgacgacgatgaatgt

SEQ ID NO: 844494 - DNA, 100 bp, Homo sapiens
gagggaggaagagaactactcctttttacctttggttcacaacatcatcaaatggctgtgagaagacatttatcacagtgagtgccctgttttcccataa

SEQ ID NO: 844495 - DNA, 111 bp, Homo sapiens
ataccattaagtgcctaattcaaatgggagcagcggtggaagcgaagatttgaagaacccaagtgattcagcagtgcacagcccctttacaaagcgccaggcttttacccc

SEQ ID NO: 844496 - DNA, 100 bp, Homo sapiens
gttaagttataagatatagtcatctaacaagctgtgtggaaacctaactgtccaggagtgggtaaaggaagaagccccagatatactgtgccttcaagag

SEQ ID NO: 844497 - DNA, 100 bp, Homo sapiens
ccagccagcacccatcgctcagttgtctccagctgttagccagaagcctcccttccagtcaggggtttttgccaatccagaagactgtgtagcatttggc

SEQ ID NO: 844498 - DNA, 100 bp, Homo sapiens
aatctcacgaacctcaccccaagatcttcacattctggatctcagctgctcttgaaggaatatttagatgccatcaagaaattttaccagaccagtgtgg

SEQ ID NO: 844499 - DNA, 99 bp, Homo sapiens
ctgcctggaccaaactagagtgaagctaacaaagcgaagtggccatactcaggtactccaaagattcaggtttactcacgtcatccagcagagaatgga

SEQ ID NO: 844500 - DNA, 100 bp, Homo sapiens
ccacctccgccagttaagaggaaaaagccctggcttgaaaaacagtccaattgatgaaagtgaggtgcaaacagcaactgatagtccctctgttaaacct

SEQ ID NO: 844501 - DNA, 99 bp, Homo sapiens
ccaagttgaaaatggacgagtaatcgcctgctttgattcattgaaagttctttatagagttggaagcaagacatcagaataatatcttcatagatgaca

SEQ ID NO: 844502 - DNA, 100 bp, Homo sapiens
agtcaagacgatcatagtcactgaactcatcccaagaacagtatccataaggaagatggaaaagggggacagaataaatgttaccctaagaagtccagag

SEQ ID NO: 844503 - DNA, 100 bp, Homo sapiens
aaatactgtcatttgctcaaagcgtgtgctcctgagaaaattagaagcaggcattcgaggaatcagtcatgtaattgtagatgaaatacatgaaagagat

SEQ ID NO: 844504 - DNA, 100 bp, Homo sapiens
ttgacctgctggacagcagaacaatttcttcatcagcagctaaacaggtggcttcccacacttctgactcggacgttccttccggtgtcactgaggtggt

SEQ ID NO: 844505 - DNA, 99 bp, Homo sapiens
gccgccgcctccagggtgggcgcctttcgccgtggacgccgaccgtccgggacgaggcgttactacaaggagacctctggcctgatgctggacgttggt

SEQ ID NO: 844506 - DNA, 100 bp, Homo sapiens
aaccagtgacatcaccgagtacctcaggaagctcagcaagactggagtccctgatggaattatgcagtttattaagtatcctagaaggaaaacatcacca

SEQ ID NO: 844507 - DNA, 110 bp, Homo sapiens
ctgtgagccacaacaccaagaggttccgctttgccctgcccaccgcccaccacactctggggctgcctgtggatcaatgttctccgaaacaggatcaacgataaccagaa

SEQ ID NO: 844508 - DNA, 98 bp, Homo sapiens
tcagatcctctaccttttacagaatttgtgcggtacatttctacaacagccttatgttgatgtagaacattctcatgttcgatttctgggaaacctgg

SEQ ID NO: 844509 - DNA, 100 bp, Homo sapiens
aggcgggactaagagagccgaggtcgctccccatccactctcacaaggatgatgatgctgaagctatccttgctgcagacttcgaaattggtcacttttt

SEQ ID NO: 844510 - DNA, 98 bp, Homo sapiens
atggatggaaaagagtaccaagctggccggtttgcccgaggacttcggctacagtgctttaggatcagaattcaggctataaatgaaattggagctgg

SEQ ID NO: 844511 - DNA, 100 bp, Homo sapiens
gagacagattgggaggtgtatctgagggagactgcaaatgctattgtcagtcagcaaactccacaaaggaattgcattttgtgaaaaaagaacaagaatt

SEQ ID NO: 844512 - DNA, 100 bp, Homo sapiens
gacttccaagctggccgtggctctcttggcagccttcctgatttctgcagctctgtgtgaaggtgtcatggagaaactccagctgggcccagagattctg

SEQ ID NO: 844513 - DNA, 98 bp, Homo sapiens
ttccatacaatgtcatgctctacagcttgggatttaaaacatctctgttgaaggcttttgatccttttgagaaataaagatctgaaagaaatggcata

SEQ ID NO: 844514 - DNA, 100 bp, Homo sapiens
ctggattgggaaagaccatggcaggcaggaaactgcatatcttctggtttacatgaagatggagtgctaatggaaatgcccaaaaccttcagagattgac

SEQ ID NO: 844515 - DNA, 100 bp, Homo sapiens
caaaaccagaagatgtcctcagaaaatgagaagatgggaatcagagtggatcagcttcagaggcatttcatccttcatgaagccattcaggattttgaat

SEQ ID NO: 844516 - DNA, 100 bp, Homo sapiens
tctctaaaattggccttctcccagttcctgctacctgcagacgctgtaccggaaggagatcaagccaccgttcaaaccagcagtgggcaggcctgaggac

SEQ ID NO: 844517 - DNA, 100 bp, Homo sapiens
cccttcagtcgcagcctcactctagattgaggacgagacgcaggtgtcacgggccactcagggtgaacaggacaattacgagatgcatgtgcgagccgcc

SEQ ID NO: 844518 - DNA, 98 bp, Homo sapiens
agcagtgagaaactttcacaatctgtaatagatggtgtgactgttctaggaggtcaattccatggtggcctttttgaagatgtaactattagagctgg

SEQ ID NO: 844519 - DNA, 100 bp, Homo sapiens
cgaggtcccagcagcggacgagggaggtgccgccgtcgcccaggatgggctgggaatgaagcgatgtagccttttaaggccaattcctgtccccccagca

SEQ ID NO: 844520 - DNA, 100 bp, Homo sapiens
ccaaggcggccctggctgggggaaccactatgatcagccagaagcggactcctagaagaggggagcagcaaggatggaatgacagccgtgggccggaggg

SEQ ID NO: 844521 - DNA, 143 bp, Homo sapiens
ttatttccaaagttgaagaagtcttgaatgactggaaactgattggaaactctttgggaaagccactcgaaaagggcatggtgctgatgtgaaatgtgtagactggcatccaaccaaagggttagttgtttcaggaagtaaag

SEQ ID NO: 844522 - DNA, 100 bp, Homo sapiens
cccacccctcctgtaacccagcctgtttcacttcttgaacaactctgctcatggtgattacatgcaaaataacgagagcagcttaatagagcaagctcca

SEQ ID NO: 844523 - DNA, 99 bp, Homo sapiens
gaggacggcagcttttgggggccgggcgggagaagcgtccgttcatccgcggaaccaagctgagacaaatttacatgtattggagaccagaccagaagc

SEQ ID NO: 844524 - DNA, 100 bp, Homo sapiens
ttgggaagcatgtcaccaacccggccttcaccaaactcccttgtctaccatcagagggagatctctgccccctggggctgagagaccccaacctttcccc

SEQ ID NO: 844525 - DNA, 100 bp, Homo sapiens
ggacctttcccgctggcgcgcagcctcagctagaacgaggtcactcggacactatggtgttcttttacctgtggattgtcttttatatcatcagttcctg

SEQ ID NO: 844526 - DNA, 100 bp, Homo sapiens
ggatacaatctaccacctacagccaagtggcagatttgttattggtgggcctcagggtttaatgggaagcaatggctcaccaggccagcctggaacaccg

SEQ ID NO: 844527 - DNA, 100 bp, Homo sapiens
tggaaacgaggcactcagttggaagagtccagcaaggtgatgatgaacagtctacacagatggctgcaagttgggaagatgataaagttacagaagcatc

SEQ ID NO: 844528 - DNA, 99 bp, Homo sapiens
tggactcatggaggctgagcatttattcaggggcatggtctagtggcccagtcaggacgcggaaacactccctggaggttctgacccactccctctcag

SEQ ID NO: 844529 - DNA, 50 bp, Homo sapiens
gagaattccgcagcccacacggaagacctggaagcgctcatagcccattt

SEQ ID NO: 844530 - DNA, 98 bp, Homo sapiens
aagcctcatttggtgatgaatgtagccaccacgcctacctgcatgaccagttctggagctactggaatagaccagttggaatgccaaaaatggaaaaa

SEQ ID NO: 844531 - DNA, 99 bp, Homo sapiens
gaaaagcctccagactactagtacgaggacgtagtgagaaagatcagtctaaagaaaaggagaagaaagtgaaaaaaacaattccttcctgggctaccc

SEQ ID NO: 844532 - DNA, 74 bp, Homo sapiens
caccttctccagtcgacactctcgcgcccggaggtaccaaccaagaagctgaagaaatatgagaaagaatatca

SEQ ID NO: 844533 - DNA, 100 bp, Homo sapiens
agacagtcgtggttcctgtgatctgtgtcctctttgcagaagaatgaaagtgcccttgtgaaagaaaaagagctgtcaatcgaacttgcaaacatcaggg

SEQ ID NO: 844534 - DNA, 100 bp, Homo sapiens
cttcattcagatgtggtggaatatgccaaggaaaaactggagagcttcatcaaaaatagtgatagctttgataaggcattgtctaaatataggagcagat

SEQ ID NO: 844535 - DNA, 100 bp, Homo sapiens
ttccttgccaagttaattcctgagcagagctttggccactcattttacaaagaatgtcgagtggtaaagtccacttcttacaccaaaatagcttcatcat

SEQ ID NO: 844536 - DNA, 100 bp, Homo sapiens
ggaagatatgcatcagttccatcgagccattactacaggtatggcccatctcctgtacgcttggagcgacctttggctacgtggctggccttgttatttc

SEQ ID NO: 844537 - DNA, 99 bp, Homo sapiens
tctgggagcctagaatgcatcagtgcccttgtggcgaatggggctcacgtcgaggtcaacagttgtcaccgacagatggctgagattgctgtgaatgcc

SEQ ID NO: 844538 - DNA, 99 bp, Homo sapiens
gggaattgaaggagcccatcctgaagacaaggcaaatgaagatgtgacacagattgtggagattctccattctggacctagtaaatggaactggcttac

SEQ ID NO: 844539 - DNA, 98 bp, Homo sapiens
agcactagcagcgatcgggcccaggaaaaagaggaaagtggactgtccggggccgggctcaggagcagagggtaaccaggagccgacaacaactcctg

SEQ ID NO: 844540 - DNA, 100 bp, Homo sapiens
cttccagtggaggcattttggggcagaatacagagatatggaatcaggaatccagacgctctgcagtgtcccatcgtcttatgcggatggcggggaaagg

SEQ ID NO: 844541 - DNA, 100 bp, Homo sapiens
tgcagaaataccagtccccagtgagggtgtacaaatacccctttgaattaattatggcttggatctccagcttgtagctgcatcagcccctcctcctttc

SEQ ID NO: 844542 - DNA, 100 bp, Homo sapiens
aagcaggtgccccgaataacccctgggcgctgcctatggcacagccaagagcggtaccggcattgcggccatgtctgtcatgcggccggagcagatcatg

SEQ ID NO: 844543 - DNA, 99 bp, Homo sapiens
ccggctctcggacccgcctccgaagacgtggagcgctgcggcggctgggttaatcatctcattttagtggagccttggggtttccctgaacgaccagac

SEQ ID NO: 844544 - DNA, 98 bp, Homo sapiens
tgataggcaggttaccatcactggatctgctgccagcattagcctggctcaatatctaatcaatgtcagcataaatcacctgttttggatacaaagcc

SEQ ID NO: 844545 - DNA, 98 bp, Homo sapiens
aaacagtaggaaagcaatgaaagaagctggtaagggaggcgtcgctgattccagagagctaaagccgatgtctgacagcaatgcaagcttcctccgtg

SEQ ID NO: 844546 - DNA, 100 bp, Homo sapiens
ggagccggaggaggatgctcctgcctcccagagaggggagccggcgaggatcaaaatcttcgaaggaggagagagatcatcattgcctgaatttagcttt

SEQ ID NO: 844547 - DNA, 100 bp, Homo sapiens
cccctgaacccgaggccctgcctactatctatgttgttacccccacctatgccaggacttgattattcttagaaatgcacttgacctgcttttgccaaag

SEQ ID NO: 844548 - DNA, 100 bp, Homo sapiens
ccgggagaggtggttccagaattatggagtaaacatggaagtactaacttcattccagaacaatttttggatgacttcattgatcttgttatctggggcc

SEQ ID NO: 844549 - DNA, 100 bp, Homo sapiens
actgccttccattgtgaagtctgctctatctaatgttcctcctctccggaactactttctggaagaagacaattataagaacatcaaacgtcctccaggg

SEQ ID NO: 844550 - DNA, 100 bp, Homo sapiens
agatgtaaagactaatcctgacatgttgttagcagtttttgaagaacatccagtcatggataaaaatgagctggttcagaaggccaaactggccgagcag

SEQ ID NO: 844551 - DNA, 100 bp, Homo sapiens
gagaggggttgttttataaactgcctggccgaatcagccttttcacgctcaaggttgagcaatgtttaaagcgtttgaaaaacatgaatttggagggctc

SEQ ID NO: 844552 - DNA, 100 bp, Homo sapiens
ccggaggagggagctgactgatacactccaagcggtggatctaggatccggcttccaacatgtggcagctctgggcctccctctgctgcctgctggtgtt

SEQ ID NO: 844553 - DNA, 100 bp, Homo sapiens
cctctgagctcaacggaggattgtgcctgagaagaacccacagagggccttaaagcggctgacaatgaccccacagctccaccatatgactccctgttag

SEQ ID NO: 844554 - DNA, 100 bp, Homo sapiens
cagcagcctctgctcccagccagctgtggtgtaatagcctgcagctggtgttttgagaagccctactgctgaaaacttaacaattttgtgtaataaaaat

SEQ ID NO: 844555 - DNA, 100 bp, Homo sapiens
gatcttggaggtggtgtaaaggaagctcaagtatatcaagcattcaaattgctcacagctgatcctaaggaacttctgcactatttaatcggtaccctgc

SEQ ID NO: 844556 - DNA, 100 bp, Homo sapiens
cctaataagaaacatccctggatatgcccgttcagtttacagttcattttttgcttggtttggaaaaatttcattagagacctaatctgggagcctgcaa

SEQ ID NO: 844557 - DNA, 98 bp, Homo sapiens
tttatgggaaacctcagcttgatgatgtatctcagtctgacagcaatgcaagcttcctccgtgctgccagagcaggcaacctggacaaagttgtggaa

SEQ ID NO: 844558 - DNA, 100 bp, Homo sapiens
gcagtggcgcctaaagtctgagagagggaagtcgcctctgtgctcagccctgaggatgatgacaggaaggtccgaaggagagaaaaaaaccgagttgctg

SEQ ID NO: 844559 - DNA, 100 bp, Homo sapiens
gttcaagggtctctccagaaaatcttgtggacaaatccaggggaaggtgaggaagatcttctcagtcctccccaggacacaagcacagggttagaggagg

SEQ ID NO: 844560 - DNA, 100 bp, Homo sapiens
aaagaattcaaaattaaggtggggaagaaggagacagaaacgaaatatggaatccgaattgataatctttcaaggcaatctgaaagcaaatcctgtttag

SEQ ID NO: 844561 - DNA, 100 bp, Homo sapiens
taggcaacttcaagatcctttagtaatcatgacaggaaacatcccaacatggcttactgagctaggaaaaacctgggaatgaaagctactggttgatttt

SEQ ID NO: 844562 - DNA, 132 bp, Homo sapiens
ggacactttgttattggagaaacatgcagattatatcgcatcctatggctcaaagaaagatgattatggtcagcagttcccagcgctcctcacggatccctctctctcgggccagggtggagcaggctcgcc

SEQ ID NO: 844563 - DNA, 100 bp, Homo sapiens
ccgggacacctggaagccgagaaatgacgcaaacatgcagatctttgtgaagaccctcactggcaaaaccatcacccttgaggtcgagcccagtgacacc

SEQ ID NO: 844564 - DNA, 100 bp, Homo sapiens
caccgtcatctcctgccccgccgaggcttgacccgctaccacatactgttgattgtgatgaaatgccagttgaagcacctgtcctgcgagcttaggggtg

SEQ ID NO: 844565 - DNA, 98 bp, Homo sapiens
aaagcccaggcataaaatcatctccatattctcaggcacagagaaagatcccatgttagatctggatattcaagaattagccagtcttaccactggag

SEQ ID NO: 844566 - DNA, 100 bp, Homo sapiens
gttgtcaaacacatgcgccaagaccagatcaccaatggcatggtgaatgctatttctaccaacctgacagtattattgaaaaggcttctcactcgggcat

SEQ ID NO: 844567 - DNA, 130 bp, Homo sapiens
tgggacacacctccattggatttaaaagacagtcctcgtcagcactgactttcagctatggaatcgggaggagtctgctactagtcttatcagctcttaaaaacagaaactcatctgtccaagttcgtgg

SEQ ID NO: 844568 - DNA, 99 bp, Homo sapiens
tcttcagcatccctgacttccagaggaagtggtgagcttcttctccctcaagtcggactcggcgcccccctggatggtgctggctgtgctgtggtgctc

SEQ ID NO: 844569 - DNA, 98 bp, Homo sapiens
caggccttagcgcggctcagccatgagcaacaggagtagcttttcccggctcacctggctaccaagcagtttctcgaagagattaacaagtggacagt

SEQ ID NO: 844570 - DNA, 100 bp, Homo sapiens
aaccaggacctctaaaaaaggcacctgctgctaaggcggtctatgcttgcttggtgcttatgctgacagtgatgacgatgacaatgatgtttccgaaaaa

SEQ ID NO: 844571 - DNA, 100 bp, Homo sapiens
gtgccagacaaacctctccaccctcagtgacccggtgcagctagaagtccatatcggatactatttttgagacaacaaattaaggaacttgaaaagctaa

SEQ ID NO: 844572 - DNA, 100 bp, Homo sapiens
cgaccgggcgctccgcttcctggagaaggcacagcggctgtatccgacgccgcgagttcgcgagttctatatgaagggaaagaacggcttattccaggat

SEQ ID NO: 844573 - DNA, 98 bp, Homo sapiens
tgactttccatgctattggaagctccattgaagccagccatgatcagaataatccagaatggctactctgatctatgttgataaggaaaatggagaac

SEQ ID NO: 844574 - DNA, 100 bp, Homo sapiens
aacggggctcccaggacctccactaatcaccagaacaaaatgtgcagtttgtggagatgagtgcactggccttcttctcggtgacttggctcgcctggag

SEQ ID NO: 844575 - DNA, 98 bp, Homo sapiens
cggctctccgccgtccccagccctgcctctccctgggctctggatgaccagtgtcccagtgaaggaacgagtgaaggtgtctcagaactggagactgg

SEQ ID NO: 844576 - DNA, 100 bp, Homo sapiens
ctcagctgggagaaatgttggaaatggtttaaacacattatcaggacccaatgttgtcttccagttgtgaaagcaccccagagacccactatccaagttt

SEQ ID NO: 844577 - DNA, 100 bp, Homo sapiens
aatccgggcttttgctgatatgcatgcatgtaccgaccttctgaacaaggccaacacctatgcagctgatccatatgaattcctcttattaagaaaaata

SEQ ID NO: 844578 - DNA, 110 bp, Homo sapiens
cgcggattcgccgaggcaccgaggcactcagaggaggaatcccttggcaccatgtcctgtgtgcattataaattttcctctaaactcaactatgataccgtcacctttga

SEQ ID NO: 844579 - DNA, 99 bp, Homo sapiens
ctgtgtcactcccaatttctgaggatgaatttttagatgtgatctactggttccgacagatcattgctgtggtcctgggtgtcatttggggagttttgc

SEQ ID NO: 844580 - DNA, 98 bp, Homo sapiens
tgtcggcagctgctgttctgaggttgaccagatgttcgccgccttcccccctgacgtgactggcaacttggactacaagaacctggtgcacatcatca

SEQ ID NO: 844581 - DNA, 100 bp, Homo sapiens
tatactaccgtgcgtgcatgaacgagaccaggatcgaggagctcagggccaaacctctaatggagttgattgagaggctgtttggggcaacttcgttaat

SEQ ID NO: 844582 - DNA, 100 bp, Homo sapiens
cactccagggtgtcaggactaagagaagtcacaaaacagcagatttcccaagagcagcggaaaatgatccagtcacagtctccaacctgtcccagtattt

SEQ ID NO: 844583 - DNA, 100 bp, Homo sapiens
agtgctactgtttcccccattttacaggggctaagtgatggatcttgtactccgtgttgcagattactatttttttacaccatacgtgtatccagccaca

SEQ ID NO: 844584 - DNA, 98 bp, Homo sapiens
tgtggttcctgcatgaagacagtggctggcggtgcctggacgtacaaggtggttctcttcccaaagtggaagccaaattcatcaattatgtgaagaat

SEQ ID NO: 844585 - DNA, 98 bp, Homo sapiens
aatgctacaaagacatttcgagaattttgtggacctgctgatcctctttgggacatccggaagaaagcagccatccagacatttcagaacacgtacca

SEQ ID NO: 844586 - DNA, 100 bp, Homo sapiens
ctcgatgccggaaaaacaccttggcccgccggaagggcaggcacatgggcataggaaggtgtcttgctgcaggtaactaatgaagaagtggtcaaccaca

SEQ ID NO: 844587 - DNA, 100 bp, Homo sapiens
tacagctcatgaatagactctcccatcccaacatccttagatgaaggatttgggggcagagcacttggcaggtcatgaaggggtccaacttctcgggttg

SEQ ID NO: 844588 - DNA, 98 bp, Homo sapiens
aagaaatctgccccaaagtcttagaactgactgtggatattcataaggagaaagtggcacgaagagagattggtattttgacaacaaataagaataca

SEQ ID NO: 844589 - DNA, 99 bp, Homo sapiens
acctccgctttcatgtggaggaagaagggaagggaaaagatgcttctgggaacaagggtacagccaaagaccggagctttggagagatgaagtttaaac

SEQ ID NO: 844590 - DNA, 98 bp, Homo sapiens
tgctgcagcagacattacttcaggacaacctcttgggcagggattgtggtttgctgattcatccagaggaaacctgtgggttacagcctatttcttct

SEQ ID NO: 844591 - DNA, 100 bp, Homo sapiens
ccaaggcctgggccgcttcctgcaagaaaacaagcagcttctgcacgacgcactggcccaggacctgcacaaggaggaagataccaactagagataaaaa

SEQ ID NO: 844592 - DNA, 100 bp, Homo sapiens
gttcaaggctacaagcccccggggagagccccaggatggactctactgcatccggaactcctctaccaagtcggggaagacttctgcgctgacccagggg

SEQ ID NO: 844593 - DNA, 100 bp, Homo sapiens
aacacatctgctctcccaatcagtgaaatcgctgctgtcagcaaaagacctgagaaggtatgggcactaggaaaagacttcttccatcaagcttaattgt

SEQ ID NO: 844594 - DNA, 98 bp, Homo sapiens
gtgtggctgtttgtctccttgcccgccaaagttctgcccagtccaacgactccacgcagctcgcccttgcctcctgacaaggtgatccgggcgggccc

SEQ ID NO: 844595 - DNA, 100 bp, Homo sapiens
aagttggaacaaggagaagagccatggatcataaagagacacataccaaattggatctatccaggcttcatccctccacccctcatcttcggggctggca

SEQ ID NO: 844596 - DNA, 136 bp, Homo sapiens
ccccagctccagatcatctggccaaatctgcaccctcctcccgggcctcccttttgctggggatggtttgggcagagatcatggaagggaagtggttgctgtgtatgttactggtgcttggaactgctattgttga

SEQ ID NO: 844597 - DNA, 100 bp, Homo sapiens
agcacgctactacctggtgcagggcctgattgaggactgccagctggcgctgcagtacaaaattggacagctgtacatgatcagcaaacacagccatgaa

SEQ ID NO: 844598 - DNA, 100 bp, Homo sapiens
tgttcattgatggaagtgagatcattagaggatacctgcccactatgtctatccgcaggcttttgtgcagccgggagtggtcattccacacgtccagccg

SEQ ID NO: 844599 - DNA, 98 bp, Homo sapiens
tgaagcgagtccctgagctcccggtatatttgaaggctcccatgattctgaatggagtctgtgttatctggaaaggctggattgatctccaaagactg

SEQ ID NO: 844600 - DNA, 100 bp, Homo sapiens
gatgctttccttgacctgaagaagcctcctgcctccaaatgcccccatcgctatacaaaaggtagaagagcagaggatggctctgtcattgattatgaac

SEQ ID NO: 844601 - DNA, 98 bp, Homo sapiens
gcggccgcggcggctgctgctgctgcagtgggacaggtggcggcgaccggcggcgtccgaggagatggtggagccagggcaagatttactgcttgctg

SEQ ID NO: 844602 - DNA, 100 bp, Homo sapiens
gctacaactatatgaaattcatggagctcagaaaattgctgatggagtgtcgcaatgtatctgctgagcaaaaagatgaaaacaaagaagcaaagcctcg

SEQ ID NO: 844603 - DNA, 98 bp, Homo sapiens
gcttttccaagttatacaggcgcagggatatctactgaaggaagctcggacttctcctggggatatggtgcggtggaatccatccaggccgaggacga

SEQ ID NO: 844604 - DNA, 100 bp, Homo sapiens
agcgggggcagtgcagtggactcagtggctggcgagcacagtggaattacatgaatgacagtcttcgaaccaatgtgtttgttcgatttcaaccagagac

SEQ ID NO: 844605 - DNA, 100 bp, Homo sapiens
cttgttgcagatcctgattgtaggtggtgtccagctccagactgtggccatgtacatcttcatgtgatcagccaggattttgattctccttgccttaaaa

SEQ ID NO: 844606 - DNA, 98 bp, Homo sapiens
acatccgctcccgccgagacatccgctccttgcccgagaacatccagtttgatgtttactacaaggagtgtgaggaagaggctgtctgtgtcattatg

SEQ ID NO: 844607 - DNA, 99 bp, Homo sapiens
ctcttgggaacaaaatacaaatcatggagccgctggggtcccttttgcctcagatactattttgaaggcactcctctttatgctgctcactttcgtcca

SEQ ID NO: 844608 - DNA, 98 bp, Homo sapiens
accataagcctcttcaaggagggaaaagaaagaatgtatgaggagaattctcagcctagggtgttaaataccacattatttgaaagctgggagatcgt

SEQ ID NO: 844609 - DNA, 100 bp, Homo sapiens
gtcctacagtgtgggtgccagtgggagctcttccagttgagccccatatgggggttggcaggcagcagagaggcccctttcaaggtgttcgggtaaagaa

SEQ ID NO: 844610 - DNA, 100 bp, Homo sapiens
cgggtactggcaattggttttcggctttggcgctcggggtgactcttctcaaatgccttctcatccccacatacagtcctgcgttaactgcggccgggag

SEQ ID NO: 844611 - DNA, 100 bp, Homo sapiens
atcattccatggctccaagtttaaaagaactacgtgttttatccaacaggtataagaagagatttcataagtttgatgcagaccagaaaggctttattac

SEQ ID NO: 844612 - DNA, 100 bp, Homo sapiens
gatacttcctgcagatgcacccagatggtaccattgatgggaccaaggacgaaaacagcgactacaaaaaggcgagtcactataggcgacactggtctcg

SEQ ID NO: 844613 - DNA, 100 bp, Homo sapiens
ccatcggaggacctccctgccctgtataccgagggaacagtgcttagatgagtacgaagatgatgaagcagggcagaaagagcggaaacgagaagatgca

SEQ ID NO: 844614 - DNA, 100 bp, Homo sapiens
ccaggagaggctgcggagccgcagccgcccagaccgcgcagcgcgggaggcaggttccgcacggttttggcttggtttgaagaaggtgaagaaacaatta

SEQ ID NO: 844615 - DNA, 98 bp, Homo sapiens
aagaactgacagcttgaggaattctctccacacctaggcaataattactgcgaggacgacgggcagacgttcttcagcctagatgacgggaacaccaa

SEQ ID NO: 844616 - DNA, 99 bp, Homo sapiens
ggagcctggcgcagcctccctctattaccaggttctgcggggagtgtctccagccctgcctgcaggtgccatccccgctgtgcccactctgccgcctgc

SEQ ID NO: 844617 - DNA, 100 bp, Homo sapiens
ggtggatagtactccttgtacctcctgcaacccagaaccctggctgaccactttgaaggaggatgctccagcaggggtggagggcttcaccagccaggag

SEQ ID NO: 844618 - DNA, 100 bp, Homo sapiens
tatcgttagagtcttcctgcccaacaaacagaggacagtgacctacaacggccagagcgagaacaacgaagactatgagatccccccgataacacctccc

SEQ ID NO: 844619 - DNA, 100 bp, Homo sapiens
cgatccagaaggtaaagggttcttggacaaacagattatgtttgagaccttcaacaccccggccatgtacgtggccatccaggccgtgctgtccctctac

SEQ ID NO: 844620 - DNA, 98 bp, Homo sapiens
ttcatgaactccaagccaaaatcacagctttgagtgagaaacagagctcagagttctacagagtcaccactgaacaatatcagaaagctgctgaagag

SEQ ID NO: 844621 - DNA, 100 bp, Homo sapiens
taattctgaggaaagggaattctccccgagtttcatcaactttgtcaacttgtggcctatgaaaggaggttccctacatgtcctttgattccgatgttcg

SEQ ID NO: 844622 - DNA, 100 bp, Homo sapiens
tgggcagcgccctgaccggagccttcagcggggggagctcggagccctcccagcctgctgtccagcaggtcaaaatgcagatcttcgtgaaaacccttac

SEQ ID NO: 844623 - DNA, 100 bp, Homo sapiens
cgtttcttcctgcctttgggccgtcaggcagttggttgggacccgctccaaccctcgaaagctgacttcatgagaccgaggatctcgttcgttgatcgat

SEQ ID NO: 844624 - DNA, 98 bp, Homo sapiens
acatcctgtgcatcattggtgtctgtgggctctttgctgggcagaaactggcgatggaatatgagaggagccctctggaaagaaaaggacagaccctg

SEQ ID NO: 844625 - DNA, 99 bp, Homo sapiens
tctgggttggatccccatgctctggccgggcgcattatcactgagagcctcaacaccagccactggagcagttcagcatggagagcccatcagccagcc

SEQ ID NO: 844626 - DNA, 98 bp, Homo sapiens
ggctgctgcggaccccgccgagtcctagcgcctggcctgcgcgccgctgcccgcgccacagcgggtcacagaaagtcgagagagccaaatgacgattg

SEQ ID NO: 844627 - DNA, 98 bp, Homo sapiens
aggaatccctccagaacaatccttggaaactgctaaggcagtaaagaacatgaatttgctttcggatgctcgctctgccagaatgtaccgagatgaat

SEQ ID NO: 844628 - DNA, 99 bp, Homo sapiens
agaaaatggccaaagccctctgccacctcaacgtccctgtcactgtggtgctagatgctgctgtcggaattgttcaggagacaacttttgatttgggag

SEQ ID NO: 844629 - DNA, 98 bp, Homo sapiens
tgatcccaccggaggttggaaatgtggctgtgagctcatcctgccccacgtggacatccagctaaagtattttgacctcgggctcccaaaccgtgacc

SEQ ID NO: 844630 - DNA, 100 bp, Homo sapiens
caaggacctcagcagcggtttcccaagtttcctgacttcttccatcctctggaaatcagctgtggttgttttctgcatggaccgtgccctagaatttgcc

SEQ ID NO: 844631 - DNA, 100 bp, Homo sapiens
aaaaacacagctcgacagtacgcctacttctataaagtcatccaggtaccaaccaagaagctgaagaaatatgagaaagaatatcagacaatgcgagaga

SEQ ID NO: 844632 - DNA, 98 bp, Homo sapiens
cgatggcagccgggacgagctgttccgccggagcccccggcccaagggcgacttctccagccgggcccgcgaagtgtggaaggaggcaaaaccggaag

SEQ ID NO: 844633 - DNA, 100 bp, Homo sapiens
acagccccatccaggtccccatggtggccggctcccctctcggggcaacccagacgtgcaacaaagtgcgatgatgatcaagcggtgctgattcacgaga

SEQ ID NO: 844634 - DNA, 99 bp, Homo sapiens
aggctgccaaatgcaggcactcaggtcacaaacatgtcagacaaaagtgaattaaaggctgagttggaacgtaagaagcagcgactggcccaaatcaga

SEQ ID NO: 844635 - DNA, 100 bp, Homo sapiens
ccatggaaccactcagtattgcaccatgaagagatgattgggaaagctgggggagtgtctctgtcaaaccccgcagcgcctccaccccagagacccggac

SEQ ID NO: 844636 - DNA, 99 bp, Homo sapiens
gctgggtctcggagtgggagacgtggagtgcagtgtggacaacagtgagtatatgcggaatggagacttcttacccaccaggctgcaggcccagcagga

SEQ ID NO: 844637 - DNA, 98 bp, Homo sapiens
cagagggagatgtcaggtgggagaaaggtacggaatgagccctggaacatttctatttcagcagaatatattgcccaggtgaaagggatctcagtgga

SEQ ID NO: 844638 - DNA, 100 bp, Homo sapiens
ggagaagaatggaaagagaagactgatagagacttcgttaagtctattgaagacaatgaagtatatttgcctaatgatgaaatttggacctatgatattg

SEQ ID NO: 844639 - DNA, 114 bp, Homo sapiens
gacggctgcgtcgcccgaggcgaggaggagcgctggcgctgatgaacttattagtcctaaagacattgatcctgtccagcgctatgtcccactaaaggatcaacgtaacgtgag

SEQ ID NO: 844640 - DNA, 100 bp, Homo sapiens
gggcactgcggctgtctccttgaaggttctccctgttggttctgattaggtacatcaggaacgtctctatcaagaatacaatttcagcaaggctgagggc

SEQ ID NO: 844641 - DNA, 99 bp, Homo sapiens
tcggtggcgccgggtctgggggccgcgggacagtcagatcttcgtgaagactctgactggtaagaccatcaccctcgaggttgagcccagtgacaccat

SEQ ID NO: 844642 - DNA, 100 bp, Homo sapiens
agcgaagccttgaaaaagctgccctgagacggtgtcccgccgaaagactttgaataatgagatgagtacagatgaagacaatgaatatgcagaagaaaag

SEQ ID NO: 844643 - DNA, 100 bp, Homo sapiens
catcatcactttcattgtctcggacgtgcggggcctgggcctcccggtccgcaagcagattgctctggaagcagccaaagcactggatgacaagaactgc

SEQ ID NO: 844644 - DNA, 100 bp, Homo sapiens
actactggctgaccatgtttcgaatcagagcaggacaggctgctttggtttgtgacctccaggcaggacggccatcctctccagaatgaagatcttcttg

SEQ ID NO: 844645 - DNA, 100 bp, Homo sapiens
ggtctggagtaaacaacagaagaactgagctatttttgaaagaacatgaccaccttcgaaaaattctcaatcacaatcctctgacaactgttgaagatcc

SEQ ID NO: 844646 - DNA, 98 bp, Homo sapiens
gcagcatggacgacctgatacgccactgtaacgggaagctgggcagctacaaaatcaatggccggacgaaaactacatgaggaaataattgactttta

SEQ ID NO: 844647 - DNA, 98 bp, Homo sapiens
ctggactgcagtcacagtggactcccaaggggcagatggctcgttcggaacaccacctggatacggctgcgctgcagaccgggcagaggagcagcgcc

SEQ ID NO: 844648 - DNA, 100 bp, Homo sapiens
cgtgggcccacctaccactgtccgagtgacacacaatgccggtggtggtgtgcacattgagccccggtatagacagttcccccagctgaccagatcccag

SEQ ID NO: 844649 - DNA, 98 bp, Homo sapiens
ctgacctcgctgtacgccgagcacccaggcgactgcctcatcttcaagagtccctggagaagtgggagcgtctgaccgtggcggatgcgctggagccc

SEQ ID NO: 844650 - DNA, 100 bp, Homo sapiens
ctggagttaaatttatcatgtccacatggcatgggagaaagaggaatgggcctggcctgtgggcagtccagttacaacacagggatcacaacaaacacaa

SEQ ID NO: 844651 - DNA, 98 bp, Homo sapiens
gcatttctgtgcctaggaggactggcttgtcttattgtaatgtttcttccagaaaagaaagatattgatgatgttaagaagttcaaaccgggttacct

SEQ ID NO: 844652 - DNA, 117 bp, Homo sapiens
cctggcgtgcactccgcacctcggggacattattgcgcgtggaacggctgcttttggaaggtccggcctctttggcctacccccgttggctccgctgccccaggtcgatgagtcccc

SEQ ID NO: 844653 - DNA, 98 bp, Homo sapiens
gaacgcgggcgcctgaaggagttgttgtctcggcagcgcccgcggagacgtgaagaggttgaagccatccttgtcaatatatttggtggtatcgtcaa

SEQ ID NO: 844654 - DNA, 100 bp, Homo sapiens
tgggtggcatgactaggatgcccaaggtttcagccatgccacagagctccggcagtcatgggcccgctatagcagcagttcatagcagccatcatcaccc

SEQ ID NO: 844655 - DNA, 98 bp, Homo sapiens
aatgtttcagtttgggaaatctggatgccaaacgagattggggccatgccaaggactatgtggaggatttggagttccatggagtgatgagattttat

SEQ ID NO: 844656 - DNA, 98 bp, Homo sapiens
acgagctagtgttggagtgcaccaagaaatgtattggtaaaggttttcaaggtgtcatgaaaagatggggatttaaaggccagcctgctacgcatggt

SEQ ID NO: 844657 - DNA, 100 bp, Homo sapiens
ctcagaagtggagagaacgtctgaggctacatagccagtacaaaggtatttgaagtataccatacaactgttttgaaaatccagcgtggacaatggctac

SEQ ID NO: 844658 - DNA, 101 bp, Homo sapiens
ctcaaaaccagcatcgagatgtagttcctgagcatgaggctcccagcagtgagcctttcagtgggatctacctgaataacaaggaagcaggaatgtatcat

SEQ ID NO: 844659 - DNA, 100 bp, Homo sapiens
gggaccgagcctgggaggccggccggtgccagcacctttcggcttctgagacggcggcagcagcggcattcaggagctcttgtccctggcaaagcgaaag

SEQ ID NO: 844660 - DNA, 98 bp, Homo sapiens
tgcctatgatgccaacgtgtccttcaatgtttcccgggagctcttcttcatcaacatgtggcagaaggtcctcatgctgataccgccagtggatgcca

SEQ ID NO: 844661 - DNA, 100 bp, Homo sapiens
cgagggatgcggagagaccatatatgtcattgggcagggatcagggaaaccaggaacaactggtaactgtcatggaggaacgaatgatagaagttgaaca

SEQ ID NO: 844662 - DNA, 100 bp, Homo sapiens
gtcatagccttagctcaagcaataggaactgcaagcacatgttgaccagataactgaaatggcagcagtaatgaggaaagccattgaaattgacgagcaa

SEQ ID NO: 844663 - DNA, 101 bp, Homo sapiens
cttctatgtgatgaagcctcttggtttgaaagtaatgacaatccagaaatgccttctaattcaggcaatttgcaaaaggttttcctttggaatatggataa

SEQ ID NO: 844664 - DNA, 100 bp, Homo sapiens
ctcagctattcggtcatatagagatgtcatgaaggtcaccctcgtcgactgaaagtgaaacctgattctgaaattttagttatagaaaatggaacagctt

SEQ ID NO: 844665 - DNA, 50 bp, Homo sapiens
attccagcttcggaacaagagaccctggtatttcagtgtctgtagacaag

SEQ ID NO: 844666 - DNA, 100 bp, Homo sapiens
gggtttcttactaaggacgagctgatcaagtatatgactgaagaaggtgggaaagcagtgccactctccgcttcacagatgccccctgccaagatgtcag

SEQ ID NO: 844667 - DNA, 100 bp, Homo sapiens
ctggagcactgtcctctaacgccatccgcgagcaactttgactctttgaatgaagatgatgctgtggagaacaaccagctcgcatttgatgtggccgagc

SEQ ID NO: 844668 - DNA, 100 bp, Homo sapiens
gaaactcacttgactaatcttcgggcagagagaaggaaacacttagaggaagttctggagatgaatttgagatgctcacggggtccctgccgttccaggg

SEQ ID NO: 844669 - DNA, 100 bp, Homo sapiens
gccgcctgcagtcggtgaccgcgcgactcggcgcccgcccgcggggttcagctgttgcaaaaataattggtaataatgtcaagaaacttcagaaatttgc

SEQ ID NO: 844670 - DNA, 100 bp, Homo sapiens
cacaaactgaccaagcacagagtcaccagtttccatatgtaatgcaagggcaagctaatgaagaatatcaaatactggcgaactcctggcgctattcatc

SEQ ID NO: 844671 - DNA, 51 bp, Homo sapiens
ctccgtgacctggtacatcgccgagttctaattctcaatcacaatcctctg

SEQ ID NO: 844672 - DNA, 100 bp, Homo sapiens
cctctagcacatcacctacactaccacggccacactcaccactccatggccacacagatcaggatcctcatgaccagccaaagagaagaagaattaggaa

SEQ ID NO: 844673 - DNA, 99 bp, Homo sapiens
gaggagcccatggaggacgtggtagaggacgggcccggctaaagtcaactgcttcttccattgagactctggtagtgcggttcctcatctgagaggctc

SEQ ID NO: 844674 - DNA, 98 bp, Homo sapiens
agcgccacgaattctcgcgtcgtctcgcgagagtccaagttaaagaacatggcgacgtctaatctgttaaagaaagtcattgggtggtacagattccg

SEQ ID NO: 844675 - DNA, 98 bp, Homo sapiens
cagctgctacactaacgggcatctttgtcttgttctcagtcttaaaaagatgagaaagtggcgtgtgaaaagtgccctgggagccatgggccagtggc

SEQ ID NO: 844676 - DNA, 100 bp, Homo sapiens
gcgatggatgtggataccccgagcggcaccaacagcggcgcgggcaagaagcgctttgaagtgaaaaaggaagatgagaatgtgcctactgctcctgatc

SEQ ID NO: 844677 - DNA, 98 bp, Homo sapiens
tacaggtccctaatggtgcaggagcagcggctggtgcatgaacctcagaggatccagaacggcagctggtccttgctggactgttcctgtccatgtgc

SEQ ID NO: 844678 - DNA, 99 bp, Homo sapiens
cggcacccagacaggtggcgacggcagaggagtggatatcatccagtgaaaattggagacctcttcaatggccggtatcatgttattagaaagcttgga

SEQ ID NO: 844679 - DNA, 98 bp, Homo sapiens
tttcattctggacctagagggactcatgatctttgggatagcagattgtttgcctactccaggatgatgaagtggttctgcagtgcaccgcaaccatc

SEQ ID NO: 844680 - DNA, 100 bp, Homo sapiens
caatcacgtgcgcactgaagtagaacagcaaagagatttaacgtcacagtttttgaagaccaaggagaaggatgtccggaagtggaaggaagaattgcta

SEQ ID NO: 844681 - DNA, 100 bp, Homo sapiens
gctcgccccccggagcagtacgttcaactcccaagaaccccataacatcctgccactggcatccagtcagatcagtcaccaggagactaaagtccatcaa

SEQ ID NO: 844682 - DNA, 100 bp, Homo sapiens
ctccatggccaactccttcgtgggcacgcgctcctacatggctgtttggaatttcagctgggcagcttcgatcccaccacctgtagccactgaggttcac

SEQ ID NO: 844683 - DNA, 100 bp, Homo sapiens
cgtgtgccagcaacagagctgggtccgggtgtacgctgttccatttcctccaagtcaccggcttacagcaaaagaagtgtttgataatgatggaaaacct

SEQ ID NO: 844684 - DNA, 100 bp, Homo sapiens
ggagctggggactgacagtacaggagaccagaggggagccagtcatggctccgatcttcatcttgaagaagagtgacattgggtgactgctgcttggaaa

SEQ ID NO: 844685 - DNA, 100 bp, Homo sapiens
gctgcaacggaaggaagatagttcgagagaagaaaattttagaagttcatattgacaaaggcaaccttcaaaagatcctgtcccatgatcatcctccaga

SEQ ID NO: 844686 - DNA, 100 bp, Homo sapiens
gttccaggtagacatggaggccgtcggggagacgctgtggtgtgactggggcaggaccatcagggacattagtcatgagtgccgagtgtgcggggtcaca

SEQ ID NO: 844687 - DNA, 100 bp, Homo sapiens
gaaagaaggatctagcgaaatatggctacagagagccctgctacgcgtcgggtccaggtggcagaacatcctaggaatcggtgacatttaaggatgtggc

SEQ ID NO: 844688 - DNA, 100 bp, Homo sapiens
ctgtcctttcacaaccagctgggattccacaggcagttcaagtcaagcaactagaattgaatgatctggcacgggaccctccagcacagtgttcagcagg

SEQ ID NO: 844689 - DNA, 100 bp, Homo sapiens
cccatcaagatgaccggggtgtgccggggggaaaggggcagcatgatggtctgagatgagtcctgatgggaaatacctagccagtggagccatagatgga

SEQ ID NO: 844690 - DNA, 98 bp, Homo sapiens
tattaccgtcaaatcctccctgtcctgaacatctttaagaatatgaatgctggctgtcccaactccttgattaaagagctccatcacttcaggattct

SEQ ID NO: 844691 - DNA, 99 bp, Homo sapiens
gcttctgcccaagatgaggagcccctggcctgcccggacgagttcgatgacttcgtcacctatgaggtagaatgtaagaaagctcagccgaaagaagtc

SEQ ID NO: 844692 - DNA, 98 bp, Homo sapiens
agatccacagtcgactcttctcatcccccaaagatcattctgcctgggaaagaaatgaaagtctttccaatgcagactgtatgaaaacaagggagagg

SEQ ID NO: 844693 - DNA, 98 bp, Homo sapiens
tcaaccagatgaggaagtacaactttgagtaactctcaggagccttctccgcagttggcttcctcggtagcttccacacggagcatgcccgagagcct

SEQ ID NO: 844694 - DNA, 98 bp, Homo sapiens
atttccttactggagcaagggaaagagtcctgcatggtttcaagggacgtaccaggaggatggtgcccagttggtctcttcccatggcgatgtccatc

SEQ ID NO: 844695 - DNA, 100 bp, Homo sapiens
atactatacccaggctggtggaactctgggcagaaagctgtatgtgatggcttctgtgtttgtctgtctactcctttctggattggctgtgtttttcctt

SEQ ID NO: 844696 - DNA, 99 bp, Homo sapiens
accttctgagacaaaatgaagggcagaggaaaccagtagcagttctcaagagacctagccagctaagcagaaaggcatacataatcttgctgctatgct

SEQ ID NO: 844697 - DNA, 99 bp, Homo sapiens
ctccctgtctgggaccttctccctgcctggacccctactattgcaacaagatctcccttgagtttagaaatctggctgagaaataccaaacagtgattg

SEQ ID NO: 844698 - DNA, 98 bp, Homo sapiens
gtaactccatgcaataaacagttcctgagtcaatttgaaatgcagtccaggaaaatttctggcctggatatctaattctctgtttggagctggagaga

SEQ ID NO: 844699 - DNA, 100 bp, Homo sapiens
tcctatatgtcgacatcagggcagcacagacagtttaaatacagaacgaccaatggatatagcacttgtcttatggcaacggcagcttacacgtggatgc

SEQ ID NO: 844700 - DNA, 100 bp, Homo sapiens
atgacactaagaagtaaaattacgaactcactgagctggaagtcattcaacgggaattgaatagtatgtccgtggttcagaccctgtattaaagcttttg

SEQ ID NO: 844701 - DNA, 100 bp, Homo sapiens
gcgtcctgctgaccccagccggcgccgagggcttggaatctcgagcgggaaaaggaaaaccagtagattcccagacatcgcgaagtgaatctgaaattgt

SEQ ID NO: 844702 - DNA, 99 bp, Homo sapiens
agctcagcgcccggcagccttcgacgcgatgttccgccggagcttgaatcgttttcccactgtttgtaacatggaagattggtcgagacaaaagattac

SEQ ID NO: 844703 - DNA, 101 bp, Homo sapiens
cggatggactcttttgatgaggacctcgcacgggaaaaagacctcgatgaagttctgcagacccactcagtgtttgtaaatgtttctaaaggtcaggttgc

SEQ ID NO: 844704 - DNA, 126 bp, Homo sapiens
ggggactctgtgtgagggaaagaaaacaatttctcctgctctgcagcttctgttcaggtgtggacgatggcgctgacatccccagggagctggtggtaggcatctatgagaggatacagcagaagg

SEQ ID NO: 844705 - DNA, 99 bp, Homo sapiens
tgaagtgcttcagatttaaatacaaaaaggcattgggatgaacgagccgctggtggactgtgagggctacccccggtcagacgtggacctgtaccaagt

SEQ ID NO: 844706 - DNA, 100 bp, Homo sapiens
gagaaaatgcaacagcacacatttttgcaacatacccagctccgtatctatctctggcgaacgcatttgcagatcaatagggacggggtttcaccatgtt

SEQ ID NO: 844707 - DNA, 98 bp, Homo sapiens
atgccaatactgtcgactccagaagtgctttgaagtgggaatgtccaaagaatgtttaagaattgtttaagctgcatcaatggagcacatacagggag

SEQ ID NO: 844708 - DNA, 100 bp, Homo sapiens
gtccgcttcaaggtgccccagcagattaaagagtctattgttggggaaatcagacgggaaattgtaagtggacttttggcagcagtatcttcaagtaaag

SEQ ID NO: 844709 - DNA, 98 bp, Homo sapiens
aaaccagtgaacctgtacacattttaaagaggtcttttgcaagaactgtctcagtggaaatggagttgttttttccttcaagtggaggttgtgggccg

SEQ ID NO: 844710 - DNA, 100 bp, Homo sapiens
gctgtgagagcagcagggatacaggtgacatcctagccctggtttttggcctcctttttgctgtcaccagcgtcgcgttccttgtgcagatgagaaggca

SEQ ID NO: 844711 - DNA, 100 bp, Homo sapiens
gatcttctgccgcaccaggctcatcctgtccatcgtgtgcctgatgatcacgcagctggctggcttcagtggaccagaatctcccattattcttcgagat

SEQ ID NO: 844712 - DNA, 98 bp, Homo sapiens
ttgccctaaagattatagacaaagccaaatgttgtggaaagagtatccggtctaaagtggagttgtcagtctgggatcagcctgaggatcttaatctc

SEQ ID NO: 844713 - DNA, 98 bp, Homo sapiens
actttctggatctgtgcttgtgaaaggctccatggtcttgcctccttgcaggctggaggctctcaggtcatttttaccaacccattggagatagtgaa

SEQ ID NO: 844714 - DNA, 100 bp, Homo sapiens
taaagatgacagctccagtgacaagctacgtggagcctggttcaggtccttttaagaacgtttgtctgcctgatgagagccacttgggttaagaaactac

SEQ ID NO: 844715 - DNA, 99 bp, Homo sapiens
tcacgtgtgcccaggccctgaggtgggccggacctgggagtggcaggaaatgctgacttttaacccacacaagcgaatctctgcctttcgagctctgca

SEQ ID NO: 844716 - DNA, 98 bp, Homo sapiens
gccgccgccgagacagctgcgcgggcgagcatccccacgcatcacagaagatcttattagacggaatgctgaacacaacgactgtgtcattttttccc

SEQ ID NO: 844717 - DNA, 100 bp, Homo sapiens
cgccggccggctgcgaagacgcggtgggccgcccctccgaacctggagctggttgaaaaaggcttcagtaacttgaagaaacaaattgaaaatgccagaa

SEQ ID NO: 844718 - DNA, 100 bp, Homo sapiens
gctgcacggcagtctgtttatgaggagtcagtggatcggtggggaaaatgctgcttaccctgggccctgggctgtagaaagaagacaccaaaggcaaagt

SEQ ID NO: 844719 - DNA, 99 bp, Homo sapiens
ttaggttcatgggtgtatgtgttcatcaaggacaattgcatgcacttacagagaaaacaaccctttttgctgcacatgtaagtggagctgtgcttacct

SEQ ID NO: 844720 - DNA, 101 bp, Homo sapiens
cgtgtctgaagtcttcaggcgagctcaccacatgctacagaggagtgaatgtcgttccttttctagaactcattgggttacctgacagtgtggtaagcatc

SEQ ID NO: 844721 - DNA, 98 bp, Homo sapiens
tgttgtggagaagattcgtgggctgatggaagacaccacccagcaaaactcatcagatttatctgccaaacccaaattctcaaagcctttcaacccac

SEQ ID NO: 844722 - DNA, 100 bp, Homo sapiens
tctgcagcaagaggaaaggaaagatgtgttcgggtttttctagaacacggagccctgggcctggaggcacacactgcccgggtgccagtgtagaacatgc

SEQ ID NO: 844723 - DNA, 99 bp, Homo sapiens
gtcgcactacctggggaagacccacgcaaagaacttaaagctgaagcagcagtccactaaggtggaagttgctctaggtcgtaaccagcctttgaaaaa

SEQ ID NO: 844724 - DNA, 100 bp, Homo sapiens
tggcagggcagtctgcggcggtgttctggtgcacccccagtgggtcctcacagctgcccactgcatcaggaagtaccaaccaagaagctgaagaaatatg

SEQ ID NO: 844725 - DNA, 98 bp, Homo sapiens
aatgaaatccgagccactgacctgcctgagaggttccaggacagagcgggatgccaccagcttgtccaaagggaagttccaggagctcctggtgggca

SEQ ID NO: 844726 - DNA, 98 bp, Homo sapiens
cgaccccctcatccgctgggactcctacgacaacttcagtgggcatcgagatgacggcatggagggaacagatgttgttattgtaaagaatggaagaa

SEQ ID NO: 844727 - DNA, 100 bp, Homo sapiens
aaaatattaatgacagaagatctgcgaacatgatgcacgtgaataattttccctttagaaggcattcctggatatgatgccttcaattaagttgcagagt

SEQ ID NO: 844728 - DNA, 149 bp, Homo sapiens
cactgctggctgcttccagtgttcgccgagaggtaccgggggtgacagctccgggaccggccgaaaggcgaggaaccgaacaagttgaaatcatcgcagaaggataaagttcgtcagtttatgatcttcacacaatctagtgaaaaaac

SEQ ID NO: 844729 - DNA, 100 bp, Homo sapiens
aacggggtcctcttctgcaaggtccggctgctggatggaggggattttgtcagcttgtcgtcaagaaaattatgacgcgaggctctcacggatcgacatc

SEQ ID NO: 844730 - DNA, 116 bp, Homo sapiens
ctgacgtgtttggagggaaatgggaatgtacacgataattaaagagtaaagttgtgctcaacggagattcatatgggacattgtgtaaatctgactgatggggctgtcgaagctgt

SEQ ID NO: 844731 - DNA, 99 bp, Homo sapiens
gcaagatgcggctgctggacggcggcagcttcaccgccgagtcctccaggtccagcagtttaagcaggatccacgcccaacaacatgtcttcactctgt

SEQ ID NO: 844732 - DNA, 100 bp, Homo sapiens
tggccactgacaaaaatgacccccatacccggagtggcgttggatggaagcgagtcctgcgttcactctgtcattcacggacccgagtgccacttctagc

SEQ ID NO: 844733 - DNA, 100 bp, Homo sapiens
ggcggaatgacagcggcgaggagaacgtcccgctggatctgacccgaggagctgactgctgggcaggaacgtctctcaggagaaagagtggaagagaaaa

SEQ ID NO: 844734 - DNA, 100 bp, Homo sapiens
ggatcatatcagaaagatggcatatcagatatgcaagtctgtgaattatatgaaaattttgaggatcctatgggaactattgataagtttcactatggta

SEQ ID NO: 844735 - DNA, 100 bp, Homo sapiens
ccaagccccgctccccgcagccgccaaggctgaggctgaggtggcctccttgaaccgtaggatccagctggttgaagaagagctggaccgtgctcaggag

SEQ ID NO: 844736 - DNA, 105 bp, Homo sapiens
tcaaagctctaaagtctctcttcgagcaccacaaggccctggatgagaagaaagtgagtgagaaggttggaggagctgaaggaaccaagctagatgatgacttca

SEQ ID NO: 844737 - DNA, 100 bp, Homo sapiens
cagctcttcacagggggtagaacaagtggtactaggattatacattgtaagaggtgacaacgtgtttaccgacaagactgtgaaactttcgggatggtgg

SEQ ID NO: 844738 - DNA, 100 bp, Homo sapiens
gggatcttgaccctttgctcctgaggactgtcgaccggcgagccctagggggtcctggtcttcatgatccttgtgagcgagacccaacagatgctctgag

SEQ ID NO: 844739 - DNA, 100 bp, Homo sapiens
ttagaagaagaaagcgttgcagaagatgatgcagaattaacattaaataaagtggatgaagaatttgtgataagtttataccatggatagcacaaaggag

SEQ ID NO: 844740 - DNA, 98 bp, Homo sapiens
ctgggtcagatttgaaaatgcagatttaaatggagagcgacttgcagttgtggaggtacagtgtgaacggctgaggatgctctaccgggactgtgctc

SEQ ID NO: 844741 - DNA, 100 bp, Homo sapiens
gagagtggagaccgcacttccatattctggaatgacgtaaaagaccctgtctcaattgaagaaagagcggagatcatgaatcagacagataaaaatcaac

SEQ ID NO: 844742 - DNA, 100 bp, Homo sapiens
ggctccagaggatcatggcagctcctatgagatacgaaaaccggtgaggtccaaacattgtggtgtgtgcaaccgctgtatagcaaaatttgatcatcat

SEQ ID NO: 844743 - DNA, 100 bp, Homo sapiens
ttgaagcaacaccctagatggatgtacagccatcaagaggatcttaaagtgtggtctttagtggaaaaaaagggacccccacagaagagacgtggcccgg

SEQ ID NO: 844744 - DNA, 98 bp, Homo sapiens
ctgagacagaagtacaacgtgcgatccatgcccatccgaaaggatgatgaagttcagtgtgtctctatgcatggagtaagaaagaaaccatcctacaa

SEQ ID NO: 844745 - DNA, 100 bp, Homo sapiens
cttcagcaagaggaccgggctgggcgcgcccggccgcgacgcccgggacccagattgcgggttcagcacacagcatgcctctgcaatgccatcattgctt

SEQ ID NO: 844746 - DNA, 100 bp, Homo sapiens
agcatcccggaggaggaagaagaagtgttatatgtcctaaagtaaggtttcagcactggcttctctggactttgcacacctccaggagaagaacccagaa

SEQ ID NO: 844747 - DNA, 98 bp, Homo sapiens
aggatttacggtatatcttatgactctacaggagccttgggatataggtgctgggactctggtgcccccaaccctgggcatcctcaggctttgaggag

SEQ ID NO: 844748 - DNA, 98 bp, Homo sapiens
acagtccgaaatggcggggactgttggtctcggccctgcggaagggagtgaagagcaaggccagcctacccaactttcttgaccacatcattgcctca

SEQ ID NO: 844749 - DNA, 98 bp, Homo sapiens
agtgccaaaagacggaacaggatgggcaagcaaacaggagcagtccgaccccaagagatatgagatcctgactccaaactccattcccaagggtttca

SEQ ID NO: 844750 - DNA, 100 bp, Homo sapiens
gacagaactgatattttatattgaaatggatcctccagcattttgaaagcgaagcagaagccgtagaatcagcggcgagcctgttgaaagaacccacagg

SEQ ID NO: 844751 - DNA, 100 bp, Homo sapiens
caggcagctcgcggtcatgggcggctcagcctccagccagctggacgagggcaagtgcgcttacatccgaggcaatgaatcgctccctggctaatgtgat

SEQ ID NO: 844752 - DNA, 100 bp, Homo sapiens
tccaagttgggggctcagaggggagtcatcatgagcgatgttaccattgtgaaagaaggttgggttcagaagaggggctaacatttccaatgatcactgg

SEQ ID NO: 844753 - DNA, 98 bp, Homo sapiens
tcattcctgaggccatcgttaatctgcagatgctgacttacctgaacttgaggcctttgtggaggcccagaataagattactgtgccatttcttgagc

SEQ ID NO: 844754 - DNA, 100 bp, Homo sapiens
acatccttcgaaaagctgccaagttgaaaatggacgagtaatcgcctgctttgattcattgaaactcatcatgtcactacagtgaacagtacaaattgta

SEQ ID NO: 844755 - DNA, 115 bp, Homo sapiens
gtactgcacatcgtggtggtcggatttcaccacaagaagggctgccaggcaatgaatcgctccctggctaatgtgattcttggaggctatggcaccacttcaacagctggtggaa

SEQ ID NO: 844756 - DNA, 100 bp, Homo sapiens
cctaaacttttcaagcctgaaggaaaggcagaactgcctgattacaggagctttaacagatggttctgtgaagggaaagaactgcacaacactcctgata

SEQ ID NO: 844757 - DNA, 101 bp, Homo sapiens
aggggagccgtggcctcctctccgccctagcgctgagatgtctttggtggacttgggaaagaggttgctagaagcagcaagaaaaggccaagatgatgaag

SEQ ID NO: 844758 - DNA, 100 bp, Homo sapiens
gacaaattgaagggagagatgatggatctccaacatggcagccttttccttagaacaccaaagattgtctctggcaaagagatagaatctcactatgttg

SEQ ID NO: 844759 - DNA, 98 bp, Homo sapiens
gtcttccgtaacctgcgggagaggtttggaattgatgatcaagatttccagaaccttttgcccagagtagcagccaaacttgaggttgccccgatttc

SEQ ID NO: 844760 - DNA, 100 bp, Homo sapiens
tgatgttggagaactacagaaacctggtctccctagaattcctagaggacctgtgcaacaacctcttgaggatcgaatcttcactcccgctgtctcagca

SEQ ID NO: 844761 - DNA, 100 bp, Homo sapiens
cgagtgtctcactgtcccttcaggagaacatggtgaagagcagcggagaccttcactgcctggtgtaactcccacctaaggaaagccggcacccagattg

SEQ ID NO: 844762 - DNA, 100 bp, Homo sapiens
aagaagtccaagaagcaaaaaagggactgctaagaagataccaccagattgtgattgctagcattatgtgcagttacaataaaaatgactggacggaact

SEQ ID NO: 844763 - DNA, 100 bp, Homo sapiens
ctctctgtttctccccaaaataaccattctccagatccagaggcaaactatgcaagaggcaccagacttcctctttctggtgaaggaccaacttctcagc

SEQ ID NO: 844764 - DNA, 98 bp, Homo sapiens
caccgggagatccgtagctcagacgccaggacatcccggaagctgggaaatggactcacaccacccggcaagaactgctcactacggctccctgcccc

SEQ ID NO: 844765 - DNA, 99 bp, Homo sapiens
cagtgtctgagcctacaactgcgctatcttccctggatttttcttcaccttttccttactcatgagccagtgttccattggcaagctacaataatgggg

SEQ ID NO: 844766 - DNA, 100 bp, Homo sapiens
atgtacttgctacagcccctgacaaaaaaaagcagaaattgctagaagaaaacgttagtgctttcaaaacagtcaccaggtgtcaagatgctgcaagtac

SEQ ID NO: 844767 - DNA, 98 bp, Homo sapiens
ttggttgagctgcagctgtttgtctgttcgacacaggcttggggccgacgggggagacggagccccagtaccttccactggaagaatctcaaacagcg

SEQ ID NO: 844768 - DNA, 98 bp, Homo sapiens
tcgatttgaaaaaatggacaacctgctgcgggatcccaaatcggaagtgaattcggattgtttgctgatctgtgactttggcctggcccgtgttgcag

SEQ ID NO: 844769 - DNA, 98 bp, Homo sapiens
ttggctttggaagtggtaactctttgggtgctgctataggctcagccctcagtggatttggttcatcagcacgaaagcaagagattatcaaagtcact

SEQ ID NO: 844770 - DNA, 98 bp, Homo sapiens
atgacttggagtgttcaggaaaaggaaaatgcaccacgaagccgtcagagccaggaaatgtgaagaattcacctggaactaagtagaaaactccatgc

SEQ ID NO: 844771 - DNA, 100 bp, Homo sapiens
gaaaatggagagaagccaatgtcaaggctgtcagtgaggaggcatacaaggttgtggaaaatgcccttaaagtgaacccaatactaggtccacaaatgtt

SEQ ID NO: 844772 - DNA, 100 bp, Homo sapiens
ctctagaagaaatgccctccgggtcacaggataagatatatttttgccatcatggatcagtttggagatatattagaaggtgaagtggaccattctttct

SEQ ID NO: 844773 - DNA, 98 bp, Homo sapiens
gtggtgagaaatgtgatgaagatgcttgggctgtctgcagagcctgcaccagcatggactacttttagagttggcctattttgtggaatattcattgt

SEQ ID NO: 844774 - DNA, 98 bp, Homo sapiens
caaataaacccaagatcctggctaatggtgatggatgtggacacactgtactaggccctgagagtggaacccttacatccataaactacccacagacc

SEQ ID NO: 844775 - DNA, 99 bp, Homo sapiens
tgtacttatcctggatgatgccaccagtgccctggatgcaaacagccagttacaggtctatgttaacaatgaatgggcaaccagtgttggggaaggagg

SEQ ID NO: 844776 - DNA, 100 bp, Homo sapiens
aaacagatatgtattctggataagtcagagcaccataacatggtgtgggaagtgaagacaaatcagatgcctaatgcagtacagaaactcctgttggtga

SEQ ID NO: 844777 - DNA, 98 bp, Homo sapiens
ggcgccggcggccttcacctctggaagtattctggctcacagaggactgctggttgcaagcaaacttgtatctgggtcttcaagattttgactttgag

SEQ ID NO: 844778 - DNA, 98 bp, Homo sapiens
gtggaatgcagttatatttggcctgaagttcaagttcgacaagtggctgtgaaatttgccagtacggtgtttccctcagatcatatcccttccagata

SEQ ID NO: 844779 - DNA, 100 bp, Homo sapiens
acttattgatctccatacaaatgttgccactgctgttttagaacatataaagtttcaggatctgaagctgagggaattctactgtgagggaaacccactg

SEQ ID NO: 844780 - DNA, 100 bp, Homo sapiens
ggatgaactgaaacggattgccagagaattggcagaagaaacagtgtggttcttgttgggcttttagtgcgactggtgctcttgaaggacagatgttccg

SEQ ID NO: 844781 - DNA, 98 bp, Homo sapiens
gtcacaccttcagtccttcgagcaagttgcacagagcattgaggatcaccatcaggaagtgattggtttctgcagagagaatggtttccatggcttgg

SEQ ID NO: 844782 - DNA, 98 bp, Homo sapiens
ttgaaggtcccttgtggggactggaaagaggacggtggagttctacttcctttcccagtacgtgtcgccagccgactccccgttccgccacatcttca

SEQ ID NO: 844783 - DNA, 99 bp, Homo sapiens
ggagctgtgcagctccttatcatggttcaaaccttgtactactcagctgatcacaagctgcttgatgggaacctactagatggacaggctgaggtgttt

SEQ ID NO: 844784 - DNA, 98 bp, Homo sapiens
gcttcagagacatgagaagattcatactgatgttctgccttactcaatacgggtcttgttggaagctgctgtacgaaattgtgatggctttttaatga

SEQ ID NO: 844785 - DNA, 98 bp, Homo sapiens
tctgaaatacctgcaaccggaacagatcgagaaaatctggcttcggctccgcgggctgagcaccttctgctccatcattgctcagctcacagaggaga

SEQ ID NO: 844786 - DNA, 100 bp, Homo sapiens
tgacttgcttttttgaccatgttactcatagagtccgactataccacatacagggtagtagccatggttatgtgggttccagtagtagaatatcaagaag

SEQ ID NO: 844787 - DNA, 100 bp, Homo sapiens
ccctggaaggaaggcccagcgcctataactttgacaatagccctgtgctgcagggactgatagaaggttctgctcagtaccgggaaaggctagaaatggc

SEQ ID NO: 844788 - DNA, 99 bp, Homo sapiens
agaacttttcgcttatggcctcagtagcaccagtggcagttcgcagcctccaggacttggctcgcatcgccatccggggcaccattaaaaagattattc

SEQ ID NO: 844789 - DNA, 100 bp, Homo sapiens
ttccttgacctttaggtgcttttatattcatctcaaaaacaaaattctgaactcaggacttggcaactcagattccaaatgaaaatgtttgagagcgctg

SEQ ID NO: 844790 - DNA, 100 bp, Homo sapiens
ccgtcccaggaagtggccgtcctgagcgccatggctcactccccggtgcagtcgggcctgcccggcatgcaggatttaagtgccctgtatgctcaaaatt

SEQ ID NO: 844791 - DNA, 100 bp, Homo sapiens
aggagcagggaagaaggaatcatcgaggcatgggggtccacactgcaatgtttttgtggaacatgatgcagcagcttttttatgagaattacgagcagaa

SEQ ID NO: 844792 - DNA, 98 bp, Homo sapiens
agcaagaggaccgggctgggcgcgcccggccgcgacgcccgggacccagattgcgggttcagatgctgtcttcgcaggtgccatgcctacaatggcaa

SEQ ID NO: 844793 - DNA, 100 bp, Homo sapiens
aacaacatcaaactctatgtccgccgtgtgttcatcatggacagctgtgatgagttgataccagagtatctcagtattactcagcacagaaattcaggag

SEQ ID NO: 844794 - DNA, 100 bp, Homo sapiens
ctatggggacagagaccggttcaaggtctctaagaaggtgcccaagatcccactccatgtcagaagctcattcacacagaagacccatttaatgatgaac

SEQ ID NO: 844795 - DNA, 100 bp, Homo sapiens
gctaatggaactgaagacagctgggcctaacaagtgcccaggtgactcaggcaatgaatcgctccctggctaatgtgattcttggaggctatggcaccac

SEQ ID NO: 844796 - DNA, 100 bp, Homo sapiens
gacaatggactccatcccactgaggacctgccccgtgctgaagggtcgagtgcagaagatcctacattggcggtggggggagccacctgtagcagtgcca

SEQ ID NO: 844797 - DNA, 98 bp, Homo sapiens
ccattatgtcgtgtgcttccccgggccctcatctttgtgtcccatggagccggagagcacagtggccgctatgaagagctggctcggatgctgatggg

SEQ ID NO: 844798 - DNA, 100 bp, Homo sapiens
cgctggtgcatctgtttgccggagggactatcctattaagtgtaatctcactgcttaatgagcccaacaccttctccccagccaatgtcgatgcttcagt

SEQ ID NO: 844799 - DNA, 100 bp, Homo sapiens
ccctgtttgagaaaaggcctaagaattttggcattgattctggctacattggagattggttgctttctaaaactgaaggagaagcccatgaagagatggt

SEQ ID NO: 844800 - DNA, 100 bp, Homo sapiens
aactggtgtcgagaagtccggaagcttgtggcgctgaaaacgaacgctgtgttccagatcatctccctggtaatttaccccgtgaagtacacccagacct

SEQ ID NO: 844801 - DNA, 100 bp, Homo sapiens
cagctcgttcgtggcccagagggaggagaacgtgcccaagaaccgctccctggccgtgctgaccttttccacagtgcctacacaacctgataatccattt

SEQ ID NO: 844802 - DNA, 100 bp, Homo sapiens
tggaatgaaaaggaagtattagaaatgagctgaagaccattcacagttttccaagagataacttcaccaagatgtccagtgataggcaaaggtccgatga

SEQ ID NO: 844803 - DNA, 98 bp, Homo sapiens
ggactgccagaggtggaggggaggattttgaggacacttgtggagagctcgaattccagaatgatgaaattgtgaatacggggtgctttgcattcagg

SEQ ID NO: 844804 - DNA, 128 bp, Homo sapiens
aaccagcacttctgggacgcacagagaccgtgaagattccaagttcaggagaactcgaccgctgtcaaagctcgaaaaacagcagcagaggaaagaaaagaccagagctaagggaccttctgaatcaa

SEQ ID NO: 844805 - DNA, 100 bp, Homo sapiens
gggaagtgagaagcccaactaaagccccacatttgcagctcattgaaggaaaggtaattgctctagcagatgcagtggaggaaaaccaaggcaatctgtt

SEQ ID NO: 844806 - DNA, 100 bp, Homo sapiens
aatacggaggagctgtggctcctccattcaaacatcgacgccatcgacaagcggcacattgcaagcaacccgtgccttgatggtggttggcatcctcctg

SEQ ID NO: 844807 - DNA, 132 bp, Homo sapiens
ggagttcaccttgaccctgccgtcaaagaagttcagtataatcctacctatgagaccatgtttgctcctgagaagttgaatataccggcaattttgcgagcacccaaggagagaaaaccaagtaaaaaagaa

SEQ ID NO: 844808 - DNA, 98 bp, Homo sapiens
ggagcggccggaggagccatggactgcagcctcgtgcggacgctcgtgcacagatacttccgcctggtggtgaagacagccctgaagctgctgctcgt

SEQ ID NO: 844809 - DNA, 100 bp, Homo sapiens
gttttgctacaaatggaggaggaggaggacgacgacgatggggatatcgcacgtcagctaactgttcagatgatgcaaaatcctcagattcttgcagccc

SEQ ID NO: 844810 - DNA, 98 bp, Homo sapiens
aggcagcgcgggatcccagcctcaggcgtgcgcggacggtgtgcggggttctacgccagccagtggacaggatttactttgcaggcaccgagactgcc

SEQ ID NO: 844811 - DNA, 99 bp, Homo sapiens
aaaacatggtggattactatgaagttctaggcgtgcagagacatgcctcacccgaggatattaaaaaggcgacacatgacggaagtgtgtatttttggg

SEQ ID NO: 844812 - DNA, 100 bp, Homo sapiens
ccaacttgaattaatgcctcacatgtgtcgggaacatgccctgtgtgccgccgtcatttcccacctgcggttattgaagcatctgcagctccttcctctg

SEQ ID NO: 844813 - DNA, 98 bp, Homo sapiens
gagaggatttgcttttgtaacttttgatgatcatgatacagttgataaaattgttgtgcgccaatctgcagaacgccattgcggatgccgagcagcgt

SEQ ID NO: 844814 - DNA, 98 bp, Homo sapiens
tggcacgtcacttccgactagtggagtttttagccttttaacattcaaggattaggtctgacctacgagaaacatggcaaccagcgccgtccccagtg

SEQ ID NO: 844815 - DNA, 100 bp, Homo sapiens
ggagaagctgggattggagattccacccaaacttgctggtcactgggagcaccgaacaagatttgtgatgaaatggagcctggaacaaactcttttcggg

SEQ ID NO: 844816 - DNA, 100 bp, Homo sapiens
cccacctcctggaatgaccttaaatgagaagagtgttcaaaattcaattacacagtttcaggctctgtataactatactcccaggaatgaagatgagctg

SEQ ID NO: 844817 - DNA, 98 bp, Homo sapiens
tctggagcaggacttctgaggctttctatcctccatgctgctcactagaaaaggggctgtgaactgtgtccctggccagtgtccttccacctgtccac

SEQ ID NO: 844818 - DNA, 98 bp, Homo sapiens
tgtacactgaccttcgagatggacggatgctcatcaagctgctggaggtcctctctggagagaggctgaaagaagattggcccatgcacaagctggaa

SEQ ID NO: 844819 - DNA, 100 bp, Homo sapiens
cggaccccgcgtgcgccttgctcgcccgcagccccgagaccgcaggccccctcttctctcctggaggtcagccggccccttgtggctctcaggccagctg

SEQ ID NO: 844820 - DNA, 98 bp, Homo sapiens
ggtgaaaggagcagtagatgatgatgtagcagaagctatcggcaggaccctcatcccccgttactttagcactgtgtttgaaggaggggtgaccgacc

SEQ ID NO: 844821 - DNA, 98 bp, Homo sapiens
agctcctggccctggccctgatcatcctgctgggcttcgtccagatcgggaaggggaccttaaaccggaaaacattttgttaaatgaagatatgcaca

SEQ ID NO: 844822 - DNA, 98 bp, Homo sapiens
cctacggcttctccgccatgcaaggctggcgcgtctccatggagcaagttgtcctcgaagaaggtacaattgcttttaaaaattgggttaaaacaggc

SEQ ID NO: 844823 - DNA, 100 bp, Homo sapiens
ttaccatgccctacgcccactgcaaagggatcaagtttgtggttctagcagatcctaggcaagctggaatagattctcttctccgaaagatttatgagat

SEQ ID NO: 844824 - DNA, 99 bp, Homo sapiens
acaagtcggcgccccagagcggacgagacaagttggatggcttgaggactggtactaaaaggaaacgtgactgggaggccattgccagcagaatggagg

SEQ ID NO: 844825 - DNA, 99 bp, Homo sapiens
gctccgtttccaccctcggcagttgtacctgtccgtgaagcagggcgagctgcagaaggtgatcctgatgctgtgagcctgactacggggccctgtatg

SEQ ID NO: 844826 - DNA, 99 bp, Homo sapiens
ttgcctaaatgaggaatgtctttcctaccatctaaaatacgaaggtttctggctgggaatgtatcctgtcaggtataatgtcagtgaatggcaagaaag

SEQ ID NO: 844827 - DNA, 98 bp, Homo sapiens
atccaccttctcacggccagggccaccaactcccaacttttccggagagctgtgctgatggttctcttattcaagtaccttccgttgagagggggaaa

SEQ ID NO: 844828 - DNA, 99 bp, Homo sapiens
aagaaagcagaagggaagctgagtaactccaacagcaaagatggaagttggtgaaccatctaaagaagagaaggctgtggccaagtatcttcgattcaa

SEQ ID NO: 844829 - DNA, 98 bp, Homo sapiens
ggagactagagacgctaagagttgcgtttgacagtgctctggaagacctacctaagagtggacctcaccctcctgcaactcctcaggtgttaactatt

SEQ ID NO: 844830 - DNA, 100 bp, Homo sapiens
gaagctatgcttggcagcagaaggatttggcaacagactttgtttcttggagtccacttccaattccaaggctacagaagaagtttccaaaaatctggtt

SEQ ID NO: 844831 - DNA, 98 bp, Homo sapiens
ttcaggaacctatgtctgtacagcttcaaatgaggctggaagcagctcctgctcagccacagtcactgtcagagttttgagtatccgaggagcccagg

SEQ ID NO: 844832 - DNA, 98 bp, Homo sapiens
gggccgtgcgctctcgggccactcggccgcagaagtgcctagctgccactccatttatatgaggcaagaaggcttcctggctcatcccagcagaacag

SEQ ID NO: 844833 - DNA, 100 bp, Homo sapiens
gttaactatggtagcccacccagcattggttgctccttgagggcaggacagttcttatggctttatccgttgcgtaagcacagagaggtctgcgaggtca

SEQ ID NO: 844834 - DNA, 100 bp, Homo sapiens
ctcattcggacaaacgcctgtggttttgtagtgcatccctgagcatgagcacagaatgaagcggcgtttggatgaccaggagtcaccggtgtatgcagcc

SEQ ID NO: 844835 - DNA, 100 bp, Homo sapiens
tgtgacggtgcccacctcgtggggtgtgtgagggccgagtgaaatcgtgcatttgcgactacaaggcttttgaagaagcagctgaacacttccagcctta

SEQ ID NO: 844836 - DNA, 98 bp, Homo sapiens
gatgtggactgcagtgctgcagtgccagtatgaaaagacacagactgtactctcagaactgaagttgaagtttgaaatgactgagcaggaaaagcagt

SEQ ID NO: 844837 - DNA, 98 bp, Homo sapiens
caatcttgggattctcccttcgtgcggttgtctgggacctttttccagggtcaaagcagatcgtgaggaggaagctgaaaaggcaacagatggctccc

SEQ ID NO: 844838 - DNA, 100 bp, Homo sapiens
tcaatgtctggaacatctgtcccttgttcaaagatgctgagcacctgaagaccctgtccctgtcctacaacgccctgggagcccctgccctggccaggac

SEQ ID NO: 844839 - DNA, 99 bp, Homo sapiens
ccaggcagcccagaaaccccagagtacaggggctcaggtccaggtggcaggggatatgctacccaactcaactgagcgggccatcactattgctggcat

SEQ ID NO: 844840 - DNA, 100 bp, Homo sapiens
ccaaggaagaggacatggaggtggacatacctgctgtgaaagaatccaactgccagatgagaacattggacagtgggatcggaacctttccactcccaga

SEQ ID NO: 844841 - DNA, 100 bp, Homo sapiens
ctgccggtgacatctgtactacatcctggcagctgagcccagtctggcagcaggcagttgtgaaaaacttcaggacaaaaatgtttcatttaaggacttg

SEQ ID NO: 844842 - DNA, 100 bp, Homo sapiens
cacagcttctagtgttgctttggatcttgtggaaagtcagaaaccttctgaggaaaggaggccatacagaaattgaacctcagcacttctgtcaagcttt

SEQ ID NO: 844843 - DNA, 100 bp, Homo sapiens
gaggaatctgcccaagcacaattccaggaaggcttctgtacctaagaaggcaggtcttgaggatgccaaggcagtacctgaagcaccggggacagtggaa

SEQ ID NO: 844844 - DNA, 98 bp, Homo sapiens
tttggagccagcctgctaggggctgaattctgactcagccatttactaactgtgtgaccttagcaatggctgccatccggaagaaactggtgattgtt

SEQ ID NO: 844845 - DNA, 98 bp, Homo sapiens
cccaaagatgagatttacctgtgagatgtttcatcccaacagccagatggggactgtgcatcttcccttaatggtggaaatattaaaggcattgaagg

SEQ ID NO: 844846 - DNA, 100 bp, Homo sapiens
gttccaccagcaaccatgagtggttccatgatgggaagtgacatggtgacttaagagattaaaattaatttggttgctgttggttctgaacaaataatga

SEQ ID NO: 844847 - DNA, 100 bp, Homo sapiens
ccagggtcttctaagtcagagacatcaaaacctggaccttctggattacaggccaaattagcaatacatgttggatgctgctaggaatttgcaacccaat

SEQ ID NO: 844848 - DNA, 100 bp, Homo sapiens
tttggaatacgtacaggcacatttaactgttccagtgatcccaggtgacagtatgttgactgctgtctctgtggccagagattgtggaatgattctacct

SEQ ID NO: 844849 - DNA, 99 bp, Homo sapiens
gtggtagcattcgaatgcctgctttcttcaatggtatatttggacacaagccttctccaggataccatacttgcagagctccttcagatacataaagaa

SEQ ID NO: 844850 - DNA, 100 bp, Homo sapiens
gaggatatgtagcgaggaggaacgcgctaaggcaaagcacctgctgaaactagaggaccgttctgtggtgccccgagatgtggtccggcacatgcgatcc

SEQ ID NO: 844851 - DNA, 100 bp, Homo sapiens
atcgcgatgttggtgagcgtggggaatctggaagaggctggggagtctgtgtccttccagctgcagatacggagtttcacagattccttggtgtctttct

SEQ ID NO: 844852 - DNA, 101 bp, Homo sapiens
ccgccatcgatgcatcccagacccccgatgtcgtgttcgcaagcatcctagcagccttctccaaagccacatgagatcagctggttccaggagtcccaggc

SEQ ID NO: 844853 - DNA, 98 bp, Homo sapiens
ggaaggggccagagtttacaaaagattttgcaccagttatagtggaggcttttaagcatgtttcaagcaacttgtactggacagactggaatagagaa

SEQ ID NO: 844854 - DNA, 100 bp, Homo sapiens
ctgccttgaataaaagctccctcaggcctccccagaaaaagatgctgccatgcttcctgtacagcctgcagaacagacttcagaaatgggcttgggaacc

SEQ ID NO: 844855 - DNA, 98 bp, Homo sapiens
cgtctctcgagtcatcaggctacagcatcatcggatcgcccagattatgtttgagaccttcaacaccccggccatgtacgtggccatccaggccgtgc

SEQ ID NO: 844856 - DNA, 100 bp, Homo sapiens
acatatgaaggactcattgatgaaatttatggcattcagaacaagaagttgatgacgcctgagatgttttcagaaatcctctgtgacgatctggatttga

SEQ ID NO: 844857 - DNA, 100 bp, Homo sapiens
ccagggagttctgacagctctgcgtctcagctgcaagctttcttcctggtggcagatgacatcatggattcatcccttacccgccggggacagatctgct

SEQ ID NO: 844858 - DNA, 100 bp, Homo sapiens
aagggagatgccctgcccgttgccctgtgatgaagaaagtgatgatgtaaaatctaaagattacattgttgcactacagcaccctgtgaccactgacatt

SEQ ID NO: 844859 - DNA, 98 bp, Homo sapiens
tgaaccagtattcttaaattgatttcaagtttgaacaagggctcaaaatttgggcggggaactggactcactcagccttctcaacgcacgtctgctcg

SEQ ID NO: 844860 - DNA, 100 bp, Homo sapiens
gcagctacacagttccaggctacatgcaggacttggaggtggagcaggccctgactccaggaatcagagatcattgatttcttcctgggggcctctctca

SEQ ID NO: 844861 - DNA, 98 bp, Homo sapiens
caagaggacccaggagaaattcgccctcaaagatgggtttgtggagttcttccatgtagaggacctagaaggtggcatcaggaatgtgctgctggctt

SEQ ID NO: 844862 - DNA, 100 bp, Homo sapiens
ggagtttcggctcagtggggaggccttcgactggctgcttggggagattgagtccaagttcaaccaagccatttgcagctctccggctgggatcctggtt

SEQ ID NO: 844863 - DNA, 98 bp, Homo sapiens
gttgtcttcagaagcaagcagcatgggggcgccacagggtcgactcatggatgatacctctattgctgctgcatgatgttcaagaccggcccttggct

SEQ ID NO: 844864 - DNA, 99 bp, Homo sapiens
gccgccaagatggagaagaaggtgtctaagcgctcgcggaaggaggagtgagtgttgaaaagatagacctgaagggattatcacacacaaaaaatgaca

SEQ ID NO: 844865 - DNA, 98 bp, Homo sapiens
tgcctcaggccagtcgcctccaggccaagagggatccttcacccgtgtctggacagctactaaagcttatccacagtctccaaagacaacgaaacctc

SEQ ID NO: 844866 - DNA, 100 bp, Homo sapiens
acgacagcaacccgaagacagggaaatttagaaaattggcaacttctccatcgtgcggcggcttggcgtgcaggagtgcattctcctggttacacaacgc

SEQ ID NO: 844867 - DNA, 98 bp, Homo sapiens
cctggcggccggcttggagaggccgagggtttgatgaaggtggaggcagcgcggctctcagatccagcacacggaagacatggagaacgagatcgacg

SEQ ID NO: 844868 - DNA, 98 bp, Homo sapiens
ggtcttagaatacattccagaaaatgtatcaagtactatactggcaattgctggagaagattttgcaattgttgcttctgatactcgattgagtgaag

SEQ ID NO: 844869 - DNA, 100 bp, Homo sapiens
aaggagaggcggtcccggtgtcctcgggtcccagatgaggacggggacttggttgccttttccagtgacgaggaattgacaatggccatgtcctacgtga

SEQ ID NO: 844870 - DNA, 98 bp, Homo sapiens
ctgatgatgggagtgctggggcccctgtctattgaccccaacatgttgaatgcacaaaagcaacaggtccaggacagtcattttgtttactcattcag

SEQ ID NO: 844871 - DNA, 98 bp, Homo sapiens
tccctggcagtttacatattcacttgatgcagctttctcaagatatccatttggggatgaagtctactttgacagctagcaaggcgacatgcaactgt

SEQ ID NO: 844872 - DNA, 100 bp, Homo sapiens
gaacaagcttccagacccactccggcatcacctgcccttgaagttgtctgtgagacggaagttttactaaaagagctggagcaaatgctgcagcaagcac

SEQ ID NO: 844873 - DNA, 98 bp, Homo sapiens
aacagaacagtcgaacctttcccagagggaacacagatggctgtatttggattaaagcaaggagagccaatcatgactggcaaaacacagaccagcaa

SEQ ID NO: 844874 - DNA, 100 bp, Homo sapiens
agctagttcctctccagctcagccgcgtaggcaggatggggaagcagaatagcaaactggcccctgaagtgatggaggacctggtgaagagcacagagtt

SEQ ID NO: 844875 - DNA, 100 bp, Homo sapiens
cctcggaactgtgtggcctctcttccctgcgggacctcaatgtccggaggaaccagctcagtacgctgcccgaaggtgcgcgcggagccatggttatcat

SEQ ID NO: 844876 - DNA, 100 bp, Homo sapiens
agatgggaccacatcagtaattattcttgatgccgcatcctcgaaggtaccactcctcagagcgaggcagccgggggagttaccgtgaacactatcggag

SEQ ID NO: 844877 - DNA, 100 bp, Homo sapiens
tcctggatccagatgatgtcttggcagatgttgttgaagataaagacaaggttggaagctgtgtactgtgggtgttacccactttgtcctaaagatttgg

SEQ ID NO: 844878 - DNA, 100 bp, Homo sapiens
ttatggagcatatattatggaacacacacttttccagccattaactccaggctctcgagaatttgaagatgttgtaaatattctccattcttcttacctt

SEQ ID NO: 844879 - DNA, 98 bp, Homo sapiens
cctggatattcctaaaatgttggatgctgaaggctcaagaccacctttaatcctacaatctcagtctctaccttgttcatcacctcgagatgttccac

SEQ ID NO: 844880 - DNA, 100 bp, Homo sapiens
gccgacccgccgagcaaaatggcttcagggatgacttcttagggggcaggggaggtagtcgcccaggcgaccggcgaacaggcccccccatgggcagccg

SEQ ID NO: 844881 - DNA, 98 bp, Homo sapiens
ccgggcagtgcggcaaccaaatcggcgccaagcttcagtgcgatcaaagttctacgtgcgagagccgccgaatgccaaacctgactggctgaaagttg

SEQ ID NO: 844882 - DNA, 100 bp, Homo sapiens
tacccagcatgcctcggtcctataagatgagtcctgccggcggtgaccatcttccaacatagggatatacctccctccttcttataactgaagatcctgg

SEQ ID NO: 844883 - DNA, 100 bp, Homo sapiens
ttcaaagccacttgtggctaaagatccatttggtgaccatagccgatgactactcagatccctttgatgccaagaatgatctcaagagcaaagcaggaaa

SEQ ID NO: 844884 - DNA, 100 bp, Homo sapiens
cagactagccactttgcattgactggaaacaatggcatttacagaaagagtcaacagcagtggcaacagcatgtgcagtctttgccaacaaaaaaaatta

SEQ ID NO: 844885 - DNA, 98 bp, Homo sapiens
ttaccaggttttttttatcgctgccttgatatacacttttcaaaatgctttggtgggaagaagtagaggactgttgggcggagaaactcatcatccac

SEQ ID NO: 844886 - DNA, 100 bp, Homo sapiens
cggggaggcagcggaaggcggcagtgcgtatcacggccacctgagctccctgattgacatcagtccctacaagttccgcaacctggatggccagaaggag

SEQ ID NO: 844887 - DNA, 100 bp, Homo sapiens
caggaaaccaacagtcacacatgtacattacagctggctcatcgccatcctggcgcagctgaaccccctgttcgggccccagctgaagaatgagaccatc

SEQ ID NO: 844888 - DNA, 100 bp, Homo sapiens
gaatgttcttttgttagtgacaaagatgcaagcctggcattttttgatgattgtgtagataaagctgtatcacctgctctgcgctcatcaaaaatgcctg

SEQ ID NO: 844889 - DNA, 98 bp, Homo sapiens
ggatgttctcatcgtccctgccaactttccaagtctggggatggccaggtatccagctcacatagaagacattgactacgaggaaggaaaagtactca

SEQ ID NO: 844890 - DNA, 98 bp, Homo sapiens
tcccattcccatctccacgacagcacctccagtccagacccctctgccggtgatccctcaccagaaggttctcctgaaaagaaagctgaacattcatc

SEQ ID NO: 844891 - DNA, 100 bp, Homo sapiens
ttcttttcaatacatcctaaaacagaatttcagtatgattgtaggcaatgccactgaggcagctgtgtcatccttcgtgcaaaatctttctgtcatcatt

SEQ ID NO: 844892 - DNA, 100 bp, Homo sapiens
aaagcggcactattggcgcctggactgcaagtgtatcacgctcttccagaacaacacgaccaacagatactataaggagaggcaagagaaagctctgggc

SEQ ID NO: 844893 - DNA, 100 bp, Homo sapiens
gctgctggagcgcgtggaggagccggtgctgcagaaccagatccgggagcacgtcatcgccatcgaaggcaccatgcgggctgtgcggagacacctgttc

SEQ ID NO: 844894 - DNA, 98 bp, Homo sapiens
ctgaggcggcgagagatggtcaggtctggagctcgaccgggccagtgttgctaacaaccacaagcagaatttgatgacggtggcaaaccttggtgtgg

SEQ ID NO: 844895 - DNA, 100 bp, Homo sapiens
cgtcgagatgtctacttcgaagactggcaagcacggccacgccaagggggatgttggcctccctggcccagcaggacctccaccatctactggagagctg

SEQ ID NO: 844896 - DNA, 98 bp, Homo sapiens
atttgatcctacttggaatccagccaatgatcttcaagccattgacaggtgcaaatatatacagagcttcataatcagcccaagaccacatagagcaa

SEQ ID NO: 844897 - DNA, 98 bp, Homo sapiens
tggtggactacctggtgcctctagtgaaaagaacaagaagtcttaccctcaggtcaaaatggtcagtaggacagaaggtaacattgatgactcgctca

SEQ ID NO: 844898 - DNA, 100 bp, Homo sapiens
ccgacgggcatgccaagaagatgagaccgggggaggcgacgctaagttgctgatcgtggcgaacaagttgaaatcatcgcagaaggataaagttcgtcag

SEQ ID NO: 844899 - DNA, 100 bp, Homo sapiens
caaagagcaaacagattcagtggcctgcattgctgacatagcccagagatacaggataagcaaatacccaaccctcaaattgtttcgtaatgggatgatg

SEQ ID NO: 844900 - DNA, 100 bp, Homo sapiens
tcattgcacagctcagccagcagtccttggacttcgtaaagatcatcaccatcctaaggcgcttacagctcaatgctaatcaggccttcttcctgttggt

SEQ ID NO: 844901 - DNA, 100 bp, Homo sapiens
gcatgaaggacagcctcttctcaatgctcagcaaaacccagcagctcagattcctgccaggcagcgggagattgaaatgaaccgacagcaacgcttcttc

SEQ ID NO: 844902 - DNA, 100 bp, Homo sapiens
ttcttatccggactgggatattaaatatacgacacatccaggagtttattggagcgcagactgatggcgcaaaggatggtcagtaggacagaaggtaaca

SEQ ID NO: 844903 - DNA, 98 bp, Homo sapiens
gaaagagtacgacttccacctgctgcccagcggcatcatcaacaccaaggccgtgtccttcattggagtggtatgaggagcatgccagggagcaagag

SEQ ID NO: 844904 - DNA, 99 bp, Homo sapiens
aacgacgttccatctgtggaaggacctaccaaccaggggggacacagcgattgccacgcgccattggaatgtccctggccaaggagctcatattctctg

SEQ ID NO: 844905 - DNA, 100 bp, Homo sapiens
tgatactttaggtgaaggagcttttggaaaagttgtggagtgcatcgatcataaagcatcctgtcttcagctgggtcagagaaaacttcttgactaaaac

SEQ ID NO: 844906 - DNA, 100 bp, Homo sapiens
gttctactccaacagctgctgcttgtgctgccatgtccgcaccggcaccatcctgctcggcgtctggtatctgatcagccaaatggccgatgacacagtg

SEQ ID NO: 844907 - DNA, 100 bp, Homo sapiens
acgaggagtatgcttgcatgaaagcaattaacttcctaaatcaaggctactgtggagccgatatcaaggccctgtgcactgaagccgccctgattgcact

SEQ ID NO: 844908 - DNA, 100 bp, Homo sapiens
tgctccagcgagaggccagcaagttacggctagatgaggctcaagaagcagaatgccaggccttgaggctacagctccagcaggaaatggagctgctcaa

SEQ ID NO: 844909 - DNA, 100 bp, Homo sapiens
accagatatccacattgacagctatggtgaaaattatctaagcttcaccctgaccatggagagtgatatcaagtaacaaatgtggcaattattttggatc

SEQ ID NO: 844910 - DNA, 99 bp, Homo sapiens
cctgctcctttgctcagatggatgttcgccagcatggtcatccccaggactacaaatccctccaggatatcattgccatcctgggtatggatgaacttt

SEQ ID NO: 844911 - DNA, 100 bp, Homo sapiens
gccgcgccgcccggcagcctcggcagggacccagacatggagctgcgggaagaagcctggtctccggggccgctggattctgaggaccagcagatggcca

SEQ ID NO: 844912 - DNA, 98 bp, Homo sapiens
gcccaagaaaggacatcttatctttgatgcttgctttgaaagtgactgcgccatggggctcagcgacggggaatggcagttggtgctgaacgtctggg

SEQ ID NO: 844913 - DNA, 50 bp, Homo sapiens
tgacgaggagtcctggatcaagatgttttagaagaatgtatgtctcttcc

SEQ ID NO: 844914 - DNA, 99 bp, Homo sapiens
tcttacgtctgcggaagtgcagctgcctcagttcttagcgcagtgaggagctggtttcacctgaggacctgctggagtggctgcggcctttctgtgctg

SEQ ID NO: 844915 - DNA, 100 bp, Homo sapiens
ccgctttccgggagactggagtcgaaggccgtgagttgttgacctcctgtactggagagacattaagaagactggagtggtgtttggtgccagcctattc

SEQ ID NO: 844916 - DNA, 100 bp, Homo sapiens
gccgggcgtcttctgagagtcaggatttgctcgaatatttgggtacccagtaggtatcgttggaaacaacggagttctcttttctgaatctgcaaaaaag

SEQ ID NO: 844917 - DNA, 98 bp, Homo sapiens
ccaaaggattgcttcgaaaccttcgacttccttcagggtttaggagaagcactgttgttttccacacaggatcttcagcctgttaaacaagaaaacga

SEQ ID NO: 844918 - DNA, 98 bp, Homo sapiens
ttccaatgagtatggcagtgtcagctgtacagccacactaactgtgacagttacagccaagttctacttctgaatctatggatcaactactaaacaaa

SEQ ID NO: 844919 - DNA, 100 bp, Homo sapiens
tttgtttctgctgaccgcgggccctgccctgggctggaacgaccctgaatcttttagctgaaaaagtagagcagctgatggaatggagttccagacgctc

SEQ ID NO: 844920 - DNA, 100 bp, Homo sapiens
gccagcctctgcatgtgcttcgggcccaagacccttgaacatctgtgaagaaatgactattctgcatggaggcttcttgctggccgagcagctgttccac

SEQ ID NO: 844921 - DNA, 134 bp, Homo sapiens
aacgatctgtggtggaagcagcagtccaggaatgcagtcagtctgttgatgaaactatgaaatgctgaatgttcatgatcattatcagaacatgaaacatgtaatttcagttgataagtccaagccagataaag

SEQ ID NO: 844922 - DNA, 134 bp, Homo sapiens
caacatccacagccggaccgtcacccgctatcctgccaactctatcgtggtcgtaggaggctgtcctgtctgcagtgcttgaatttcagccacatccctaagctgccatctcagaccagaggaacagggagggg

SEQ ID NO: 844923 - DNA, 100 bp, Homo sapiens
ccgctctgggatcccggccaccagcaattgtccggaagccagttgagggaagttctccatgaatgtacgtcacaatgatgatgaccgaccaaatccctct

SEQ ID NO: 844924 - DNA, 100 bp, Homo sapiens
agaccgcgtccgccccgcgagcacagagcctcgcctttgccgatccgccgcccgtccacacccgccgccaggctccagtgcgttcggggccccgcccggc

SEQ ID NO: 844925 - DNA, 98 bp, Homo sapiens
cttaagacatttgtccttgaaactgcaccaaactcttggaagaacccagaacgtggaagctatgcgaaattatttaaaagagcgaggggatcaaacag

SEQ ID NO: 844926 - DNA, 100 bp, Homo sapiens
atgtgaagtagatgataaagatgatgatatccttctcaaccttgtgggatgtgaaaactctgttactgaaggtttgtggtaaatatgccagctctagaac

SEQ ID NO: 844927 - DNA, 98 bp, Homo sapiens
tcctgtcaagatgaaccatttagagatcctgctgtttggccaccccctgttcctgcagaacacaggtgaaaggtgtagcagtcactcggcctacaccc

SEQ ID NO: 844928 - DNA, 98 bp, Homo sapiens
ggtgatgattagagacatactaatgtacatgtgaagcgtgacattcaggaaaacgatgaagaggcagtgcaagtcaaagagcagagcatcctggaact

SEQ ID NO: 844929 - DNA, 101 bp, Homo sapiens
ctgcctggaaataaagtttctgagcatccctgcaatgaagagaacccagggaagttcctttttgaagtagttccagggtatcaagccagcaaaccggatgc

SEQ ID NO: 844930 - DNA, 99 bp, Homo sapiens
catccgctcccgccgagacatccgctccttgcccgagaacatccagtttgatgtttactacaagagctcttcagaaaccaggctgctttcaggaacatt

SEQ ID NO: 844931 - DNA, 100 bp, Homo sapiens
cgccgctgtccggagccccacagatgccatggacaatattaccaggcagaaccaattctacgatacccaagtcatcaaacaagaaaacgagtcaggctac

SEQ ID NO: 844932 - DNA, 100 bp, Homo sapiens
gtggagcttggtttcgggatctcggtgctgcagacggcgagacctcctgcacaggttaaagctgaagctcaacaaagatatagtgatctctgtgggcatt

SEQ ID NO: 844933 - DNA, 101 bp, Homo sapiens
gatcaagatcagctccaggcctgggaaagtgaaggaggagatgttaaagtaacccatcttgcaggacgacattgaagattggtcttctgttgatctaagat

SEQ ID NO: 844934 - DNA, 100 bp, Homo sapiens
tgaagattgtcagcaaaggaagagatggattgccaacactcctgatagctgaatgtgtgctggtttacatgactccagagcagtccgcaaacctcctgaa

SEQ ID NO: 844935 - DNA, 100 bp, Homo sapiens
gggactggttgaccaactggtggaacccctggctgccccagtgctcagctgtgaagctgcaacacagactgaaaggagactggatctggctgcagtgact

SEQ ID NO: 844936 - DNA, 100 bp, Homo sapiens
tgaagagttcaactttcccagaagttgttctaacgctgcctttgctttaaaacagtattacttgcggcctactgaacttgacgcactggtatttggccat

SEQ ID NO: 844937 - DNA, 100 bp, Homo sapiens
gcccccagcagagcagggctgagaggcctggctgagcccctcccgctcaagacagaactgagagccccccaggcatcatgagcgtcttggacgacgtgtg

SEQ ID NO: 844938 - DNA, 100 bp, Homo sapiens
cggcgacagctaacggggacgacagggaccccgagatcgagctctttgtgaaggaatgaggggagaatcatacttcatcggaatgaggagcccagggcag

SEQ ID NO: 844939 - DNA, 100 bp, Homo sapiens
atcgaatcttcactcccgctgtctcagcagtctacagcacgaacacttcagttatggaagatcaaaatgaagatgagtccccaaagaaaaatactctttg

SEQ ID NO: 844940 - DNA, 98 bp, Homo sapiens
cggactactgcagtggagcttgactcttaatgttttcaaaaggtacatgggaaatactcctcagaaaaaagccgtctttgggcagtgtcggggtctgc

SEQ ID NO: 844941 - DNA, 100 bp, Homo sapiens
ccattagatttaaagatctcaaaaactttcatgtagacctttgtcgtccatttgctgctcactgatggccaaatgtgatgcttgtaagcgacagggtaaa

SEQ ID NO: 844942 - DNA, 100 bp, Homo sapiens
gggactgccagaggtggaggggaggattttgaggacacttgtggagagctcgaattccagaatgatgaaattgtaaaggaagaggttttatcagaatgtc

SEQ ID NO: 844943 - DNA, 99 bp, Homo sapiens
tgtaatgggcaaggagccacaaagaagaaaacatttcttttaatttttaaacttggtttgaaaggactcagtctcctttgaggatgtggccgtgaactt

SEQ ID NO: 844944 - DNA, 100 bp, Homo sapiens
cacccgcccgcccaaggtctctcgcgggcgggagaacggaaaactcccaacttcctgggaaaactgaggctgccatcaaaaacttcagtccctactacag

SEQ ID NO: 844945 - DNA, 99 bp, Homo sapiens
gtaggagcgcgggggcggctcctgctcttcctggactcctgagcagagagacatctgaacagctgacccctgaggaagaggctgaggagacagaggcct

SEQ ID NO: 844946 - DNA, 100 bp, Homo sapiens
agtcagagggaattgttaagaaggtaaaccccacagcccagtgtacccatgccctgttgaagatgatctactgctcccactgccggggtctcgtgactgt

SEQ ID NO: 844947 - DNA, 98 bp, Homo sapiens
tgtgatccagtaaaccgactctggtactgtgacctacagcaggaatccagtggcatcgcggggattaatgaaaatcaagttccatcctcagacaagag

SEQ ID NO: 844948 - DNA, 99 bp, Homo sapiens
ttctttctcgctgatcgcctaacttctactgacgaagcttggaagttgcagaaggagtacaagcgcaagctagccagagtttccctggtgcgcaaagaa

SEQ ID NO: 844949 - DNA, 99 bp, Homo sapiens
cacgctcctcggaccaagcctcgggagctaaggtttgtaaccagattcatcgacttggatggcctatcatgtatcctcaactttctaaagaccatggac

SEQ ID NO: 844950 - DNA, 100 bp, Homo sapiens
ctcaacccagaggaatcgttactctttcaggcatattctcaagatgcctacctgaaaggcaacgaagcttatagcggcaatgcccgcaatatacctgaac

SEQ ID NO: 844951 - DNA, 100 bp, Homo sapiens
acaccgcctacaggagtatgatgcaagcttgcctgggaccagtggcagggaccccggaacctgaaggtgctgacaaagatgacctgctgctgttgagtga

SEQ ID NO: 844952 - DNA, 100 bp, Homo sapiens
cttgaggcgaatggccgaatctctccggcttgagtttgaagaaacagaagaacctgattttactgcattatgtcagaaattaaagataccagatcatgtc

SEQ ID NO: 844953 - DNA, 100 bp, Homo sapiens
ggtctgttgtgctggcttggtgacgctcacagtgctgggaaggaatctatccaagggttacacatcattttggaatgactgtatatcatctggattacgt

SEQ ID NO: 844954 - DNA, 98 bp, Homo sapiens
tggaatggtgaacactgcaccattggtaggcaaacggcaggcaccgaaacagtatggtgactacgaccccagtgttcacaagcggggatttttggccc

SEQ ID NO: 844955 - DNA, 98 bp, Homo sapiens
aagagtcaacagcagtggcaacagtcaagaagacatctctttacacctgctgataagagaatccctcgaattcgcatagaaaccagacaggcttccac

SEQ ID NO: 844956 - DNA, 116 bp, Homo sapiens
ctacagctgcattcactgcagagctcacttggccaatcatgatgaactaatttccaaggggccctcctcgccaaagacagcctagagaggacggcaatgaagaagataaagaaaat

SEQ ID NO: 844957 - DNA, 99 bp, Homo sapiens
gacactgtctgtgatggaggactctgcccaggaggtaaaaggtgctcctttgcctgggtttgaattccagcgctgccacttcctctctgcacctcctgg

SEQ ID NO: 844958 - DNA, 99 bp, Homo sapiens
tctcatctcgctcggctgcgggaaatcgggctgaagcgactgagtccgcgatggagggctggtgaattaccatatctccgtcaagtgcagtaaccagtt

SEQ ID NO: 844959 - DNA, 99 bp, Homo sapiens
gccgcctggactcagagctgagaaacatgcaggacctggtggaagacttcaagaacaatgtggcaaaggagcagagaactttgacaagttcttcacacg

SEQ ID NO: 844960 - DNA, 99 bp, Homo sapiens
tgagagctacaacttggagaatggaaaagaaccattgaagcttgagagaaaagcccccaaaagcagctattcagttttttcaagggggaacatggcaaa

SEQ ID NO: 844961 - DNA, 51 bp, Homo sapiens
ctggtggatctgcagtacgaagaaatgggacgtcggtcatcagatactgaa

SEQ ID NO: 844962 - DNA, 100 bp, Homo sapiens
agcatgcatctgatgctctctctccagtccttgctgaagagactttccgttacatgatgtgggactacaatactggcagagtgggagcaccattagtttg

SEQ ID NO: 844963 - DNA, 100 bp, Homo sapiens
taagcaagcatctaaaaagactgcaatggctgctgctaagcttttctgaagctcagcagcagctatgcaacaccagacaggaagtgaatgaattaaggaa

SEQ ID NO: 844964 - DNA, 100 bp, Homo sapiens
atatgtatcagcaatatgctgcatttaaaagatggcattttgaaaccctggaatattttccaagtgaactaggttctcttggttacaaactccttccctt

SEQ ID NO: 844965 - DNA, 99 bp, Homo sapiens
taatggagaccaaaagtatgttgtaccttgtgacagaatatgccaaaaatggagaaatttttgtactatactggcaattgctggagaagattttgcaat

SEQ ID NO: 844966 - DNA, 100 bp, Homo sapiens
ctggaaaacctgtatcttctgatgggaagggaactggaatatctagaggaggtacctccaggaaatgtgctaggtgacttaagagattaaaattaatttg

SEQ ID NO: 844967 - DNA, 98 bp, Homo sapiens
agaggtcaagatcagctctggctagatgatcatgacgcagtcctgaggtttaatggggcacccacagccaacttccaacaagatgtgggcacaaaaac

SEQ ID NO: 844968 - DNA, 100 bp, Homo sapiens
gtctgagaaagagccctaaagaagttgggctgactaagttgggagaagggaaggctggaggaactttgcatacaggggatgaacgtagggcacttagctt

SEQ ID NO: 844969 - DNA, 99 bp, Homo sapiens
ccattttcctgagttccctgatccccacacctacatcaaaactccgagtcaactactggattttctgtctggcaaacagtatgcagtaggtgatgaaac

SEQ ID NO: 844970 - DNA, 99 bp, Homo sapiens
caaggcgcgccactcctcccggaggcgacatggggcacccggtgtaccgcggcgagaagccccagctgcactacgcgaatcatgtcaaccctgccatgg

SEQ ID NO: 844971 - DNA, 100 bp, Homo sapiens
caagcgcaagttgcaggcaggcaagaagagtcaggacaagcagaaaaagcggcagcgagaccgcatggtggaaaggcgtggtgaccaagatgaagatgca

SEQ ID NO: 844972 - DNA, 100 bp, Homo sapiens
gggatatttgagagtccaactggcactgtttcccaggcagctgcagacttgaaacagttctgtctgcagaatgctcaacatgaccctctgctgactggag

SEQ ID NO: 844973 - DNA, 100 bp, Homo sapiens
aaacagagattcgggttctgccgcttatcttcaggagcgaagagctgcttctgtatcttaaggttaatccctatatcctgaagaagaacatgatcctcat

SEQ ID NO: 844974 - DNA, 98 bp, Homo sapiens
cggagacgagtggtgggagaaccagccgactggagcaggcagcagcccagtccctctgtcgtgaaatcaagcaacgacgtcgaggagttgcctccatt

SEQ ID NO: 844975 - DNA, 100 bp, Homo sapiens
tccaggcttctgcagcctccaaaaggatcaggcaaaaatgatcatgccgaaaaagtggcggaaaagctagaagctctctcggtgaaggaggagaccaagg

SEQ ID NO: 844976 - DNA, 100 bp, Homo sapiens
caggacccaggaattgcgccctccggcatttcatccgtccttggctcaggatttggagagcttgcaccaccaaaaatggcaaacatcaccagctcccaga

SEQ ID NO: 844977 - DNA, 100 bp, Homo sapiens
caactccaggcacgaggccagcctgaagttgtacaagcgtccaagccatatttcctacgccggatcctgctgctttaaaagacagacggatggaaaacct

SEQ ID NO: 844978 - DNA, 98 bp, Homo sapiens
aacttggaagcaccagatcaagatcatggaaagaagattctatatgatatacttgcctttgccaaagaaagtgtgaattctcatgttaccacgcttgg

SEQ ID NO: 844979 - DNA, 100 bp, Homo sapiens
cgcttactacggacagaccccaggtcctggcggcccccagccgccgcccacgcagcagggacagcagcagggcactttccctcatggtattgatattttg

SEQ ID NO: 844980 - DNA, 100 bp, Homo sapiens
catatttcttcactactggaattgttgtttctgcctttggatttcctgttattcttgctcgtgtggctgtggttgatgaaaaaaccgtaggagaacctgg

SEQ ID NO: 844981 - DNA, 98 bp, Homo sapiens
agggaagatctttttcctcaattgcaagctctattgccaagattggctcagatcctttaaaactggtacgtgatgctatggaggaaaccacggactgg

SEQ ID NO: 844982 - DNA, 98 bp, Homo sapiens
gaagactccctgcctcctgagtcccaatgttctcagtgcagctgagtcttggtgagcagacatgggaatccgaaggcagcagtataaagaaggctcag

SEQ ID NO: 844983 - DNA, 100 bp, Homo sapiens
ccacagtaaaaggaaagaagtgcattgttttggtgactgaacttatgacgtctggaacacttaaaacgaagatgatccctatgatcttgaagatgtttct

SEQ ID NO: 844984 - DNA, 100 bp, Homo sapiens
cttggagttcgcctcagacgcggtggagccgccggagtctgagaagtgcccactgttgatgtctttcagatttccacaaaagagcgatttggattgggac

SEQ ID NO: 844985 - DNA, 99 bp, Homo sapiens
gggacacacctccattggatttaaaagacagtcctcgtcagcactgactttcagctatggaatcggctcctgctccagcccagcccccagagagcagac

SEQ ID NO: 844986 - DNA, 98 bp, Homo sapiens
ttcactggtgaaggaaggacagaagccacacacattgggtagcctttccagtaaatatatgactcagggaaaagcctcagcgaagaggacccagcagg

SEQ ID NO: 844987 - DNA, 98 bp, Homo sapiens
ggacaagctggaagaggaaattaaccggagaatggcagacgacaataagctcttcagggaggaattcaacggccgttgctccagggagaactgcaaat

SEQ ID NO: 844988 - DNA, 100 bp, Homo sapiens
ctaatagacctaaagccacagtcttcaagagcccacggacaccacctcaacgtaagaagactgttagaatgccctcggtaacacagaggctgagagatcc

SEQ ID NO: 844989 - DNA, 98 bp, Homo sapiens
cccaatctgccggtgctgccctatgtccagatcttctatgacacgacaaaccactttctgcccctggaagctcttcgtgtggtgaagatcttacagaa

SEQ ID NO: 844990 - DNA, 100 bp, Homo sapiens
agccagactcagggatcaaagagcaaacagattcagtggcctgcattggtgccgacgccaccgccgagcccatgatcctggaacagtacgtggtggtgtc

SEQ ID NO: 844991 - DNA, 100 bp, Homo sapiens
attcgtctgtggaaacctacacccctccaggcagactgccagattcacttacagccccagctaattccaccaaacatggaggagtacatgaacagccttc

SEQ ID NO: 844992 - DNA, 110 bp, Homo sapiens
ggacaacctctttgaaattgtaacaacgtctcgaactttctatgtgcaggtcagcccaaggctgccccctcggtcactctgttcccgccctcctctgaggagcttcaagc

SEQ ID NO: 844993 - DNA, 98 bp, Homo sapiens
gatcagtgacttgtttgctagacaccggaccaaaatgaggcgtaagaaacgctttgcaaagcaaggtggtgttcccactgatgaagagcaggcgactg

SEQ ID NO: 844994 - DNA, 98 bp, Homo sapiens
gaagtgcaagtcgatcgaggtcaagaacacgatcacgttctagatcacatactccaagaagacaacattgtatgcaaacctgttccattctttcttcg

SEQ ID NO: 844995 - DNA, 98 bp, Homo sapiens
ttgcaacagtgattcacaggtgtttccctctttgaatctcccagatggacgtatcatcaaagttgggggagagagatttgaagcaccagaagctttat

SEQ ID NO: 844996 - DNA, 100 bp, Homo sapiens
atcatgtccgggcagctggagcgttgcgagcgcgaatggcacgagctggagggagaatttcaagaactgcagtgcggtcccccccgggtctggccaagac

SEQ ID NO: 844997 - DNA, 98 bp, Homo sapiens
ccagcccttttcaggacagggtcacagactaggaaggatgttttcactccagaatgcaaattcaaggaatctgtgtttgaaaactactatgtgatcta

SEQ ID NO: 844998 - DNA, 141 bp, Homo sapiens
gctatctagggacgagatctagaatcaactgagagagatgcttaaaaatcaccagttactttaatgaaggatgccagcccccatcagattgcgggagctgatccggaccatccggacagcccgaacccaagctgaagaacg

SEQ ID NO: 844999 - DNA, 98 bp, Homo sapiens
gatcaacgagaccctggtgatccagcagcgcggggtgcgaatctacgatggcgaggagaagatgtgtcttgctgaatcagggctctcttatccctgcc

SEQ ID NO: 845000 - DNA, 100 bp, Homo sapiens
cctgcctctccctgggctctgggtgtgtttgaccatcgaatgaagtgctggcagaaatgggaagatgctcaaattactttgctcaaaaaacgtgaagctg

SEQ ID NO: 845001 - DNA, 99 bp, Homo sapiens
tgagaatgctggcggaggacgagctccgggatgctgtactccttgtctttgcaaacaaacaggcccttcataacacaaggcttttatctgcttattccg

SEQ ID NO: 845002 - DNA, 100 bp, Homo sapiens
tgtaaatttgcacatccttcgaaaagctgccaagttgaaaatggacgagtaatcgcctgctttgattcattgaaactgtgatgcagatccatccgcccta

SEQ ID NO: 845003 - DNA, 100 bp, Homo sapiens
gaccgacgcgctgttgcccgcggccccccagccgctggagaaggagaacgacggctactttcggaagagctggaagtcgagtgtgctactcaactcagga

SEQ ID NO: 845004 - DNA, 100 bp, Homo sapiens
cagcctcagagtcagatgcagggatgtgatcttcgtggtggaaagctaaattttaaaaccaccccaatggatgcagacagtgatgttgcattggacattc

SEQ ID NO: 845005 - DNA, 100 bp, Homo sapiens
ggtgcaggtgaacggagccgccacggccgagacagcggctaacaggatatgtaaggttcttgctgtgaatcaagagaatgagaggctgatggaagaatat

SEQ ID NO: 845006 - DNA, 98 bp, Homo sapiens
gcaaagcagcaaatgcattccacgtgtatcagagcattggctgtgatgactacttaggctccgacaaagtcgtggacaaatgtggggtgtgtggagga

SEQ ID NO: 845007 - DNA, 100 bp, Homo sapiens
ctgatggccatggagaagagcaaggccacgccggccgcgcgcgccagcaagaagatcctgctgcccgagcccaggtactccaaagattcaggtttactca

SEQ ID NO: 845008 - DNA, 100 bp, Homo sapiens
cgcagatgctggagaagtccccttatgaccaggtagatatagttgtaggtactccgggaagactagatgacttggtgtcaactggaaagctgaacttatc

SEQ ID NO: 845009 - DNA, 99 bp, Homo sapiens
gactctattttacgccttcagacatgggacgaagcagtatttagggaaaaggagcctaaaatgacacgctctaaactgaaggaagtagtggaaaaagga

SEQ ID NO: 845010 - DNA, 100 bp, Homo sapiens
cgcacctcgtcaccaaggccaagctgagctgactgctgcccactttggaggaggcggtgggctccttcacaagaagactcaacaggaaggcgaggagcgg

SEQ ID NO: 845011 - DNA, 98 bp, Homo sapiens
tgcttcagccttgatgacggccatcttcccccggtccaccatggagcccttgtgtccactcctgctggtgggttttagcttgccgctcgccagggctc

SEQ ID NO: 845012 - DNA, 100 bp, Homo sapiens
tccaggagtacccgaccctcaagtgcacagccagagaacaacacatcacacacaggaaacagttgtgctcatgtgatgggggcctcagcactaggaagga

SEQ ID NO: 845013 - DNA, 98 bp, Homo sapiens
ggaattattgaaaaatctggatcttgctgtattggagctcatgcagtcttcagtggataataccaaaatgggggcttggagtacccataatacagtga

SEQ ID NO: 845014 - DNA, 100 bp, Homo sapiens
gaaaacccaagatatttatcattcagatggctgccagcaacaggaaggagggggagagaataccaactccatcagttccaacggagaagattcagatgag

SEQ ID NO: 845015 - DNA, 100 bp, Homo sapiens
aagtttacacttctgaccccatcacactgcttcccactgagatgcaagagtctcggaagggtgctgacctggaccgggagaagaaggctgccgagtgcaa

SEQ ID NO: 845016 - DNA, 99 bp, Homo sapiens
atgacagaagcagaacggtttcagcctccagtactggggatttgccaaaaggaccttgctaagcagtactctgacagactagaatgctgtgaaaatgaa

SEQ ID NO: 845017 - DNA, 99 bp, Homo sapiens
tctggtgtccaaaatttcctttactggttcaacaactacaggaaagctgtccgcaggcttgtccaaaaggaaacatcggaatgaccacttaacatctac

SEQ ID NO: 845018 - DNA, 100 bp, Homo sapiens
tgatgaaattgaagttgactttagtaagccctatgtcagggtaactatggaagaagccagcagaggaactcctttgccaggtggagctcaacaggaaagt

SEQ ID NO: 845019 - DNA, 98 bp, Homo sapiens
gacatctcactgcagagacacccaggcctgggctgtttaacgacccccaactccccatccatgcactcacgttctcttacgctgggtccatccctctc

SEQ ID NO: 845020 - DNA, 98 bp, Homo sapiens
cccctccggctcctggaacggagccctctgccggctgctcctgctgaccctcgcgataattctgaaataatcagcagaaacggaatggaatgccaaga

SEQ ID NO: 845021 - DNA, 99 bp, Homo sapiens
atacgcaatggaattgaagcctgctattgcaacatgggattttcaggaaatggtgtcacaatttgtgaagggtctccgtctctccaccgggggcttcat

SEQ ID NO: 845022 - DNA, 98 bp, Homo sapiens
aacaagcaagcatgcagcttactgcttgaaaggacttagcactcaggcctgtgaatcaggagatacaaagacctccaaaaaaggaccagttcctcgga

SEQ ID NO: 845023 - DNA, 100 bp, Homo sapiens
cccgcgcctgggaccatggccactgactcatgggccctggcggtggacgagcaggaagctgcggctgagtcggttaaaaagatcaagtggcatgagcagc

SEQ ID NO: 845024 - DNA, 51 bp, Homo sapiens
tacaagctttcaaagtcaatttctcttgcaactagcaagtgaagccttgcc

SEQ ID NO: 845025 - DNA, 100 bp, Homo sapiens
gaactatgtaataaccaaagagcaagtacttcgtcaggagacacattgaatcaagggaccaggtgccctactgattttgctgaggttccttctattctga

SEQ ID NO: 845026 - DNA, 98 bp, Homo sapiens
tcaaaattatccgaaaccgcctcactggcttcacagttgactgcaggcattcagctttctctggcatcatctggcgtgaataaaatgcttccttcagt

SEQ ID NO: 845027 - DNA, 100 bp, Homo sapiens
gcaggcatttcaatcacattatgataaccatgatgactacacagacttctactatgacatttgctccttttgaggatacattgagttggatgctatttgg

SEQ ID NO: 845028 - DNA, 100 bp, Homo sapiens
tcttacgacagggagcccagaagacaagttggatggcttgaggactggtactaaaaggaaacgtgactgggaggccattgccagcagaatggaggattat

SEQ ID NO: 845029 - DNA, 99 bp, Homo sapiens
acggcggcagcagcggcattcagatttggagcaagaggtggtggtggccttcccccgaagaaatttggtaatcctggggagcgtttgcgtaaaaaaaag

SEQ ID NO: 845030 - DNA, 100 bp, Homo sapiens
gagtcgaaagtgaaattttcctttggccaacgtgacagagctggaagtcgagtgtgctactcaactcaggagatttggagacaaactgaacttccggcag

SEQ ID NO: 845031 - DNA, 100 bp, Homo sapiens
gtgcctctgcctaattggcttataaacagttacaagatgaacaggaagcggtgcaggaggttcctagagttgttcagaatcctccaaaaccagtcatgac

SEQ ID NO: 845032 - DNA, 51 bp, Homo sapiens
ctcctactccttagctttcctggcaggatacagtttatgtaacttgatgga

SEQ ID NO: 845033 - DNA, 100 bp, Homo sapiens
ggcggccgcgtgcagggcacccgctggcgccacggccaggacatatctgaagaagctgcacacgcaggagcgggcggtggaggaggtgaagctggccatc

SEQ ID NO: 845034 - DNA, 98 bp, Homo sapiens
gtggaaaaactcagtgagacacaatttatcattgaataagtgttttaagaaagtggacaaagagaggagtcagaacaactctgctcatggtgattaca

SEQ ID NO: 845035 - DNA, 98 bp, Homo sapiens
cacaaaacagcagatttcccaagagcagcggaaaatgatccagtcacaggtatatggatacctctttaatcgatgttgatgtgcaaccaacttacgtg

SEQ ID NO: 845036 - DNA, 129 bp, Homo sapiens
ggaaatcaagttcgagttacctcatgggatggcaggaaatggggagaactggagggggacacctatgaccgggaatgtatcctgtcaggtataatgtcagtgaatggcaagaaagttcttcatatggat

SEQ ID NO: 845037 - DNA, 99 bp, Homo sapiens
atggccactccagtcggtgttgagcacggcgagcagtctcaggcctttagtgatgatgcaacccaaggagatctgtgcgctggttgggttctgtgatga

SEQ ID NO: 845038 - DNA, 100 bp, Homo sapiens
ttttattcaggttcctaggaatctcgttgatattgatgatgttaagaagttcaaaccgggttacctggaagctactcttaattggtttagattatataag

SEQ ID NO: 845039 - DNA, 100 bp, Homo sapiens
gaagcgcggccttcacacatcccagccggtgactgcagtgaggtggatctcgagccagaggggaaagtatttgtggtaataacccttaccgggagtttca

SEQ ID NO: 845040 - DNA, 98 bp, Homo sapiens
aggcgaagctggccgagcaggctgagcgatacgacggaagctgttttaggttatgtgaaagagatgtttcctcatctctaaggcttaccagaagctct

SEQ ID NO: 845041 - DNA, 100 bp, Homo sapiens
cttcaggattgagacccggaaggcttcaaaggctgtcgcaaggaggaaggcccaccgtttccatggtcgaaggtcagggcgagaagaacgtgaccttctg

SEQ ID NO: 845042 - DNA, 100 bp, Homo sapiens
aacaggctggaggccctagccagtccacagattgtagcggcattcacctctcaggctgtagacctcttcctgtgccaaaactgccacctggggagcaatg

SEQ ID NO: 845043 - DNA, 75 bp, Homo sapiens
attacttaggagcttcagaatctgaaattgtatacctggcactgctaataatgtataagcattccaataataagg

SEQ ID NO: 845044 - DNA, 98 bp, Homo sapiens
aaagaagaaaacatttcttttaatttttaaacttggtttgaaagggcctacctggtcccactggtataccagggccaattggtcccccaggaccacca

SEQ ID NO: 845045 - DNA, 100 bp, Homo sapiens
agcaagctgccgcagatcgcaggaccgtggagaagacttggaagctcatggacaaagtggttgtttacattcagagctctatcaataagaggaatacata

SEQ ID NO: 845046 - DNA, 98 bp, Homo sapiens
tcgcatcgcgcactttttggatcggcatctagtctttccgcttcttgaatttctctctgtaaaggagactcctacaactcttccaagagcagctggtc

SEQ ID NO: 845047 - DNA, 100 bp, Homo sapiens
ttgcagaattggcctgacctcttaccaaaactctgtagcctgttggattctgaagattataatacctgtgaggtaagaagtttgatagctgtaggactgg

SEQ ID NO: 845048 - DNA, 100 bp, Homo sapiens
gcaagttcctgcttctgggacagctctactgacgcacctgttcttcccggagcctatcagcaaagccattcccaaggctatggctacatgcaccagacca

SEQ ID NO: 845049 - DNA, 98 bp, Homo sapiens
accacgacattgaccaaggggtgagcagtaacagcagctacttgaagtggaacaagcctgtcccctggctctcagagtggcagaaatctgaagctatc

SEQ ID NO: 845050 - DNA, 100 bp, Homo sapiens
cagagtacagacttattgtggagaatttgtcaagtcggtgcagctggcaagacctaaagggaacgtgtgaaagaagaattgtggggaaaaaaaagcaagc

SEQ ID NO: 845051 - DNA, 99 bp, Homo sapiens
aaaatgcccacttcatggttagcagtggaaagaggcaaaacctgatgaattaatggattccaaattgagatgcgtatttgaaatgcccaatgaaaatga

SEQ ID NO: 845052 - DNA, 98 bp, Homo sapiens
tacatctactcatattgagagctgtcgacagttacgtcaacaggttctgagcaaggttcaaccagtcaagaacaggccttatctgctcagcaagctgc

SEQ ID NO: 845053 - DNA, 99 bp, Homo sapiens
aagaagatgatgaaggacttggaggggttacaccgagctgagcagagtctgcatgaccttcaggaaaggctgcagataagctgggatctacccagatcg

SEQ ID NO: 845054 - DNA, 100 bp, Homo sapiens
gccccaatcagacgccgctcctccaactaccgcgcttatgccacggagccgcacgccaaggtcaacgctgagggctccgtggacagtgtcttctcccagg

SEQ ID NO: 845055 - DNA, 100 bp, Homo sapiens
ttcctctgctgccgctcggtcacgcttgtgtaaacaggaacatcgataagtagtgtaaaaacttgcacaatgaaatccgaagccaaggatggagaggagg

SEQ ID NO: 845056 - DNA, 98 bp, Homo sapiens
tcagcgctgccattttatttcaatcaactggtgagactgcagtcagtgcttttgagattgacaagatgtacacccccttgttcttcgccagagtaagg

SEQ ID NO: 845057 - DNA, 100 bp, Homo sapiens
tctatcttcttccttaggaaaccagcctatatgaacccaatagcaatggcgagatcaaggggtccaatccagtcttcagggccaacaatacaggattatc

SEQ ID NO: 845058 - DNA, 98 bp, Homo sapiens
gacagcaggtcacagtggacgaggtgttggcggaagctgttcatgccaagagcctggtggccatcttacacctgctcgttgctctgtctcagtatttc

SEQ ID NO: 845059 - DNA, 100 bp, Homo sapiens
ccttctcaaccttgtgggatgtgaaaactctgttactgaagggtaatgcaaacctggatatccagaatgtgaaccaacaaactgccctacaccttgctgt

SEQ ID NO: 845060 - DNA, 100 bp, Homo sapiens
gggaacaaagtcagtcgccagtcagtgttgtgtggaagccagaacatcgttctcaatggcaagccaatggagatcttcgtggatgatgagacgaagttga

SEQ ID NO: 845061 - DNA, 98 bp, Homo sapiens
gcctgcaaggactggttccacggcagaccttctctcaccatgccccataggaatctgacaggaagctgcaacgttaattgtggttgtaaaatacacga

SEQ ID NO: 845062 - DNA, 99 bp, Homo sapiens
atgtactgggggattcgcagggaggatgtcgggacaccccggaagctgggaaatggcttgccttttgtcactgctccgaataaatttgaagctctggct

SEQ ID NO: 845063 - DNA, 98 bp, Homo sapiens
cgcatccctgctggcacagtgccgggctctgacccaggcgtgcgggtactcagaagattgtgaagaggtctcttgaagtttggggtagtcaagaagca

SEQ ID NO: 845064 - DNA, 112 bp, Homo sapiens
agagggcatttgctattgattctagtcatccctggcttcatgagtgtatgattcgtctctttaatactgcaatgatcgtgcgcttcctgaccaagagattcattggagacta

SEQ ID NO: 845065 - DNA, 99 bp, Homo sapiens
aacaccccgagcgaggccaaccttcaggaggaggaggtttggaattcacccagttgcaggccgaatgcctggtcagcttaatgtgctgctggctgaggc

SEQ ID NO: 845066 - DNA, 99 bp, Homo sapiens
ttccccttcctggtgctgcttgccctgggaactctggcaccttgggctgtggaaggctctggaaagtgtgctcagcagggagaccccctttcccgctat

SEQ ID NO: 845067 - DNA, 100 bp, Homo sapiens
ttatgtataaaatgtcatactacagatttggagaaatgcagcacatcaaccccgtggccgcctccctcatccagaagatgcttcagacagatcccactgc

SEQ ID NO: 845068 - DNA, 100 bp, Homo sapiens
gtatgcctcaatttgctggatttaagcactgctgcactttatgaggacccagatgatgtggtaccagttggccaaagaagagcctggtgttggtgcatgt

SEQ ID NO: 845069 - DNA, 100 bp, Homo sapiens
gatatgttacatcaaaaattcttcatctggctcagagtcaagttggtgtgaccccatatggttatgcatcccggtttgagatccactttgatgacaaatt

SEQ ID NO: 845070 - DNA, 100 bp, Homo sapiens
aaaatggcggacgggaaggcgggagacgagaagcctgaaaagtcgcagcgagctggagccgccggagactgaaccggccgctgacactctcggagaagat

SEQ ID NO: 845071 - DNA, 99 bp, Homo sapiens
taaaacctttgaagaggaatttattatatcctacaactgggttatatgtgtgggccaaactgaaattgcagaaggcttcagaacgatggcagcctgaca

SEQ ID NO: 845072 - DNA, 100 bp, Homo sapiens
agaatgacagcaagaggcaaaacttcggacatagaggccaaccaacctttggaggccaaatttgagtttcatcatggtgactatgaaaaacagtttctgc

SEQ ID NO: 845073 - DNA, 104 bp, Homo sapiens
ttttatgatgtctatgaccgtgtgttccatgaaggccgccatggcatcagatgaaggcaaactttttgttggagggctgagttttgacaccaatgagcagtcgc

SEQ ID NO: 845074 - DNA, 100 bp, Homo sapiens
aacatttctgggtgacactcaacaggattcccgctctagcaaaagccagctgctatgcggtgcggactttcaggcagctttgcagggagatacatgtggc

SEQ ID NO: 845075 - DNA, 100 bp, Homo sapiens
ccacaggagccgtgaaggagaagatcacagcttttgtggtggagaggggcttcgggggcattacccaattcttctgatgtagagcgactggaaagattct

SEQ ID NO: 845076 - DNA, 138 bp, Homo sapiens
ttttcgacgcctccgccgccgcctgaggaggcgagctagccgggagttacaccgccaccgccagtttgataaaggttactcttagaacatccgtcacagctttggaaaggaaggcaagaggacagactatacaccttt

SEQ ID NO: 845077 - DNA, 99 bp, Homo sapiens
tgccttcttggacgcctttcagaaagtggctgacatggccaccaacacacgtggtgcccagggtggctccgtggcccgcacactcctggaagatgggac

SEQ ID NO: 845078 - DNA, 98 bp, Homo sapiens
ccaaacccataaaataacaaaaccaacccgcagtggccgaccggagatagctaagatgccgcgcaggaggacactcatgaggaccatgatacttccac

SEQ ID NO: 845079 - DNA, 100 bp, Homo sapiens
atttagcgtcagaaataagccgttttttgacatctgtacttcaagaaaggatatgtcgttattgatccagctcaactttatgtatatgagaaacttggac

SEQ ID NO: 845080 - DNA, 98 bp, Homo sapiens
ttttatccagctctaaactttatttcctcccagaagacactccccagggcagaaatagcgaccatggcgaggttaaacccatccagagtaatggctgc

SEQ ID NO: 845081 - DNA, 100 bp, Homo sapiens
ctcctcgccagcagccgtccggagccagccaacgagcggtttgtctacagattttgagcgttcgaagttgacccctgactaagtatactttgctgctccc

SEQ ID NO: 845082 - DNA, 100 bp, Homo sapiens
ggacgagtaatcgcctgctttgattcattgaaaattcactgcgtgctgtcctcacttgttctacaatgagtgccaaatctgctatcagcaaggaaatttt

SEQ ID NO: 845083 - DNA, 98 bp, Homo sapiens
cgaaatggaagaagttaggtgtccagagcacggcagtagaaactgatgaaggaattgaagaggagataccggattcaccaggaatagaaaagcatgat

SEQ ID NO: 845084 - DNA, 100 bp, Homo sapiens
ggtgcctgagcccgtgcctgtcttcagatcttcacagcacagttcctgggaaggtggagccaccagcctctccctgtttctcttcagcaacgggtagcag

SEQ ID NO: 845085 - DNA, 100 bp, Homo sapiens
cttcagtattccgcacgccttcctgctctgtgctagcagcgtggccacagccttcattgcctccctggtactggcccagacaggcggtgggtgggaatgc

SEQ ID NO: 845086 - DNA, 100 bp, Homo sapiens
tcatgcggccactcatattaccaaccgcagagaggttatctaccttgcctgctcctatgccacagtgtacctgatctacctgaaatttaaggcaacctac

SEQ ID NO: 845087 - DNA, 98 bp, Homo sapiens
agcattaaaatcagaagttcagaagctacagactcttgtttctgaacagactgtattatgaagaaagcagtccaagtgaagaaaaacatttcacatat

SEQ ID NO: 845088 - DNA, 99 bp, Homo sapiens
aaagctgctgccgccccttgggctaaaaggactgtcctttcattgtatgtatgacctatgccttccataccccagataaactctgcttcatcctggatc

SEQ ID NO: 845089 - DNA, 98 bp, Homo sapiens
cgatgggggcgagggcgaagacgagatccagttcctgcgaacttggccataaaatgcagtaaaaacaaatccagttcccaagaagctgtacaaatgct

SEQ ID NO: 845090 - DNA, 99 bp, Homo sapiens
cgatactgagcttcttcctatttgccatgggcccagcttcgggcatttatcccagagatgctcaagtactctacaggtcggggaaaaccaggctggggg

SEQ ID NO: 845091 - DNA, 98 bp, Homo sapiens
gccggatttggctcatttcaacgctggccggaggtcacgaggatggaggatgtgggggctcaaggttctgctgctacctgtggtgagctttgctctgt

SEQ ID NO: 845092 - DNA, 98 bp, Homo sapiens
ttccctcccccttctttcgatcagagatcggcggagaccctcgaagtgcgcaaacttgacactcaccctgaccgatgtgtcatccccacaccagcgag

SEQ ID NO: 845093 - DNA, 100 bp, Homo sapiens
ggaatgtgaactttgaggatccagcctctgcctgtgattccatcaatgcatgggttaaaaatgaaaccaggggagtatgtaaactttactcagaacagag

SEQ ID NO: 845094 - DNA, 100 bp, Homo sapiens
aatgcagacggacagtacctcttctgcaggtactggaaacccacaggcacacccaactgattgctgtgtttgaagaacaagaaccactccacaagattga

SEQ ID NO: 845095 - DNA, 99 bp, Homo sapiens
gataagagaaagaaagttaagcaactacaggaaatggctttgggagttccaatatcagtctatcttttattcaacggtgatgcaactgtgacaatagct

SEQ ID NO: 845096 - DNA, 100 bp, Homo sapiens
cctatgcaaagaaagggaagctattgctgggattttgaggagttccatgccattgcagtgtcaactaggcctcagttacttttcagtttgcccaaattga

SEQ ID NO: 845097 - DNA, 100 bp, Homo sapiens
cacccaggaacaagtatctgacagagtgtgaacatggctacgcctcttcattcccgtccatgccgagcccccgactgcagcattcaaagcccccacggag

SEQ ID NO: 845098 - DNA, 98 bp, Homo sapiens
gcaatcagatttatcattcggggacggaagaagtctatagtggctgtggagcccaggagtcttattcaaggagcctttcaaggctgctcagtgtccgg

SEQ ID NO: 845099 - DNA, 100 bp, Homo sapiens
ggagactctgctgacacccatcacccacatctcacaggttgttacaagttgagttgaaaacaagaaaaacttgcttttggcgccatcaaaaaggaaagcc

SEQ ID NO: 845100 - DNA, 100 bp, Homo sapiens
acggagcccacgactcccgatagtgagagacctgctcaagctctcttaagagattatggccttattccactgctggggattgatgtgtgggagcacgctt

SEQ ID NO: 845101 - DNA, 98 bp, Homo sapiens
catcgacagctgcaaggaggccgtcaccttcaaggccgtcagacaagacagagtctagctctttcacccaggctggagtgaagtggtgcaatctcagc

SEQ ID NO: 845102 - DNA, 98 bp, Homo sapiens
gcaggatgaagttcgccgagcacctctccgcgcacatcactcccgagtggaggaagcaatacatccagtatgagtcttcccaagggattgttgaagaa

SEQ ID NO: 845103 - DNA, 98 bp, Homo sapiens
tgaaatgtaaacaagaagccagaaacttacaggggataaaggcactattatcaaaagtcaaaatatgactcaagtgtgagtggtcaatcatcttttgt

SEQ ID NO: 845104 - DNA, 100 bp, Homo sapiens
agcagatgctgactcagcctgttccattaagagattcataaaagtgtggcgctatttacagctttcatgaaatattaaaagcagccagaggagaaaatac

SEQ ID NO: 845105 - DNA, 100 bp, Homo sapiens
ttcagtcctcggcctctccagccaacgatgaccagtccaggcccagcctctcgaatgggcacacctgtgtaggttgcactgctgtgatccatcctcatct

SEQ ID NO: 845106 - DNA, 100 bp, Homo sapiens
ctgtctgcccagagaggactgcctgctggggaaagggggtactcctgagctcctgacagcccagcttcaggctgctcccggcagatcggcttctcctttg

SEQ ID NO: 845107 - DNA, 98 bp, Homo sapiens
gctgatgcaggtgaacgacactctgacttccgaagatgccggactccggaacagcaagaactgcaccgaaccagaattaaacaaccaccatgtcgagc

SEQ ID NO: 845108 - DNA, 98 bp, Homo sapiens
gaaaatccacaagaacgcactttcctcccaggtggccaagcaagaggagttcttcaacctgtcccactgccaactggtgaccctcatcagccgggacg

SEQ ID NO: 845109 - DNA, 100 bp, Homo sapiens
atcgagaaaaatcacgggctgtccaggaactgtcggaacagaaccaaaggctattggatcagctcagcaggggtgtccgcaatgttgccagtgtctgtct

SEQ ID NO: 845110 - DNA, 100 bp, Homo sapiens
aagctttgaaggatgcccaggagaagctggaactggcagagaagaaggctgctgatctccttccagggagatactacagcaaaccttttgttacatttca

SEQ ID NO: 845111 - DNA, 100 bp, Homo sapiens
agaaataaggacaaaagccaagaggaggacagttcgctacacagcaatgcatcgaggaatgtgaattggacccttgctgcgaaggaagtacctgtaagct

SEQ ID NO: 845112 - DNA, 137 bp, Homo sapiens
ggtagcagcgggtgacatggaaggggcagtacaagcttacgtctctgctcttcagtacaatcctccatcagtggcctatgtacataccacgccgggtctgccttcaggctgggaagaaagaaaagatgctaaggggc

SEQ ID NO: 845113 - DNA, 100 bp, Homo sapiens
atgctgtccgccaggccctgcaggacctgctttcggagtacatgggcaatatgccagaccagtttgaccaggcggttgtgctgaaccagctgcggtactc

SEQ ID NO: 845114 - DNA, 100 bp, Homo sapiens
cttgaaatgaagctggacttggagttgagccccatatgggggttggcaggcagcagagaggcccctttcaaggtgttcgggtaaagaactcagtgaagga

SEQ ID NO: 845115 - DNA, 98 bp, Homo sapiens
tttacccactatgacgcttccttagaggatcaaaaggggctcgtggcatcctatcaaggagctcttgtccctggcaaagcgaaagcgcagtgactctg

SEQ ID NO: 845116 - DNA, 100 bp, Homo sapiens
tgagttctggagatgatgacgatttcaacccatttttagatgagtctaatgaggatgatgaaaatgattggaaccaaccagatggctgtgtgtgccaaag

SEQ ID NO: 845117 - DNA, 100 bp, Homo sapiens
caagtcgctgctagaaatattttagcctctccaaagcccagaatgcagccccgacccaagtttgtaagggagggtgaacagtggctcaagatgagaagcg

SEQ ID NO: 845118 - DNA, 98 bp, Homo sapiens
cgcatcttagcttgccccatccccatttgaggtctgtcggagctgcccttcagtgtgttgcagaattaagacaaatctttgaaccaaagaagaaagaa

SEQ ID NO: 845119 - DNA, 100 bp, Homo sapiens
gggagccacgcagaggacgccggaacaccctggaagccgagaaatggtgatctttacggagccataggctctccagtgagactgactcgcaccgtagtgg

SEQ ID NO: 845120 - DNA, 100 bp, Homo sapiens
gtctggctgtgatgctcgggagggagactgttgttcccggagatgcggcgcgcaggccaagcagatagaacttcagttcactattggcgaagccattacc

SEQ ID NO: 845121 - DNA, 98 bp, Homo sapiens
ggtcatttcgtacatatgagagggttgccttttcgtgcaactgaaaatgacattgctaattgtctcctttcctcttgggccgggcactttgggctgcc

SEQ ID NO: 845122 - DNA, 100 bp, Homo sapiens
gcagggagaggagctgtggataacgggaggtgaatttccatgtcaacatagtcctgggccagatgcagatggctggagatgggtgcagatcccagggatc

SEQ ID NO: 845123 - DNA, 98 bp, Homo sapiens
aaggcgcgagtgaggaaaggaggtactgtaggcacctcaagcgggggctcgggaaaaggttgcccgatcctggtactgtaaccgtggcctagtctccc

SEQ ID NO: 845124 - DNA, 100 bp, Homo sapiens
tctcttcccacagtgcactcctcctagtgtcctgccatctgatattacaatctaccaccttattcaggtgacttctgggggaacagaaagcatactgatg

SEQ ID NO: 845125 - DNA, 99 bp, Homo sapiens
atgtggcagatatcgaggtggatggaaagcaggtactgctataaccagaatttggtagaaaaaggatttacttgttggggccctcttgataaaaagaga

SEQ ID NO: 845126 - DNA, 98 bp, Homo sapiens
gaactctaatatgagcagcatggtagttacagggacagcaatcagacctattgctttgagagctgtgacctccattgctcgtgctctgcctggatttc

SEQ ID NO: 845127 - DNA, 157 bp, Homo sapiens
caacttcttggatcttggaggtggtgtaaaggaagctcaagtatatcaagcattcaaattgctcacagctgatcctaagaccatagtcttgagtttacttatgaggtcaattggaaataagaacaccattttactgggtctaggatttcaaatatta

SEQ ID NO: 845128 - DNA, 98 bp, Homo sapiens
cttcagcactcgtgaggtgtactgctgctagaatgtttgagtgaagcataactttaacctggaagaatacagcctttctcagtgcacactggagaagg

SEQ ID NO: 845129 - DNA, 98 bp, Homo sapiens
gcagcgacgcgaggggcgcgcggagatggcagcgtccagcaactccagcctgtccggctcgtcggtgtcctccgaatgtgaatggcataaagtatcac

SEQ ID NO: 845130 - DNA, 100 bp, Homo sapiens
ctggttgaggttcaatgcagacaagacggatgtgatgctggaataagacgagttggaagaagacctgatcaacaacttcagggtgaagggaaaataattg

SEQ ID NO: 845131 - DNA, 100 bp, Homo sapiens
tctggaagttctgtcacagctgaggaagccaaaaaggcaattcgaagttttcaagtagcccttcacatctatccaatgaaccctgaaatatggaaagaag

SEQ ID NO: 845132 - DNA, 98 bp, Homo sapiens
agtcaagacggggaataaagcggagcgaggacagcaagggaatctaagggaggaaattatcaactgtgcacaaggaaaaaaatagatatgtgaaaggt

SEQ ID NO: 845133 - DNA, 100 bp, Homo sapiens
agcagatatgcctgctaacatggataagcatgccctgaaaaagtatcgtcgagaagcctatcatcggtcttctttgatgtgaggattggagacaaagatg

SEQ ID NO: 845134 - DNA, 98 bp, Homo sapiens
aatgccctccgggtcacaggataaggaagaatgtggccattagccttcggttctggcatgggattaggaatggcttattccaactgtcagcatgattt

SEQ ID NO: 845135 - DNA, 100 bp, Homo sapiens
tggcagaccctaatggagactcacctgctaatgttgatgctgcggtggaatgaatcttacttgttgaatatcttctggttactagttggattcatttgtg

SEQ ID NO: 845136 - DNA, 100 bp, Homo sapiens
cagtacactagctgttcaacagatttctcgaatgctggcagccaaaaccgttttggctatccgttatgatgcttttggtgaggattcaagttctgcaatg

SEQ ID NO: 845137 - DNA, 100 bp, Homo sapiens
tggatgacacccaggaggcatttgaagttccagttggagtccccaacccggtctctagtgatggaggccccaaaaggagtggaaatcaatgcagaagctg

SEQ ID NO: 845138 - DNA, 99 bp, Homo sapiens
cctggacgacgtgaaggagaaattcgactatggcaacaagtacaagcggcgggtgccccggaacggccggtttgtgggcgatgctgaccttgaaagaca

SEQ ID NO: 845139 - DNA, 98 bp, Homo sapiens
atcatcattgaactaaaacacaaagcaagagaaaaaccttatgatagtaaaagtttgcggacctcccagccgccagatgacggaggctctcgccagac

SEQ ID NO: 845140 - DNA, 100 bp, Homo sapiens
agctttaggcagcttacaactcacaagtgcatgggagattcctgcatcttttgcgctctcaagggaatgaaagctactggttgattttaaagtgcctggg

SEQ ID NO: 845141 - DNA, 99 bp, Homo sapiens
ctggctcggtgggacagggcctcagaggtatgccccagagtgcctgaaggagtataagttctactatgcgtcagatgtctggtccttcggggtgaccct

SEQ ID NO: 845142 - DNA, 100 bp, Homo sapiens
aggtcacgcaaaaacagttccaactgaaagaaatcgtgcttgaggtgcactgctactatgtcactgtgaagggttttacagaagctctggagaaactaga

SEQ ID NO: 845143 - DNA, 100 bp, Homo sapiens
gtgatgttggagaactacagaaacctggtctccctagagacaaaatctggctctgtcacccaggctagagtgcagggatgtgatcatagttcactgaagc

SEQ ID NO: 845144 - DNA, 100 bp, Homo sapiens
catctaactcttatttctccgttggcccaaccagtcccagcgctgtcgtgctcctctactcggtgcatgtgagggaaccctggcttgttcaacctgtcac

SEQ ID NO: 845145 - DNA, 99 bp, Homo sapiens
gactcagaccagtctctgcaagaatttgtgacccagaaggaaatctctgacctcagctgtggctcttggtgctggccagaagccaacttcatgtctgag

SEQ ID NO: 845146 - DNA, 100 bp, Homo sapiens
tgaggaatgtctttcctaccatctaaaatacgaaggtttctggctggaacaagttgaaatcatcgcagaaggataaagttcgtcagtttatgatcttcac

SEQ ID NO: 845147 - DNA, 100 bp, Homo sapiens
cagatggcggatgccctgcagtacctgcagaaggtctctggagacatcttcagcagcggaaggagagttttacatggaagtggcttacagaaacttggcg

SEQ ID NO: 845148 - DNA, 100 bp, Homo sapiens
cttatgggtccagccaagcatttgctagtgtggtcttagtggtgcaatggctagtataagcgtgcgttcgagtaccccaggctctcctacacatgtaagc

SEQ ID NO: 845149 - DNA, 100 bp, Homo sapiens
taaaatccatgcaatatgataaacagggtatagcagatacatggcaagttgttggaacagtgacttgcaaggcctccggtgtggctgtctctgatggtgt

SEQ ID NO: 845150 - DNA, 98 bp, Homo sapiens
ccggggccgggtctgggcgagctcccggcgtgccaccaaagcggctccccgcgcggacgaaggctcagcattctcctggtgtgcagcctgcagatgtg

SEQ ID NO: 845151 - DNA, 98 bp, Homo sapiens
gcaaactctgcaatgtcaccttgaactctgcacagcaagcccaggctcattatcaggtgaataacgtatgtttagaagaagttactcatgaagaagca

SEQ ID NO: 845152 - DNA, 100 bp, Homo sapiens
agccatttcaggagtacctggaggctcaacggcagaagcttcaccacaaaagcgaaatgggcacaccacagagagattccccttccacttccagacagtc

SEQ ID NO: 845153 - DNA, 98 bp, Homo sapiens
atggtggcctggcgctcggcgttccttgtctgcctcgctttctccttggccaccctggtccagcgagagttacactgttagaccttatgatagccaag

SEQ ID NO: 845154 - DNA, 98 bp, Homo sapiens
accaggtcaagcccgaccaatacactgaggccctggcccagagggacaaaaaaggtcacggatcgcctacagtgacgaagtacggaatgagctcctgg

SEQ ID NO: 845155 - DNA, 98 bp, Homo sapiens
ggcgaccccccggcgcagcagcatcatcaaggtgtcgaagcaggccaaggagtttctggagtacgtgtacgaagagccgctcatcgacatccagcagg

SEQ ID NO: 845156 - DNA, 98 bp, Homo sapiens
gaaatatctgtgggcagaaaaatacaaagttggaagcaataccaaacagtggcatggaccacacccagcggaagtgaatctggattgggaaagtcgac

SEQ ID NO: 845157 - DNA, 98 bp, Homo sapiens
tcaagctggatttcctcccggacatgatggtcgagggccgcctgctcgttcctgacagaataatgcactgctgcctgcaggcctgaggcagaaggatc

SEQ ID NO: 845158 - DNA, 100 bp, Homo sapiens
caccacagaaactttagaatggaggctcggttcttctgacattcttaattacagttggtaagtcacatagaagagatgctccagacagcctacaacaagc

SEQ ID NO: 845159 - DNA, 100 bp, Homo sapiens
tttaccttgtggaaatgatttcctcaggactccagattatctacaacactgatgagggatgatcatggtgattttactgctgcttgtggctatcgtggtt

SEQ ID NO: 845160 - DNA, 100 bp, Homo sapiens
tgaggcctagccgaggcggcgggacccccaagtttggaaagctcttttaacgttcaggacctcaaggggctcggctatgagaaggggaagcctgtgggtc

SEQ ID NO: 845161 - DNA, 98 bp, Homo sapiens
gacctctgcctaccatccataaaatactcattcccctctcaggctccatggtccccttctcgatgcgcatcttgcacgcggagcttcagcagtacctg

SEQ ID NO: 845162 - DNA, 98 bp, Homo sapiens
acaaggaagtgaagaaggcgcatcactcccagctgcgcaaagcttgcgaggtggcgttaggttgttaaaattacacactgtcctacactgctgaccag

SEQ ID NO: 845163 - DNA, 100 bp, Homo sapiens
ctacgtggtcgccgtgctctccgggcacgtcaaccccttcctcccgtatatcagaggaagaacttgtcgcttttcctaagcattagtttgttaattttct

SEQ ID NO: 845164 - DNA, 101 bp, Homo sapiens
cccggatttgccacaaaagaaattacaaatggaaagcctttcttcaaaggaaatggagcagtcaatgaatatgctgaattccaaccatgagttgcctgatg

SEQ ID NO: 845165 - DNA, 101 bp, Homo sapiens
aaagccatcacgctggccatcggagatggggccaatgacgtgaacatgatcaaaagtgaggtcccagcttgaagagaaagaaaacaagaagttccctgtgt

SEQ ID NO: 845166 - DNA, 100 bp, Homo sapiens
cagggcttcctggtttacctggcactcctggacaggatggattgccagggcttcctggcccgaaaggagagcctattccaactccacagagtgaccagag

SEQ ID NO: 845167 - DNA, 116 bp, Homo sapiens
agagagagattcagacactatgcccctcttggatttaatgcagaaaatccatacacagcgcttgataagaaacccattctggaacccccctatattgaagcccatcatcgagtctg

SEQ ID NO: 845168 - DNA, 98 bp, Homo sapiens
gaacagtaggaaaccagatcttcgagttgtcatccccccttcaagcaagggcatgatgcctccactaaaccccaacaagcacatctcccagacagagg

SEQ ID NO: 845169 - DNA, 100 bp, Homo sapiens
tggcttgtgaaatcatgcctctgcaaaggcagtcatcaagtgcctactatgactttaactaccatgatggaagcatgtgccaaggagaactgttcaccca

SEQ ID NO: 845170 - DNA, 100 bp, Homo sapiens
gtacaagaggtgtaccagccccagcaataaccaggagaagtacgtggaggaacttgcagcagtgaggcaaaccctccagacagacctggagacatccatt

SEQ ID NO: 845171 - DNA, 99 bp, Homo sapiens
ccgtgagatgcgtggtccaccatcggtgacctcaccgcctcggttcgccctcagccgccccggaaataccgtctgaaggctgaatcggaagcacggcag

SEQ ID NO: 845172 - DNA, 100 bp, Homo sapiens
ctgatctctgttcggctgagctacccaccctatgaacaacatgaatggcaaggggacgcgagataaggtcctgatcagaatcatggtctcccgcagtgaa

SEQ ID NO: 845173 - DNA, 98 bp, Homo sapiens
gtctgtgtttgaagtcaacattcgatttattggaggcctacttgcagcatattacctatcaggagaggaggcactgtgctctcggacatcatccagaa

SEQ ID NO: 845174 - DNA, 100 bp, Homo sapiens
catgcttttggctgccctgagctggcagtacctgaccactctctcccagatgggtccgctgtgtgcagaggctccatgggatgtgttgtcttcatagtag

SEQ ID NO: 845175 - DNA, 100 bp, Homo sapiens
tccagtgacccagacctggctgtggtcaaacccacccggcccaactcacttgatgatgatgatgattttgatgatgaggaagctgaagaaaaagcgccag

SEQ ID NO: 845176 - DNA, 98 bp, Homo sapiens
ctgctggcgtgtctcctcctagtgcttcccgtctcagaggcaaactgcagccttaagtgccttgaaacaattttctgaacaaggactggatccaatcg

SEQ ID NO: 845177 - DNA, 99 bp, Homo sapiens
ttctgcggaatctcagaaagtaaagttccatcctgagaatatttcacaaagaatttccttaagagctggactgggcaggcattcaacaacatgttttgc

SEQ ID NO: 845178 - DNA, 100 bp, Homo sapiens
gctagttcctctccagctcagccgcgtagagctgtaggtaaaacttgcctactgatcagttacacaaccaatgcatttcctggagaatatatccctactg

SEQ ID NO: 845179 - DNA, 98 bp, Homo sapiens
agaaggttacctctacccatcacccatgactgaagagttgctgaaacaacaaaagctgaattcacatgagaccactataactcagcagtctgtatctg

SEQ ID NO: 845180 - DNA, 100 bp, Homo sapiens
ctggatctctggtgagacatttttcttccttctgtcacatcacacccaatggctgaccggttccctgatgtgttacctgcttctgctactgatccaaact

SEQ ID NO: 845181 - DNA, 100 bp, Homo sapiens
tataaattcaatgatcaggacattgaagaggttactgtgcagtatatgcaggatcgaggtgctgtgcttcccatcagagtccacacaattgttatatctg

SEQ ID NO: 845182 - DNA, 99 bp, Homo sapiens
tgggagagctgcagccaggagcaggaggtcaagcaggttcatgtagtattgaaactctggaagagtggattcagcctggataatggagaactcagaagc

SEQ ID NO: 845183 - DNA, 99 bp, Homo sapiens
agccttgtcaaagatgccagatgtgggagacacgccaaagctcccaaggaactgatgacgcttgataatgtggctggggacttcagggaagagtgggtt

SEQ ID NO: 845184 - DNA, 100 bp, Homo sapiens
tgtaccttcttgatatcgagagcctgcaaaaactcaacactggctaattatttatactggtttactcctggcttgggggcattaggaagcactggaggct

SEQ ID NO: 845185 - DNA, 100 bp, Homo sapiens
aagaaggttgggttcagaagagggggttcaggataagtttgaggtgctgaattacacaagcattcctatctttctcccggaagtcaccattggagctcat

SEQ ID NO: 845186 - DNA, 100 bp, Homo sapiens
cagattcaaaagggaatttagttttctagatattcttcgattatgggaggttcagcagactgtacaggatctttttggcagagccccaagtaaagctgtc

SEQ ID NO: 845187 - DNA, 100 bp, Homo sapiens
aaagacaaagacccagtgaacaaatccgggggcaaggccaaaaagaagggattgcaataaagttcaagaaaaaagaggtgctgtctatgaacgagtaacc

SEQ ID NO: 845188 - DNA, 99 bp, Homo sapiens
agtacaaaaattcttcaagaaatctaaggtaattattcgaggtggaggacatattttaccctatgaccagcctctgagagcttttgacatgattaatcg

SEQ ID NO: 845189 - DNA, 100 bp, Homo sapiens
tacgcttcccaaaccagttcagaagccacccaaaagtaatgttaacaataacccaggtcacccaacctgcctgcagtttaccctgaacatgaccgaggct

SEQ ID NO: 845190 - DNA, 100 bp, Homo sapiens
gtgtggtgaagggtacttttcatggtgcatggaaggaaagccaatgcgcagcacaagtgcatacaccttgatagcaccaaatataaaccggagaaatgag

SEQ ID NO: 845191 - DNA, 100 bp, Homo sapiens
ggagcggttctgtgccaacatcataaagaggctgataaaataccagtaatgcgtggacagtggtttattgacggcacttggcagcctctagaagaggaag

SEQ ID NO: 845192 - DNA, 100 bp, Homo sapiens
gctggagaagctgggattggagattccacccaaacttgctggtcactgggagtctggctcttgctgattgaattcctttggtgcagtttagcatgttcct

SEQ ID NO: 845193 - DNA, 99 bp, Homo sapiens
tgggtcccggcggcactcaccacacccggcatcagacctggcactacttgtccaagacgtactggtggcgagatgacagtcatgtccctttccagggac

SEQ ID NO: 845194 - DNA, 101 bp, Homo sapiens
tttgaagggggaagtctcttgcaaattccagtcaaggccctaaaatataggcccagcagtgagaaactttcacaatctgtaatagatggtgtgactgttct

SEQ ID NO: 845195 - DNA, 98 bp, Homo sapiens
aattcccggaaccgcgattcggcgtgtcaggtgaatgaaaactttgccattgatttgatagcagagcagcccgtgagcgaggtggagactcgggtgat

SEQ ID NO: 845196 - DNA, 100 bp, Homo sapiens
ccgcaggcaccttcgggccctcctgccttccgtgcctgccagtgtagagccggtggagcagctgggctcggcgctgaggtttcgccctggctacaacgac

SEQ ID NO: 845197 - DNA, 99 bp, Homo sapiens
aaatgcctcatctgtaaagaacaggttcaatccaggacaaaggtgactcgaagaagccttccaaaaagcatgtgaaaaggaagccctactctactacca

SEQ ID NO: 845198 - DNA, 100 bp, Homo sapiens
attcgcccagccaagttgaagaacctaatcttgctggtgaagcactggtaccaccagcttctgcagaaagccgtcattacacctgattttgaaaaaaacc

SEQ ID NO: 845199 - DNA, 100 bp, Homo sapiens
atcttccccaaaataaaaaaattgcaagagagagactattttcgttattacaagtatactgcattggaacaaaaactgaaaaaattgacggaagatttga

SEQ ID NO: 845200 - DNA, 98 bp, Homo sapiens
cccattcacaaggcagctcgctctgggagcctagaatgcatcagtgcccttgtggcgaatggggctcacgtcgaggaagctgccaaagaatgtcgacg

SEQ ID NO: 845201 - DNA, 100 bp, Homo sapiens
gtgattctgaagagggtctggaggagccttctcaagaacagagttacatggacacagaacagtatgaagaagcagtacgagactatgaaaaagtatacca

SEQ ID NO: 845202 - DNA, 100 bp, Homo sapiens
gcttctcagaagacagagggttttcttttgagaaatcatgagtggaggatctcaagtccacattttttggggtgctccaattgctccactgaaaatcaca

SEQ ID NO: 845203 - DNA, 98 bp, Homo sapiens
aggcgagcccttccgtgtgctcgtgtgccccatctacacctgcctcagggagtctgttcggcacttgaagtactccttgtttaagaaatcactactgg

SEQ ID NO: 845204 - DNA, 99 bp, Homo sapiens
tcaaaggctgtcgcaaggaggaagcttttggaaaagaagaagagagtccaactcaaagatatgggagaggatttggagtgcctctgtcagataatgagg

SEQ ID NO: 845205 - DNA, 98 bp, Homo sapiens
tttatcagaaaaggatcggaaaagaattttgatcacccggaagttcaggctgaattctgaaggcaaacttgagcagacggtctccatggcaaccacga

SEQ ID NO: 845206 - DNA, 100 bp, Homo sapiens
tatgaattggatatcaagccagagaagtgcccgaggagagttaacagagtggttaagaaagtagctcaatacatggctgatgtattggaagatagcaaag

SEQ ID NO: 845207 - DNA, 100 bp, Homo sapiens
tgtatggcaagaccgaggtggtgcggctgcttctggagggactatgcagccatcgtcttctttgctaacaaccgctttgagacagggaagaaaaaactgc

SEQ ID NO: 845208 - DNA, 100 bp, Homo sapiens
tgagggacatgaagtgacagcagcctgtttaggaccacaccacattttggacctcttgctgtgcagttcagtaccttccactggaagaatctcaaacagc

SEQ ID NO: 845209 - DNA, 98 bp, Homo sapiens
agcgggagaaggcgctgcgcaagcacgctgaggaggtggccctggtacagtggacggaaagtgtgggcttaaccctggtgggccgagaccagtcttcc

SEQ ID NO: 845210 - DNA, 100 bp, Homo sapiens
caggcgcagcggccgcagcagcagcggcagtcacaggcacatcagcaaagagagactgcaaataggacatttcaagaaaaaggcatcctggtaggagaga

SEQ ID NO: 845211 - DNA, 100 bp, Homo sapiens
gagttcaagtacagatcacacgcccactaaagcccagaagaatgtggctaccagcgaaggattgtggataatatgcctgtaacgtggtgttacgatgttg

SEQ ID NO: 845212 - DNA, 100 bp, Homo sapiens
ctttctgcccgtggacgccgccgaagaagcatcgttaaagtctctcttcaccctgccgtcatgtctaagtcagagctatgtgttctcatttcacccaaga

SEQ ID NO: 845213 - DNA, 100 bp, Homo sapiens
atttttacagtatctcaaagacttcacttgacttcttgatcctgcataaaaccaagtttctagcatggacaatccagataatgaaatagtgttgtactta

SEQ ID NO: 845214 - DNA, 98 bp, Homo sapiens
tggactctgccgacaccggagagagccttgggttcaacattgtgctttatggtttgggttctaagagagatttactagaaaggtttcgaaccactatg

SEQ ID NO: 845215 - DNA, 100 bp, Homo sapiens
cttcgtgaacagccaggaatggacgctgagtcgatctgtcccggagctcaaagtggattatgaagaagctgtgctcttgctgttagaaggagctgcctgg

SEQ ID NO: 845216 - DNA, 98 bp, Homo sapiens
ctcccccttctttcgatcagagatcggcggagaccctcgaagtgcgcaaacttgacactcaccctgaccggttcctcagtggtgtgctgaatattgtc

SEQ ID NO: 845217 - DNA, 51 bp, Homo sapiens
cgggccgcgccgcgcctcagctctgcatttaaatcaaacggtattgagatg

SEQ ID NO: 845218 - DNA, 98 bp, Homo sapiens
caccatcctggattctggaggcatcattgtggccattgagcacagcagccgtcctatcaatgtgattaagattccagacagcattggaaaagacatag

SEQ ID NO: 845219 - DNA, 98 bp, Homo sapiens
gctttgatgacataagtggctacacttgccactgtgtgctgccatacacagcactttgttgaacgtggtggtgagagcacacgtcctcgtctcattcc

SEQ ID NO: 845220 - DNA, 98 bp, Homo sapiens
tgggacccgcggaagccggcatgctggagaagctggagttcgaggacgaaggtttttagaacttcagccataaaaatgggcagaattttccttgatca

SEQ ID NO: 845221 - DNA, 100 bp, Homo sapiens
tgatctggactcactgcaacctccacctcccaggtttaagcagttctcctgcctgagcctctcggattacagtctgaagttgacaagcagcagcatagac

SEQ ID NO: 845222 - DNA, 100 bp, Homo sapiens
cgaaatcgtccacagtgacctcttcacacagcatggaacaccagatgcattttcacaattactcacctgtccatattgtgatagaggctataaacgcttt

SEQ ID NO: 845223 - DNA, 100 bp, Homo sapiens
ttgctgagggtcacattgagctgcaggttgaatccggggtgcctttagcaatggctgccatccggaagaaactggtgattgttggtgatggagcctgtgg

SEQ ID NO: 845224 - DNA, 98 bp, Homo sapiens
agaaagcctgcaagtgacgagaggagacttccttgcttctttggagaatgatatcaaaccagttacttgtctgcaagacttttttggtgatgacgatg

SEQ ID NO: 845225 - DNA, 100 bp, Homo sapiens
ccagcatccaactgggagcgttgtcattgcatttccacattcccaggaaagcccagttcctctgtgacgagggtgcaggtatctctggggactacatcga

SEQ ID NO: 845226 - DNA, 100 bp, Homo sapiens
tatgaccgaaagctcaagaatgaacttctaaaaatgtccctcttccagtggaaagcccaaccatgcagacatcttgctcataaacttacagtatgtttca

SEQ ID NO: 845227 - DNA, 100 bp, Homo sapiens
ggaaatcctgccaacagtgcaaggaagcctggttcagcaggtggccctaaggttggagctttgggccagattatgttgtatgtggatggaatgaatggag

SEQ ID NO: 845228 - DNA, 98 bp, Homo sapiens
gatagcaatgatcccaatttccagatgccttgttcaacagtatgtcattgaaagtgcccgacagagacctcctaaaaggaaatacctatcaagtggaa

SEQ ID NO: 845229 - DNA, 99 bp, Homo sapiens
agggcggggaccggcggcgctggaggagcgaggcagctgtactaggactgggaacgggacttcattgacttaactagagagaccagaccaaggacaaaa

SEQ ID NO: 845230 - DNA, 100 bp, Homo sapiens
aaactgcgaaaatgtgaggtgctgaagaaaaaagtagggcttctcaaggaggttgggacagcgtcttcgctgctgctggatagtcgtgttttcggggatc

SEQ ID NO: 845231 - DNA, 98 bp, Homo sapiens
ttgagctgctgaaggttttaggacaaggatcctatggaaaggtgtaattgaaaagtgatcctctcttcagagatgtcaaaaacaaacaaatccaagtc

SEQ ID NO: 845232 - DNA, 100 bp, Homo sapiens
ggccagcaggaccaggagggccacccccaccttttccaggtatacagcctcctgccatgtcaactccagtgtgtgctctgggaaacccagcaactcaggc

SEQ ID NO: 845233 - DNA, 100 bp, Homo sapiens
acatctgaagcagaagtacccccaccacgcctctgcaatcatgggtcaccaagagaggctgagagaccaggactttttttatgaagacatggagtccttg

SEQ ID NO: 845234 - DNA, 98 bp, Homo sapiens
gtcagcagactcaggccgcttacccaaagtggttggttctagctattgccatggtacgtttttatatggaaaaaggaacacacagaggtttatataaa

SEQ ID NO: 845235 - DNA, 100 bp, Homo sapiens
tcacagaagtggccaactgctgtatccgcatcgcccttcctgcccctcgaggctcaggaactggtaactaggatttctacctcaaccgcgagacctatgc

SEQ ID NO: 845236 - DNA, 100 bp, Homo sapiens
gatcccttctctgatttgctgtcagccatgaacggatggatgtgatgcctgctagccaaaagggtgacaggaactccctcgaaaggctttgatgagaagg

SEQ ID NO: 845237 - DNA, 99 bp, Homo sapiens
gttagcagtcacgacctccagcacagataacgaaggaggcccaacttcattcaataaggagcctgacggatttatcccagacggtagaacaaaaggaag

SEQ ID NO: 845238 - DNA, 101 bp, Homo sapiens
cctcatctcatgcagcagtcagttgaatacgaaaggaagaagtttcaagagattttggagaggcaaccaattgatggagtttgcactgtagcaaattgcgt

SEQ ID NO: 845239 - DNA, 100 bp, Homo sapiens
ggcgtcttcgtttgggacgaggagaggatccaggaggaggagttgcagagcctattctgcaaacttggagttcttgtcaggcataggatttcactatttg

SEQ ID NO: 845240 - DNA, 98 bp, Homo sapiens
caccttccattccgagcatccgaagactgggttcagtgaagtttagcaactgcaatggaaaaagaaaagtacaatatgagagcagtgagcctgcagat

SEQ ID NO: 845241 - DNA, 100 bp, Homo sapiens
ctgggcctcctgtgcaaaagcatggtgctgaacatgtacgggaaggtggtgactgtcagacatcaggctgtgacccggaagaaggacaaccgctttgctg

SEQ ID NO: 845242 - DNA, 98 bp, Homo sapiens
ccgcatcgaggacttcatccagtttgctacggtctacggggcagagcagatctcacattcttgaaggtggcattgaagagcactaagatcggaagatg

SEQ ID NO: 845243 - DNA, 100 bp, Homo sapiens
ctactttgacgccctggtgaagatgggggagctggccagcgagagccagggctccaaagaactcgggactttgaacatgtcggggatcgccctcagcaga

SEQ ID NO: 845244 - DNA, 99 bp, Homo sapiens
ttcaagaaaaccaccagtgtttgatgaaaatgaagatggtggtatggtcaggaaaaagactacaatgtactagtcatggatcttctgggacctagcctc

SEQ ID NO: 845245 - DNA, 99 bp, Homo sapiens
caatttgcaagaattatcctcatcttaggggataaatttacggagaaatggcagcacacgttgaaattattcctttgcaggtggtgcaaaggatcagca

SEQ ID NO: 845246 - DNA, 98 bp, Homo sapiens
tccttcccgcgccggtccctgcagcggcgcgtagccgagggcagcgcccgtcaggggggcaccgcggagcaaggcatagaatgtcaagctaaccaggc

SEQ ID NO: 845247 - DNA, 100 bp, Homo sapiens
agaagaaaaggtgtacttgcaagaaacctcaggacttgagtaacagcaacatgtaatcaagatgattaccaactggttcgaaaacttggtcggggaaaat

SEQ ID NO: 845248 - DNA, 100 bp, Homo sapiens
ctgaaatttatgaacaggagtacatcaaactcaaccagattgttgatccatttcagatacttgtggcagcaaacaaagcagttcacctctacaaactggg

SEQ ID NO: 845249 - DNA, 100 bp, Homo sapiens
gctggaatcgccagctcccggcactgctacctctgacccaaagcagggtacccagaaaatatgccttccctacagtcccacaaaaactctttctgtgaag

SEQ ID NO: 845250 - DNA, 100 bp, Homo sapiens
agaagccacagaacaaaacatacgagctggtacccaggcagttttgcaggactaatgtttcaagccagactccctctgccaaaagaagtttgggatttct

SEQ ID NO: 845251 - DNA, 98 bp, Homo sapiens
cattcacaaccccctgaaagcgagcctccctattaaggaccttgccgtagacagcgcctctcccgtctaccaggctgtgattaagagccagaacaagc

SEQ ID NO: 845252 - DNA, 98 bp, Homo sapiens
ttcattgttccactggacgctcatcagagggaagatctttttcctcaattggtgagccagccatgagagggtatcttgtggccatattcctgagtgct

SEQ ID NO: 845253 - DNA, 100 bp, Homo sapiens
ggaggagcgccatagtatccacttcatcattaagaggtcccgcggcagtgctggtggccatggttcccgtagccagaaggagttgcccacagagcccccc

SEQ ID NO: 845254 - DNA, 100 bp, Homo sapiens
gagtcaattaaggaattctttcgaggattaaatatctgccaggctggactgtgctgttcctctctgtcctggggctcctggcctcccgggctgtgtccgc

SEQ ID NO: 845255 - DNA, 100 bp, Homo sapiens
tcattcagatgtggtggaatatgccaaggaaaaactggagagcttcatcaaaaatagtgatagctttgataagaatgtatcctgtcaggtataatgtcag

SEQ ID NO: 845256 - DNA, 99 bp, Homo sapiens
tccatttgaagctgatgaggaaaattggcaaatctgttactgcagacagatgggaaaaatatttgatcaagcctaatcacacggatgctacagagagat

SEQ ID NO: 845257 - DNA, 99 bp, Homo sapiens
gctgcggctcggacgccagcggacacgcgggcgaggccatttcataattctgaatcatgtctgataacggagaactggaagataagcctccagcacctc

SEQ ID NO: 845258 - DNA, 100 bp, Homo sapiens
gcacttgagccacgtgcatgaaccaaacccacttcgttcaagacaggtgtttaagctgccgctgggttagggtctccacaaccgagctggtctcagcaag

SEQ ID NO: 845259 - DNA, 100 bp, Homo sapiens
gactgacggccaaaggattgcttcgaaaccttcgacttccttcagggtttaggagaagcactgttgttttccacacaggacatggtccggcgaggagaga

SEQ ID NO: 845260 - DNA, 100 bp, Homo sapiens
cacaatggagcttcatgtcctcgtgcaggaagtactcatcgactgatgtggcagactttgctccctggcaaaagtgtcatggagaaactccagctgggcc

SEQ ID NO: 845261 - DNA, 100 bp, Homo sapiens
cttaatcctactcagaagaacttgtacagagatgtgatgttggagaactatagcaatctggttttcttggcctcttgttgctgtaccacatagaattcac

SEQ ID NO: 845262 - DNA, 99 bp, Homo sapiens
aggcagtatcgggagcaggaaagccagtgttgtggaccctagcacagaggacctgaaggagaagaaggagaaggtggaggagaaggcaagccggaaaga

SEQ ID NO: 845263 - DNA, 99 bp, Homo sapiens
tggcttggaaccagaaaatatccacatgatgattggacagtcattttgtttactcattcagccctgttgcaggtcccaataaactcttcataaggttga

SEQ ID NO: 845264 - DNA, 98 bp, Homo sapiens
gcaagcgcagggggacggggaccagcagctgtcgccgccgctctcagattgagaggatccagaatccagatctctggaatagctaccaggcaaagaaa

SEQ ID NO: 845265 - DNA, 98 bp, Homo sapiens
tctctggactccttagatgactctgtggtgggtccctcagcccttctgagctctgtgctgaacaagttcctctgtgacgagggtgcaggtatctctgg

SEQ ID NO: 845266 - DNA, 98 bp, Homo sapiens
ccacccaagatggagttcctcctggggaacccgttcagcacaccagtggggcagtgcctcggttgatgataattagaagcatgctttccactgaactt

SEQ ID NO: 845267 - DNA, 99 bp, Homo sapiens
atgatttaaacaagagatttccacagaaggaaacagatgatttgaagagagctgagagtatgcttcaacaagcagataaattaggttgcagacagtttg

SEQ ID NO: 845268 - DNA, 100 bp, Homo sapiens
aggtgaccagcattcagctggagttccgggagctctcccgtctcacaggggataagaagtttcaggattatcattggcaatggcgttcattccttacgag

SEQ ID NO: 845269 - DNA, 99 bp, Homo sapiens
atgaagcttgccaacggggccatcgagctggacaccggcaaccggccccggagactcttgaagacaactctgaaaagtgggctgtgactcccgatgcag

SEQ ID NO: 845270 - DNA, 98 bp, Homo sapiens
aaaacagaaggaagagctgaacgtttagaggcaacagaataccttgtctcagctgctgaagctggtaaatacggcatcatctgcatggaggatttgat

SEQ ID NO: 845271 - DNA, 100 bp, Homo sapiens
caagatttctacagtctctggatgaagacaacatgacaaaacaacctgggccagtatttctaaaggagacttcagattgttcctacttgtttgagtggcg

SEQ ID NO: 845272 - DNA, 100 bp, Homo sapiens
gtttacacatgtggtttgaacaccaaggggcaactgggccatgagagggaaggaaacaagccaggatacctgcccactatgtctatccgcaggcttttgt

SEQ ID NO: 845273 - DNA, 100 bp, Homo sapiens
accaaacaccacatgttgtctcttagaagtgggagctgaacggtttttgacaactatgcagtcacagttatgattggtggagaaccatatactcttggac

SEQ ID NO: 845274 - DNA, 99 bp, Homo sapiens
gtaattcttggactcagctatgctaatttgcaaacaggtcacatatcctggagcaggaaaacttccacacatcattggaggatcagatctaatagctca

SEQ ID NO: 845275 - DNA, 101 bp, Homo sapiens
gcgaccagacgtccggggccgctgcgctcctggcccgcgaggcgtgacactgtctcggctacagacccagagtgatacatttgatattgcctggaatggca

SEQ ID NO: 845276 - DNA, 100 bp, Homo sapiens
ggagaccggagcgggagacagcggtgacaggagcagcggccgggagcccttagggaggcagattgtagggaatggaagtgaacagcagctgcaaaaagag

SEQ ID NO: 845277 - DNA, 100 bp, Homo sapiens
ccagaaaagaaagtaccggtgcctcctgccaaaaagccagaagctccacctcctaaagggcctgttcttcttgatgaatttgttgagtggcaaaaagtcc

SEQ ID NO: 845278 - DNA, 98 bp, Homo sapiens
agcagcatatgttataccagcaggagcagcaccatcaaattctccagcaacaaattcaagtggactgggtggttatggatcaggagacagtgaagatg

SEQ ID NO: 845279 - DNA, 99 bp, Homo sapiens
acaattacctgtataatcatctcacctatgcagtcaacatttggagtgaaaacgacccggcagatgttgacgtggagaatcccgacctggaaaagttcc

SEQ ID NO: 845280 - DNA, 98 bp, Homo sapiens
cacgctcagcctcagaagaaagacgttcaacgacttactggggagagaaagaaaaggaacgggagctgagaggtactccaaagattcaggtttactca

SEQ ID NO: 845281 - DNA, 100 bp, Homo sapiens
taatcgcctgctttgattcattgaaagagccaccagaaatggaactattgaaatttttcaggccagaaaacattacagtttcctcaaggccatcagtaga

SEQ ID NO: 845282 - DNA, 100 bp, Homo sapiens
cgcgggcccccgacgcgctgcagccggcagcccaccgccgccttcttggcgcgaccccaacccagccccaatctgtctcgtaactgtgtaatcaaggaac

SEQ ID NO: 845283 - DNA, 101 bp, Homo sapiens
ctttaccaatcaggaggttaaggatatcaatgagtgtattcttgaaaactatcccgagtgctccaaccccaggttattttacatcattccgtacttttgtg

SEQ ID NO: 845284 - DNA, 98 bp, Homo sapiens
tttgaaaagttcatgctgtcccttcattgaattttaggccaaagaacagacaggagcaacggcttctgtcatttatgttcctccgccttttgctgctg

SEQ ID NO: 845285 - DNA, 100 bp, Homo sapiens
caaacgcagaaggactgcctcactgagcaaccaagattctggagagtcttggcttctgggaggaagtcagagggattatctcaggatcagagctgataac

SEQ ID NO: 845286 - DNA, 99 bp, Homo sapiens
tatcatctgcggcagtatacagaagccatatcagttggtgaaaaactttatcagttcatagagccttttgcatatagcactttctacattgtgggttta

SEQ ID NO: 845287 - DNA, 101 bp, Homo sapiens
atactcaatcttatccaatgaggaacccaacggatatgatctctagtaactaccagacctgtctcggccttctgatgcattacccattcatcggggatgta

SEQ ID NO: 845288 - DNA, 75 bp, Homo sapiens
ttcttgggacaaacttcatttggtgatctttgacgagactctacagaagtgcctggactcctacctgcgctatgt

SEQ ID NO: 845289 - DNA, 100 bp, Homo sapiens
tttccagagaagagaagctttactggtgttccagccctaaggtgatcgaggaaacatctcaacatcttctaaaccagcctctacatcaggaaaatcagag

SEQ ID NO: 845290 - DNA, 99 bp, Homo sapiens
tgaaagatacatggcttgcaaaaagtaaaccacgatcgttatgctgagttgaagcactggacaatgccacatactttgtggatggtgtgggtcttgggg

SEQ ID NO: 845291 - DNA, 100 bp, Homo sapiens
atacattcacctcctgctttattctgaagttcaagtatgagaatacgtgttgacatacaagccagctatggtgaaatgacaatggatgctctgttggctc

SEQ ID NO: 845292 - DNA, 100 bp, Homo sapiens
ttggaagtggttctacaattgtccatgctgtgcagcgaatagctgctgtgttgaaatatgaaaacaatgtcatgaatatcaggcagtttaactgttctcc

SEQ ID NO: 845293 - DNA, 100 bp, Homo sapiens
accgtcggaggaggagggcgagagaaagaagctggcccagcggctgcaggatgccgaggaggccgtggaggctgttaatgccaagtgctcctcactggag

SEQ ID NO: 845294 - DNA, 100 bp, Homo sapiens
acggttaggaaggagtatagatgacataggtcacctcattcatgaaggcctacagaagatggggtcgaggatttggtcttttgggttccatttttggaaa

SEQ ID NO: 845295 - DNA, 99 bp, Homo sapiens
tcatcttcaagctcttctcctccattcaagagcctgttggtgacctgcacacaggagccctccagtcagtactgattgaattactcaaggctgcctctc

SEQ ID NO: 845296 - DNA, 100 bp, Homo sapiens
gaaagagccacctccagtagtaaattatgaagaagatgcacgatcagttacatctatggtcaacgaagtgacggtggaacagctggtgcagcagtacccc

SEQ ID NO: 845297 - DNA, 50 bp, Homo sapiens
cgcgcctcgaggccgagtcaaggtacaaggaaatggtagaactagtgatc

SEQ ID NO: 845298 - DNA, 100 bp, Homo sapiens
gaaggacagtcggcccctctgtcactgggcagttgacagagaaagcttcttgctatctacctccaccatgatgaaagtgtgttaaccaacgtgttctgct

SEQ ID NO: 845299 - DNA, 100 bp, Homo sapiens
gatgaagtgtgcggagggctacggcttcaaggaggaatacgagccttggtcatctataatttcctgagcctgtgctatgagtacctaggaggagaaagtt

SEQ ID NO: 845300 - DNA, 98 bp, Homo sapiens
ccgtggctgccatcatccaggacatccattcccagagggagagggacatgttccgggaagcagacaggatgttgacaatgcgtctctggcacgtcttg

SEQ ID NO: 845301 - DNA, 99 bp, Homo sapiens
gaaaaaccgctatgtggtgctgaaaggggaccagctctacatctctgagaaggagtgtgccctgatcttgtagacaagtatctggaggagacatcaatt

SEQ ID NO: 845302 - DNA, 98 bp, Homo sapiens
tggcctctggcaccaccaccaccgccgtgaagggaactgctcgcagaaagaagaaggtggttcatagaacagccacagcagatgacaaaaaacttcag

SEQ ID NO: 845303 - DNA, 99 bp, Homo sapiens
atctctggtgcatgctgatgacgaaaaacgaaaaccagtagattcccagacatcgcgaagtgaatctgaaattgtgccaaaagttgctaaaatgactgt

SEQ ID NO: 845304 - DNA, 100 bp, Homo sapiens
cttctttgtcttacttgtcatttgaaggtgcaactaaaagaaacagaccaaatgtgcagcatccgtacccttccgaagagcagaagaaacagttagcgca

SEQ ID NO: 845305 - DNA, 100 bp, Homo sapiens
cttacccgtgacaaaatgtgttccatggtcaaaaaatggcagcttcataaacaagcagatatgcaagaagagaaaaaccgaatcgaaagagtccttggcg

SEQ ID NO: 845306 - DNA, 98 bp, Homo sapiens
ccaccgcgcggggacgacggcggccatgagctcgcggaagctgagcgggccgaaaggcaggaggctcagatacctactggagcaggatttcccaggca

SEQ ID NO: 845307 - DNA, 100 bp, Homo sapiens
tggcaccccctgtgaccagaacggcacggccatctgtgtgtctgggcagtgcaaggatgtaacagtccctcccaagcctgtctcgctccatcctttatat

SEQ ID NO: 845308 - DNA, 98 bp, Homo sapiens
tacatcagtgtgggaagccaagcagatacaagtggtactgtgaaggcaaggagcttgaaaattccccagatattcacatcgtccaggcaggaaatctg

SEQ ID NO: 845309 - DNA, 98 bp, Homo sapiens
tcggctgtttcacaaagaagcatattcacgagcatgcgaaggcgaagcggcacaacctggaagctaaaccagccccagaaatatttgaaaatgaagtc

SEQ ID NO: 845310 - DNA, 111 bp, Homo sapiens
cagcaccgacagccgacgcgcagatagcagagccatccttggggtgaaccacctgcgctgcctccacgagttcgtcaagtctcagacaacctactacgcacagtgctaccg

SEQ ID NO: 845311 - DNA, 100 bp, Homo sapiens
gagtatctatatgagaagctctgtgaggggacactgttgtcacaagcagtgtttcctctggatatggcagtggcagtggctatggcggtggcctcggtgg

SEQ ID NO: 845312 - DNA, 100 bp, Homo sapiens
ctggagatggccagttacttaagggcaattgaaggaacagactaaaaatcgtgtcctggaaggaaactacaggtactaccagggattttcagtctgaaga

SEQ ID NO: 845313 - DNA, 98 bp, Homo sapiens
tcgaattccagaatgatgaaattgtctgggcagatgctcaaactcaaatccaaaacattgctgcatcttttgaccaggaggcagctgccattcttatg

SEQ ID NO: 845314 - DNA, 100 bp, Homo sapiens
tcggatgctgatggggctggacctgctggtgttcgcccacgaccatgggctccatgaagaaggagttcccgcagaacctgggaggcagcgacacatgcta

SEQ ID NO: 845315 - DNA, 100 bp, Homo sapiens
cagggctgctgccagcacctgccactcagagcgcctctgtcgctgggacccttcagatgttttcacctcctgtgagcagtgggaaaaatggaccaacttc

SEQ ID NO: 845316 - DNA, 99 bp, Homo sapiens
cagctaggagcgctctgtggtgcctggggctgaacgcggctttctggcacctgcggaactcgagtcatgcaggagcttttgtgatcgtgacggaagaag

SEQ ID NO: 845317 - DNA, 99 bp, Homo sapiens
tctagcaaaaccactgctaagttatccactagtgctaaaagacaagttggatggcttgaggactggtactaaaaggaaacgtgactgggaggccattgc

SEQ ID NO: 845318 - DNA, 100 bp, Homo sapiens
gcacagagttcagaagactttaacatgggctcttcctctagcagccagtatactttctgtcagccagaaactgctgctgaaaagaaatgctgcttctcgt

SEQ ID NO: 845319 - DNA, 100 bp, Homo sapiens
gttatttgtctcaacaaaagagtcctgcaaccctggttccagtctggcaagcattgtagacctggctgctgaagactgacggggcccagggtccgctgcc

SEQ ID NO: 845320 - DNA, 100 bp, Homo sapiens
aagaacgcgctcctccgcctgctgcccgggctggcctgggccgagccagtggcccccagaggatgagaaggaggtgatccgccgggccatccagaaagag

SEQ ID NO: 845321 - DNA, 100 bp, Homo sapiens
tcttatcgaaggatgtgcatgaaggacagcctcttctcaatgtgcggaaacaggaaattataaaagtgacagagcagctgattgaagccataagcaatgg

SEQ ID NO: 845322 - DNA, 100 bp, Homo sapiens
aaattcttaaaaaggctcagaaagatggatttttgcatgagacgcttctggacaggatccctgctgccttggtgatcccgggctgacagccagagagcac

SEQ ID NO: 845323 - DNA, 98 bp, Homo sapiens
ggcttcctagtgagtcggcggctgatttagaaggaggttcaggctacggtgagccgaaggaaacgggactggtggtgatgaccgaccgagtgagcctg

SEQ ID NO: 845324 - DNA, 98 bp, Homo sapiens
tttgcctttgattattgcttttggtccatggatgaatctaacactacaaaatacgctggttataatcaccaacagatgagtgaaggacacaggcagaa

SEQ ID NO: 845325 - DNA, 100 bp, Homo sapiens
gtgatgccattccagcactggactcatggaggctgagcatttattcaggtgaagtggatcctaaagagaggatagcacgccaacgaaaattattacagaa

SEQ ID NO: 845326 - DNA, 98 bp, Homo sapiens
tcatcccatcagcctggattggtgaaactgaatcacaggagatatttccaggaacggaaaacagttcttccttcaaagcatgcagtacctgaagtaat

SEQ ID NO: 845327 - DNA, 100 bp, Homo sapiens
ggtccccgacctcgctgtgggggctcctgtttctctccgccgcgctctcgctctggccgacgagtggagaaagtttaaatgtgatactggtgtagatctc

SEQ ID NO: 845328 - DNA, 98 bp, Homo sapiens
cctggtccctctttcgcaaattctccacctttgcgaacagagggtctttaggacacagattcttaaaagtgcaggatcccatggtccattattgcctt

SEQ ID NO: 845329 - DNA, 101 bp, Homo sapiens
tatcctcccgactctgcttaaaaccacgtggttcgatggctgccgcggctacgctgaggctctccgctcagttacaggtcggttcacccagaagccagggg

SEQ ID NO: 845330 - DNA, 100 bp, Homo sapiens
aagtatatcaagcattcaaattgctcacagctgatcctaaggttcccgtgtcagtggctatgatgacacctcaagttatcactccccagcaaatgcagca

SEQ ID NO: 845331 - DNA, 98 bp, Homo sapiens
ttaccatatggcccatggaaaagattttgcatctagaggaattgaaaaccggttggagggtgacagatcagaaggctctggtcaagagaatgaaaatg

SEQ ID NO: 845332 - DNA, 100 bp, Homo sapiens
tacctgtgcaataatgcttcttaataccgatctacatggccacaatatctcatttgaaaccatgtatgatgtcctgtcaacaaaacctgtcctcaacaag

SEQ ID NO: 845333 - DNA, 98 bp, Homo sapiens
tcacaggcgtggacctgtctaagggtttggtaaaggctccagtgtggtggcctatgaaggacaatcctggcacgactactgcttccactgcaaaaaat

SEQ ID NO: 845334 - DNA, 100 bp, Homo sapiens
tgtgacaaatcaacacaaaccccaagtcctccttgccaggccttcaaccactatctcagtgcaatggcattcgttcagtcagagagcataatagaagtac

SEQ ID NO: 845335 - DNA, 100 bp, Homo sapiens
atccggatcagtataacttttcaagttctgaactgggaggtgactttgagttcatggatgatgccatggagcacatgatccagaagaaccaatgtctctt

SEQ ID NO: 845336 - DNA, 100 bp, Homo sapiens
acctggagtccagcccacctctgtctatggagactttagctgtaaggaggagccagaaattgacagcccaggggttgagccccatatgggggttggcagg

SEQ ID NO: 845337 - DNA, 99 bp, Homo sapiens
tcttacatgcaatgtgtacactgtgctttgctgtcactggaaggaagacaactgttagttttgtggcttactgctgctccacccagtgtctgcagactt

SEQ ID NO: 845338 - DNA, 113 bp, Homo sapiens
tgtgagggaactggttctgcaaggagcagacatcaatctccagagagaggtgttttcacagtcctgtgtttggtatggagagtgtggaattgcatatggggacaagaggtaca

SEQ ID NO: 845339 - DNA, 100 bp, Homo sapiens
acttataagagattcagcccagtgtgctgcaatagctgaacgtttgatgcatttgacctctgaagaactggctcataggcggaagggacttgccttgtct

SEQ ID NO: 845340 - DNA, 100 bp, Homo sapiens
cgcggatctcaacatcaagaactgtatcctgcactggatggatcagcggacaacacacagaccggtaatctgggtcaatcagttctgccatcccacccag

SEQ ID NO: 845341 - DNA, 98 bp, Homo sapiens
gttccactggacgctcatcagagggaagatctttttcctcaattggatgttggcaaaggatgaactgatgaccatacttgagaaatgtttcaaggttt

SEQ ID NO: 845342 - DNA, 100 bp, Homo sapiens
cgagacaagttcaccccgaagtctgccgaaggcacagatcattcatggggatgtataaccgaaaccagtcctctccaccgcctggggatcttcactttcg

SEQ ID NO: 845343 - DNA, 100 bp, Homo sapiens
tgctcggaagttacacagaggacaatgcttcccaggctcgagttgatgcccacagaaattattcttgacagaagtattttaaaagaaaaatctttacgat

SEQ ID NO: 845344 - DNA, 100 bp, Homo sapiens
ctttgtgcccgtggtatatcatgatcttacctgttgtttgactatgaaaaaggttttgccagatcgaagtcatcctaaactgctgatgagtggaggtggg

SEQ ID NO: 845345 - DNA, 98 bp, Homo sapiens
tggcggagaagctcaccatcctcaacgaccggggcgtcggcatgctcacccgcctctacaacatcaagaagatctacgaactgcgtgtgatggagacc

SEQ ID NO: 845346 - DNA, 100 bp, Homo sapiens
tcacctgaggcacccgaagaagagaccatccatatttccaggtaaacgctgcatttctacaacagccacctgtgcaggccctgcatgctctgtaacctgg

SEQ ID NO: 845347 - DNA, 100 bp, Homo sapiens
tccagacccttgcgatgctcctgatcgggacagtgtctttccacctttggatccgcagaaatcgagggaaacctcaaatgaattctgaaggggagatacc

SEQ ID NO: 845348 - DNA, 100 bp, Homo sapiens
gaatgctgctaaaaacaagactggggctgctcccatcattgatgtggtgcgatcgcctccattgtgttccctcctccaggggcttctgaggagaatggcc

SEQ ID NO: 845349 - DNA, 102 bp, Homo sapiens
caacatcaacaaccagtccttcaataacttcatgctgcgcatagggcttcaagatgggctgcgctccagttccaacagccgcagcgggagccgggagcggcg

SEQ ID NO: 845350 - DNA, 99 bp, Homo sapiens
ccaggtgcatatgtggttttacacatgatgatggatacatgatctgttgtgacaaatgcaggatatgcctttcacctgtgaaggtatcacccctgatat

SEQ ID NO: 845351 - DNA, 100 bp, Homo sapiens
agggcagcagtagaatcacttgggttcattctattcaggtttgtctacagattttgagcgttcgaagttgacccctgactaagtatactttgctgctccc

SEQ ID NO: 845352 - DNA, 100 bp, Homo sapiens
aaggacacggtctacaccgacttcgacggcttcaccggccagaactgtgaggaaaatatcgacgattgtccaggaaacaactgcaagaacgggggtgcct

SEQ ID NO: 845353 - DNA, 99 bp, Homo sapiens
tcgagccgggtttatgtcaaaaacccaaagaggatctttcgcttttgctgataaaggacctcccccagtggtattgttggaaatagtgcaactgcatta

SEQ ID NO: 845354 - DNA, 100 bp, Homo sapiens
aggaattgctggtgccttcattcatgaaaagcatgcccatacgattaaacctgccaaaacccttgaagatcgtttgaaaattgaagcaaaaaatgggaca

SEQ ID NO: 845355 - DNA, 100 bp, Homo sapiens
ctgtgggggtgtcctggtgcacccccagtgggtgctcacagctgcccattgcctaaagaacctcaatcctggtcctctggatgctccaaggctcccaggc

SEQ ID NO: 845356 - DNA, 99 bp, Homo sapiens
agtgaaggagtgcagaggcatcacctgaaagtgcacgatctgattttctggagagatgtgaagaagactgggtttgtctttggcaccacgctgatcatg

SEQ ID NO: 845357 - DNA, 99 bp, Homo sapiens
ttgtacagtgctctccggtgctgtgacaatgatatggaaagaaaaaaagtcttggatgatctaaccaaggctttccttaaagtttcccatgtctcaatg

SEQ ID NO: 845358 - DNA, 100 bp, Homo sapiens
ggcgcctctgcgcgcgggaagatggcggaacaggctaccaagtccgtgctgtttgtgtgtctggattacatgaagcagatgacatttgaagcccaagcct

SEQ ID NO: 845359 - DNA, 100 bp, Homo sapiens
gagccaatattaatgcacagtctcagatgcggttcatgctattattcagccggcagggaaaactgcggctgcaaaaatggtacctggccacttcggacaa

SEQ ID NO: 845360 - DNA, 51 bp, Homo sapiens
gctggctggcggagcatgagcgccccaggaatcttgtcgattggcctggct

SEQ ID NO: 845361 - DNA, 98 bp, Homo sapiens
tgatgtggccgagcagcataatgtctgcttccactacacttttgccctcaaccgaattcacagatggattcagtggaaaagacaacaaatagaagtga

SEQ ID NO: 845362 - DNA, 98 bp, Homo sapiens
gttttgtggaggtggttctttacaggatatttatcacggatattggtatggtatagagcttgaaaaaccccatggcaagaatgatggttcagttggag

SEQ ID NO: 845363 - DNA, 100 bp, Homo sapiens
agtgcttcaacaagatttcgagagacgctgactgtcgggcggtggtgatctctggtgcaggaaaaatgttcactgcagggacccccgatgatgccacctt

SEQ ID NO: 845364 - DNA, 100 bp, Homo sapiens
acaagctgtacgaaaagcggaaggtggcagcgctggagatcgagaaataacagcgacttgattgcatgtacagtgatcaccaaggatggcggcatggtcc

SEQ ID NO: 845365 - DNA, 99 bp, Homo sapiens
aattactgagagacaacttgacattgctgatgattcctctgatcatgtcagtactttatgtctgggcccagctgaacagagacatgattgtatcatttt

SEQ ID NO: 845366 - DNA, 100 bp, Homo sapiens
ccaagaccccattgatgctctctcaggagatctggacagctgtccctccactacagaaacctcacagaacacagcaaagagccagataacagtgaatgga

SEQ ID NO: 845367 - DNA, 100 bp, Homo sapiens
ctaacagctcggagcaggagaggacgggactgccaagagacatgttagaaggacaattgcagtacctaccccagctaactggcagcagcatccttccagc

SEQ ID NO: 845368 - DNA, 99 bp, Homo sapiens
ctgaatttcggttccagctgtgtgctaggagcaggacatcgagactttacatggctctgttcacgtcacgctgtgtgggactcccaagggaaaccggcc

SEQ ID NO: 845369 - DNA, 100 bp, Homo sapiens
ccgcaccccaggcccccagaggccagtctgtttgcctcccaacgccatctgacccagggaactctaatgatccaggacaaagaagttaccctggagtatg

SEQ ID NO: 845370 - DNA, 98 bp, Homo sapiens
gttcatctgctgggtccgggaggctcttggagacttaattcagtgcacaaatgagatgaatgtgaacatcccacagttggcagacagtttatttgaaa

SEQ ID NO: 845371 - DNA, 98 bp, Homo sapiens
ctgtctggtacctggtacccggcacactgtgagttcctggacatcaagggctgcttggatttacactgggcaacgtggttggaatgtatctggctcag

SEQ ID NO: 845372 - DNA, 100 bp, Homo sapiens
atccggcccctgcggaagcaggtggagctgctcttcaacacacgatacgggttgtgagtcccggcccagcccctccacccccctgcccccccgatgcgac

SEQ ID NO: 845373 - DNA, 100 bp, Homo sapiens
accgagagcgtgaccgagagcgcgaatatcgtcatcgttagaagggagtcatttaatacttcatgattagaacaaatatgtgaaagttcccaccaaccag

SEQ ID NO: 845374 - DNA, 100 bp, Homo sapiens
gacgagctgcagttgtgggcaccttgtatgcgaacccttaggagaaatcttgagagtggacagcaattgtgaagatcgccagagagttctgtgtttcatc

SEQ ID NO: 845375 - DNA, 98 bp, Homo sapiens
gcaagcaggcaacctgaatacagagctcagaggacgaatcaaaatgggtagaagaactcatgaagatgcacacagctagggtgcgtgacattgaacat

SEQ ID NO: 845376 - DNA, 100 bp, Homo sapiens
acagatgcgtctcgctcaagtgatctttgataagaatgattcagattttgaagctaaagttaagcagcaattctgtggtgttcttggtcacacatttatg

SEQ ID NO: 845377 - DNA, 100 bp, Homo sapiens
gtggtccaggtcttcatgctgctgtgggtgatattactggtcctgggtgagagcacagtaaggactattgctatggatggtacagaaggcttggttagag

SEQ ID NO: 845378 - DNA, 100 bp, Homo sapiens
tgggggtggctgggagcagcgcagcctccggaggaggaggcggaggccgagcagagtcacctgatatgaaaaaggagcaagacccccctgccaagtgcca

SEQ ID NO: 845379 - DNA, 100 bp, Homo sapiens
gcaacatttcccacaggacacgaagtttgtcggcccttgccttggcagagctgagaaatgcacagcggtattgatgagtagatccttggattcagaggtt

SEQ ID NO: 845380 - DNA, 100 bp, Homo sapiens
agtttccaagtcaggatatgtgcctttcagctttaaagagaattgaagacttaattcagtgcacaaatgagatgaatgtgaacatcccacagttggcaga

SEQ ID NO: 845381 - DNA, 100 bp, Homo sapiens
gtgccgcccgcgccccggggcagcagcgcgtcccaggaggagcaggacgaggagatacaaggcagatccaaccatccccaccgtggtcctacgatcagtc

SEQ ID NO: 845382 - DNA, 98 bp, Homo sapiens
atcacatgaccaaagcattcctcttctatggagatggaataaactgagactgcaggacaaagagaaacgtctgaagctggaggacgattctgaggaaa

SEQ ID NO: 845383 - DNA, 100 bp, Homo sapiens
aacagcaggccacagagctgcttgcggccaagtacaaggaagcacaagcctatgcagacgacaacagtttgctgttcatggagacatcagcaaagactgc

SEQ ID NO: 845384 - DNA, 98 bp, Homo sapiens
cgaggtgcagaagttgtctgagtgcgttggtcggcggcagtcgggccagacccaggactctgcgactttacaccgaagccaggacagcacagccgtag

SEQ ID NO: 845385 - DNA, 129 bp, Homo sapiens
gcaccatcggcaagggcaacttcgcggtggtcaagcgggccacgcacctcgtcaccaaggccaaggcactgacatggccgtcttctgtctgctgtgtgggaagcgcttccaggcgcagagcgcactgca

SEQ ID NO: 845386 - DNA, 100 bp, Homo sapiens
gctctatagccaaggaaggcttcgagaagattagcaaaggtgctaatccagtggaaatcaggagagcctggatttgtggtatcatttctatcactgtcat

SEQ ID NO: 845387 - DNA, 100 bp, Homo sapiens
gggcatcccaggcaaggcagctaccaagcacaggtgtgaaggagagacagcgtctggagaccatcctcagtctctgtgctgaatacacaaagcctgacag

SEQ ID NO: 845388 - DNA, 100 bp, Homo sapiens
tattctggtggggagatgaacccaacctagtgggtgtaatacatcatgaactgcaggatatggaagaaagtagcagtgttgccatgttggtgccagatat

SEQ ID NO: 845389 - DNA, 99 bp, Homo sapiens
catgtcagctgatccagataatgaggatgcaacaggtagtcaaaccacacactccattaataaggtttcctgacagaagagacaatcctaaacccaatg

SEQ ID NO: 845390 - DNA, 98 bp, Homo sapiens
tcacttgactaatcttcgggcagagagaaggaaacacttagaggaagttctggagatgaagatttgtacacacagatatgacgaaagacttgaaagaa

SEQ ID NO: 845391 - DNA, 100 bp, Homo sapiens
gagtcatttggaattgtgggtaaattattatgtacgatggaatccacggatgagacctcaggtacggttgacatttagggatgtggccatagaattctct

SEQ ID NO: 845392 - DNA, 99 bp, Homo sapiens
gcgcgcccagagccccgcgtttcagccctagggaagttccctgaatgtggtttctacggaatgtatgataagatcctgctttttcgccatgaccctacc

SEQ ID NO: 845393 - DNA, 100 bp, Homo sapiens
tccggaatatggagaagtaattcagctacagggtgaccaacgcaagaacatatgccagttcctcgtagagttgttctaccatctccagagggaacgctgc

SEQ ID NO: 845394 - DNA, 98 bp, Homo sapiens
ccgctgcccgggccatccctcgaggaagtttcatcagaaccactttcttcacaagatacacaccggatgactggtacaggtccaatttaaccaactat

SEQ ID NO: 845395 - DNA, 98 bp, Homo sapiens
tctgaaggcgacaggctcagggtggagctggcggagaaagcaagtaagctgcagagcatcgaactggctccacacaaagtcctcggacacaacctcga

SEQ ID NO: 845396 - DNA, 100 bp, Homo sapiens
tccactcaagaatcgtaggccaggctgatggagagctgaacattactcttccagaagaggatccactagttcctggactatgggaactgatgactcgccc

SEQ ID NO: 845397 - DNA, 100 bp, Homo sapiens
gagcgaattgtggcagagtgtaatgctgtccgccaggccctgcaggacctgctttcggagtacatgggcaatcacaaagacattagcaggctgctggttt

SEQ ID NO: 845398 - DNA, 101 bp, Homo sapiens
tcagcgaggagcagcagcagctccagcaggcgctggctcctgctcagcacgaaagcaagagattatcaaagtcactgaacaactgatcgaagctatcaaca

SEQ ID NO: 845399 - DNA, 99 bp, Homo sapiens
gtgacctgcttttcggttccgggtcttggccccgtccttacctcacaggctgtgacagtgaggaactccatggctaagtctctgtatagtgccctgttt

SEQ ID NO: 845400 - DNA, 98 bp, Homo sapiens
cggagcgccatggcctgcatcctgaaggctatgactttgcagccgtcctggagtggttcgcggagcgtgtggaccgcatcatcctgctcttcgacgcc

SEQ ID NO: 845401 - DNA, 98 bp, Homo sapiens
ctcatcaatggccatttgaattcacttcagagcaatccactactgccagaccagaaggaggaacatatgcagcagaaaaaagaggaggaagaagttct

SEQ ID NO: 845402 - DNA, 100 bp, Homo sapiens
tgcgtcgcccgaggcgaggaggagcgctggcggcgaacagctgcttggagaactacaagtgaagaaaagaaagcattagatcaggcaagtgaagagattt

SEQ ID NO: 845403 - DNA, 100 bp, Homo sapiens
ccgtccgtgtcaccgccggaacctggcgcaggttggaatgttgcatcagcaggtagaagaacatgaaaaaatcaagcaagagatgaccatggaatataag

SEQ ID NO: 845404 - DNA, 99 bp, Homo sapiens
ttcaacctcaaggccagccgcggcaacgaccgcaaccgcatcgtgctgcctttcagtttcgcctggccgacgtttgatgcaaatgatttgtatcagggg

SEQ ID NO: 845405 - DNA, 100 bp, Homo sapiens
gcaaagatattcaaactctaaaccatctgaattggctcaatgatgagaaagctgtatgtgatggcttctgtgtttgtctgtctactcctttctggattgg

SEQ ID NO: 845406 - DNA, 100 bp, Homo sapiens
tccacagagacatcaaaagtgacaatgtacttttgggaatggaaggatctgttaagctcagtacaggtttgcagattccgccagcagcacagcaagctct

SEQ ID NO: 845407 - DNA, 100 bp, Homo sapiens
gggagaaactggctgcagcagagcgagtacttcgttccaacatggacatcctgaagccaatcctgctagagatgatcgctatggaaaatcctgcagactt

SEQ ID NO: 845408 - DNA, 145 bp, Homo sapiens
agatgtggtggaatatgccaaggaaaaactggagagcttcatcaaaaatagtgatagctttgataaaacatagacagagttgtgtttgttggaaattttctcagaatcaatatggtctccatgaagctgctggcatatgccatgg

SEQ ID NO: 845409 - DNA, 100 bp, Homo sapiens
acgaacagcagaaccatcacctgggcaggacgggaccagcagagcggctgattttaccaaatgttgcaagaactctggagttcttatggtagtaaaatgc

SEQ ID NO: 845410 - DNA, 124 bp, Homo sapiens
gcaagatctacgtggatgatgggcttatttctctccaggtgaagcagaaagagttcaagctgaagaagatgtggaaaagtcccaatggaactatccggaacatcctgggggggactgtcttccg

SEQ ID NO: 845411 - DNA, 98 bp, Homo sapiens
ccctataacactcttctccaaaaggacctgccagagactgggagtgttgactgctgcaaggaccaaggcgtgcagtatggtgaatatgttaataacca

SEQ ID NO: 845412 - DNA, 100 bp, Homo sapiens
gtcaccctggccctcgcggtggctgcctttagtctggtgagctgtaccttctttctggcagtgaatggtctgtattcctctagtgatgatgtgatcgaat

SEQ ID NO: 845413 - DNA, 99 bp, Homo sapiens
agcacctttcggcttctgagacggcggcagcagcggcattcaggtttgaatcttcagacaaacttctgggaggactcggtccctgcctcgcagcagatg

SEQ ID NO: 845414 - DNA, 99 bp, Homo sapiens
aaaaaatggtggtgttgttactacagccttctatgatccaagaagtctgggcacagttggcgggcagctcccaggtctccatgagtacggcgccgtcgg

SEQ ID NO: 845415 - DNA, 98 bp, Homo sapiens
ccgtatctgcctaggcattttgctgtctcctcctaatacgattggcaagttatgtgcccattctcaacaacgccaatatagatctgcttattatcctg

SEQ ID NO: 845416 - DNA, 99 bp, Homo sapiens
cagaagcgggcggcgcgggggagatgaatgccagaggattcaacatgagcatacctatgcctgggcatccagtgaacttctccagtgtcactctggagc

SEQ ID NO: 845417 - DNA, 99 bp, Homo sapiens
gattttgcatgcagcaggtgcgcaaggtgaaatgttcactgttaaagaggttgataacactgatgctgaggggaggctcatactggctgatgcgctctg

SEQ ID NO: 845418 - DNA, 98 bp, Homo sapiens
gcctccaggatctgtcggcagctgctgttctgagagagcagagctgacatctgataaagacatgtaccttgacaacagctccattgaagaagcttcag

SEQ ID NO: 845419 - DNA, 99 bp, Homo sapiens
gcaagccggtgcagcagccttcagcttttggcagcatgaaagttagcagcagcacacttctgcttttgttccttcatcaggacgaatttactcttttgg

SEQ ID NO: 845420 - DNA, 132 bp, Homo sapiens
ggggccgggcgacctgggcaccagcaggacccgaggccaggagccaggggcccagaaggagaacatttcaggataggaataggccaagtgctgagaagatgagtcttaggattgatgtggatacaaactttc

SEQ ID NO: 845421 - DNA, 98 bp, Homo sapiens
ccgaggagaagtaccaggaggcgttggccaaggtttctccacagacactacccaaagcagtccttcactacagtggcagacagacctgaaaattttca

SEQ ID NO: 845422 - DNA, 100 bp, Homo sapiens
aacaacaccacaataatccacagccaaggatgagttagatgaactccgtgctgagatggaagagatgagagacagttatttagaggaagatgtttaccag

SEQ ID NO: 845423 - DNA, 100 bp, Homo sapiens
tggacattggatttggtggaacagcaatcatgggaaggccatggtaaaatttcagtatttgctgtcaaaatggctttagccacattgtgtggagggaaga

SEQ ID NO: 845424 - DNA, 100 bp, Homo sapiens
cttggacattttacccttcagtcggcccaagaaatcaaaataaaggaaacacatttcatatactgcagaatgccttccctgtgtctggtcaactctatac

SEQ ID NO: 845425 - DNA, 99 bp, Homo sapiens
gaagacaaagcagagttggaaagtgatccaccttacatggaaatgaagcccacaaaacaaaccgcctgcagctcctgttataaatgagtatgccgatgc

SEQ ID NO: 845426 - DNA, 100 bp, Homo sapiens
aatctgcaaaagaagagaagcagaattatacctagaagtctactaatggacagttagtcacccacctacatgttgagatttacactgactgggccaacca

SEQ ID NO: 845427 - DNA, 100 bp, Homo sapiens
ccttaaaaccgaagaggaggacggtcagttcaccgggacctggaggcccagattgcgatcgtgacggagaaccaggccctgcagcagcagcttcaccagg

SEQ ID NO: 845428 - DNA, 100 bp, Homo sapiens
tgagtgaccaagcaaggtacccaccaggccgattatgtccattgttctcttggagcagctggtcatcatgcctgaagagttgagagaaatcattgagaag

SEQ ID NO: 845429 - DNA, 100 bp, Homo sapiens
cctcctagtagaaaaagttcttgggacaaacttcatttgcttggaggtattatagcagaagtgaatttggccgagcattctacagttattacatttttag

SEQ ID NO: 845430 - DNA, 106 bp, Homo sapiens
tggaatcgggaggtcatctggctcgtcctgcgctgagcatttgaacacagggctgtcaagggagaggagccttcttcatcccctacttcatcttcttctttgtctg

SEQ ID NO: 845431 - DNA, 100 bp, Homo sapiens
tgttgttgccggagctgagaccgggcggccacagtccgcagggatgaacctcgagttgctgggaatttacaagctcaggctcagccaacactgagaccac

SEQ ID NO: 845432 - DNA, 100 bp, Homo sapiens
gaggaacagaagaaaagtccagtcttctcatgagctgtctgataaacattgacgatcttgaggatgaccctgtggtgaacggggagaggtctggctgtgc

SEQ ID NO: 845433 - DNA, 100 bp, Homo sapiens
atggatattctggtggggagatgaacccaacctagtgggtgtaatacatcatgaactgcaggatgtgacagacaggaagctgactatggaagaagaggag

SEQ ID NO: 845434 - DNA, 100 bp, Homo sapiens
tgaaattaaagtgaaagaagaagtagaaccaatggatatcatgaggccagtttctgttctggacatggcaagacatgtgccactctatcgggcactgctg

SEQ ID NO: 845435 - DNA, 100 bp, Homo sapiens
caaggcttgaatctgtattacccagaagccctgctggacatggacatcttccagcaacagatctcgagaagacagctggctaaaatccttatttgtccgg

SEQ ID NO: 845436 - DNA, 100 bp, Homo sapiens
ggagttcaaagaaggacacagctactactacatctgttttactgggacctgatcatgctgctgctgatggtggggaacctcatcgtcctgcctgtgggca

SEQ ID NO: 845437 - DNA, 100 bp, Homo sapiens
gctgagggagctcggtacgccgccgcctcgcacccgcagcctcgcgcccgccgccgcccgtccccaggattttttatcaagcagaaatgcatcgaacaac

SEQ ID NO: 845438 - DNA, 100 bp, Homo sapiens
tgggctgttctctgtgttaaaccaatcagttgcgaccttctcttaacaggcatgttggagacttgggcaatgtgactgctgacaaagatggtgtggccga

SEQ ID NO: 845439 - DNA, 98 bp, Homo sapiens
catcgccacagctgaaggctgcgagggactaagagcagagtcccaaaatggtagaagtccagaatcaacagtttcagatcaactccaacgacggcaag

SEQ ID NO: 845440 - DNA, 98 bp, Homo sapiens
cggggatagtggagctgcccactctagaggagctgaaagtagatgaggggagagaccattctaacacaggtaccgtccagacagtgcctctgagaaag

SEQ ID NO: 845441 - DNA, 100 bp, Homo sapiens
tcagtcaagaatgggattctgaccatctcacatgccacaattggtggaacgagaatgcctacacgcagccacaggaatccagtttccatggaaaccaaaa

SEQ ID NO: 845442 - DNA, 100 bp, Homo sapiens
gtattgacagggaggatggaagtcttcagggtccggtccttgaatgggcaagagggcacatgaagtacggcgtcctccacattcacggcctctacacgga

SEQ ID NO: 845443 - DNA, 98 bp, Homo sapiens
tgcaccgccccctgggatccgcaggttccctacacggtctcctgggtcaaggtctacaggtccaactgctgccactggcagtaatcgaagacttcagc

SEQ ID NO: 845444 - DNA, 100 bp, Homo sapiens
aaggatttgccagtggagtagaacagattattcttggagctggaccagtacttgagaacaatccatttcacagatgaagaaacagactcagtgagcacgt

SEQ ID NO: 845445 - DNA, 100 bp, Homo sapiens
gttggttcacagggaagtcgcctggaaaaaccaatagtattgaaaatgttgatgtctgccttagttttctagcagccagaggggtaaatgttcaaggtct

SEQ ID NO: 845446 - DNA, 100 bp, Homo sapiens
tcctgagtagctggaattacagtcttataaaatctgctttaggagacagaactgggcttgaagccttgtctttcaaagacaaaatccatgcaagaccaag

SEQ ID NO: 845447 - DNA, 98 bp, Homo sapiens
gggaactcgactcttggcgccaccgcctcatgcactgtgtagatgaatgatttcggaatcaagaatatggaccaggtagcccctgtggctaacagtta

SEQ ID NO: 845448 - DNA, 112 bp, Homo sapiens
ggaccagtctcggcaaatattacacttctctccttataacaacgaacttgatgcaagtgataggtttgccaaggtcagacctctcatcatccggatgaactgcaatttccag

SEQ ID NO: 845449 - DNA, 99 bp, Homo sapiens
gaagtgtggtgaaggtggacacagaagccgcaggatggttcacatttgagtaaagacaggggagtttgttttcagaatgacatactagtctgcaggatg

SEQ ID NO: 845450 - DNA, 100 bp, Homo sapiens
cacgaaaaaacttccagaacatctgggagaatatttaatggaaaatcgcttggttaaaacctgacacttttaacaggttcaaaccttgtactactcagct

SEQ ID NO: 845451 - DNA, 98 bp, Homo sapiens
ccctcccgggtgaggagcgtcctgagactaaggaaagagcctggaaaatggagcagacctggacgagctgatcactggagattccatcgttagtgctg

SEQ ID NO: 845452 - DNA, 50 bp, Homo sapiens
cattctcgaatacctagaatgggtattctaccttgtaaatactgttattt

SEQ ID NO: 845453 - DNA, 98 bp, Homo sapiens
cgttttggttcccggttggtgcttcctgttcgcagctgcggcaggtcaacatatttcactggcacctattcacaagcttgaagaagctctgtatgaat

SEQ ID NO: 845454 - DNA, 100 bp, Homo sapiens
acttgagcgaagttttatgcaaggtttttcgttggaatatacgttgcacatttatggcgattctgagtgtgagggcagacttctgccaggctcagcacag

SEQ ID NO: 845455 - DNA, 119 bp, Homo sapiens
tgtggtttattggcaaagaaaaagaagaacgtgaccggctgcaactgaaagctctagaggtattacatttatgcactgtctgctgccaaagatctgaaaccaatgatctcatatatatg

SEQ ID NO: 845456 - DNA, 98 bp, Homo sapiens
tgggacttgtagttctggagatggagcgagctgtgccgctcgcggtgcctctgggtcagacatagggcctgattacattccaacagaggaagaaagga

SEQ ID NO: 845457 - DNA, 100 bp, Homo sapiens
agcagaatgaaaatggagaatacacagatcatctacactcagctagctgccaaatcaaagtttttaaggtggaagatgcaatgctgatgtttgataaaac

SEQ ID NO: 845458 - DNA, 98 bp, Homo sapiens
tgagaagaaggaattaccaggtgtgatcaacacctgcacggtacctgcacgctaatcttccagtaccaacaattgcagcaatagatggactcgcttta

SEQ ID NO: 845459 - DNA, 100 bp, Homo sapiens
ggagccggaggaggatgctcctgcctcccagagaggggagccggcgaggatcaaaatcttcgaaggaggagagaactcgatgccaccgcaacggtattgg

SEQ ID NO: 845460 - DNA, 100 bp, Homo sapiens
gaagctgcacaggaagccgtgaaactgcccaatgggagcagccaaggcaaggtgcacaacccattccttcccaccccaatgttgccaccgccaccgccac

SEQ ID NO: 845461 - DNA, 100 bp, Homo sapiens
ctgactgcctatgaatttgctaaacttaaaagcaagctggttctctgggatataaataagggctttgtgaaggatgtccatgaagactctgtcaccatct

SEQ ID NO: 845462 - DNA, 98 bp, Homo sapiens
ggcgctggccggatggaaatcctaatgacagtctccaaattcgcctccatctgtaccatggttggatttggtctagggagtcccagaaagaagtagaa

SEQ ID NO: 845463 - DNA, 100 bp, Homo sapiens
tgttgaaagtacaattctattgcacatcaatgatatcatcccaggtgcccgtggggcaggaggtggaggggatgaacatcctgggcttggtagtgtttgc

SEQ ID NO: 845464 - DNA, 98 bp, Homo sapiens
tatgacctaggaccagggccttcaggaatcttcacccctaacttgaacttcataacactggagaggactcaggcttcctccacatgacaaggtggcaa

SEQ ID NO: 845465 - DNA, 100 bp, Homo sapiens
tttctcctgcacagatcaaacagcttttacagaatcctcctgctgatgacaagagcacctcaaaggcagcagcctcaaggagcagccatggccccagact

SEQ ID NO: 845466 - DNA, 99 bp, Homo sapiens
tgaagaagacccacttcatcaagaacatgaggcagtacgacaccaggaacagcagcctttcgattaccaggcattggtattagatactgtgatgtgtgc

SEQ ID NO: 845467 - DNA, 100 bp, Homo sapiens
atagacatgtacagaatatcttgataaatgagcagtcagcagaacttgtacatatagatctagcattagtgccagcagtagttcccaagggctgtctcag

SEQ ID NO: 845468 - DNA, 100 bp, Homo sapiens
gccggatggacgcttgttcctggttctgtgccccgtgagcgctcaacgccctgccctgggcgctgcctatggcacagccaagagcggtaccggcattgcg

SEQ ID NO: 845469 - DNA, 98 bp, Homo sapiens
ttgcctatcagaagtcaattcaaaggacctgcccccagagagaactctaaaatagagctcaagcttgagaagagagaaccactaaagggcagagcaaa

SEQ ID NO: 845470 - DNA, 102 bp, Homo sapiens
aaaagtttataccaagtcttctcatttaaaagctcacctgaggactcacactgaatatcaacacctttgagaacagaatgttaatgcttgatgggatgccgg

SEQ ID NO: 845471 - DNA, 100 bp, Homo sapiens
tgatagcttatggttctccattgtgatgaaagcacatggtacagggtcttcctgagagctatcaacaagtttgcagaaaccatgaaccagaagttcctag

SEQ ID NO: 845472 - DNA, 100 bp, Homo sapiens
tgaagattcaccaaataagctatatactttggttacctatgtacctgttaccactttcaaaagtccaggggcaagttcatcctactctcgagtctaatga

SEQ ID NO: 845473 - DNA, 100 bp, Homo sapiens
acctggggacgattgccagatcggggtcaaaggcagcctggcatcctcgctacaacctcattgttgtgggccgatacccagatcctaatttcaaaagttg

SEQ ID NO: 845474 - DNA, 74 bp, Homo sapiens
gcaggaactctacaacccaatccagattcgagtggtgaatgcatttcgtagttctttatatgaagggttagaaa

SEQ ID NO: 845475 - DNA, 100 bp, Homo sapiens
cagtagaagttgacaatttcagatttactcctcgcgtccaaaggctaaatgaactggagggagagtcccgtattctcagagtaaaagttgtttctggaat

SEQ ID NO: 845476 - DNA, 98 bp, Homo sapiens
gacccttgcatggtgtttcaaagggtggtgaagaactaaggtgggaagaagagcgctatcctgaaggcatcaagtggaaattcctagaacataaaggt

SEQ ID NO: 845477 - DNA, 98 bp, Homo sapiens
ccacacgccatggagcccgactcccttctggaccaagacgactcctacggtctcagcagcttgaaaaaccattcgctggaaaggaagatgctttggac

SEQ ID NO: 845478 - DNA, 98 bp, Homo sapiens
ccccgaaagacccggctttacgtggatcagacactgcgagagcgggaggctggcaccggacagagcgggatgccaccagcttgtccaaagggaagttc

SEQ ID NO: 845479 - DNA, 99 bp, Homo sapiens
ctactagaacttgaagcaccactcaaaatatgtgagagactgtggaatggaatgactctccagagctgcagattgaaggcatattttcatctgactttg

SEQ ID NO: 845480 - DNA, 100 bp, Homo sapiens
cagattcctcggagcaggatgaacagacagacacagagaaccttgctcttcatatcagcatgaaaatatttacaccagcagctccagttcataccaataa

SEQ ID NO: 845481 - DNA, 50 bp, Homo sapiens
gtgatgacctagagggcttctcccagctgatcatcctggccaatggtggg

SEQ ID NO: 845482 - DNA, 100 bp, Homo sapiens
actctgctggcagatgatccaaatcctcactatggatgggctcattgaggacattaagcatcggcggtattatgagaagccatgccgccggcgacagagg

SEQ ID NO: 845483 - DNA, 98 bp, Homo sapiens
atttttcaccatttggagaaccaatatttttggaatcagtgtctgtccctgaagggtcattaaatcagctatgttcttcagaagaaccagaacaagaa

SEQ ID NO: 845484 - DNA, 100 bp, Homo sapiens
gcgttggagcgcggaaatctggaaccgggatggcgacgtctacactgagtcggaggcgaaggtggtggtgaagtttattaagaaggagaaggtcttggag

SEQ ID NO: 845485 - DNA, 98 bp, Homo sapiens
gacacaaggaaagtattctacagaaactaatctggattcactccctctggttgatacccactcaaaaaggacacttctgattaagacggttgaaacta

SEQ ID NO: 845486 - DNA, 100 bp, Homo sapiens
ttttgctaactgcggcgggcgagacgttctcagaaactggcgatggaatatgagaggagccctctggaaagaaaaggacagaccctgtgctttcatgaaa

SEQ ID NO: 845487 - DNA, 100 bp, Homo sapiens
aggaccagaaggagccatggggctccctggaatgagaggcccctcaggaccaggtccctggaatgcaggagattctgctcattggcttctaccaacctga

SEQ ID NO: 845488 - DNA, 99 bp, Homo sapiens
ttcaacctcttgttggaagattattcaaaagggtctccgtctctccaccgggggcttcatccttccagggaggagaagagggactccagaatggctgag

SEQ ID NO: 845489 - DNA, 100 bp, Homo sapiens
cttctctgaatgatgaatacttttactactgtgacaacattaacggtgactgtaggacgaggatttggtgtcacataccaactggtatcaaaaatctgcc

SEQ ID NO: 845490 - DNA, 99 bp, Homo sapiens
tctctccaccatcgactacgtggaggacgtgctcttaaagttccgtacagataaaggaagagatcccagttctgatacatatgaggaagattctgagtt

SEQ ID NO: 845491 - DNA, 100 bp, Homo sapiens
aaaatatccaaataaaaagctggagtctgtgaaaaagcaagttctacatttcactgtaaggtgcgagaggtgtgagaggagcttcacgcaggccacccag

SEQ ID NO: 845492 - DNA, 100 bp, Homo sapiens
ctgaacgaattttctttcgatggcattaccagagtatagaaaggagatgtaagattcttgatttgcacagatgtagctgctagaggaattgatatccacg

SEQ ID NO: 845493 - DNA, 100 bp, Homo sapiens
ttgcagacgcagaaggagctacagctgagagagggacggattcagaatccatggctggaagaggtagtaaggccattgggagggcatgcctctcctcagc

SEQ ID NO: 845494 - DNA, 98 bp, Homo sapiens
gatatttggagttcttacaacatggcagacattgacaagtttggcacctggatcctgtcattgcaaaactggttttggaggtgtgagctgtgatcggt

SEQ ID NO: 845495 - DNA, 100 bp, Homo sapiens
aaaggatgttgagaaatggtggcatcaacgaataaaagaacaggcctccaaaatttcagaagctgatccaagttcaacaggggaacagaagactaaacct

SEQ ID NO: 845496 - DNA, 99 bp, Homo sapiens
tcatgcccagcagcagcaagcaggtctggacaaagtgccaaaggatcttccccctgacacaactctgctagacctgcaaaacaacaaaataaccgaaat

SEQ ID NO: 845497 - DNA, 99 bp, Homo sapiens
cagcaaccatgagtggttccatgatgggaagtgacatggcccaggatgttttggtgcaggagatggaagtggttaaacaaggaatgagccatggagagc

SEQ ID NO: 845498 - DNA, 100 bp, Homo sapiens
ctcgctcacttgtgatgccctgactgagctgctggctaagatcaccaacacagacgtggtgctggagaatctggtaaaagcaccattgtgaagcagatga

SEQ ID NO: 845499 - DNA, 99 bp, Homo sapiens
tctgcagttgagttcaggcagacgggctacatgctgagatgttccctgtctcacgccatcactctgaaatcttaaagaaactctccaccttttctaagt

SEQ ID NO: 845500 - DNA, 99 bp, Homo sapiens
gctcatgctcaagatggaagatcgcctcaagctcgtcaacgcctctgtcgctttctacaaaacctcagagcaggttgaaatgttccttcttgcctatgc

SEQ ID NO: 845501 - DNA, 98 bp, Homo sapiens
taaggatggcaaacttcagattggagataaacttttagcaacctgccaggtatgccaaatgctgctgcccaaccagtgcagtttctgtgcccaccagc

SEQ ID NO: 845502 - DNA, 98 bp, Homo sapiens
cgagatgtctcgctccgtggccttagctgtgctcgcgctactctctctttctggcctggaggctatccagcgcatggctctgtgagcgctgatgaggc

SEQ ID NO: 845503 - DNA, 50 bp, Homo sapiens
atggagcgtcaaactaaactggacaggggacattctggagaaggtcagcg

SEQ ID NO: 845504 - DNA, 100 bp, Homo sapiens
tcaacatgcctctgacaatctctagtgtatggcctcacaagtcttggtctacccaccatatgtttatcaaactcagtcaagtgccttttgtagtgtgaag

SEQ ID NO: 845505 - DNA, 98 bp, Homo sapiens
tatccatttcaactacagatactttgaagtagaagaagctgatggcacctacaaaggcagcacctaagcaaaagattgtgaagcctgtgaaagtttca

SEQ ID NO: 845506 - DNA, 100 bp, Homo sapiens
aagcatgtctgcaacccagccattttcagacccgtttgatggagctgcaccgccagtgggaattacttttggagaagatgcgagaaaaaggaatcaaact

SEQ ID NO: 845507 - DNA, 98 bp, Homo sapiens
cagtcccacttcaaacattcgtctcggaaaccccgcctcttacagtcacgagagccccccaagatgaacccagtggtggagccactgtcctggatgct

SEQ ID NO: 845508 - DNA, 98 bp, Homo sapiens
cacccagtggcggcggatgggcggccggggcggccggggcggccggtcctgagcgcggcccgggctgtcagggaagatgctgatcctgggctccatgt

SEQ ID NO: 845509 - DNA, 100 bp, Homo sapiens
atctcaggtcctcgggggcggcggccacgccaaggacggtgagtgatagttgcttcaggaatcttgcagaagaccgcagtgggataaatctcaaagatct

SEQ ID NO: 845510 - DNA, 100 bp, Homo sapiens
gcattggtcagagcagccaagcaattgaattttgttttcactggaagaacacccgactcggtgattatagattcaaattcggttccctcaaaattataaa

SEQ ID NO: 845511 - DNA, 98 bp, Homo sapiens
cccgcagcgacgcggctggcaagactgtttgtgttgcgggggccggacttcaaggtaccctggctaaagccgggccggagccctctgccctctcatgc

SEQ ID NO: 845512 - DNA, 100 bp, Homo sapiens
ggacagtcatcaccatgggccgggatcacattctgattttgatattcactgatggactccaaagaatcattaactcctggtagagaagaaaaccccagca

SEQ ID NO: 845513 - DNA, 100 bp, Homo sapiens
tatggcacacacagtgggacctagacaaagggagagggtgaccgacatcccaactagaaatgcactcggtgatggaaagagagccactattctgaagaac

SEQ ID NO: 845514 - DNA, 98 bp, Homo sapiens
gatttggtttgaatgtctcttcaatctccagaaaggtctatggccatgcaggcagctgcactgggttcctctatcggaacagcagttgttggaggtct

SEQ ID NO: 845515 - DNA, 131 bp, Homo sapiens
gtagatggagaaattacgaaaacagcaaaatccagtagttcttctaatccaaaatgggatgaacagctaactgtcttcgaaaggcaaggaggaagcttatctatgaaaaagcaaagcactatcacaaggaa

SEQ ID NO: 845516 - DNA, 98 bp, Homo sapiens
gctattgacagctttaggcatatgtatgtgtttggagacttcaaagatgtattgcagcctgcttctgcaaagtggtacgatcgaagggactatgtctt

SEQ ID NO: 845517 - DNA, 100 bp, Homo sapiens
tggacggcgagcgcgagcggcgcgagaaatgtctgcgagattaatctctcatggccgctgcacaagaacctggcttttagctgaactaaggagaaagtcc

SEQ ID NO: 845518 - DNA, 98 bp, Homo sapiens
gtggccataccgttgaccgctcctccaactaaccacaatggcaccagcatgatatcattgatcattcctcccaaagaccagatttcacgagtggcaaa

SEQ ID NO: 845519 - DNA, 100 bp, Homo sapiens
agcgtctgcaccttcagaaacagtgctgaagcctttaaatgcagcatctgcgatgtgaggaaaggcacctccaccagctctgtctcccactccgtgctgt

SEQ ID NO: 845520 - DNA, 98 bp, Homo sapiens
gggatctgtgactcatcagagtgtgggggttgtgaaagagttggattacagaaactcctatgaaattgaatatatggagaaaattggctcctccttac

SEQ ID NO: 845521 - DNA, 100 bp, Homo sapiens
cagttatgtggacgagctgttaaaccagactttgacccctggtggacaaacgactgtgagcagaatgagtcagagcccattcctgccaactgcactggct

SEQ ID NO: 845522 - DNA, 100 bp, Homo sapiens
atgaatgccatccgggaagagcgggaccggctccggaggaggaggctgtgggtaatattgtgaagttcttgggaatgcacccttgtgagaggtcagacaa

SEQ ID NO: 845523 - DNA, 98 bp, Homo sapiens
tccctccgtgtcctgaaaagtgcgaccgttctcccaaggaatttccacggtctcggcgcggaagatggccggcggcgtggacggccccatcgggatcc

SEQ ID NO: 845524 - DNA, 100 bp, Homo sapiens
ttttggtacccctttttatccactcattggcagagaagctaatgacagcccatatcaaggcggtgtattctttttgacaattcattttcctacagactac

SEQ ID NO: 845525 - DNA, 100 bp, Homo sapiens
aagaaaggagaaagagagctcaaaatcggagacagagtattgattcgggaactggagcctctcctctgtcacagtgacaatccatctcagctcatctgga

SEQ ID NO: 845526 - DNA, 100 bp, Homo sapiens
aaggataagcctcgacttagaagctaccgagttaccctaagaaagtcactgtgtgcccagtattctgcagacaaacgagaagatgagaagatgtgtgatc

SEQ ID NO: 845527 - DNA, 98 bp, Homo sapiens
aaccagacagcaccattcaggatgctggtttataccaaggacagggttatcaatgccgggaagagcacacacaatgaagaccaagccagctgtgaggt

SEQ ID NO: 845528 - DNA, 100 bp, Homo sapiens
gcaaccaatacactgggtagaggagagcccagtataccatctaacagaattaaaacagacggtgctggtatggtgacatggtgccaaaaaccatagcagg

SEQ ID NO: 845529 - DNA, 100 bp, Homo sapiens
ttacttatctggagcaaggaaaagagccctggaatatgaagcaacatgagatggtggatgaacccacaggtggtgttatcaaggagaagaaattcctgcc

SEQ ID NO: 845530 - DNA, 51 bp, Homo sapiens
cggagctggaatgactggcaacccaggaggagattgtatttcgttactacc

SEQ ID NO: 845531 - DNA, 141 bp, Homo sapiens
ttctgattccctgtgttctgcttttttcattgttccactggacgctcatcagagggaagatctttttcctcaattggaaatgggtcctgatgaatatgaagagatggaagaagaggaggaggaggaagaggaggaagacga

SEQ ID NO: 845532 - DNA, 98 bp, Homo sapiens
aaggcatcctgcagtattgccaagaagctaaaataaatgaagctgtagaatgcttactgtccctgaaggctcagtataaagaaaaaactgggaaggag

SEQ ID NO: 845533 - DNA, 98 bp, Homo sapiens
aaaaaaaccacaaatgtttttctgttttgcctgaatacatgatttaaacaagagatttccacagaagggtgaagcaagaagcatttcatttgcacatc

SEQ ID NO: 845534 - DNA, 100 bp, Homo sapiens
tgggacgcacagagaccgtgaagattccaagttcaggagaactcgaccgtcctattttgtaacggattatgatccaaccattgaagattcttacacaaag

SEQ ID NO: 845535 - DNA, 98 bp, Homo sapiens
atgaagttatcaaaaacagctgtacattttcagctgcaggacaaattcgagcatcttaaaatgattcaacaggaggagataaggaagctcgaggaaga

SEQ ID NO: 845536 - DNA, 100 bp, Homo sapiens
ccgtgaagattccaagttcaggagaactcgaccggagcatcatgagagcatcagggacccgtcaacaggctttactctgacattcaagcaagatcacagt

SEQ ID NO: 845537 - DNA, 100 bp, Homo sapiens
atcagccacaaatgtacccccagtacacttactactatcctcattatctccaaaccaaggataatgcagaattgatcacttctctgcttcacagtggagc

SEQ ID NO: 845538 - DNA, 100 bp, Homo sapiens
tgctgctggattgaactcagagaagccgggtgtttgggaaatgggaagtaatgacagctggcacctgaactaagtacttttataggcaacaccattccag

SEQ ID NO: 845539 - DNA, 100 bp, Homo sapiens
ttcaaggaggccttccagctgtttgaccgaacagcatggtgacatggaccagaaggagagagatgttatcatgagggaattccggtcagggtcaagtcgt

SEQ ID NO: 845540 - DNA, 100 bp, Homo sapiens
gggttcggcgctatggaggagctcgatggcgagccaacagtcactgttgattcttcaccacactgaaaccattaggaaaaatccttgtggttaacagcag

SEQ ID NO: 845541 - DNA, 98 bp, Homo sapiens
gccgagtggaagctcttcatctacaacccgaccaccggagaattcctggggcgcaccgccaagagctgggctgttaaaaaacccgctccagcaccccc

SEQ ID NO: 845542 - DNA, 100 bp, Homo sapiens
tgtcatgaaagctcggaaggacattgttgctagactgcagactcagaatttttccctagattggtgtaaacagccagacgtgggccttcccaaacccgac

SEQ ID NO: 845543 - DNA, 100 bp, Homo sapiens
ggagaggctcaaggagtattcagagactgagaaggagtttcagaatggagttttaaatgaaacatatccagctgaattaaataacataaataacactcag

SEQ ID NO: 845544 - DNA, 113 bp, Homo sapiens
aatcagacggtgccccatagatggccagctttcccccgagggtcaacgagaaagagatcggtattgggagagttgctgctacatctttaggaaatttgactaaccatggttct

SEQ ID NO: 845545 - DNA, 99 bp, Homo sapiens
tgaaaggcaggtccagccttttcaccatggttgcagctggaaggaaacaagtggatttgacacaagagtctgaaaagtgtcgaagagacagttttcagg

SEQ ID NO: 845546 - DNA, 98 bp, Homo sapiens
tcgaaggatgtgcatgaaggacagcctcttctcaatggatgtatatggaatgttactcaatttagaaaaacatcaaagtcacttgcaagccaaaagtc

SEQ ID NO: 845547 - DNA, 100 bp, Homo sapiens
cgtggagcgcctgaaacaccagtctttgggtacaccaggggttggaaaaaccacactaggcaaagaacttgcgtcaaaatcaggactgaaatacattaat

SEQ ID NO: 845548 - DNA, 100 bp, Homo sapiens
tcagccagcacgccaagtacacttgctctttctgtggcaaagaggagttggaaactctggagagcaacctcttagcacagcagaattcactgaaagctca

SEQ ID NO: 845549 - DNA, 122 bp, Homo sapiens
gagcggcggcggcggcagcgggtcttgggtcctccgagagcagcagcgacagcaactctggaaagtggcttctaactcggcgcattttcttagtggatgcagtaagtggacgagaaaatgac

SEQ ID NO: 845550 - DNA, 105 bp, Homo sapiens
tttgcaaggttttgtgcccatgaaaattgttctgctgatttacaggtttctgcaaagattgggtttttgaaggcaaagtatgtttagtccagcaagtatcggtca

SEQ ID NO: 845551 - DNA, 100 bp, Homo sapiens
tctgactgtagatgatcagtcagtttatcctaaggcattaagagatgaatacatcatgtcaaaaactcttggaaggaggagaagcagccccaaaagacga

SEQ ID NO: 845552 - DNA, 100 bp, Homo sapiens
taacacgccctcaagagctggatttgacacatcaagggcagccaattactgagaacttcagatggtggcaaagtggttggcaccatagaagtcagtgtcg

SEQ ID NO: 845553 - DNA, 100 bp, Homo sapiens
caggaaccagactgggggcgagctgagcacctgtagtcaatcacacgcagttgttgacctcctgtactggagagacattaagaagactggagtggtgttt

SEQ ID NO: 845554 - DNA, 100 bp, Homo sapiens
ccccttctttcgatcagagatcggcggagaccctcgaagtgcgcaaacttgacactcaccctgaccgttgtggaatacagactcacgttcaaaggtggct

SEQ ID NO: 845555 - DNA, 100 bp, Homo sapiens
agaagcgtttcatccgcgttttacagacgtgtgcaggtggtgcagcggctgacgcggatggtggggaagaacgtgaagctgtacgacatggtgctgcagt

SEQ ID NO: 845556 - DNA, 99 bp, Homo sapiens
ggcagacgatattgatattgaagcaatgcttgaggctccttacaagaagttctcagcacagatattctacacctcacgccttcacctttaacacctcca

SEQ ID NO: 845557 - DNA, 99 bp, Homo sapiens
ctgccaaaattatcaacaccaaaaagctttctgctaggggtctcgtctacagaggactggtctttcaatagcaagttttcacttcatcgacaacatcac

SEQ ID NO: 845558 - DNA, 98 bp, Homo sapiens
atggagcgtccgcaacccgacaggttctcctgaaaagaaagctgaacattcatctataaatcaagaaaatggcactgcaaaccctatcaagaacggta

SEQ ID NO: 845559 - DNA, 98 bp, Homo sapiens
aggagaacaggaagagcacgatgggttctgaaaatattgtgcacagggcaggctgaggacacagccacgtgatacccactgtagagagagggagagag

SEQ ID NO: 845560 - DNA, 98 bp, Homo sapiens
tctactataaatcccggttttggctgcttaaactgctggactgggaattcccacatttcatgggagatgttgatgtaaatctccctggtttgcacacc

SEQ ID NO: 845561 - DNA, 100 bp, Homo sapiens
gaatcacacctgagccagcagtcagtaatacagaagccttgttgtcctcctggtgcgaagagctcggccgcctgctgctgctccgacatcagaagagccg

SEQ ID NO: 845562 - DNA, 98 bp, Homo sapiens
ttccacggagccttctcctgcagggcgagagcgttcctccagttgtgagtggttaagaaagtagctcaatacatggctgatgtattggaagatagcaa

SEQ ID NO: 845563 - DNA, 98 bp, Homo sapiens
caagatggcggatactctcccttcggagtttgatgtgatcgtaatagggacgggtgttgaaaagtctcctctagagctttggaaggctgaatgcacta

SEQ ID NO: 845564 - DNA, 115 bp, Homo sapiens
ccgcggaaagcatgttgtggctgttccaatcgctcctgtttgtcttctgctttggcccagggaagacgagcacgccctcatccagcagtattgccaaacactcggaggagagtcc

SEQ ID NO: 845565 - DNA, 100 bp, Homo sapiens
tgccagtgtttccacaatggaaccaattgttttacagtctgttccacatgatcattgtaataagaagacttgcactatctgccagatgctgcttcctaac

SEQ ID NO: 845566 - DNA, 139 bp, Homo sapiens
gcagcccagcagccccgcagcggcgccgaggacagtgcagccgagttgcgtctccctcgcgcgaggtgaaggtaggcaatgaagttgctacaggaacaggacctaataaaaagatagccaaaaaaaatgctgcagaagc

SEQ ID NO: 845567 - DNA, 100 bp, Homo sapiens
gggtgaagctggcggagcaggaggatgggcggcacaccagattaatattggttattatttgacattactgtttttatatggagtagcactcactgaaaga

SEQ ID NO: 845568 - DNA, 98 bp, Homo sapiens
tctcacgtgttgaaaaatgaccatgtcaggaggtttctcagcacttcctctcccccacagcagcttcagagtccaactgccccagagcacatcagcta

SEQ ID NO: 845569 - DNA, 100 bp, Homo sapiens
gcgctggagagggggcgctgagctgttgggggcgtccccctggataccagtaaactgtccactgaccagcggttacccccatacccatacagctccccaa

SEQ ID NO: 845570 - DNA, 100 bp, Homo sapiens
tccagcggtcacctacccccagcaccacctccagcccctgcgcctcggctcttgatggaaatgtgtatgatcatctcaaggattatttaatagccttcag

SEQ ID NO: 845571 - DNA, 74 bp, Homo sapiens
tgagctacatggccccctggtttagggaggactgaaatcgccaagagattgaatacgatttgtgcacaagtcat

SEQ ID NO: 845572 - DNA, 128 bp, Homo sapiens
tcaaaaagatgctgtaaatgatgatgattttgagccatacttaagtagccagacaaatcagatagaagatctttctgatgaagtcttctccctaaggcacaaaaaatatgaagagagagagcaagcca

SEQ ID NO: 845573 - DNA, 98 bp, Homo sapiens
gagagggcctgggagcttgctgcagcttcagatgggggctccggaggtggcgcccaggctctgagctaccctaggtctgcagactagcgggcattggc

SEQ ID NO: 845574 - DNA, 100 bp, Homo sapiens
taggaatctatgatgctgatggtgatggagattttgatgtggatgatgccaaagttttattaggtgaagatgcaatgaccggggacacagacaaatatct

SEQ ID NO: 845575 - DNA, 98 bp, Homo sapiens
aaccagagctgggaagattcgaacaccgacctcgtcccggcccctgcagtccggatactcacgccagaagctgagatctgtatctgtggacctgaatg

SEQ ID NO: 845576 - DNA, 100 bp, Homo sapiens
atctgcatgatgatcggtgtcaacccggggggcgttgtgcagcttttccagaagcctgttaaaagcaaggtctccccacaagcaacttctctgccacatc

SEQ ID NO: 845577 - DNA, 100 bp, Homo sapiens
tgtgaccctgggagattactaccagggccggaggattaccatcaccggaagtaagccaagatgggtgcatacaagtacatccaggagctatggagaaaga

SEQ ID NO: 845578 - DNA, 100 bp, Homo sapiens
ggcacctctgcagctgcagaagtgaaccggcaaatgctgcaggaactggtgaacgcaggatgcgaccagattcatgttacatgtaaagctgtcctcattt

SEQ ID NO: 845579 - DNA, 98 bp, Homo sapiens
agccgaggcggcgggacccccaagtttggaaagctcttttaacgtccctggtacgtgagcccctttcccggcgccggcagctgctccgggagaacttt

SEQ ID NO: 845580 - DNA, 100 bp, Homo sapiens
tcccctgttcctttttgctgacgtgtcatttctaagtactttctcctactccataaagacttcaaggaatgaaagctactggttgattttaaagtgcctg

SEQ ID NO: 845581 - DNA, 100 bp, Homo sapiens
aatcaatcaataagaacaagtcccaggacttcagactaggctcagaatctatgacacatttgcagaaaaaacttcagcatgtgccaggaacacaacctca

SEQ ID NO: 845582 - DNA, 100 bp, Homo sapiens
aaatgaccctgaactggaccagcagtaattcgccaaaatgacgaacacaaagggaaagaggagaggcacccgatatatgttctctaggccttttagaaaa

SEQ ID NO: 845583 - DNA, 99 bp, Homo sapiens
tcaacgcccacaacaaggcggcggtggactgaaaatgacagatggcgagacctggacaggaaatgccctcttcagattgaccaaccgagcaccagcatc

SEQ ID NO: 845584 - DNA, 100 bp, Homo sapiens
aggatcgtaacaacacggaagtggagaggttttcagagatgccccttggtgtggccactgcaaggctctggcccctgagtatgccaaagccgctgggaag

SEQ ID NO: 845585 - DNA, 100 bp, Homo sapiens
gctcggagcttcgctcggaagggtctttgttccctgcagccctcccacgagtatatcttggaacctccaccctgcatatcagcacctgaaaactgtactc

SEQ ID NO: 845586 - DNA, 100 bp, Homo sapiens
tagaaagaatgcttcgcctcagtttgaacattgaccctgatgcaaaggctttcagtccagtgtaaagctgttggagcgcgggagcaaaggtaaagaatga

SEQ ID NO: 845587 - DNA, 100 bp, Homo sapiens
gccgactggagcagttcatcccggaatagcgggttttgcagcaattgttgcatatggattatataaactgaagagcaggggaaatactaaaatgtccatt

SEQ ID NO: 845588 - DNA, 100 bp, Homo sapiens
ctctgcgctggaatcagtcactgtcagcgacagacccctcggggtgtccatcacaaaagccgagtgaattttgaagattgcaccggtcgacaaaggacag

SEQ ID NO: 845589 - DNA, 100 bp, Homo sapiens
ggagctgcaaaatccggtgtaggcacagctctcctattgaaacttgcccagatgttctcagatatggtcttaaaagggtctagttgaagtgataacaaac

SEQ ID NO: 845590 - DNA, 99 bp, Homo sapiens
cctcccaggtagctgggattacaggagttcgcagcacttactaaagaactcaatgtatgcagggaacagctccttgaaagggaagaagaaattgctgaa

SEQ ID NO: 845591 - DNA, 99 bp, Homo sapiens
aaaaaacctgagaacttcctgatctctctcgctgtgagacatgtctgagactcctgctcagtgtagcattaagttcaacaacatgttgctgtactgtgt

SEQ ID NO: 845592 - DNA, 98 bp, Homo sapiens
aatggcagctctcagaatgggaagaatgagagaagtcatatgcccggcacaaacctaaaggcagacccagaagagctttttacaaaactagagaaaat

SEQ ID NO: 845593 - DNA, 100 bp, Homo sapiens
ctgggcacagcatgagatccaaaggcagggcaaggaaactggccacaagagagacagcgtctggagaccatcctcagtctctgtgctgaatacacaaagc

SEQ ID NO: 845594 - DNA, 98 bp, Homo sapiens
gccctgggggttcagattgcaaggtggcaaggagcagaagcagcccttacaagttgcaaagattgtgtcagcagctaaggtgtgtggagctgccagtg

SEQ ID NO: 845595 - DNA, 98 bp, Homo sapiens
cgtgatggaaattgtcaagaggtgcaaaaatcttagctctctcaatctctgtctgaactggatcataaatgacagctgacaggacttccacacccatg

SEQ ID NO: 845596 - DNA, 100 bp, Homo sapiens
tactgatacagagacgatggtcggaatcagatttgaaaatgaaagtctcagaattctgcaaatgcagattttgcaaactttgatgcatttggacagtcta

SEQ ID NO: 845597 - DNA, 99 bp, Homo sapiens
cttgagcccagggcgacggtcagcttgttaattcctggctgcaggaagcagttcaggtacttttgaagcattctgcagatgttaatgctcgagacaaaa

SEQ ID NO: 845598 - DNA, 98 bp, Homo sapiens
ttaagggactcaggcagtacgggaagaacttcttcagaattagaaaggagctgcttcccaataaggaaacaaggcgaatctttagataacctggactc

SEQ ID NO: 845599 - DNA, 100 bp, Homo sapiens
agcccccgtcctgcagcgagaggcccctgacgctcttccacaccgttcagtcaacagagaaacgaatgacatctttgtgttcctgttaagcacacgagct

SEQ ID NO: 845600 - DNA, 125 bp, Homo sapiens
aaatggaggcgcctggtgccccgcccaggaccctgacgtgggaagccatggagcagatacgggaggcctcgtgggtctggtagattatcctgatgatgatgaagatgatgatgaggatgaagata

SEQ ID NO: 845601 - DNA, 99 bp, Homo sapiens
gtacctggcaaaccttgttggcctggcagaaaacataacccaggaacgtgacagtcttatgtgtttgtggtcatctccatcagaggcaactgaaagttt

SEQ ID NO: 845602 - DNA, 100 bp, Homo sapiens
tcgggtggagtgtaggtcatatcgccgcggttatcaatactctggctgaccatcatcatcgtgggactgactttggtggaagtccttggttacatgtcat

SEQ ID NO: 845603 - DNA, 100 bp, Homo sapiens
aagaacttcttcagaattagaaaggagctgcttcccaataaggaaacaacaacatctggggaagatgtacgagacttcacaaaggtacttaagaacaagt

SEQ ID NO: 845604 - DNA, 100 bp, Homo sapiens
aatattagttccgtcacaggggctatttgtttggatatcctgaaagatcaatgagctgattatattgtgaaaatctttgatcgccatggtcaaaaaagaa

SEQ ID NO: 845605 - DNA, 99 bp, Homo sapiens
gtatctcaattgcggggcttactgctgatgctagactgttatgtgtcgatatatagtatctggttttatgacaagaatgactgtcaccgcatagcaaaa

SEQ ID NO: 845606 - DNA, 100 bp, Homo sapiens
cgacttgccggcagaacttacgctgcgggaccccgggcactgttgctgctgcgggagagttttgcggcctccaggtggtggatccaatttttcattaggt

SEQ ID NO: 845607 - DNA, 98 bp, Homo sapiens
aacattccccccaacgatgggatgccgggaggccccatcccgccaggtttctttcagagtgatcagcagctggactgtgccttggacctaatgaggcg

SEQ ID NO: 845608 - DNA, 98 bp, Homo sapiens
aacagattcagtggcctgcattgcataagccggaccaagctgagggaggtggaaccagcagcatgcagtggaaccgtgaagggtgaacagtgcgctaa

SEQ ID NO: 845609 - DNA, 100 bp, Homo sapiens
taaacatgcaatgaacccaaaagggcattgctaccatttatgttcgttataagcaagttcatgctctgagtcctgaagagaacgttatcatcaaattaaa

SEQ ID NO: 845610 - DNA, 100 bp, Homo sapiens
acacggccagatctgccctccaatgttaccctgtgtgaggaggcattcttcaggtttgctgttcctacaaagtttacgcctaactggcttagtgtcttgg

SEQ ID NO: 845611 - DNA, 100 bp, Homo sapiens
aagtccagagacagagcactaattagcatagttgttgcccaaatctcttggtacagaatgtttttgtagaaacacacaacaggaattttccattggtggc

SEQ ID NO: 845612 - DNA, 99 bp, Homo sapiens
agatgtgaatcttgtagtcagaaacttgaaagagagaataaccgttgtaacatcagtcacagcatgcagtggagctactgctgtggttcaggcagccct

SEQ ID NO: 845613 - DNA, 100 bp, Homo sapiens
aacgcggtgtggaatcggcagcgaggaatcctggagcacagagaagctcccagctttgaaggtcttgcggtgtttccgttactatggcaatgacggcagg

SEQ ID NO: 845614 - DNA, 100 bp, Homo sapiens
caaatacatttataataggagtccagctattgctgctgttgctctcagactccccagtacaatgactcaagcagaaattaagctctgttctttgttgctg

SEQ ID NO: 845615 - DNA, 98 bp, Homo sapiens
atggacaaagagaaagctgatgtaaaatcaacagcatttaccttccggtcttccaagtcctcctgcatatgcccaagaggattgggagtggaatggac

SEQ ID NO: 845616 - DNA, 98 bp, Homo sapiens
ccatcaaccgccagatcaacctggagctctacgcctcctacgtttacctgtccatgctggactctgactcagaccgcattggagatacctgtgacaac

SEQ ID NO: 845617 - DNA, 100 bp, Homo sapiens
cagcgttgtgggaagcccctgggaggccgaatgtgcaggatcaccgaggggaaagtgagcttgacagacaacaaaggaggctttgaaaatgttttagaag

SEQ ID NO: 845618 - DNA, 98 bp, Homo sapiens
acaaaagacacttcaagctaccaaccagaccaggacttaataaagcacaacttgttgagagaatccattgttatcaatctagtgaagaattcaaggaa

SEQ ID NO: 845619 - DNA, 100 bp, Homo sapiens
aaagctgaggtccagatgaaagagaagtttctggtcactccccaggattatgcgcggtcagccccagttgatgctgacagcaggacccagtgttgccgtc

SEQ ID NO: 845620 - DNA, 100 bp, Homo sapiens
gcatggaaggggtcctcagagttactggggatggcagaatagctgtgaaggcatgtgaaggcttgatgctgttagtaagtttgccagagcctgcggctgc

SEQ ID NO: 845621 - DNA, 98 bp, Homo sapiens
actttgagaggctcaagcaggccatggagatggtgggcttcctccccgccaccaagaagcagccactcccagaagagacgggggtggaactgcttggc

SEQ ID NO: 845622 - DNA, 100 bp, Homo sapiens
gcttacttcaagaagaagaagctgcggaagcccagacaccaggaaggtgagatcttcgacacagaaaaagaggtaataaaaggcctgacatatctgaggg

SEQ ID NO: 845623 - DNA, 98 bp, Homo sapiens
gctctacattttcaccaagatctcgattgccaacactcctgatagctgaatgtgtgctggtttacatgactccagagcagtccgcaaacctcctgaag

SEQ ID NO: 845624 - DNA, 100 bp, Homo sapiens
ttcggccttgtccgagcaaacagaggcgctcatccacagagccacatctgttagcaaagaatggccgagtggattctgaggaccggaggagccgccactg

SEQ ID NO: 845625 - DNA, 100 bp, Homo sapiens
cgtggacggcttgacagccctgcaccaggggaaagttgctcagacagcttgcatgtcagcctgccagcatctgtcaacatccttaatgcagatgctactg

SEQ ID NO: 845626 - DNA, 98 bp, Homo sapiens
tcgctgtgagacatgtctgagactcctgctcagtgtagcattaagtgttcaagagacctatgaagccaaaagacatgagttccatggtgaacgtcaga

SEQ ID NO: 845627 - DNA, 100 bp, Homo sapiens
aaaagtggaggcaccaccagctaaagtgggcaagttacggaagcaatggctaaaggaaagtatctctgatgtcggctttgggatgctgaagtctgtcaag

SEQ ID NO: 845628 - DNA, 115 bp, Homo sapiens
tgaagagttggctgtcgcgcagcgtaacttcattcttcagagcagttgaagacatctcttcatcgaggactaacccctacagttatgcaatgagtactgaagaagccagatttct

SEQ ID NO: 845629 - DNA, 98 bp, Homo sapiens
tcgtcatttcctgccggccggtcggtttccggatgaaacgaggagccaggtgttggtaaatcatgcttattgctacagtttacagacaagaggtttca

SEQ ID NO: 845630 - DNA, 51 bp, Homo sapiens
gaagaagcagttctacaaggcgagccagttcccagtgacctgacagcagag

SEQ ID NO: 845631 - DNA, 100 bp, Homo sapiens
gcgaggccacggagagctcgccttggagagcccaggagcaggggagacatgtagcaggacccagtgctccataaaggataatagtttccagtacactatc

SEQ ID NO: 845632 - DNA, 98 bp, Homo sapiens
ccggatctcctggaagtgttggcggaggaaggcaagaagctcttctggctgccattagtgaaaaagacgccaatatagctctcttggagctttcgtcc

SEQ ID NO: 845633 - DNA, 100 bp, Homo sapiens
ctgcgagacggagacggcaatcgcacctggggccgcctaacagagtgcctggtgaagaatgtgatgggatcactagcatgtctgcggagagcggccctgg

SEQ ID NO: 845634 - DNA, 99 bp, Homo sapiens
tcagtttacagccactgcagtatcacagccaggtgtcatggagaaactccagctgggcccagagattctgcagcgggaaaatccaaggcttatttatgc

SEQ ID NO: 845635 - DNA, 99 bp, Homo sapiens
cccgcttgccgcagccgcctcagaacccgaccaacatccagaacttccagctgcccccagcagcaatgcagagtccctggacaggctcctgccacctgt

SEQ ID NO: 845636 - DNA, 100 bp, Homo sapiens
acacggtggggcgcagcttcgagggccgggagctcctggtcatcgagctgtccgacaaccctggcgtccatgagcctgagctctcagcatggcggctcct

SEQ ID NO: 845637 - DNA, 98 bp, Homo sapiens
gaggatgaagattcaccaaataagctatatactttggttacctatgtacctgttaccactttcaaaaagatgtggtctgaagctattaaaatcctgaa

SEQ ID NO: 845638 - DNA, 100 bp, Homo sapiens
gaggtttcttgtacttcagatttacgtacccctgggacaagacttctccactgaattgctcgttgacagaaggctacgttggggccctgcacgagaatag

SEQ ID NO: 845639 - DNA, 98 bp, Homo sapiens
gaaagtgcctgccattcttatcatttctaagcaggttcatgccagcccagaacagagaatcagacccccaaatctccaatttctcacaagtgaattta

SEQ ID NO: 845640 - DNA, 100 bp, Homo sapiens
ggtgacagcaatcagctggcctggtttgatactgacctgtaaatcatcctttaggaagatgatccctatgatcttgaagatgtttctgcacagaaatgag

SEQ ID NO: 845641 - DNA, 117 bp, Homo sapiens
gcgcgacaccgggctccggaaccactgcacgacggggctggactcctcctccgcctcctcctctctgcatgcgcgtcagagcccgtgccaagaacaagcagcagtcctgaactcgag

SEQ ID NO: 845642 - DNA, 98 bp, Homo sapiens
cttggctgcctgcctccttctgaaatggccagtgatgaactgagggagttgaggaatgccatgacccaggaggccatccgtgagcaccagatggccaa

SEQ ID NO: 845643 - DNA, 120 bp, Homo sapiens
cttggatagaggcctccgaacaggagtaaagaatggctgttgaacatccacaaggcacctgcaaggtttctgcggcactgaaacaaggccaaattacaccaacagagctctgtcaaaaat

SEQ ID NO: 845644 - DNA, 100 bp, Homo sapiens
atgacgcacacaggagagccaggattcatgctctacatccccatagagaatttatccagttggcgaaggactttgaggatttccgtaaaaagtggcagag

SEQ ID NO: 845645 - DNA, 100 bp, Homo sapiens
agactgttgagtatgctccatgtagatcacgtcttgtccagaatgccgtgtgatatcagagtttgtaattccaagtgtgtattgggtggaagatcagaat

SEQ ID NO: 845646 - DNA, 100 bp, Homo sapiens
tgtaccagaatcagttgttggagaaaattaaaggcgcattctacattctaaaggggagctcagtgaagatagacataaacagtatgaggaatttgctatg

SEQ ID NO: 845647 - DNA, 100 bp, Homo sapiens
agttgtcccagctcggcccgcgggggagccccgggagccgcacgttttcggctttgtgagaaaccttaccatcaaacacgatggccagcaacgttaccaa

SEQ ID NO: 845648 - DNA, 98 bp, Homo sapiens
aacatcatcgttttgaagagttctgcgttttgccagtcacctctcaactgtgtgccaaaggatgtatatggaatgttactcaatttagaaaaacatca

SEQ ID NO: 845649 - DNA, 100 bp, Homo sapiens
catttcaaagaatatagatggttttgaaaagttcatgctgtcccttcattgaattttagttggggaatggcggtcaatgtgtattctacctcgataaccc

SEQ ID NO: 845650 - DNA, 100 bp, Homo sapiens
agtgtgagcagagctctgccaggcagaaggcctctctcctgatacagcaggcgctcaccatgttccctggaggagtgactggctgcaggcaagaccaagg

SEQ ID NO: 845651 - DNA, 99 bp, Homo sapiens
agctctaatccccacgcctgggatgagtgcagaatatgccccgcagggtatttatccacacaacttaaagatctgctgccgagtgaatggggaagtggt

SEQ ID NO: 845652 - DNA, 100 bp, Homo sapiens
cagctagcagccacgtggggcacttctccaggcaatgaatcgctccctggctaatgtgattcttggaggctatggcaccacttcaacagctggtggaaaa

SEQ ID NO: 845653 - DNA, 100 bp, Homo sapiens
gtggggacgttgcctcgggcttccactacggtgtgcacgcctgcgagggctgcaaggagcagatcccctggtggagaactttgagcctctctatgacctg

SEQ ID NO: 845654 - DNA, 100 bp, Homo sapiens
cccacacacagatgtggtgaaatgtacccagttagtaagaggaattatctatagagtaagtatgctaatcttgactaagactgcaggagttttttttaaa

SEQ ID NO: 845655 - DNA, 100 bp, Homo sapiens
aatcatgactcatctcaacccacaacgccttcccagtcatcagctgcctccaccccagcccccaaccttcccagggatatgggattagaactgtttagaa

SEQ ID NO: 845656 - DNA, 100 bp, Homo sapiens
tgctgatgagggaggtgcccctgcgttgtaccatccgcctgtgggacacctaccaggaggcactggctacaattaggcttctcgacgtcctgtgcgaaat

SEQ ID NO: 845657 - DNA, 100 bp, Homo sapiens
cgtaaagggaagtcatttctactggacttcatgcttagatacatgtataacaaggcctgcactgcccaaagtcttggaaacttgctggatatgatgtacc

SEQ ID NO: 845658 - DNA, 99 bp, Homo sapiens
tcttcatgaaggtggtgaagcccaagttgaagatgagcagccgtcaacactatcaccaaaaaaaaagcaacggaatggaggcatgcggaactcacccaa

SEQ ID NO: 845659 - DNA, 100 bp, Homo sapiens
ttgaccatggctgtagaacccagcagctcagaatccattaaaaggagagctgggaggagcaaccatgtccaagggacctgcagttggtattgatcttggc

SEQ ID NO: 845660 - DNA, 100 bp, Homo sapiens
caccttttccacagggaattgagttggtcctgaatctgtgcctccttcccttcttaaagtagtgatgaaacccatagcaactgttggagaaagctaccaa

SEQ ID NO: 845661 - DNA, 98 bp, Homo sapiens
ggtgatcctggaaccgttgattggagatatgcccttagttggagctttgtctatcttcttccttaggaaaccactcaccaagatggaggaacagagcc

SEQ ID NO: 845662 - DNA, 98 bp, Homo sapiens
aggacttacggcagtgggggctgacaggtgctggagaatctggtaaaagcaccattgtgaagcagatgaggatcctgcatgttaatgggtttaatgga

SEQ ID NO: 845663 - DNA, 98 bp, Homo sapiens
ggaatgtggcgctggatccggcagcagctggaagacgtattttagcagatgaagcactcaagctgggcattctagataaagttgtaaactcagacccg

SEQ ID NO: 845664 - DNA, 98 bp, Homo sapiens
ggggtcgctggctctgctgctgccgccggcgaaggaggaggcgttgccgggcaattaagttggaatatgcaaggttggttaagttggcccaagaagac

SEQ ID NO: 845665 - DNA, 100 bp, Homo sapiens
ttactgtcctcaaatacgtatattactcttccatggatgccccttgataacagagtatgcccagctttttgcagcactgattgcacgaacagcaaaagac

SEQ ID NO: 845666 - DNA, 98 bp, Homo sapiens
cggtgcacgtactacgagacgtgtgctacatacgggctgaatgtggagagggtcttccaggacgctgccactggtgacatgccaacttaccagatccg

SEQ ID NO: 845667 - DNA, 98 bp, Homo sapiens
ctgctccacgaggagcacagccgggccgctgcgaagacggggtctggctctgtcacccaggctggagtgcagtggcacgattatggctcattgcagcc

SEQ ID NO: 845668 - DNA, 98 bp, Homo sapiens
gccgcggccgaccatagagatgcggctcccgccggctctgggtctggaggatccaggtggacccagaaatggaaccagtgaccatctggagactgacc

SEQ ID NO: 845669 - DNA, 100 bp, Homo sapiens
acaagcattcctatctttctcccggaagtcaccattggagctcatcagactgaccgtgtcttacatcagttcagagagataggagcatgctgctatgtgg

SEQ ID NO: 845670 - DNA, 125 bp, Homo sapiens
aattctgggcaagaaagatattgaaacaaccaccatttcaaattttcacactcaggtggcattgccaggacttacacagatcaatgtgttcagattttaacagagttgctgggtcttcgacaaga

SEQ ID NO: 845671 - DNA, 98 bp, Homo sapiens
gaagttctacgcacgcgtctgcagaagtggctcaggcctggttggccgccaggacatgaagaatgcaaccctctccctgaattctaatgacagtgagc

SEQ ID NO: 845672 - DNA, 99 bp, Homo sapiens
aaagacgcattgcaaacttaattaaagaactggccagtgtgaagcagtattctggaaagtttttctaagactagtgaagaactgaaggagtcctgcatc

SEQ ID NO: 845673 - DNA, 100 bp, Homo sapiens
cttgagttcattaaatggtcagctgcaggttgttttacgaatacgtgttgtagtcatccattaagcaatccagccgagcttgaggaaagtgacgcccttg

SEQ ID NO: 845674 - DNA, 143 bp, Homo sapiens
atggagacttcatcctgggctactatagtcacaaccacagcatcctcatcggcatcactgaacccttccaggatttccctggggaaagtcttcactcagagcttcgctgacagccaaggatggcaagcaaggggccctcggcc

SEQ ID NO: 845675 - DNA, 100 bp, Homo sapiens
caagaggaagcggaaaccagtggccacagcatctttgtctagccccagtgcagggaaatcctcattgacgattcaatttgttgaaggccaatttgtggac

SEQ ID NO: 845676 - DNA, 100 bp, Homo sapiens
atgagtggaaaaatacccatggtgggcaggaagagctattcaaagtgtgattagagctgggcttggtggcttgcatctacagttccagctacccaggagg

SEQ ID NO: 845677 - DNA, 100 bp, Homo sapiens
tctgaccgcctcccgcggaggggtggccgccgccgaccgcttgttgattggtgctggctgtgccctctaccccttgggctgggacagtgaggaagtccgg

SEQ ID NO: 845678 - DNA, 98 bp, Homo sapiens
actattcctccaaataaaattgttctttcagaggaccaagacagttacctgtgtaatgtcaccttgtttaggaaggcagttgatgacttcagacacaa

SEQ ID NO: 845679 - DNA, 99 bp, Homo sapiens
ttaagctcgtgtaacggcggcggtgtcggcagctgctgtagcgaagagagtttggcgcgatgttatgtgtctcggtaccacgtgaaagactcctcacgc

SEQ ID NO: 845680 - DNA, 100 bp, Homo sapiens
taatttcaacagaagagtgagagatggaacccgaagaagaaaggattcgttacagccagagattgatcactcatgctaggtatggatctccttacccttg

SEQ ID NO: 845681 - DNA, 99 bp, Homo sapiens
ggaacggctggcccagccaatcctggagctgctgttgcagcacttgttccccaaacaagtgctcctacattctggttaatacaatctgttggaatgaca

SEQ ID NO: 845682 - DNA, 100 bp, Homo sapiens
ctttggaagagttcgtgaaagctttctgcccagagctcctggaccaatgcatcttcccaccaccttaaaccactggtaaaacatggctaaaagcttacgg

SEQ ID NO: 845683 - DNA, 100 bp, Homo sapiens
tggagatggtcagcctgctgctgagcacaggacaggtggacgtcaacgcccagaacttgtctgtgtgtccagaggaggagtccatcatcatgtcctcatt

SEQ ID NO: 845684 - DNA, 100 bp, Homo sapiens
atgaattcctagatgggcaaagatggattgaagacaaccttgatttcagtgtgtgtgttcacaatgaaaccaagaatgaattggagaagatgttgaaatg

SEQ ID NO: 845685 - DNA, 98 bp, Homo sapiens
gcaacttctttcagtagtcaagtggtctaaatcattgccagatggggaaattgaggcagagaagccaagacatgtgctaaaggtcatgcaggctatga

SEQ ID NO: 845686 - DNA, 100 bp, Homo sapiens
aagatggcaaactgtactatgacaaaagatggggagtcctcagcactgcctcttctatttccctgtggaaacctcaaaagagaaatcctgccaaaagcgc

SEQ ID NO: 845687 - DNA, 100 bp, Homo sapiens
acgggccaggtaggatttccgggagaggctgctgtggaggctgaggaggcggcggcggagatctggcataagcagtactataatggatgtagacagcaca

SEQ ID NO: 845688 - DNA, 100 bp, Homo sapiens
gtctaggaaaatcgactctcataaacagcctattcctaactgatctgtacccagaaagagtcatacctggagcagcagatcctttgcacatggcctgcta

SEQ ID NO: 845689 - DNA, 98 bp, Homo sapiens
gcttcctgtgggagtgacccgccgcccccgacccaggttatgaagacagtatggagtttccagaccatagtagacatttgctacagtgtctgagcgag

SEQ ID NO: 845690 - DNA, 100 bp, Homo sapiens
tctagcatgctctctgaggaggaaaaggaagagttaaaagcagagttagttcaggctgctgatgtgctgttgcaacatggagctaatgtcaatattcaag

SEQ ID NO: 845691 - DNA, 100 bp, Homo sapiens
ggccacgagagagcgggagcctcgctggtccccatttcagtgtactaatggtcacttgatgtgcgctggctgttttatccacctactagcagatgcccgg

SEQ ID NO: 845692 - DNA, 100 bp, Homo sapiens
ccgggaaaagtggcactgaggctctggaacttctgcccagctctccttgagagtattatgagggaggccgaggacttcatgctccggacagagaaacggc

SEQ ID NO: 845693 - DNA, 100 bp, Homo sapiens
cggaaaggataagcctcgacttagaagctaccgagttaccctaagaaagaattcaattcgtcataatctgtccctacacagcaagttcattcgtgtgcag

SEQ ID NO: 845694 - DNA, 98 bp, Homo sapiens
cagcgtgagcagccggaggatcgcggagtcccaatgaaacgggcagccatggccctccacagcccgcaggtaaaatgtcggttccaggaccttaccag

SEQ ID NO: 845695 - DNA, 98 bp, Homo sapiens
aagtatctctagtctttatgggaaacctcagcttgatgatgtatctcaggtggttgaccagattgacaccctgacctctgacctacagctggaggatg

SEQ ID NO: 845696 - DNA, 98 bp, Homo sapiens
gctggagtttgccatccagcccaacaccaccgggaagcagctatttgaccagcactctgatctacaaatttggaagaaccgaagagctatggacctga

SEQ ID NO: 845697 - DNA, 100 bp, Homo sapiens
ctacaggactgcggacaagggctggcaggtgaaatgacaatggatgctctgttggctcgattgaaacttctgaatccagatgaccttagagaagaaatcg

SEQ ID NO: 845698 - DNA, 100 bp, Homo sapiens
ctacacaccacccctgccatcttgctcaaggagatcatactggtggatgatgccagcacagaggatgatgctgtgtatctggacaatgagaaagaaagag

SEQ ID NO: 845699 - DNA, 99 bp, Homo sapiens
tccggcagcacatcttacaacaggtgctccagctgaaggtgcgagaagaagtcagaaatctacagttactcacacaagatatgatgcttcctggtgtgt

SEQ ID NO: 845700 - DNA, 100 bp, Homo sapiens
gtggagcagctctgaagatgcaaagatggaacttgctaaggaagaaaagtgtgaatttctgccattcctgtccccacggaaggttatagtaaaaggtggg

SEQ ID NO: 845701 - DNA, 115 bp, Homo sapiens
tggagaaatgtacattaccattgactggaaagcaatgtgtcaaccgcattattactgaaaagaaatgcctccacggctgtgtacgcctgttgcaaccccatccaggagacatatt

SEQ ID NO: 845702 - DNA, 98 bp, Homo sapiens
caggtgttgctcccacctcagtcttctgaatagcttggagtatagtgggtccgccattaggtactcagacagagttaagaccggggtcactggagagc

SEQ ID NO: 845703 - DNA, 100 bp, Homo sapiens
cactcagtccctctgtgctccaggactccctcaataatgttctacacatgttttaacacccaaaaagctgttggatgatataaagatgctgaataaaccc

SEQ ID NO: 845704 - DNA, 101 bp, Homo sapiens
cctcaaggcagccgtgatcgtggcgttcgcctttaccaccctcctcatcgcctgcctgctgctgcgcgtcttcagacctgaaagatgtctgaaaattccag

SEQ ID NO: 845705 - DNA, 100 bp, Homo sapiens
atgcgaatgatcctgaagcctcaaagtttcatgtgaaaggagatgaccttcaggccattaagaaggagctgacccagataaaacaaaaagtggattctct

SEQ ID NO: 845706 - DNA, 100 bp, Homo sapiens
attcctatctttctcccggaagtcaccattggagctcatcagactgaccgtgtcttacatcagttcagagaggccaactacacagacccccagagcaaac

SEQ ID NO: 845707 - DNA, 100 bp, Homo sapiens
gacagaagcagtgaccgtgcccacgccaagatcagccgcatcgagtatatccactccaagaacttcatccaccgggacgtcaagcccgacaacttcctca

SEQ ID NO: 845708 - DNA, 100 bp, Homo sapiens
ctcttggaactgggcttggtgcaggatttggaacaggaaggcccgaacaagacaggaacgtcctgtgccctggactgtggagctggcattgggaggatca

SEQ ID NO: 845709 - DNA, 99 bp, Homo sapiens
tggtctccaactccttagctcaaggaatcctcccacctcagcctcccaaagcgctgtgattacaggcctgagtgtgatgatgaacagtctacacagatg

SEQ ID NO: 845710 - DNA, 99 bp, Homo sapiens
tcagaaggtggctcaatgcaggtattcaagcaggtggtgaaaactattggcttgagggaagtttggttctttggtctgcagtaccaggacactaaaggt

SEQ ID NO: 845711 - DNA, 98 bp, Homo sapiens
ttactgcgaagttttgctcctggatgaatccaagttaacccttaccacccagcagcagggcatcaagtccgatacatacttctgcatgtctatgcgaa

SEQ ID NO: 845712 - DNA, 100 bp, Homo sapiens
tttgagttggaatccaggtctttttaaagaatcaacatgtattcacaggaatggaagttggatacactttgtgacttgtacgagacactgaccattacac

SEQ ID NO: 845713 - DNA, 100 bp, Homo sapiens
agttccagtttgtggcctcctaccaggagctcatggttgagtgtacgaagaaatgggtgaatctgtaaaatatttcctggataacttggataaacttgga

SEQ ID NO: 845714 - DNA, 100 bp, Homo sapiens
gaaggactgtacatggtgaatggaccaccacattttacagaaagcacagtgtttccaagctccagaaacatgacaaggaggactttcctgcctcttggag

SEQ ID NO: 845715 - DNA, 100 bp, Homo sapiens
tgctgtcaggctacatcagcaaaggggaggaggaagccaagaatctggtgagcgaagccatcgcagctggcatcttcaacgacctgggctccggaagcaa

SEQ ID NO: 845716 - DNA, 100 bp, Homo sapiens
tcagccccatggggtatatccaccctcaagtgtgaataaagttacctcaatgaccttcttaactggcaaagcagtagaagatttgtgcagaataaagcag

SEQ ID NO: 845717 - DNA, 100 bp, Homo sapiens
gtgattttgaattttttggcagcagaagggcgactgagtactcaacatattgactgtatttgggctgcagcacaggcctctagactcaggactcaacaat

SEQ ID NO: 845718 - DNA, 98 bp, Homo sapiens
ttctctcatatttcttactctcaactggttccgagagtggcgccctgctcaagccgtggctcttcacggagatcaaggagcagcggcactgggacatc

SEQ ID NO: 845719 - DNA, 100 bp, Homo sapiens
tgttagaaacagtagtggagaatcaagtggctggcacatgtgtatcaatcccaaggaatgatgagagctgcagagatgtgttacagaaagagtctacaat

SEQ ID NO: 845720 - DNA, 100 bp, Homo sapiens
gagccagtttcaacaaccctgacagagcagtggagtatcttttaatggtgcaggtggtaccattataacgaattttgagaggttggtaaaaggagattgg

SEQ ID NO: 845721 - DNA, 98 bp, Homo sapiens
aggaaaatactggagttcctgagatctcaaggcaaaaagggcagctagctgtagaaagagctaaacaagtagaagagttcctgcagcgaaaacgggaa

SEQ ID NO: 845722 - DNA, 100 bp, Homo sapiens
attaattggacacagtgccagagtgtatgcactttactacaaagatggacttctctgtacagggacaggagagagtggcaagagtacgtttatcaagcag

SEQ ID NO: 845723 - DNA, 100 bp, Homo sapiens
tacccggttgtcctcaggcgctgtcagagcattggctgtgatgactacttaggctccgacaaagtcgtggacaaatgtggggtgtgtggaggagacaaca

SEQ ID NO: 845724 - DNA, 100 bp, Homo sapiens
tgagggggggcggaggaggggggggtaccacacaacaccccagcaaacctccgggcccccaggcatggctagctcgggttatgtggtccgaatcagtggt

SEQ ID NO: 845725 - DNA, 100 bp, Homo sapiens
cctgtgggacgctccgtggatgaggctctgcggctggtccaggccttccagtacacagacgagcatggggaaggaatttatcaaagagctgctttctcgg

SEQ ID NO: 845726 - DNA, 147 bp, Homo sapiens
agcacaggattgtccatcctccagcagctcagtgcaacggtgtgaactcagcctgtttcagagcctccacaccatgcatcaccatgaacggagagaccatcgcctgtgctgagggctgccaggccattgttgacaccggcacctctc

SEQ ID NO: 845727 - DNA, 100 bp, Homo sapiens
catgaatggcattcagaagtttcagatccatcgagatgacaggtccacagatcgcctgccttcagctcacacatggtctataagaaggagaaagctcgag

SEQ ID NO: 845728 - DNA, 98 bp, Homo sapiens
acgaagccaccccccacgttttcaactgaatggtcagtaggacagaaggtaacattgatgactcgctcattggtggaaatgcctccgctgaaggcccc

SEQ ID NO: 845729 - DNA, 99 bp, Homo sapiens
ggactgctctatccagcatcattgagattgggaaaatgaggtacgttagtgttcgcgattttaaaggcaaagtgctaattgatattagagaatattgga

SEQ ID NO: 845730 - DNA, 100 bp, Homo sapiens
gatgaaaaacttccgtaacatccaggttgatgaagctaatttattgacttggcaagggcttattgttccttctctggctgatgaacttgctcttgtggat

SEQ ID NO: 845731 - DNA, 100 bp, Homo sapiens
tgatgttgatttcccaataggagctggagtggaccagagaaattgcttgctttagatgaactcattgatagttgtgaaccaacacaagtaaaacatatga

SEQ ID NO: 845732 - DNA, 103 bp, Homo sapiens
aagaaacctcaggacttgagtaacagcaacatgtgtaaacaggaacatcgataagtagtgtaaaaacttgcacaatgaaatccgaagccaaggatggagagga

SEQ ID NO: 845733 - DNA, 100 bp, Homo sapiens
gcaaaggagacagacttcggatgggaggtgggtttggaggatttgggacaacatctacaactgcaggttctgcattcagcttttctgccccaactaacac

SEQ ID NO: 845734 - DNA, 100 bp, Homo sapiens
tgatgaagcttctgaaccatccacacatcataaagctttaccagataaggctcaattacttgaaatagccaaagctaatgcagctgccatgtgtgctaag

SEQ ID NO: 845735 - DNA, 100 bp, Homo sapiens
ccctcctctgcagcctggtgcccatctgtgtgctgcgccggccaggagctaaccatgaaggctcagggatcatagacggtatttctatgtaaacgaacag

SEQ ID NO: 845736 - DNA, 99 bp, Homo sapiens
acacgttctgattaaccaagggcttgaagtagaaaatgccatgatgagaaaaactattaaaaaacaggatgaccaaattgagcgacttgagaaaatcct

SEQ ID NO: 845737 - DNA, 100 bp, Homo sapiens
gaagtactttctggggtcttagatacagaactacgatataagccagttgcatttgctggtctggcctttgcgtccttctacctggcagggaagttacact

SEQ ID NO: 845738 - DNA, 98 bp, Homo sapiens
gagacacctggggatgaggagcttggatttgaagcagcagttgctgccttgggttgtggacctggcctattagcagatgccaagatgcgggtatttga

SEQ ID NO: 845739 - DNA, 99 bp, Homo sapiens
ttctatgtgctgtgtccggacaacggctgcggcgacaattttgttttgagaacagagtgctgttttagagctggcagcagcatctcagcccaagagaag

SEQ ID NO: 845740 - DNA, 98 bp, Homo sapiens
aaagtggtgatgctacttgaggggaatttctgcaacccatagtcaacgattacatggtgctggagaatctggtaaaagcaccattgtgaagcagatga

SEQ ID NO: 845741 - DNA, 100 bp, Homo sapiens
tttcaaacatctgaagatgacaatttattagatggtgacactgcagttgattactctcgtggctttggtggccggtacggggtggagaaggataaatggg

SEQ ID NO: 845742 - DNA, 98 bp, Homo sapiens
tctgcccctgccatgaccactgtggagaacaaatccaagattagcacagtttgtttcgacgccggaccgcgtaagagacgatgatgttgggcacggaa

SEQ ID NO: 845743 - DNA, 100 bp, Homo sapiens
gcatcccgtcaggggttgcaggtgtgtgggaggttggtactaagaagtgcctttcctgacgtctctgctgcttggaaccgcttctagagcagtctctgct

SEQ ID NO: 845744 - DNA, 100 bp, Homo sapiens
gctctacttgctctgcgacaaggtgcagaaagccggttgttatgacaatggaaaacactatcagataaatcaacagtgggagcggacctacctaggcaat

SEQ ID NO: 845745 - DNA, 98 bp, Homo sapiens
agcagaggcccttgttctgatgggggctgaccggttccctgatgtgttacctgcttctgctactgatccaaactgcagaacttctcattcatccccaa

SEQ ID NO: 845746 - DNA, 100 bp, Homo sapiens
gctcaagcgcccagaaacccctactcatgatccggaccctgagactcccctaaaggccagaaagattgaagataaaactttccaagtccttggtaatctt

SEQ ID NO: 845747 - DNA, 99 bp, Homo sapiens
gctgcgggccattagagatttcttctggaaaactggaaacaagatcctgtttgaccaaactcagagatcaattaaggcacagcttcagaactttgttaa

SEQ ID NO: 845748 - DNA, 98 bp, Homo sapiens
gaggaattacgggaacagaaagaaaagtccgaaagagctggtccaggttatgggatcagccaatcaagtcgactgtcgtcttctgttagtgccatgcg

SEQ ID NO: 845749 - DNA, 100 bp, Homo sapiens
cttccgtggcattagtagtcagcccttccctgaactacactgtgctgccttaaaagtgtttacggttcgtgacaataaaaaattaagagtaaatgctgtt

SEQ ID NO: 845750 - DNA, 118 bp, Homo sapiens
aagaacctccaaagagcattgaagaattcttaaagtttcaaaattgggagtctcaggagcaggggctgcggcagaggctgctggacgagcagttcgcagtgttgcggggcgctgctgc

SEQ ID NO: 845751 - DNA, 99 bp, Homo sapiens
ccaagtgtgccccagctcagaaggttccagcaacagatagaaatgctttaagttcactctggggaaagctggcctctgaaatcttaatgcagaattggg

SEQ ID NO: 845752 - DNA, 100 bp, Homo sapiens
cgccagacctttgtaacacccggaagtctgaaggaagtggcagtttttgtctttgataaaaaactgattgacaagtatcaaaaatttgaaaaggatcaaa

SEQ ID NO: 845753 - DNA, 99 bp, Homo sapiens
tctcggaatactgcccttcttgcttggaaaatgatcagagatggttgtgtaatgaaaattacaaggtcgttgaacaagtacgagctcaactggaggcag

SEQ ID NO: 845754 - DNA, 100 bp, Homo sapiens
tttggaacgcccgtgccgcgtctccgcgttcccagcccgggtccccgcgttcacagccccagcgcaggttggcgtgcagtggtgtgatctcagctcattg

SEQ ID NO: 845755 - DNA, 100 bp, Homo sapiens
cttcagcactgataagaatctattattgagcggcactgcagaggtggagctgaagaagggagccactctcaaaatcacgctggataacgcctacatggaa

SEQ ID NO: 845756 - DNA, 99 bp, Homo sapiens
ttgagacggagctaagagatatctgcaatgatgtactgttgatttatgaagactctatggatctaatcgcaaagctaccttgtgttgcagcaaagatct

SEQ ID NO: 845757 - DNA, 100 bp, Homo sapiens
cacaatacgaattgaaaaaggaaccccaaaggagtcgattcttaaaaactctgcttctgttgcttctgggctggctggctgagaaactacctactcttcg

SEQ ID NO: 845758 - DNA, 98 bp, Homo sapiens
ggacggagatggagccgtggtccttcccaatgaggtggccctggtacagtggacggaaagtgtgggcttaaccctggtgggccgagaccagtcttcca

SEQ ID NO: 845759 - DNA, 100 bp, Homo sapiens
tcagatactctgactccacctttacttttacctacgttggcggccccagaaggtgggtcctacgtgtatgaactcagcgcagtcctcatacacagaggag

SEQ ID NO: 845760 - DNA, 99 bp, Homo sapiens
tgggggttgctgacccagaggagagttctccaaacatgatcgtttactgcaaaatacagtttatgtaacttgatggaagaaaatggaattactccaaaa

SEQ ID NO: 845761 - DNA, 100 bp, Homo sapiens
gaaattcagttatcagtcccgtgggcaatagagtcactgtatttgaccttaaaaaatctgactgcagccatgagcagcaatgagtgcttcaagtgtggac

SEQ ID NO: 845762 - DNA, 128 bp, Homo sapiens
cttctccattgccgcgctcatgtcgagcggcggctctaaggagaaggaggcgacggagaacacaatcaaacccctggatgctgtcttcgcaggtgccatgcctacaatggcaagcgtcaagctgtcta

SEQ ID NO: 845763 - DNA, 100 bp, Homo sapiens
aggaggctctgaagtggagaacgaagggcaagtgtccagagaatggctgggatgaaagtacacttgaactctttttacatgaacttgcaatcatggacag

SEQ ID NO: 845764 - DNA, 100 bp, Homo sapiens
cctcagcctcctgaggagctgggattacagcgatgactacctgtccctggagggttcccgctggccaccagccatcaggcaggccacacgctggaagtac

SEQ ID NO: 845765 - DNA, 99 bp, Homo sapiens
actcatggaggctgagcatttattcaggcctcattgctacgatttcagagtaccctggtaatagctgagcatgcaaatgattccctagcacccattact

SEQ ID NO: 845766 - DNA, 127 bp, Homo sapiens
ccaagttgatgacacctcaattgttgttcgctggagcagaccccaggctcccatcacaggttgaccagatgttcgccgccttcccccctgacgtgactggcaacttggactacaagaacctggtgca

SEQ ID NO: 845767 - DNA, 99 bp, Homo sapiens
tctgatgatagcagatcctatctgttcaattcttatagccattcttatagttgtaaggagtttccagatgtcttggaatgcactgtatctcatgcagta

SEQ ID NO: 845768 - DNA, 98 bp, Homo sapiens
ggccaagtacactctcaacgacacggggctgctgggggatgatgtggagtacgcacccctggagatggaataaactgagactgcaggacaaagagaaa

SEQ ID NO: 845769 - DNA, 98 bp, Homo sapiens
atggcggtggtggccacgctgaggctctctgctcagcatccttttatcaagaatgccaaacctgtatcaatattaagagacctgatcacagaagctat

SEQ ID NO: 845770 - DNA, 98 bp, Homo sapiens
ttattatggactttcaaacatctgaagatgacaatttattagatggtgacactgcagttgatagctttccaatgattagacgaattgattctttctgt

SEQ ID NO: 845771 - DNA, 100 bp, Homo sapiens
agaaccccgtctgtggcaaagagccccgaagctaagagcccccttcagtcgcagcctcactctagatacaaactggactctcaggacaaaacgacaccag

SEQ ID NO: 845772 - DNA, 98 bp, Homo sapiens
tccagctcatcgctcgcatcgctgccgccaacggggtaacggaaggccattggaaatggggcggcgtcacagtccaagtgaacagtgcctttttcaca

SEQ ID NO: 845773 - DNA, 100 bp, Homo sapiens
cttcaggggaaatggcttcagcgcagtatattactgcagggataaagtaattcctaataaagtggggacatattgtatccagtttggttttatgatggat

SEQ ID NO: 845774 - DNA, 100 bp, Homo sapiens
ggaattctgattcattgccacacagattatcagaccttgaagctgatgatgttaagggcagtgtaccactgtcttcaagccctcctgctacacatttccc

SEQ ID NO: 845775 - DNA, 98 bp, Homo sapiens
catctacttcctggaggagcgcatgcaacagaagtatgaggccagccgggaggacatctacaagcggatactccatcttctaaaccaacactcctagc

SEQ ID NO: 845776 - DNA, 98 bp, Homo sapiens
aggagccgcggagccggcgctgagaggggctgcggccggagcgggcggctgagacaaaggcgacgaccatggcaaaagttataaccaccgtactgaag

SEQ ID NO: 845777 - DNA, 100 bp, Homo sapiens
agcccccacgtcccccaaagaagaagtatcagaaagcagggctgtattctgacgtttacaaaactacagaataacgaaggaggcccaacttcattcaata

SEQ ID NO: 845778 - DNA, 98 bp, Homo sapiens
acttcggaggaacattgtaaaactctctttgtatcggcatttcaccaacacgcttattttggcagtggcaggtggccacatggttgaagagtgacgtg

SEQ ID NO: 845779 - DNA, 98 bp, Homo sapiens
actctcctcctctggcccattaacaagcagctcttccggaagatcaactgcagactgtcctattgcatctcaagccaacccttaggagaaatcttgag

SEQ ID NO: 845780 - DNA, 100 bp, Homo sapiens
ccgaaagcaagctcttctagaagttggaatagccaggccagaagaaggaaggcctgtggtgagtgggacaggaaatgacatcaccaccccaccgaacaag

SEQ ID NO: 845781 - DNA, 98 bp, Homo sapiens
ggactcctacgacaacttcagtgggcatcgagatgacggcatggaggatctcacattcttgaaggtggcattgaagagcactaagatcggaagatgag

SEQ ID NO: 845782 - DNA, 100 bp, Homo sapiens
agcaaatattccacactacctacagtgaaatagcatggatttcatccattatgctggctgttatgtacgcaggagcaccaatagctgcaggaactggccc

SEQ ID NO: 845783 - DNA, 105 bp, Homo sapiens
tttcagctttggctttgctctctcttctgccatctgataataggaacctcggagagctgatagatcggtttgtggctgatttcaaagcccaggggccacctaagc

SEQ ID NO: 845784 - DNA, 98 bp, Homo sapiens
gaaccagatccgggagcacgtcatcgccatcgaaggatttgtactgtgttcgcagtgacctggggaacctgctcaaagccctgggtcgcttggaagaa

SEQ ID NO: 845785 - DNA, 100 bp, Homo sapiens
gacctacgacatcgcggcttctctggcgttggccagtcagccacaggacccagatgatgtggtaccagttggccaaagaagagcctggtgttggtgcatg

SEQ ID NO: 845786 - DNA, 100 bp, Homo sapiens
gggcagccatggccgaagcggcgcctgcccgggtgtggatgaggtcaccattgtcaacattttgaccaaccgcagcaatgcacagagacaggatattgcc

SEQ ID NO: 845787 - DNA, 100 bp, Homo sapiens
catgtgtctgaactgaagaagcttgggctcacttccacaaataatgttggctaccagggtatttagcctagttggcaagcgagcaatttccacctctgtg

SEQ ID NO: 845788 - DNA, 132 bp, Homo sapiens
gagatcgaaaacctctcatggaaagtggagcgtgcagacagctatgacagagggattatgtttgagaccttcaacaccccggccatgtacgtggccatccaggccgtgctgtccctctacgcctctgggcgc

SEQ ID NO: 845789 - DNA, 98 bp, Homo sapiens
gacttacagaaaaagaagaagcggaaacaacgttctcccgcaaaacacgagtacacgagacaggattgagaaaggagagattcaaattgtgacttcag

SEQ ID NO: 845790 - DNA, 100 bp, Homo sapiens
accttggcctatgataatggcatcaacctcttcgatacagcagaagtctacgcagccggcaactcttttgaaacagatggtcaccatgtttagatattag

SEQ ID NO: 845791 - DNA, 100 bp, Homo sapiens
atccgggagagaaatcacttggaaggactttgtcaataactatctttcaaaaggagtagttccagtacaatggtcagatatggtcactttgaaagccagg

SEQ ID NO: 845792 - DNA, 100 bp, Homo sapiens
cggcgaccagcaaggaggaggcgctgatggagctcaagaccagggccctgcagctggaagaggagctgttccaggcctcccccagggaagaacttcacta

SEQ ID NO: 845793 - DNA, 100 bp, Homo sapiens
ccagagccagtcgggccaagagaagaggcggtggaggacacgacgcgcttaaaggctgtccgtacctggcggtgaaaatcacccctgccatccctgcagt

SEQ ID NO: 845794 - DNA, 100 bp, Homo sapiens
gccattggcaaagcagcaaccaattatcagtttacaacctgcacccactaaaggcttcaacggaccacaccaaaatgccatctcaaatggaacacgccat

SEQ ID NO: 845795 - DNA, 125 bp, Homo sapiens
tcacccagcctgggcaagcacgaatgtccataatggaccgtattctccaaatagcagaggctgaaactactgttgaaccacaccaatatcttgcggcctcagtatcagtatgatgaagattctgt

SEQ ID NO: 845796 - DNA, 50 bp, Homo sapiens
tgtggcaatggaacaggcttgagaaacagatgtgtagcactttgtagttt

SEQ ID NO: 845797 - DNA, 98 bp, Homo sapiens
ttacgaatatcagcctggcaagtcttccgttctgaccaacgaaaagatggtattcctgcaacacatggtaaacccaccagttattcaataagggtaga

SEQ ID NO: 845798 - DNA, 137 bp, Homo sapiens
gacatggcttccagaatcactgagctgtaacaaagcactctgtgctagtgatgtgagcaaatgcctcattcaggagtgtgaaaccaagattgcacaagagatagccagtctttcaaaagaggatgtttccaaagaag

SEQ ID NO: 845799 - DNA, 98 bp, Homo sapiens
tttgaacattcagtggagacaccccttgtcagagccgacccgtttcaagaccttaggtttggaattcacccagttgcaggccgaatgcctggtcagct

SEQ ID NO: 845800 - DNA, 100 bp, Homo sapiens
tcttcttcgagtatttgtagaagggtgtggaggcacagttggtgctattttcacttgtccactagaagtcattaagacacggttgcagtcttcaagatta

SEQ ID NO: 845801 - DNA, 98 bp, Homo sapiens
agcattgctgcagctcgtgggtgctcagggaccttggtagctaatgtccgaagaaagtgactctctgagaaccagcccttctgtggcctcactctctg

SEQ ID NO: 845802 - DNA, 100 bp, Homo sapiens
acctactcgccgaccttcatccgcggaagccagcagacctgcagaacttggctcccgggacccacccaccatttataactttcaacagtgaagtcaaaac

SEQ ID NO: 845803 - DNA, 100 bp, Homo sapiens
gacgcagccacctgctttgtggacgctggcaacgcattcaagaaagccgacccccaaggtggctgcagtgctgactctaccctttgacgtggtaaagacc

SEQ ID NO: 845804 - DNA, 98 bp, Homo sapiens
tccattcgaagtgttggcagtcacaggcaacttggagtcatcacggatgtatgacgttttggaaccgcagcagggcagaggctgtggcagctcaggaa

SEQ ID NO: 845805 - DNA, 100 bp, Homo sapiens
ccattaacaccctggagactcgggatcccaggagggcactcatggtggtttatgggactctggactcctgagaagcggccttgagtctacaggatacatc

SEQ ID NO: 845806 - DNA, 98 bp, Homo sapiens
agagctctccatctctaagccccgtaagtcctctgtcaccaacatcatctgaggctgaatttgataagaccactccaacatcccatgcaccatcgtgg

SEQ ID NO: 845807 - DNA, 98 bp, Homo sapiens
cagctgaagctcatcatgaccttccagaattacgggcaagcgctgttcaaacccatgaactccagctccagaaatcccagtacctgcaactgggcccc

SEQ ID NO: 845808 - DNA, 98 bp, Homo sapiens
ctggccctccgtagcatccaaggcagacaaagagggttggggtgctggaggactgcttcaccttcctgggcatcttcctggccatcatcctcttcccc

SEQ ID NO: 845809 - DNA, 98 bp, Homo sapiens
gacactttgttattggagaaacatgcagattatatcgcatcctatggctcaaagaaagatgattatacttaattcagtgcacaaatgagatgaatgtg

SEQ ID NO: 845810 - DNA, 99 bp, Homo sapiens
gaatatgagcgcttttccaagtacatgcccagcgtcaagcccagccatctaatcagtctccgatgtctttaacatctgatgcgtcatccccaagatcat

SEQ ID NO: 845811 - DNA, 100 bp, Homo sapiens
aagtcaaacgcagaaggactgcctcactgagcaaccaagagtgacatctgttcccgagctgttcctgactgcagtgaagctcacccatgatgacacagga

SEQ ID NO: 845812 - DNA, 100 bp, Homo sapiens
gcccggctgcgcccccactcagcgatggagagaactattgtcgagtgatgcgatgaaagaatataacagggctcgagtctacctggatgaaaactacaaa

SEQ ID NO: 845813 - DNA, 100 bp, Homo sapiens
tgggacttcactaagtttgacctccctgaaatcagtaatggcaaagtgtttcatggatttcaaagctggaggcgccttatgtcacattcttggggctgct

SEQ ID NO: 845814 - DNA, 98 bp, Homo sapiens
cgagggctggaggatgcgttccctggggtccggcttctagaattcctctccagagctactctcaagttatatccaggggacaggcccctttggctcca

SEQ ID NO: 845815 - DNA, 100 bp, Homo sapiens
tggcaaccagatcggtgccaaggtacaccaggggttggaaaaaccacactaggcaaagaacttgcgtcaaaatcaggactgaaatacattaatgtgggtg

SEQ ID NO: 845816 - DNA, 98 bp, Homo sapiens
gagtttgggcatcctgcagccattaatgatcccaagatactctggcaggctgccctgagcacgctcaaccccaaccccacggacagctgtcccctcta

SEQ ID NO: 845817 - DNA, 100 bp, Homo sapiens
cgggctgcggcgtgtgcgcgcccgccagctgctccggagatacggaatcatattgacaggtcatgaaaatgagaccaaaagatctctggaagcgattaat

SEQ ID NO: 845818 - DNA, 100 bp, Homo sapiens
gaggggggtgcagatgactctgctgaggagggggacctactggatgatgatgataatgaagatcggggggatgaccagggtggctttgcaaaatgttacg

SEQ ID NO: 845819 - DNA, 98 bp, Homo sapiens
tgccagaatgtgtctctgaagaggctcgctcactcattcaacaggtcagcaagtcctgggcttggtggagaaccagagtgactggtaccttggaaacc

SEQ ID NO: 845820 - DNA, 98 bp, Homo sapiens
tctgggtcctcggtcggtacagtctctgcacctcgcgccccagcagtgtccgagctgcaggaggagggaatgaacgccatcaacctgcccctcagccc

SEQ ID NO: 845821 - DNA, 100 bp, Homo sapiens
ggcgcttccgagcctcacctttattctctcagcacactgcagcaccatatgaaggcggagtatggaaagttagagtggacctacctgataaatacccttt

SEQ ID NO: 845822 - DNA, 100 bp, Homo sapiens
gaagtctcagatcttttctacagcttctgataatcaaccaactgttacaatcaaggtctatgaagagcacgaacttccaggagccggtgcagccgctgac

SEQ ID NO: 845823 - DNA, 100 bp, Homo sapiens
gacacctgcatcagatcctcacggagacaaccttacctactctgtgttctacaccaaggaagggattgctaggtcttacagaagaagcaacaagatagta

SEQ ID NO: 845824 - DNA, 98 bp, Homo sapiens
ttgaactctgtggtgcgcttaaggacaatagccggaggcagaagcagttgttaaaccagaggtttgagagcctgtgcgcagtgctggaggagcgcaag

SEQ ID NO: 845825 - DNA, 100 bp, Homo sapiens
tcttgctaaagaggtagcaagaaagaaaattagagtgaatgtagttgcaccaggtggtataagttgaaatccaaaccaggaaagaaggacaaggagcgag

SEQ ID NO: 845826 - DNA, 99 bp, Homo sapiens
agatggcatgccagtaggtcctgtaccaccagggttctttcaggactgttctgatggctacatgtgcaaaatacactttcaaattaagaatgggtctgt

SEQ ID NO: 845827 - DNA, 100 bp, Homo sapiens
gttaacttctgtttacatggaactcagacatctgcaaatcatggcctgatcaaccccgtataaccaaagatgtaatttgttttcatgctgaagatttctt

SEQ ID NO: 845828 - DNA, 99 bp, Homo sapiens
ttggccccgatatccgctcagggctgaaggtgatgtggccgccctcaaccgacgcatccagctcgttgaggaggagttggacagggctcaggaacgact

SEQ ID NO: 845829 - DNA, 100 bp, Homo sapiens
tccatcaaaatccagatgctggatgacacccaggaggcatttgaagttccaatgtgtcttgctgaatcagggctctcttatccctgccatcgacttacag

SEQ ID NO: 845830 - DNA, 100 bp, Homo sapiens
aagaaaaaaaccacaaatgtttttctgttttgcctgaatacatgatttaaacaagagatttccacagaaggtgactgaaaactcctgaggcatttcctgg

SEQ ID NO: 845831 - DNA, 98 bp, Homo sapiens
gatcacatcctctgattggcaacatgttagctttgaagtggatcctaccagggggcttggagtacccataatacagtgagcccaccttcctggtcccc

SEQ ID NO: 845832 - DNA, 98 bp, Homo sapiens
cgacttcaacatgttccgcagccaggccgggggcgcctgcgactgcggggacagcaacgtgatgcgggagagcggactccctgagaaatgtttcctca

SEQ ID NO: 845833 - DNA, 100 bp, Homo sapiens
tcagggaccaggacattcacagacaccacctccttccctctcttcacatggatcctcttcaagcttaaacctgggtttttcgttggaatatacgttgcac

SEQ ID NO: 845834 - DNA, 111 bp, Homo sapiens
ggaagttctgaatctggcccaaggtcagtgagctaattatgtttgagaccttcaacaccccggccatgtacgtggccatccaggccgtgctgtccctctacgcctctgggc

SEQ ID NO: 845835 - DNA, 100 bp, Homo sapiens
ttttacaaatatgcagtacaaggaagtggggaaagtaagaagtaacttggactcttctagaggagagcaggcacaaactaagccaagaaaagcacgtttg

SEQ ID NO: 845836 - DNA, 100 bp, Homo sapiens
gagagcgtgaccgagagcgcgaatatcgtcatcgttagaaggaatactctgaagatagtaactccgagccaaatgtggatttggaaaatcagtactataa

SEQ ID NO: 845837 - DNA, 100 bp, Homo sapiens
gaaatattaaaggtgattggtcgaggagcttttggggaggctctcaaaattagagagatgtgtaattgtccaccactgtctaatccagaccctcgattac

SEQ ID NO: 845838 - DNA, 100 bp, Homo sapiens
ctactaccatgagccggtgtcttcagataaggtcacgcaaaaacagttccaactgaaagaaatcgtgcttgagcgggcagttgcaggagatgcctctgag

SEQ ID NO: 845839 - DNA, 98 bp, Homo sapiens
tttgataaaactaccaacaggcacagagttacagatgtagagctaaaacgactgaaggatgctttcaagaggacctgtggactctcatattacatggg

SEQ ID NO: 845840 - DNA, 100 bp, Homo sapiens
cggcggacggttttcgtacgggcggccgtgcgcgaggcgagattgacaagtatctctatgccatgcggctctccgatgaaactctcatagatatcatgac

SEQ ID NO: 845841 - DNA, 98 bp, Homo sapiens
tcaagatcctcaagaagaagaagttgcgaaggatccccaacggggaggccaacgtgaagaaagttgcatgctgagaatttgaaaaatgaagatgatgt

SEQ ID NO: 845842 - DNA, 50 bp, Homo sapiens
gaaatggagggcatcttcaaccacaaagccatgcctgatggagctctgga

SEQ ID NO: 845843 - DNA, 99 bp, Homo sapiens
tggtctttggcttctcgactcggtcctgtttcgacagcgaacatgtcgcggcctgtcaggttgctatcaagatcatagataagacccagctggatgaag

SEQ ID NO: 845844 - DNA, 98 bp, Homo sapiens
tggccccaggccccgtgggagagatgcaatcttcttaccgcgaagaagccaggggaataggtagccacatcttgtttgcagataagaaaggaagctaa

SEQ ID NO: 845845 - DNA, 100 bp, Homo sapiens
catcagtgtcctttgggcattcctcatgccaaaggaaagagtgatagattcgtgtggcctttcaaatgattgtgaagtggtggaaatggatccaaaataa

SEQ ID NO: 845846 - DNA, 100 bp, Homo sapiens
taagctggtggtggatagtcacgtgcagtatcggctgggcaatgtggatgccttccaggagacccagattgacaccaccctgcggcgcagccagatgtcc

SEQ ID NO: 845847 - DNA, 99 bp, Homo sapiens
gttactccctgataacttcatagctgcctgtacagaaaagaaaatccccgttgtttttcgattgcaagagactcagattgatggacaacttttcttaat

SEQ ID NO: 845848 - DNA, 100 bp, Homo sapiens
aggcaatggaatcaagacagttatagtcaacatggttgacgttgcaaaggcgcttaatcggcctccaacgtgcactgaaaatgaagtatttcagtaatcg

SEQ ID NO: 845849 - DNA, 98 bp, Homo sapiens
ggccctggcccagagggacaaattcaaggcctcttccagatgtagccctgactgggaagtgcactcgtgagtgtgatgagtatggccactcagactcc

SEQ ID NO: 845850 - DNA, 100 bp, Homo sapiens
agaagatgacagcccgcagagagttaacttctgtttacatggaactcagacatctgcaaatcatggatagtggccaaagcctccaagaacctcatgtcca

SEQ ID NO: 845851 - DNA, 100 bp, Homo sapiens
ccagagaaggtggaggaatcctgatactgagcggcgtggtgaccaagatgaagatgcagaggaccattgtcatccgccgagactatctgcactacatccg

SEQ ID NO: 845852 - DNA, 99 bp, Homo sapiens
gactttaagaaaggaatgaacatgtatttaaccaagttccaacaaaagaatgctgccgcagcggaatggccaaagactatgacgggtcttcctagcaca

SEQ ID NO: 845853 - DNA, 100 bp, Homo sapiens
aatactctgaggctctcaaagatgcccaggagaagctggagctggcagagaaaaaggccaccgatataacgaaggaggcccaacttcattcaataaggag

SEQ ID NO: 845854 - DNA, 99 bp, Homo sapiens
ttactcagcgctgccattttatttcattgcaggaccagctctgccccctaattataaaagcagtagttcagattcatcagacagcgatgaagacagtag

SEQ ID NO: 845855 - DNA, 100 bp, Homo sapiens
ctgagctacagagactgaagaggactcaggagcaaatcagtaatgtgttcaaactggatccaaacaataaagaaggccctgtattaatcctgggaaggag

SEQ ID NO: 845856 - DNA, 98 bp, Homo sapiens
agaaaaccaagcaaaggatgtgcagaaagagacagcacccaagaaaacctcatttggctcgctgaaggatgaagaccggattttcaccaacctgtacg

SEQ ID NO: 845857 - DNA, 100 bp, Homo sapiens
gtttctgctgattacacccgtgcccaggagcttgacgccttagataacagccatcctattgaaatggctcatgatgccctcaatgcccctctgcacattc

SEQ ID NO: 845858 - DNA, 99 bp, Homo sapiens
atctgatctgaatgctgtgaaatcactaggaactccagaggtggctgtacttttgatgatggtccaggggcctgtgattaccaccaggatctgtatgat

SEQ ID NO: 845859 - DNA, 100 bp, Homo sapiens
gacaactgtgagacatgcacttgctacgaaacagaaatttcatgttgcaccctgtgccagctattcaacagaaaagaacggtggcttttctaaaccaatt

SEQ ID NO: 845860 - DNA, 100 bp, Homo sapiens
tcatagcagagtacgatactcaggtcaaagatgtgtcagaagaattggatacaaaactccctcttgatggtggattagacaaaatggaagatatcccaga

SEQ ID NO: 845861 - DNA, 100 bp, Homo sapiens
tctgcggccatggcggcgactactgccaaccccggtcggaagtctatgcgtcagtctacagctgagcatacacgacaaacgttccttcgggtacaggaga

SEQ ID NO: 845862 - DNA, 75 bp, Homo sapiens
tcgctggagatcgagtaccaagggtatagaacaggctatgcttacaggcatcctctcattcgagagaagcctagg

SEQ ID NO: 845863 - DNA, 100 bp, Homo sapiens
gccctttcaatagacagtgttgaggaccatcttgcctggagcaagcaacacagtcactcctggcggcaaaccaaacaaaaccagagtcatctggggaaaa

SEQ ID NO: 845864 - DNA, 98 bp, Homo sapiens
aagcagaggctgcaaagaatgctttgaattctgaagatgatgagaaactgaaaaagaggaaggagcgatttgggattgtcacaagttcagctggaact

SEQ ID NO: 845865 - DNA, 100 bp, Homo sapiens
gtatcctgttataaagcaggaaggtgaccatgtttctcagacacattcatttttacaccccagttcccacggaaaaactaccatctcccctgcccaccat

SEQ ID NO: 845866 - DNA, 99 bp, Homo sapiens
agaactgttctcaggactcattattttaacatttgggagaaacacagccagaaggccaaaaggtgtgttttgctgacttcaagcatccctgctacaaaa

SEQ ID NO: 845867 - DNA, 100 bp, Homo sapiens
ctgtgacagtaacagtacttgggatcccccagttccaaagtgtcttaaagaaaccaccatcatgggttcgggtcccatagaccccaaagaacttctcaag

SEQ ID NO: 845868 - DNA, 100 bp, Homo sapiens
aacttcgtctacctcaacttctgctgcctgggcttcatcgccttggcctactccctcaaagccttcctggatgctctgcagaaccaggctgaggccagca

SEQ ID NO: 845869 - DNA, 98 bp, Homo sapiens
aaagtaaataatccagatcattccacttaccatgatttcgatgatgatgatcctgaggttttcaacacatactccaatgaagactatgacaggagaaa

SEQ ID NO: 845870 - DNA, 100 bp, Homo sapiens
atgatcttgtgtcaccccctaacacagaaggaaaccagtggtatgactttcttcaaaatagcagccaccttaaagatactagagtaaaaggatggtttct

SEQ ID NO: 845871 - DNA, 98 bp, Homo sapiens
tccaacaaggaggactggctgtcagtgaacatgaacgtggctgatgccactgtgactgtcatcagtgaaaaggcgcctgtgtctggcagagctggtgt

SEQ ID NO: 845872 - DNA, 100 bp, Homo sapiens
aactcttctgaaaggtgggcaacctagaaagccagttgatgccacttgctattggagttgtgggctccaaccaggaatggagacgccattggatgttttg

SEQ ID NO: 845873 - DNA, 100 bp, Homo sapiens
gaaaaatatggcaaagacttcaatgacatacggcaagattttgaactttatattgctgttggaatatctggagccatccaacatttagctgggatgaaag

SEQ ID NO: 845874 - DNA, 100 bp, Homo sapiens
tgtggataagcacaaagtcaagagacagcgattggacagaatttgtgaagagtctagaaggaagctcataccgggggagcttgaaagaccctgcaggctg

SEQ ID NO: 845875 - DNA, 100 bp, Homo sapiens
ctttcatttcctgcctgtaacacggtttttcgttggaatatacgttgcacatttatggcgattctgagtgtgagggcagacttctgccaggctcagcaca

SEQ ID NO: 845876 - DNA, 100 bp, Homo sapiens
cagccgtggagacaaccatcttcattttgggagaaataactaaagatgttttactgtgcctggctaactatagtcgagggggtgatggtcctatgtgtcg

SEQ ID NO: 845877 - DNA, 100 bp, Homo sapiens
acgagtcacccgttctacgacgtggccagacatggcattctgcaggtggcagcccgtggaacacagagcattcctaatgacagtcctgcccggggtgagg

SEQ ID NO: 845878 - DNA, 100 bp, Homo sapiens
gcgactccggggcctgatgaatgacatcgggctcagaaacacttatgggattttctaagcacggagggttcacttccttaacatcacctgaagggactct

SEQ ID NO: 845879 - DNA, 100 bp, Homo sapiens
ttaataaatcaactcagtgatcctgattatattaatcagtatgtcatatggatggtatctcttgggtcacagattgatttacagaagaagaagcggcgag

SEQ ID NO: 845880 - DNA, 99 bp, Homo sapiens
cctcctctatgagtactgtcagcaaaagggaatttcctacaagcagtgtggcaagattgaccctgctacgggaatggttatgaatctggctgatctcaa

SEQ ID NO: 845881 - DNA, 98 bp, Homo sapiens
tggagacttggaaactgtgaagcccaagaatctatcattttgaagccaaagatggccttagaggtgggtgactacaaaatcaatctcaagctcatgga

SEQ ID NO: 845882 - DNA, 100 bp, Homo sapiens
aaggttctgatttagattcatcagcaactcctataaacacagtggacgtcaataatgaaagctcttcagagatctcagtggttcaatagcatccccagat

SEQ ID NO: 845883 - DNA, 104 bp, Homo sapiens
cggccggacgacccaagcccgctgagcaggatgaggctatgacagtgaaggtcgtctgacaaatgttacgtttccaactggagtggtcacaaacctgcatgggg

SEQ ID NO: 845884 - DNA, 99 bp, Homo sapiens
ctacttatcattgaccaacacacctttgaagctgtgatgaattccactggtggcagtagcagtggcggtggcattgggctgaccctcgggggaaccatg

SEQ ID NO: 845885 - DNA, 100 bp, Homo sapiens
aggacacagttccggaaagcacagccaggcatgttatgttacccagagaactttccaaacaagtacctaaaactcatctgatgtctgaagaggagtggag

SEQ ID NO: 845886 - DNA, 100 bp, Homo sapiens
gcagcagcggcagcttgtgagcaccctggagaagaagcagcgcaagtttgaccagcacgtatctcccatgcgccaagtggagcccccagccaagaagcca

SEQ ID NO: 845887 - DNA, 100 bp, Homo sapiens
gacctgccaatttaccagagataattgataacaccctgtaacagctgagatggtgattgctcacaccaaagccttggacccctcccagcctgtgaccttt

SEQ ID NO: 845888 - DNA, 100 bp, Homo sapiens
acagcttcagaagaccgaagcgttcgtatctggaagggagaagacagttctgcagtctaccaatcgaaaactggagcggaaagttaaagaactatccatc

SEQ ID NO: 845889 - DNA, 100 bp, Homo sapiens
ctaaactgcttaaacgattatttctgttttcctatgcgactgctgcacaaaacaatacagggttacacatcattttggaatgactgtatatcatctggat

SEQ ID NO: 845890 - DNA, 100 bp, Homo sapiens
gcggcgttggcggcggcggcggcggcagcggcagcgcggcggggccggacaaagaaacagccttggtataatagcacgttagcatcaagacgaaaacgac

SEQ ID NO: 845891 - DNA, 100 bp, Homo sapiens
aagacgtgcggctacaggagcgcacgagcgggtctcacagatttcaagcctggctactggattggtgtccgctatgatgagccactggggaaaaatgatg

SEQ ID NO: 845892 - DNA, 98 bp, Homo sapiens
acagcaagaaagaccatcaagtttaccactaagaaacctttccagcttggacctacgtcatatcactgaactggataatgaaaccgtgatggaaattg

SEQ ID NO: 845893 - DNA, 98 bp, Homo sapiens
ggcccctttggaacctaaggagccctgccgaggagctgaaggccttcagagtccttggggtgattgacaagagccccacagtcttcgttataacctca

SEQ ID NO: 845894 - DNA, 100 bp, Homo sapiens
atgagaagctgaagcagtgcctggtggccgaccttgtccacacagtccatagtacccaagtggccttggaccatctggagtctgtgcctgagaaactgag

SEQ ID NO: 845895 - DNA, 100 bp, Homo sapiens
ctgaaagaatacatcaagattctgaatctggtgatgaacttagcagcagctccactgaacagataagggatgggtcatcagttaaggaagttgaaaccta

SEQ ID NO: 845896 - DNA, 98 bp, Homo sapiens
ggtgtcttcagaaggtcgcgatggttttcttgggaacacgatagacagcatattctggcaggtgcgtatagcagcaaaattcatcattcatgcccctc

SEQ ID NO: 845897 - DNA, 101 bp, Homo sapiens
ggtgttgagtggtcggcttggtgtggtgtgcggaggagctccaggcccgtcggcgcggagggaaccctactctggaaactgtcagtcccagggcactgggg

SEQ ID NO: 845898 - DNA, 98 bp, Homo sapiens
actacgccgagctgacgattatgaagactctggaagcccacaaagactcccataaggagccctcaacaggaggcgcagaaaatcttcaaagccaacca

SEQ ID NO: 845899 - DNA, 100 bp, Homo sapiens
tttttgaaagggaatataagtatggtgcacacaactaccatcctttacctgtagccctggagagaggaaaaggcaaaatttggtttctctaatattactg

SEQ ID NO: 845900 - DNA, 100 bp, Homo sapiens
cttggggaggcactattagaggctgaaactattgaagaacaagaatctccagtgaactgctttagaaaattatttggtgaacacacagtgttcatcccct

SEQ ID NO: 845901 - DNA, 100 bp, Homo sapiens
ttttcgaatataaccagagaaaaaaaggatggagaaatatctaggacagggagtaccatatttttgggattcagtggaaactttaaaccatcatggacta

SEQ ID NO: 845902 - DNA, 100 bp, Homo sapiens
cggagggggagactgtgccgtggagggcctcgccatgtcctgctgcccgcccatgactgaagagttgctgaaacaacaaaagctgaattcacatgagacc

SEQ ID NO: 845903 - DNA, 100 bp, Homo sapiens
agatggagattcaggagatgcagctcaaagaggccaagcacattgcggaagaggctgaccgcaaatacgaggagtccgcttccggacaacaacagggctt

SEQ ID NO: 845904 - DNA, 98 bp, Homo sapiens
tgacgacgggcgcccccgagccgccgccgctgtccggagccccacagaattatatccagatcgagagacagaagattctgaaagggttcaatgaaatg

SEQ ID NO: 845905 - DNA, 100 bp, Homo sapiens
agcagggaaaggcaaaggcaaaggcggctcgggagattcagccgtgaagcaagtgcagatagatggccttgggttattatcgtccccagtgctggtgttg

SEQ ID NO: 845906 - DNA, 99 bp, Homo sapiens
ttcgtcgccaagctggccaacaacacgcaccagtgtctttggtgcaacactaacaaggcttgtctggactacccagttacaagcgtcttgccaccggct

SEQ ID NO: 845907 - DNA, 100 bp, Homo sapiens
atctggaccagttattaatgtgtgccatttatgtgatggcaaagggcagctcagttctggcaccaaaccaaatccccaggtctactcgaggctcctcacc

SEQ ID NO: 845908 - DNA, 100 bp, Homo sapiens
gtgtattatggataccaaggaagagaagaaggaacggaaacaaagttattttgctcggtcatgatgatgggcagcgcccgagtggcggagctgctgctgc

SEQ ID NO: 845909 - DNA, 98 bp, Homo sapiens
tgaccgagagcgtgaccgagagcgcgaatatcgtcatcgttagaagcctcaaactccgatctcttcgagttaacgtaggacaactgctggctatgatt

SEQ ID NO: 845910 - DNA, 98 bp, Homo sapiens
tatggtctccatatcacagtatcccagatgccaaatgctctgtgtgctccgggatggagcaggtgtgcagagggtgagaacccagctctgggaccaag

SEQ ID NO: 845911 - DNA, 122 bp, Homo sapiens
tttgtttgtttttttcgtaaacatctgggtgtatatcaaacggcaagatgtccagtaatgtcccggcggatatgcttggtgatccagctatttttcctgccgtaattgtggaacatgttcct

SEQ ID NO: 845912 - DNA, 99 bp, Homo sapiens
catggggcgcctggcctcgaggccgctgctgctggcgctcctgtcgttgggtggtgactatcctgttgagaagcaaaagatactttgcaagtaaaaaat

SEQ ID NO: 845913 - DNA, 98 bp, Homo sapiens
caagaatcaggatggcgaaataaataggaacattatggaagagactgaacgggcctggaaggcagagatctcagcccaggagagccgtcgtaagaaga

SEQ ID NO: 845914 - DNA, 100 bp, Homo sapiens
ctctatcactacgtggccgtcaacaatcccaagaagcaggaatgaaagtggcgctttctccgccccagtgttctctgtcttcatcagaagaagaaagatt

SEQ ID NO: 845915 - DNA, 98 bp, Homo sapiens
ctaacttctactgacgaagcttggaagttgcagaagtttttcacagcatatggtcctgattatgtgctggaaatcacgccaagctgccggccagaccg

SEQ ID NO: 845916 - DNA, 98 bp, Homo sapiens
gggagaaaacacgatgaaaacagaaccgacttctccccttgtggaattacaagagatttcgactgtggaagagtgtagcttccattggcaatacttta

SEQ ID NO: 845917 - DNA, 100 bp, Homo sapiens
tccaggaaattcagcctcaaaaccgtcctgctgcttgctgaccaaatggctgaggaattcctctacagattcttgccacagaaaatcatatacctgaatc

SEQ ID NO: 845918 - DNA, 100 bp, Homo sapiens
aaagaagcaggagatcttttatacagccattgtgaaccgtacaattgcaaacatgtttggatccagtgagatattgcagttggagctccgtatgatgact

SEQ ID NO: 845919 - DNA, 100 bp, Homo sapiens
agggaagtcgcctggaaaaaccaatagtggtaaaggcagcagtaatgctaacgctagcaagtaaactgaagcgtgacgatggtctcaaagggtcccggac

SEQ ID NO: 845920 - DNA, 100 bp, Homo sapiens
ctttgggaaactggaatcctcaaaatgctgtggctcttcttccagagaatgacacaggtgaaaggttaaatgggccagggaaaactatcaccataacatt

SEQ ID NO: 845921 - DNA, 99 bp, Homo sapiens
ttcaggaaaactcgtgtccatcaaaatccagatgctggatgacacccaggaggcatttgaagttccatggaagatagatgataagcctgtaaaaattga

SEQ ID NO: 845922 - DNA, 100 bp, Homo sapiens
agaggaattaaactttggccctgcgcctcgtccagcctaggttccacccttttctgggaacgtgagtatcaaccaaggtgcaggcctggggtagtctcct

SEQ ID NO: 845923 - DNA, 98 bp, Homo sapiens
aaaacacacgttcctccgaaaccggtttgcaagtccttgtagagatcaaatgatgccgtttggaaaaatttcccagcagttgtgtggcgtaaagaaac

SEQ ID NO: 845924 - DNA, 99 bp, Homo sapiens
accaacttccctgtggtatggcacaagacggtaagagggagaccaaagttatcaaggaaatggtataggccctcgggaccaaggatcacgtcatgactc

SEQ ID NO: 845925 - DNA, 100 bp, Homo sapiens
ctgtaagcatgagtgaattctggttgtgtttcaactgctgtattgcagaacagcctcagcctgaaaacatttaaagttgatgatatgttatcaaaagtag

SEQ ID NO: 845926 - DNA, 98 bp, Homo sapiens
aagcacgagggcgcgctcgagacgctcctgagactgctagatttggttgttcagcctgtcccccggccttctcagtgttcggagtttattcagcaaag

SEQ ID NO: 845927 - DNA, 100 bp, Homo sapiens
tcacttaaaggagtggacattgctagcaatgagctcccaaagccatccagaatgaagagcttcgaaacttgtctttgtctggccatgtgggatttgacag

SEQ ID NO: 845928 - DNA, 99 bp, Homo sapiens
ggctccctatgaatctcttatcattgatggcccccttacccaggaatggaacaacctccacaccatccttactatcagcaccatgctccacctcctcaa

SEQ ID NO: 845929 - DNA, 100 bp, Homo sapiens
cgcacgcccaggaggagcaagtccgatggagaggctaagctcaaggcggataagaaggcggcacaagaaaagatgatccagcaggagcatgagcggcagg

SEQ ID NO: 845930 - DNA, 100 bp, Homo sapiens
agacacgaaggttggaaataataccatccatgtgcaccgagaaattcacaagaattatatccagatcgagagacagaagattctgaaagggttcaatgaa

SEQ ID NO: 845931 - DNA, 100 bp, Homo sapiens
gctcctgtctggtctgtgagatgtcctcactgtttcaggagcgctttgaacttcaagattcaggaagctctctacttcctaaagagattgtaaaagtaga

SEQ ID NO: 845932 - DNA, 100 bp, Homo sapiens
cccacaagagcttactggtgaaggaatgggacaagacccatctttatgcaaagccagcgttacagtaatgttccagcggaatggccaaagactatgacgg

SEQ ID NO: 845933 - DNA, 100 bp, Homo sapiens
aacattggctcaggggttagcatcttagcagtatattccaaagataattacaaacgggtcacaggtactagatacctatatcatggcaatactaatccag

SEQ ID NO: 845934 - DNA, 100 bp, Homo sapiens
cgcgatcctgggctaccggtctgtggatgagcgtgaagccgtgcagaagaagaccttcaccaagtgggtcaattcccaccttgcccgtgtgtcctgccgg

SEQ ID NO: 845935 - DNA, 100 bp, Homo sapiens
gcagtggtcgcttcttctccttgtacctaagactaatgctttctgtggacaccactgagctctgcctcaactccaccctctgcgaccggaggactatgcc

SEQ ID NO: 845936 - DNA, 100 bp, Homo sapiens
gcccggctcccgcaccatggaggaggacgacagctacgcagcccctgtcaaagggaacaggaagcagtccacggagggtgacgccctagacccacctgca

SEQ ID NO: 845937 - DNA, 98 bp, Homo sapiens
tggatgccaaaaccacagtaggaaaggccaagggcaaattgtggctctttggaaagaagccaaaggaggaataaacatggtgtgtctcgaaagaagat

SEQ ID NO: 845938 - DNA, 100 bp, Homo sapiens
ggacattgcagaagctgtcactgccccagaaagaaagcaccccagagccaaggcaaagaggtcctcagaatggttggaatgaccctccagctttgaacag

SEQ ID NO: 845939 - DNA, 99 bp, Homo sapiens
gaaaccagtggccacagcatctttgtctagccccagtgcagaaatgatgtgctcacgggtgccctctgaacagtcttctggtacctctctcttgcctaa

SEQ ID NO: 845940 - DNA, 98 bp, Homo sapiens
ccaggcccacggaggaagagccgggcagtccctggagcgggccagcctgcctgctccgcttcagcggactctcgctggtctacctgctcttcctgctg

SEQ ID NO: 845941 - DNA, 100 bp, Homo sapiens
aaacttcagagcaagttttcattgggcaaaatgggatcaagaagttggtatatgtttacctggttcgatatgctgaagaacagcaggatcttgcactcct

SEQ ID NO: 845942 - DNA, 100 bp, Homo sapiens
acaccgggcacccagtctcctttcttcctgctgctgctcctcacagtgcttacagagactcctaaaggggaactcccctccagctgcgctgggaccccag

SEQ ID NO: 845943 - DNA, 100 bp, Homo sapiens
gagcagatcaagaccctcaacaacaagtttgcctccttcatagacaagagctgtaggtaaaacttgcctactgatcagttacacaaccaatgcatttcct

SEQ ID NO: 845944 - DNA, 98 bp, Homo sapiens
tttttgtgctgccagcaagaaatgatcagtagcaccagtgtttatgggtgtgattgctgccatgagagatggttttggtttcatcaagtgtgtggatc

SEQ ID NO: 845945 - DNA, 100 bp, Homo sapiens
gggaagatgtaccaggagaccaggtcaagcccgaccaatacactgaggccctggcccagagggacaaagaaactccagaaaatcttgccaaacttctgac

SEQ ID NO: 845946 - DNA, 101 bp, Homo sapiens
cgcagcccggcgaggagccgcagacccatgagttcgtgccctcgtgaggctggcatgcaggatggcaggacagcccggccacatgccccatggagggagtt

SEQ ID NO: 845947 - DNA, 100 bp, Homo sapiens
agagctcactgatctgggtctggcactcctggaagcctgcactttccgtagaccttaaaatctcagaggtagggctgccaccaaggtgaagatgggaacg

SEQ ID NO: 845948 - DNA, 100 bp, Homo sapiens
ctcattaccgtcgccagcggagcgaacccgagagcgtggagcgggctgggccagactttatattcagagcaccaatcaaattaagcaagcctggggaact

SEQ ID NO: 845949 - DNA, 100 bp, Homo sapiens
catgatgaaagctcagtttatgagtctctgggatggattggatactgatcacagctgccaggcccctggccccaacatggcccgtcgctctcagagctcc

SEQ ID NO: 845950 - DNA, 100 bp, Homo sapiens
atttccagcagcgctagtccagctgaacactttccagccttgtttttcagcagctttgaggaaaagtatagaactatgaatagactgacccagctggaaa

SEQ ID NO: 845951 - DNA, 100 bp, Homo sapiens
ttgatgtggttgaaggagagaagatcattgcggccaccattgagaatgcgcagcccattttgcagattgacaatgccaggctggcagccgatgacttcag

SEQ ID NO: 845952 - DNA, 98 bp, Homo sapiens
aggcgtgctctccagtgcctgtttctgactgagtgaggttgaaatcctactgactccttttcaggtaaaaaagctccagttttatttaataaagaaat

SEQ ID NO: 845953 - DNA, 99 bp, Homo sapiens
aaggaggtaccagaaaactgtggcctactttggggataaaggattatttggtcttctggatttggaggcaatcagcggacagcatggaagatgtgtgct

SEQ ID NO: 845954 - DNA, 100 bp, Homo sapiens
aacaatacatcctggaaatgtccaaagcagaatggcctgtccagaagacagccaaatacatccttcaaacagacttcactgcaggagacagagtggattc

SEQ ID NO: 845955 - DNA, 98 bp, Homo sapiens
ttcaaaggaccggacccagagaagaggaaaactctaccggtgcagagatgatttacacaatgaagaaagtacatgcactttgggcttctgtatgcctg

SEQ ID NO: 845956 - DNA, 98 bp, Homo sapiens
cgatgcttctcaccgaaggtgttcaccagcacactgctctgccaggtggcaggacaaattgcgcccatttagaggatgtggctgtaacctgctggatg

SEQ ID NO: 845957 - DNA, 100 bp, Homo sapiens
gaaagattgattaagtcttttatccgagacctgtctctctacctccagcacatccggacaacagtgattgactacgtgaagccctcggatctcaagaagg

SEQ ID NO: 845958 - DNA, 50 bp, Homo sapiens
tcttcgccgatggggccttccccgaggcagctgacacacaagagttcagg

SEQ ID NO: 845959 - DNA, 98 bp, Homo sapiens
ggtctgtcctcaggtggcagtggttcttatagccctggagtgacctactcgcccgtcagtggttataataagggaggtggggaagacagggctccagc

SEQ ID NO: 845960 - DNA, 100 bp, Homo sapiens
caatagcatgggaaccatcaaccagcaggccatggaccaacttcagttcgaggtgttggaacaggaggaattgtttctacagcattttgcctgttataca

SEQ ID NO: 845961 - DNA, 98 bp, Homo sapiens
cgagcgcctcgacctcggtctgaggccgactcgcgggccgctgcacccaccgccaaggacaaaaggagcccagcgctactagctgcacccgattcctc

SEQ ID NO: 845962 - DNA, 100 bp, Homo sapiens
cagacctccacttccaaggatatagagcaggtctcgtctacagaggactggtctttcaatagcaagttttcacttcatcgacaacatcacgaaggtggta

SEQ ID NO: 845963 - DNA, 98 bp, Homo sapiens
cacattcagaacctgttacccaaggaattccctaaaggtccattaatataagatttgccactctcttggatactcctggtgtggaaaatcttgtcagc

SEQ ID NO: 845964 - DNA, 100 bp, Homo sapiens
cagggggctgcgcctgcctgctccgccccagacctgtcggcgaaagggtggataggcatgtagacctgctagaagttgcccaggaaactgatgggttttc

SEQ ID NO: 845965 - DNA, 78 bp, Homo sapiens
aaggttcaaaaactaagcatccagaggccctgagcagctttcagcactggagaaggatatggccctgaagccacatga

SEQ ID NO: 845966 - DNA, 99 bp, Homo sapiens
ggggatgcttttaagtgcatgtgtcctggcggctgggaaggaacaacctgtaacatagagggtggtgaaggcagatattgtaaactacaaccaggaacc

SEQ ID NO: 845967 - DNA, 98 bp, Homo sapiens
aaacatgatcgtttactgcaaaagcttctcgaaacaagtctgagaagaagcgtcgggaccagttcaatgttctcatcaaagagctcagttccatgctc

SEQ ID NO: 845968 - DNA, 99 bp, Homo sapiens
tcctcggaggtgactgctgccctccgagtcaccgatggcgcattggtggtggtggactgcgtgtcagccgccgccatgtctgcgcatctgcaatggatg

SEQ ID NO: 845969 - DNA, 100 bp, Homo sapiens
gcaaaggttccagagcatcatttgcaggaaggatgcaccccactccgagggcgacatgcacgcttccaactgaatatgagaggaacgggagatatgaggg

SEQ ID NO: 845970 - DNA, 99 bp, Homo sapiens
atccttcagtggggctattggactgacttttcttatgctgggatgtgccttagaggattatgggaacatcatttacagcgagcaatttcagcacagcaa

SEQ ID NO: 845971 - DNA, 100 bp, Homo sapiens
tttatgggggaaagctcatcgtagctgttcattttgaaaactgccagatggctgtatgggcgaaaaagatgaccgaaattcaaactcctgaaaatactcc

SEQ ID NO: 845972 - DNA, 100 bp, Homo sapiens
ctgtaaatccctatccagagtttttggagctgtacaggcagttgcagtggtgcagaatggctgacctcagtcttgcagatgcattaacagaaccatctcc

SEQ ID NO: 845973 - DNA, 100 bp, Homo sapiens
aaaacctgatcccaaaattattgaaaacactcgaaggggaaatattgccttgtttgaagcatgttgtaaggaaagaatacaacagtttgatgatggtggc

SEQ ID NO: 845974 - DNA, 98 bp, Homo sapiens
gaaccattggataaggataaaggcagcataattcgttgtatgaggcgcctggaagaattgcttcgacaaatgtgtcaagcagcaaaagccattggaaa

SEQ ID NO: 845975 - DNA, 98 bp, Homo sapiens
gcagcctgacctagctcctggactgaccactattggagcctgatttaggtcctgaatatgaaggtatatttaacacttcattgcagtggatcttagaa

SEQ ID NO: 845976 - DNA, 99 bp, Homo sapiens
gagtagcaagtggccatggggagcctcagcggtctgcgcctggcagcagaaatgctgagccgattatcaggattagcaaatgttgttttgcatgaatta

SEQ ID NO: 845977 - DNA, 100 bp, Homo sapiens
tcctgtcctcctgaccctcacaaagggatcgcggatcctagaaccagatgacttcctggatgacctcgatgatgaagactatgaagaagatactcccaag

SEQ ID NO: 845978 - DNA, 100 bp, Homo sapiens
acaaagcttcagcatgtcatgtgtgcacaagggtctggatccctgaccctgatgaggtatggcgctcagctgagttaaccaaggactacaaagaaggaga

SEQ ID NO: 845979 - DNA, 100 bp, Homo sapiens
agatgaatactgctgaggactggggcctcattttggatatctgtgataaagttggtcagtctcgcactggagccaggctttcgaggactgactcctccaa

SEQ ID NO: 845980 - DNA, 100 bp, Homo sapiens
ctgtcttgtatgagatgctgtatggcctgaacgatatgtggtaccccaaattatctctctcctgaagtcctcaacaaacaaggacatggctgtgaatcag

SEQ ID NO: 845981 - DNA, 100 bp, Homo sapiens
aagcccaaagcccaaacccagcatctacatcagctgacacaaatgaccctgtgtttgttggaggcttcccagactttacaccaaatctcagaagattcag

SEQ ID NO: 845982 - DNA, 98 bp, Homo sapiens
cagcccggccccaggggtgccctgggctccgcggaaagaccacagcaagattctttcattcgtctcctcctagcctgggggaccaggctcgaactgac

SEQ ID NO: 845983 - DNA, 100 bp, Homo sapiens
tccttaaggccaacagagtttggggagcattacgaggtctttctgtggaatttggaacaattctagtttacacatgtgagaagagttgctggcccccaaa

SEQ ID NO: 845984 - DNA, 100 bp, Homo sapiens
aattctcttttgttatagatttgcaaacaagactttcccagcagactgaaggtcctttcccataacctgtgcacggtgctgaaggttcctcatgacccag

SEQ ID NO: 845985 - DNA, 99 bp, Homo sapiens
agcatgtgcatcacccaattcatgaagaagcgcaggcacgacggccagggttgaaaaataccggccacagaccctgaatgatctcatttctcatcagga

SEQ ID NO: 845986 - DNA, 100 bp, Homo sapiens
ctgagtggttgtgtggtcgcgtctcggaaaccggtagcgcttgcagcatgctcctgtatgacagccccaaggcccggcaggaggtagaccatcactggca

SEQ ID NO: 845987 - DNA, 99 bp, Homo sapiens
gcaggttctcggagggaccgggataggtgtcaaggagcagaagcttttgaaatccagcattctggattggcaaatggaatctttatgaaatttttaaaa

SEQ ID NO: 845988 - DNA, 99 bp, Homo sapiens
aggctctggaacttctgcccagctctccttgccaactgggtacatggaaaactcagtctcctacagcgcaattgaagacgttcagctgctgtcctggga

SEQ ID NO: 845989 - DNA, 100 bp, Homo sapiens
cagtagtttggagaggccttatggtaatgtcggccattgagaaattgttgaggcagcaccagccacaacgggaccactgccttcagctcctcgggatgtc

SEQ ID NO: 845990 - DNA, 98 bp, Homo sapiens
atgtatctactgtatccatgcactcagagctgaaatatgctaataccgtgatgcgctttgattacgtctggcttcgagaccactgccgctcagcatcg

SEQ ID NO: 845991 - DNA, 100 bp, Homo sapiens
tctagaggggtgacagcgaaaccaacacagtcactcctggcggcaaaccaaacaaaaccagagtcatctggggaaaagtaactcgggcccatggaaacag

SEQ ID NO: 845992 - DNA, 100 bp, Homo sapiens
aaaaaagaacccaggtggatggtgggaaggagagctgcaacttagcagtgtctgcaaaaacgaatcttttcctacaacctgttaactgactggactgttg

SEQ ID NO: 845993 - DNA, 100 bp, Homo sapiens
gttaacgggaccagctctgcggaagtaaacatcagtctccaaagataactacatcccttcttcccatcaacaatggctccaaagaaaatgggatccatga

SEQ ID NO: 845994 - DNA, 100 bp, Homo sapiens
ctccaatggcgctttctacaagcaattctgtggtgttcttggtcacacatttatggagtttctgaagggcagtggagattactgccaggcacagcacgac

SEQ ID NO: 845995 - DNA, 99 bp, Homo sapiens
tcaaaggaaaactgtaatggaaaaatggcaaccctgtctgtaggaggaaaaactgtatcacgttttcgtgtgggttgcctatgaaaaagaacattttaa

SEQ ID NO: 845996 - DNA, 98 bp, Homo sapiens
atcttggtgtttggacataggaggtataaaaaccaggtgccaataaatgtccatgcaaaccctggaaagtatattattgagagtcgatatgggatgca

SEQ ID NO: 845997 - DNA, 98 bp, Homo sapiens
aggccttggtgccttattaccgtcaaatcctccctgtcctgaacatctttaagaatatgaatgctttcagaaggagttctcactcgaagataaagaac

SEQ ID NO: 845998 - DNA, 100 bp, Homo sapiens
accgaattcagaaggatatcgacgtcgtgatccagaagtccagagctgaggactgcctgtttgcagagtactattaatcccgtagatgcaatatatcaac

SEQ ID NO: 845999 - DNA, 100 bp, Homo sapiens
ctcaaaactcttcccagtctgctgacggtttgcgctaggtgctgatactcaaagaaggtttaagttgtctgatctctctataaattccactgaatgtcta

SEQ ID NO: 846000 - DNA, 99 bp, Homo sapiens
cctgggtatgggctacaaagagaacgctcaagccaggacagaacagctgcagggacagtgacagtgaaagtgccagtggagaatccaagggcttccacc

SEQ ID NO: 846001 - DNA, 135 bp, Homo sapiens
gtcattctagtcttgactaccttccatgtaccactggtaattatgacttttggacagtccaagctatatcgaagaaatcaagatgactaccagctggttcgaaaattaggccgaggtaaatacagtgaagtattt

SEQ ID NO: 846002 - DNA, 100 bp, Homo sapiens
ctgactttgtcttctccgcacgactgttacagaggtctccagagccttctctctcctgaggcatttcatccttcatgaagccattcaggattttgaattg

SEQ ID NO: 846003 - DNA, 99 bp, Homo sapiens
acagaatgagaagctacaaacaagaaatgggaaaactcgaaacagattttttctcaaaagtctatggccctgtgttcactgtgtattttggcctgaagc

SEQ ID NO: 846004 - DNA, 99 bp, Homo sapiens
ggctcccgcaccatggaggaggacgacagctacgatatgcacttatttggccattacccagcacatgacgacttctatctcgtagtgtgcagtgcctgt

SEQ ID NO: 846005 - DNA, 100 bp, Homo sapiens
tcactatgtgcctgatatcatgccaattgaatctgttattgcaagggctgatcccttatccaacatggttctaaccttcagtactaaagaagatgcagtt

SEQ ID NO: 846006 - DNA, 100 bp, Homo sapiens
ttgtactgaatattacccttgtgcttgccgcacttttcaggattagaagaggctgtgtatagaaacatacaagcttgcaaggagcttgcccaaaccactc

SEQ ID NO: 846007 - DNA, 100 bp, Homo sapiens
cacaaaccctgtagaggtgtacaaggcttgggtgaaccaactagaaacacagactggagaggccagtgactgaagcaaggctgtgtgacattccatgttg

SEQ ID NO: 846008 - DNA, 98 bp, Homo sapiens
acaagtacttgttatgtatcataggtactgggaagaatacagcaagggtgcagactatatggactgcttatataggaaatgggtcctgatgaatatga

SEQ ID NO: 846009 - DNA, 99 bp, Homo sapiens
ctggttgagggtctccagggttctttggggcccgaggttatgggagaagatatcccagaaaaaataaaagatgaagttcacccagaggtgaagtgtgtt

SEQ ID NO: 846010 - DNA, 100 bp, Homo sapiens
gtttttacaggctcaataccacagtttgtggggacattcatggacaattctttgatttgatgaagctctttgaagtcgggggatctcctgccaacactcg

SEQ ID NO: 846011 - DNA, 98 bp, Homo sapiens
tgaagcgactgagtccgcgatggagactgattcttgctattccaaatcctcttccacgttgacagcccttcagatatttcaacactcctctcagcatc

SEQ ID NO: 846012 - DNA, 99 bp, Homo sapiens
gcaggagtcggcggctcagttgtccatgaccctgaaggtccaggagtacccgaccctcaaggagccatgtggctagaaatcctcctcacttcagtgctg

SEQ ID NO: 846013 - DNA, 100 bp, Homo sapiens
gtcgccttgcaacactactaggtcttcaagccccaccgacacgaattggccttattaatgatatggtgagacatggaatccattaaaattgcattatcag

SEQ ID NO: 846014 - DNA, 99 bp, Homo sapiens
ggatatcacattcaacgtgaaggttccggagtctcaccactgcatttttcagagacgccatgggcttcttattaatgtttgacctcaccagtcaacaga

SEQ ID NO: 846015 - DNA, 98 bp, Homo sapiens
agctgtttccacgtgcggtgctcgtcgggagtgatcacctaccctacagcttctcaaaagtgaaataagaagattggaaaggaatcaagagcgagaga

SEQ ID NO: 846016 - DNA, 98 bp, Homo sapiens
acacgaggccccccaacacctccctgttcatcaggaacgtcgcggacgccaccagacaccattcgcttttcacccaagatgatttgatgtcttataaa

SEQ ID NO: 846017 - DNA, 98 bp, Homo sapiens
gatcttcttcactgcctctggcatggatgaggtgaggaaaatagcagctgaatactatgacaacctccctcactacaattcctggataaaagtactgt

SEQ ID NO: 846018 - DNA, 100 bp, Homo sapiens
ctcctccccaccaccaccatctccatcacccaccaacaacaccacaataatccacagccaagcacctcttctgcctgtgagcgatttgtcacctcattct

SEQ ID NO: 846019 - DNA, 100 bp, Homo sapiens
gaccctgggtatgatctggaccatcatccttcgctttgctattcaggatatttcggttgaaggacgaaaaggaggttgtgctaaagggaaaggaggatcg

SEQ ID NO: 846020 - DNA, 98 bp, Homo sapiens
aaaggatgtttgcttctgaggaagctggaagctgcagccacaatgtgcctttgcaggggagcctgagagccacagaacccggcagtgggcaggtgttt

SEQ ID NO: 846021 - DNA, 132 bp, Homo sapiens
aatcttttcctgtctgtgcctccctgagctgctaaaggtctctggtgtttgtaagaggtggtatcgcctagctgagatgagtcagaaaccggccaaggagggtcccagactctccaaaaaccagaagtactc

SEQ ID NO: 846022 - DNA, 100 bp, Homo sapiens
gagacatgtcaaaaattagaacctcttcgccaaagccttaatttatctgaaaggaatttggataaagagagggcagtgctactacaacgccggaaaaggg

SEQ ID NO: 846023 - DNA, 100 bp, Homo sapiens
cgtttatttataacctaagcagcatctctatatactcctacctcccggcatttaaagtctgcatccagatctcattatgcatcagaaaaatgaaaaaaca

SEQ ID NO: 846024 - DNA, 100 bp, Homo sapiens
ttgactgggaatccatttggtacatcagcttgcctcaagtctggaaagaaattggcttgggctcatcaagggcaaacactgtatccttgatgtgtctgga

SEQ ID NO: 846025 - DNA, 100 bp, Homo sapiens
aggcagaaacacagcaatggatgcacaggaagctttagctagaaggctagtagcattaccagagagctccaggggagagagctaaagcttactaaccttc

SEQ ID NO: 846026 - DNA, 99 bp, Homo sapiens
tcgtcgctgctggcacttcaggctctggtttcagtgttgactggtgggctcttggagtgctcatgtttgagatgatggcaggaaggtctccatttgata

SEQ ID NO: 846027 - DNA, 98 bp, Homo sapiens
tcagaggggcaggagcttctgggagccaccgtctgaagtcaccttcaggccattcagaggaggaaagagaggggaatatgaagtcagccaagccccaa

SEQ ID NO: 846028 - DNA, 98 bp, Homo sapiens
cgagcaggtggcggcggctgcagatgttccagcctggctgaaaagcctccgcctgcacaaatatgccgcgcttttctcccagatgacctatgaggaga

SEQ ID NO: 846029 - DNA, 100 bp, Homo sapiens
cggctgccctgtggcctcgctcctcggagggtggacaatcagctcattggtaccacgcagcccttcatgctctatgtgactcccctgagcaatgagaatg

SEQ ID NO: 846030 - DNA, 99 bp, Homo sapiens
tgacactctacggaagtacgcaagcccacggggagcagagcagcaactcacccagcacacaaaatggatctcttacgttgtctgggttcatgtctaagc

SEQ ID NO: 846031 - DNA, 100 bp, Homo sapiens
tttcacgtgtcaacaagaatgccttctgattctgatgattctttgaccaaaaaagagccttttgtggcagatgaatatattgaacgtcttgtatggagaa

SEQ ID NO: 846032 - DNA, 139 bp, Homo sapiens
tccacttcgccaaggatgcccagagccccaacgggcactacttctgggacccagagttggggcaccgaaaagatcattgcggccaccattgagaatgcgcagcccattttgcagattgacaatgccaggctggcagccg

SEQ ID NO: 846033 - DNA, 99 bp, Homo sapiens
tttcctgtgtccagcgctgccggagccgcctgagctctgcatggtctctctgagtctcttcaggaccctcctgaacctcagctgtgaggatgtcctgct

SEQ ID NO: 846034 - DNA, 98 bp, Homo sapiens
gtctgggaggataattgggatgatgacaatgtagaggatgacttctctaatcagttacggtaagaccatgaattatggcatttcttaaatgaagcgtt

SEQ ID NO: 846035 - DNA, 99 bp, Homo sapiens
tacaatgaagtatatgcagaggaggtcccacaggctcctgccctggactaccgaggcatccgtgtcattctggaccttactcccaactaccggggtgag

SEQ ID NO: 846036 - DNA, 98 bp, Homo sapiens
tccatctactgtctttttcttcaatgggcagcatatgaaagtggattatggctgaaagtccgtattgccttttggcttctcatagaacttggagcagc

SEQ ID NO: 846037 - DNA, 98 bp, Homo sapiens
ggattttgttcctgaaaatcaccagttccgtgctccattatgtcgtgtgcttccccgtggcccaccctcaggaccctcaccacccatcagagaagcct

SEQ ID NO: 846038 - DNA, 98 bp, Homo sapiens
cacttgtcctcctgtttctatagaaactgggttggaagtcagagctgcacaaagggaaaggtgtcaacctaagaaaaagtctacgccactgaagtatg

SEQ ID NO: 846039 - DNA, 100 bp, Homo sapiens
gcataggatccggcaaagtcctgaagagttgcctttgtgtacacacctgctttcagccttctacatatgaacatatcaagtaaatgttggtgtacaaata

SEQ ID NO: 846040 - DNA, 50 bp, Homo sapiens
aacttcaaggagataaaggacgatgggtctcggacagcccgggagacgag

SEQ ID NO: 846041 - DNA, 99 bp, Homo sapiens
agcctggaggattgtcactccaacctcttttcgctggacatggatttgattgacatactttggaggcaagatatagatcttggagtaagtcgagaagta

SEQ ID NO: 846042 - DNA, 98 bp, Homo sapiens
aacaagaagccagaaacttacaggggataaagctgctcagatggaagataaaaagccctttatcctgtcttccatgaggcttcctctcctggacacca

SEQ ID NO: 846043 - DNA, 100 bp, Homo sapiens
aaaggaggaatttgcctcttctacagatagagctgttaaggatacccagagttatattgacgaatgtcctgggaacggagttaggaagaaaatacataag

SEQ ID NO: 846044 - DNA, 98 bp, Homo sapiens
agagttcaaggaggccttccagctgtttgaccgaacagatgcctgaggaagtgcaccatggagaggaggaggtggagacttttgcctttcaggcagaa

SEQ ID NO: 846045 - DNA, 100 bp, Homo sapiens
atctgttttggaagttagagaaaagggctatgaacgattaaaagaagaactcgcaaaagctcagagggaagtggcagtttttgtctttgataaaaaactg

SEQ ID NO: 846046 - DNA, 100 bp, Homo sapiens
gatccggggatcaaagagcagtgggggttgctgacccagaggagagttctccaaacatgatcgtttactgcaaaaatggtcttcagcagagaagccgtca

SEQ ID NO: 846047 - DNA, 112 bp, Homo sapiens
ctgcagccaaaaatgcgagcaattcttctggattggttaatggagacgccaaattccagcgaaacagctgatgccagccagcttgaagacccctgccacagaagaagggaat

SEQ ID NO: 846048 - DNA, 100 bp, Homo sapiens
ctttttgagccttacggagccgtctaccagatcaacgtcctccgggaccggagtcagaaccctccgcagagtaaagataaccatgatgactacacagact

SEQ ID NO: 846049 - DNA, 100 bp, Homo sapiens
cccggctcccgcaccatggaggaggacgacagctacgctctttcgacgtgtagcagcagctttgccgggaatggaaagcacacaggacagaagcagagaa

SEQ ID NO: 846050 - DNA, 98 bp, Homo sapiens
cgccgacatcaattacgccaatgtggacggactcactgccctgcaccaggaaatgacccattcatggccgcctcctttgacagcaatacatacgccta

SEQ ID NO: 846051 - DNA, 98 bp, Homo sapiens
actgtcagaaggatgactatgtcttcagaaatgcaatcacagacgtcacaaggtttttacaggaacctggcttctgtatttaccatgtacctggagca

SEQ ID NO: 846052 - DNA, 100 bp, Homo sapiens
ctcgatggctactctgtaatggcagtgttatagttttgccgctggactcttccctcccttcccccaccccatcaggatgatatgagacttgaaagaagac

SEQ ID NO: 846053 - DNA, 100 bp, Homo sapiens
aaagttacttggactcaaagttaaagggactatgttcggagtgaactggagtttgcctatgagggaccaatgtatttagaacctctctctatgaatcggt

SEQ ID NO: 846054 - DNA, 98 bp, Homo sapiens
aggacgatttaaggatttttaccagtttacttttaattttgcaaagaatccaggacaaaaaggattagatgaataatacggcagctagtccaatgtct

SEQ ID NO: 846055 - DNA, 100 bp, Homo sapiens
tactacccacccccggttacgcctgtcacataaaggaaacccctcctggagtttccccaaagccatggacagccctagtcttcgtgagcttcaacagcct

SEQ ID NO: 846056 - DNA, 100 bp, Homo sapiens
cagcctctccgtatgcaggagctggtttccctcccacctttgccattcctcaagctgcagatcctggggcagagtccagggcagctcaaggctcctccac

SEQ ID NO: 846057 - DNA, 122 bp, Homo sapiens
tgcaaccggaacagatcgagaaaatctggcttcggctccgcgggctatggttctgtgaagggaaagaactgcacaacactcctgatattcaaatccactgtgagggaggggacctccatacc

SEQ ID NO: 846058 - DNA, 98 bp, Homo sapiens
aaatctacaagatgatgcagggaggaggtggcccacaaactctttaacaacttgaaataaatgtgtggacttaattcaccccagtcttcatcatctgg

SEQ ID NO: 846059 - DNA, 100 bp, Homo sapiens
agcagaaatgagcagaaaggagttggggcttgatgaaggcgtggatagcctgaaggcagccattcaggctttctgtgaagaattggaatcaatgatacag

SEQ ID NO: 846060 - DNA, 98 bp, Homo sapiens
tgaatgctgtgaaatcactaggaactccagaggactatcctattaagtgtaatctcactgcttaatgagcccaacaccttctccccagccaatgtcga

SEQ ID NO: 846061 - DNA, 101 bp, Homo sapiens
actaccacgtggcatgttaccactgtgagccacccacacagaatatgcctatgggtcctggagggatgaatcagagcggccctcccccacctccacgctct

SEQ ID NO: 846062 - DNA, 100 bp, Homo sapiens
gtgaaggaatgggacaagacccatctttatgcaaagccagcgttacagtaatgttccaggtgtgcgactctgacactgtgctggatccagcctgcaccat

SEQ ID NO: 846063 - DNA, 100 bp, Homo sapiens
gttaccatcatgaaccccaacgtgctaatggagcatggtgtgcctgctgctctttggcgtaaattgcaatcgattagggatcgtttctcagaatcaagtt

SEQ ID NO: 846064 - DNA, 98 bp, Homo sapiens
ccgcccgtcaccgcctccttgaagctgccgctgtcgctgctgctcgttcgagtcgcaggttcagattcagaacaagaaagtggacatctctaaggtct

SEQ ID NO: 846065 - DNA, 100 bp, Homo sapiens
tcgcgagcctccttcgccgcgccccacttgctcgtgcactttacacacatgagcaactgcttcgagaacgacagcagatggccagccgtccctttgcttc

SEQ ID NO: 846066 - DNA, 99 bp, Homo sapiens
aaacttatgtattttttaagtcacagaattcttggtgagtgatttcacgtggagccatgatggaactcaagcacttatttcctatcgagatgggtttgt

SEQ ID NO: 846067 - DNA, 98 bp, Homo sapiens
gaccagacaaatcaaattagtggttttgacccgagagggactcacttatgggaattcatccgcgacatcctcttgaacccagacaagaacccaggatt

SEQ ID NO: 846068 - DNA, 100 bp, Homo sapiens
ttacctgcaggtattgggagatccacagctaagacgccaggacccactggaagcctagaaatggtgggaatggaagtggccccacatctcaaagaaaccc

SEQ ID NO: 846069 - DNA, 100 bp, Homo sapiens
cagtgtgccagctgctagaaaacagggaagatattagccaatatggaattgccaggttcttcactgaatacttctgggctggctggctgagaaactacct

SEQ ID NO: 846070 - DNA, 100 bp, Homo sapiens
tgcctggcaaatgactgaagaggaatatactccacctgctggttctaggtcccaattctactgcaaatagtatcatggcatcttatcagcaacagaagac

SEQ ID NO: 846071 - DNA, 98 bp, Homo sapiens
cggcgacggtggtggtgactgagcggagcccggtgacaggatgcaagaagttgagaactttaagaagctaaatctcattagtaaagagcagtttgaaa

SEQ ID NO: 846072 - DNA, 100 bp, Homo sapiens
acagccaagcactcagctctccaatctgggaagcaccgagactctagaagaaatgccctccgggtcacaggataaggaatcctgtgctctggacagtgtt

SEQ ID NO: 846073 - DNA, 98 bp, Homo sapiens
ggtcacatccaacttcctctatgccaccgaaatttgggaccaagctgaacagctttccaaagagcaaaaagacccctgtaaaagagcccaacagtgaa

SEQ ID NO: 846074 - DNA, 100 bp, Homo sapiens
aaaagagaggcaccgctggaacactaatgagctgtttgagatggagaacgtttttactgtgtcatcagatcctcatccctctcctgcagcccctccttca

SEQ ID NO: 846075 - DNA, 100 bp, Homo sapiens
gcagggagagaggtttgtcctaacctccatcatccagctaatgtcatgtactactgagcgagtgtgcttgatccagggaacggttgaagcactgaatgca

SEQ ID NO: 846076 - DNA, 98 bp, Homo sapiens
ttgaaaattcatgctgaaaaactgagtgaatatgatcagatttctccaccaaattctcagcctgataagggagagaaggctcttatgaccgataccta

SEQ ID NO: 846077 - DNA, 100 bp, Homo sapiens
ctgggagcctagaatgcatcagtgcccttgtggcgaatggggctcacgtcgagtatttgttggaaggtgccacattatttaacaaagaggaacatcatta

SEQ ID NO: 846078 - DNA, 100 bp, Homo sapiens
cggccaccgactactgtcagcagctgtgccaggtattaggggaatattcctacctcttagataaggaaacgccagaggaagttatagctaagctctacaa

SEQ ID NO: 846079 - DNA, 100 bp, Homo sapiens
agcagctcctcctggaaaaagcaagctgaagacatcaagaagatcttcgagttcaaagagaccctcggaacaaatacatgctacaggatttaactatcag

SEQ ID NO: 846080 - DNA, 100 bp, Homo sapiens
tcttcactgagtctgagggctttgctggctccagaaaggagtctcaggagcaggggctgcggcagaggctgctggacgagcagttcgcagtgttgcgggg

SEQ ID NO: 846081 - DNA, 99 bp, Homo sapiens
ataagttatgctatgaggatgacaaactctggagtaattggagccaagaaatgagtataggaataagacgagttggaagaagacctgatcaacaacttc

SEQ ID NO: 846082 - DNA, 100 bp, Homo sapiens
aggtgagcactctcccagcctggagcagccggaccagcccagaaggcagcggcggcccaggccagcattcccgcactgctggaaacgcgttctgccaggc

SEQ ID NO: 846083 - DNA, 100 bp, Homo sapiens
cgcacacagccttcctcggagaacaagactgcccacctccacaagggcttcctggccctctaccaaaccgtggttggttgtcgaatatcatcaatgaaag

SEQ ID NO: 846084 - DNA, 99 bp, Homo sapiens
gaagattcaccaaataagctatatactttggttacctatgtacctgttaccactttcaaaaatttacagccagttacttactcagaacctgcattttgg

SEQ ID NO: 846085 - DNA, 100 bp, Homo sapiens
ccccaaacaagtggtggactggactagaggttttaaaatcaaagatgggaaaatcggagaaaattgcccttccccatggccagcttgttcatggtataca

SEQ ID NO: 846086 - DNA, 100 bp, Homo sapiens
agcactcgtgaggtgtactgctgctagaatgtttgagtaaactgtttcacgttagacctgtaacccaaggagatgtgtatagagctgaaactgaagaaat

SEQ ID NO: 846087 - DNA, 99 bp, Homo sapiens
gaatcgctatgagagccgagaccgggaatgggctacctacacctgtgtgctgggctttcacgtctacgggagcgacagtgcccaggggtctgagtctca

SEQ ID NO: 846088 - DNA, 98 bp, Homo sapiens
aacggtgtggtccaccgggacttgaagctggaaaatatactgctcgatgacaactgcaatattaagcctttggagactcgacttatttcagagaccac

SEQ ID NO: 846089 - DNA, 100 bp, Homo sapiens
cacagatttggttcataacactagaattcaccttatgccatccatgaatcctgatgggtatgaaaagtcccaggaagttctgtggctcctgatggatctg

SEQ ID NO: 846090 - DNA, 100 bp, Homo sapiens
gctgcgcagccgacgcgggaatgaagcgggcgctgggcagacactctcgaaagcgatgggaacgctttgtccacagtgaaaatcagcaccttgtcagccc

SEQ ID NO: 846091 - DNA, 98 bp, Homo sapiens
ctacatccagccaatgccaagacagtggagtgggactggaaactgctcacctatgtcatggaggaagaggtcctgaaaatccttggttggttcaagct

SEQ ID NO: 846092 - DNA, 112 bp, Homo sapiens
gcagctggagtctattaaacggggcaggatctgtgtcaaaagagcttctctccagagtagaaagaatgtcaagctgtcagctgaggtggagccatttattccccagaagaag

SEQ ID NO: 846093 - DNA, 100 bp, Homo sapiens
gaatgctgggatcggttcctccaggagaagttagcttcagagttctttgtggatggacttgattctgatgagagttacacaacagccaatgcggagtctg

SEQ ID NO: 846094 - DNA, 100 bp, Homo sapiens
ggatcgctactattcaggactaatctattacaagccagctgccatgttgtgagcacataccacatagctccatggagatgcccatgtgactgtgatgaag

SEQ ID NO: 846095 - DNA, 100 bp, Homo sapiens
ggacagtggaacaaattccgagacttggccgtaaaccaaagacccagcaatcaccaatttccaatgggtctcctgagttaggtataaagaagaaaccaag

SEQ ID NO: 846096 - DNA, 100 bp, Homo sapiens
tcaattttctggctccctcgactggttgatcagcagattggaaagactggaagcttcttcaggaaatgaatgttccattgaacagatggaacatgttcgg

SEQ ID NO: 846097 - DNA, 98 bp, Homo sapiens
tgcacattatgaaaagcgtcaagaagaggaggaagccatgcgtaggggtctgaaaagccctcaagaaagcctcagtgatcttggtgccatagagagtc

SEQ ID NO: 846098 - DNA, 98 bp, Homo sapiens
tgaatgtgaggagggtggaaagcatttcggctcagctggaggaggccagctctacaggcggaaaaccagtagattcccagacatcgcgaagtgaatct

SEQ ID NO: 846099 - DNA, 100 bp, Homo sapiens
ccatctaatcacagactcctatttgaagtatttgacgaaaatagactgcatcctggtggggaagaagttttaagggaacaagctggaggtgacgctactg

SEQ ID NO: 846100 - DNA, 109 bp, Homo sapiens
tcagcaccgcagcactggagctgtcctgaaggtactctcgcaggaaatgggaattctacttgtgtggatattgatgatgttaagaagttcaaaccgggttacctggaag

SEQ ID NO: 846101 - DNA, 100 bp, Homo sapiens
aacaaaccttggaaatgttattgataactatgtttatgaacataccctgaattcataatgcactgaaaggaattccagatgaccgagatgggctgtttga

SEQ ID NO: 846102 - DNA, 98 bp, Homo sapiens
tcctatccttacccgacctcagatgctcccttctgctcctgaaagaagagattttatcgacatcgaaagtaaatttgccctaaggacccctgaagaca

SEQ ID NO: 846103 - DNA, 100 bp, Homo sapiens
cagttcaagtccatggagtcattcaggcggcccagccatcagttattcagtctccacaagtccaaacagttcaggtttccaatacttatctacaggaatc

SEQ ID NO: 846104 - DNA, 100 bp, Homo sapiens
catttaccgtaaccctcaaaactcttcccagtctgctgacggtttgcgctatttggagcaagaggtggtggtggccttcccccgaagaaatttggtaatc

SEQ ID NO: 846105 - DNA, 100 bp, Homo sapiens
cgccttcgtggccaaggtgatgtcggtcggagaccggactgtgacattaggtatttggccgtgcttcctcaaagactgggaaatgcacgtccacttcaaa

SEQ ID NO: 846106 - DNA, 100 bp, Homo sapiens
ctgcatactcgctgcccgccggctccctcccccgcgtccctgcgaccgccgcggcgaagatgccctttctaaggcacaaaatgatgtgatggaaatgaag

SEQ ID NO: 846107 - DNA, 98 bp, Homo sapiens
atgctctctctccagtccttgctgaagagactttccgttacatgacaagttgtcctcgaagaaggtacaattgcttttaaaaattgggttaaaacagg

SEQ ID NO: 846108 - DNA, 100 bp, Homo sapiens
cctcccagcagctcatgcaacatctcctctggggaaatgcagaaggttggcaaggccacaggcttcctcaagaactttctgatcgagcccttcgtccccc

SEQ ID NO: 846109 - DNA, 98 bp, Homo sapiens
gcaaggcggcggacggctgcgtcgcccgaggcgaggaggagcgctggcgcccgagcgggaagaagttccgcagcaagccgcagctggcgcgctacctg

SEQ ID NO: 846110 - DNA, 98 bp, Homo sapiens
ccaccgcgtctgcatgtaccaaccgccaacctgcccatttctacccatggaccagattcacttgtcatggattagtgactggtcagagttatattttc

SEQ ID NO: 846111 - DNA, 50 bp, Homo sapiens
aaggagttccctggatttttggaacgacttcaggaagaaatcaccaaaca

SEQ ID NO: 846112 - DNA, 100 bp, Homo sapiens
atcgaggtcgtcgacgccatcatgaccacggcccagaggtactccgtggaaggcttcatcgacaagaacagagatttcctcttccaggacttcaagcggc

SEQ ID NO: 846113 - DNA, 100 bp, Homo sapiens
gcaattaccttaccgactaatatccagaggagaataatttggaagactgttgtggccaatgttttcagttgcaccaagcttagccaccaatgcatcagca

SEQ ID NO: 846114 - DNA, 98 bp, Homo sapiens
ctcagggcaaccccctgccacctcagatatttaatggcgaccgatactgtggagtattagaaaactactcggatgctccaatgacaccaaaacagatt

SEQ ID NO: 846115 - DNA, 100 bp, Homo sapiens
ccaccattacaagtcattcaaagtcagcatgatccacagactgcgattcacaaccgacgtacagctagtttgcgtgtgaacttggacatgggcaaagcgg

SEQ ID NO: 846116 - DNA, 100 bp, Homo sapiens
caaattgtatgtacgcagagttttcatcatggataactgtgaggagctaatccctgaatatctgagaacagaagtgtgtcccggccagtggagaactctc

SEQ ID NO: 846117 - DNA, 100 bp, Homo sapiens
gcgggaggcaacggagctaccagccggtcatttgattgcccgcctcagaacgatggatctgcatctcttcgactactcagagccagggaacttctcggac

SEQ ID NO: 846118 - DNA, 99 bp, Homo sapiens
gcttggagagcatacgaggcggaatccggatcgagatttttttcccaggaagccatcccgtcagaggggttcaagtgatgaaagttggcaaactgcagc

SEQ ID NO: 846119 - DNA, 100 bp, Homo sapiens
aggatggtgtgaccccatatatgattttctttaaggatggtttagaaatggaaaaatgtctctattaccaggttttaaacttcgccatgatcgtgtcttc

SEQ ID NO: 846120 - DNA, 99 bp, Homo sapiens
cctgcctcagcctccaaagtagctgagactacagaacactggaactattttggggctgatgagaatcttggtccagtggctgtgagcattcgaagggaa

SEQ ID NO: 846121 - DNA, 98 bp, Homo sapiens
gaaagagtcaacagcagtggcaacaggaaacttcatggtgttatggtcaacttgccgcacaaccgtgttcaaatctgtcaccaacaggttcattaaaa

SEQ ID NO: 846122 - DNA, 100 bp, Homo sapiens
cagagacaaaagaaacgggccccgactgatctgaagaagacacttgaatcatgggtgacgttaaaaattttctgtatgcctggtgtggcaaaaggaagat

SEQ ID NO: 846123 - DNA, 100 bp, Homo sapiens
tatcacctccaaggagcaccttgccagcaagatccgagtggtattcatgggtagtttgaaatatccagatgagaatggatttgatgccttcctgaagaag

SEQ ID NO: 846124 - DNA, 98 bp, Homo sapiens
caaataagttatgctatgaggatgacaaactctggagtaattggagccaagaaatgagtatagcaatggctgccatccggaagaaactggtgattgtt

SEQ ID NO: 846125 - DNA, 100 bp, Homo sapiens
agcaaatgcagcatttttgataggtgcctatgcagctaaggcagctggataagcacagccaggccacagcccagcagctggtgcagctcctcagcaagca

SEQ ID NO: 846126 - DNA, 100 bp, Homo sapiens
tgcagcaaagccattcgggttggagtaattggttggactccatgaaagaattgcacaaaacaaatcgacagcagcatgagaaacatctgcaaagccgagt

SEQ ID NO: 846127 - DNA, 100 bp, Homo sapiens
agcagcccataacggtacgtgaaggccaaaccatctgtgtgcgtttctggcgatgcagcaattccaagaaggaagaagaggagtcggagccataataaaa

SEQ ID NO: 846128 - DNA, 100 bp, Homo sapiens
taaggaggcagccccagccccacccaccgagtattgttgcagcatctggcagtgagactgaggatgaggacagcatggacattcccttggacctttcttc

SEQ ID NO: 846129 - DNA, 100 bp, Homo sapiens
gcagtcctaccatgtcagccttcccagtagctgggaccacagattcaagatggaaaaggtgatgtaaccattacaaatgatggtgctaccattctgaaac

SEQ ID NO: 846130 - DNA, 100 bp, Homo sapiens
cctgtgttcgcctgctcaacgccactcatcagattggctgccagtttccacttacttacatgatcatttcgagagatgtaatgttgattgctgctgtttt

SEQ ID NO: 846131 - DNA, 100 bp, Homo sapiens
aatgggccgggaccgaaacctagccccggacgagaagcgcagcaacgtgcggtgggaccacgagagcgaatacatgcaccacctgctcgccctggagcat

SEQ ID NO: 846132 - DNA, 139 bp, Homo sapiens
ccagccaatcctggagctgctgttgcagcacttgttccccaaacaagtgctcctacattctgtatctccagatgaaatggccactgcttgatgtccaggcagggagcctccagagtagacaagccctcaaggatgcccg

SEQ ID NO: 846133 - DNA, 100 bp, Homo sapiens
ccaggcctgggctggagtgttacattcagttcctggactccgtggtctcctctgagcctccggcctccataagacccaaaacagatgacacctcttccca

SEQ ID NO: 846134 - DNA, 98 bp, Homo sapiens
tgccttccatggatctataggagagcaagtcctccagtgtatcgcattaagttcaaggagagctttgctgagatgaacaggggctcgaacgagtggaa

SEQ ID NO: 846135 - DNA, 100 bp, Homo sapiens
gagggataagaacatgacttgtattaaagtttctattgatccggtgagaatccttttgaaattcaagaccattctcaggatcagcaaatagaaggagatg

SEQ ID NO: 846136 - DNA, 100 bp, Homo sapiens
gcccgggctaaggagtccctggacctgcgggcccacctcaagcaggtgaagaaggaggacaccgagaaggaacaagattgggagagtgaaagtgaggcag

SEQ ID NO: 846137 - DNA, 99 bp, Homo sapiens
agagatgcaagaccagtccatttggggaaatccttcggatggtgaactcattagaattggagtcattcgttgcccagtttgcagccaagaatgtgcaga

SEQ ID NO: 846138 - DNA, 100 bp, Homo sapiens
cttcgcccccaagactgcgactctaaacggactcatgtactttgtcagaaacgcttcgttaagggactcaggcagtacgggaagaacttcttcagaatta

SEQ ID NO: 846139 - DNA, 100 bp, Homo sapiens
gtccggctgctggatggaggggattttgtcagcttgtcgtcaaggatgagttccacccgttcatcgaggccctgctgcctcacgtccgcgccttcgccta

SEQ ID NO: 846140 - DNA, 98 bp, Homo sapiens
ctggtcctgctcggctgcctcctggcctcgctcctgttctcaggacaagcagttggatatgtcaagtgaccagatagctgccaatctgcaagcagtta

SEQ ID NO: 846141 - DNA, 100 bp, Homo sapiens
cgccgggtgatgaaaccacttctctacatcccatctcaatcagaattactagattttctctcaaactacgaggaaaatggcattcctatgaagaaagcac

SEQ ID NO: 846142 - DNA, 102 bp, Homo sapiens
ttattagatggtgacactgcagttggtatgcatccatgtggaaaggatgtctgacactttatactggaaggggtggtgaacttcaaaaaattggggagtaag

SEQ ID NO: 846143 - DNA, 100 bp, Homo sapiens
tcaggcaattatgtcttctaaaaatattgcacagcttgaaataactgtgaatgtcccagatgtaggatgcatagctgttgttgaacatgagctaccaaac

SEQ ID NO: 846144 - DNA, 99 bp, Homo sapiens
cgagtgttctgggactccagtcttggcggagcttcagtttcagcgactcacccgagaactggaagtggaaaggcagattgttgccagtcagctagaaag

SEQ ID NO: 846145 - DNA, 100 bp, Homo sapiens
ctgaagatagtgcctttcagccctaccaggtttaagaattgtttaagctgcatcaatggagcacatacagggagcttggaagacgatcagcaatggtttt

SEQ ID NO: 846146 - DNA, 100 bp, Homo sapiens
gcaccaagtggcgaaggagccggctccaagagcttactcacatagcatattggtatatcaaaatgaaatgcaaggaaccaaaaataacataattgaaggc

SEQ ID NO: 846147 - DNA, 98 bp, Homo sapiens
tggacatagacaggcttttgcatgggttgatgagtggtatggaggaactctctggaatgaaaaataaaatacaagtagttgtgcttgaaaacgaaggg

SEQ ID NO: 846148 - DNA, 99 bp, Homo sapiens
aggttcccatggttgccggctcccctctcaggacaacccagatgtgcaacaaagtgcgatggatgataatgaagataattcaaatgatgggacccagcc

SEQ ID NO: 846149 - DNA, 100 bp, Homo sapiens
taaaggaaaatcagtagacgcgattagatcctcagatgaacctctagtcttgctttgaaaaaatcattctgtgtaactcttgactgtgactaagttccta

SEQ ID NO: 846150 - DNA, 99 bp, Homo sapiens
caggctatgccatggcagctgcagaggcccagggagagcgtcgtatgtctcgtggggtgaatccctccttggtgagctggctgaccactatgatgggac

SEQ ID NO: 846151 - DNA, 98 bp, Homo sapiens
agcagctgtccgagtcccaggtcaagagcctctgcgagaagattcaaccctatgaaaagataaaggccaggggcttgcctgataatatatcttccgtg

SEQ ID NO: 846152 - DNA, 98 bp, Homo sapiens
cctgtggtgacgtcagaccaggggcaatggcggcttcctgtgttctactgcacactgggcagaagatgcctctgattggtctgggtacctggaagagt

SEQ ID NO: 846153 - DNA, 99 bp, Homo sapiens
aattgttgagttgggctccatctttcagcagttggcacacatggttaaggaacaggaggaaaccattcagagagttgaagtattgataacaccaaggaa

SEQ ID NO: 846154 - DNA, 100 bp, Homo sapiens
agaaaatcaatctaaacatttgtgggaagttgtattcatcaataatgaaatgctgactaaggaacaagcttttcggagactgggaagcccaactgcgaag

SEQ ID NO: 846155 - DNA, 100 bp, Homo sapiens
catcctggctgagaacctcaacaacccacatgacattgtcatcttccatgagctgaagcagccaagaggaaggatttgatgccctggatccctttattcc

SEQ ID NO: 846156 - DNA, 98 bp, Homo sapiens
cacgtgtataaatccaggaccaagagatcctctaccaccaaactctatcttgctaagcaggaatttgctgattcccttggaattccgtttttggaaac

SEQ ID NO: 846157 - DNA, 101 bp, Homo sapiens
gagctggatgccgaagtcctggaggtgttccacccgacgcatgagtggcaggcccttcagccaggcacaattctgctttcccaggaactgcatcactcagg

SEQ ID NO: 846158 - DNA, 100 bp, Homo sapiens
aatatttaatggaaaatcgcttggttaaaacctgacacttttaacagatgccagaccagtttgaccaggcggttgtgctgaaccagctgcggtactcagg

SEQ ID NO: 846159 - DNA, 100 bp, Homo sapiens
tttccaaatattcatctgtacaggacttcagaaatgggcttgggaaccagctgagttcaggatcccacacctctgctgcatctcagtgtgactcagcgag

SEQ ID NO: 846160 - DNA, 100 bp, Homo sapiens
ctcccgcctggacctgcacatttgtgatgatagccagtcccgagagccaggatggaatgggaaacctgaggatcacagaaaaaggtctaaagctagaagg

SEQ ID NO: 846161 - DNA, 100 bp, Homo sapiens
gttcacagtgttggtgtggagtcacagcttgacttttgtctctggcatctctatcccctatgaggcaccacgtaagacctcctgcccttagctctcttgc

SEQ ID NO: 846162 - DNA, 100 bp, Homo sapiens
tcaggccgctacacctgcattgcaggcaacagctgcaacatcaagcacacggaggcccccctctatgtcgtgggcattgctcatcgtgatctgaaaccag

SEQ ID NO: 846163 - DNA, 100 bp, Homo sapiens
atatgtcacaagaaattgtatacaggacctggcttagctattcattgcatgcaggttcagattcagaacaagaaagtggacatctctaaggtctcctcca

SEQ ID NO: 846164 - DNA, 98 bp, Homo sapiens
catggaaagcgaccccggggtcttcaccgagctcattaaaggattcgctcatgatggagcagtccaagaagtcctccctcatggtggcccgcagtatt

SEQ ID NO: 846165 - DNA, 100 bp, Homo sapiens
cagtggtggctatgaacccagaggtcgtggaggtggccgtggaggcagaggtggcatgggtttcaccagtgatcattaaagaatgggcagcttacaaagg

SEQ ID NO: 846166 - DNA, 98 bp, Homo sapiens
tacagtttcctggtgggatgtgcctcaatctcagatgtcatagctcaggtacaagttcaggaaacagtcagagagacaatctcttgcagccagatgcc

SEQ ID NO: 846167 - DNA, 100 bp, Homo sapiens
aagccaacaaggaaatcctcgatcaaattcaacacccaacagcttccttaatagcaaaggtagcaacagcccaggatgatataactggtgatggtacgac

SEQ ID NO: 846168 - DNA, 98 bp, Homo sapiens
aaccagcctgtcgtgatcgacaacaacaagttgaaatcatcgcagaaggataaagttcgtcagtttatgatcttcacacaatctagtgaaaaaacagc

SEQ ID NO: 846169 - DNA, 98 bp, Homo sapiens
agaagcctctgaggcgctatggggcggtggaggagacggcttggaaaacggagagactggggagaagaatagccaggccagaagaaggaaggcctgtg

SEQ ID NO: 846170 - DNA, 100 bp, Homo sapiens
aagggcgacagcaacagctctgccggctggaaggaggagacatcacagctttcccagatcgggaggaaaaatatggaatgtgttttaccgctgactgaac

SEQ ID NO: 846171 - DNA, 98 bp, Homo sapiens
tgattggctacagtgatggaatgcaggtctggagcatcccttcactggaggaggatccatggccaagggtgaattctaaggaccatatacctgccctg

SEQ ID NO: 846172 - DNA, 98 bp, Homo sapiens
tactttgtaatccggatccaggatggtactggtgtggtacatggacggctatcacaacaaccgcttcgtacgtgagtacaagtccatggttgacttca

SEQ ID NO: 846173 - DNA, 98 bp, Homo sapiens
aaattagcagtggatgcctactgggcttctgcaaccgctttccacggacgttacatccaagaggaaataatccaggcaaggaagcacaagctgatcaa

SEQ ID NO: 846174 - DNA, 100 bp, Homo sapiens
acaggctgcaagcgcccaaagccaatgggaatcacctggttcaagggtgcaactggaaactgacttgaagattgagaaggaatggaggcagactttgcag

SEQ ID NO: 846175 - DNA, 100 bp, Homo sapiens
gaagaattctgttcgacataatctgtccctgaataaatgttttcagaaagtggaaagaagccatggcaagtttgcagaaaaaacttcagcatgtgccagg

SEQ ID NO: 846176 - DNA, 100 bp, Homo sapiens
gagtctgggaaggcggcgtccgcttttctgacaagggaagaggtattgttgcagcatctggcagtgagactgaggatgaggacagcatggacattccctt

SEQ ID NO: 846177 - DNA, 100 bp, Homo sapiens
tcctgcagatggccaatgagaaagccctgaagcagaagggcatcaccgtgaagcagaagagctctctattggaggcatcatcattctgaaggataccagt

SEQ ID NO: 846178 - DNA, 99 bp, Homo sapiens
gacacttttgggatccgatggcctgaggagcttgaatgtgacagctctgtcaggattgccacaattccagcctttggcactattatggaaacagtaatt

SEQ ID NO: 846179 - DNA, 100 bp, Homo sapiens
taatgctacacagttcataaaacagggaaatgatcttcattggttagcatgtgccttatatgtggcttgcagaaaatctgttccaactgtaagcaaaggg

SEQ ID NO: 846180 - DNA, 100 bp, Homo sapiens
agcatctttgtctagccccagtgcagaatggaggctccagagtgaaattaatgacactttgtcgatgaagatcttgattgtgacctctgtggaaaatgag

SEQ ID NO: 846181 - DNA, 98 bp, Homo sapiens
cccaatttcccagctgctaaaggaagaggaagacctgatggccaaaagaaaggaagaaaatttttcctctcctaaaaatgccaaaaggccaagacaag

SEQ ID NO: 846182 - DNA, 100 bp, Homo sapiens
tgtcctccacagaggctttttgtgtgttttatcatctaaaatccaatccctcgttcaaaagaatgctgaaccgggagctgacacacctctcagagatgag

SEQ ID NO: 846183 - DNA, 100 bp, Homo sapiens
gtcggtcagtgagagccacacgtcctgtcctgcaggtaatcattaccaaatgaggaggaaaggacgatgtcatcgaggctctgcagcgaggcatccttct

SEQ ID NO: 846184 - DNA, 98 bp, Homo sapiens
atggtgctgctgtccaggctggtgtgctctctggtgatcaagatacaggtgaatcagagctggcgcaaagaacgcttcctggatgtgcccttatgcaa

SEQ ID NO: 846185 - DNA, 99 bp, Homo sapiens
ttgaagtgaatccccagacccgaattcccagaacctttgaccgcttttgtggcctcatggctgggaacttctggggtaggacgttgtctgctatctcca

SEQ ID NO: 846186 - DNA, 100 bp, Homo sapiens
tggaggatgactccagtgtgagtgaagacttagatgtggattggagggaggttttacataaatggagtcctaaacaaataggagaacaccttctactgaa

SEQ ID NO: 846187 - DNA, 100 bp, Homo sapiens
acgactggagggattaagaagaactcttaggagcagcttggcctaaaggggcagctgcaatgactctccgcacggtattattgtcattgcaagcactatt

SEQ ID NO: 846188 - DNA, 100 bp, Homo sapiens
gaaaagaaacttatttctgttgacacttcttttagaactcatcaaattgaagctgttccaaccagctctgcaagtgatggatttaaggcaaatcttgttt

SEQ ID NO: 846189 - DNA, 98 bp, Homo sapiens
cgacagctgctaaagtggcatcctgggattttgttgaagccacacaaagaacaaattgcagttgtttgaggggttccagcgttcctgaaaatgatcga

SEQ ID NO: 846190 - DNA, 100 bp, Homo sapiens
caccattaaggaatggcttgccaagaatcaccatgaggtaccagctggaggatgagtctgcgcatttggatgaaatgccactaatgatgtctgaagaagg

SEQ ID NO: 846191 - DNA, 98 bp, Homo sapiens
ccagctcagccatgcaggccccaacaggattaaaatcggaaggcctttacagagtctctgggttcactgaacacattgaagatgtcaaaatggcattt

SEQ ID NO: 846192 - DNA, 100 bp, Homo sapiens
cactatggcgctgaaacggattaataagctgtgtgccaaccacgatgcaaacatggtgaatgtatcgggccaaacaagtgcaagtgtcatcctggttatg

SEQ ID NO: 846193 - DNA, 134 bp, Homo sapiens
ctggaagagagggccttctcccgcttctctcctcctcctctccacgctggggggatcctgggatgccgaggaatgtgacagggctgggagtgtggccacctgccaggccgtcatgcgtgccgtgattgggattg

SEQ ID NO: 846194 - DNA, 101 bp, Homo sapiens
caatcagctggcctggtttgatactgacctgtaaatcatcctttagggtctttttggagttcctgagctgagtgccccagaaggatttcatattgcacaag

SEQ ID NO: 846195 - DNA, 100 bp, Homo sapiens
tgtgtcaatggaggcacctgtcggcagactggtgacttcacttttgagtgcaactgccttccagggacccagacccgcttcagccaggagccagctgacc

SEQ ID NO: 846196 - DNA, 100 bp, Homo sapiens
gaactcatgtcatttcttgtaagtaaaccagagcgaatcaggatcatgatcagaagcatcttcctgttcttggaccgcacctatgtgctgcagaactcca

SEQ ID NO: 846197 - DNA, 99 bp, Homo sapiens
gaaaagcactttccttaatccggttcccactgatgacaattgaggaatttgcagcagagaggtgtgggaaatggaactggatagactcaagaatcagga

SEQ ID NO: 846198 - DNA, 98 bp, Homo sapiens
gcgcactggcaaacgtatgtttctggaacattgcgatttggaatgatgaagatgcatcagggggcgatcaagatcaggaagaaagaagatggaacaaa

SEQ ID NO: 846199 - DNA, 100 bp, Homo sapiens
caacatcatcctctactgtgatactaactcggactctctgcagtcactgaaggtgcgagaagatgtactaaattcattgaataacaactttcttcaaacg

SEQ ID NO: 846200 - DNA, 99 bp, Homo sapiens
tgtcctttcagcttctttctcacacgcagatgaacactggacttcagaaatgctggatcctcattgaccgctgtgggaagcactttggtacgatactca

SEQ ID NO: 846201 - DNA, 100 bp, Homo sapiens
cctgtgggatttattattttgaagtaaaaattgtcagtaagggaagagatggaatcgagagctccagatcatgagaaagctagatcactgtaacatagtc

SEQ ID NO: 846202 - DNA, 98 bp, Homo sapiens
gctggagcggagccggccgtacgcggtgctgcgagggcagaacctggtacatccagcagtggtcattcgacaacgaaagtcataccgtagaaaagatg

SEQ ID NO: 846203 - DNA, 98 bp, Homo sapiens
gtacagtcagaaaaactcagcaaacaggactttttcaaaggaaccagacataagttcagaggaatctgtctccactgtagaagaacaagagaatgaaa

SEQ ID NO: 846204 - DNA, 98 bp, Homo sapiens
agaaacgttctggattcagagacagaaaatcgggaacatgccctgtgtgccgccgtcatttcccacctgcggttattgaagcatctgcagctccttcc

SEQ ID NO: 846205 - DNA, 100 bp, Homo sapiens
atctttgctgaagatgactttatgacccaagaagggcctgctttcttccccgggcgatgtgcagagatctttgccaggggtcaaagcgtcgggaagcttg

SEQ ID NO: 846206 - DNA, 98 bp, Homo sapiens
gattcctgtgctaagagaagaaaaactacctgtggtaggaattggaaagcatctgtgtggtatggcaacagccaaacgtctcaagtccagtaccagtt

SEQ ID NO: 846207 - DNA, 100 bp, Homo sapiens
acaaccatccgtgtggtgtccatggacagagactaccacgtggcatgttaccactgtgaggtttcccaaaccactccttatgatccagtgaatattcaag

SEQ ID NO: 846208 - DNA, 98 bp, Homo sapiens
ctaaggccgccgcttaccccggggtctatggaagtaatggaaggacccctcaacctggggaaatctgtgcgttcaagatccatggccaggagctgccc

SEQ ID NO: 846209 - DNA, 100 bp, Homo sapiens
ggatcttttttcacatccagcccatgcggactgagcagccaaagcttgacagaggcctcccagacctgtaaccagcatgaacgacaccctgttctcccac

SEQ ID NO: 846210 - DNA, 98 bp, Homo sapiens
agtacattaggaaacatgctagaattacctggaacttcatcatcatctacttcacaggaattgccattttagacgtcccgtcaaatattgcaaaaatt

SEQ ID NO: 846211 - DNA, 99 bp, Homo sapiens
agagcttaaaattgctgttttacagaaggtgatgtacagttcattgattatgaatattctggatacaactacctggcatatgatattggaaatcatttc

SEQ ID NO: 846212 - DNA, 98 bp, Homo sapiens
agtgaggcagctgcaaggagggcggcgggactgcactcgagtgtccagacctgctcgatggtggatccataaagaacccagccaacccgcagagggag

SEQ ID NO: 846213 - DNA, 98 bp, Homo sapiens
gttgctggttcaccttgacgatccagagagggccatccaggatgcaattttaggtggaatgaggtaccatctactgtctccagaggaccgagaagaac

SEQ ID NO: 846214 - DNA, 99 bp, Homo sapiens
atcttttgccctagagcaattgaagggcaaatgtgagaaacgagtacaggatgtaattgaacgattttgggatttcattgaccagctgagcatcaatac

SEQ ID NO: 846215 - DNA, 99 bp, Homo sapiens
ggaagttgtattcatcaataatgaaatgctgactaaggaacaaggggatcatcgtcttgctcttcttttatctcagtttgtgggtagccagtcagtccg

SEQ ID NO: 846216 - DNA, 100 bp, Homo sapiens
ccgatgtcgtccagtccgaaagaaaccaccttctccagcaatgctgcagttggagaagaaacttgaacgtgaacttgaggatgatgcacgagttattgct

SEQ ID NO: 846217 - DNA, 100 bp, Homo sapiens
gaacagaaagaagaaaagaaagatgcagaggaagaggaaagcgaactggtggggacccatcgtgaagatggcgtggccctgagaggcagccattctcttc

SEQ ID NO: 846218 - DNA, 100 bp, Homo sapiens
cgcttctcccgcttcaacgaagaccgagactttcagttgcagactccagcctcttttgcacagagtgttcaggaactaacaattgctctccagcgaactg

SEQ ID NO: 846219 - DNA, 99 bp, Homo sapiens
gagggtcatgtttcctgtgtgaaattgcttctgtcaaaggtatctcagatgaagacatcatcaacattactcttcctactggagtccccattcttctgg

SEQ ID NO: 846220 - DNA, 100 bp, Homo sapiens
atgggaaagctgaacctttttccgcagcactccgaagccttgtcaacaacccgcgatacaggaatactcccccagttgcaagaggcgcaggaccgtggaa

SEQ ID NO: 846221 - DNA, 100 bp, Homo sapiens
ttggctggacctccggtacaatagaattaaagcgcttccttctgggattggagctcaccagtggcttccagagtcatcccgctggctcctcctgcatggc

SEQ ID NO: 846222 - DNA, 100 bp, Homo sapiens
accggagaccccgaaaacggaagcgcagggagaaggaagaggtgtttgaaaaggcttctggctgtgatgggtcggagattcctgatgaagtgaagctgat

SEQ ID NO: 846223 - DNA, 100 bp, Homo sapiens
ttttacttcaagcaggggctgatttagaaggagtcaagactgagaacaacgatcatattaatttgaaggtggcggggcaggatggttctgtggtgcagtt

SEQ ID NO: 846224 - DNA, 98 bp, Homo sapiens
tgtgtgccttgtggagaccctcctcctccttacgaaccgcactggcctgaaggggctctttttgaacattcagtggagacaccccttgtcagagccga

SEQ ID NO: 846225 - DNA, 99 bp, Homo sapiens
ttgctgctgtactccttctccgatgagtataggatcaaaccagtggaagaggtcaaatacatgaaaaatggggcagaagaagagcagaaaatagcagcc

SEQ ID NO: 846226 - DNA, 98 bp, Homo sapiens
atttaggagctctgctcaaagccagacggaagtctgcggtcttgcagttcttcagactgctttaataaagtgatgccaccaaggaaaaagagaagacc

SEQ ID NO: 846227 - DNA, 100 bp, Homo sapiens
ccggaacgtaaacctgaaccaaaggaagaagttgttctgaaaagcgattagtgatgatgaaccaggttatgaccttgatttattttgcatacctaatcat

SEQ ID NO: 846228 - DNA, 100 bp, Homo sapiens
acctttgcttatgcaaatcagaaaaacagaatggactaggactcagtgacttaaagagagatctacttcagagccagcagtcccgccagaagaggctgag

SEQ ID NO: 846229 - DNA, 100 bp, Homo sapiens
ccacggcccaggggtcatggtcacccaggcaggtgtctgctaccagggcaccttccaggcggacaagacggtgggaagatcagttttcctgccatccagg

SEQ ID NO: 846230 - DNA, 98 bp, Homo sapiens
gctcatgaatagactctcccatcccaacatccttagcatttcttatactgaagcagtggagatcttaaagcaagcatcccagaacttcacctttaccc

SEQ ID NO: 846231 - DNA, 98 bp, Homo sapiens
aggactccaaggacagccacacgtctgtcaccatggaagaatccttgttgcctgatgactatgtggttccccttgactggaagacactaaagatgatc

SEQ ID NO: 846232 - DNA, 136 bp, Homo sapiens
aaatcttgactgccatccttgcctcgctcactgcacgccagaacctgaggagagaatggcatgccagctaagaagaaatttcctgacttgtttgtcttcttggaagattcctcctcatgtctcaaaatcttcccag

SEQ ID NO: 846233 - DNA, 100 bp, Homo sapiens
attgaaatcgcatccagagaacttgagaaagcaaaagtcgctgctgccaatgtgatcttgcaggagagagagttactgcctgtgaagaaatttgaaagtg

SEQ ID NO: 846234 - DNA, 100 bp, Homo sapiens
ggcagtgacgaggacgaagtgtccgagacaatgcagatcttcgtgaagactctgactggtaagaccatcaccctcgaggttgagcccagtgacaccatcg

SEQ ID NO: 846235 - DNA, 98 bp, Homo sapiens
gaaaatgaatccaattcactgtcaagaaaactcagcaagtttggatccatacgttataagcaccgctacaggaaggatctgagtctctccctgcggag

SEQ ID NO: 846236 - DNA, 105 bp, Homo sapiens
tcggaaaaaggaaggagaaaagatccggaagaaatatccggacagggtccccgcccacccccagagattgttatctatcaggagcttcgcatggaagcttttgtc

SEQ ID NO: 846237 - DNA, 100 bp, Homo sapiens
ccagtgctaccatgggccaactgtatgagataaccatgatgactacacagacttctactatgacatttgctccttttgaggatacattgagttggatgct

SEQ ID NO: 846238 - DNA, 100 bp, Homo sapiens
gcaaaagaattcttcgaaaattgggcatcctattttcattggtggtgatgctgtatgtcatctgggtccaggcagtggctgacatggaaagctaccgaaa

SEQ ID NO: 846239 - DNA, 100 bp, Homo sapiens
cccccagccaccagctcgaccacagcaagctcctgggtccctagagcgtccaagatttttggtttcaaaccaatttcctgctgaccagaatgaaatggag

SEQ ID NO: 846240 - DNA, 50 bp, Homo sapiens
aggagcatcccggctggagcagagccagatgcggaaaacgccatgcggta

SEQ ID NO: 846241 - DNA, 100 bp, Homo sapiens
attacactgaagaagtagagtatttcaaccataaagacatcttaattgggcacgaaagagaaatacaggtatcaggatgaagatacacctcctcaagagc

SEQ ID NO: 846242 - DNA, 100 bp, Homo sapiens
gcttcatacgctattgtcctgcccgtaagttcccgttttgtgtgtgcaaaatgatgcttcaacacccaggccaggtctctgcctcggaagtgagtgcttc

SEQ ID NO: 846243 - DNA, 100 bp, Homo sapiens
ttgagcagatgacaaaacttcaagccaaacatcaagcagaatgtgatttgcttgaagatatgaggagggtttgcatttgtgtatgaagctcaagatgtgg

SEQ ID NO: 846244 - DNA, 100 bp, Homo sapiens
agcagccaccggaccctgtcttacagccgctggagctatgacagatatgtttgacgacttctcagaaggcagagagtgtgtcaactgtggggctatgtcc

SEQ ID NO: 846245 - DNA, 98 bp, Homo sapiens
tcctatttcatggctaccaacagccatcagagggttctcgcttcagcacaagatccggagttttgaagaagcgcgaggtctggaccgaattaatgagc

SEQ ID NO: 846246 - DNA, 98 bp, Homo sapiens
cgggggctcagagatccaagtgcgcgccctggcgggtccggaccaaggtctggccgtgggcctgggcttcggggcactggcagaggtcgccaagaaga

SEQ ID NO: 846247 - DNA, 99 bp, Homo sapiens
aagaacaaggaaatgtataagctacaggaatttaaactttgggataatgagctgcagtatgtggaccaacttctgaaagaggatgtgagaaataactct

SEQ ID NO: 846248 - DNA, 100 bp, Homo sapiens
agaagctatccgcgtgattgcagagagaggacttggaggcactgtggttggcgtggacgagagcactgctttctcatggcctgtgtgtgacatgtgtggc

SEQ ID NO: 846249 - DNA, 135 bp, Homo sapiens
atggcatccatttactctgaggaaggcaacattgaacatgccttcatcctctataacaagtatatcacgaagtcctggctgagcaaggttggaagccctagttctcgcattgaccgcacaaacttttctaatgaa

SEQ ID NO: 846250 - DNA, 100 bp, Homo sapiens
tgggaagtgttatcatccagaattgcagaaagacatgcttcattgtaatatgtgcaaaagaattataaggctgtctgcagagatttgaaaaatggcaaca

SEQ ID NO: 846251 - DNA, 100 bp, Homo sapiens
caaccttccagccccttttgaaagagagaaatctcatcatctgtgcagccttcttaaagcaaactaagaccagagggaggattatccttgacctttgaag

SEQ ID NO: 846252 - DNA, 98 bp, Homo sapiens
gccgccgcccagagactgctgagcccgtccgtccgccgccaccacccactccggacacagtattctaccttgtaaatactgttatttgtatatactgt

SEQ ID NO: 846253 - DNA, 100 bp, Homo sapiens
cttccagtattcaagagatgatatttatacattgcagatcaatcctgattctgcagttaatccgactcagattgatggacaacttttcttaattaagcac

SEQ ID NO: 846254 - DNA, 100 bp, Homo sapiens
cagggccacttttgtggccagaagggcactcccaatgaaaactgccaagttttggaccttatctggaacagcgcaagaaaatcatagcagaaaacaagat

SEQ ID NO: 846255 - DNA, 100 bp, Homo sapiens
gcagcaagcatcactcagtgcctatttctatctatcgttcccctgtttcccttcgaggaggacacggggatggactatttgggttctcggcaatacgttc

SEQ ID NO: 846256 - DNA, 98 bp, Homo sapiens
gaggccttcaagtgcatgatgtgcgatgtgcggaagggcacctccacccgtcttggtcctttagtgagtaaagtgaaagaataccaagtagagacaat

SEQ ID NO: 846257 - DNA, 100 bp, Homo sapiens
aaagacagtctccatttcatggcaaccatgcagctattaaccagtgtcagaatactacaacacatctttgcaggattctttgcaaattctgccattcctg

SEQ ID NO: 846258 - DNA, 98 bp, Homo sapiens
ccagcaagtatgtcccggtctctgcagccgccatcttcctagtgggagctacgacactcttctttgcctttacactcaccccacacagaccgcgtttc

SEQ ID NO: 846259 - DNA, 100 bp, Homo sapiens
tatatgccatttgtttgacaaagataagaagcagtatcactgtgaaaactgtggaatttgtaggtatttgtagtgagctcattctaaaacctaaggatgt

SEQ ID NO: 846260 - DNA, 114 bp, Homo sapiens
gcagaaggtttgaggagcattgcttctcatacagtaagactgtccttcatctacttggattcagttccaagacagttgttacatttttctccaagaagccatcaaagtagaaag

SEQ ID NO: 846261 - DNA, 99 bp, Homo sapiens
atggctccccaggctgacaatccccttggcagatctgtccttaggaaagatatttaccaggagaggtgatatccagcctcagttggacagtgctctcca

SEQ ID NO: 846262 - DNA, 100 bp, Homo sapiens
cagaggatgaggaggtcataagtcaagacaaattatgcgcacagccatgaagtataacctgggattggacctgagaacagctgcctatgttaatgccatt

SEQ ID NO: 846263 - DNA, 100 bp, Homo sapiens
tctgagtgtggacgagtagccagtgaagataatgaatgtcgaatgtgactgactagcagcttcattttgaaatctccaagaaggagaagcttctctcgca

SEQ ID NO: 846264 - DNA, 99 bp, Homo sapiens
gctattgaggcagagagacgacgcattcaggagaagaaggatgaggttaaaggtgaatccttgtttcattctaagaaaatggacctgacagtaaatggg

SEQ ID NO: 846265 - DNA, 98 bp, Homo sapiens
ggtagaagaaatcgtagctggcgtgagttatcttctggaaatgagtcttcaagctctgtaagacatgtcagagatgtcatcatcgctgcaagcgttgc

SEQ ID NO: 846266 - DNA, 98 bp, Homo sapiens
gagagactgccatgaagcaaatatactttgcccatacagccctgaagtggatagagagagctaatatggatggttcccagcgagaaaggcttattgag

SEQ ID NO: 846267 - DNA, 98 bp, Homo sapiens
cacatcgaggtgaatgggagcaagattggcccagacaacctgccttatgtccagatcttgaagttatgtgaaatcctagctaaagaaaaggacactat

SEQ ID NO: 846268 - DNA, 100 bp, Homo sapiens
cgagacgccgagtgtttcccgcagccggccggggtccagggggggccctcagcctcttggccttgaacgggctgttcatcttgattcacaaacacaacct

SEQ ID NO: 846269 - DNA, 99 bp, Homo sapiens
ttaaactcttgctaccactaatgctgcagatcacaaaatttgtccaggatagacatagagctagaagaaacagacttcgtaaagatcaacttaagaaac

SEQ ID NO: 846270 - DNA, 100 bp, Homo sapiens
tctagaccataaaaataaaaaacatatccgagggtgtcctgttacttccaagtcatcaccagaaagtttccccctttctagggtgaggatggttctacac

SEQ ID NO: 846271 - DNA, 100 bp, Homo sapiens
taattagcattttcatcatatttttgttagtgataggaactcttcttttagccctactcctgactgcaaagcttattcagctgattctgaatcatcttac

SEQ ID NO: 846272 - DNA, 100 bp, Homo sapiens
cgcattttttaaccctagatctcgaactctaagaaggagctgatgtggaggagcagctgagacagttcaagatgacgaccacagtagccacagactatga

SEQ ID NO: 846273 - DNA, 113 bp, Homo sapiens
tattgtacgatttctggtacagttagatgactacaggtggtatcacggaaaacttgacagaacgatagcagaagaacgcctcaggcaggcagggaagtctggcagttatctta

SEQ ID NO: 846274 - DNA, 99 bp, Homo sapiens
caacttcaaagacgttctcaaggagaaggcagacctgggtcttgatcttagcagtcaaatcaagggctgtctcgtgactgcttcagctgacaaatacgt

SEQ ID NO: 846275 - DNA, 100 bp, Homo sapiens
caagctatcaaatctgaggtcttattttgttgagtcgaaagtgaaattttcctttggccaacgtgacaggtacttacaatttcatcagaaattcctaaaa

SEQ ID NO: 846276 - DNA, 100 bp, Homo sapiens
tgtatgccagcagcttgttgtacaacctgtcgcgaaatcgcctttcagaaattcctatagaagcatgtcactttgtttctctggaaaatctcaacttgta

SEQ ID NO: 846277 - DNA, 100 bp, Homo sapiens
aatacagctggggacgacctggccaagctgctgtggctgaaaagccccagctccgagggtattttactggatgaagcctcaggtgtaaacaagaatcaac

SEQ ID NO: 846278 - DNA, 100 bp, Homo sapiens
atgaaaatgaagacgacattcagtttgtcagtgaatgtatcctgtcaggtataatgtcagtgaatggcaagaaagttcttcatatggatcgaaaccctta

SEQ ID NO: 846279 - DNA, 99 bp, Homo sapiens
ggagacgacgctgctgggtccgctgagcggggcgacccgagataaccatgatgactacacagacttctactatgacatttgctccttttgaggatacat

SEQ ID NO: 846280 - DNA, 100 bp, Homo sapiens
acaccatccaggagtcagtttattactggaaagtgctggagaatctggtaaaagcaccattgtgaagcagatgaggatcctgcatgttaatgggtttaat

SEQ ID NO: 846281 - DNA, 100 bp, Homo sapiens
cggcaactccatggtcattttggctgtgacgaagaacaagaagctccggaattctgagggtctcaacgcagactacgtgaagggagagaacctggaagcc

SEQ ID NO: 846282 - DNA, 108 bp, Homo sapiens
aatggggcccggattgctgctgccattctgaacaccccagatttgcgaaaacaatggctgaccggttccctgatgtgttacctgcttctgctactgatccaaactgca

SEQ ID NO: 846283 - DNA, 100 bp, Homo sapiens
aagaacatgctcacatcttcaggtgcctcattcacatacgtcaaggaaattgaggttttcctttggaatatggataaatacaccatgatacggaaactag

SEQ ID NO: 846284 - DNA, 98 bp, Homo sapiens
tggaaccatctcagaagccatgcccctcaggctggaacttgccctgtctcctcgcagatgaggctccatggtccccttctcgatgcgcatcttgcacg

SEQ ID NO: 846285 - DNA, 99 bp, Homo sapiens
gttgcttgatcaggtggaacagattcagaaggagcaggattaccaaagggaagacaccatggaggagtctgggtggaagttggtgcacggcgacgtctt

SEQ ID NO: 846286 - DNA, 98 bp, Homo sapiens
cagaaacaaatgccagtattgtcgatttcacaagtgcctttctgtcgggatgtcacacaacggccgggtgctcgtccactgccgggaaggttatagcc

SEQ ID NO: 846287 - DNA, 98 bp, Homo sapiens
gctggagcacttgagccacgtgcatgaaccaaacccacttcgttcaagacaggtgtttaagcagttgaacaatgaccatagttgacaaagcttctgaa

SEQ ID NO: 846288 - DNA, 100 bp, Homo sapiens
aaagggtatatggctggaggctgggaaagctttggactactacatgctccgaaatggggtatctctggagacaaagtagagatagaccctgttacgaatc

SEQ ID NO: 846289 - DNA, 98 bp, Homo sapiens
agacagcacaagactttcctgccagaggcacagtccccaggcaaaaagggcagctagctgtagaaagagctaaacaagtagaagagttcctgcagcga

SEQ ID NO: 846290 - DNA, 100 bp, Homo sapiens
atcaccttcatgggcctggagaagctgcatccctttgatgccggaaaatggggcaaagtgatcaatttcctaaaaggagcctttaacgatagtgaagctc

SEQ ID NO: 846291 - DNA, 100 bp, Homo sapiens
tggctgctcctggttacgttgtgcctgaccgaggaactggcagcagcggaacaagctgaaagctggatacctaatgtcagtggagtcttctgagtgtttc

SEQ ID NO: 846292 - DNA, 98 bp, Homo sapiens
gaagatgctgttctgatggatggaatgactgaatctgatacagcttcagttaatgaaaatgggctagagcccagcattacatcaacatgcccgtgcag

SEQ ID NO: 846293 - DNA, 100 bp, Homo sapiens
gagaagatccatggttattagagaaagagaaaggatttctaagcaggaactccccaggaactggccagtcatggtggcttatgcctgtaatcccaggact

SEQ ID NO: 846294 - DNA, 98 bp, Homo sapiens
aacactgaatcaacatgggcaatgagaacagcacctcggacaaccaggcaaaatcctgacagatgactttgcagacaaggagggtctggaaatgggtg

SEQ ID NO: 846295 - DNA, 51 bp, Homo sapiens
gcctcatcacccggctgctggaggaatgaagtgtctatgttgaaaaatgag

SEQ ID NO: 846296 - DNA, 100 bp, Homo sapiens
accaatgtgctggggaggaaggtcctctatctgccgagcttcttcacctacgccggcacagtcttcactaccgtagaagaccttggctccaagatactcc

SEQ ID NO: 846297 - DNA, 100 bp, Homo sapiens
cctttgaccttctgccatgattgtgaggcctccccagccacgtgaaactatgtgccaggtgcagagattaaggagttatctgcaaagagggctattaatg

SEQ ID NO: 846298 - DNA, 98 bp, Homo sapiens
gagagacccctggatctgagcaatggaaatttcaggaattaagtcaaccacgttctcataccagcctgaaggtttacaacctgctaccagaaaaggac

SEQ ID NO: 846299 - DNA, 99 bp, Homo sapiens
ggagatgaagtatttgtggaggcagaatctgaagggattaaactgcaaatatctcatgaagctgctgcctgtatcactggtctccgggcagccatggag

SEQ ID NO: 846300 - DNA, 100 bp, Homo sapiens
tggaagcagacctcgtggaagcgctggaaaaatttgggacaatatgacacgatgaggcgagtggtacgacagagcaagtttcggcatgtatttgggcaag

SEQ ID NO: 846301 - DNA, 100 bp, Homo sapiens
cactccttgctcagcgatgatgtggaaccttaccctgaggtagacatctttagactcatcagaacttcctacgaggttttgcgtccattcctccttcgtc

SEQ ID NO: 846302 - DNA, 50 bp, Homo sapiens
gccgccgccgcgagcgctcccgctccctcgtgaaagatgcttctgttcct

SEQ ID NO: 846303 - DNA, 99 bp, Homo sapiens
aagaaaaccagctgccctgggtgaagcccaaccaacaaagagtttgggttctccaaaaaatgtggaatcctttgcatctatgctgagacattctcctct

SEQ ID NO: 846304 - DNA, 99 bp, Homo sapiens
ccaagtgtggcagcagttcgtgaagtctgtgaggagaaaaaggcattgctggctctgaagaagcaaagtagcagcagcacaaccagccaaggtggtgtc

SEQ ID NO: 846305 - DNA, 98 bp, Homo sapiens
tgacgaggtctgagcgaccatggaccggccggggttcgtggcagcgctggtggttctgatctacaatggccaactggacatcatcgtggcagctgccc

SEQ ID NO: 846306 - DNA, 100 bp, Homo sapiens
cgtttgtcactttttgtacaaaagaagcagctcaggaggctgttaaactggctgatttggagcaatataaaaaagctttaactgatgcaggatgcaacct

SEQ ID NO: 846307 - DNA, 100 bp, Homo sapiens
attcgccgtgcccgagaatagctccgtccagcagattggtgtgcccgtttaataaaagaatatggaaactgaacagccagaagaaaccttccctaacact

SEQ ID NO: 846308 - DNA, 99 bp, Homo sapiens
aggaccagtctgcagagggatcctgtggctggaagcgaggaggctccacacggccgttgcagctaccgcagccaggcatggaagttgtaaaggttggag

SEQ ID NO: 846309 - DNA, 98 bp, Homo sapiens
caggtccctgctgaatcacacgccgccatccgggaggcccagggaaggtactttgatggaaacctggagaagctctttgctgagtgtcatgtaattaa

SEQ ID NO: 846310 - DNA, 98 bp, Homo sapiens
gatgatgtctttaatgaaaagggatggaactacattcttgagtctgaccagtgcacaggacttcagggcttcctggtgttccacagctttggtggggg

SEQ ID NO: 846311 - DNA, 100 bp, Homo sapiens
ccgcgtccagcacctacgtcccgctgccgtcgccgccgccaccatgcccaagagaaagatcgcaccccctccctccctggcggagcccctgaaggagctg

SEQ ID NO: 846312 - DNA, 100 bp, Homo sapiens
agatatcaattaggcatagagaaactactcgatcctgaagctcctcagtgggtagtgcacttccacgaagacgctgctgtgcatatattaccattggaat

SEQ ID NO: 846313 - DNA, 98 bp, Homo sapiens
acgtggtcaccatccaggaggggaagtttgtgaagaaatatgggaacctttttagcttggagcttggtgacatatctgcagttcttattactggcttg

SEQ ID NO: 846314 - DNA, 100 bp, Homo sapiens
ggaagtagtagttgttgagcagagggaaagggataggagaaggatgtggactgcagtgctgcagtgccaggctcaggccacagggtcaccacatacatcg

SEQ ID NO: 846315 - DNA, 98 bp, Homo sapiens
ctgggtcagtccgccgctcaccccgcggccgcaccttcccgccttctcagtgaagtttagcaactgcaatggaaaaagaaaagtacaatatgagagca

SEQ ID NO: 846316 - DNA, 100 bp, Homo sapiens
gtcgtatcatagttcattttatgtgggaggatgttcagcagcgcggcagagtcatggggctatatgttctcctttcagccaagacctttcaccagtgcag

SEQ ID NO: 846317 - DNA, 99 bp, Homo sapiens
gcagtgccgcttcggccgaaggcccgagcgcccgaggcgtctgggatggtgtgggaccgggtttaagtggaaaccctgcagatttagaaagaagagaag

SEQ ID NO: 846318 - DNA, 100 bp, Homo sapiens
agattttgatgtggatgatgccaaagttttattagaatgtcgagtggtaaagtccacttcttacaccaaaatagcttcatcatcccgcaggagcaccacc

SEQ ID NO: 846319 - DNA, 98 bp, Homo sapiens
ctggcgctagtctgaccctccgccaggcaaaaggaaggtcaaaatgcagatcttcgtgaaaacccttaccggcaagaccatcacccttgaggtggagc

SEQ ID NO: 846320 - DNA, 98 bp, Homo sapiens
aaactttgcacaacaaaatgtttgagtcaattctgaaagctccggtattattctttgatagaaatccaataggctttcctcggagacgggtggcatgg

SEQ ID NO: 846321 - DNA, 100 bp, Homo sapiens
aaacagagcgacgagcaagaagcagcccaaagtcgaatgattcagacttgcaagcgagtaaccagctcataaatcacatcgaacagtttttggatactaa

SEQ ID NO: 846322 - DNA, 100 bp, Homo sapiens
gtgaagtcaagtaaaatcgcacactgggttcttgaagcttttgagattaacaatggcaggaaaatcatcactttttaaagtaattctccttggagatggt

SEQ ID NO: 846323 - DNA, 98 bp, Homo sapiens
cgggcggccctccctttcatcagtcttcccgcgtccgccgattcctcctccttggtcgccgcgtccttggctggcgtgcccctggccccaacatggcc

SEQ ID NO: 846324 - DNA, 99 bp, Homo sapiens
aagaaacccagcttgatatgttgtttcatcgcaaaccagaaaaggttagaaatcatcaacgaagatgatgttgaagcttatgtgggactgagaaatctg

SEQ ID NO: 846325 - DNA, 99 bp, Homo sapiens
aattttccccccaaactgcaataagccgccttccaagatttgaaaaatgtgtgagtgctaaggaagctttggagactgatctttataagcggtttattc

SEQ ID NO: 846326 - DNA, 100 bp, Homo sapiens
ctagaagcattgctagaagcagcagaaggcgtccagctcagcgcatgaaggtcgcctcagtgacccacagctcagtggtcctggccacatgcggccatcc

SEQ ID NO: 846327 - DNA, 98 bp, Homo sapiens
ggcattaccatgatggtgatcatcattgccatcggagctggcatcatcttgggctactcctacaagaggggctatcttcaccttggcagctctgaaag

SEQ ID NO: 846328 - DNA, 100 bp, Homo sapiens
ttttttaccattgtttcatcaacgtctaagaaacttggagaactccaggaaattgacaatggcccttcagctatgctaggtctataatgggaagtgtcac

SEQ ID NO: 846329 - DNA, 99 bp, Homo sapiens
caccccaaagtaccaatatgccattgatgaatattatcggatgaagaaggaggtggattctgaagagccagtctttgaggctgtcatcaactgggtgaa

SEQ ID NO: 846330 - DNA, 98 bp, Homo sapiens
attcacaaccccctgaaagcgataaacgaagaggctggggacactgagaggacccagtcggcattggcactgagcagagcccggtccaccaatgtcca

SEQ ID NO: 846331 - DNA, 100 bp, Homo sapiens
agaaatttctgccatggttctcactaaaatgaaagaaaccgctgaggcttatttgggaaagaagaagctgaacatggttatgcctccatgttaccataca

SEQ ID NO: 846332 - DNA, 99 bp, Homo sapiens
cgagtcttcggcgggctcgcgagcccggccgcggcctgctggtttcagatctccagtctatgtgctgaagaagcagcagcccaagagcagacaggtcag

SEQ ID NO: 846333 - DNA, 100 bp, Homo sapiens
gatgttcagcagcgcggcagagtcatgggggtgagccctattcccagaggcaggtggtgctgaccctgtaacccaaaggaggaaacagctggctaagctc

SEQ ID NO: 846334 - DNA, 100 bp, Homo sapiens
ggattggactgaagatggcaaaaaatcgaacaggacaatgggtagatggagctacatttaccaaatcactgaatgtggatgtcagttcacgtcaaaactg

SEQ ID NO: 846335 - DNA, 100 bp, Homo sapiens
gaaaaagaagaagaaaataaaaaatggcagtaaccctgagacaaccacttctggtggttgccactcacctgaggatgattactacagcatcccatttccc

SEQ ID NO: 846336 - DNA, 101 bp, Homo sapiens
caacagcaaagacagctgaacacagatttagagctcagagccacagaattgagtaaacaacttgaaatggagaaggaaatacggagtctcactctgtcgcc

SEQ ID NO: 846337 - DNA, 98 bp, Homo sapiens
cactgtgagaaatgtccccttccaggcacagatcgccatgaggttatctccaaagaaatattggaactggacccatgggaaaaccagtggaatgttgt

SEQ ID NO: 846338 - DNA, 100 bp, Homo sapiens
cttcatccggtcaccatctacctattcttcaaatgttcctacaacagcagccagtacccctgatgccgttgacaagtatctcgagacacctggggatgag

SEQ ID NO: 846339 - DNA, 98 bp, Homo sapiens
aaagaagatgacagcccgcagagagttaacttctgtttacatggaactcagacatctgcaaatcatgtcagcagataagcagagagccctagaagaaa

SEQ ID NO: 846340 - DNA, 122 bp, Homo sapiens
ctggctgatgatgtaaccctggacgacctgatcatggctaaagatgacctctctggtgctgacatcaaggagcccgtaggtcatcttggagggtcgtctcaagtattgaacaaaagacggaa

SEQ ID NO: 846341 - DNA, 100 bp, Homo sapiens
cggcctccgtaatgagagcccggaaccactctttgtgccgcagcttcgcaggaatagcgggttttgcagcaattgttgcatatggattatataaactgaa

SEQ ID NO: 846342 - DNA, 98 bp, Homo sapiens
ggcacaccttggccagcagtggggattgcaaagcgaactacatatggaggagtgtctgagtcttggaaattcacagagagaatatgaaaagcaggttg

SEQ ID NO: 846343 - DNA, 99 bp, Homo sapiens
atctccatcacccaccaacaacaccacaataatccacagccaagacctgcctagagctggaacgttacctccagagcgagccctgctatgtttcagcct

SEQ ID NO: 846344 - DNA, 100 bp, Homo sapiens
agtgagcaaatgcattgagcttgggtcaggacaattccatttggggaccagagatggacggtcactcagcctatggaggctgtgcacacggggatgcgag

SEQ ID NO: 846345 - DNA, 100 bp, Homo sapiens
ctgcagtgcaaagggcgtggcattgaccagacatttctcttgggaagttgtgcatctgacaggaatatagtactgtacgatatgaggcaagctactcctt

SEQ ID NO: 846346 - DNA, 98 bp, Homo sapiens
cgatccatgaaaatgctttggaaattgacggataatatcaagtacgaggactgcgagttccagaaagctgagtctgatctggattacattcaatacag

SEQ ID NO: 846347 - DNA, 100 bp, Homo sapiens
gtgggcacatggttacctgcaccaagtgcggcaagcgcatgaggactctctttctgtggatgttttggcccagctttaactcggccattgctgaacctgg

SEQ ID NO: 846348 - DNA, 100 bp, Homo sapiens
ggcccccatcctccccgccccatcggttgttgtctgggcggggcttccgttacaagatgaggtctgtgtatgctcacttccccatcaacgttgttatcca

SEQ ID NO: 846349 - DNA, 98 bp, Homo sapiens
ctcagtgttcaacatctgacagtgcttgcaggatctctcctggacaaatcaatcagcgagtgatagacagccaagcagagaaactgaaggagcttgac

SEQ ID NO: 846350 - DNA, 98 bp, Homo sapiens
acaacagcctggtcagacaaatttttataacactgcccagtcaccaagtgctctccagcaggcggtggagtacaacatcttcgagggtatggagtgcc

SEQ ID NO: 846351 - DNA, 100 bp, Homo sapiens
acgtggtctgtttatgagatttagtgtttgtgagatcctgaggcctcataggtggcacatttagaacgaacagggcattacttaactgtgaaagataacc

SEQ ID NO: 846352 - DNA, 100 bp, Homo sapiens
cttgggaaaaggagaactcctgactgattagcattcacaccaggtcacccctcctaatttctcagtgtcacaagtgcccaacatgcccagctgtccccag

SEQ ID NO: 846353 - DNA, 140 bp, Homo sapiens
gtgaagaagctacaagaaatcatgatgcatgtgatctgggccgcactggcatttgcagctattcagggaactcccagagccgagtcccccatgagcaggcaggagaaggacgcagagctggatcggaggatagttgccct

SEQ ID NO: 846354 - DNA, 100 bp, Homo sapiens
gaatcaagttaaaacctctagacaaagtaaccaaatctccagccactaacccactcctagaagcctttggaaatgcgaagactgttcgcaacaataatag

SEQ ID NO: 846355 - DNA, 98 bp, Homo sapiens
cgtgctctccgggcacgtcaaccccttcctcccgtatatcaggacctgaaggagaagaaggagaaggtggaggagaaggcaagccggaaagagcgaaa

SEQ ID NO: 846356 - DNA, 99 bp, Homo sapiens
tctctctgctgcggcgcggggaccgctgtgctctcgcttcccatcgacggtcagtgcgcacgttgtaatcagctgaggccatgtcaggagacggagcca

SEQ ID NO: 846357 - DNA, 100 bp, Homo sapiens
aaaggtgagcgccctagaccttgcagttttggatcaagtggaggctcggctacagtgttcaagaaggaagtgtatcttcatacatcaccacacctgaaag

SEQ ID NO: 846358 - DNA, 98 bp, Homo sapiens
agagaaaaaaccaacaccttcctgtgcagtcctgttggaatttgtgcatcatttctggcatggcttcaggaagcattgtgctattttacaacgacttt

SEQ ID NO: 846359 - DNA, 100 bp, Homo sapiens
ggacagcacaattggaatccaccctgtctgtgcagagatttatgatattcagactggcaacaagctgttgactctgtttaacccagatcttgccaacaac

SEQ ID NO: 846360 - DNA, 98 bp, Homo sapiens
cggcccgccgtgacccacggccgcctccggagcccgacgcgcactattcctgatcagagaactccagttgcttcaacacacagtatcagtagtgcagc

SEQ ID NO: 846361 - DNA, 100 bp, Homo sapiens
gtactgccagatgccatcctttgaagaaatatgtgttttcagtagaactcttttcattcctcctgacagtgggcctccaccattgccaacatcctccctc

SEQ ID NO: 846362 - DNA, 100 bp, Homo sapiens
gatgccgtcagtatcactgtggaagaaacattaccaaggtcctcattgcaaacagaggagaaattgcctgcagggtgatgcgcacagccaaaaaactggg

SEQ ID NO: 846363 - DNA, 98 bp, Homo sapiens
ggaaccacttgggataaatgaacctccgcatttggaaaattgcctaagaattatgacccaaaagttaccccagatccagaaagatggctgccaatgcg

SEQ ID NO: 846364 - DNA, 98 bp, Homo sapiens
ttatacttacaacaaggaagggactttaatcactgaccatcccaatatacaggggaaaatcgttgcccagggtaaactgctcttgcaggacacattct

SEQ ID NO: 846365 - DNA, 98 bp, Homo sapiens
aaagtggcatcctgggattttgttgaagccacacaaagaacaaattgcagttgtttgagggattttgaagcaccttaggagaaaagacacaggaaaat

SEQ ID NO: 846366 - DNA, 100 bp, Homo sapiens
acattaagaacttggatcccattcacctgaggcacccgaagaagagaccatccatatttccagaaagcatcatcattcaccagttacgaatgaactccag

SEQ ID NO: 846367 - DNA, 100 bp, Homo sapiens
aggacaacgagaagaaccggaagctctttgaccttctggatgtccttgagttcaaccaggtgctggaaacgtgcgtagcaacagtaggccgagtatccaa

SEQ ID NO: 846368 - DNA, 99 bp, Homo sapiens
agggaagctggggctggtgcaactttcagaagtggtcccagattgacttgatgcaaaacatcacaaaggctccatgttacacagtatgcgatttttgag

SEQ ID NO: 846369 - DNA, 100 bp, Homo sapiens
tagctcatctgtagagactgatttgcaacccttccgggaagccatagctctgcatgagcagcccgacggccatggaggctgaagagacgatggaatgcct

SEQ ID NO: 846370 - DNA, 98 bp, Homo sapiens
agacaccacacattgcgcagtcgggaccatcgccggagcctgaggacacttctctgtcgtcacaggatcgcttacacctgagacgaactacagaacag

SEQ ID NO: 846371 - DNA, 100 bp, Homo sapiens
taagtttgctgtatagtgaggatcaggagatctgatcctgattgcagaaccttccctgattacagaatcttggggccacccagtgctcctgcagaagatc

SEQ ID NO: 846372 - DNA, 98 bp, Homo sapiens
ggaatcgtatcctcctgtgttttttcagactccttggaaattaaggaatgcaattctgccaccatgatggaaggcgtctgtagaggcttctggtgaaa

SEQ ID NO: 846373 - DNA, 100 bp, Homo sapiens
tttgggaagtggagcaccgatgatgtgcagatcaatgacatttccctgcaggtattgatgaagatgaccctactgctgatgataccagtgctgctgtaac

SEQ ID NO: 846374 - DNA, 98 bp, Homo sapiens
tcaaccagatgttttcccattgttcaaggacaaaggtggcccagaattttccagtgccctgaaaaataacaacagcagttctgtagagagtttaaata

SEQ ID NO: 846375 - DNA, 98 bp, Homo sapiens
gggccaggaagcaattctggaagcgcagcaacagcaagctcccgggcagccaccgctggagtcgctggccacagtggaggagacagtggtgcgggaca

SEQ ID NO: 846376 - DNA, 98 bp, Homo sapiens
ggaattggctacagaacataataagcaaaatgatgcttcaacacccaggccaggtctctgcctcggaagtgagtgcttctgccatcgtcccctgcctg

SEQ ID NO: 846377 - DNA, 100 bp, Homo sapiens
tggttctggcacccctgtaaccataatcattccgaagcaaggcatatctttttcttgcacatcaaggaggccctcttggcaggccacctcttgtgttccc

SEQ ID NO: 846378 - DNA, 100 bp, Homo sapiens
tcttccacatggaagacggggagccctactgcgagaaagatggccgccaagaacgagtcatgtttgacaaaattacatctcgaatccagaagctttgtta

SEQ ID NO: 846379 - DNA, 100 bp, Homo sapiens
ctctgccacggtctgcccacccaacgcgaagacggtaacccgtgtgactttgactggctgggatctagcaattgggaggcagcagacttgggtaatgaag

SEQ ID NO: 846380 - DNA, 99 bp, Homo sapiens
ggcctgatagatgcctgccagtgtgtattgatgtgggaactgataatatcgtgttccaccaggtcctgcctatgggaagctgaaaaatggaatttctgt

SEQ ID NO: 846381 - DNA, 100 bp, Homo sapiens
acatttttctctcgagaaaattataaagatcattccatggctccaagtttaaaagaactacgtgttttatccaacagacggaatcagtccccaatgcctg

SEQ ID NO: 846382 - DNA, 100 bp, Homo sapiens
ctccgaactgtatgcagagccccatcagaccagttttaacttctagtcatggcgaatgatcgcaggagagcacagactggaccctgctacgatctctctt

SEQ ID NO: 846383 - DNA, 131 bp, Homo sapiens
ggccatgtcaaccacccttgcactgtggaggaggagatgtctgtgcccttgaaagaactgattgagaagcatgctgcacctgaactcctggggggaccgtcagtcttcctcttccccccaaaacccaagga

SEQ ID NO: 846384 - DNA, 99 bp, Homo sapiens
gatgctctaacagtgacctggaattttcgtcctctagacgggggacctgagcagtttgactctctagcagaagttgaagagaaatataagaaggctatg

SEQ ID NO: 846385 - DNA, 98 bp, Homo sapiens
attctgcgaggacaaggtggccacagaactgcagccctcccagcgtcgagccatgtccattggagcccgttcccaatcagctcgtacttacttggaga

SEQ ID NO: 846386 - DNA, 98 bp, Homo sapiens
attgcagtgggggctgccagtgctaccctgagaaaggtggacgtatttctcacattggcaaactgagagattttcttctggaacacaggaaagattat

SEQ ID NO: 846387 - DNA, 100 bp, Homo sapiens
ggttccccggcccacagtgggggtgtgcaaacccgagagaactggtgttcagcctcacaggcctacaacaaatccaaacacttctaaatttgctcagaaa

SEQ ID NO: 846388 - DNA, 100 bp, Homo sapiens
tgaaagaagcccagcttttccatcctggagatctacaggatttatcaaatcgagtcactgtcaaaattggagcgttattcagtatattaatgtcttattg

SEQ ID NO: 846389 - DNA, 100 bp, Homo sapiens
ccagtacatcaagttcatcagcgagactctgcggcgcatggaggaggaggaggttattcagcttctcaaggctggaaaagcgaaggaagtttcctacaat

SEQ ID NO: 846390 - DNA, 100 bp, Homo sapiens
actgaagccatgcaggacccctgggcagacctcttcagaaatagcagttctaatacccgatttacaattacattgaactacaaggatcccctcactggag

SEQ ID NO: 846391 - DNA, 100 bp, Homo sapiens
cccaaagaggagggcgtcatcagcgtctccgaggacagcccttgaagaaagctgttaggatgatgggagcacctaacctaatagcagacagtatggaata

SEQ ID NO: 846392 - DNA, 99 bp, Homo sapiens
aggagcaggagtcccctggagctggagcccgaggccaagaagctctgtgcgaagggctccgactactccaaaggattcggcgggaagtatggggtgcag

SEQ ID NO: 846393 - DNA, 100 bp, Homo sapiens
ggccaaccagagctgggaagattcgaacaccgacctcgtcccggcccctgcagtccggatactcacgccagaagatgcacttttgtcttcctggccagtg

SEQ ID NO: 846394 - DNA, 100 bp, Homo sapiens
tttccagccttccaagctctactgtgacttcagagacactgccaagcagccttagccctagtgtagaggaggatcccttttcccccagaaattactcaat

SEQ ID NO: 846395 - DNA, 100 bp, Homo sapiens
gagagaggcaccgggatcgtgaccgagaccgtgaccgagagcgtgaccgagagcgcgaatatcgtcatcgttagaaggtagttgtcctgggaacccctgc

SEQ ID NO: 846396 - DNA, 100 bp, Homo sapiens
gagagataccgccggcatgggacccactcagtcaagatcacaggtgagccagagcgaggaaggctaactccctcaccagacatcattgttttgtctgaca

SEQ ID NO: 846397 - DNA, 51 bp, Homo sapiens
ggaggaggttcgaagctgagtatgtgacagaaactggcgatggaatatgag

SEQ ID NO: 846398 - DNA, 100 bp, Homo sapiens
gtctcgctcgggagcggaaacagcggcagccagaggttcctaaagagaaagatgaaatggtagagcaagagtttaaccggttgctagaagctacatctta

SEQ ID NO: 846399 - DNA, 100 bp, Homo sapiens
ggtcaatgcatcctacaccaaactgcagttaagtgggcagaccaacatccacctcagcaaaaacttcttcctgacgaatcgcgccagggagcgctcagac

SEQ ID NO: 846400 - DNA, 100 bp, Homo sapiens
tttcccctcccttccctatccccgacgaccggatcctgaggaggcagctgcggtggcagctgctgagttctcggtgaagtaaacggagttccctctcgaa

SEQ ID NO: 846401 - DNA, 100 bp, Homo sapiens
gacccgcgccctgctccctctcagcacctgggcggacgattaacgtgacagtgtcaggtggacccacagccatcccacctccccctctggggagtgctga

SEQ ID NO: 846402 - DNA, 100 bp, Homo sapiens
ggagtctatgtctgtgtagcaaggaattaccttggagaggctgtgagccacaatgcatcgctggaagtagccaaaagcgaaattattattgacgatggac

SEQ ID NO: 846403 - DNA, 98 bp, Homo sapiens
aattgcagccacaagagccaaactcattttttgatggaatagccatggaattccatgaacacttgcacagcataggcaccaaggaaggtttgaaggaa

SEQ ID NO: 846404 - DNA, 100 bp, Homo sapiens
actgcttcagcctcacacagtgtaccagaagcagtgtgttgcctgtgagtgtgacctcggaggctcttcctcaggagctgaagtcaggatcagaaaccac

SEQ ID NO: 846405 - DNA, 100 bp, Homo sapiens
gaagtcgtgcacgaacaccaagtaagactttgaccccgacgcaggcttcagtgattgccgcggatcagaagcctgagcactttggctcgagacaattaag

SEQ ID NO: 846406 - DNA, 100 bp, Homo sapiens
acttcatctccagagcctttgccaccatgggggagaccgtaatgagcgtcaaaattatccgaaaccgcctcactggatttgaccacctggtggccataga

SEQ ID NO: 846407 - DNA, 100 bp, Homo sapiens
tggcttgcaaaaagtaaaccacgatcgttatgctgacatgtttgcaagactacacagatgatttggggacattcacttctccaaacttccccaataatta

SEQ ID NO: 846408 - DNA, 100 bp, Homo sapiens
ggagaccccgaaaacggaagcgcagggagaaggaagaggtgtttgaaaaggggaagacaggaagacccccagcgaatcaaatagcccctcttcatcctcc

SEQ ID NO: 846409 - DNA, 100 bp, Homo sapiens
ttggagaactacagaaacctggtctccctagaagaagctcattcacacagaagacccatttaatgatgaacatcaggagaggcaagaggtggaaatgttg

SEQ ID NO: 846410 - DNA, 98 bp, Homo sapiens
taaattccttaattgtcatgagcaaacatatgatgaagaatttctgaacacttttactcatctttcacaaggtacctcagccagcatggcagcctctt

SEQ ID NO: 846411 - DNA, 100 bp, Homo sapiens
cctggatcaatgagtctctgcagttgaatctgacaaagatcgaacagttgtgctcagaattcaattcgtcataatctgtccctacacagcaagttcattc

SEQ ID NO: 846412 - DNA, 100 bp, Homo sapiens
ggaaaccgactggaaagtcattgccattaatgtggatgatcctgatgcagccaattataatggtgctggagaatctggtaaaagcaccattgtgaagcag

SEQ ID NO: 846413 - DNA, 98 bp, Homo sapiens
agacagctggaggaggaacttcgaaccatggaccaggccctcaagtccctgatggcctcagaggaggagatcatgtttcactccttcggcaacaagca

SEQ ID NO: 846414 - DNA, 125 bp, Homo sapiens
cgccgattgaaaacactaatgaacttactgcgccatttgaaattcacacgcaccaacaaaatggggtattgcctaagtgtaatcttgaacatgggcggtgctgtgagtgctggtgaagacaatga

SEQ ID NO: 846415 - DNA, 100 bp, Homo sapiens
gctgtgagacatgtctgagactcctgctcagtgtagcattaagctctttcagtctcacatggcaacgaaaacaacttgtatgtcttcacaaggatcagat

SEQ ID NO: 846416 - DNA, 100 bp, Homo sapiens
ggccatgtgcatcagtcgcaagaagctggagcacagccctggcaggtgcccggcccgccccccaccctccggctcccagggcctgctggaggagatgctg

SEQ ID NO: 846417 - DNA, 100 bp, Homo sapiens
ccattccctatggagcctacaatggcccagtaccaggctatcagcaaacacctccccaaggtgtatgtgactgctgagagccgcttcagcaccttggcag

SEQ ID NO: 846418 - DNA, 100 bp, Homo sapiens
ctctccagcccagctacctcctcgccaagtgggaatgcctactccagtcttgccaacaggactccagggttcgctgggaacttctccacttcatctagca

SEQ ID NO: 846419 - DNA, 98 bp, Homo sapiens
actcctacaactcttccaagagcagctggtcgagaaaccaaatatgttcttgagcaggccagagtggaaatccccctgtttcccttcagcattgttca

SEQ ID NO: 846420 - DNA, 100 bp, Homo sapiens
gggcgaattgcagaattcttccctgatgcagtacttattatgttggattggatgctgctggcaagacaaccattctgtataaactgaagttaggggagat

SEQ ID NO: 846421 - DNA, 98 bp, Homo sapiens
agcgccctggccctctcgctgttgctggtctctggctccctcctcccagggccaggcgccgctcagaacgctgcatatctatgtgagactgaattttc

SEQ ID NO: 846422 - DNA, 100 bp, Homo sapiens
gaagatggcgcaatttcatggcatggagatgcctttcaccaaggagccccactggctgtttgggaccatggagcgatatacaaccacttcctgttgtgtc

SEQ ID NO: 846423 - DNA, 100 bp, Homo sapiens
tctccagcatatcttttctgttgtgacagacacttcacatactgctggaggttgtgcccagacatttccttcttccagagggccactgactacccttgcc

SEQ ID NO: 846424 - DNA, 100 bp, Homo sapiens
gaccgaattcagaaggatatcgacgtcgtgatccagaagtccagagctgaggactgcctgtttgcagtcactgtatatatgccttatttcctgggtccat

SEQ ID NO: 846425 - DNA, 100 bp, Homo sapiens
atggatacgtggaggtgtctgatgctcagccagcattgggcagcccccgcttcctgctcccctacccccttcacatggcagtagttctgggcaccccagc

SEQ ID NO: 846426 - DNA, 100 bp, Homo sapiens
gcctcccaaagtgctggattacagtctcttccagttgcgcctcttctccttggtggtcttcttaagcaacagactcttccacaagacagtctacctgcag

SEQ ID NO: 846427 - DNA, 100 bp, Homo sapiens
gtcaatgcctttgtgtctatcacagtggagccgattatgtttcgaggggaagtacgtttaaatgtggaagagaaaaaaacaagagctgcaagagagcgag

SEQ ID NO: 846428 - DNA, 101 bp, Homo sapiens
agttgtaaattacagagaacctaagtctgtttgcaaagcacctgaactgtctcaaggccgatatgagattatgctaagtctgcaaaatatattgaatggac

SEQ ID NO: 846429 - DNA, 98 bp, Homo sapiens
gagtcgccgctgggcctgtccgctggcgtcatgtatgaacggtgccttagcgtttgtggacacttcggactgcacggtcatgaacatcgcagagcact

SEQ ID NO: 846430 - DNA, 100 bp, Homo sapiens
gcgggagagagaatgagccagagggacacgctggtgcatctgtttgccggagggcaccgaccgtcacgagctaacttcctggaagagctttccgtctatt

SEQ ID NO: 846431 - DNA, 99 bp, Homo sapiens
ggtttcgtaggatggtttgaaacatcagcaaagggcactccacagaaggatgttattatcaagtcagatgcaccggacactttgttattggagaaacat

SEQ ID NO: 846432 - DNA, 98 bp, Homo sapiens
aaagcttaataggcaatgggcagtcaccagcattgcctcgaccacactcacctctctctgctcatgcagggaataccttggcaagcagctccagtccg

SEQ ID NO: 846433 - DNA, 98 bp, Homo sapiens
ggcagtgtgacggctgggcgacttgcgaggatgagagcgacgaagccaactgtccaggcatgggcaagaaggacgaccccaagctgatgcaggagtgg

SEQ ID NO: 846434 - DNA, 100 bp, Homo sapiens
acgcctttcagaaagtggctgacatggccaccaacacacgtgaatatgacagatacctagcatctagcaaaataatggcagctgcttaccttgaccccaa

SEQ ID NO: 846435 - DNA, 99 bp, Homo sapiens
ccatcggatctaagatccaaaaggttgtcccagttttggtgcatctcctgtctgctatcagcagtgttaggctttacattcctaaagaccttcggccgg

SEQ ID NO: 846436 - DNA, 100 bp, Homo sapiens
gaggggccctcgtgtaaattcatgcagagaagttaaatccactcaagaccgaaaaagcgccctccacctgttccgcctggggaatgccatgctgaggatt

SEQ ID NO: 846437 - DNA, 98 bp, Homo sapiens
gcgctgttcgtgctgctgggattcgcgctgctgggcacccacggagcctccggggctggtctggagcccggcactgtggtcataacagagcaggcagt

SEQ ID NO: 846438 - DNA, 99 bp, Homo sapiens
ggcacccggtgcgtgtgaagggacttgagggcagcgagatggaatcagcaagagaaaacatcgaccttcaaaacaggccgcccgcctgaagaaactaca

SEQ ID NO: 846439 - DNA, 98 bp, Homo sapiens
aaagattctgccagaagaagaggctttatttcaggctggagaacttaaatgggggacagatgaagaaaagtttatcaccatctttggaacacgaagtg

SEQ ID NO: 846440 - DNA, 100 bp, Homo sapiens
aatacgtgagcccggagcagctggctggctttgataagtacaaggcagcgcccggttaccacatggccaagctgatcatcaagttggtcacctccatcgg

SEQ ID NO: 846441 - DNA, 99 bp, Homo sapiens
ctgaaggtgatcaggctgcaggaagaagaagggacacctttcacagctatcagggaaggaagccagcagacctgcagaacttggctcccgggacccacc

SEQ ID NO: 846442 - DNA, 98 bp, Homo sapiens
gaagatccatttgtatttattcctgaagatgacccattatttccacctattgagtatcttggagatggccgcttccatctggagtctgtcatgattgc

SEQ ID NO: 846443 - DNA, 100 bp, Homo sapiens
gttcagtgcccagctctactgagaagaatgctgtggaaaggctgcagaggatcctggaaggggaagggaatcaagaagcagggaaggaactgaaagctgg

SEQ ID NO: 846444 - DNA, 90 bp, Homo sapiens
ctcatccacaccaagaatcagccacagacggaacaagcatgcagagtgatgacagacctaatgctctattaagttcacctgcaacagaaa

SEQ ID NO: 846445 - DNA, 98 bp, Homo sapiens
gtgaaggtggacacagaagccgcagcagcaatgcagagtccctggacaggctcctgccacctgtgggcactgggcgctctccccggaagcggaccacc

SEQ ID NO: 846446 - DNA, 98 bp, Homo sapiens
cacgagcagatcctggtcctcgatccgcccacagacctcaaattcaaagctgtcccagttaaatcagagttggcagttgaaattttggagaaaggcca

SEQ ID NO: 846447 - DNA, 100 bp, Homo sapiens
caattatgaaagaagtcattccttttttgaaggagtaaaagtccctcgcaatttccgactgttggaagaactcgaagaaggccagaaaggagtaggagat

SEQ ID NO: 846448 - DNA, 100 bp, Homo sapiens
gttggatctttgccagccttcgtgccgaatgggagcagggactttgaacatgtcggggatcgccctcagcagactcgcccaggagaggaaagcatggagg

SEQ ID NO: 846449 - DNA, 100 bp, Homo sapiens
gaccatcagtgcctttattgacggcggaggcagtgtgctggtagctgccagctccgacattgatggagaggagaaaacctatggtggctgtgaaggacct

SEQ ID NO: 846450 - DNA, 100 bp, Homo sapiens
tatgccatctgttttctgtggggccctgagtgatgaggagaggaacaaggattcatggaagtgaggcggtggatgaattttattccaagatagaaggcca

SEQ ID NO: 846451 - DNA, 98 bp, Homo sapiens
aagaaagtaccggtgcctcctgccaaaaagccagaagctccacctcctaaaggtgtggtacatggacggctatcacaacaaccgcttcgtacgtgagt

SEQ ID NO: 846452 - DNA, 98 bp, Homo sapiens
gcacagcgacgagcaccagctcctgaccaaccccaaggttaaccagcttcgtggcatcctcaagcttctgcagctcctaaaagttcagaatgaagacg

SEQ ID NO: 846453 - DNA, 100 bp, Homo sapiens
aatggtgcttatttctgtgaagggcgagttcgaggagaggcaatcaggatacgaaccatgaagatgcgtcaacaaggtttctagagaggaaggatctccc

SEQ ID NO: 846454 - DNA, 100 bp, Homo sapiens
tggtctccaatgccccccgactcatccgcccctacatggagcctattctgaagagctcaggccccggggcctccagcggcaccagcggagaccacggtga

SEQ ID NO: 846455 - DNA, 100 bp, Homo sapiens
aaacttccagaacatctgggagaatatttaatggaaaatcgcttggttaaaacctgacacttttaacaggagatgttacagcccagatagctcttcagcc

SEQ ID NO: 846456 - DNA, 109 bp, Homo sapiens
tttaattgcatactctatgaccacgcacatgtaaagccccttctgcaaaagcgccttaagaattgggaaatcagagaacgaaagaaaacccgggaatatgagaaagaag

SEQ ID NO: 846457 - DNA, 106 bp, Homo sapiens
gagtaaaagagataaaggagtttgaaagagttattgcgtatcttcttttccaaccatgcagtagaagtcggattaaaatttgaagtcccaacatccaagtcatcta

SEQ ID NO: 846458 - DNA, 98 bp, Homo sapiens
ggccggccggtgccagcacctttcggcttctgagacggcggcagcagcggcattcagggcttggcctctgtgttctccaaccgcacatcccggaagtc

SEQ ID NO: 846459 - DNA, 100 bp, Homo sapiens
tatggcacacacagtgggacctagacaaagggagagggtgaccgacatcccaactagatggcccactgcgtgaccttggttcagctgtccatttcctgtg

SEQ ID NO: 846460 - DNA, 100 bp, Homo sapiens
aaacggaggaactacaaccagggagtcgtgggatggagtcccctgtttccacaccagcagtgctgccaatacaccttttggtgccagtggtcaacaatga

SEQ ID NO: 846461 - DNA, 100 bp, Homo sapiens
ttatatacacaggaactttaaatcttgacagaatcgagagctccagatcatgagaaagctagatcactgtaacatagtccgattgcgttatttcttctac

SEQ ID NO: 846462 - DNA, 132 bp, Homo sapiens
ctgaacttaaggaagaaaagggcatagtgctgatgactgcagaaatggattccacatttctgtgcacagccagaggacaacacatcacacacaagaaacagttgtgctcatgtgatgggggcctcagcacta

SEQ ID NO: 846463 - DNA, 100 bp, Homo sapiens
cgcgctcgtcgtcgacaacggctccggcatgtgcaaggccggctgtgaacgtagttcctgagagatagcaaacatgcccaacagtgagcccgcatctctg

SEQ ID NO: 846464 - DNA, 100 bp, Homo sapiens
tctcctgatacccggatgtgaggcgatccgctggcgctagtctgaccctccgccaggcaaaaggaaggttttgtagtgcatccctgagcatgagcacaga

SEQ ID NO: 846465 - DNA, 100 bp, Homo sapiens
cgacttggtggaagcacacagtgacagagctgaatgaacctctctccaatgaagatcgaaatctcctctctgtggcctacaagaatgtggttggtgccag

SEQ ID NO: 846466 - DNA, 50 bp, Homo sapiens
ggagaattatgggagcgcatttccccaggtttcaccagtgatcattaaag

SEQ ID NO: 846467 - DNA, 99 bp, Homo sapiens
ttcagttcgccgatgggaaacccggagaccaaatccttgctggagtcacatcagaagccgcgcagactatcaccacggctcctgatgcctcagggcctg

SEQ ID NO: 846468 - DNA, 100 bp, Homo sapiens
gagagcgtgcccggctgcagatagagattgggaagctgagggcagagttggacgaggtcaacaagagacgacatccctattcgtacctggttccccaagg

SEQ ID NO: 846469 - DNA, 99 bp, Homo sapiens
gcgtccctcttcaagaagaaaaccgtggatgatggttggaatccattttcgtacccatacaaaaaactggattatggaaaatgggagctgtatatccca

SEQ ID NO: 846470 - DNA, 98 bp, Homo sapiens
cccacgcaaagaccatcaccactgccagccgctgcctggctgtgctgcaggatattcctcagggagctggaaaactacactgactgcccagaactggt

SEQ ID NO: 846471 - DNA, 98 bp, Homo sapiens
tgctggagcactctctgccttggccagagaagagaacagggccatgctatgatagtggaagcttatccaaaataatagatccagaagaagtgacctga

SEQ ID NO: 846472 - DNA, 100 bp, Homo sapiens
aagaattcccatttgatgttcagcctgtcccattaagggtttggtaaaggctccagtgtggtggcctatgaaggacaatcctggcacgactactgcttcc

SEQ ID NO: 846473 - DNA, 100 bp, Homo sapiens
ttccgtaacccctgcacagagcagattctgaaacttcttgacaatttgcttgcgcttataaggactgtcactgcaagcaaaacaacatgcagaaaaagcc

SEQ ID NO: 846474 - DNA, 131 bp, Homo sapiens
ctcagggccagtccaacactgataagattgaatgccaagcagaaaattacctaaatgcactctttcgaaagaaaggaaactgggaagaactggtgaagtacttgcagatggcccgtaagaaggctcgagag

SEQ ID NO: 846475 - DNA, 100 bp, Homo sapiens
cgaagacataaatccctgagtgcccgggaggagccttaacaagcgcacggagccctcaaggctgaagccgacgtagcttctctgaacagacgcatccagc

SEQ ID NO: 846476 - DNA, 100 bp, Homo sapiens
atcgacggcacctcgggggccacactgcaggcctccgcgctcagtgaatggagatgaggcgcctggtgtttggatgatcccaacttcagatccagcggct

SEQ ID NO: 846477 - DNA, 100 bp, Homo sapiens
cgtatgattttattttggctgttacaacagatgagcccaaagatgatgataattccgaagaaggcttccacactattcattcaggaaggcatgaatatgc

SEQ ID NO: 846478 - DNA, 98 bp, Homo sapiens
agccttcctcggagaacaagactgcccacctccacaagggcttcctggccctctaccaaaccgtgggctggatgacaccaaaatcctcccaggcaaca

SEQ ID NO: 846479 - DNA, 98 bp, Homo sapiens
gccgagaaggagaacaccccgagcgaggccaaccttcaggaggaggaggccaagaagcttgagagaagaaaaatttcagaaaaattgtctcaatttga

SEQ ID NO: 846480 - DNA, 100 bp, Homo sapiens
agacgatgtcatttctgtattcctctaaggtcacggaacagcaaatttctgagaagttgaagactatcatgaaagaaaatacagaacttgtacaaaaatt

SEQ ID NO: 846481 - DNA, 100 bp, Homo sapiens
agtagctgaggagctggcattggagcaagccaagaaagaatccgaagatcagaaacgtgatgatgatgatgattttgatgatgaggaagctgaagaaaaa

SEQ ID NO: 846482 - DNA, 99 bp, Homo sapiens
gacaatccaaaggtgcagaaagcactctgacaagttcagaaaagatcagtaagtctgaggaaaccttactaactccagagcgactagttggaacaaatt

SEQ ID NO: 846483 - DNA, 98 bp, Homo sapiens
gtttcttggaatttgtggaggattttattcaggttcctaggaatctcgttgaataacctgggtatcttgtggtctgaaagagaagaaattgaaactgc

SEQ ID NO: 846484 - DNA, 98 bp, Homo sapiens
tccatattgagctgttgccgctgttgctgatgtggctttatgaaagcaccctggaggggtattatgtggatgatgccttgcagggccagggagtttac

SEQ ID NO: 846485 - DNA, 98 bp, Homo sapiens
ttggtggccttgcatggtttctgcagatccactccttcacagctataccaaacttaaaggttcaagaacatgaagactcgggtgactcagaagtggag

SEQ ID NO: 846486 - DNA, 100 bp, Homo sapiens
gactgagtactggattgtccggaattcatggggtgaaccatggaggttggaaagaaccatgactgtattcaggaaggcacatgaactgaagcttctgtca

SEQ ID NO: 846487 - DNA, 99 bp, Homo sapiens
tctcctatcgtctccacccacctggacactcgtaatgtggcctttgagagaccggagagcaatggtgtgatctccgcacactgcaacctctgcctccag

SEQ ID NO: 846488 - DNA, 98 bp, Homo sapiens
ctgaatcttctgggagctgaggaaccagatatcttgaaaagctgccagaaagggaagtgtgaaatcggctgggcctactactgcacgggagcaggtgc

SEQ ID NO: 846489 - DNA, 98 bp, Homo sapiens
agagtactactgcgccaaatttggtgcctggagtaggagcttcttggacacttaatgattgttggcaagaaatgtgctgctgatctgggcctgaataa

SEQ ID NO: 846490 - DNA, 100 bp, Homo sapiens
gctcggagttggcattcatcattttctaatcatcagcatttacatgacagaaatcacctatgtttacagcgacagggctggttgatatgtgaagagccaa

SEQ ID NO: 846491 - DNA, 99 bp, Homo sapiens
gccaatacaaaaagacacaatgtgtcccagccacttttcccctggtcttcaatgccagaatggtgtttgaaaagtgccaggtggagctcaacaggaaag

SEQ ID NO: 846492 - DNA, 98 bp, Homo sapiens
aagaactcagatgccaagtgtgtggctgaactgcagaaagagccacatccatcctgaagcggcagaagcagctgcggaggaagaatgtacgctttgac

SEQ ID NO: 846493 - DNA, 100 bp, Homo sapiens
atgagaagttcaagctctacctgaccatcatcctgctcctgggtgccgtggcatgtcgatttgtccttcactacagattgacttgatgcaaaacatcaca

SEQ ID NO: 846494 - DNA, 98 bp, Homo sapiens
taaaatccattgctgctaagtactccggttcccagcttctgcaaaagaccttcactgcctggtgtaactcccacctaaggaaagccggcacccagatt

SEQ ID NO: 846495 - DNA, 100 bp, Homo sapiens
gtaatcccattggaattctcaccacaagctactgtgagttgctgcaaaataaagtccctttgctcggagatcatgaatcagacagataaaaatcaacaag

SEQ ID NO: 846496 - DNA, 98 bp, Homo sapiens
tccttttccctctccctttccctaagccatatacaacttccaaggcagcggagccccccagctctccctgcagatcggcgatgtggtgcgaatacagg

SEQ ID NO: 846497 - DNA, 100 bp, Homo sapiens
ttccttttggttccaagcagaaggaggtctgcatcaatccctaccactataagagagtagaaagccctgatataccagtatattcagagtcgcttttatc

SEQ ID NO: 846498 - DNA, 100 bp, Homo sapiens
acatccccaccccacaggatctgccccagagaaagtcctcgctcgtcaccagcaagcttgcggggtggcatggaatattcacatgggagagccgcatgag

SEQ ID NO: 846499 - DNA, 100 bp, Homo sapiens
gtgcgctgctcaaggacacggtctacaccgacttcgacgttctgggaagtcatcagtgatgagcatggcatcgaccccagcggcaactacgtgggcgact

SEQ ID NO: 846500 - DNA, 98 bp, Homo sapiens
agaatgcaacgccattcgccaggctcttcaggatctgctttcagagtacatgaacaacgaacttataatcaaaactgtattaagctcggcaagagatg

SEQ ID NO: 846501 - DNA, 98 bp, Homo sapiens
ccacgactgaggagatggaagtggcggtcagcaaggcacgggctaaagtggtctctaattaacagaagatggcaaagcccagccacagcagctatgtc

SEQ ID NO: 846502 - DNA, 100 bp, Homo sapiens
attcggtacatcctcgacggcatctcagccctgagaaaggagactaaatgtgttaaatgggcttgccaacaatatggatgatttgaagataaacaccgat

SEQ ID NO: 846503 - DNA, 100 bp, Homo sapiens
atgagcactgggttcccagagaaaagatcctcaccactaatacttggtcttcagagctttccaaactgggaagaacagtgattattgagcagagttgggg

SEQ ID NO: 846504 - DNA, 99 bp, Homo sapiens
aaccgccgcggagccctcatccctaacggtgaaagactggagttccatagactttctgaagaaaacactttgttgaaaaacgatctgggaagggttcgg

SEQ ID NO: 846505 - DNA, 98 bp, Homo sapiens
aaagatgtagctgtgatgcagttgcggaggtacactcacgtggaagctgagtgtcctttcctgacttttgacgacctcctgaaccggttggaggactt

SEQ ID NO: 846506 - DNA, 98 bp, Homo sapiens
gctcgccttggggaataatcactttattgctcagaggatgaaacaggaaactgagtcataaaacactactacaaacaagcccaaggattttatcccag

SEQ ID NO: 846507 - DNA, 100 bp, Homo sapiens
ggaattgtcctctgtggaagggactttcttttggccctaggccccttcctgcccctgtcgtcagcagggcaatctagagcagccatgatacctcccaagc

SEQ ID NO: 846508 - DNA, 100 bp, Homo sapiens
aaaggcaaaaatcccatctaccgcaactctcagttcgagagtaaaggattggattcagcatcaaaatacatctactcatattgagagctgtcgacagtta

SEQ ID NO: 846509 - DNA, 100 bp, Homo sapiens
tcttcgatgcacaggagtggccgttatggaacgcagttgtctgagggaagtcaaaagcatgcaagcctacagaaaagcattgagaaagctaaaattggcc

SEQ ID NO: 846510 - DNA, 100 bp, Homo sapiens
gtaccctggtggacgtgcacccagaggaccaggcggcgcatttaaatcaaacggtattgagatggattgggttatgaaacataatggtccaaatgacgct

SEQ ID NO: 846511 - DNA, 100 bp, Homo sapiens
acaatctgtgatgatggatggactgataaggatgcagctgtgatctgtcgtcagcttggctacaagacagctggcctgaagctcagagccggggcgtgcg

SEQ ID NO: 846512 - DNA, 100 bp, Homo sapiens
actgtccttcctgtttcgcagatgaggaaactgaggcttagagaagtttggcaaattggctaagttcctacagctagcacttctggatccagctgtgtga

SEQ ID NO: 846513 - DNA, 100 bp, Homo sapiens
aacagaattgctgcacagcgctgtcgcaagagaaaacttgactgtatacagaatcttgaatcagaaattgagaagctgacggagtctcgctctgtcaccc

SEQ ID NO: 846514 - DNA, 100 bp, Homo sapiens
ttgtcaactgctcacgacagaaggcgtctcatggcgttggaataccggctctcagcggctgggatggagaagtttatgtttgggatgtgaactcaaggaa

SEQ ID NO: 846515 - DNA, 100 bp, Homo sapiens
gcagatcaaaggataaacttgaccaggtttccagtgaaataagcaaactcttccacatagactttggatatattttgggtcgggatccaaagcctcttcc

SEQ ID NO: 846516 - DNA, 133 bp, Homo sapiens
gggctgcgggagtgccctgctctggcctcgcttgttgctcttcggggactccatcacccagattttagtccatggagaacagaatgaaatggccagattgaaagcagcactgattcgagaatatgaagataac

SEQ ID NO: 846517 - DNA, 100 bp, Homo sapiens
ctagggtcgccgccactgccgcaggaggcgtgaggcgcagacggggaagcggagccaacatgccagtggcccggagctgggtttgtcgcaaaacttatgt

SEQ ID NO: 846518 - DNA, 100 bp, Homo sapiens
tacgttaaagaaagctcaaattaatgatgcaaaataccatgagatcaatgagctgagcaatgttcctgttcctgtcatgctaatgccagatgacttcaaa

SEQ ID NO: 846519 - DNA, 100 bp, Homo sapiens
ataaactgacagaggctgaagacaaaattaaagagctggaggcctcaaaggtcttacttatccgagcccagacattgtataagaagtttgtgaagtcaac

SEQ ID NO: 846520 - DNA, 128 bp, Homo sapiens
tgctgctgctgctgctgcatgtctaccaggagaggagggaactgcggagcgggtgttcttccagagagcaaagccctgaggactggatttccctgtgcctacttcatgatcatgaattccagttaatt

SEQ ID NO: 846521 - DNA, 100 bp, Homo sapiens
aggtaggctgcgttgaggatctttgctcttccatccgcctttgatcgtcttcctcttcagccatccagtcaggatggctaaaggtgaccccaagaaacca

SEQ ID NO: 846522 - DNA, 99 bp, Homo sapiens
tgtctcctggtgaccgagcacccgcctccgggcatcttcaactccaagaaggatcaagaaggtggagaagaaaagaaatctgtgcaaaagaaaaaagta

SEQ ID NO: 846523 - DNA, 100 bp, Homo sapiens
agatttgatgcctactgctttaaacatgggagacctttaactctgaaggacatatgggaaggagttcatgagtgctataagatgcgactgctacagggac

SEQ ID NO: 846524 - DNA, 100 bp, Homo sapiens
actccgagtccatccacaacagccccaagtcatgccctacacctgagtctcatctttggactcatcacctgcctgaccggagtcctgggtgtgggcctgg

SEQ ID NO: 846525 - DNA, 99 bp, Homo sapiens
ccatggcgaggagtctctgtccgggggcctggctaaggaaaccctattacctccaggtgttggtaaatcatgcttattgctacagtttacagacaagag

SEQ ID NO: 846526 - DNA, 100 bp, Homo sapiens
cgacgtcgtgatccagaagtccagagctgaggactgcctgtttgcaggctacgtgcaggcctgccgcgccctgatgattgctgcctcggtcctgggtctg

SEQ ID NO: 846527 - DNA, 100 bp, Homo sapiens
gcagcagcaagtcccatcggaggacctccctgccctgtataccgagggaacagaaagtgaagtcactgcttttgctgtcttggatcaagaccagaaagaa

SEQ ID NO: 846528 - DNA, 98 bp, Homo sapiens
ggagacctgccgccggctcatcaaaggctccgcagacagtttctattccaaggacaatgaaggcagctggttccgctccctctttgttcacaaagtgg

SEQ ID NO: 846529 - DNA, 100 bp, Homo sapiens
agcacagtagcagaatcttccgaactgacatttttcctttgaattgtcctaaagcagttggatgggaaaagaaccagaaaggaggcatgggaccaaggat

SEQ ID NO: 846530 - DNA, 98 bp, Homo sapiens
cccccgcctcccccgctcctcccgcctggccgccccggcccgccgtgacccacggccgcctccggagcccgacgcgaaatctccgagaagcaagggat

SEQ ID NO: 846531 - DNA, 99 bp, Homo sapiens
gaaaacaaaggtagaacatggaggatcgtcaggctctaaacaaaattctgtgtctttggtgcaacactaacaaggcttgtctggactacccagttacaa

SEQ ID NO: 846532 - DNA, 99 bp, Homo sapiens
cccttcttcctgtactatgcctctcacgtgctcctctccgaattccggcccagtggggagctgttcgccatcaaggctctgaagaaaggggacattgtg

SEQ ID NO: 846533 - DNA, 99 bp, Homo sapiens
cgctacacagcaatgcatcgaggaatttttggaatttcgtaaggcaagaagtgacatgcttctctccaggaagaatcagctcctgttggagttcagttt

SEQ ID NO: 846534 - DNA, 100 bp, Homo sapiens
ttccagggcatcgtggatgcctacggcgtgggccgctaccaggaggtcaaccccgagagaagaagaaggaggttcctgctgtgccagaaacccttaagaa

SEQ ID NO: 846535 - DNA, 99 bp, Homo sapiens
gacataccactatatcagataagcttgacattacagccaagatggtgctgtcccagagacaacgagatgaactgttggattagcttttcaaaacagaaa

SEQ ID NO: 846536 - DNA, 101 bp, Homo sapiens
agcgctatggcctgggggcacatcgagggagactcaacatccagctgccactggtgacatgccaacttaccagatccgagctcctactgctgctttgccac

SEQ ID NO: 846537 - DNA, 98 bp, Homo sapiens
tgatgagaaataaggacaaaagccaagaggaggacagttcgctacacagcaatgcatcgaggcatttgcaagtaaaatcactggcatgttgttggaat

SEQ ID NO: 846538 - DNA, 99 bp, Homo sapiens
gagcggcggatctggacacccagcggtctgacatcgcgacgctgctcaaaacctcgctccggaaaggggacacctggtcattcccaaaagcaagttcgt

SEQ ID NO: 846539 - DNA, 100 bp, Homo sapiens
agcgccttcccacggagcagcactcttcaccctgcacagccttgttaggcaatgcatgaaccattgcaaacttggcaagatgcaccatacatttttattg

SEQ ID NO: 846540 - DNA, 99 bp, Homo sapiens
cttcacccatctgaagggaggaaatagtggcaggtgacagtctgcatgtgcagttttcagttccttcagtgatccttaaagagtggtctgcctataaag

SEQ ID NO: 846541 - DNA, 98 bp, Homo sapiens
tcagaactatcagaactacatcttaaggggtacaagggatttaaaggcaactgttccatgaccttcattgatcagtttaaagcactacaccagtgtaa

SEQ ID NO: 846542 - DNA, 98 bp, Homo sapiens
gctgtttcctgagttgctgtttcttgggactgcgaagctatacaggctgtcgattgagctatccacatccaggaactgacaatctgttgatgttaaat

SEQ ID NO: 846543 - DNA, 100 bp, Homo sapiens
aggagtttgacttcttggttacatcagaggaaggagacaatgaatctagaagtgcaggcgatggaacagactggggtaaatctcacctggctatcgtgca

SEQ ID NO: 846544 - DNA, 98 bp, Homo sapiens
gatgatcgtgtgtcggatgaggagaagacatgccttgaattggaacgctacctacagacggagccccggaggatctcagagacctttggtgaggactt

SEQ ID NO: 846545 - DNA, 106 bp, Homo sapiens
aagttctcaaaactctctgaaaaatggctccctccgagttaaggtcatcttccacgatgttgctgtgctgacggataagctcttccccatcgtggaggccatgcag

SEQ ID NO: 846546 - DNA, 98 bp, Homo sapiens
tcccctttgccttccgccatgagtgtaagtttcctgaggtctcccagtcatactgctggttaagcctgcagaacggtttatctggcaagactgaggca

SEQ ID NO: 846547 - DNA, 100 bp, Homo sapiens
ttacttgaacagagggaggagatcagaggcagcagtgaggatgccagagttcatgggtttctagaagacaagttttcaactgcagatacaaacatcagga

SEQ ID NO: 846548 - DNA, 98 bp, Homo sapiens
agagaaagagtggatttcagcctgcacggatggtcttgaaacacaaatggtttttggtattccaatgctgctagagttcttggagcaaaatattgcca

SEQ ID NO: 846549 - DNA, 98 bp, Homo sapiens
gcgaacccgagagcgtggagcgggctgggccaggcagttatacttaagcatgaacattgacgacaaactggaaggattgtttcttaaatgtggcggca

SEQ ID NO: 846550 - DNA, 100 bp, Homo sapiens
tccatgttcatgcatgtcttttaacccggaaacaagaagactgtccataggtctagacaatggtacaatctcagcccgccagcgccagtacctcgagttc

SEQ ID NO: 846551 - DNA, 100 bp, Homo sapiens
acctgagccgcgaggacacgggctgcaacctgcagcacatcagcgaccgggagaacatagacgatgagctttgatccaaaccttctccacaacaatggac

SEQ ID NO: 846552 - DNA, 98 bp, Homo sapiens
ctactgtgtcatcaggtcaagcaacacctacatcacctattaaaaagccgcaagatattccagatggccatcgtgctccacccccccttgtacagaga

SEQ ID NO: 846553 - DNA, 99 bp, Homo sapiens
agacattaacagtatttactgagagctcatcaggttttccctgatgaatttcacctccagactttgaatccttttcttcgggcctgtgctgagttacac

SEQ ID NO: 846554 - DNA, 98 bp, Homo sapiens
cttgataatcttgttacctgtggaaatcagaagagagaatatagtaaaaatacgcagtacagtcccagatgcttttactgactctgctatcagtgcta

SEQ ID NO: 846555 - DNA, 100 bp, Homo sapiens
aacatgattgaccagaaccgtgatggcttcattgacaaggaggacctgcacgacatgctggcctcgctggattacatgaagcagatgacatttgaagccc

SEQ ID NO: 846556 - DNA, 99 bp, Homo sapiens
ggaggtcctccatgcgcagtcatgagtcgcttcaagtttatcggttagaagttcaagccgatgtccaaaaggaaattttccccaaagacacagccagtc

SEQ ID NO: 846557 - DNA, 100 bp, Homo sapiens
acgactcccgatagtgagagacctgctcaagctctcttaagagattatgttccaaagaactactggttcagattttagctcttcccaagttgtgaaaata

SEQ ID NO: 846558 - DNA, 99 bp, Homo sapiens
gataatcctccgatcttcaatcccaccacggtgtgcgactctgacactgtgctggatccagcctgcaccatcgagatgcttcgagtcctggaggaggat

SEQ ID NO: 846559 - DNA, 100 bp, Homo sapiens
tgaaggaccaactggcccacagggattacaaggcctgtcaatcaaaggggagaagttggtagctggcagtgttgtgatggcttttgaagaagtatgcccg

SEQ ID NO: 846560 - DNA, 100 bp, Homo sapiens
agcagttgtggcacagcatctgacaaacactgtattcgttgacagagctttgatagtcgtaccatatgcagaaggaccctatgtactcggaactgggctt

SEQ ID NO: 846561 - DNA, 98 bp, Homo sapiens
acagagtatgaaccaagggttataaatcaaatgttggaatttgctttccagtgaaccagaggaaatgcctccagaagcaaagatgaggatgaagaata

SEQ ID NO: 846562 - DNA, 127 bp, Homo sapiens
cggccgtgtcagtttggggcatctccgcggtccggcccggggccccgggatctcggctgtccttcctcccgtgggaatgtaagacggacttagatattgcatacaaatttggaaaaactgtggtgag

SEQ ID NO: 846563 - DNA, 98 bp, Homo sapiens
ccaagatgtcttttcctattttaaagaatatcctccagctcacatcgaatggttggatgatacctcctgttatgatgtgattgctcaagcccaatctg

SEQ ID NO: 846564 - DNA, 99 bp, Homo sapiens
gaagattcaataacagttgcatttgaaaacaaattgtcactgctgttccaagggcacacgcagagggatttggaattcctggagagttgcctttgtgag

SEQ ID NO: 846565 - DNA, 100 bp, Homo sapiens
ctgaagaggtcaaagaaacgtggagcctgagcccttgtgaagccggcaatgacaagtctgtatggtcgccatgccgagaaaaccactgacatgccaaaac

SEQ ID NO: 846566 - DNA, 100 bp, Homo sapiens
gcacacgccggacttcgcaggcccagacgacgcgcgcgcactttggacatcagacagtgcaggagaagaatgtgatgcggcagaaggggctgaaaactaa

SEQ ID NO: 846567 - DNA, 98 bp, Homo sapiens
cctttaactctccttatgctgggtgaaaacaaagtgatttagaatctagaagagaagtaaaaaaagaagaaggtgaagcttttgcacgagaacatgga

SEQ ID NO: 846568 - DNA, 99 bp, Homo sapiens
gggcgggcaggcgagcgcggcggcggcggcgagcgtggatcccgctgcacaagttcacgtccatccgccggaccatgtcggaggttgggggctctgtgg

SEQ ID NO: 846569 - DNA, 98 bp, Homo sapiens
tttgagtcatttccttcgtacccacagtgcttcatgagagtatcaccttttgccatgatagcatttctttcattggacagttccttacaagggctcca

SEQ ID NO: 846570 - DNA, 98 bp, Homo sapiens
cttctgcactagacaatcgaaaacagagttcagaaggggtagcagcaattgcagagacagatgaatctgcagaatcagaaggtgtaattgattctcat

SEQ ID NO: 846571 - DNA, 99 bp, Homo sapiens
tcagactggaagccagaagcaggcctttctccaccaaggaaaaaacgagaagaccccaaaaccagttttaatcgcctggacctgccaccatacaagagc

SEQ ID NO: 846572 - DNA, 100 bp, Homo sapiens
ccaaggaaggaggcctgcaaattcatgacaggattattgaggtagtatcttccccagcagatgttgctgaaaaagctgacagaattattacaatgctgcc

SEQ ID NO: 846573 - DNA, 101 bp, Homo sapiens
cctgttctacctcttcagcagcttcaccatcgacctgccctggggcggctgctaccatgagtggaacacagcctgtaccagagattaaagttgtgtcaaat

SEQ ID NO: 846574 - DNA, 98 bp, Homo sapiens
tgcagggagtatcaaatatgagaaagctaggccatctgaataactttactaaggcagaaatactcagtgtcctcagtcacagaaacatcatccagttt

SEQ ID NO: 846575 - DNA, 100 bp, Homo sapiens
tgaagactgccctcatccacgatggcctagcacgtggaattcgcgaagctgccaaagccttagacaaggaagatgtgagaacagcaaacgtaattgctgc

SEQ ID NO: 846576 - DNA, 100 bp, Homo sapiens
tcatgcttacacccctggtccaaaagaaacgcaaactttgggggctcaaatgcaaggtggttttggatgtggcaaccagttgccaaaaacagatggagga

SEQ ID NO: 846577 - DNA, 100 bp, Homo sapiens
atggccgacttcgatgatcgtgtgtcggatgaggagaagacgcaggaggagggagacgcactgatgacatcgggccgctcctgcagctcgggcgcctcgc

SEQ ID NO: 846578 - DNA, 100 bp, Homo sapiens
gggacgtcctggagacagaggatgaccctggcaggtgcccggcccgccccccaccctccggctcccagggcctgctggaggagatgctggcagccagcag

SEQ ID NO: 846579 - DNA, 98 bp, Homo sapiens
acggcagccccaagaacggaaagaatttcagaaactgtggaggagtgtcactgtagattccatggacgaggagaaaattgaagaatatctgaagcgac

SEQ ID NO: 846580 - DNA, 100 bp, Homo sapiens
agccgccttggtagcagcgggtgacatggaaggggcagtacaagcttacgtctctgctcttcagtacaatcctgagattacctggggcaattgatgttat

SEQ ID NO: 846581 - DNA, 51 bp, Homo sapiens
ccaaactctccatcacccaggaaagtgttgtgaagagcgaagacttttcgc

SEQ ID NO: 846582 - DNA, 98 bp, Homo sapiens
ttgaatgccatccttatacatggagttgatattacaaccagtgacactgcaggtcctatctgactcctgtacgggatgaggaagcagagtctttacgg

SEQ ID NO: 846583 - DNA, 99 bp, Homo sapiens
cagtaacaacagcgaggaagaagaggacgacgacgacgaggaagaggaggtttctgagaacaaaatccagtctcatagcagaggagaatataatgttta

SEQ ID NO: 846584 - DNA, 99 bp, Homo sapiens
tttcacaattgcagcagatgaagatccattggtaaattgatcaggatttttggcctaccctccaaagaaaaggttcgagaaatggctgctactacctta

SEQ ID NO: 846585 - DNA, 100 bp, Homo sapiens
tgggaccgggacctgctgctggacccggcctgggagaagcagcagcgcaagggcttcaagcagcaagctcttacagtatccacagatcctgagcatcgtt

SEQ ID NO: 846586 - DNA, 98 bp, Homo sapiens
gagtatcaggaaaagaagctaaatgacgtgaccagctttgactatgaatgcacaactacagagccccggagctatgtggagtctgtggcacggacagc

SEQ ID NO: 846587 - DNA, 100 bp, Homo sapiens
gcgccgggaatcctgtacccgggcgggaataagtaccagaccattgacaactaccagaatactctggagcagtgcaatgtgtgttccaagcccatcatgg

SEQ ID NO: 846588 - DNA, 100 bp, Homo sapiens
ccacccagaatctttaggtaaatgaggagcagtatagcatcaagttctagaggaattgggagccattgcaaatctgagggtcaggaggaatctttcgtcc

SEQ ID NO: 846589 - DNA, 100 bp, Homo sapiens
cccctccccggctgccgccgccgccgcctcggccgaccagggacctgcccgcctgcggctgctccggggagactcatgcatctgtatgccgtgtgcgtgg

SEQ ID NO: 846590 - DNA, 98 bp, Homo sapiens
aaatgtgttcctcttgtccgagaaataacatttgaaaatggagaggttgctgaaaagccaggagtcaaaatgactgagcgctttgactgccaccattg

SEQ ID NO: 846591 - DNA, 100 bp, Homo sapiens
gcaacgtggttggaatgtatctggctcagaactatgatgagaatcagatgagagggaacaatcaaaattggaagttaaagtttgggatccaaatagccca

SEQ ID NO: 846592 - DNA, 98 bp, Homo sapiens
tgggcacaatccatctggtggcagagagaagaagaaggaggttcctgctgtgccagaaacccttaagaaaaagcgaaggaatttcgcagagctgaaga

SEQ ID NO: 846593 - DNA, 100 bp, Homo sapiens
taagtgaagagtcatacaaagacagcacgctaataatgcaattactgagagacaacttgacacctgccacagtgactcaggtcactcaaggaactatccg

SEQ ID NO: 846594 - DNA, 99 bp, Homo sapiens
tctgactctttgccaccaccctgatctaagcccttatcatctgcttgaatcactcggacaaacataaattgcagagattcctgactgctgacatggccc

SEQ ID NO: 846595 - DNA, 99 bp, Homo sapiens
tggctccgtgcctttatcctggccactctctctgcttccgcggcttggggtcctagcagaagatgtgactcagactgcctctgggtggggctggctggc

SEQ ID NO: 846596 - DNA, 100 bp, Homo sapiens
gaactacgaggcctccatgtcccacgtggacaagttcgtcaagttgacatcatggacatatgtgagtccatcctggagaggaagcggcatgacagcgaaa

SEQ ID NO: 846597 - DNA, 98 bp, Homo sapiens
ggcagctcatcgactccatggccaactccttcgtgggcacaaggtcctacatgtcgtctggcaagttctccggcagttctccggcgcccccaagccag

SEQ ID NO: 846598 - DNA, 100 bp, Homo sapiens
tttgacttttgtcctgattcccagtcaacagatcaagccgcctcctgccaaggaaacagtaaaaaatatggtgttatccctaagaaatgcttccctgaat

SEQ ID NO: 846599 - DNA, 98 bp, Homo sapiens
ccgccccccgcccccccagtctcggagatctcagaggcaccgactgggaggcaaggggagagccagttgcgcagagccctgcaaccagcagtccaggg

SEQ ID NO: 846600 - DNA, 100 bp, Homo sapiens
gagtggaagccatgaggccaaaggcagttgtattggtacaggcaattaaacttctggtaaggtggctgttgggtatgaaaaacaaccagtctaaatctgc

SEQ ID NO: 846601 - DNA, 100 bp, Homo sapiens
tgtggtagaggaaacaagacagttctgtctgcagaagcccattatggctgtaactggagatgacacagatgaagcctgcaggacaccagctgacagtgga

SEQ ID NO: 846602 - DNA, 100 bp, Homo sapiens
tctaagccaaggcagctgcggcaacgttgaggcagaatcaaaacctggggaaagaccttaggtattcaggaggcctcagcggggcaacagtcattgactc

SEQ ID NO: 846603 - DNA, 98 bp, Homo sapiens
agtgagccacacgccacagtcagcgtctgctgcttgtgaagaaatagcctaccaggtgcggctctatgagtggacaacagagaaggagctgcgcactg

SEQ ID NO: 846604 - DNA, 98 bp, Homo sapiens
gcccttcgccacaagaagatgggcagatcatgtttgatgtggaaatgcacaccagcagggaccatagctctcagaggcatttcatccttcatgaagcc

SEQ ID NO: 846605 - DNA, 100 bp, Homo sapiens
tacagacctcacagtgccaaatggagctggaagcagtccagtggataatgatgaacctctcctgagtggatctggtgatgtatccaaagaatgtgcagaa

SEQ ID NO: 846606 - DNA, 100 bp, Homo sapiens
ctgcccgcctttgcttcatctacagtcaggatgctggatgttcatggagtgagagtaaccagagagcacagagaaatgctggtgaaactggccaaacaga

SEQ ID NO: 846607 - DNA, 99 bp, Homo sapiens
ctcactcggttaaagcacattgtagaattgcaaataatcctggaaaagtacttggcagcgttgggaattcaagcatcctcagcctttcctacgtactcg

SEQ ID NO: 846608 - DNA, 98 bp, Homo sapiens
tggccaccagcaggatcataaaatacatgatctgggttccatcataatgaatggatccaatatggcaaatacatcaccgagtgtaaaatccaaagagg

SEQ ID NO: 846609 - DNA, 100 bp, Homo sapiens
ctttgccaccgaccccaatagtgagtggaaaggtgcatggaggactgcaacagaggagtgggggactgaagattggaatgaagatgtaggtattcccagg

SEQ ID NO: 846610 - DNA, 98 bp, Homo sapiens
gtgacacttcgggtctctcacagaggaagacttcaccataagggaaagaagagagccttgttggacactgaagaagggacggggatttctcctcctaa

SEQ ID NO: 846611 - DNA, 98 bp, Homo sapiens
ggaaaaaggagaaagttaactgaattggtgacacttcgggtctctcacagaggaaggtacttgaagaagcagaagctcaacatttatatcagtccatc

SEQ ID NO: 846612 - DNA, 98 bp, Homo sapiens
catgagggacctagaccaaagaacagaggctgcaagctttcttcctggtggcagatgacatcatggattcatcccttacccgccggggacagatctgc

SEQ ID NO: 846613 - DNA, 98 bp, Homo sapiens
tgccaggtgtccatccccgtgctgagacatgtgcattgccattgcgatttctcttctcatgatcctgatatgtgctatggctacttacggagcgtaca

SEQ ID NO: 846614 - DNA, 100 bp, Homo sapiens
gtagccgaggggcagtaaaagcatctactgggggacatcctgttgtgaaggactagcccgagccaagtcagttcccacaaagacctactcaaatgaagtt

SEQ ID NO: 846615 - DNA, 100 bp, Homo sapiens
gaggtcgccgcggggctggccgccatgcacaagctgcacttcctgcacaggtaatcattaccaaatgaggaggaaaggacgatgtcatcgaggctctgca

SEQ ID NO: 846616 - DNA, 98 bp, Homo sapiens
tctgtctttaaaagatgaggtgacttggtgattttcctggaaaattataggctctgtgtgctccgggatggagcaggtgtgcagagggtgagaaccca

SEQ ID NO: 846617 - DNA, 100 bp, Homo sapiens
aaatgttatgcagctcagcaaggtgaaggagtgtgaggaagaggctgtctgtgtcattatgtgtgcgtcggtcaagtataatatccggggtcctgccctc

SEQ ID NO: 846618 - DNA, 98 bp, Homo sapiens
aagtccagatctccatctccaaaaagaaggatggcaatggttatatcagtgcagcagaactacgtcacgtcatgacaaacttaggagaaaaactaaca

SEQ ID NO: 846619 - DNA, 99 bp, Homo sapiens
atgtactgtctcaccccgtccatgtctgagccccctgaaggggccattgacgtttagggatgtggccatagaattctctctggaggagtggcaatgcct

SEQ ID NO: 846620 - DNA, 100 bp, Homo sapiens
aaaattgctcactttgatctcaagtggtggctgctcgagcccccagaaaggtgcttggttcttccacctctgccactaattcgacatcagtttcatcgag

SEQ ID NO: 846621 - DNA, 100 bp, Homo sapiens
cagaagatgctgcgcttcctggagagccacctggatgacgccgagccctacctcctcacgggtgtgggccgaagatatgctcatgtggtgttgaggaaag

SEQ ID NO: 846622 - DNA, 147 bp, Homo sapiens
gttcaaggcaagaccgaattcagaaggatatcgacgtcgtgatccagaagtccagagctgaggactgcctgtttgcaggaatctatgcgaaagtcatttccccttaacctgggaggcagcgacacgtgttacttctgtaagaaacgt

SEQ ID NO: 846623 - DNA, 100 bp, Homo sapiens
gtttctttttccaaaagaggagctcaaaagagaaagttcatctagaaatctcaaagccatgtctcagctactcccgagcccggagaggacccacgcgtga

SEQ ID NO: 846624 - DNA, 99 bp, Homo sapiens
tggagacgagataacacggaagccaggggaggtctgaagcctgagtatgatgcggtggtgataggagcaggaatcgggcgcctgattgctgagtgtcat

SEQ ID NO: 846625 - DNA, 100 bp, Homo sapiens
ccaggccgtgcgcacccaggagaaggagcagatcaagaccctcaacaacaagtttgcctccttcatagacaagctccacatccagaggccggagatggta

SEQ ID NO: 846626 - DNA, 100 bp, Homo sapiens
tcgggacaccccggaagctgggaaatggaagccatcggtatcagattctacccctgcattctcagattcctcgagaggaacagcgcaaagtgtttgatcc

SEQ ID NO: 846627 - DNA, 100 bp, Homo sapiens
agagacttggggatggaaccgcacagagccgcgggccctttgcagctgcgattttcgccctacgttttcaacggaggatgaaccattgtggaactcaggc

SEQ ID NO: 846628 - DNA, 98 bp, Homo sapiens
agcatcggcggggtgccattcaggtaaagtaccttttattcatgtgggaaatcaagtagtatcagaacttggtccaatagtccaatttgttaaagcca

SEQ ID NO: 846629 - DNA, 100 bp, Homo sapiens
ttggttccccctccctcagcttccgccccaaaaggttaacattcaagatggtacatgctgaagccttttctcgtcctttgagtcggaatgaagttgttgg

SEQ ID NO: 846630 - DNA, 98 bp, Homo sapiens
aaaattcgatttgcaaatcattcagtgaatcccaactgttatgccaaagggcgcgggaacaaacgaagatgccttgattgaaatcttaactaccagga

SEQ ID NO: 846631 - DNA, 100 bp, Homo sapiens
caggacctgctttcggagtacatgggcaatgtgttaagtgtgatgcttccataatacatttggatgctgtcagctaagttcacttctgaactaaggggtt

SEQ ID NO: 846632 - DNA, 99 bp, Homo sapiens
tcagggctcagcagtgccccagcatggggcagagcctctcggtgccagccaggaatcttttgggtgagttgtgaggctggcacctacattcggacatta

SEQ ID NO: 846633 - DNA, 100 bp, Homo sapiens
acaaagaagacacattcgatgtgttccgacagaggatgatgcagatgtacagacacaagcgggccaacaaatagggtttactgcgaggaaatgcgtgaag

SEQ ID NO: 846634 - DNA, 100 bp, Homo sapiens
cttgtgaaaggctccatggtcttgcctccttgcagaagttgattcaagtcagttgagacgccagttgtgtggaggaagtcaggccgccatagaaagaatg

SEQ ID NO: 846635 - DNA, 100 bp, Homo sapiens
ttaaataccattccagaggttcacaaggggctaagtgatggatcttgtactccgtgttgcagattactatttttttacaccatacgtgtatccagccaca

SEQ ID NO: 846636 - DNA, 98 bp, Homo sapiens
cagctgttgccatcgttatgtttgatttagtggattacaaaaacttttcaggtattgttgcagcatctggcagtgagactgaggatgaggacagcatg

SEQ ID NO: 846637 - DNA, 98 bp, Homo sapiens
cccgccaagaaggacattttctgccccgagagttggctgaagccgacgtagcttctctgaacagacgcatccagctggttgaggaagagttggatcgt

SEQ ID NO: 846638 - DNA, 100 bp, Homo sapiens
cctttgttcaatgagaaggccacattattactggaatccaggtactccaattcagaatgatctgcaagaattttttgcattaattgattttgtaaatcca

SEQ ID NO: 846639 - DNA, 98 bp, Homo sapiens
tgccttcagtgcctggacaagacggccgagacagcggctaacaggatatgtaaggttcttgctgtgaatcaagagaatgagaggctgatggaagaata

SEQ ID NO: 846640 - DNA, 99 bp, Homo sapiens
cacactctctgttgtgccccagctcactggtggctctgtctacaaatatgcttcctttcaggatgaaaactttcggaagagaaagttgcctgtggtaag

SEQ ID NO: 846641 - DNA, 109 bp, Homo sapiens
gggcgtacaggcgcagcggccgcagcagcagcggcagtcacaggcacatcagcaaagagtgcttatcagattgttgtggaagaactgcacccacaccgaaccaagagag

SEQ ID NO: 846642 - DNA, 51 bp, Homo sapiens
agagcggcgaaccgtgggcagtgaggtctccaactggtttggcaacaagag

SEQ ID NO: 846643 - DNA, 100 bp, Homo sapiens
accgatgtctgcgggaataggacctatggcgtggtggcccagtactaccggcccctgcatggcattctacttggacaagtcaaattcaccaccaaactcc

SEQ ID NO: 846644 - DNA, 100 bp, Homo sapiens
atggattggagtgaaccggagaccccgaaaacggaagcgcagggagaaggaagaggtgtttgaaaagctccagagtttcctattttggagaagcagaact

SEQ ID NO: 846645 - DNA, 98 bp, Homo sapiens
aaagaacaggaagagatgaagaagcaaaatcaacaagaccagcaccagatccaggttctagaacaaagtatcctcagtcctacacacctccaagcaac

SEQ ID NO: 846646 - DNA, 99 bp, Homo sapiens
ttccatccctctggatccggcaaggttatcaatactctggctgaccatcatcatcgtgggactgactttggtggaagtccttggttacatgtcattatt

SEQ ID NO: 846647 - DNA, 99 bp, Homo sapiens
atgaaagttggcaaactgcagctacatcaaggcatgtttccccaagcaatgaagaatctgagactggttttgggatttgagattgacgcggtgaactct

SEQ ID NO: 846648 - DNA, 99 bp, Homo sapiens
ttagaaaggctcaacgagaacaagctatcagaggagaggagacgccgtgagcgggacgaccagatgtaccgagagcggctgcgcaccttgctggtcatc

SEQ ID NO: 846649 - DNA, 98 bp, Homo sapiens
ggaaggtgtgtccggaggtttgcaggggtgcagtgtgtctggtcttatgaggtaggcgaaaaccaagagtacatcggcctcgttctcctatattggaa

SEQ ID NO: 846650 - DNA, 98 bp, Homo sapiens
gaaattgtcccgaatccctgcaggttcacctttccttgccagtgaagatggcgtgcttggcggagtgattgtcctccgttcatgcagatgttctgccg

SEQ ID NO: 846651 - DNA, 99 bp, Homo sapiens
ggcaatattgatgaccacttcaggattgatgcctgtgaggagccaccaacatttgaagctatggagctcattggtaaaccaaaaccctactatgagatt

SEQ ID NO: 846652 - DNA, 99 bp, Homo sapiens
agaggaggaaaacaaaagctgctacttatggaagatacaaagggttgactttggcagaatatcatgaacaggaagaaattttcaaacttagactaggac

SEQ ID NO: 846653 - DNA, 100 bp, Homo sapiens
tttgaggcacctacaatagtcaaggtgttcaggtgttaatctttatgtgaaaaatcttgatgatggtattgatgatgaacgtctccggaaagagttttct

SEQ ID NO: 846654 - DNA, 100 bp, Homo sapiens
gactgtttgagcccggaagcgcagaagctgctggttatattctgggcactaaatgaaggcgtttctaggcaatttgattcgttcagagatggatttgaat

SEQ ID NO: 846655 - DNA, 99 bp, Homo sapiens
ggatttaccatgacagcaaccagggaaataagagatattgaaaccttacctccaaagcttacctatttctactccatgtaccaccataaacaaagtttg

SEQ ID NO: 846656 - DNA, 100 bp, Homo sapiens
gccgttgggataatgatgatatgacagctgtcccccagcgagcagatcacagggtagtgggcaccatcgaccagcttgtgaaacgtgtcatcgaaggcag

SEQ ID NO: 846657 - DNA, 99 bp, Homo sapiens
gaaaacttacagcaagatggttcatcttttgccctagagcaattgaagatttatgtgatcagtttggctgaaccccgtctgcccctgcagctggatgat

SEQ ID NO: 846658 - DNA, 101 bp, Homo sapiens
gtcctggggctgggcatcaacggcaaagttttgcagatcttcaacaagaggacccaggagaaattcgccctcaaagtgacccatgggctgagggcatacga

SEQ ID NO: 846659 - DNA, 99 bp, Homo sapiens
gcgagagtggcggagagggcatcttccgggaacgggacgagttcgtcatccgtgctgaggacatcccttccctcaagacttcccaagtaagaagcggaa

SEQ ID NO: 846660 - DNA, 100 bp, Homo sapiens
ggaggtggagtgttacgactccctcacggatgggggctgtgacgactatgcagagggccgagtttgcaaagttcgctttgatgctaacggagccacagga

SEQ ID NO: 846661 - DNA, 100 bp, Homo sapiens
caggtgactgaacttcctcctggccccgaggacccagggaagcacctctttgagatcagcccagggtttgaaagtattcttgaagggctgtttggacctg

SEQ ID NO: 846662 - DNA, 98 bp, Homo sapiens
cttgtggatgcctctcatcgggagaatgctcttcaggatagtatcttggccagggaactcaaacagcagatgcaggacctaatgcactgcacagcatt

SEQ ID NO: 846663 - DNA, 100 bp, Homo sapiens
tatggctcagtacctctgcaatgttcgacacatctttacgattccaggacaagcttttgtccccaaaccagaggtgacctatagcattgatggctgcgtc

SEQ ID NO: 846664 - DNA, 100 bp, Homo sapiens
aaacccgagtggatgatgatccaccgaatcctcaaccacagggtctgacatttcaggaggtggagaacttctttactttcctaaagaacattaatgatgt

SEQ ID NO: 846665 - DNA, 100 bp, Homo sapiens
ttctggaaaaggtcttcactgcaattacaaagatccatccttttacaatccctgctattattcgtccattcagcgtattgaactatgatccacctcaaag

SEQ ID NO: 846666 - DNA, 98 bp, Homo sapiens
tatattccgacgaagcttgcgggttttgactggacatgtttgtcagggagatgcctgtatattttgtgcattgaaggaattgcagtgcaacaaagtac

SEQ ID NO: 846667 - DNA, 100 bp, Homo sapiens
accaaggggtgagcagtaacagcagctacttgaagtggaacaagcctgtcccctggctctcagagacttcccaagtaagaagcggaagaggagccgctgg

SEQ ID NO: 846668 - DNA, 100 bp, Homo sapiens
actcccacacacaggatgtcaagcatgtggtttggcacccaagtcaggaggcaggcgagtggaaccacaggtgcttcccgtcctggtcacaaagtcagag

SEQ ID NO: 846669 - DNA, 100 bp, Homo sapiens
aggagttcggcgccgcttctgtggccacggcagtgagtgttgcagagagctgctggacacagtggataactacgccgtcctccagctggatatagtgtgg

SEQ ID NO: 846670 - DNA, 100 bp, Homo sapiens
atagctgctggtgaatctttggcacttctctttgaattggccagaggaatagagagtgtaagccaagatgggtgcatacaagtacatccaggagctatgg

SEQ ID NO: 846671 - DNA, 100 bp, Homo sapiens
aacaagaaatcacagtgctgagtcagtgtgacagtccatatgtaaccaaatattatggatcctatctgaaggaaccctaaggactctgcaatatgaataa

SEQ ID NO: 846672 - DNA, 100 bp, Homo sapiens
tcagccactgccttctgctgccaggaagccagctagagtggtggccgtgggtcacaaagttttcggcagtctttaccaagaccagattttagagaaattc

SEQ ID NO: 846673 - DNA, 99 bp, Homo sapiens
gctcaaccgcttcgtgcaactctccgggcggccgcacctgccagaccgatttgggatgttgcccctggatgagcctgctattcttgttagtgaattcct

SEQ ID NO: 846674 - DNA, 98 bp, Homo sapiens
acgaggcggacatgtgcgtgaggtggcagatatgctgttggagctctgtgtcaccgagttggaggatgtggccacagactcgcagagcggccgcctct

SEQ ID NO: 846675 - DNA, 124 bp, Homo sapiens
gaaagccaaagagctgaatgttatgtttattgaaactagtgcaaaagctggatacaatgtaaagcagcgtggtgagacggcactacacatggcagcccgagccgggcaggtggaagtggtccga

SEQ ID NO: 846676 - DNA, 100 bp, Homo sapiens
gcagctggatgacctcagagctctcaagcatgaacttgcctttaagctgcagggattgtcgatcagtcacaacaagcataccaagaagcttttgaaatca

SEQ ID NO: 846677 - DNA, 100 bp, Homo sapiens
gcgctcacgtgccttccatggtgggggtgaatcctttgccaatagtgcctggtgggtttcaggagtcagtggatcggtggggaaaatgctgcttaccctg

SEQ ID NO: 846678 - DNA, 100 bp, Homo sapiens
ttggaggcaggcatgattgtcactgatgatacgtaggtaacctttccagagatgtgacagaagtccttatacttcagttgttcagtcagattggaccctg

SEQ ID NO: 846679 - DNA, 51 bp, Homo sapiens
acctggcattgccttttgttgaggaacaggaaatatagtggtcattatgat

SEQ ID NO: 846680 - DNA, 100 bp, Homo sapiens
ctggccgggctgcgtcgcttcgatgccgcgcagatattgatgatgctcaaatacttccccgctcaactagagtcagacatttttcacaaagtgaagaaac

SEQ ID NO: 846681 - DNA, 100 bp, Homo sapiens
ccatagtgtatgctgctgcagatgggaccctggaaacgtctccagatgtggtgatggctctactaccggtatctgtgcctaggtttgctgtggggattgt

SEQ ID NO: 846682 - DNA, 99 bp, Homo sapiens
ttgaatgttgaagatgtccttaccagctttgacaatacaggaaatgttttctattgcgtctgcagacatggatttcaaccagctggaggcattcttgac

SEQ ID NO: 846683 - DNA, 98 bp, Homo sapiens
gctgcagccgcctcctcctccagttgcaggagaaataacaaggcattgaagaatggcagatgaacggaaagatgaagcaaaggcacctcactggacct

SEQ ID NO: 846684 - DNA, 100 bp, Homo sapiens
attttgggtagctgatcttgcattttctacgcctctacttggtcagtttctagaagacatggaagcatatgctgagaatcaaagaattccatcggacatg

SEQ ID NO: 846685 - DNA, 100 bp, Homo sapiens
agcctgagtccaaccccatccagcccaggcagtccttgtagtcctctcttggcctttcacttttggagctatgctaagaaggaatctgatcttaatggcg

SEQ ID NO: 846686 - DNA, 100 bp, Homo sapiens
cgtcctgctgctggtccctgtcatctgccaaatccggagccaagttgactgcattcagccagtgccaaaagaggagcccagtcccgctaccaaattccag

SEQ ID NO: 846687 - DNA, 98 bp, Homo sapiens
cagaacgacctgatgggcacggccgaggacttcgccgaccaggtattctgagagaagcctcacaaagtgtattggaattactattgaaaccagaccag

SEQ ID NO: 846688 - DNA, 98 bp, Homo sapiens
tcttccagaccatcatcagcgacatgaagagcctggagacacaggccccatccttcccaatggggacacttcagggagcggctctcaggtcccgagaa

SEQ ID NO: 846689 - DNA, 100 bp, Homo sapiens
gccccatcagcgaggggcgctggcagacggaggaccatgatgggaacaagatcctcctacagaattctcccagtccttggctacatcagcccacccctgt

SEQ ID NO: 846690 - DNA, 100 bp, Homo sapiens
gttgaaaaatataggccagtaaagctgaatgaaattgtcgggaatgaagacaccgtgagcaggctagaggactggaaggatcaccagcacatatgcggcc

SEQ ID NO: 846691 - DNA, 98 bp, Homo sapiens
gaacactgaatcaacatgggcaatgagaacagcacctcggacaaccagatggcaagttcttagcgtgcgtgagccaggacgggtttctgcgggtgttc

SEQ ID NO: 846692 - DNA, 100 bp, Homo sapiens
agatatgaccatgtatttgtggcttaaactcttggcatttggctttgcctttctggacacagaagtatttgtgacagttgatgctgatgtaacagttata

SEQ ID NO: 846693 - DNA, 98 bp, Homo sapiens
ttgataagaatgattcagattttgaagctaaagttaagcagaaagcactccaaagacctccgccagctgcagccctgcccctgagtccccgatgagtt

SEQ ID NO: 846694 - DNA, 98 bp, Homo sapiens
ggtggggctgcggcgcctgggactgcaccgcaccgagggcgagctccagagaatggatcttggagaatgtctgaaagtccatgacctggctttaagag

SEQ ID NO: 846695 - DNA, 98 bp, Homo sapiens
gcgcttggcgagaaggtgtgcatggatctgccaaattttatatttcagatttgtggaaggacatggatttgattgacatactttggaggcaagatata

SEQ ID NO: 846696 - DNA, 106 bp, Homo sapiens
ccagcttctgctgtccttctttgtggagagcaaggtgtaattgaaaagtgatcctctcttcagagatgtcaaaaacaaacaaatccaagtctggatctcgctcttc

SEQ ID NO: 846697 - DNA, 99 bp, Homo sapiens
tttgttacacctttcaagtgtctcggtatggcctcacaagtcttggtctacccaccatatgtttatcaaactcagtcaagtgccttttgtagtgtgaag

SEQ ID NO: 846698 - DNA, 100 bp, Homo sapiens
cttcaacatgatggagcagaggaaacgagttactcagatcctgcaaagtcctattttaccaaatgttgcaagaactctggagttcttatggtagtaaaat

SEQ ID NO: 846699 - DNA, 98 bp, Homo sapiens
tgatcctatcgttttgacgccagaaaaacacaccttgactttagtcagatacatcactgtctgttaaaggaaaccaagcgtgaagtggaagtctaaca

SEQ ID NO: 846700 - DNA, 98 bp, Homo sapiens
ttttgaggacacttgtggagagctcgaattccagaatgatgaaattgttgagaaggcaaccaaagtgcaggacatcaaaaacaacctgaaagaggcga

SEQ ID NO: 846701 - DNA, 99 bp, Homo sapiens
tttgctgctaggggaccaaggatggcaaaacgacgacaggataagttctgaacgtcgaaaagaaaagtctcgagatgcagccagatctcggcgaagtaa

SEQ ID NO: 846702 - DNA, 100 bp, Homo sapiens
aacaatcgcaaagggaaacttatcttcttttatgaatggagcgtcaaactaaactggacagggtacaagtgccctggcctctggtctgactccagtagac

SEQ ID NO: 846703 - DNA, 121 bp, Homo sapiens
gtgaggcaacatccatccatgacctcaatgacaagctggagaatgagctggccaacaaggagtccctgcaccgccagagtgttctgccagttctggataatccactgtccaagaaggttcg

SEQ ID NO: 846704 - DNA, 100 bp, Homo sapiens
gtggaggcagaggtggcatggggtgcgctcccaggccctgctgttcatcaaacgcatgtatgagaaggagcagctgcgggagtatgtggagaaatttgcc

SEQ ID NO: 846705 - DNA, 100 bp, Homo sapiens
agattcttggataccacagtatcataaaattcctctaaatgcactcaagagggccagcagtgaggacacgctcaacaagccaggaagtaccgctgcatcg

SEQ ID NO: 846706 - DNA, 98 bp, Homo sapiens
catctttacaaccagaagctcagggagaagttgaaggaggaggagaacacagtggatgctgtcttcgcaggtgccatgcctacaatggcaagcgtcaa

SEQ ID NO: 846707 - DNA, 100 bp, Homo sapiens
tttcacggacaacctcagaggacaacgaagtgttcgatactagagtaaaaggatggtttcttctggacaattatatacccacatttatctgctctgtcat

SEQ ID NO: 846708 - DNA, 100 bp, Homo sapiens
cgaggccggcacggtggccacgctggtctttcccagggaactccgatgaagtgttccaacaaaatgagcgagtgaaccaagaagaggatgacattagatc

SEQ ID NO: 846709 - DNA, 99 bp, Homo sapiens
gaagacatccttcacccctgtagggaagagagaagggcacagttacctaagtatcaacgtaatcttcctcggccaggacaggcccccatcggtaatcca

SEQ ID NO: 846710 - DNA, 100 bp, Homo sapiens
agcttctgttagtcagaaagcggttacttggtttggaacctgaaggccctatgagctgctaagccgcacatctcttgagacccagaagctcgatctgatg

SEQ ID NO: 846711 - DNA, 100 bp, Homo sapiens
atgctgtgatccaggtccggagccgggttccgccgcggccgcagcgacccgaccccacccgacaggccagaggaaccaaagaggttgttgtaaatgtgga

SEQ ID NO: 846712 - DNA, 100 bp, Homo sapiens
ttctcactttggactggtttttacttcccgacttctggggagcgcggcctgagcacgttcctgttccggccgcactgtggggaagccggctccatcaccc

SEQ ID NO: 846713 - DNA, 100 bp, Homo sapiens
cagaactttacatcaatgaacatgagttcaatacttcttcaagatcttggataattagtggtgtggaaagtaaagaagtcacaggttgggacatttagac

SEQ ID NO: 846714 - DNA, 100 bp, Homo sapiens
tttggcagttggtgaaaattactgatggctctccttccaaagcccagtggagcaggcagcaagtaaaggaggagctggccacctggctgcgaccattgac

SEQ ID NO: 846715 - DNA, 100 bp, Homo sapiens
ggagttgatgagggaggtgtttccaaagaattttttcagctggttgtggaggaaatcttcaatccagatattggccgctttgtagttcagaatgtttctg

SEQ ID NO: 846716 - DNA, 100 bp, Homo sapiens
taaaaggccactgactcctacttcctctgtatagagcaactgttgaactcagctgcctgtagcataagcagtactataatggatgtagacagcacaattt

SEQ ID NO: 846717 - DNA, 100 bp, Homo sapiens
cttgtaggtttagaagatggcaaattgattgtagtgggtgttggcaagcctgctgagatgttctcattccggaggggaagaacgtctagaaactccttct

SEQ ID NO: 846718 - DNA, 98 bp, Homo sapiens
cgagacggagctcctggcccccgaggaggagcagaggatcaatgcggttcaagaatcgattccagcggaaatcttcaccgaaccagcagtgttcctga

SEQ ID NO: 846719 - DNA, 100 bp, Homo sapiens
tttcgatcagagatcggcggagaccctcgaagtgcgcaaacttgacactcaccctgaccgggtttgaacataatctttcatgtagctttggctctcctaa

SEQ ID NO: 846720 - DNA, 100 bp, Homo sapiens
agtcgactttcctcctcgagaaattgtcacgtatacaaaggaaactcagactccagttatggctcaacccaaagaagtggaagcatcagttcacagcagt

SEQ ID NO: 846721 - DNA, 100 bp, Homo sapiens
gaaagtccttggaatggcagtgttggagaaaaattaagaggtatttcattaatcacggagccagtgtaggtattgtcaatagtgaaggtgaagttccctc

SEQ ID NO: 846722 - DNA, 98 bp, Homo sapiens
gaacatttctgggtgacactcaacaggattcccggccgaatacatcaagcaatggtaacatctttaaatgaagataatgaaagtgtaactgttgaatg

SEQ ID NO: 846723 - DNA, 100 bp, Homo sapiens
ttatcagccagacaggaggatacagtgatggactcgcagccagtcagatgtacagtccgcagggcatcagtattcaaccctatgaaaagataaaggccag

SEQ ID NO: 846724 - DNA, 100 bp, Homo sapiens
aaggcttcactatgtatggggtactcaatcctagtactgtgccctacaacattcatgccggtggtggtgtgcacattgagccccggtatagacagttccc

SEQ ID NO: 846725 - DNA, 99 bp, Homo sapiens
tggatggcctaaatgaaaatgctgttgtatgcagtgaaagagttgctgaactacaaagaaagttgttcccatgactttgccgactaaagttctaagtgc

SEQ ID NO: 846726 - DNA, 144 bp, Homo sapiens
ttcccattcaagacctgtgggccactgcttagaagctgcagcagtgctatctaaagaaggagttgaatgtgaggtgtatgcaacagcgttattgcaacaggctaacgaaaacagacaaaattcaactggaaaagcatgttttgg

SEQ ID NO: 846727 - DNA, 100 bp, Homo sapiens
agcatctgaaaggccacagcataacccacctaggcacaaagccgttcgagtgtcctgtggaaggtagctacagcaagctgggtagcaggcagatccaaag

SEQ ID NO: 846728 - DNA, 99 bp, Homo sapiens
agcagcggacgtgagcgataatggcggatatggaggatctcttcgggagcgacgccgacagcgaagctgagcgtaaagagatggggttttgccatgttg

SEQ ID NO: 846729 - DNA, 99 bp, Homo sapiens
ggaaaacctgatcccaaaattattgaaaacactcgaaggggttttggccaaattgggcgagggcacaaaataaccacttaccccttctcaccgaggaag

SEQ ID NO: 846730 - DNA, 120 bp, Homo sapiens
atatactttggttacctatgtacctgttaccactttcaaaacgatgtgcattttgtaagcactttggagccactatcaaatgctgtgaagagaaatgtacccagatgtatcattatcctt

SEQ ID NO: 846731 - DNA, 100 bp, Homo sapiens
ctgccgccaaggtgttcggtccttccgaggaagctaaggccgcgttggggtgagaccctcacttcatccgattttgagaagagggggaaaaaggaagttt

SEQ ID NO: 846732 - DNA, 98 bp, Homo sapiens
tttacagtaatttcaacagaagagtgagagatggaacccgaagaagaaaggattcgttacagccagagattggtgtatgcccacgcaggcgcgacgct

SEQ ID NO: 846733 - DNA, 99 bp, Homo sapiens
gcttaaggtcttcagcggggcgctccaggaggcactcacagcattttgaaagcgaagcagaagccgtagaatcagcggcgagcctgttgaaagaaccca

SEQ ID NO: 846734 - DNA, 98 bp, Homo sapiens
aagaaataatagaacaagggatagatttgtcgtggttcaattccagaattctttcatattatgaaaagaaagtttaccaacaaagaatgggaaacaat

SEQ ID NO: 846735 - DNA, 100 bp, Homo sapiens
cacagggggctggacaagttggaggagaacctccccatcctgcagcagcccacggagaagtacatgggctgcatcgaggttctccgctctatgcgctccc

SEQ ID NO: 846736 - DNA, 98 bp, Homo sapiens
aaaaccaagagtacagccccatgactgggcagtgccgctcccggacctccacagatcatccagcccctcttagaacttgaccaaaatagaagtaaatt

SEQ ID NO: 846737 - DNA, 98 bp, Homo sapiens
tggaactcttactaatgtctataaagccagtatgatagcaatgatggcagcctgcctagggtagttaaaagacgagtgaatgctctcaaaaacctgca

SEQ ID NO: 846738 - DNA, 98 bp, Homo sapiens
ccacttgctactggagaggatgatgatgatgaagttccagcatcccagccatcactcttccacctgctccttagagaagggaagatgagtgagtcgag

SEQ ID NO: 846739 - DNA, 100 bp, Homo sapiens
ccaacctctcgtacatcggcgagggcgcctacggcatggtgtggaggagacatcacagctttcccagatcgggaggaaaaatatggaatgtgttttaccg

SEQ ID NO: 846740 - DNA, 100 bp, Homo sapiens
aatgaacccacatgcctctaccaatggacagctctcagtccacactcccaaaagggaaaggctcgtctgtgtccctgccactctgagttatccagaaacc

SEQ ID NO: 846741 - DNA, 101 bp, Homo sapiens
tgacgatcctgtgtacccggagctatccgcacctccggagagaggctgtgggtaatattgtgaagttcttgggaatgcacccttgtgagaggtcagacaaa

SEQ ID NO: 846742 - DNA, 100 bp, Homo sapiens
gacagcccggtagagcccagctcagcgcccggcagccttcgacgcgatgttccgccggagcttgaatcgttttcctgcttagacgcctggtgactctcat

SEQ ID NO: 846743 - DNA, 98 bp, Homo sapiens
gatgaagaattgaaaagaagagtagctgaggagctggcattggagcaagccaagaaagaatccgaagatcagaaacgaacatacatatgatagttgag

SEQ ID NO: 846744 - DNA, 100 bp, Homo sapiens
cctccagtcgcgcacaagtgttatctctgtaccgggcgatgctgagagagagcaagcgtttcagcgcctacaattacaggctacccatggggacctcaac

SEQ ID NO: 846745 - DNA, 98 bp, Homo sapiens
cggtttccggatgaaacgaggagccagagatcctacagtaaggaattgtttgaagaagttatttcaaagatgcggaaggcagggatcaaatccacaat

SEQ ID NO: 846746 - DNA, 100 bp, Homo sapiens
aaatatggggaatactttcctggcacaggagacttgagggatatcggggctggcaaaggcaagtattatgctgttaactacccgctccgagacgggattg

SEQ ID NO: 846747 - DNA, 100 bp, Homo sapiens
cagcccagcgattctcagtcagatgccacttcaaatgaacaacaagagcttttctgtcagaagttgcagcagtgttgtatactgtttgatttcatggact

SEQ ID NO: 846748 - DNA, 100 bp, Homo sapiens
cagagtcaggacaagaagattcacgtgtacggctattccatggtctatcatctcatgaagaactgctgggagacagaggcgtcctttcgcccaaccttcg

SEQ ID NO: 846749 - DNA, 98 bp, Homo sapiens
cgcatcgagaagatgagctcagaggtggtggattcgaatccctacagaccaagatcactccatggatgaaatgacagctgtggtgaaaattgaaaaag

SEQ ID NO: 846750 - DNA, 100 bp, Homo sapiens
caaatgaccaatcttcaagatggtcttcagagagcaactatcctccccaggcagttcaattaacctccagaagatggctgaacctgcaggaataccagag

SEQ ID NO: 846751 - DNA, 98 bp, Homo sapiens
gagtgagcacgcaggaagatgaggagcaggagaacagaagcagaaatggctgcaagcaactgacctcactagagaagtgtaccagcatttagcccact

SEQ ID NO: 846752 - DNA, 100 bp, Homo sapiens
aggattttttatcagcgcctcaatctctactcgaagaagaaagagaagaaacgttttctcagtgccggtggtggtgtgcacattgagccccggtatagac

SEQ ID NO: 846753 - DNA, 100 bp, Homo sapiens
caagctccttaggagaaactaacaagaggaacacggtagatctagtgtggtttcagaaccgaagagccaagttccgcaggaatgagagagccatgctagc

SEQ ID NO: 846754 - DNA, 98 bp, Homo sapiens
tgtaatcgagcttaaagggaaattcctcatcaacttagaaggaacacagcctattggatccctaggctcaatatgtcctaatagttatggaagtgtga

SEQ ID NO: 846755 - DNA, 100 bp, Homo sapiens
ggactcatctgcgccacttgtccgcttcacactccgccgccatcatggtgaagctcgcgaagggagtgcatccgccccaacccttttccccctcgtctcc

SEQ ID NO: 846756 - DNA, 100 bp, Homo sapiens
aaagattctttgtagcagacactgcaaatgaagctctcgaggctgctaagagactaagtgcgcttcccttcccacttcagctctgacttgaaggacctgc

SEQ ID NO: 846757 - DNA, 100 bp, Homo sapiens
agcagtctcctggaggagcagttccagcagggcaagcttcttgaatccacattcatctcaatggaaggatcctgccttaagtcaacttatttgtttttgc

SEQ ID NO: 846758 - DNA, 98 bp, Homo sapiens
ccgggtcctcctagaaattccccccgaagaagactcccccacatctgggacacagcattgttggttttgccatgtactattttacctatgacccgtgg

SEQ ID NO: 846759 - DNA, 100 bp, Homo sapiens
catctgtggtcatgtcaacagtagcacaaggggagcatgtaacttcaaggtttaaaaacgaggtggagaggatgggttttgatatgaacaacgcctggag

SEQ ID NO: 846760 - DNA, 98 bp, Homo sapiens
ggaagcggttcctggatagtttgcggctgagaatgcacttactggctcattcaggtttgttatccaggcataagaccaagaaattatcttcagaaaag

SEQ ID NO: 846761 - DNA, 100 bp, Homo sapiens
cattcctgcagatgaaaaagtgtgacttggcagctggctaatgatgccaaaggaggaaaaacaaatggacttgaacactggtcgaatgcgtcggaaagcc

SEQ ID NO: 846762 - DNA, 100 bp, Homo sapiens
agtgaaggccgggggctgccccctccccccagatcatccccccgaaggagtggaagccgcggcagacgtatgatgacatcgacgacgtggtgatcccggc

SEQ ID NO: 846763 - DNA, 98 bp, Homo sapiens
cgctacacccagggaacaggtggtgatgaggaggaagaacgtgcaaaacgtgaggagctagagcgaatactggaagagaataaccgaaaaattgcaga

SEQ ID NO: 846764 - DNA, 99 bp, Homo sapiens
tcatggtacttacatttttgtgggctggataataaacaaggtttgttatccaggcataagaccaagaaattatcttcagaaaaggacattcatgaaatc

SEQ ID NO: 846765 - DNA, 100 bp, Homo sapiens
ctctgcggctggtccaggccttccagtacacagacgagcatggggaaggaggtgttgcccatggcccccggggccccacaagttactactacatgctgcc

SEQ ID NO: 846766 - DNA, 98 bp, Homo sapiens
aattatcaacaccaaaaagctttctgctagggacatcaactagtcaggcagtcttccgtctccagtctggcatctgccatctcttccgagaaacttta

SEQ ID NO: 846767 - DNA, 100 bp, Homo sapiens
cagtgtaacacacatgcttgtccacacgacgctgcatggagtactggcccttggagctcggtcagaagagatcaattctacagaaatttccagtggttct

SEQ ID NO: 846768 - DNA, 100 bp, Homo sapiens
cggtgtccagcggggctgcgggctacggctgttgactgtgccctgtccacggtgcctcctgcatgtcctgctgccctgagctgtcccgagctaggtgaca

SEQ ID NO: 846769 - DNA, 98 bp, Homo sapiens
gaccaaggcaatatactgttacgatccagttgaagattactggatgcacgtacagaatacattcagccgtcaggttatggataaatatggagagttct

SEQ ID NO: 846770 - DNA, 98 bp, Homo sapiens
gaagttgttcattgtttgtcaccacaaaaaggacagttgacatgaagacaatggagactgcagagaaactggctagatttgttgctcaggtgggacca

SEQ ID NO: 846771 - DNA, 98 bp, Homo sapiens
cgaggcttgaagagtggagagaactttaagttgttatatgacttggcagatcaactacatgctgcagaactaaggccacatttcagccttgcatctga

SEQ ID NO: 846772 - DNA, 100 bp, Homo sapiens
gcgagcacagagcctcgcctttgccgatccgccgcccgtccacacccgccgccaggtttaaacttacacgaatcgctttctggaggaggaggggacccgc

SEQ ID NO: 846773 - DNA, 98 bp, Homo sapiens
gatattcctgaacgcaagaaaagctccactgtccctagtaggctatttggaagctccagactgtttagaagacctggacagccagaaagtcattagtc

SEQ ID NO: 846774 - DNA, 100 bp, Homo sapiens
gaacagtgccaagttagatgccgattacccacttcgagtcctttattgtggaggcatttattaatacagcaaaagaaatttatgaaaaaattcaagaagg

SEQ ID NO: 846775 - DNA, 100 bp, Homo sapiens
gttcatcacaggactccccagagatgccaggaaggagactgtggagagccacttccggctcatggaatccaggtccttctataccgcttacctgcagaga

SEQ ID NO: 846776 - DNA, 100 bp, Homo sapiens
gtggcagcaggggactcctgacacttccccttccccaccgaaccgcgttaccatggtttgggaccacagagatcacgtcaacaacagcctgttccaaata

SEQ ID NO: 846777 - DNA, 100 bp, Homo sapiens
agaactatatcagccagtattctgaaattgctatccagatgatgatgcacatgagcaccactaggctggacagcgacagagtgtcgtctgcctctagcac

SEQ ID NO: 846778 - DNA, 99 bp, Homo sapiens
tggaagaagagtagatattacatattgagtttctgagcgatgtaccaattttgacaactgaagacgacatggtttctcagccagcaaaaatactaaact

SEQ ID NO: 846779 - DNA, 100 bp, Homo sapiens
tggaaatcagtttgctgaaattaatcaacgattcttgaagttgaagaaaagacagaaagaatttactttcaggttttcttacctaaagggagcaaagaga

SEQ ID NO: 846780 - DNA, 100 bp, Homo sapiens
ccaagatggcggacggcccggatgagtacgataccgaagcgggctgtgtgccccttctccacccagaggctggactctgtgaagctgagcaggagcagat

SEQ ID NO: 846781 - DNA, 100 bp, Homo sapiens
agcatacattatgctgccgcctatgggcacaggcagtgtctggaattgtttggaaattttagcattcaggtgccaggaatgcagatgggacagccagtgc

SEQ ID NO: 846782 - DNA, 98 bp, Homo sapiens
gactcaagacacacaactcataacagttgatgaaaaattggaggcatgtgagcgcagcctggcagagatggagtcctcgcaccagcaggtgatggagg

SEQ ID NO: 846783 - DNA, 98 bp, Homo sapiens
ggatttggctggcgtcccgctgggcctttggagtgacgctgtgggaactcatgactctgggccagactccctacgtggacattgaccccttcgagatg

SEQ ID NO: 846784 - DNA, 100 bp, Homo sapiens
attcttattgttattttcccaatttttgctatactcctgttctggggacagtttggtattaaaagtatcgatatcctgaagcttgtagcagcccaagtgg

SEQ ID NO: 846785 - DNA, 98 bp, Homo sapiens
catgggcctgttcctggcccgcagccgccacctacccagtgaccatgatagctttatagcaggccaaatcgactcttgtctggtgtgccactgtacaa

SEQ ID NO: 846786 - DNA, 100 bp, Homo sapiens
gtgtgaattagaggtttataaagccacttaccacttcatctttgcacagaaaaacttctttacagccattgcctagaatacttcaagtctttcaatttta

SEQ ID NO: 846787 - DNA, 100 bp, Homo sapiens
tcttttatattggcctgagaggagagtggactgagaaattgccccaatgatggccaagacaattaaagctttcaagaacagattctcccgacgataaact

SEQ ID NO: 846788 - DNA, 100 bp, Homo sapiens
cgctgatggtgtcggtgagcgcgtttcccgcctgagcgcaactagcggcgggtcgtgggcacctccaggtgagcgtcctgaccaccctggagcgtaggtt

SEQ ID NO: 846789 - DNA, 100 bp, Homo sapiens
aagaggagaaagatgcttctaagggttgtaaagaagaaagttctaccctttctgtcaaaatgaagtgtgattttaattgtaaccatgttcattccggact

SEQ ID NO: 846790 - DNA, 99 bp, Homo sapiens
gatggggacggtttcgtccgcatcgaggacttcatccagtttgctacggtctacggggcagagcaggccaagcccagcattcggtgcttcattaaaccc

SEQ ID NO: 846791 - DNA, 99 bp, Homo sapiens
ttcaaacgggcagggctctaggaaacatatgttacgatagccacttaattcagtgcacaaatgagatgaatgtgaacatcccacagttggcagacagtt

SEQ ID NO: 846792 - DNA, 100 bp, Homo sapiens
agcgagttgcagatctacacttggtaaagaagcttcttaataaagtagtgctccgtgaatcttgcttttaccggaaattaacagacacctcaaaagatga

SEQ ID NO: 846793 - DNA, 99 bp, Homo sapiens
tattaaagctgcagttacaactggagcctggattttaactggaggagtaaacacagtgatccttacgtgagagtgacgttatatgacccaatgaatgga

SEQ ID NO: 846794 - DNA, 99 bp, Homo sapiens
ttcccgcaagcccagacaatgccggtggaggaatttgtggctggctggatctctgaatgtgtgcccagtccttcacagaagccacatggcagttacccg

SEQ ID NO: 846795 - DNA, 100 bp, Homo sapiens
gcattcctgactttaatatgctcttcaacctagagaattgcctaaggaggtgccagaaaagcttccagaggctgctgattttggaactacgtcttctctg

SEQ ID NO: 846796 - DNA, 100 bp, Homo sapiens
ctgcgaaggagcccaggctcaggggcgcccgctcctcttctcagggaatttgaggatccaagggatgcagatgatgctgtgtatgagcttgatggaaaag

SEQ ID NO: 846797 - DNA, 99 bp, Homo sapiens
gaggtggagggtggaacgcgggcgcctgaaggagttgttgtctcggcagcgcccgcggagacgtgaagaggttatatttcacactatgtgctgactgta

SEQ ID NO: 846798 - DNA, 100 bp, Homo sapiens
aaggagttgaaaacagacttcattaaaattgaggagtttttagaacaaaccctggctcctccaaggtatgagagaatcgaaatcccaatccatattgtac

SEQ ID NO: 846799 - DNA, 100 bp, Homo sapiens
aatgaatccttcagcttcaaagttccccaagaagaactggaaaatgccagcctagtgtttacagcattttctgcattagcaaatatcgacctggctttag

SEQ ID NO: 846800 - DNA, 99 bp, Homo sapiens
tccaaagcagtcgtaagaagaggtcccaatcccccactctttccgccctaatggaggtctccagtttcggcacgtctgagaatggtggatgtggtggag

SEQ ID NO: 846801 - DNA, 99 bp, Homo sapiens
atcgtccagtgctcgtgctcagcctggccttgtgtcctgaggtccaagatcttcttgaaggttgtgaactgcctgacctcccctctagccttctgctcc

SEQ ID NO: 846802 - DNA, 100 bp, Homo sapiens
caagactctggagccagtcttgaggtcctacatctccgaaagcaagctcttctagaagttgaatgtgacagtgatgataacatgggtgccaaaaatactt

SEQ ID NO: 846803 - DNA, 98 bp, Homo sapiens
catccttcacctttgtacatcctggccgtgtttgacatctttacgataacgaaggaggcccaacttcattcaataaggagcctgacggatttatccca

SEQ ID NO: 846804 - DNA, 100 bp, Homo sapiens
ctcggggctctcacgctttctgctcaagtcctgtcctcttctgaccaaagagcgtgccttcagatgctgattcttctgctgccagtaataaaataagtgg

SEQ ID NO: 846805 - DNA, 100 bp, Homo sapiens
cccaaagaccaaggtccaacttacctcctaattggatccaagcatgaaaaggtggacccccaaaagtacaagggcatatttaacggattctcagttacac

SEQ ID NO: 846806 - DNA, 100 bp, Homo sapiens
cgcggagatctctctcatctcgctcggctgcgggaaatcgggctgaagcgactgagtccgcgatggagtgatgatgatgatgattttgatgatgaggaag

SEQ ID NO: 846807 - DNA, 98 bp, Homo sapiens
gaaaacaatgaagattatttacaatgctaccctgctttttctggtgtcctgaacctggaagttgtgctttttaagagcccagcattacatcaacatgc

SEQ ID NO: 846808 - DNA, 99 bp, Homo sapiens
gatggcccacaagcagatctactactcggacaagtacttcgacgaacactacgagtaccgaaaagcagcatctgttatagcaaaatacccacacaaaat

SEQ ID NO: 846809 - DNA, 99 bp, Homo sapiens
ggcttagcgcactggaggagcggcgggcttcagacaggttgtacgtggacactataaaggtcagcaaattggcaaagtagtccaggtttacaggaagaa

SEQ ID NO: 846810 - DNA, 100 bp, Homo sapiens
ggtgtgggcgcgtcaggccgcgacgagggcgctgaggtccacaaggcgattacaatttccagtcccctaaccacagacctgactgcagagctgtctggtg

SEQ ID NO: 846811 - DNA, 100 bp, Homo sapiens
cgagggtcccacgactcccgcctgtaccttctccaggcaaattccgttcccctgcagcaccatctcctttggctcttcggcaaccagtgaaagcatttag

SEQ ID NO: 846812 - DNA, 98 bp, Homo sapiens
gccctctgccccttttggggaaccttctgcagatggacagaagaggcctactcaaatcctttctgaggggtctcgctctgtcgcccaggctggagtgc

SEQ ID NO: 846813 - DNA, 100 bp, Homo sapiens
aggtggcagacagtggctatcagcggggggagaacgttactgtggagaaccaaccaagaacatacatatgatagttgagaaagacacatattctgatcat

SEQ ID NO: 846814 - DNA, 100 bp, Homo sapiens
actgggtggacattacccaagattttgaagaagcttgtcgagtgctcggccttgttctccccatgtgggccatagccctcatttcctttggtgtcgccct

SEQ ID NO: 846815 - DNA, 98 bp, Homo sapiens
aaggggtctgtcctgcgtgtgcagtctttgagttggatgcactaggtgatgagcttctggctgatgaagacagttcttatttggatgaggcagcatct

SEQ ID NO: 846816 - DNA, 99 bp, Homo sapiens
ttctctccctccttctgcaaggctatcatttcacagctgattcctgggagcacatccatttcattggcaaggtaaattaaaagatcttgggaacttggt

SEQ ID NO: 846817 - DNA, 100 bp, Homo sapiens
ttcattttacctttatgtatttacctacggagtcagattcctgaaaaaggaacccaagccagaccgtctccttgtattgaaagtactatggaatgatttc

SEQ ID NO: 846818 - DNA, 100 bp, Homo sapiens
tttgatggagaaggttcgaggcctacagaacctagcctatcagctggggctggatgagttgtaaagagaatggcgctttcactgtgcttgttgacaacta

SEQ ID NO: 846819 - DNA, 128 bp, Homo sapiens
gcggctgatggcggatcaggatcggaagcctgcgtaactttctcccttgatccgggagtctttccactggactatatcatcatgtacatagaaaaatccaaaggattctgcaaaaaagctactagaac

SEQ ID NO: 846820 - DNA, 100 bp, Homo sapiens
atttaacttcaacaagctggtgatgcccaactacccattcatcaacattcggtcaagtggttggagtcagttagctgctatgcactgtgttatgctgcca

SEQ ID NO: 846821 - DNA, 100 bp, Homo sapiens
cccgggcttcggcccccaccagagactcgggaaacagtgcttcttagtcctacgtcagcagcagtttaatgtccaggctcttgtggcggtgggagaccat

SEQ ID NO: 846822 - DNA, 100 bp, Homo sapiens
acagatcctgagacgcattgctaagtgcaatgggaaatacctctcatcaaattactcagaggtttttgactaaaggccagaatgcattggtagagctaca

SEQ ID NO: 846823 - DNA, 100 bp, Homo sapiens
tgccaactccaatttaccaaactagcagtggacagtatatttcagatacaccacctccaccgccacctgtggaagaaccagtctttgatgagtctccccc

SEQ ID NO: 846824 - DNA, 98 bp, Homo sapiens
cctacagccccgacgaacatttctgggtgacactcaacaggattcccgtgtattcctaggaaagataaaggatgcatttgatcgaaacccggaacttc

SEQ ID NO: 846825 - DNA, 98 bp, Homo sapiens
gagccagggctgagccggctgacaacagaagctgcacacatacatgtaagagaagcaaaaatgtcagatgatatcaggaaaaggtttgaatttccaaa

SEQ ID NO: 846826 - DNA, 100 bp, Homo sapiens
ccagaagctcctccgtcagttagatttgtaacaaaaattaatatgaacggaataaataattccagtgggatgatatatggtacatttgctggagttggct

SEQ ID NO: 846827 - DNA, 100 bp, Homo sapiens
agattcgaacaccgacctcgtcccggcccctgcagtccggatactcacgccagaaggcatttctcattgcaattgtggtaccagatgttgagacattatg

SEQ ID NO: 846828 - DNA, 100 bp, Homo sapiens
gaacgaagccccaaagaggaccacgtggagagtgcctgatctgactgcagccatgagcagcaatgagtgcttcaagtgtggacgatctggccactgggcc

SEQ ID NO: 846829 - DNA, 99 bp, Homo sapiens
aagaaaatcaaatggcatccggggatttctgctcacctggagaagggatggaaatacttcaacaaggaaaaagctcctcaatttctgaagagaaaggtg

SEQ ID NO: 846830 - DNA, 100 bp, Homo sapiens
gggttcttggtctcactgagttctagaatgaagctgcagaccctcgcagtgagtgttacagctcttaaggccggtctaattgaagccaacggagaactca

SEQ ID NO: 846831 - DNA, 98 bp, Homo sapiens
ggatacaatatagaggcagaaggccttttttcaaagaatacttcagagagtcagagttgtgccagaagtctcttaatggcagatagaatgcaaatagt

SEQ ID NO: 846832 - DNA, 101 bp, Homo sapiens
aagctgccctgagacggtgtcccgccgaaagatgtcatctgggtgattctcagtgtggaggtgggtggacttttaggagtaacgcagcagctgtcatcttt

SEQ ID NO: 846833 - DNA, 100 bp, Homo sapiens
gagcttcgcggggatcctgctggactgcacgaaaaatctagattgaaaatgtcaactccagacatcactgtgcttctggaaactataaagaggaagtggg

SEQ ID NO: 846834 - DNA, 98 bp, Homo sapiens
gagatgaacctgctggagatgtacagcctgaaggatgagatgggcaacctcagggtggcaattttaagcccagccagaaaggttttgcaggaggaacc

SEQ ID NO: 846835 - DNA, 99 bp, Homo sapiens
agcaattggagctctaaaattaaacatcggggacctacaggttacaaagtgctacctgggcgatgccttccgctgtgccagctgcccctaccttgggat

SEQ ID NO: 846836 - DNA, 100 bp, Homo sapiens
tgtgggaaccctctggaacaagaaagtggcttcacataccttcctgaggctttcatggaggctggcaatatttggagttcttacaacatggcagacattg

SEQ ID NO: 846837 - DNA, 100 bp, Homo sapiens
cttgtatctgtccccacaattattctgaaaacgttgtgtgacgtgatcctcatggtccaggaaagaaagatacctgctcatcgtgttgttcttgctgcag

SEQ ID NO: 846838 - DNA, 100 bp, Homo sapiens
tgggaatctggagcttcagtaacaggcccccttgtatttgctggtcctatttttatgaaccatcgagaacaggctctagccagactcagatcccatccag

SEQ ID NO: 846839 - DNA, 99 bp, Homo sapiens
ttccttgcttctttggagaatgatatcaaaccacttattgacatgtgtgtgcagaactgtggtccaagtttccagtctctgattgtgaagaaggaattt

SEQ ID NO: 846840 - DNA, 98 bp, Homo sapiens
aaatgggacattagttcaagtagcaactatatcagttccatcaccgggacagcttcaacacagggtccacagcgtggggcatttcccagtgtctatcc

SEQ ID NO: 846841 - DNA, 98 bp, Homo sapiens
cagccttgtgctggagcaccagccagacaacatcaaggctctcttccgcaagggcaaggtgctgtccctggacaccaacatcacaaaccaggtgaata

SEQ ID NO: 846842 - DNA, 100 bp, Homo sapiens
gaaggggtccgagggcagtctgtgtcaaacgcaggtgaccaagaatatggcccaggtgaccaaagccctggacaaggccctgagcaccatggacctgcag

SEQ ID NO: 846843 - DNA, 98 bp, Homo sapiens
gcagctattgctggacggccagtgggagagcgaggcctgagcctctgcgtctagttgatattcactgatggactccaaagaatcattaactcctggta

SEQ ID NO: 846844 - DNA, 100 bp, Homo sapiens
tctaatcacagactcctatttgaagtatttgacgaaaatagactggctctcaaaattagagagatgtgtaattgtccaccactgtctaatccagaccctc

SEQ ID NO: 846845 - DNA, 99 bp, Homo sapiens
cgaaagacagaggtgctgctgaaggtcatggatgccaagcacaagaactgcatggaggtgggggagtctgtgttccacacaacccgctgggtgcccccc

SEQ ID NO: 846846 - DNA, 99 bp, Homo sapiens
gacgagtgaaagtaacctggttgtcacatacccccagcttagaggtgcttcaccctgccccaaggttttctgtctcaactggtctctgacaagcctctg

SEQ ID NO: 846847 - DNA, 98 bp, Homo sapiens
tggctgttatgatcagcacaaccttgttgcatgccagataaatgatcagtcccatgagcgtgtaagcaagcgtctacatcagagattccaggcctggg

SEQ ID NO: 846848 - DNA, 98 bp, Homo sapiens
ctgaggttgctcctcccggggcccttcccgggcaaggggacggcaaaacagaacagaaaggcggagataaaaagaggggtgttaaaagaccacgagaa

SEQ ID NO: 846849 - DNA, 100 bp, Homo sapiens
aataacctaatcggcttcatgtcactcgccacactcacagatattcaaatagaagccttgctgatgagagcctgtgagcccataattcagaacttctgcc

SEQ ID NO: 846850 - DNA, 98 bp, Homo sapiens
tgcaacaagttaagctgaagaccgaagcaagagctggttcaggtacaagaactgcaaagccctccaagagccagccaggtggtaaaggattgtgtgaa

SEQ ID NO: 846851 - DNA, 100 bp, Homo sapiens
aaaataaaaaaattgcaagagagagactattttcgttattacaagaatgctggaagccaagcttgcacattctaggcagccatttggaagattcttctct

SEQ ID NO: 846852 - DNA, 100 bp, Homo sapiens
ccgagacttcccgggcagcggctacgacctgacggacaccacccaagcagatgtgcagagcagcccacacaaccagttcaccttcagacccctcccaccg

SEQ ID NO: 846853 - DNA, 100 bp, Homo sapiens
actgtggaacttttaagtggagtggtggatcagaccaaagatgggaagatgagaatgtgcctactgctcctgatcctccaagtcaacatttacgtgggca

SEQ ID NO: 846854 - DNA, 107 bp, Homo sapiens
aacaagaatgctcgcgccacgctcagcagcatcagacacatgatccgcaagaacaagtaccgccccgacctgcgcatgcccagtgtgccatcataatgtttgatgta

SEQ ID NO: 846855 - DNA, 100 bp, Homo sapiens
aaacctaaccatgaagacttgaacttaatacagcaagaaagaccatcaagtttaccagtaaatgaaattgcctttataaatacccttgaagcccagaata

SEQ ID NO: 846856 - DNA, 98 bp, Homo sapiens
aggaggagcgggccgtggaggcttcgccgcctagtctgaagttgacaagcagcagcatagaccctggtctgagtatcaagcagttgggtggtttgtat

SEQ ID NO: 846857 - DNA, 100 bp, Homo sapiens
gcaccatgatgcaaaccaagaccttctcctcttcctcctcatccaagaagatgggcagagcgttgacagacccagagactggtaccggagaatgttccag

SEQ ID NO: 846858 - DNA, 100 bp, Homo sapiens
ccgctcaccaggagccccttgccaggagtgttcaagatgctctctctggaccgatcccactatcagccaaatggccgatgacacagtggcagaactggac

SEQ ID NO: 846859 - DNA, 100 bp, Homo sapiens
cagataatcagagtggaggaagtacagccagcagctcctgggtaaacagactggtctgactcctgatatgccgtacttggacccctgcctacccctagac

SEQ ID NO: 846860 - DNA, 99 bp, Homo sapiens
ctttgtaggagcatggcttggagcacttcctattccactggattgggaaagaccatggcagttggaaattttgcagaagagtaaagaagaagcttacgt

SEQ ID NO: 846861 - DNA, 98 bp, Homo sapiens
tgagctgtcgctcttcagcaagacccaaggccaacaagtgtctagcctcaaaggatgccattggaggagaatctatgcctattccaactattgataca

SEQ ID NO: 846862 - DNA, 100 bp, Homo sapiens
tggtcaattgccatgcacacttctggagctggaagtcgagtgtgctactcaactcaggagatttggagacaaactgaacttccggcagaaacttctgaat

SEQ ID NO: 846863 - DNA, 98 bp, Homo sapiens
ctcctgtgtgcatggctttccaaaaggacatgttggcagataaattgaacatgactccagaagaagctgaaaggtggattgtaaatttgattagaaat

SEQ ID NO: 846864 - DNA, 100 bp, Homo sapiens
ctcctacaagaggctggagatctacctggaacccttgaaggatgcaggtgatggtgttcgatacttgctcagattttgagatacagagtgaaaatgggga

SEQ ID NO: 846865 - DNA, 99 bp, Homo sapiens
tatgataagctgagcagagccctgcgatactattatgacaaggttgatagatccacagactcaagtatcaagggccaatgtaagtaccgcatacaggtt

SEQ ID NO: 846866 - DNA, 100 bp, Homo sapiens
ggaaagaggagaggcacccgatatatgttctctaggccttttagaaaacatgtgtttgggaaatgggaagtaatgacagctggcacctgaactaagtact

SEQ ID NO: 846867 - DNA, 119 bp, Homo sapiens
tgtgcccctggagaatcaatgcctagaggagatctcggagcccacccctgaccctgacttcctgactgccctaccacttatgtcttggatgaagatgaacctcgattccttgaagaagt

SEQ ID NO: 846868 - DNA, 100 bp, Homo sapiens
aaaccctggtgctccagacaaagatcttagtcgggactagccggccaaggatgaagcctcacttcagagcagcccgacggccatggaggctgaagagacg

SEQ ID NO: 846869 - DNA, 100 bp, Homo sapiens
ctacatccaggagagaatgctgacagtcctgcaggtcacggtctagatcacattctcgatccagaggaaggcgatactctcgctcacgcagcaggagcag

SEQ ID NO: 846870 - DNA, 99 bp, Homo sapiens
tgaagcattttaccagaagctgcttgacctttccactgaggatgacgggacagtggccttcgcgctaacgaagatgtcatttgtcagagtgaaccgctg

SEQ ID NO: 846871 - DNA, 100 bp, Homo sapiens
atggaagcggcggcgacgccggcggctgccggggcggcgaggcgcgaggagctaggttccgaggcctcatcctgctgctgaccttcctaatttacgcctg

SEQ ID NO: 846872 - DNA, 115 bp, Homo sapiens
cacatccaggttgttttgaagcaaagtccaagcattgtatcacttcatctgcaaatatttcaataagtacccaaaagcgtgaccaaatgttacttgaagatgtattacctgttca

SEQ ID NO: 846873 - DNA, 99 bp, Homo sapiens
cctttcctcaggagtcatttctgttccgcacaggcctgctgaactgggtgctttatataggagtatttgatttctgacactggaggacaacagctctca

SEQ ID NO: 846874 - DNA, 100 bp, Homo sapiens
attggccgcggaaaccgatctgcccgttgtgtttgtgaaacagagaaagataggcggccatggtccaaccttgaagcttctcaataggtttggcatggac

SEQ ID NO: 846875 - DNA, 75 bp, Homo sapiens
agaaaaccccgaggagccctgttccaaagcctcctggaccgtccaagaagaagctcttcgtgggcggtcttgact

SEQ ID NO: 846876 - DNA, 99 bp, Homo sapiens
gcgcccaagtggcggggactactggtgcctgcgctgaaaaaggggaaagtgcagtgttgcccttctgaatgagacagaatcagtattgtcatatcttga

SEQ ID NO: 846877 - DNA, 98 bp, Homo sapiens
gccacaatacgaattgaaaaaggaaccccaaaggagtcgattcttaaaaactctgcttctgttgaagagccacgtggtgctttgctggttaagttggc

SEQ ID NO: 846878 - DNA, 98 bp, Homo sapiens
ggaccactcagtggcacagaccaagcctgattgacagaaatgttggtaaatgttctgagtatttgctctgatgatgaactaatgactgaaggtgaaga

SEQ ID NO: 846879 - DNA, 50 bp, Homo sapiens
actagatgagaccaaaatcattctgacatactttgaagacaaccctaggg

SEQ ID NO: 846880 - DNA, 98 bp, Homo sapiens
ctatcagcatgggaaacttacactgctgcataatggagaacctctctacattccagtaacccagattgcaacacctgctcggtataccgtgactttgg

SEQ ID NO: 846881 - DNA, 98 bp, Homo sapiens
aatgaaggcccattggtatatattcaggaaattattcctggaggagactgttataagtacaagttgtgcaaagtgaggaagattactgtgggagtgaa

SEQ ID NO: 846882 - DNA, 99 bp, Homo sapiens
agatttgtggtgcgttctgagccgtctgtcctgcgccaagtcgcaatgtatctgctgagcaaaaagatgaaaacaaagaagcaaagcctcgatccctac

SEQ ID NO: 846883 - DNA, 98 bp, Homo sapiens
ggggatggagcccctgcgggtgctggagctatacagcggcgtgggcggcatgcaccacgcgctgagaggattttttatcaagcagaaatgcatcgaac

SEQ ID NO: 846884 - DNA, 100 bp, Homo sapiens
tggagccagtcttgaggtcctacatctccgaaagcaagctcttctagaagttggtttggaattcacccagttgcaggccgaatgcctggtcagcttaatg

SEQ ID NO: 846885 - DNA, 98 bp, Homo sapiens
caagctggagtttacacaggcaaactgtcagaaaagagtagcctgggctgtctggaaatctgagtgtgctggaattgatgttcgtctgtgtgatgttg

SEQ ID NO: 846886 - DNA, 100 bp, Homo sapiens
agtgtgtgttgatcttggcttgattcagtctgccttgtaacagttgagccccatatgggggttggcaggcagcagagaggcccctttcaaggtgttcggg

SEQ ID NO: 846887 - DNA, 99 bp, Homo sapiens
aacagtgtcataaggtaaaataaggatgctggaggtcagcagattggcttcttgctaggaagctgtggtattgccttagctcttaccagtgaagtttgt

SEQ ID NO: 846888 - DNA, 98 bp, Homo sapiens
ccagtcatgagcagggcttctctgtggaagtggaaatggatattgttgaaaaactggtgaaaatgataccttgtgagcatgaagacctgctgaatatc

SEQ ID NO: 846889 - DNA, 100 bp, Homo sapiens
aggaaataggatttaaccgctctctgcctcccagacacagcggtcctggggttgccttccagatgaagatctatcaaagatttgaagtcttgtgtatgtg

SEQ ID NO: 846890 - DNA, 100 bp, Homo sapiens
gggagacaaagcagcgcccgtctgcttcgggcctctggaatttagcgctcgcccagctagccgcaggctgttactgaggcggagacacgggtgatgattg

SEQ ID NO: 846891 - DNA, 98 bp, Homo sapiens
cgctgctggacacctggatcgggtctgtcatacacggaggaagcggctgttctacgtataagtgtgctagcggagtgtctagattgtcctgaattgaa

SEQ ID NO: 846892 - DNA, 100 bp, Homo sapiens
ggtctacaaaggtctggacactgaaaccaccgtggaagtcgcctggtgtgaactgcaggtgtatgtggaatttgatgatcttgaatgggataaacgagag

SEQ ID NO: 846893 - DNA, 132 bp, Homo sapiens
caaaattctggggacgctgggaacactgaatcaacatgggcaatgagaacagcacctcggacaaccagtggatgaggatcgcagtacggaacctgaccgattgcaggtgtttcacaagagagccatcatgcc

SEQ ID NO: 846894 - DNA, 118 bp, Homo sapiens
tctgccgtgccacctgctgcacccacgaatctgcccacccctcctgtaacccagcctgtttcacttcttggttctgcacttttaaaagaaaagcaaaggcatcgattacataagttct

SEQ ID NO: 846895 - DNA, 99 bp, Homo sapiens
tgcttaggaatccgggcttttgctgatatgcatgcatgtaccgaccttctgaacaaggccaacacctatgcagggtttcatcaccttaaatggttttga

SEQ ID NO: 846896 - DNA, 98 bp, Homo sapiens
taacttactagaacagaatctgatccgagtcattgagcctttttccagagtacaggcatacctccattaatgccaggtgttcctcctctgatgccagg

SEQ ID NO: 846897 - DNA, 99 bp, Homo sapiens
gaacaatgggaaccagtctttcaaaatggaacagatatggagcccagcttgtatcgttgcagtaacatcgattgtaaggcttcacctctgacctttaca

SEQ ID NO: 846898 - DNA, 100 bp, Homo sapiens
tccattcaggaatcagaagcttttttgcctcagagaaaatacggtacatgtccccatggaggatatggcttgggcttggaacgattcttaacgtggattc

SEQ ID NO: 846899 - DNA, 100 bp, Homo sapiens
cccgcccccgccgccccctcccggggctgaccgcgtcgtcaaaggtctagcacataccgctccaagggctttgacgtcacagtgaagtacacacaaggaa

SEQ ID NO: 846900 - DNA, 99 bp, Homo sapiens
gcagggggtggctctggggctgacccgggaagtcggggtctccttcgccttctgtctttctgcgtcctactagcagccgagagacacacaagattgcag

SEQ ID NO: 846901 - DNA, 100 bp, Homo sapiens
tctttttaaatttatgaactcgaaatgaagcggaaagcagatatgcgcgtcagcatactttggcgggtatttaccttgctgtggattgctgactggatgg

SEQ ID NO: 846902 - DNA, 100 bp, Homo sapiens
gggagtcccggcgttcttccgctggctcagccgcaagtacccgtccatcatagtcaactgcgtggaagagaagatgatgggaaatattgcagcagttgca

SEQ ID NO: 846903 - DNA, 100 bp, Homo sapiens
aaacagtggactcaacttcaaagacgttctcaaggagaaggcagacctgggcccacctgccgtttgctgtcattggcagcacagaagaactgaagatagg

SEQ ID NO: 846904 - DNA, 132 bp, Homo sapiens
ggtgagctcaccgcccagcccaaaccaggagattgcgagggagcgatgcggtgcagcgcgagctccactggttcaacagcctctcctccagtttcgaccccagtcacaggacacaagagaatggtcatcccg

SEQ ID NO: 846905 - DNA, 100 bp, Homo sapiens
gcagtccctctctgtccgggcgctgcaggagatgctggctaacaccgtggagaaatcagaagggaaagcaacagcccacaattgcctgcattttctttcc

SEQ ID NO: 846906 - DNA, 98 bp, Homo sapiens
tcgctttccctctcgcgtctctggctgcaggttgacatcatggacatatgtgagtccatcctggagaggaagcggcatgacagcgaaaggtctacttg

SEQ ID NO: 846907 - DNA, 100 bp, Homo sapiens
gctgggaccacagtggacaccaacatcacccacccatttgagtttgacttctatctgtgcagccacgcaggcatccaggcaacagcattattgagaaaag

SEQ ID NO: 846908 - DNA, 100 bp, Homo sapiens
agcctgatgctaccaaaggtggaaagtcctgaagaaatccagtggcagtagcagccagatgaagaagcggccaacatctgcagtgggctacaagaggcct

SEQ ID NO: 846909 - DNA, 100 bp, Homo sapiens
cggcaccgccatccccatttctatggtcctcctcacctatggccgctggcagccaactgggtacatggaaaactcagtctcctacagcgcaattgaagac

SEQ ID NO: 846910 - DNA, 100 bp, Homo sapiens
gatcacctgctaatacacgatacctttttcttggcgattatgtggacagaggttattttagtatagagtgaacagcctatcccgctccaagtattgttaa

SEQ ID NO: 846911 - DNA, 100 bp, Homo sapiens
gtggccttttgcgaggtgctgcagccatagctacgtgcgttcgctacgaggattgagcgtctccacccagttagagccacagctgaaacaactacaaaca

SEQ ID NO: 846912 - DNA, 98 bp, Homo sapiens
aaagccctcgtcagaaggaattatgggaaacgcagaggcagaaaccaggtcgtggagggcccccaagacccaacagagggatgccgcaaatgaacact

SEQ ID NO: 846913 - DNA, 98 bp, Homo sapiens
tattgaaacattaaatgacagttcacataagaagttcttcgatgtatctaaacttggcaccaagtatggctgaagccgacgtagcttctctgaacaga

SEQ ID NO: 846914 - DNA, 100 bp, Homo sapiens
aagctggccttggcagtttcggtgcatagaaaatcaggctcttgtcaggatggtgaagctgttcatcggaaacctgccccgggaggctacagagcaggag

SEQ ID NO: 846915 - DNA, 100 bp, Homo sapiens
atgcgaccttaaacaaatttatagaggtagctacagcaagctgggtagcaggcagatccaaaggatatcatgaagtttccagggcctttggaaaaccaga

SEQ ID NO: 846916 - DNA, 100 bp, Homo sapiens
ccaggctgcttcccctcccgggtgaggagcgtcctgagactaaggaaagagcctggaaaatggagcagacctggacgagaccccatatcatgtgaacctc

SEQ ID NO: 846917 - DNA, 98 bp, Homo sapiens
tcacttatctcttctttaacttatcgtggaaataaaacagctgttttgcagattggactacaagtttaaaattggtggtgaatggtggacatggatcg

SEQ ID NO: 846918 - DNA, 100 bp, Homo sapiens
atgctggcatgattggaaaccaagttaatcgaaaagttctcaattttgaacaagctatcaagagatttaccgcattgtttctcagaagcaaatgtcagac

SEQ ID NO: 846919 - DNA, 99 bp, Homo sapiens
ctttatcctggtcatcttctatttccaaagccttcacctaccaccatatccaggagatcatggtccagctgctgcggacagtgaaccggacagtcatca

SEQ ID NO: 846920 - DNA, 100 bp, Homo sapiens
ccagtccgggcaggggcagcgggagccggccggatggaggagatgtataagaaagctcatgctgctatacgagagaatccagtctatgaaaagaagccca

SEQ ID NO: 846921 - DNA, 100 bp, Homo sapiens
gactggagtccaacaaggaaggaactcggtccttccatagtgacgccccccaaggacatctggaatgtcactggtgcccaggtgtacttgagctgtgagg

SEQ ID NO: 846922 - DNA, 100 bp, Homo sapiens
gtggggtcactggtgtatgtcatggaagcttctcttttaaaaggactaaaacatgctaacatagtgctacttcatgacatcatccataccaaggagacgc

SEQ ID NO: 846923 - DNA, 100 bp, Homo sapiens
aagtatggaaatagcagtgcttcaggaatagaaatcttggcaatcgaaaggaaatgggtcctgatgaatatgaagagatggaagaagaggaggaggagga

SEQ ID NO: 846924 - DNA, 98 bp, Homo sapiens
aaacccctgcagtacttgaagatttgcataaagccaacattcgcaccgtcatggtcacagtcaccaggagactaaagtccatcaaaaacatccagaaa

SEQ ID NO: 846925 - DNA, 100 bp, Homo sapiens
atgagaaccctacttgcctaaatgaggaatgtctttcctaccatctaaaatacgaaggtttctggctgggggggaaaagtatatgggaatgtggcaagat

SEQ ID NO: 846926 - DNA, 60 bp, Homo sapiens
tgccgcagagtcggcacctgaaggacatggagggcccagctggagacagccctgaagtgg

SEQ ID NO: 846927 - DNA, 101 bp, Homo sapiens
gggagctgcagaggtacgccgaggaggttgggatcttcttcactgcctctggcatggatgaggctatggagttactagtagagaaagcaatcagcagtgct

SEQ ID NO: 846928 - DNA, 98 bp, Homo sapiens
tgtttcagagcgtttgggtcctctgaggccccttgaccaggctctctatgagaacatgctggtggagctgccctttgcaggcttctttctttccaagt

SEQ ID NO: 846929 - DNA, 100 bp, Homo sapiens
attaatttcaacgagaaggcgatccataaggagggctgtgctgaagtttgctgctgccactggagccactccaattgctggccgcttcactcctggaacc

SEQ ID NO: 846930 - DNA, 100 bp, Homo sapiens
tgagaaacaggcacacaagtgtgaggagttgctaaatgctcagacccttatagttgcctggatcaaagcaaacctaaatgtgtacatctcccgagaactt

SEQ ID NO: 846931 - DNA, 99 bp, Homo sapiens
tttgaccagcagatgcgtcagaacttgttcactacctggtcccatcacctacagcaagccaacatccagccaaactggcaagacgcagtcaagaacggg

SEQ ID NO: 846932 - DNA, 98 bp, Homo sapiens
tcttagttgaattttcaccagttgaaaaattggagcttgctcctgagaccaaggctgtcattcattggattatggatattccttttgtgctttctgcc

SEQ ID NO: 846933 - DNA, 100 bp, Homo sapiens
gatcgcggtagcatacggatccgagtcctgcgccgagtgagaggagaggctggcagtgttgctaacaaccacaagcagaatttgatgacggtggcaaacc

SEQ ID NO: 846934 - DNA, 98 bp, Homo sapiens
actgactgcctatgaatttgctaaacttaaaagcaagctggttctctgggatataaataagagtgttgcggagataggaacatgggagagaaacaatc

SEQ ID NO: 846935 - DNA, 100 bp, Homo sapiens
cgctcaagtgatctttgataagaatgattcagattttgaagctaaagttaagcaggagaactctcttcagaggtcgaagacgacgagaagatgacaggat

SEQ ID NO: 846936 - DNA, 100 bp, Homo sapiens
aggagtagtggccaggtttgtggagttcctcaaacgaaaagagaattgtacactgcaggttaaaccacagcttgaagaaaaaacaaatgagacttacgga

SEQ ID NO: 846937 - DNA, 98 bp, Homo sapiens
gcagcagccgccaccaccgccaatacctgcaaatgggcaacaggccagcagccaaagaagcacaagactctggccttgatcaaggatgggcgggtcat

SEQ ID NO: 846938 - DNA, 100 bp, Homo sapiens
tttgtagaaaccaacctcttcctggaggagattcagcttgtctttaaccgaactgtcacactgaaggaagacccaggaaaggtgtgagctggaagcactg

SEQ ID NO: 846939 - DNA, 100 bp, Homo sapiens
gggaggagtttcatgaagagcccaaaacctattacgaactcaaaagtcaaccgctgaagagcagtgctggacccaaaggagacaacatttatgaatggag

SEQ ID NO: 846940 - DNA, 98 bp, Homo sapiens
agttcagcttttagagcaggtgtatgatcttttggaggaggaggatgaatttgatagagagaatcccacgtggcgaagtctcgattttggaattatgc

SEQ ID NO: 846941 - DNA, 99 bp, Homo sapiens
actgctcctgctggccgcctggacggctcgggcgctggaggcttgcattgatgacaatgttgatatggtgaagtttctggtagaaaatggagcaaatat

SEQ ID NO: 846942 - DNA, 98 bp, Homo sapiens
gattacggggctgcccgccgggaaaccgtgcaggattggtggtgattttcatagccaagtgctggagaatctggtaaaagcaccattgtgaagcagat

SEQ ID NO: 846943 - DNA, 100 bp, Homo sapiens
gcctcttcctttttcgacgcctccgccgccgcctgaggaggcgagctagccgggagttacaccgccaccgccagatagtcgtgcaagcactgcagtgttc

SEQ ID NO: 846944 - DNA, 100 bp, Homo sapiens
cgcgccgctgctatcgcgcgccagaaggccgagattgccgcctccaggctccaacccggcgcggcccggaggcttcccgggggccaacagcccaggacct

SEQ ID NO: 846945 - DNA, 98 bp, Homo sapiens
tttactgcaacttcacagccggggggtcgacatgcgtcttccctgacaagaagtccgaagggttgccaccttccagagaagaggtacgagatgacaag

SEQ ID NO: 846946 - DNA, 100 bp, Homo sapiens
atggccccaggtgtaagcgcagaaagcaggcgaacccgcggcgcaataacggtgccttagctggaccaattattgtggagccacatgtcacagcagtatg

SEQ ID NO: 846947 - DNA, 98 bp, Homo sapiens
ggccgcccgacaccccaatctcggtgaatctggattgggaaagtcgacattaatcaactcattattcctcacagatttgtattctccagagtatccag

SEQ ID NO: 846948 - DNA, 100 bp, Homo sapiens
ccgagcccgacctcgggcgccccgccggtcacctccgcgcggacaccagccttatgccagcctggaccatcttggaggcagtgtaggatcatggaagaac

SEQ ID NO: 846949 - DNA, 99 bp, Homo sapiens
gagaggcaatcaggatacgaaccatgaagatgcgtcaacaaggattaagttgtcatcattctgggaagaaaaaaaaaacattaatgaagaggccaataa

SEQ ID NO: 846950 - DNA, 100 bp, Homo sapiens
ggaacatgagatctctcatctaaagaagaagttggaaaatgaggtggaacaaaggcatacacttactagaaatctagatattctgaaaaagagttccacg

SEQ ID NO: 846951 - DNA, 100 bp, Homo sapiens
aaactgaattttgagaacacatttcttcgcctaaagctaaataacttgacttcctgctatatcctgatcatcactattgcaaatattgcaaatttggcca

SEQ ID NO: 846952 - DNA, 100 bp, Homo sapiens
cggcctttgccccaatcttgtgtgggcactgaagggggactacaggttcgagagttctgatctacaatggccaactggacatcatcgtggcagctgccct

SEQ ID NO: 846953 - DNA, 98 bp, Homo sapiens
catgtactctgggacctttgactgtttccggaagactctttttagagaggaccgggtgacttttagaagaatcatagtgaaaaataatgcaaagaaga

SEQ ID NO: 846954 - DNA, 100 bp, Homo sapiens
cacgtctctaccgagcacaaactccacgaagccaacgcccaggttcacaatggtccgtagtggaaaaaatggtgaccttcatcttaaacagattgcatat

SEQ ID NO: 846955 - DNA, 99 bp, Homo sapiens
ttttgtgaagcacagcacggtactggagaacacggatgggagtctaatctccaacacttatcagtactggaattaacagactctggtgctttaatggca

SEQ ID NO: 846956 - DNA, 100 bp, Homo sapiens
cggcccgcgggggagccccgggagccgcacgggttatgtaccgaaggactctaccgtgtcagcgggaataaaactgaccaagacaatattcaaaagcagt

SEQ ID NO: 846957 - DNA, 100 bp, Homo sapiens
tttggaagaaacaggtggcctgggagtagatattgtcctagatgctggagcttcttggacacttaatgattgttggcaagaaatgtgctgctgatctggg

SEQ ID NO: 846958 - DNA, 99 bp, Homo sapiens
ccccagatgcccaccgggatggagaaggaggaggaatcgatggaatggggcgagtccttgctcaagatgtatatgcaaaagacaatttaccccccttcc

SEQ ID NO: 846959 - DNA, 100 bp, Homo sapiens
atgatatacagctgttgcatatttgtgtactgcatttttccaagagataacttcaccaagatgtccagtgataggcaaaggtccgatgatgagagcccca

SEQ ID NO: 846960 - DNA, 98 bp, Homo sapiens
agcctactggtgactcggctgcaggttacgactatggctatgtctgcgtggagttttcactcttggaagatgccatcggatgcatggaggccaaccag

SEQ ID NO: 846961 - DNA, 132 bp, Homo sapiens
ccggatgttcggtgcagctgccagatccgctgatctagtgcttctcgaaaaaaaccttcaggcggcccatgggattaaagcaaggagagccaatcatgactggcaaaacacagaccagcaacgtcaccaata

SEQ ID NO: 846962 - DNA, 99 bp, Homo sapiens
aaaagggtccatgacaatgagcatccagtggaaaacacgccagcttcaaagcaaggaaggatctgagtctctccctgcggagacagccctgaagaactc

SEQ ID NO: 846963 - DNA, 99 bp, Homo sapiens
gacaaccaacggctcaagaatttcaagaacaaaggccgcgacttggagatcttgtggagaattttgatgaggcttccaagaatgaggcaaactgaattg

SEQ ID NO: 846964 - DNA, 98 bp, Homo sapiens
aagaactccgtgcccagatgctcataaggattgtcctctttctacaaaaggcatctccttggaaacaatgccatctttgaatgtgagagataaaccta

SEQ ID NO: 846965 - DNA, 100 bp, Homo sapiens
aatgtggcaattgtaaggccatcgattgttggtgccagttggaaagaaccttttccagtagctacagcaagctgggtagcaggcagatccaaaggatatc

SEQ ID NO: 846966 - DNA, 100 bp, Homo sapiens
tgtgaggtcgaaacaggataaaattttgatagtgtgtgtaccatatcagtggcgtgtaactatgctcatcattgttcttgtcaatgcctttgtgtctatc

SEQ ID NO: 846967 - DNA, 100 bp, Homo sapiens
cttgaaaaagctgccctgagacggtgtcccgccgaaagttggcaaacatgaattgactgggcataaagtagctgtgaagatactcaatcgacagaagatt

SEQ ID NO: 846968 - DNA, 100 bp, Homo sapiens
atttcaacatgcctctgacaatctctagtatattgatgatgttaagaagttcaaaccgggttacctggaagctactcttaattggtttagattatataag

SEQ ID NO: 846969 - DNA, 100 bp, Homo sapiens
ttcccactgtcatagctataggctgtccagtcttgagggagctgcaggaacaggaaaaagaggatggagatgaagatgaggaagctgagtcagctacggg

SEQ ID NO: 846970 - DNA, 100 bp, Homo sapiens
gaaggaagaggtgtttgaaaagctcttttgaaacagatggtcaccatgtttagatattagcagtcccgtatgtgcatgtctgcatttgaaaatggaagag

SEQ ID NO: 846971 - DNA, 98 bp, Homo sapiens
gccgcctccgccgagccgcccgccgggccgctctcgccgcccgggccccgcggctgccgcagcattcccgggaaggctcacccatgacatcagcctgg

SEQ ID NO: 846972 - DNA, 99 bp, Homo sapiens
atgacttgtcatgcaatcaaaatgaagttgaagcatcagctcaccatctgctacctggatatgctgatgaccagtgaggagcgccggaagcagctgagg

SEQ ID NO: 846973 - DNA, 100 bp, Homo sapiens
gccgccgcgccgccatcatggacaccagccgtgtgcagcctatcaagctggccagggtacaaggaaatggtagaactagtgatctcacccagcctcactg

SEQ ID NO: 846974 - DNA, 98 bp, Homo sapiens
tcatccccaaagcgcttaatagaagtttgaattgatgcatgttgatgagtttattgatgaactattgcacagtgagagagtctgtgatatcattctgc

SEQ ID NO: 846975 - DNA, 98 bp, Homo sapiens
ctggcccggcgcgccctgtgcccctgaagaagcgcggatacgatgtcaccaggaaccctcatctcaacaagggcatccgcttcgatcctgaaattccg

SEQ ID NO: 846976 - DNA, 99 bp, Homo sapiens
aatctcccataggcactcagtcaagccagtgatggtgtctggagtgcatcataaattgaactctgaactttggaaacctgaatccttcaggaaagagtt

SEQ ID NO: 846977 - DNA, 100 bp, Homo sapiens
tgcttatgcagatagttactattatgaagatggagaatccacattcatctcaatggaaggatcctgccttaagtcaacttatttgtttttgccgggaaag

SEQ ID NO: 846978 - DNA, 100 bp, Homo sapiens
agtggagcaccgatgatgtgcagatcaatgacatttccctgcaggtacaaattctgagctgtctaacccctctgaaacggaatctgagcgtaaagacgag

SEQ ID NO: 846979 - DNA, 51 bp, Homo sapiens
tgagactcctgctcagtgtagcattaagtccctgactccacctcttctgcc

SEQ ID NO: 846980 - DNA, 100 bp, Homo sapiens
gagacttgatggcttgtgcccaaacaggtgtggcagagaagacacagcttctgaaattgagtgtacctgctacttttatgcttgtgtctttagatgaagg

SEQ ID NO: 846981 - DNA, 100 bp, Homo sapiens
ctttcatggagttcacagaagagtcgaggagataatgttaattcaagactctcgaagagaagcttcagtgcagatggatttgagatgctacaaaacccag

SEQ ID NO: 846982 - DNA, 98 bp, Homo sapiens
gttgaaattcttaaggatgctttcaaatcaaatgactcacagcagggcccttctagcccaatccagagctgtaccatggcagagacaagagaagagga

SEQ ID NO: 846983 - DNA, 99 bp, Homo sapiens
tcaccgccgctagggtcgccgttgcatcggtgcagggcaagattgtagaaggcatgaaacaaaaaatgtggagtattgaaaatattgccttcggttctg

SEQ ID NO: 846984 - DNA, 99 bp, Homo sapiens
gcagcactactcagacatcttcaccaccacagagcccatcaagcccgagcaggtctctacattggctggcgctgcccccattacctatgggactgtttc

SEQ ID NO: 846985 - DNA, 98 bp, Homo sapiens
cgggatctcaggtcctcgggggcggcggccacgccaaggacggtaaggatggggatgataagaagagacctgtgatcattcatcgagccattttggga

SEQ ID NO: 846986 - DNA, 100 bp, Homo sapiens
ggacgcgtgtacgacctaacgtcattggcacaggaatacaaggataaggatgacattcggctgctgccgtcagcattgggtgtgaagaagagaaaacgag

SEQ ID NO: 846987 - DNA, 98 bp, Homo sapiens
ttcttcattatgaaaccactagcaatcccagctaaccatggagttatgggccagcaggagaaacactcagtgacgcatccaaagaagacattgacact

SEQ ID NO: 846988 - DNA, 100 bp, Homo sapiens
cgacaacgaagagaagcagatgctgcattattttcagaactccacagaaaacttcattcacagtgccctctggtggtcagaagatgctgtgctgtctcgt

SEQ ID NO: 846989 - DNA, 100 bp, Homo sapiens
ctgggtggcaggtcatcagggagacttgtgtgctctctctgcttgaagaactgaacaagtggtatgcaatctgccttagtgatgttggagattatgaagg

SEQ ID NO: 846990 - DNA, 99 bp, Homo sapiens
gtgagaagatagaggcagaactgcaggacatctgcaatgatgttctgtatgacatgatgggaagaaatcagactgctgtgagagaagagatgattctcc

SEQ ID NO: 846991 - DNA, 98 bp, Homo sapiens
gcaggagctgttggagctttgcagctgacctacatctcgaaggctccatctactctttgaagcttctgcccagcttgcattgtttctaggagaacctg

SEQ ID NO: 846992 - DNA, 100 bp, Homo sapiens
ggcctcctacacctacctctctctggcctccagccagctgtcccggggttcggccacgacgccccgaggtgtcctgcacacgttcagtccgtcacccaaa

SEQ ID NO: 846993 - DNA, 98 bp, Homo sapiens
ttcagacagcatatttgagtcatttccttcgtacccacagtgcttcatgagagcaataagagctaactgccatcaagagccatcagtatgtcttcaag

SEQ ID NO: 846994 - DNA, 98 bp, Homo sapiens
caatgatatctacagcacctatcacttgttccctccaagacaactgaatggagctgtgactaatgagaattaaaggccatggatgaagatgaatttga

SEQ ID NO: 846995 - DNA, 101 bp, Homo sapiens
ctgtcctccggcccgagatgaatcctgcggcagaagccgagttcaacatcctcctggccaccgactcctacaaggtatcccacctgaccagcagcgtctga

SEQ ID NO: 846996 - DNA, 99 bp, Homo sapiens
agattgacgcggcgttagtattggccgtgtacccgaaaaactgattgactgggctggcgttaactgtgcggaggcagctgctacaggccagagcggatg

SEQ ID NO: 846997 - DNA, 100 bp, Homo sapiens
agccccggcactgcctggctgcgagcacatgatggcgatacgggagctcaaagtgtgccttctcggggacccagatgatgtggtaccagttggccaaaga

SEQ ID NO: 846998 - DNA, 100 bp, Homo sapiens
gcagactgacaactgtgagacatgcacttgctacgaaacagaaatttcatgttgcaccctggtttttaatgaccacaacaagcaagcatgcagcttactg

SEQ ID NO: 846999 - DNA, 100 bp, Homo sapiens
tcaagtcccgcctgaggaggcaggacgtgcccggccccgcgtcgtctggcgccgccgccgccagcgcgattggatttgaggctcctcccctccagggaca

SEQ ID NO: 847000 - DNA, 111 bp, Homo sapiens
agtttgccttctcctatgttttccagaaatgacttcagtatctggagcatcctcagaaaatgtattggaatgacccatcctcatgccaacaaactacccttgaaggattct

SEQ ID NO: 847001 - DNA, 98 bp, Homo sapiens
tggagtatttgctgggccgggtaccatggacgtgggcgaacttctgagctaccaggtgagccctattcccagaggcaggtggtgctgaccctgtaacc

SEQ ID NO: 847002 - DNA, 98 bp, Homo sapiens
acgtcgagcgtgcccgagacccgaggaagcgccagctgtcaccccagtccaagagctccagcaaggtcacgagcgtgcccggcaaagcctcggatccc

SEQ ID NO: 847003 - DNA, 100 bp, Homo sapiens
tttgctccaaactcaagtctgtgtgtgtagtgtgtgttcgcgacctccgtctccttgactgttcgaccaagagccttgatggaggtttgctcttgttgcc

SEQ ID NO: 847004 - DNA, 100 bp, Homo sapiens
cctcagtggttaacttttttgctgcaatcacaaagcattttttactgtctacagaaacttattgtaattcatttttcctcactccagtagtaagaattat

SEQ ID NO: 847005 - DNA, 98 bp, Homo sapiens
cgcgctcaaccagatcgcgcgggaggtgtacattccaagcagagtggccctcatccttcagaatgtggatctgccgaattgaagaggcctgatttcag

SEQ ID NO: 847006 - DNA, 100 bp, Homo sapiens
ggcggtggagcgcagagcgggcgagcgcgtgtaatgttcaagctcagaaatgccttatgtggatcgtcagaatcgcatttgtggttttctagacattgaa

SEQ ID NO: 847007 - DNA, 98 bp, Homo sapiens
ccagaataagattaagggttgtacaggctctttgaatatgactctgcaaagctactgccttcctcatcaacaaagtgccccttcctgttgacaagttg

SEQ ID NO: 847008 - DNA, 99 bp, Homo sapiens
catggtgaatggaccaccacattttacagaaagcacagtgtttccaaggaaaactcaatgtgagtagtgacactgtccagcatggtgtggaaggattaa

SEQ ID NO: 847009 - DNA, 100 bp, Homo sapiens
tttggttataaattatgatctacctaccaatcgtgaaaactatattcacagctttctgaaacaaagactcattttgaagatgtttaacaaatcatttgga

SEQ ID NO: 847010 - DNA, 98 bp, Homo sapiens
cctcctaggcatcttattgatcctccagtcgagactctaaaatagagctcaagcttgagaagagagaaccactaaagggcagagcaaagactccagta

SEQ ID NO: 847011 - DNA, 100 bp, Homo sapiens
agcctattccacgccctccctgttgcagtatccagtttattgggaccatctcgagttctgtgatggattcagaaaacttttagaccatttacaattggat

SEQ ID NO: 847012 - DNA, 98 bp, Homo sapiens
atcacattaatcgcaaatatgcttttaaggtaaatcttacaaaccattgtggttttatgggaggactacaaaaaaacaaaagcactggattgaccact

SEQ ID NO: 847013 - DNA, 99 bp, Homo sapiens
attaactgcctttcttctgtgggctgtgattttcagaggggaatgctaagaggagcatattaatgaaaagtgccataaactgaaaaaccaaacatgagg

SEQ ID NO: 847014 - DNA, 100 bp, Homo sapiens
cgggccgtcatgctcatccaggcaggtttgcacatccttatcaatatgaactaaatcactttaccccagcagatgcagtgcttcaaaagccacaacccca

SEQ ID NO: 847015 - DNA, 100 bp, Homo sapiens
tggggagcagttgggaatcaggtctggaatactcctaaccaagaagttgcccagataacaacgaacttgatgcaagtgataggtttgccaaggtcagacc

SEQ ID NO: 847016 - DNA, 98 bp, Homo sapiens
acacggaggtcaagtttaagggtactttggtgcatgaagctcaactcaactatttctacatctctcctggagggttctatggcctggatgagtctgac

SEQ ID NO: 847017 - DNA, 100 bp, Homo sapiens
atcatggataactgtgaggagctaatccctgaatatctgaaatggtgaggttctggagaattgatgaggattatccagtgcaagttgcacctttgagcaa

SEQ ID NO: 847018 - DNA, 100 bp, Homo sapiens
aaaactgctccttatagaaatgtgaacattcagaacttccatactagctggaagatgagctggtgtcactgcaaaagaaactcaagggcaccgaagatga

SEQ ID NO: 847019 - DNA, 100 bp, Homo sapiens
catggtggactacctggtgcctctagtgaaaagaacaagaagtcttaccctcaggtcaaagcgaaaattttgaccagagtcctttgagaagaacattcaa

SEQ ID NO: 847020 - DNA, 98 bp, Homo sapiens
tcatcaaaaatagtgatagctttgataaataaactcatcctgaaagtcgctgttgttctcctgctgagcaagaatggaggccccactggtgagtctgg

SEQ ID NO: 847021 - DNA, 99 bp, Homo sapiens
tcaaaaggtgatctggacaaaggaacaggtatctcagggacttgccatgaggtgttgaagccttgtttcactgagttggagagactggacctaaatggc

SEQ ID NO: 847022 - DNA, 98 bp, Homo sapiens
aagcgtcccattcccatctccacgacagcacctccagtccagacccctctgccggtgatccctcaccagaagaattgcggcgagcagtaagaagcagc

SEQ ID NO: 847023 - DNA, 98 bp, Homo sapiens
ttatgggctctgtcgccgtgggtatcattgcccagtgcctaagatcttttatgttcagctcactgtaggaaataatgaattttttggggaaggaaaga

SEQ ID NO: 847024 - DNA, 98 bp, Homo sapiens
gggattcaacttcaatttttctgcagtggctctgggtccagccccttacttaaagtgggagcgatgcagcctcaatccggagcagagccacactaagt

SEQ ID NO: 847025 - DNA, 100 bp, Homo sapiens
gaagcccttagccctgctaaaggccaggagtatattctcaaaggagtggtcaatgcagcccttggccaggaaatgggttcagtgagtatgaaatcactga

SEQ ID NO: 847026 - DNA, 100 bp, Homo sapiens
cgaccacagccagagcctcagcaggagcctgttctcatcaccatggcaacagtggaagacttataaccctgccttctcccggttggaaatctggttccgg

SEQ ID NO: 847027 - DNA, 98 bp, Homo sapiens
ccccttctgggaaagaccgagtgaagaaaggtggatcctacatgtgccataggatggtgagaacaagaccaagattggaaagccagcttcagaggagg

SEQ ID NO: 847028 - DNA, 98 bp, Homo sapiens
atctttgctgctccagctcctcagtcaacagctacagccaattttgctaactttgcacatttcaacagtcatgcagggcgtgattctcagtcaccaga

SEQ ID NO: 847029 - DNA, 100 bp, Homo sapiens
tctgcgcgagtccacgcagctccccaggatgaccggaaagaagggatgaccgcgtttgtggaaaagagaaaggccaacttcaaagaccagtgagaaccag

SEQ ID NO: 847030 - DNA, 98 bp, Homo sapiens
acagacactgggccatctatgttggcgatggatatgtggttcatctggcccctccaatcagcaggatggacctggagatgtcagggctgaagaccctg

SEQ ID NO: 847031 - DNA, 100 bp, Homo sapiens
gaataaagagcccgctgtaattggaagaccagattttgaacatgccgtggaagcttctaaactttctagtcaagtgctgctcccggcagccagcttgctg

SEQ ID NO: 847032 - DNA, 98 bp, Homo sapiens
gagaagagccatggaaacaggaggaagaattcccaagccaaagctttccaggctccacaaggctgacttcaggacctgggcctgcatggatttgtgcc

SEQ ID NO: 847033 - DNA, 98 bp, Homo sapiens
agattcgaacaccgacctcgtcccggcccctgcagtccggatactcacgccagaagtaccaaatatgccccaacagcggcaagaccagcatcatcaga

SEQ ID NO: 847034 - DNA, 100 bp, Homo sapiens
aacaaaaactgaaagaacatcacacagttgaagctccaggaggtcaaaaggctgcagcgctggtggaggaggaaactcgcagataccgacctactaagaa

SEQ ID NO: 847035 - DNA, 100 bp, Homo sapiens
gagtgccccaattttcaggttgactaaaacatgggcggtaattaataatgcttgtgctactcaagccatagtgagtgtgttactgaactgtacccaccag

SEQ ID NO: 847036 - DNA, 98 bp, Homo sapiens
gaggagagacggaggaggccgagaccggagcgccgctcgccgcagacttacttccccggctcagcagggaaagccctgggcgctgcctatggcacagc

SEQ ID NO: 847037 - DNA, 101 bp, Homo sapiens
accaggaggaccagctggatcgacccccgggacagtgacaatgtcagtgcctactgcctgcatattgctgaggatgatggggaggtggacaccgatttccc

SEQ ID NO: 847038 - DNA, 100 bp, Homo sapiens
ctggatgaggagctgaaagacgcctttcagaacgcctatttggagctggggggcctcggagaacgagtcctagcccctcggaaaccaagccctaagggtc

SEQ ID NO: 847039 - DNA, 101 bp, Homo sapiens
acgctctccaactggccaatacaaatcccttgtatcctgcacctatgatatgtgttttagaaatagccgttaaactttggtttgaatgaagaatgtctctc

SEQ ID NO: 847040 - DNA, 98 bp, Homo sapiens
tggacagttggaaagacctaaaggttcagattcagaacaagaaagtggacatctctaaggtctcctccaagtgtgggtctaaggctaacatcaagcac

SEQ ID NO: 847041 - DNA, 100 bp, Homo sapiens
tctccacctcctgggaggccagccattcccaaatgccccaaggatgaagaacggagacgattgcaatgaacttcctccaagaagaaatacagaaattctg

SEQ ID NO: 847042 - DNA, 100 bp, Homo sapiens
ctctgaggatgagctggaggagggggtattgataggcatgtatggcctcctttatcaggacttcctcctcttagtaaaatgtctctcaacaaggacctgc

SEQ ID NO: 847043 - DNA, 98 bp, Homo sapiens
tcccattacagcccaggtgtcccatattacctccagacttttgtgagtgagatccgaagagttgtggcagagttcaaggaggccttccagctgtttga

SEQ ID NO: 847044 - DNA, 100 bp, Homo sapiens
actaccaaggagaagctatagactacttctactccaccaggaagctgtattcttcaggacttgtggaatgtgaggatcaggatccacttaatcctgatag

SEQ ID NO: 847045 - DNA, 100 bp, Homo sapiens
cttggacacttgtcatctgtgtactgtgtaacttttgatcgaactggcagacggatatttactgactgggctaatgctaatgtcagcagacagattgagg

SEQ ID NO: 847046 - DNA, 100 bp, Homo sapiens
ccttcccccacgagcgaggcaactgggccacccacgtctatgtaccatactatcttgctaatcatggccggttaaatgagtctgaagccaggcgaaaatt

SEQ ID NO: 847047 - DNA, 100 bp, Homo sapiens
atcgagaccactttggccgtacattctataatcaggcaattatgtcttctaaaaatattgcacagaactctctttgctcacaagttaccaaaaaaaaaag

SEQ ID NO: 847048 - DNA, 100 bp, Homo sapiens
cgggaaggagcatcccaggacctaccagaatctggtggagccgccaccaaaatgcagattttcgtgaaaacccttacggggaagaccatcaccctcgagg

SEQ ID NO: 847049 - DNA, 100 bp, Homo sapiens
ccagggtggctgaatcacggaatgtaaaactgctgtcaggaatgtctactcaacatgggatctaattaaagagcttctgcatggcaaaagaaactaccat

SEQ ID NO: 847050 - DNA, 99 bp, Homo sapiens
gcggggactgttggtctcggccctgcggaaggggagtacatcaagacctggcggccacgctacttcctcctcaagaatgatggcaccttcattggctac

SEQ ID NO: 847051 - DNA, 100 bp, Homo sapiens
gaggagctcatggccactgatgctcatttgcaggggggagccaaaagggtcatcatctctgccccctctgctgatgcccccatgttcgtcatgggtgtga

SEQ ID NO: 847052 - DNA, 99 bp, Homo sapiens
gccatcgttgctgccttcttcgtcaaggatgaccgagtgggagacagcagcaccagcggtggcagagaccccagacatcaagctctttgggaagtggag

SEQ ID NO: 847053 - DNA, 99 bp, Homo sapiens
tccaggtgagactttcacaataagagcagaggatggaacacttcagtgcattcaagcaaatgaaccagtgagtgaagggcattatcacaactccaagaa

SEQ ID NO: 847054 - DNA, 98 bp, Homo sapiens
gatgctggagggcgaagacctgcgaagtccctctccagagtaaccagagagcacagagaaatgctggtgaaactggccaaacagaacaccaacaaggc

SEQ ID NO: 847055 - DNA, 99 bp, Homo sapiens
gggaccacattgctccaagccagatatggtacaggactgtcaacgaaacctggcacggctcttgcttccggtgaagtgaaactgctgctgtcctccgag

SEQ ID NO: 847056 - DNA, 98 bp, Homo sapiens
aaaaagtgaacttttctctggacttccccagaagaagattgtggttgaattcaggtcaatgtgcgaaatggaatgagcttgcatgactgccttatgaa

SEQ ID NO: 847057 - DNA, 99 bp, Homo sapiens
gaggagcggcagggcatgaaggtccaggcgctggccaggtctgggaggggctgaacgtggtgaagacaggccgagtgatgcttggggagaccaatccag

SEQ ID NO: 847058 - DNA, 100 bp, Homo sapiens
aggaagaatccactgctccgaaaggagagtgcgccccccagcctccggcggcggcccgcagagaccctcggaggtacaggtttgcagattccgccagcag

SEQ ID NO: 847059 - DNA, 99 bp, Homo sapiens
tccggctgcagcagcaagtcccatcggaggacctccctgccctgtataccgagggaacaggattcctacaggaagcaagtagtaattgatggagaaacc

SEQ ID NO: 847060 - DNA, 98 bp, Homo sapiens
gagcgggtgcgtctgccgcagagtcggcacctgaaggacatggaggtactctttgagcacatcaaattcttccattgccgctcttctctgtgcccttt

SEQ ID NO: 847061 - DNA, 100 bp, Homo sapiens
taggtgtatcaagtaatggtgcaaagcctgaagtgtctgtgacctttgaggatgtggctgtgacattcacccaggaggagtggggacagttggatgcagc

SEQ ID NO: 847062 - DNA, 100 bp, Homo sapiens
tggatagtgtaactgattcccaaaagcgaagggaaattctttcaaggaggccttcctacagagaatgtgttcagtgcagagccttcaataaaggagaaaa

SEQ ID NO: 847063 - DNA, 100 bp, Homo sapiens
gccgacgccgcgggggcaccggattctgttgggggctgaagcggtcactctgtgagactgctgggtcagaaaaaggataatggaaggcggcttgggggag

SEQ ID NO: 847064 - DNA, 100 bp, Homo sapiens
cgatcctggtgttcgaggtggaggttaggcggataacgaaggaggcccaacttcattcaataaggagcctgacggatttatcccagacggtagaacaaaa

SEQ ID NO: 847065 - DNA, 100 bp, Homo sapiens
ctccagatggaagcttgatcctggtgtcagcttcaagagacaaaactctcagagtatgggacctgaaagatgatggttttaaaatcaaagatgggaaaat

SEQ ID NO: 847066 - DNA, 98 bp, Homo sapiens
cacgtcctcgaacgcgaggccaacagccccggagttggcatcctttggaagagttcgtgaaagctttctgcccagagctcctggaccaatgcatcttc

SEQ ID NO: 847067 - DNA, 98 bp, Homo sapiens
ctgccgcctcgctgtccctgcggcttctggggaggtcctgctgtactagccaccaaagcagctgctggtactaagaaatatgatcttagtaaatggaa

SEQ ID NO: 847068 - DNA, 100 bp, Homo sapiens
gtctctgttgattccaagtttcctatagaagacacccctttggttccgttctggagagtcttggcttctgggaggaagtcagagggattatctcaggatc

SEQ ID NO: 847069 - DNA, 98 bp, Homo sapiens
tgtagtaagaactgttccaggtcttctgcaaacagtcttcctaatagcaaaagtgaaatatttgtcaggatttgttaaggattccaagtaactcttat

SEQ ID NO: 847070 - DNA, 99 bp, Homo sapiens
gaaaagttcagaagatgccactgatgatatctaaccatatttatttagagtcagaatggagcgatttgtagtaacagcaccacctgctcgaaaccgttc

SEQ ID NO: 847071 - DNA, 99 bp, Homo sapiens
actgaagaaagcatcgtcctaggaatggatttctcctctaatgacaggagcttgaaatcgtcattggagatgaacacatttcttttacaacatcaaaaa

SEQ ID NO: 847072 - DNA, 100 bp, Homo sapiens
gtttgccatccggaagtcccggcgctacttctcctccaaccctatctcgctgccagtgcctgctctggtttcattgaaaacagatcctgcaaaagttcca

SEQ ID NO: 847073 - DNA, 113 bp, Homo sapiens
caagaatctcgtgctcaccggtttctcccacatcgacctgggaaattaattttgtcactggataaagacacttatgaagaaactggacttcagggtcatccatctcagttttc

SEQ ID NO: 847074 - DNA, 98 bp, Homo sapiens
ctttacaacctatgcaaatggctcctgcagtgttaaaatcatcacacaacaggttcaaccaagtaaaatcttacccaaaccagtgacagcaactctac

SEQ ID NO: 847075 - DNA, 98 bp, Homo sapiens
acatttccagcaggctgcagatacgagtggacaacctacaacacagcagtcccctcaggatgagcaggaaaagctcttggatgaagccatacaggctg

SEQ ID NO: 847076 - DNA, 100 bp, Homo sapiens
cttactccaaaatgagtctacagttataccaagtggatagtagaacttatctactggatttccgtagtattgatggtttcatcacccaaacatactagag

SEQ ID NO: 847077 - DNA, 99 bp, Homo sapiens
aagataatagccagctccccagaaatgaacctgcccacggtgtccgcgctcagggaggcaagtgaggcctatctggttggcctttttgaagacaccaac

SEQ ID NO: 847078 - DNA, 98 bp, Homo sapiens
aacgcatcatgccagggagccaagcgtcctgcccggccgtgttccagatcgcgtatgtgattgtgaaggcagctaactccccccggcctggaaactgg

SEQ ID NO: 847079 - DNA, 100 bp, Homo sapiens
atgggaaacccggagaccaaatccttgctagatagacgatcagctgaacactctcttgaaggagttccagctaacagaggagaacactaagctccgatat

SEQ ID NO: 847080 - DNA, 100 bp, Homo sapiens
ccacacccctgtattctcctccgaaccccttcatgcccaaatcccggaaactccagcgtgtctccagccgtgatctgcacattcattgcaaccttcttct

SEQ ID NO: 847081 - DNA, 99 bp, Homo sapiens
gacgatctgcacttcgcattttggcattgacatttaattttagggtcctttatatagaagggagagtagttttctgactcagaatgtgccaaaaaggct

SEQ ID NO: 847082 - DNA, 100 bp, Homo sapiens
gagaagatggcgcctggcagggcagccagctggccaggggggcccgtctgggccagccacctggtgtccgtttgcgcgataacaatatctcagaccgagg

SEQ ID NO: 847083 - DNA, 100 bp, Homo sapiens
ctgaaacatacagtcagatctcaggaatggaagtgctcaagtaaagctctttgtgacagggcttttcagcttaaatcaagatattcctgctttcaaggaa

SEQ ID NO: 847084 - DNA, 100 bp, Homo sapiens
tttatatatcatgtgtgttcctcactcagttgagccccatatgggggttggcaggcagcagagaggcccctttcaaggtgttcgggtaaagaactcagtg

SEQ ID NO: 847085 - DNA, 100 bp, Homo sapiens
tgtggccttggactcagagcagaacaacatccatgtgaaagacatcgttaaggtcattgatggcccccactcaggcaccttctctttcatcatcgaaacc

SEQ ID NO: 847086 - DNA, 100 bp, Homo sapiens
tgatgatgaaattgactttaaagaaacgggtttctcacaggattcttctttgcagcaagtacctggggcccaagatttggtggatttctctccagtttat

SEQ ID NO: 847087 - DNA, 98 bp, Homo sapiens
taaagatttcagaattgtcagatttcgctttgatgaatcaggtcccgaaagtgctaaaaagttggtagctggcagtgttgtgatggcttttgaagaag

SEQ ID NO: 847088 - DNA, 100 bp, Homo sapiens
ccatgtcagccttcccagtagctgggaccacaggtttaccaagattcaaaacacgaagctgaccatgaagcgggacggcattgggtcagtgcggtaccag

SEQ ID NO: 847089 - DNA, 100 bp, Homo sapiens
tacctcactgcctgagggcatcatggtcaagacttttgaagatagaatggaccaggagctgcattatctattctagacaaatttcttgaagaatcctcca

SEQ ID NO: 847090 - DNA, 99 bp, Homo sapiens
ttcttacaaacagcaaccctcattgaagatattttgggtgttaaaaaggtgcccctgggcgctgggattgctctagcctgtaagtataatggaaaagat

SEQ ID NO: 847091 - DNA, 98 bp, Homo sapiens
tgttcagcctggactcattcagaaaaggatgaatttgacaagctgaggcctctctgctacaccaacacagacatcttcctgctctgcttcagtgtcgt

SEQ ID NO: 847092 - DNA, 99 bp, Homo sapiens
tcgcccgccgagccacagccacgatgatcgcgggctcccttctcctggaagaccagggaatttatcagagcaaagttcgggagctgatcagtgacaacc

SEQ ID NO: 847093 - DNA, 100 bp, Homo sapiens
gaaacatgtgaacactcaagtgaagcaaaagccttccatgattacctcaaattgaaattattccatgcaagatctgtggagacaaatcatcaggaatcca

SEQ ID NO: 847094 - DNA, 100 bp, Homo sapiens
gaagagaacaccctgattgccagcctttgtgatctcctggaaaggatctggagtcatggactacaagtgaaacaggtaaattgggatattcacaatgtat

SEQ ID NO: 847095 - DNA, 99 bp, Homo sapiens
ttcaccccacttcatcagcgtacataagttatctcttcttttggacccttattttatgccataatgtcctattttgtaacggattatgatccaaccatt

SEQ ID NO: 847096 - DNA, 100 bp, Homo sapiens
tcacctgctagcccatgatccagattttacaagatcacaagatgttgatcagcttcgtgatatcaaagagatgttcacggaagaccagggtgtagatgac

SEQ ID NO: 847097 - DNA, 98 bp, Homo sapiens
ctagatcccaagattgctgtggctgcgcagaactgctacaaacttgccttgcgccatggactggcagccagacgagcagggcctgcagcaggtcctgc

SEQ ID NO: 847098 - DNA, 99 bp, Homo sapiens
aaaaggaagccccttaaatgccgcaccctacggcatcgaaaggtacaccaggggttggaaaaaccacactaggcaaagaacttgcgtcaaaatcaggac

SEQ ID NO: 847099 - DNA, 98 bp, Homo sapiens
tgaaaccctctacaaaggcattagtcctatcttgtaagcctgaaaggatttcaggggagcagtatggaattcattctgatgtctggagcttaggaatc

SEQ ID NO: 847100 - DNA, 119 bp, Homo sapiens
cgctggagctgggtcagtccgccgctcaccccgcggccgcaccttcccgccttctcaggccgtacacctggtccctggctccaagcggaagcagtcgggcagagctctgatgacatcaa

SEQ ID NO: 847101 - DNA, 99 bp, Homo sapiens
tggttcatcttccttctcaacttacctgttgccacttggaatatatatcgagttgtggaaagtaaaaatgtagccctaccaaaaggaactattgtactg

SEQ ID NO: 847102 - DNA, 100 bp, Homo sapiens
ggcgacaatgttggcctgtctgcaagcttgtgcagggcaccataaggatgaagtggctggtgacatattcgacatgctgctcaccttcacagattttctg

SEQ ID NO: 847103 - DNA, 99 bp, Homo sapiens
ttttttattatgctgcacggggtcttggtggatgtcagtgcttactccccatgaaattaaattttacttcatcctttgagaagcgaatggtgaaagcta

SEQ ID NO: 847104 - DNA, 100 bp, Homo sapiens
taaagctgccaatttcagctttagaaatacactggaagactataatgtaactgcaaactccaagctggtcattatcacggctggggcacgtcagcaagag

SEQ ID NO: 847105 - DNA, 100 bp, Homo sapiens
attgtgacatatcgttggacccagaattgaggtcccaaaatggtagaagtccagaatcaacagtttcagatcaactccaacgacggcaagccactattta

SEQ ID NO: 847106 - DNA, 100 bp, Homo sapiens
agcaccccttttaccactgcctggttgcagaagtgccgaaagagcactggactccggaagctctcttatttagtgcaacttttcggaagaagattgaaaa

SEQ ID NO: 847107 - DNA, 100 bp, Homo sapiens
gtgctgggggtcatcgacagctgcaaggaggccgtcaccttcaaggccgtcagacaaggctctgtgtgctccgggatggagcaggtgtgcagagggtgag

SEQ ID NO: 847108 - DNA, 99 bp, Homo sapiens
agcggcgggcgtgggagagcgggagggctcgaggaggacaagggggggccctcagcctcttggccttgaacgggctgttcatcttgattcacaaacaca

SEQ ID NO: 847109 - DNA, 98 bp, Homo sapiens
gggatctgcaagctgccaggaagactcccctgagaaattcacgaaagtctgtgaggccttggagcatggacatgtggaatggagcagccgaggtcccc

SEQ ID NO: 847110 - DNA, 100 bp, Homo sapiens
ctttagttccatcaaacacagaggaatgaccaccatggcagatggcaacagaggatgtcaacaattttttggagaactcaagacatggctgcccagtgtg

SEQ ID NO: 847111 - DNA, 98 bp, Homo sapiens
cagaacctgttggcactcagactgccaaaatacagcagcagatcattcggcacaagctacttcagtgccctcatcctggtggagggcatggatatcga

SEQ ID NO: 847112 - DNA, 74 bp, Homo sapiens
aaagccatattggagtagcgaggaatctgattccaagcaaaaaccaggtcagtatgggaatcctttaaataaat

SEQ ID NO: 847113 - DNA, 98 bp, Homo sapiens
cttccagggtcttctaagtcagagacatcaaaacctggaccttctggattacaggccaaattagcaaatctgctgatttgggtcctactttaatgaca

SEQ ID NO: 847114 - DNA, 100 bp, Homo sapiens
gaaaaatgtcacccttggacaagaaacctgtgaaggtcgaaacagctgcgtttcctgttttaatgttagcgttgttaatactacctgcttttggatagaa

SEQ ID NO: 847115 - DNA, 100 bp, Homo sapiens
tattcttgaagttaagcgcctccttgatcaccaggataatattctctcattgattaatgtcaatgaaacattgcttctcagactgtagccagattgaaag

SEQ ID NO: 847116 - DNA, 100 bp, Homo sapiens
ccaagttccctgcggagctggagaaccggttttcggctttgtgagaaaccttaccatcaaacacgatggccagcaacgttaccaacaagacagatcctcg

SEQ ID NO: 847117 - DNA, 100 bp, Homo sapiens
tggctagagactgccgggactggtcagatgaacccatcaaagagtgcgattttgcctgcctgagctcctctagtagtggccacaattgccagagaagata

SEQ ID NO: 847118 - DNA, 98 bp, Homo sapiens
tcaagtgcaattcaagatatccgaaggttcaattatgtggtcaaagctgattcaccccaagagtggccgttcctaccacgaggagttcaaccctccaa

SEQ ID NO: 847119 - DNA, 98 bp, Homo sapiens
gccttcgtctgcacttaccttggaagccaatatatcttcacagaaatggcctcggccttattccactgctggggattgatgtgtgggagcacgcttac

SEQ ID NO: 847120 - DNA, 100 bp, Homo sapiens
tggcttccagtgcgctgtcaaaaagattagtttttagaggcatgtctatatctcgcccaaatgctgtggtcgggaggtgtcgcatgatccgccactcaag

SEQ ID NO: 847121 - DNA, 98 bp, Homo sapiens
aaagcaagtacaagatcctggatgccacggatcaggaaagcctggagctgaagccaacctcccgagcagggttcgtgtgagccaggatgggcagtttc

SEQ ID NO: 847122 - DNA, 100 bp, Homo sapiens
cctgcttctgctgctggtggggctcacggcgcctgccttggcgctggccggctacatcgaggtggcaatcactgggcagcttggtgtgaagccccaaaca

SEQ ID NO: 847123 - DNA, 100 bp, Homo sapiens
gagtggaaaaaagagaggatttgcttttgtaacttttgatgatcatgatacagttgataaaattgttgcttgaagagaaactcactgctgagaaattgat

SEQ ID NO: 847124 - DNA, 100 bp, Homo sapiens
catggcttggagcacttcctattccactggattgggaaagaccatggcaggcatgcccaagagaatcgtaaatgcaaaaattgcttgccttgacttcagc

SEQ ID NO: 847125 - DNA, 98 bp, Homo sapiens
acaaatgttcttaatggcatctagaatgcttgctttggaacgtcagaaaactgcagagaaagagcgattatttcttgtatatgctaagcagtggtgga

SEQ ID NO: 847126 - DNA, 132 bp, Homo sapiens
ggtggcagacctccttcagcacatcacacagatgaagtgtgcggagggctacggcttcaaggaggaatacgaggctggtgcctctgccgagatcacccttttattccttatttggtagactcctactcatcc

SEQ ID NO: 847127 - DNA, 100 bp, Homo sapiens
tgatcatgatacagttgataaaattgttgtgaacaaggggagaagaattgccttcagctccacgtcgttactgaaaatggcccccagcgctgaggagagg

SEQ ID NO: 847128 - DNA, 99 bp, Homo sapiens
gcacaaatacatttacaagagccctgagctgccacggatactgagccgctccgggaattctgaagttctgggcctttctcagaagactgtaatgtacct

SEQ ID NO: 847129 - DNA, 100 bp, Homo sapiens
cttgtttctggatgattctaagaggaagtaaccggttttgtgaggattggatgcaagcttttttaaatggtgccaaaggaggtaacccttttcttttccg

SEQ ID NO: 847130 - DNA, 98 bp, Homo sapiens
gaacttgaaaagcgtgaaaaaagaagcttattaaacaagaatttagaggagaaactgacgggaagaactgctaaagctttgaggtcattacaatttac

SEQ ID NO: 847131 - DNA, 100 bp, Homo sapiens
taaagtgggttgaattgccatggctgctggaagaagtctcaaaaagctcccgactagaagttttcatgggctgagctgctgagttcagcctgggaactga

SEQ ID NO: 847132 - DNA, 98 bp, Homo sapiens
gattatcgcagaatgcaacgccattcgccaggctcttcaggatctgctttcagagtacatgaacaacaaaagagtagttgaacagctacggaagaacc

SEQ ID NO: 847133 - DNA, 98 bp, Homo sapiens
agaatgtttcagagaaagttacgtggagcgtgggcgtttcgcagactcctaagctcaatctgaaattgaagtgtctgtctctgcaaggaatatcagaa

SEQ ID NO: 847134 - DNA, 100 bp, Homo sapiens
gccatgcaagcgcagttctcttcggacaggagctgcgggcgtctttggagacacagcgtgctcagagcagtcgactctgcgtggcactgaaacacgagca

SEQ ID NO: 847135 - DNA, 98 bp, Homo sapiens
ggtcgcctaatcatcgaatttaaggtggctttttctcaagtatattttccagtctgtttggaactcgggaaatgagaattttaattttgggattagat

SEQ ID NO: 847136 - DNA, 100 bp, Homo sapiens
ttcaaagggaccatcatcctgacagctgtgtactttgccctcagcatctcccttcatgtctgggtcatgaaaatccattcctcgctgccgaagaattaac

SEQ ID NO: 847137 - DNA, 100 bp, Homo sapiens
aaagatatgtttttggactctaatttcacggacactgaaagcagagaccatggagcttcttgcgtcacactgctcagctccgcgaagagttgctgaaact

SEQ ID NO: 847138 - DNA, 98 bp, Homo sapiens
attacctgctatatctgtaaagggtatctgatcaagccaacaacagtgacggaatgcctccatacatgaaggaggaagaggagcgaaggcggcgtgaa

SEQ ID NO: 847139 - DNA, 100 bp, Homo sapiens
cgggaacccttgccgctgctgtcctgcgaccccaagcagccatcgacgagtacaagccccaggatgctaccaccaacccgtccctgatcctggccgcagc

SEQ ID NO: 847140 - DNA, 100 bp, Homo sapiens
tggaggatagactacagtgccgctggtgattgtccaagtgctgaccctacagtgaaactgggagctgtgggtggaagtggatttaaagtttgccttagaa

SEQ ID NO: 847141 - DNA, 100 bp, Homo sapiens
cagactgccagcttcattatgctgccgacagcttccagcaaaaggaggacgtttgcagccagatatttcaggacactccggacgcaggcccggccaggag

SEQ ID NO: 847142 - DNA, 100 bp, Homo sapiens
cagatggaaacacatgaaagacttcctcaaggactacagtatgcacttaatgtccctgtaaaatctgtaaaaactgggtcagttttttggacaatgtgct

SEQ ID NO: 847143 - DNA, 124 bp, Homo sapiens
ggggctctgggagcgtggtaacgtggctgcaaccttagcgacatcaggaagaacagggtcgaggatcgagcaacacagatgtacacacggtggcatcacttcttaagctgtacctccgagaact

SEQ ID NO: 847144 - DNA, 98 bp, Homo sapiens
ggggtctttaggatttgcagctccaggaagcgagatgtcgaagccgccacccaaaccagtcaaaccagaaatgcactcggtgatggaaagagagccac

SEQ ID NO: 847145 - DNA, 100 bp, Homo sapiens
gtggaaaagaaagcatactgcgagccctgctacattgtccaggatacagaggctgaaactctgactggttttttgaatggcattgagtggattcttgaag

SEQ ID NO: 847146 - DNA, 98 bp, Homo sapiens
acttaacctctcagaactgaacaaagacaacattgttcctggaacgccctctttttaaaaaagattccacagacacatatccccagcatgcgcagtct

SEQ ID NO: 847147 - DNA, 98 bp, Homo sapiens
caccagtggggcagtgcctcggttttggaaacgttgtggaacttcgcatcaataccaagggtgttgggggaaagcttccaaattttggttttgtggtt

SEQ ID NO: 847148 - DNA, 100 bp, Homo sapiens
gaagcaatgcttgaggctccttacaagaagaacccttaggagaaatcttgagagtggacagcaattgtgaagatcgccagagagttctgtgtttcatcac

SEQ ID NO: 847149 - DNA, 98 bp, Homo sapiens
gatacaaaacaagcccacgaactggccaagagttacgggattccattcattgaaacctcagccaagaccagacaggaaatcctttgaatttgaggata

SEQ ID NO: 847150 - DNA, 50 bp, Homo sapiens
aaaacaatgcccagactcaatttagtgagagagaagaagaaggaggttcc

SEQ ID NO: 847151 - DNA, 98 bp, Homo sapiens
gatattgtccatgacttggaaagcccaggcattgatccttccatcatcaaacaacaggttgaagctgctgagctgcaagctttcttcctggtggcaga

SEQ ID NO: 847152 - DNA, 100 bp, Homo sapiens
cgtggctacaaaaatcaatctcagggctacaaccagtggcagcagggtgctttaatccagtgtgaccagttgaggaaggagctggagaggcaggcggagc

SEQ ID NO: 847153 - DNA, 102 bp, Homo sapiens
ggatccagagaaactcatcaggatttatcctgctcatgccagttactatgggagaatgaatgtgagagaggttctcagagaggatggccacctcagtgtaaa

SEQ ID NO: 847154 - DNA, 99 bp, Homo sapiens
gctgctgaagtggtttttcctaatggaaaatcacatacctttccacgacttcaggaagaaatcaccaaacagtctccaacgttgcaaagaaatgccttg

SEQ ID NO: 847155 - DNA, 100 bp, Homo sapiens
ctggaattaggcaaatatggacagctctactgagatgaagaaagaaaaagaatacctgctcagctccagagacacgtaaagggacagagattgggggaca

SEQ ID NO: 847156 - DNA, 100 bp, Homo sapiens
ggccgcggaaaccgatctgcccgttgtgtttgtgaaacagagaaagataggcggccatggtccaaccttgaagacacgaccgacttccaggagagctttg

SEQ ID NO: 847157 - DNA, 98 bp, Homo sapiens
ttattgttccggttgaaatcgatggaactatacatcaggaaagaccacagcaagattctttcattcgtctcctcctagcctgggggaccaggctcgaa

SEQ ID NO: 847158 - DNA, 99 bp, Homo sapiens
aaaatctggagctgaaggagaaaatggttttcctttggaatatggataaatacaccatgatacggaaactagaaggacatcaccatgatgtggtagctt

SEQ ID NO: 847159 - DNA, 99 bp, Homo sapiens
ggagccggaggaggatgctcctgcctcccagagaggggagccggcgaggatcaaaatcttcgaaggagggatgatgactttgagttcactggcagccac

SEQ ID NO: 847160 - DNA, 100 bp, Homo sapiens
tgcaaaggcggctcaagcgcccagaaacccctactcatgatccggaccctgagactcccctaaaggccagaaaggtatgaagaggagatcaacaaacgca

SEQ ID NO: 847161 - DNA, 98 bp, Homo sapiens
aaactgcattacaagcagcagtggggacgagctttgaaagaacttgccagacttaaacaggttgcaacaaggacagtgtcagagcaggctgtaaaaaa

SEQ ID NO: 847162 - DNA, 99 bp, Homo sapiens
tctggatgaaacgtcaggaatttactacacagatggcccactgcgtgaccttggttcagctgtccatttcctgtgaccatctcattgacaaggacatcg

SEQ ID NO: 847163 - DNA, 98 bp, Homo sapiens
gccggcgtgcgctggtcactgaggcccaggtcgccgccgcggcgcggtgagaattatgaagatgatgacctagtaaattctgatgaggttatgaagaa

SEQ ID NO: 847164 - DNA, 100 bp, Homo sapiens
gagagaagaaaagttactcatttgcctgattccgcacgcaaaagctgatgaagcattgaaagccaaagaaagaaatgaggaagaagcaaagagaagaaag

SEQ ID NO: 847165 - DNA, 100 bp, Homo sapiens
aactttccagagaccacttctccacatgaatattctgttttgctgcccgaagcttggtttgttatccaggcataagaccaagaaattatcttcagaaaag

SEQ ID NO: 847166 - DNA, 99 bp, Homo sapiens
gaagggctgcgggttagggggccggcgcccgcggttcaggatgctctggagttttggctgcaagctggcgtggatgggttccaggttcgggacatagag

SEQ ID NO: 847167 - DNA, 100 bp, Homo sapiens
aaaaaacgtacaaggaaggcctttggaatacggaagaaagaaaaggacactgattctacgtgcaggctgccccatggatgccacacgtggcagcggggag

SEQ ID NO: 847168 - DNA, 100 bp, Homo sapiens
gctctttgctgccgccttcctgtgcggggccgtggcggccgcggcgatgactcggacccaggccatcctgatcacctggacaaagcgatttaaagcgagc

SEQ ID NO: 847169 - DNA, 98 bp, Homo sapiens
cggagcaggcggaggcggataagaaagccgctgaggacaagtgcaagcaggtctcggcgcggaagatggccggcggcgtggacggccccatcgggatc

SEQ ID NO: 847170 - DNA, 117 bp, Homo sapiens
acattccaattcaagaggaggagaggggttgttttataaactgcctggccgaatcagccttttcacgctcaaggtatttggcaccaatgtgatggtgacagtggccaagtccttcga

SEQ ID NO: 847171 - DNA, 98 bp, Homo sapiens
ttttgagtcctcgagtgaatgggcggatctcatatcttcacttggcaaactcaacaaggttttgctggcacacctggatatctttctccagaagtttt

SEQ ID NO: 847172 - DNA, 100 bp, Homo sapiens
aaccagatccgggagcacgtcatctccatcgagggcctcctgctccacgacgtgaccatggccgggctgcaggagctgcgattccctgaggagaagccgc

SEQ ID NO: 847173 - DNA, 99 bp, Homo sapiens
agcttcacatggccctttatgttctccagacatatctgaagagatggattaagaatgctttggattaaggattgtggagcacatttcaatcattttagg

SEQ ID NO: 847174 - DNA, 117 bp, Homo sapiens
gaacagctatgcatgctgcttttgatgtctgacaacgtggatcgttgttttgaaacgagcgattggttacatgggaacaagtgcctttgtccgaaaaatctatactaatgtgaaaat

SEQ ID NO: 847175 - DNA, 98 bp, Homo sapiens
tggagatcacatcaaggaagccacctgggagagcgtttcgatgatgcttcagctgcaggatcaggcaaaaatgatcatgccgaaaaagtggcggaaaa

SEQ ID NO: 847176 - DNA, 98 bp, Homo sapiens
cctcactgcagaggtgctggagctggcaggaagaaacacctcttacagtcatctgcaggggattctccaaggacatgggaagatagatgtaagccctg

SEQ ID NO: 847177 - DNA, 99 bp, Homo sapiens
gggcggagccgctgctcgagctgctgctggattgaactcagagaagccgggttgatattcactgatggactccaaagaatcattaactcctggtagaga

SEQ ID NO: 847178 - DNA, 98 bp, Homo sapiens
gcctatggctggattactatcaactatctgctgggcaaattcagtcagttcggatcagggactatccacggtacctgtttgagatccgtgactggcgg

SEQ ID NO: 847179 - DNA, 100 bp, Homo sapiens
gtttggaaagacccaggagaagccgcccaaagaactgacctgatggccaaaagaaaggaagaaaatttttcctctcctaaaaatgccaaaaggccaagac

SEQ ID NO: 847180 - DNA, 100 bp, Homo sapiens
accgactggaccgggaaggagcatcccaggacctaccagaatctggccaactgagctgcatttccttcccacctaaggaagagaagtacctccagcagat

SEQ ID NO: 847181 - DNA, 98 bp, Homo sapiens
aacacaatcacagcaacagactctcctgcagaccttcccaggaagccagagccacacacaccatcatggtcctggtaacacaagtggcaagacagccg

SEQ ID NO: 847182 - DNA, 100 bp, Homo sapiens
gtcggagctcggcaggaagtgggaccggtgtctggcggatgcggtcgtgaagatagatatttggatttgacctgcattttggaatttatctacacttaaa

SEQ ID NO: 847183 - DNA, 98 bp, Homo sapiens
atgaaagagaagatgttcaaaagaaaacattcacaaaatgggtaaatgcacaattttctaaggagagtgggcgctccctttctcttcctggaagatca

SEQ ID NO: 847184 - DNA, 100 bp, Homo sapiens
tactgtccgacacggagcctcatttactgaacagtggacagatggttatgcttttcagaatcttatcaagatgcagaaggctatcaacaggctgagcagg

SEQ ID NO: 847185 - DNA, 98 bp, Homo sapiens
atgtctggacaccatgattcaaaccgccaggttaccatgaggaggatttctggccttcgagatggacaaccggaaattttctacacattttggaattc

SEQ ID NO: 847186 - DNA, 100 bp, Homo sapiens
tccaagctacagattccaatacctcattccctaagacttcaccatgagctccttgaagttcgtggaaggctgtatgagcttctaactcattgtattcctc

SEQ ID NO: 847187 - DNA, 100 bp, Homo sapiens
gaggagaccgaggtggctatggaggcaaaatgggaggaaggtagtgtacactgataaaggtagggcgcggtggactctgcccctgtaaccgttccggaga

SEQ ID NO: 847188 - DNA, 100 bp, Homo sapiens
tctgcacttcattttactccaagatacaccccttagaaaatggagagaatccagactccaaaatgatgcaaatcaacctgactggatttttgaatggaaa

SEQ ID NO: 847189 - DNA, 100 bp, Homo sapiens
agaacttggatcccattcacctgaggcacccgaagaagagaccatccatatttccagatacgtaggtaacctttccagagatgtgacagaagtccttata

SEQ ID NO: 847190 - DNA, 100 bp, Homo sapiens
gatttgcttttgtaacttttgatgatcatgatacagttgataaaattgttgggcaaaataacatggcagccagacgaattacacaggagacttttgatgc

SEQ ID NO: 847191 - DNA, 100 bp, Homo sapiens
acagggctccagaaattatgttgaattccaagatcagagtgacaagaatagtgccatggtgaatcaggaagttttgacactgcaggaaatgcttaacagc

SEQ ID NO: 847192 - DNA, 99 bp, Homo sapiens
gatgccgaagtcctggaggtgttccacccgacgcatgagtggcaggcccttcagccagttgttgacctcctgtactggagagacattaagaagactgga

SEQ ID NO: 847193 - DNA, 100 bp, Homo sapiens
gttacaaaatataaacagagaaatggctggtctcacaaagatctattaagattgtcacatcttaaaccttccagtgaagaatgttttcaggaaagtgaac

SEQ ID NO: 847194 - DNA, 100 bp, Homo sapiens
ttcaccttcgtctgcatggctctgtcactcacgatattgcaggagaagaggctgggtccgatccacactcattatgtctgttccacaaacaagtacttca

SEQ ID NO: 847195 - DNA, 99 bp, Homo sapiens
gcaagtgtcagaactgcttcaagccccgcgagtcgcatctgctcaacgacgaggacctgacgcagggtgtcaaattgagaaccaggtagatccccacca

SEQ ID NO: 847196 - DNA, 100 bp, Homo sapiens
aagccagcgttacagtaatgttccagctggttgtcttcttgcctgccctgtgtcgtaaaatgggggtcccttactgcattatcaagggaaaggcaagact

SEQ ID NO: 847197 - DNA, 100 bp, Homo sapiens
tgattctgtcctaaacaagacagtgactccaggatttctgaagactattgtggaagaagcatccattaagggccattttggggtttgtaaacaagcaaca

SEQ ID NO: 847198 - DNA, 100 bp, Homo sapiens
gtggagcgcttctttaagggctacgggaagatcctggaggtggatctgaagaacgggtgcctccatatgcgtcggagaaccagacctgcagggaccagga

SEQ ID NO: 847199 - DNA, 98 bp, Homo sapiens
catgacacttacaagatggacagggatgataattgggcctccaagatgtctttctcgagaagcaggtggaaacatgagcattcagtttcttggtacag

SEQ ID NO: 847200 - DNA, 100 bp, Homo sapiens
cgactagcggcggcgggagcggcgccgagaggccgtgcgggacgcgggcgccaggaccggccgaacgcagaggcgtgccgatgctctccgtccagcccaa

SEQ ID NO: 847201 - DNA, 98 bp, Homo sapiens
cggaggccaccacacacacccagctaccagagagagcgctgtacagcatggaatgtgcgttccaccccctgttcagtctcaccagtggggcctgccgg

SEQ ID NO: 847202 - DNA, 98 bp, Homo sapiens
gaaaatgcgctcgggctggaccagcaggcagaactggggctcccttgcatcttccagttacaaattcagtgccttctgcagtttccccagagctcctc

SEQ ID NO: 847203 - DNA, 100 bp, Homo sapiens
aaaaactggagagcttcatcaaaaatagtgatagctttgataaatcatgatacatggtgatggcttgcagagtcgtaaacaaaagaagacacatgggact

SEQ ID NO: 847204 - DNA, 98 bp, Homo sapiens
accgggctgttgcttccagaagtgaagcatttataagacgctgtttggcatatcgaaaagaagatcgatttgatgtgcaccagctggcaaatgaccca

SEQ ID NO: 847205 - DNA, 100 bp, Homo sapiens
attgaggtcacaccttcagtccttcgagcaaaacatgggcctggaattgatatattcacacctggtaaacctggagaatatgacttggaaggtggtatat

SEQ ID NO: 847206 - DNA, 100 bp, Homo sapiens
ctggttcatcttccttctcaacttacctgttgccacttggaatatatatcgatggggcattctcttctcccaccctcgggactttaccccagtgtgcacc

SEQ ID NO: 847207 - DNA, 100 bp, Homo sapiens
tcatccccatggctgatgcagcaggcatcatccgctatgcaattgggagagtacccagagaaggagaagccagcaaaggagacgacacagacaagacctc

SEQ ID NO: 847208 - DNA, 100 bp, Homo sapiens
caggctcatcactcagatgcagctgagcctggcagaaagtgaagcttccttgggaaacactgtgatgttggaccaaatggacaacctggaccaatgggac

SEQ ID NO: 847209 - DNA, 100 bp, Homo sapiens
atttctttctcgctgatcgcctaacttctactgacgaagcttggaagttgcagaagctgtctgcttttctgtggagactgcgggttgcagacaccagcag

SEQ ID NO: 847210 - DNA, 100 bp, Homo sapiens
gtggaacagaagcagaatcctactgtaggaacaggatctggacttggcacatttcttttaaaggtgcttgaagacgaattcccagaagtatacagatttg

SEQ ID NO: 847211 - DNA, 100 bp, Homo sapiens
tcatcagcattgacccagagagggacacaaaagaagccatcgcaaattatgtgaaagaagaagaagaggacagtgctccagtgaaagtggaagaacaaag

SEQ ID NO: 847212 - DNA, 98 bp, Homo sapiens
caaacgcagaaggactgcctcactgagcaaccaagactggaccagctattccttctgttgtggcgtatccgaaaaggagtcagaccagcactgcagat

SEQ ID NO: 847213 - DNA, 100 bp, Homo sapiens
acttagtgctggggctgcaaattttacggatcagaaggaattcagtctccaggacattgagctttttaaagatgacatcaggtatctgttgacaatggac

SEQ ID NO: 847214 - DNA, 60 bp, Homo sapiens
agaagagaagtggagcaccaggagactgcctatggttatgaagacagtatggagtttcca

SEQ ID NO: 847215 - DNA, 98 bp, Homo sapiens
tccatctgcagtgtcaatgcggcgctcccgctgaaggagggaaacgcggcgcgtccagtttctgatgaagaattgaaaagaagagtagctgaggagct

SEQ ID NO: 847216 - DNA, 100 bp, Homo sapiens
taagaaaccggcatgcccagggagaaaaaactgcaggcattaatgtccgaaaggattctgtaaagcctggtgcccatctaacagtgaagaaaatttttgt

SEQ ID NO: 847217 - DNA, 99 bp, Homo sapiens
tgctgagacgaacgcttcactggggcagtctctgcatatcatggggagatagacgctgctgcctaacaagttgaaatcatcgcagaaggataaagttcg

SEQ ID NO: 847218 - DNA, 100 bp, Homo sapiens
cagatcaaaattcgccaacactataacaaatgtggcaattattttggatctatcacctgtcatcataactggcttctgcttgtcatccacacaacaccag

SEQ ID NO: 847219 - DNA, 100 bp, Homo sapiens
tcccttggaagttgaaaaacaggatatgacagcgcgtgatctgctacagcagagatacacccttccaaatggagacactgcctggcggtcctcacccctt

SEQ ID NO: 847220 - DNA, 114 bp, Homo sapiens
tacatcgttcagaaactatatggatttccctataagattcctgctgttgttgtggaaaaggatgcagtatttatggcactccacagaaggatgttattatcaagtcagatgcac

SEQ ID NO: 847221 - DNA, 100 bp, Homo sapiens
cgacttcaagacgcggcccaaggtgtcccttggcggcgcgagcaggaaggtgttgacttcaaaatcaaaactgtagagctaagaggaaagaaaattagat

SEQ ID NO: 847222 - DNA, 100 bp, Homo sapiens
acccatgcattggttaatatcaggaactctagccaagaaccacggcctacactctccaacacaatccagaggccacaactaggtcccacagctaatttac

SEQ ID NO: 847223 - DNA, 99 bp, Homo sapiens
tgtgatcctcatcatcttcagcctagaggtacaagagcttcaggctgcaggagaccggcttttggttgggtgactgcatttcagaagacagttatccag

SEQ ID NO: 847224 - DNA, 100 bp, Homo sapiens
ccttaataaccagcggagctgacacagccaaataacgaaggaggcccaacttcattcaataaggagcctgacggatttatcccagacggtagaacaaaag

SEQ ID NO: 847225 - DNA, 98 bp, Homo sapiens
gctgctaaaaccacctttgtcaccagaatgaatgaagtgcttcagatttaaatataccctcttatatatggactgattcttattccctgctggtgttc

SEQ ID NO: 847226 - DNA, 100 bp, Homo sapiens
gcttttgtcgcgctgggacctaccctgactacgggagttgggaggacccgggacaccgcacagccgggaaatgggcatccgcttcgatcctgaaattccg

SEQ ID NO: 847227 - DNA, 100 bp, Homo sapiens
atccgcctcgagccgcaggaggtgccgcgcggctcggagccctggaagcagcagctcaccgaggacggggactcgttacagtcttcttcataccttgatg

SEQ ID NO: 847228 - DNA, 99 bp, Homo sapiens
agcgagaagctgaaaattttcatgaggcttcaggtgagaccacaggagttgacatcactaaaattcaagtcaagagatgtgagaccatgagagagaagc

SEQ ID NO: 847229 - DNA, 99 bp, Homo sapiens
ccggaagagagctggggatgagttggcttatagtgtaataatgtcctttatatcagaggtgtggaagaagaggaagaagatggggaaatgagagaatag

SEQ ID NO: 847230 - DNA, 100 bp, Homo sapiens
taatgaagaaggagctctgtctgtactacagcagttcaaggaaagtgacttatcacatgttcaggccaaagaggtgctgaaaaaatatttggagtccaag

SEQ ID NO: 847231 - DNA, 100 bp, Homo sapiens
ttggtgtgattagcttcgcagtctggaaagctttaggagttcacagtgacctgaaggagaagaaggagaaggtggaggagaaggcaagccggaaagagcg

SEQ ID NO: 847232 - DNA, 116 bp, Homo sapiens
tgatcctgagggtcccgcgctgctcttccctgagagtgaactttccatccggataggtagagctgggcttctttcagatttgaggcttaagcaacttcttccggggaagagtgcca

SEQ ID NO: 847233 - DNA, 100 bp, Homo sapiens
gaccgctgtgtgaacatggatgggtggcaggccaacatgagagctagcaatctagagaatagtacctatgacctgtacaccatccctaaagatgctgact

SEQ ID NO: 847234 - DNA, 100 bp, Homo sapiens
ccagacgcctttgtgcagctggccctccagctggcgcactacaagtgctattaccacagctactggcactccatggtctatgtgccacagatgcagcagc

SEQ ID NO: 847235 - DNA, 98 bp, Homo sapiens
aagtggttggttgcagttgtgtagtagttaagagccagataacagtgaatggaaactcaggaggtgccgtgagtcccatgagttactatcagaggccg

SEQ ID NO: 847236 - DNA, 100 bp, Homo sapiens
ttgtggcaatcatcctgaatgaatttagagccaaactgtccaaggctttggcatcgaaattctacattcacgcaggaaggaacccggttacgaccatctt

SEQ ID NO: 847237 - DNA, 100 bp, Homo sapiens
tttcttcctgcctttgggccgtcaggcagttggttgggacccgctccaaccctcgacttatgaaaatatgcatcagtttaatactgtcttggaattcatg

SEQ ID NO: 847238 - DNA, 125 bp, Homo sapiens
ttgggttttttgtggcttccttcgttattggagccaggcctacaccccagaggtgcccacgagtgtattcggggagaagcttcgagaacaagttgaagagcgactgtccttctatgagactggag

SEQ ID NO: 847239 - DNA, 100 bp, Homo sapiens
caagatgaaatttgctctgctaaaaggctccttcagtgagcaaggcatcaacgagtttctcagatgtgggaagaatatcctgatgtttatggggtcaggc

SEQ ID NO: 847240 - DNA, 99 bp, Homo sapiens
tgtaatgctgtccgccaggccctgcaggacctgctttcggagtacatgggcaattttggatttaggtggcgagtagaaaaagaagtaatttcaggaaaa

SEQ ID NO: 847241 - DNA, 100 bp, Homo sapiens
tatatgattttctttaaggatggtttagaaatggaaaaatgtttatgagttgcagaaacgaattgctgaaatggaaactcaaaaggaaaaaattcatgaa

SEQ ID NO: 847242 - DNA, 99 bp, Homo sapiens
cgactcgcggaccggcgtccccggcgcgaagaggctggactcggattcgttgcctgagtgccaactacctcaggaaccgggagtgaaactactggggtt

SEQ ID NO: 847243 - DNA, 98 bp, Homo sapiens
cgcagaattaccgcctcttctttactgttcaacggttttgtgtatagcatttgaggttcttcagggcttgcagtatatgaacaaacatggtatagtac

SEQ ID NO: 847244 - DNA, 100 bp, Homo sapiens
gaggacgccatccagttcatccgccagaaagaccacagcaagattctttcattcgtctcctcctagcctgggggaccaggctcgaactgaccctggacat

SEQ ID NO: 847245 - DNA, 98 bp, Homo sapiens
ggcaccgctggaacactaatgagttggtcctgagaaaagggtgccagcgatgcctggatcgcctgtggaagtgaagatacagtccagatcctcacctc

SEQ ID NO: 847246 - DNA, 100 bp, Homo sapiens
ttcaatgacatgaagaacgtgccagaagccttcaaagggaccaagaaaggcactgtctaccttaccccttaccgggacagagcgggatgccaccagcttg

SEQ ID NO: 847247 - DNA, 100 bp, Homo sapiens
atgttcaatataagaaatattggaaagacgctcgtcaccaggacccaaggaaccaaacatgttgagtcagaattgcttcatacctactcttctatcttgg

SEQ ID NO: 847248 - DNA, 100 bp, Homo sapiens
aggagggacccacagggctgaaggaagctgccttgtacccacatctcccgccagcaacgaaggttttgggaacagtaaaatggttcaatgtaaggaacgg

SEQ ID NO: 847249 - DNA, 100 bp, Homo sapiens
aaagccagagcgccaggagtcagcaaaacacactaaagattgggcagtcactggggagaacacccaagtcttggattgaggaacaggcaatgggatcatt

SEQ ID NO: 847250 - DNA, 98 bp, Homo sapiens
ttttccctaatctgatgggtcattatgaccagagtattgccgcggtggaaatggagacttgggaagatccccatgaaaaagataagagcacgaactgc

SEQ ID NO: 847251 - DNA, 100 bp, Homo sapiens
aaagatgatgagaaataaggacaaaagccaagaggaggacagttcgctacacagcaatgcatcgagaagtttgcctgcaatggtactgtaattgagcatc

SEQ ID NO: 847252 - DNA, 100 bp, Homo sapiens
cctccggggccacaatagcgagtcataccctaatgatcccagcaagataatgtcctgtcttctaagatgtgcatcaagcctggtacatactgaaaaccct

SEQ ID NO: 847253 - DNA, 100 bp, Homo sapiens
acttactctaaacttcacaaatggttctgaagagtatggagcctacgtagattcataagatgatgaaaaactctcagaggtagaagaagctcaggaagca

SEQ ID NO: 847254 - DNA, 100 bp, Homo sapiens
ggtgtatgggcctgacctcgtgaacatctcccatttgaatctcgtggctttccaagaagaagtggccaagctttttagttggagaaggagcctacagatg

SEQ ID NO: 847255 - DNA, 100 bp, Homo sapiens
ggaacagattgttcctaaaccagaagaggaggttgcccagaagaaaaagctctttcgacgtgtagcagcagctttgccgggaatggaaagcacacaggac

SEQ ID NO: 847256 - DNA, 100 bp, Homo sapiens
agctgtcccagaattcagctataaagcagattgataaaggaagctggcaaacaagatccagagctggcttatatcagtagcaatttcataactggacatg

SEQ ID NO: 847257 - DNA, 98 bp, Homo sapiens
gaggtttagtgccctcctgagtgactgcgtcaggcatctcaatcatgaaatcatgaccaccccaggaaaagagaactttcgcctgaaaagttacaaga

SEQ ID NO: 847258 - DNA, 99 bp, Homo sapiens
gaagatgagattcttcagttctccatgtggaaaagcagctgtggacccaggacaaaagactgtgttgtcaaatgttcaggaagaactggatagaatgac

SEQ ID NO: 847259 - DNA, 99 bp, Homo sapiens
ctaaatgtagacaatggttagagaagaattttccaaatgaatttgcaaaacttactgtaggtccagcaagactatgaatctctgttccaaatgctttgc

SEQ ID NO: 847260 - DNA, 100 bp, Homo sapiens
ctgtcaacaaggccggaaaacttcctaggagagattgagatgtggaatgaggctgagaaggtcatgcctcagctcctaaactacctgaaggctgacagac

SEQ ID NO: 847261 - DNA, 98 bp, Homo sapiens
cagcttcacacattcctggagtgccgcctcctgctctggagtatctgttgctgctttctaaaaccattagtagcaaggaagtttgtaggagcagcaaa

SEQ ID NO: 847262 - DNA, 100 bp, Homo sapiens
ggagatctgcctgaaggacctggaggaggaccacgcctgcatccccatcaagcttctccaggcagccaccaactaccacaacgggcacacaggccagctc

SEQ ID NO: 847263 - DNA, 99 bp, Homo sapiens
ttcagtttacagttcattttttgcttggtttggaaaaatttcattagaggactacaaagctgatgaagacccagcattattccagtcagtcaagaccaa

SEQ ID NO: 847264 - DNA, 99 bp, Homo sapiens
tgcatgtactgggggattcgcagggaggatgtcgggacaccccggaagctgggaaatggtacagctatggatgcacttaatagcatgcagaatttctta

SEQ ID NO: 847265 - DNA, 100 bp, Homo sapiens
gtgcattttactcggagagaggccatcaagcagatcgaggtgctgcagcacgtggccaccaacctggggcgcagccccagcggagggaccttcagtccag

SEQ ID NO: 847266 - DNA, 99 bp, Homo sapiens
ttacaaccacaggcctcaagtggaacctcaaaaccaatagagccatggcgactccctctgctgccttcgaggcccttatgaatggtgtgacaagctggg

SEQ ID NO: 847267 - DNA, 100 bp, Homo sapiens
ggtcaccggagcgacagaaaacttggaactaagctggaggacaccgagtactcttatgcagtccccatgaataactgaagtgaagtgatggactccgatt

SEQ ID NO: 847268 - DNA, 100 bp, Homo sapiens
tgttgctttttgatggccatggcataaggaactctatcccaggaatacagctttgcattaggtaaaatggaccatggaagtaatttgctatggactgacc

SEQ ID NO: 847269 - DNA, 100 bp, Homo sapiens
ctgctcacgctcggcaccgcgctcgcctccctcggctcggcccaaagcagcagcttcagccccgaagtattgttgcagcatctggcagtgagactgagga

SEQ ID NO: 847270 - DNA, 98 bp, Homo sapiens
aagatgaagatgaaaccaagcccttgacttaattcagtgcacaaatgagatgaatgtgaacatcccacagttggcagacagtttatttgaaagaacta

SEQ ID NO: 847271 - DNA, 98 bp, Homo sapiens
accagtgagaactgcgagcactttgtgaatgagctgcgctatggagtcgcccgcagtgaccagggtcctgtattaataggaagttcacatggtggtgt

SEQ ID NO: 847272 - DNA, 98 bp, Homo sapiens
acgccgtcgcggtggactgcaaggagcatctttccttgaagaagtacattattgacattgtggttgaaagtacagctccagcagaagctttgaaagat

SEQ ID NO: 847273 - DNA, 100 bp, Homo sapiens
gcctgcgtgataacaagggcacacccaggctgcggaccacggttggtgtcgacggatctctttacaagacgcacccacaaccctcagtgcagacgcaagc

SEQ ID NO: 847274 - DNA, 100 bp, Homo sapiens
cagtggataggcctcaatgacaagatgtttgagcatgacttccgttggactgatggcagcacactgtcgcaatgtatctgctgagcaaaaagatgaaaac

SEQ ID NO: 847275 - DNA, 100 bp, Homo sapiens
ggaaccgaaaaggcgaggagtatagtacggcaaaaaactgtcggtaaattcaactggaagggaactattaaagcaattctgaaacaggccccagacaatg

SEQ ID NO: 847276 - DNA, 99 bp, Homo sapiens
accttttaccatgaatagttctactccttctacaggtggtttgtgatgaaaatggttccaagggctatggatttgtacactttgagacgcaggaagcag

SEQ ID NO: 847277 - DNA, 100 bp, Homo sapiens
catgcagcgatatgcagtttggtttggaggatcaatgctggcttccacgaagtcaatgaaaggattctattttgcaaagctgtattatgaagctaaagaa

SEQ ID NO: 847278 - DNA, 98 bp, Homo sapiens
gctgccatctttccaggaggctttggagcggctaaaaacctgtaaaagtatggtttcagaaccgaagaacaaagttcaaaaggcagaagctggaggaa

SEQ ID NO: 847279 - DNA, 100 bp, Homo sapiens
gtgaggaatctggattgtcacctttgctgcaaaaaattacgggaaaatatgttggagaggattcattttcacatagtgccaagcagagatgcagacatgt

SEQ ID NO: 847280 - DNA, 100 bp, Homo sapiens
gcaaccagctagctactcgagagtgagaactcaacagaggcaaaagcagtagattctaacaatcagtcgaagtccccactggagaaatttatggtcaaac

SEQ ID NO: 847281 - DNA, 100 bp, Homo sapiens
gtttccctcaaattttgtgaaagaattagaggtaacagatgatggtgaaactcatgaagcccaggacgattcagatctctttcccagggccatggcgaac

SEQ ID NO: 847282 - DNA, 100 bp, Homo sapiens
ggtatactgctcaaaagagaaggccccaacttcatcacaaaggaaggttcaaaccttgtactactcagctgatcacaagctgcttgatgggaacctacta

SEQ ID NO: 847283 - DNA, 110 bp, Homo sapiens
aaagaagtctttacaccgccaatccacttcctgtggcaactacaggggttttgtaatccagagtagaagatatgcaggaaaagattctgatgcatttggtggatatggga

SEQ ID NO: 847284 - DNA, 100 bp, Homo sapiens
cccgctttgttcagctgcagcatggagagatagataaacggcctttctgagaaaagtctacagcattctttctctgcaggttctcttaactacagtgact

SEQ ID NO: 847285 - DNA, 100 bp, Homo sapiens
atctatgtggtcattgatctccctatcaatgtatttaagaggaggaagatgactatctctttgatgatcctctgccaatacctttaaggcacaaagttcc

SEQ ID NO: 847286 - DNA, 100 bp, Homo sapiens
ttatgctgggatgtgccttagaggattatggagtttatgcgaattccatgtgtggatgctggattgatttcaccactggtgcagctgctaaatagcaaag

SEQ ID NO: 847287 - DNA, 98 bp, Homo sapiens
cactttgctgtctgtcatgtggatgccccaggccagcaggaaggtgcaccctctttcccaacaggcatgttggcagataaattgaacatgactccaga

SEQ ID NO: 847288 - DNA, 98 bp, Homo sapiens
gaaactttggtggtagcaggaacatggggggaccatatggtggaggtgaatgtaatccacacggccaaccccatggaacacgccaaccacatggctgc

SEQ ID NO: 847289 - DNA, 100 bp, Homo sapiens
ctgcacattgaccatcatagtggtccagaaatgattatttggactagggccgtagcagtggagagaggtctacaaggaagtcttcacgaggagcagtgag

SEQ ID NO: 847290 - DNA, 100 bp, Homo sapiens
cagataaagacaatggagggatgcttgtatggtctccatatcacagtatcccagatgccaaatcagccacctcagcagagaagtgctcctgacatctctt

SEQ ID NO: 847291 - DNA, 116 bp, Homo sapiens
aaagaaattgctgcagattttactttatgtgagaaaatctacaatttcttcgagacactcatataaaggaaacctaaagatttttcatgatgatggtgtattctgggtcactttct

SEQ ID NO: 847292 - DNA, 100 bp, Homo sapiens
aatatgctgcaagatttggggaatctatagttaatcttggcgacattgacaatgatggctttgaagctatcagttgagggatttgcagttgataaaatgg

SEQ ID NO: 847293 - DNA, 100 bp, Homo sapiens
aaatcacaattaaaagaacaagatcagaaatggcaggatggtctttttggagttcctgagctgagtgccccagaaggatttcatattgcacaagaaaaag

SEQ ID NO: 847294 - DNA, 100 bp, Homo sapiens
gtggtgaatcccctgtttgagaaaaggcctaagaattttggcattgcatggtaagacacaaggatggtggctattccgaggaagaggacgtgaagacctg

SEQ ID NO: 847295 - DNA, 100 bp, Homo sapiens
atgcaatggtgaggtggactgcattacaggggaagatgaagttggctgtgcaggatctaagcctttcccacgttatggttataaaccctccccaccgaat

SEQ ID NO: 847296 - DNA, 100 bp, Homo sapiens
atccagaagtccagagctgaggactgcctgtttgcagagaaacagcacccaggactatcttccaaagagttctggatatcctaaagaaatcttctcatgc

SEQ ID NO: 847297 - DNA, 100 bp, Homo sapiens
cggcggcggcggcgcagctattgctggacggccagtgggagagcgaggcctgagcctctgcgtctagaccattactgggacttccacccccaccacgtgc

SEQ ID NO: 847298 - DNA, 100 bp, Homo sapiens
gtagccatgctcatgatcggcgtgtttggatgtactttacaggacccagatgatgtggtaccagttggccaaagaagagcctggtgttggtgcatgtgct

SEQ ID NO: 847299 - DNA, 100 bp, Homo sapiens
aacccccacaaatgccacagcagcgtcagattcatgatgagatttcagtgtcaagcatggatgcttctagacaactaatgttgaatgaagaacagttgga

SEQ ID NO: 847300 - DNA, 100 bp, Homo sapiens
tgttcatgattctgcccaccctggccattgcgtatttcacaggagatgcacaaaagcagccgctcttctaaaacattcaaaccaaagaagaatatccctg

SEQ ID NO: 847301 - DNA, 100 bp, Homo sapiens
ctcctccagttaccaccctcctccctagcataaaggttttttgattaactcaaaaccagagaatgcctgtgaacccatagtgcctccaccagtaaaagac

SEQ ID NO: 847302 - DNA, 99 bp, Homo sapiens
ctgaagtcagcatcgaccagtccaagctgcctggagtcaaggaagggctgggtataagtaagcaagaagagggcctgggagaagagtctgacgagcaag

SEQ ID NO: 847303 - DNA, 99 bp, Homo sapiens
ggagagcggcaactcgcgcactcaaaggatacatgcttgatgatgcagatagcagttcattagaaatcctagaaaacagtgaaacaacaccaagcaaag

SEQ ID NO: 847304 - DNA, 100 bp, Homo sapiens
gatcaaaatcttcgaaggaggaccatttgggatgaacatgacaacaggactcgactggtggagaggattgatactgtcaaccggtggaaggagatgctgg

SEQ ID NO: 847305 - DNA, 98 bp, Homo sapiens
ctgcagatagagacatatggaccacatgttcctgagcttgagatgctaggaagacttggagctatcagcttcccagtttgcacaattcatcaagaaat

SEQ ID NO: 847306 - DNA, 98 bp, Homo sapiens
caaaagctataccaaaagggccatgtttcaagaaaatggatttaaacatatttccctgtggagctgactttggtttctgtgcccagatcacccctgag

SEQ ID NO: 847307 - DNA, 100 bp, Homo sapiens
gaagaaaaaagaagtaaaagaagctattattacaagaataaaggcaggaatcaatccattcaatgactcagcaggcatgactggagagggaagtcccaat

SEQ ID NO: 847308 - DNA, 98 bp, Homo sapiens
cgctggagctgggtcagtccgccgctcaccccgcggccgcaccttcccgccttctcagttttgacagtgtttcctgccttgctgactcttcttccctc

SEQ ID NO: 847309 - DNA, 98 bp, Homo sapiens
gccaatgccaagtccagagcggttagataaggtttattacagaggtcagctgggaagagctaccactttaagtgtaactcctgaaatggaaagagtga

SEQ ID NO: 847310 - DNA, 148 bp, Homo sapiens
ctgcgacgagcgcggcagcgacctggtgacggtgtacaacaccctgagccccatggagccccacgccctggtgcagggacaagcaggccttcgcactatcacgtcctctgggacgacaatcgtttctcctctgatgagctgcagatcc

SEQ ID NO: 847311 - DNA, 98 bp, Homo sapiens
tctgcttcaatgtgggccgggagctgtacttctatatctacaagggggtccgcaaggaacaggagtacagctgtgtagtaaagatgccttctggtgaa

SEQ ID NO: 847312 - DNA, 100 bp, Homo sapiens
gataattctttttatgtgcgaacatgtaacaagaatccaaagaaaacaaaatggtggtatcatgggtaggagtcaatgaagacatcttagtcttaacaag

SEQ ID NO: 847313 - DNA, 98 bp, Homo sapiens
aactgttaggtttttatccaaaatgtttcatccaaatgcaaacccgctggttcagaaccaacacctaagtcacgcattgcagaccttcctcctgccaa

SEQ ID NO: 847314 - DNA, 100 bp, Homo sapiens
caagaaattactgtctcaagtgatacggacagtcggcccaatatgtcaagacctctgatcactagatcccctgcatctccactgaacaaccaaggcatcc

SEQ ID NO: 847315 - DNA, 100 bp, Homo sapiens
taaggctaggccgcgagcttagtcctgggagccgcctccgtcgccgccgtcagagccgccctatcaggtaattcatttgcacacctgttagcaagaaaca

SEQ ID NO: 847316 - DNA, 100 bp, Homo sapiens
ctggagctctgggctgcggcgcacgccttgcccgcccagcacacggcactttcttgggtcacattcggttggaacctcacaagcctcagcaaattcccat

SEQ ID NO: 847317 - DNA, 100 bp, Homo sapiens
agagcggccgccgccgctgccgcttccaccacagttcgatcctttggtacagaagacagaccgacagatcgtccaataccacctcgagatgaagtctttg

SEQ ID NO: 847318 - DNA, 75 bp, Homo sapiens
tcgtgatccagaagtccagagctgaggactgcctgtttgcaggagacagagctactggatctcagccttgtcaaa

SEQ ID NO: 847319 - DNA, 98 bp, Homo sapiens
cgtgggcggcaaggacttcgagcagcctctcgccatttcccggagagaggctgctcacccaacagacgtctccatctccaaaacagccttgtactccc

SEQ ID NO: 847320 - DNA, 100 bp, Homo sapiens
ccctcgccaagagttgatcctcagcaattctgaggacaagagtattcgagtctgggatatgtctaagcgtatggaagctccaaaaggaaagataccagat

SEQ ID NO: 847321 - DNA, 100 bp, Homo sapiens
tgtcatgggtattgtgcaggacacactcacagcagtgcgcaaattcaccaagagagacgtcttcctggagcgggaccctgctgggatctttgagcttgtg

SEQ ID NO: 847322 - DNA, 98 bp, Homo sapiens
tctgacgacattgaagctagccgaatgagatgcctacatagaagagtgacagcagctagactaaatgtttaactgctgaactagttcctcaggtatcc

SEQ ID NO: 847323 - DNA, 100 bp, Homo sapiens
tcgagcttatgcagagcagcgagctgatcgggaactggctccgttgtgctgaggtcatctttggtcatcagcctccagcatctggaaacacctccaacgc

SEQ ID NO: 847324 - DNA, 99 bp, Homo sapiens
ggcagcaaagtgaccgttggagtttaatgagaggaatatactcatcatcagtctatttagaagagatgggcagccagatatatcaaggccttttggatc

SEQ ID NO: 847325 - DNA, 99 bp, Homo sapiens
tttctcttctgcttgcgcattaaagttttaacagtcaagagaatccatcccattaaatgacctgaagtcagaagtatcaccacggatttcagcagagga

SEQ ID NO: 847326 - DNA, 98 bp, Homo sapiens
tttctaccaagctgggacttccaaagctgggaatcctattttttattatgttgcacggagggtccttgtgctgcagaatcagaaccagctcttttgat

SEQ ID NO: 847327 - DNA, 100 bp, Homo sapiens
tttaaggatggtttagaaatggaaaaatgtggagaaaactggttgtcctggatgtttgaaaagttggtcgttgtcatggtgtgttacttcatcctatcta

SEQ ID NO: 847328 - DNA, 98 bp, Homo sapiens
acaggactgttttattcttggggactggagatggccagttacttaaggattcttctctaatacttgatgttcctctgggtgtgatctcgagaattgaa

SEQ ID NO: 847329 - DNA, 99 bp, Homo sapiens
ccacttcacacatggagagatgcaagaccagtccatttggggaaatccttcggatggtgaactcattagaacggccctgggagagcctcagctctgcta

SEQ ID NO: 847330 - DNA, 100 bp, Homo sapiens
taagaagaggaaagacttgtctcaggttatcaatactctggctgaccatcatcatcgtgggactgactttggtggaagtccttggttacatgtcattatt

SEQ ID NO: 847331 - DNA, 100 bp, Homo sapiens
gggacatcagtggagccttctcagacccacagcaagagtgagccatggagctacgtgtggggaacaagtaccgcctgggacggaagatcgggagcgggtc

SEQ ID NO: 847332 - DNA, 100 bp, Homo sapiens
tttcagtgttcttggaggtgtggggtgtgagaacttgatcagtttgtgtcagccaccttgttctctaaagctcttccaccaaagccacctaagccaatga

SEQ ID NO: 847333 - DNA, 100 bp, Homo sapiens
ggaagtgccagcactgtggacactctttgtcatctcaatggctggggaaggtgctcaattcccatacatgcactagagttttacatgtggcacccataaa

SEQ ID NO: 847334 - DNA, 100 bp, Homo sapiens
tgcattggatattcgcatgcctggggttacacctaaacagagcggaaacgcttgggcattggccagtctcaggagatgaacacactcttccgcttctggt

SEQ ID NO: 847335 - DNA, 148 bp, Homo sapiens
aactccattgttgcattgttgtccgtggactttcatgctttagaacaagatgccagcaaagaacagcagcttagggtcagagtactgatcggctactatcaacagaacctcatgaggaagtacctaatattcttcagcaaccattggc

SEQ ID NO: 847336 - DNA, 100 bp, Homo sapiens
cagtgtgccagaagcccagtcagcattagactctacatcttcatctatgcagcccagaacccagtgacttgattgtaaaaatttacagagcggaatcata

SEQ ID NO: 847337 - DNA, 100 bp, Homo sapiens
tcaccatctgaagtttttacaaagatcagactggtactagaagtgctccagaaacagcttctaggtgttggagtgtggatatgagtcatggaactctggg

SEQ ID NO: 847338 - DNA, 100 bp, Homo sapiens
gcagttcgacttcaacgctgagccaccttgggaacctagctgatgataggggggttccatctcccaacttgtccatatatgatgcttcctggtgtgttta

SEQ ID NO: 847339 - DNA, 99 bp, Homo sapiens
tcgtggccagtgactacccctaacgcacaataatatggctccgatgggctcaaaggaactcttaacattcagggatgtggccatagaattctctccaga

SEQ ID NO: 847340 - DNA, 100 bp, Homo sapiens
gggcgagaggaggcgagaggcgcaaagccgtttcctctccctcgccggcctcggcggagattccaggccctatagaaaccaggacgtcccttagcgccac

SEQ ID NO: 847341 - DNA, 98 bp, Homo sapiens
ctcctgcgtagctgggattacaggtacatggtaggatcaacttcctgaccttgtgacagatcctgccagtaacatgagaggaaatgagaacgaggctt

SEQ ID NO: 847342 - DNA, 100 bp, Homo sapiens
ccaacatcacccacccatttgagtttgacttctatctgtgcagccacgcaggcatccagcctgctgatcttaagaagagaatagaatctttaattgaccg

SEQ ID NO: 847343 - DNA, 100 bp, Homo sapiens
aagattttaattgaagctggaaagcttggacttggtgagaaggactggcagaaatacgagactgctcggcggctgaaaaaatgtgtggacaagatccgga

SEQ ID NO: 847344 - DNA, 100 bp, Homo sapiens
ccactttatgacatggtagaaagaatattatattccaagacagagcacctaggattaaattggtttcctaagtgcaaatgtcaattgtcaagccttggac

SEQ ID NO: 847345 - DNA, 100 bp, Homo sapiens
ggcggctttgcatcggaaatcagctctacagttcaggatgaactggacctcacagacaaacacagagaagccatgtttgcacttccagctgagaaaaaat

SEQ ID NO: 847346 - DNA, 100 bp, Homo sapiens
ttgtggcacctatctatggtgcagatattaatgggagcatatatgatgagcccattgcagatgcaaaggctcctgagaagcgggcctcaccatccaagcc

SEQ ID NO: 847347 - DNA, 133 bp, Homo sapiens
ccagcgccgcgggatgtagcgcgggggaccgcggcccccagcagagcccgcctgcccggctatagtcactgccaatccttggaacacaattgctcttctctgtggcgccttcttggcattatttaaagcagca

SEQ ID NO: 847348 - DNA, 100 bp, Homo sapiens
gtttaactgagatccgcctctgcaggctatccatggacttttaaattatctcgtttgacagcaagtttgtttaccagcaaataggactcggaccaattga

SEQ ID NO: 847349 - DNA, 100 bp, Homo sapiens
ggtgccaccttcattcaggtgaaaaagcatagctttgagcgaattctcactaagttcagctcttttggatcccctaacaacagtgagagagcaatgcgag

SEQ ID NO: 847350 - DNA, 98 bp, Homo sapiens
ttgacttggtgttgaaagtgaaatgtcatgcctctgaaaatgaagactttaagaaagaaaggccttaatggttgtgagagccctgatgctgacgatta

SEQ ID NO: 847351 - DNA, 98 bp, Homo sapiens
gagatgaaggtgcgcatcctctccgagcgtaagaagcctctggacattgactacatgggggaggaacagctccgatgagtgatgtagaagctggtggt

SEQ ID NO: 847352 - DNA, 100 bp, Homo sapiens
attatggtcttgatccaaagattgctaatgcaataatgaaggcagcagatgaggcacgcatcgaggagctggaggaggagctggaggccgagcgcaccgc

SEQ ID NO: 847353 - DNA, 99 bp, Homo sapiens
aggaacctacaaatacatctttggaacaggcaccaggctgaaggttttagcaagtgagactgctgctcctcgggccattttgaccggccatgactatga

SEQ ID NO: 847354 - DNA, 99 bp, Homo sapiens
tgccagcctggacttcgcgcagtgcctggggtactacggctacagcaaggtacttgaagaagcagaagctcaacatttatatcagtccatcttgcctga

SEQ ID NO: 847355 - DNA, 100 bp, Homo sapiens
gctgtgtgaagcttcgagcattgacaggtatagaacaattggagaagaatccatcaccccggattgtgaaaacacatctaccgactgatcttcttcctaa

SEQ ID NO: 847356 - DNA, 100 bp, Homo sapiens
gatagcttatggcagtgatagtcaagtgtatcacgccgtgaagtcaactgtttgtcgacagaggtacgttcttggagacacagcaatgcagaagatggcc

SEQ ID NO: 847357 - DNA, 100 bp, Homo sapiens
ggaaacccaccattgtctgaatgtgattggcacaagtcaccccaaggccctgtctctgcccctggtggtcatcgtccatggcaaccaagacaacaatgcc

SEQ ID NO: 847358 - DNA, 100 bp, Homo sapiens
tccctgatgacaagcttaccctcttctgcgaggttgatggaaagttattatgctggctctgtactttatcgtacaaaagagttttacagaagacgaaaga

SEQ ID NO: 847359 - DNA, 100 bp, Homo sapiens
cagcaattcaagactgtctttcctaccctcttcagtgcccttccttgataagctgtttaaaccaggtcatttggatccaggattcctagcaagtgacaaa

SEQ ID NO: 847360 - DNA, 100 bp, Homo sapiens
ctgggatttttgggtggtgcaaagctgtctgaaaacgtggtgaaccgcatgaaggagcccagctctccaccccctgctcccacatcttctacctttggcc

SEQ ID NO: 847361 - DNA, 100 bp, Homo sapiens
aggagcaggagcttaaagaacgagaaagacgtttaaagatgtgggagcaaaagctgacagagcagtccaacaccccgaccctacgtccgctccaagggcc

SEQ ID NO: 847362 - DNA, 98 bp, Homo sapiens
gtatcgacatacacactgggtacgctgtgccaaaggcggggtttcaccatgttgcccagactggtcttgaactcctgagcttaagcaatccacctgcc

SEQ ID NO: 847363 - DNA, 100 bp, Homo sapiens
ctccacctcgaaggaaaattccccagtgttcgcagttgcagggtccacatatagcctcagttacattagctgcttatgaatgcaattcagttaattttcc

SEQ ID NO: 847364 - DNA, 99 bp, Homo sapiens
aatgctgaaagaagttcaacctaggagagatggctgcccaaagattgtcaatctggggagctctaagacagacctcttctatgaacgcaaaaaatacgg

SEQ ID NO: 847365 - DNA, 130 bp, Homo sapiens
ctgttccagaagagaaaaagcccaggcataaaatcatctccatattctcaggcacagagaaaggtatgcttcagaagtgtccttctgttgatgacttcgtaagtgccctcgtttccgacttggatctgga

SEQ ID NO: 847366 - DNA, 98 bp, Homo sapiens
tcagcaggacgtgggaggctccggcttcaagaacaaaatccagtctcatagcagaggagaatataatgtttacagcaccttccagagccatgaaccag

SEQ ID NO: 847367 - DNA, 100 bp, Homo sapiens
tcaagtggtgcagtgaccaatcagaaataatatccaatcagtacaacaatgagccttcaaacatatttgagcaagttgtcctcgaagaaggtacaattgc

SEQ ID NO: 847368 - DNA, 100 bp, Homo sapiens
tcatgaaatccattgtaaacttggattctcctatggtatcaccacctccagactatcctggagaattttttaaagcaatgcagcaaaaaagcctctcccc

SEQ ID NO: 847369 - DNA, 139 bp, Homo sapiens
cttctgattccctgtgttctgcttttttcattgttccactggacgctcatcagagggaagatctttttcctcaattgaaccccagctcaaagggattgtgacaaggttattcagccagcagggatacttcctgcagatg

SEQ ID NO: 847370 - DNA, 98 bp, Homo sapiens
tggccctcgggctgcgggagccgggctaggacgccgagcggtgactccccgccgctcccgggggccgtgacgtttgaaaaagtaccagaaggtcctat

SEQ ID NO: 847371 - DNA, 100 bp, Homo sapiens
ggtccaagatgcaaggcttgctggagcgcgtgaacacggagatacactttgtcaccaaatgtgcctttcaggtttctagtcacatccaggttttggcccg

SEQ ID NO: 847372 - DNA, 100 bp, Homo sapiens
gaaagtgcggcggccctggaacctggatatcgcgcgagatgctgatgcagagattgaaggagccccagctgctcccttggatgtgaagtgcttggaggcc

SEQ ID NO: 847373 - DNA, 101 bp, Homo sapiens
acgtcacatgtcattataccttcacccagcatttcatccctcgtcgaaaggattggattggcatctttagagacaaagtattttggacagatatcatcaac

SEQ ID NO: 847374 - DNA, 100 bp, Homo sapiens
gtatggtgcggaatttaattcagaaagatagaacctttgctgttcttgcatacagtttagatgcaaaatccacaagtattcaagtgattgttaaagaggg

SEQ ID NO: 847375 - DNA, 98 bp, Homo sapiens
gcagtctaaacctgtgaccacccctgaagaaattgcacaggaagcccatgaaacctttaatgagtggtttaagcatatgaattcagttccacaaaaac

SEQ ID NO: 847376 - DNA, 98 bp, Homo sapiens
cttctgacagtggagacactggcattggaacttcctgttctgatagcgtggaagagacgaagtttcatcatgttgtccaggctggtgtcaaactcctg

SEQ ID NO: 847377 - DNA, 99 bp, Homo sapiens
gactcggtcctgtttcgacagcgaacatgtcgcggcctgtcaggtgaccaagaatatggcccaggtgaccaaagccctggacaaggccctgagcaccat

SEQ ID NO: 847378 - DNA, 99 bp, Homo sapiens
tagaggtcatgctggaagtgtagattctatagctgttgatggctcaggaactaaaatttctcgaatgctggcagccaaaaccgttttggctatccgtta

SEQ ID NO: 847379 - DNA, 100 bp, Homo sapiens
agaggaagaagaggaagacgaagaggaggatattgataaggtccaggtcaagacctcgtctccgttctcatagtcgtagcagtgaaaggtccagtcacag

SEQ ID NO: 847380 - DNA, 110 bp, Homo sapiens
ggcactgtgcagagatcagagtactaagagacagaaaatgcttggacagaagagatgagtactatttccactaaggcctagaattgcctactgtacaaatagtcctgatc

SEQ ID NO: 847381 - DNA, 98 bp, Homo sapiens
gcatgaaggacagcctcttctcaatgttgtatatgaacacagatcaagattagagaaatccttgcaaaaagaaagacttgaacataaaaaagcaaagg

SEQ ID NO: 847382 - DNA, 100 bp, Homo sapiens
aatatggattccaaagagcgtttggatcaggacggacgcttgatcagtggaccatcccctgcccggatcctctctctccacagactatggcagctggcag

SEQ ID NO: 847383 - DNA, 100 bp, Homo sapiens
ccactccggaaatgtcactcccaccgccccaccgtacttgcaagaaagcagccccagagatgagctcacagtgcctgcactttaccccagtagccctgaa

SEQ ID NO: 847384 - DNA, 100 bp, Homo sapiens
ggaagcagaggaagtagtttaaatgatacctatcactcaagagactcttcatttagattggattctgaatatcaggacaagcaggaggacatgaagacta

SEQ ID NO: 847385 - DNA, 100 bp, Homo sapiens
gctgcccatgcttataaacaagtggatccgtctattacgtggtctcatggattataaccatttggatatttggttcactaacaattttcttactggccag

SEQ ID NO: 847386 - DNA, 100 bp, Homo sapiens
cgggcccaggaaaaagaggaaagtggactgtccggggccgggctcaggagcagagatgccttcaattaagttgcagagttctgatggagagatatttgaa

SEQ ID NO: 847387 - DNA, 100 bp, Homo sapiens
cactgctgagggggcgcgaggggaacggaggccagagctgcggagatgcgctctgtgctgcggaaggcgggctccccgcgcaaggcccgccgcgcgcgcc

SEQ ID NO: 847388 - DNA, 100 bp, Homo sapiens
gctgtgtttccgacctcatctccaggacagtgggaagagtggctggaggaattcagtttcttggggatgctgtcttcgcaggtgccatgcctacaatggc

SEQ ID NO: 847389 - DNA, 98 bp, Homo sapiens
gagcccacacaagtttacagtttctggtgatgaacgaggtgggtttggaggatttgggacaacatctacaactgcaggttctgcattcagcttttctg

SEQ ID NO: 847390 - DNA, 100 bp, Homo sapiens
tttgtttcctgtaatgttcagagtgttgatgagaagaccctatactcagaggcgacaagaacacgatgaacctattctgaagcacttgaaagatattaaa

SEQ ID NO: 847391 - DNA, 100 bp, Homo sapiens
ggtattcccttccatgagaaggacctcgtgcagcctaccagtgacaagaccatcctgtactcggtggccaccaccctggtgaactgcaccaacagctacg

SEQ ID NO: 847392 - DNA, 98 bp, Homo sapiens
ggctccacagagagctgcaacaccaccacagaagatgaggacctcaaagaagaaagccagcttccctctacaagtgctctgggaaaaggagagcaggt

SEQ ID NO: 847393 - DNA, 99 bp, Homo sapiens
tattggatgctgccctctgatgtttgtggaatgaactgcttttgggaagcggcttttagataatttttgctgatgagtgcacagaagctgagggtcgcc

SEQ ID NO: 847394 - DNA, 99 bp, Homo sapiens
gcctgctgactcgtcagagttgctcatggaggtgcacggaaatgggaagaggcccagtccagagagcctagatattatcctactgaagatgtgcctcga

SEQ ID NO: 847395 - DNA, 99 bp, Homo sapiens
ctcaataaaagcccaggaagaagacgaggatgatatgaatgccacaatacgaaggattgaccagttaaccaacatcttagcccccatggctgttggcca

SEQ ID NO: 847396 - DNA, 99 bp, Homo sapiens
ctgaaagcagagaccatggagcttcttggtgttgtttctgaatgtcaacaagagagatctcagctgaaaaataaagagctggctatgacaaagttacgt

SEQ ID NO: 847397 - DNA, 100 bp, Homo sapiens
tataccaagtcttctcatttaaaagctcacctgaggactcacactgaaaaacacaccttgactttagtcagatacatcactgtctgttaaaggaaaccaa

SEQ ID NO: 847398 - DNA, 100 bp, Homo sapiens
acaagtacatgactgagacctgggaccccagccatgcccctgacaatttccgggagctggtgcacattaagcctgagaaagatcagtctaaagaaaagga

SEQ ID NO: 847399 - DNA, 100 bp, Homo sapiens
tctccttctacatctaccatctgtactggtgggagttcaacgttcacagcaagctcaagctggcggcttacagggagaacacagttggcctccaccgttt

SEQ ID NO: 847400 - DNA, 100 bp, Homo sapiens
tccagttttcaactatgctgacagcatttatcttcagatactatggtatttgtggaatcgatgaatttgataagatggggaatcaacatcaagccttgtt

SEQ ID NO: 847401 - DNA, 100 bp, Homo sapiens
tgcatttttcctgttttaacaacggctgtgctagacgaagtggtgaagcccaactgctgctgttcttgaagggtttttcagagtcggagaggaacaagct

SEQ ID NO: 847402 - DNA, 100 bp, Homo sapiens
gagaagctctaagtacactcgtcttgaatagctgggaatggaggaagaagatgtgattgaagtttatcaggaacaaacggggggtcattcaacagtttag

SEQ ID NO: 847403 - DNA, 98 bp, Homo sapiens
caaccctgacagagcagtggagtatcttttaatgctccctccttgggcctgtggattcataatggatacaaattctgacccaaagaactgcccctttc

SEQ ID NO: 847404 - DNA, 100 bp, Homo sapiens
cgccagcatgccccagtccaaaggaatctaggtaaaaatggcttatctaacagtagcattttgttggataaatgtccacctccaagaccaccatcttcac

SEQ ID NO: 847405 - DNA, 98 bp, Homo sapiens
ccccacggtcagcgtcatcaccatcagcagtgacacggacgaggaggaggaacagaaacacgcccccaccagatcatccagcccctcttagaacttga

SEQ ID NO: 847406 - DNA, 100 bp, Homo sapiens
caagttcttaatattatttcccttctgtggaaactctctaaacaacaggatgaaacccataaattggtttaccattgcttgttcagagaacaattgcgag

SEQ ID NO: 847407 - DNA, 99 bp, Homo sapiens
ttggagctgccgccgccgggactcccgtcccagcagatcctatagcaatggaactcagcgatgcaaatctgcaaacactaacagaatatttaaagaaaa

SEQ ID NO: 847408 - DNA, 98 bp, Homo sapiens
tggtggtcattaagcggagatccgccacaatggtgcgcatgaatgtcctggcagatgctctcaagagtatcaacaatgccgaaaagagaggcaaacgc

SEQ ID NO: 847409 - DNA, 100 bp, Homo sapiens
tgactttgcatatctggcatccaaatatccagattttaagcagcatgttcagataaatctgaatggaagagtgaggaaattgcaagacctaacatggctg

SEQ ID NO: 847410 - DNA, 98 bp, Homo sapiens
tggctctgctggaaatcaaaggtcagcccaaccactggggagcccatggcactgcggaagacagaatgacttggaagataacggagcttcgaagcttc

SEQ ID NO: 847411 - DNA, 98 bp, Homo sapiens
tttcaaaggatgcagatggtgacacgctaaggtgattcaaactaaatcaacccaatgtctctcctacccactcaccattgctacccttctcacctctg

SEQ ID NO: 847412 - DNA, 100 bp, Homo sapiens
cctccggagcagaggaagaagttgtgaccgagattcccgacgagagagactgaggggaagagaggaaggaggggcgggctcctggcaaggcattcgctcc

SEQ ID NO: 847413 - DNA, 100 bp, Homo sapiens
gggattatctcctgaagaagattccactcgtggtatgagagtggataatataatcaactcctctgcctgatgctagttctcaagactgctatgatattcc

SEQ ID NO: 847414 - DNA, 100 bp, Homo sapiens
tcagctttgtgggagggttttcaaaagtggagagacaacctattcttgcagatacttatcttcagcaaatcctaatgataacagaactagctccaatgca

SEQ ID NO: 847415 - DNA, 98 bp, Homo sapiens
tttgatctataacaagaacatgcattttcacatgtcaaccggatttgtggaccagtaaagttctcccacaagaattaaacaaccaccatgtcgagcaa

SEQ ID NO: 847416 - DNA, 101 bp, Homo sapiens
atagttgtagctacaaatccatcaggacgtctcattagcgaactttttcagaaactgccttctaaagtggaaaggaaacagattcattgtctgtctgagga

SEQ ID NO: 847417 - DNA, 100 bp, Homo sapiens
acctagtgggtgtaatacatcatgaactgcaggaacctgtgagaagtttctacaatggtgggctcagctctcaggagaggtgcccatgcatatgtctacc

SEQ ID NO: 847418 - DNA, 98 bp, Homo sapiens
agatccgcaggcgcaaggcttcaggcgacccgtactgggcctactctgtatatgactgctgctgctcctatgcaagggacctacattcctcagtacac

SEQ ID NO: 847419 - DNA, 98 bp, Homo sapiens
agcaattgaccttgaaattaaagagcgagaagctgaaaattttcatgaggaggaagacgaggtgcccgacgacgagaccgtcaaccagatgatcgccc

SEQ ID NO: 847420 - DNA, 100 bp, Homo sapiens
gcttctctagctggccttgctgttgcattagtgccagcagtagttcccaagggctgtctcagccatccacccagacgactcagtatctgagagcagacac

SEQ ID NO: 847421 - DNA, 98 bp, Homo sapiens
ccagcgccaccatccacgccagccgcaccatgccgctcctaagcctgcacagccgcggcggcagcagcagtgagagctgggatggaaattctatgatg

SEQ ID NO: 847422 - DNA, 98 bp, Homo sapiens
atcaaactacatctgtagccaaaattgcacaatacaagaggaaactcatggatctttcccatagaactttacagattaattgcctaaggaattgcaaa

SEQ ID NO: 847423 - DNA, 100 bp, Homo sapiens
ccgggctccgggaaaactacactggccagttcatggcctcccacgggaacgacgccgcgagagccaggtttgagtccaaagtaccctccttctactaccg

SEQ ID NO: 847424 - DNA, 99 bp, Homo sapiens
aggagggctggttccggctgcagcccgaccagtccaagagccggcggcatgacgagtcttgggcgtctttggtactggcttttttaggggtctgcctgg

SEQ ID NO: 847425 - DNA, 98 bp, Homo sapiens
ggccaaagagggtcgacctgcaaacttgcaaggttatcaatactctggctgaccatcatcatcgtgggactgactttggtggaagtccttggttacat

SEQ ID NO: 847426 - DNA, 98 bp, Homo sapiens
ctgactttgtcttctccgcacgactgttacagaggtctccagagccttctctctcctgctcctgttggatcaccaggatgccattgctccggagcaca

SEQ ID NO: 847427 - DNA, 99 bp, Homo sapiens
ttcttcaccgcacctactctggatcttcaagatgaagttcaaagggagaatactaatctgcaaaaactacaggcccagaaacagcaggtacaggaactc

SEQ ID NO: 847428 - DNA, 100 bp, Homo sapiens
cgcgagtccagcgtcgccgcagccccccaatgcggccgcgagaagcagcgggggggcaggcgatcgaagtatctggcaccaattctgacccagtcatttg

SEQ ID NO: 847429 - DNA, 98 bp, Homo sapiens
acaatgagatcgtggacaagatcatgggcaaaggacagatccaggcatctctgccggccttgccacaaccgtgagaaggccaagggcctgggcaagta

SEQ ID NO: 847430 - DNA, 100 bp, Homo sapiens
catttgtctttagtcttggcaaagccaaatttgtatcctactgtggggcttcaaacaccaggagaagtggtcgatgccaattttgggcaacatcctttcg

SEQ ID NO: 847431 - DNA, 98 bp, Homo sapiens
gatcgaccgcaacctccgtgaggacggcgagaaggcggcgcgcgaggtcaagctgctgctgctcggtggtcttcaagctgacagagaagctgacggaa

SEQ ID NO: 847432 - DNA, 74 bp, Homo sapiens
ccacctcctgctgccttcccgtcgccgctcccgaagcttttccagaatactctggagcagtgcaatgtgtgttc

SEQ ID NO: 847433 - DNA, 99 bp, Homo sapiens
caacgtgttggaccttccggagcttctcagaagacagagggttttcttttgaggtgctgttggcagcagcggtctgcacaaaagcaggaaaggctattg

SEQ ID NO: 847434 - DNA, 99 bp, Homo sapiens
tctgagtaaggagtttgtggctgatgaatatttcactggccttgaatgtggacataagttttgtatgcagtgctggagtgaatatttaactaccaaaat

SEQ ID NO: 847435 - DNA, 100 bp, Homo sapiens
gcgccgcctcctcctcggccagcaacagcgagataacgaaggaggcccaacttcattcaataaggagcctgacggatttatcccagacggtagaacaaaa

SEQ ID NO: 847436 - DNA, 98 bp, Homo sapiens
ttgtgcatgttaatgaccttggaaatgactgagctcacggaccctcatcacaccatgggagactacaaagaatatgcttctctgggatcactctatga

SEQ ID NO: 847437 - DNA, 100 bp, Homo sapiens
cacttctccgagccagcgagccagcgagccgccgacccgccgagcaaaatgctgcagaaccttggcctgaaaatgctacattatatcagcaattgaaagg

SEQ ID NO: 847438 - DNA, 100 bp, Homo sapiens
tgccctcctcactcacttccggtggcaggcgcatattaaatttcctattgactacccctattcaccacctaccttcagattcttgaccaaaatgtggcac

SEQ ID NO: 847439 - DNA, 99 bp, Homo sapiens
gaaagggaggcaagaaggaagcagtctacatcagcatcagcatctgcgtcaccatttcaatctgcatggtatagtgaatctgagataactcagggagca

SEQ ID NO: 847440 - DNA, 108 bp, Homo sapiens
ccgtcaagcggcagaagtccaagtcttcccagtcgtccaccctgagccactccaatcgaggtggatccataaagaacccagccaacccgcagagggaggggaggggct

SEQ ID NO: 847441 - DNA, 100 bp, Homo sapiens
tagccagcacgcgtcgtgcgggccatctgggggtgcttgtataactgtaaagatattgtattacgaagaaacacagctggaagtctgggcttctgcattg

SEQ ID NO: 847442 - DNA, 98 bp, Homo sapiens
ggagtcatcttcaaagccctgaaggggtgagcccctccagactccgaataggagatcaagagtttgattcattgcctgctttactggaattctacaaa

SEQ ID NO: 847443 - DNA, 100 bp, Homo sapiens
ctttgggaaactggaaacatacgtgaaactggacaaactgggagagaaccaacactatcatcctggtagatgcggacggccacgtgaccttcactgagcg

SEQ ID NO: 847444 - DNA, 100 bp, Homo sapiens
ggatcggtaccaggctgtcctggccaacctgctgctggaggaggataacaagttttgtgcagattgccagtctaaagacaaatttacatgtattggagac

SEQ ID NO: 847445 - DNA, 100 bp, Homo sapiens
tctcctgtaggaagcaaccagtctcgatctggcccaatctctcctgcaagtatcccaggctctcaaaattagagagatgtgtaattgtccaccactgtct

SEQ ID NO: 847446 - DNA, 98 bp, Homo sapiens
cctgatccggttcttggtgcccctgggcatcaccaacatagccatcgacttcggggagcagagcctgagcccttgtgaagccggcaatgacaagtctg

SEQ ID NO: 847447 - DNA, 100 bp, Homo sapiens
ccggagccgacgggcggtggccgcactgggaccccggaatcccgcgcgctgcccacgattcgcttctgaggttctgccggagacttccatttggcctcaa

SEQ ID NO: 847448 - DNA, 100 bp, Homo sapiens
cccccggaccccactgcgcccaaaccgaagtcatgtagctacagcaagctgggtagcaggcagatccaaaggatatcatgaagtttccagggcctttgga

SEQ ID NO: 847449 - DNA, 98 bp, Homo sapiens
gctgttcgccaaaatggacagctggtcagaaatgattctctgatgttcacggaagaccagggtgtagatgacaggctgctctatgacattgtattcaa

SEQ ID NO: 847450 - DNA, 99 bp, Homo sapiens
tcagaaacccaaattacatctcatggctttgacaataccaaagagggtgttattgaagcaggagcatttcaaggtctggtttgcatgaagtcgagtagt

SEQ ID NO: 847451 - DNA, 100 bp, Homo sapiens
gtgaagcatttcgcctgaccattacacgcaaagatattcaaactctaaaccatctgaattggctcaatgatgagcaagtctggaaaagtttgaaattcca

SEQ ID NO: 847452 - DNA, 99 bp, Homo sapiens
gagcctccagctggggcccgggcagtccctggagtggaacgttacaatcctcaggaaaacagatggcacactatagcccctatggggacccggaggaaa

SEQ ID NO: 847453 - DNA, 98 bp, Homo sapiens
aagcccaaaaagctgaaggtggaggcgccgcaagcgctgaggggcctttacaacaactaaacggacaggcattccagccccacgggaattttcagtaa

SEQ ID NO: 847454 - DNA, 98 bp, Homo sapiens
agaatgtgaatgctgtgccaccaagctctgcctgcaatgtgtccaaggaattactggaagctaatagtctatgtgctctctctatcaaccattccaat

SEQ ID NO: 847455 - DNA, 100 bp, Homo sapiens
tctgagccaggccaacaatgaccaaggaggatgggatcctgggtgcagctcatcacaagcgtcgggtcatctaatacatgggagaaacatggattttgga

SEQ ID NO: 847456 - DNA, 100 bp, Homo sapiens
gaacctgagagggcagcagcggacccggcttctgaataaattcactgaaaatgacagtgagaaggtgattaggaagaagcttgttcgtaaaacgctggac

SEQ ID NO: 847457 - DNA, 98 bp, Homo sapiens
gcaggaagccaaggagcacagggtgtccctgaagtgccgcaggcagctccgtgtggaggagctggagatggccctagactggagctggttacagacgg

SEQ ID NO: 847458 - DNA, 100 bp, Homo sapiens
cataggaaatattaacctggccatggaaatcgctgagaagcacctggatattcctaaaatgttggatgctgaagctgagctgcccctcctggacctgatg

SEQ ID NO: 847459 - DNA, 100 bp, Homo sapiens
catcatcaatgctatgttactctcagttctggaattattctccttttggagaatctggtcgagaagtgaactgaaaatctggtcaacctgtagttccgtt

SEQ ID NO: 847460 - DNA, 98 bp, Homo sapiens
aaaactacagttctgtcactcacttacacagtattgggaaatctgtgaaaggtccggaccctatttgtcagtggccttcctctggatatcaaacctcg

SEQ ID NO: 847461 - DNA, 100 bp, Homo sapiens
ggtcaatgtggtctgtcgataccttcatgaagcatatgctgacattaccttgaatatggttacctacctggcagagagttgtcatgatgaggaagatgac

SEQ ID NO: 847462 - DNA, 100 bp, Homo sapiens
gggaaagagggcctttggaaacttcttggaggttttcaggaaacttgcagcaaagccattcgggttggagtaattgaaaaggtggacaagtcctattttc

SEQ ID NO: 847463 - DNA, 99 bp, Homo sapiens
ccgtgcccctgccgccacccatggccatccagcagcacagcctcctccagccagactcacaggatgacaagagattaaccattccaagcagttgcccca

SEQ ID NO: 847464 - DNA, 100 bp, Homo sapiens
agacattctcttgaagggcttcacttccttaggaatggaagaagaaagaattgaaaccgcacagcaggttcatcttccttcctgtacagtattttcaaac

SEQ ID NO: 847465 - DNA, 100 bp, Homo sapiens
acccggctgatcctccagtaccttgattcagagagaagacagaatcccaaggactgcagcaaagccaaaaagctggtgtgtaatatcaacaaaggctgtg

SEQ ID NO: 847466 - DNA, 100 bp, Homo sapiens
ttccaacagtgacgtgttctccaaataccagctcgacaaagatggggttgtcctctttaagaaggtttggacttctcccactgagcatgacaagcactcg

SEQ ID NO: 847467 - DNA, 100 bp, Homo sapiens
attgtaggggagatttttgttagggtgtataatgaagttcctactttccaactggaggttaattggactcctgagattaacaaagaacacttgctacagg

SEQ ID NO: 847468 - DNA, 98 bp, Homo sapiens
acggtaacccgtgtgactttgactggacatggaaggtctttaatgtaactttaaatggttcaccaaaggatgctctaatggatgacagcgatactcct

SEQ ID NO: 847469 - DNA, 100 bp, Homo sapiens
agaggttcaccgccatcattggacccaatggctctggtatttggtgttggagttccaaatccatatcgattgaggccgttccttggggccagagtccctg

SEQ ID NO: 847470 - DNA, 100 bp, Homo sapiens
ttgtcacagttttacatcaataagaaaaacacaccttgactttagtcagatacatcactgtctgttaaaggaaaccaagcgtgaagtggaagtctaacac

SEQ ID NO: 847471 - DNA, 101 bp, Homo sapiens
gggcaaacgcctggatcagccacaaatgtacccccagtacacttactactatcctcattatctccaaaccaagatgtaaatgtaatggacacgcaagcgag

SEQ ID NO: 847472 - DNA, 99 bp, Homo sapiens
gtcgctggaggtgaagatgaacctggaagagcagagccagcagcagctgacaagctctctactgatgatctgaactccctcattgctcatgcacatcgt

SEQ ID NO: 847473 - DNA, 100 bp, Homo sapiens
ctccagtcaggccgatccgctccgctcacgggaggtggggaagacagggctccagctaccacaggacgggctctgggtatagccgttccagtcagggaca

SEQ ID NO: 847474 - DNA, 100 bp, Homo sapiens
cctggaccgctgtgtaggcacctgagttaacggacgctaagcggggtaggggaagtgccgcagaatggaattcggcattgttcctacacagcttctcggc

SEQ ID NO: 847475 - DNA, 100 bp, Homo sapiens
acgagtaatcgcctgctttgattcattgaaaatgcaggacaagtactccaaaagtggcattgcttgtttcttaaaagaagatgacagttattgggacccc

SEQ ID NO: 847476 - DNA, 100 bp, Homo sapiens
ccatctaatcacagactcctatttgaagtatttgacgaaaatagactggtggtataagttgaaatccaaaccaggaaagaaggacaaggagcgaggagaa

SEQ ID NO: 847477 - DNA, 99 bp, Homo sapiens
tccaatcgaaaccctgaaccatccctttgtcaccatgacacacttactcgattttccccacagcacacaggaaatcctcattgacgattcaatttgttg

SEQ ID NO: 847478 - DNA, 98 bp, Homo sapiens
atgggacacagatatgttgaagttttaagacaattatctcctatattgatgagcaatttgagaggtacctgcatgacgagagcggcttgaacaggcgg

SEQ ID NO: 847479 - DNA, 100 bp, Homo sapiens
cgccaccaattatgggagggctggccaacttctgctacagacgactcagatgagacctgcacgcagtggctcacagcagcacgatttgtgacagcccgag

SEQ ID NO: 847480 - DNA, 99 bp, Homo sapiens
aactcgatcctgctggctgctgtctctattctctcggcctgtcagcaaaagtattgggaaagggtcgttgtggtgcatagacccagagtatagacaaaa

SEQ ID NO: 847481 - DNA, 100 bp, Homo sapiens
aattggacgtcgctctttgtctcgttccatttctcagtcatctactgacagctacagctcagatgttggatgacaataaccatcttattcagtgtataat

SEQ ID NO: 847482 - DNA, 99 bp, Homo sapiens
aagttcttcgtggagcctcatctcatcttacaggagcagactagagttcctggaataactattgctacagatattatctgtggttttcctggagaaaca

SEQ ID NO: 847483 - DNA, 100 bp, Homo sapiens
tggggagattccggcctggagctcccagggccgagaacaccaagctgaaaggttatcagaaaagagacgtgaagcttggaggcctcggacctgactttga

SEQ ID NO: 847484 - DNA, 98 bp, Homo sapiens
acaaatgtttttctgttttgcctgaatacatgatttaaacaagagatttccacagaaggtgaatgaaaactttgccattgatttgatagcagagcagc

SEQ ID NO: 847485 - DNA, 100 bp, Homo sapiens
ctccatcacccaccaacaacaccacaataatccacagccaagtggtctaccatcacggcaacagtgcgacgggcggccattacactacagacgtcttcca

SEQ ID NO: 847486 - DNA, 98 bp, Homo sapiens
gggcggagaggaaaggccgctcagattgtagaaggcatgaaacaaaaaatgtggagtattgaaaatattgccttcggttctggtggaggtttgctaca

SEQ ID NO: 847487 - DNA, 99 bp, Homo sapiens
gaatgcagccgtgtgacagtaactgaacattggtctaaagtctttccaaaaggtcaaggttcacaagggtgtccggtggagagctgtttgaccggatag

SEQ ID NO: 847488 - DNA, 100 bp, Homo sapiens
gaggaggtcgctgagagctgggaagaggcggcagacagcggggacagtgtggcactgaaggggggccgtggcagtgcttccatggtccagaagtgcaagc

SEQ ID NO: 847489 - DNA, 100 bp, Homo sapiens
ttatgctgctcactttcgtccaggacagtatgtggatgtcacagccaaaactgaaggaagcccatcccccagaattgagctgctgcataatattgacccg

SEQ ID NO: 847490 - DNA, 100 bp, Homo sapiens
cgcctcttcagctcgccatggatcccaactgctcctgcgccgccgatgccttattggaggaactggaacgctccacccttcaggacagtgatgaatattc

SEQ ID NO: 847491 - DNA, 100 bp, Homo sapiens
atctcccaagaggaatgacaaacaaccagctcttcagttttcggctttgtgagaaaccttaccatcaaacacgatggccagcaacgttaccaacaagaca

SEQ ID NO: 847492 - DNA, 100 bp, Homo sapiens
ttctgcaagcaggcaacctgaatacaggatacattaattgtttggtcagaagcagagaactatgatttggctctgagttttcaggagaaagctggctgtg

SEQ ID NO: 847493 - DNA, 100 bp, Homo sapiens
cttggtcacttatgaacttctccagcggtggttttacattgattttggaggcctcgccgactaccaggaacgcttcaaccccagtgccctgaaggactcg

SEQ ID NO: 847494 - DNA, 99 bp, Homo sapiens
gccatcctcggcgcgactcgcttctttcggttctacctgggagaatccaccgccatccgccaccatgggagtggagcttggtttcgggatctcggtgct

SEQ ID NO: 847495 - DNA, 100 bp, Homo sapiens
cccgagcccggctggacgccgctgcctcaggagagcgacttgcagttgtggaggtacagtgtgaacggctgaggatgctctaccgggactgtgctcggcc

SEQ ID NO: 847496 - DNA, 98 bp, Homo sapiens
ggaatttgtgcaatgtttagccaacccaaattaccttaattgttacaggaggttccagtggcatcgggaagtgcattgctatcgagtgctataaacaa

SEQ ID NO: 847497 - DNA, 100 bp, Homo sapiens
atctacaagagccaaatcaagattgcgtttctcaaagtcctacaggttggtcaaagaaaaagtgatgtatgaaaaagaggcaaaacaacaagaagaaaag

SEQ ID NO: 847498 - DNA, 100 bp, Homo sapiens
gtcctcaatctccttttccttggctacccgatgggaaactattgtgggaacaagagctatacaataactttgtatataatagtcctagaggatattttca

SEQ ID NO: 847499 - DNA, 100 bp, Homo sapiens
atgatttttgttggaagagatgactgtgagctcatgttgcaggtgtggatccggagttgtatgagttaacaacttctaagctggaaatctccacctcaag

SEQ ID NO: 847500 - DNA, 100 bp, Homo sapiens
aatgctacttgatgctggcgtcgaagttaatgctacagattgtggaagatcagttttcctgccatccaggctgctccctccttcagcaactcattcccac

SEQ ID NO: 847501 - DNA, 102 bp, Homo sapiens
aaattggtcttctggatcctggcatggatgtatacggaggagaaaatattgaactgggaatcaaggtggtcataatgtcacaatctccttgcagtccaggac

SEQ ID NO: 847502 - DNA, 99 bp, Homo sapiens
tcctctcagatgatagtaaagatcaaaagaattcgaagggagttggtaaacgctgctgagatctgtatctgtggacctgaatgttgatccctcgcttca

SEQ ID NO: 847503 - DNA, 98 bp, Homo sapiens
ggagcagaagactctgagcccccgaactctgcaaagcctccagaggacataccacctccaggatcaggatgcagagacttaattcagtgcacaaatga

SEQ ID NO: 847504 - DNA, 99 bp, Homo sapiens
tcagtagtccgaactctaatatgagcagcatggtagttacagttggttgaatctggcgatgtggaacccatggatatggagggctgactatatacacca

SEQ ID NO: 847505 - DNA, 98 bp, Homo sapiens
ggacggccccggggagacggacgcgtttggcaacagcgagggcaaagagctggtggcctcaggtgaaaaactcatgatagtaaagagcacctggcaat

SEQ ID NO: 847506 - DNA, 98 bp, Homo sapiens
atctctcaagcccattgactataagcatgatggccacttcacagtcatccagttggtcggaatgctccgaggcattgcatcaggcatgaagtatcttt

SEQ ID NO: 847507 - DNA, 100 bp, Homo sapiens
aagtggcagccaggagaagaaccagcaggctctgtggttcaggactcccgacttgacacgatattttttgctaagcaggagagtcaagccctacccgtcg

SEQ ID NO: 847508 - DNA, 100 bp, Homo sapiens
actgagtccagagcagaggaatctatacaaagaagtgatgctggagaattacaggaatcttctctcattgggctgctcccggcagatcggcttctccttt

SEQ ID NO: 847509 - DNA, 98 bp, Homo sapiens
gcacctcaggagggaattcagcctcagtgatgtccatgagtggaagagaaagccaatacccacctcctcttgggcatgtgcttagacgcctgtgctcg

SEQ ID NO: 847510 - DNA, 98 bp, Homo sapiens
accagttactggtcacccggtctcagatttcttataggaaagacgtgcaggacacccacacgtacagtgcagaacttgaccgaccagacatcaagatg

SEQ ID NO: 847511 - DNA, 100 bp, Homo sapiens
gaagacgatctgcacttcgcattttggcattgacatttaattttagggtcctttatatagaagggagagtaggcatcgccgaatggaggctgtgcgactg

SEQ ID NO: 847512 - DNA, 100 bp, Homo sapiens
gaagctgcagaagaaagacgcaaggctatggtgaactaaacggtaatgctggagaaagagaaatatctttaaagaacctgagttctgatgaagccaccaa

SEQ ID NO: 847513 - DNA, 114 bp, Homo sapiens
aactgaaagatacatggcttgcaaaaagtaaaccacgatcgttatgctgaataaacaggggtcacatgacgacagaagccaagagggctgcaaagatggaaaagaagatgaaaa

SEQ ID NO: 847514 - DNA, 100 bp, Homo sapiens
tggcagtatccctcagacagccacttctggtggttgccagccacctggggatgtacaggtttgcagattccgccagcagcacagcaagctctacagatga

SEQ ID NO: 847515 - DNA, 100 bp, Homo sapiens
gtagataagcaactggattttttaactgaagatagtgcctttcagccctaccagggacttcagtactagtgctaataacatccagattgataaaaccaag

SEQ ID NO: 847516 - DNA, 98 bp, Homo sapiens
gcccccggcaccatggacgcgccgcgcgcctcggcggccaagcccccgaccggaatgacgtggccgcacttctgaaacccatatcggaaaagattcag

SEQ ID NO: 847517 - DNA, 100 bp, Homo sapiens
cctgatcgatgtgagggcaattttgacgccatcgccaacatccgaggggaaactttcttcttcaaagggaatgaaagctactggttgattttaaagtgcc

SEQ ID NO: 847518 - DNA, 98 bp, Homo sapiens
ccaggaagtgaaaatgtgctgcctcgagagccgctggtaaatgagctggatggtatcccgttgatcctggacaactgcaacatcagtgacagtaaccc

SEQ ID NO: 847519 - DNA, 98 bp, Homo sapiens
tggaccctgcccaaaggacactgtacagggatgtgatgctggagaactgcaggaacctggcctcactagatattgatgatgttaagaagttcaaaccg

SEQ ID NO: 847520 - DNA, 98 bp, Homo sapiens
gatgggatttaggagaggaggattgcagaagagatcaatgtccgagttaccaccatggatgcagagctggagtttgcaatccagccaaatacaactgg

SEQ ID NO: 847521 - DNA, 100 bp, Homo sapiens
gctaaattacctcgctgccgacagggaggctgggcaggtgattccgtgaaggcttcgaaccaacatcagatgatcttgtttcatctgctgaatgttcaag

SEQ ID NO: 847522 - DNA, 98 bp, Homo sapiens
gtggctgatgctgatgcccgtcattggttacaactgagtcccaccgatgcttcaaatttaacagatttgggccaggcttagtcatctattggtatgga

SEQ ID NO: 847523 - DNA, 100 bp, Homo sapiens
tgatattgatgtgaacgcctctgtgtttgaaacaaacattcgagtgtctgagcagcaggagagagccttcacgctggggctagcaggacttctcggcgag

SEQ ID NO: 847524 - DNA, 98 bp, Homo sapiens
gactttcttcgttgccatgaggaaagaattctccgaggtcttaaaattttggtagcagaaagcaaatgtgcaaagagcaatggaaaacaagtcagaag

SEQ ID NO: 847525 - DNA, 98 bp, Homo sapiens
gcctgtaaaaccatggaaagaagttcctaacagacaaataaaaggctgcttaaaggtaaaatcaaggagagcacaagcttcattttatccctgccctg

SEQ ID NO: 847526 - DNA, 100 bp, Homo sapiens
ctccggcgaattgaaagcagtgatctctcagattcagaatggacagtttagaagaacctcagaaaaaagtctttaaggctcgaaaaacgatgagagtgag

SEQ ID NO: 847527 - DNA, 98 bp, Homo sapiens
ggagcgggcggtgttggatgggctgctcaccccagccgagtgtggggtgctgctgcagctggctaaggtttccaaccaaggccagtcgctcagaaccc

SEQ ID NO: 847528 - DNA, 100 bp, Homo sapiens
gaaacaatggttgcatctgcagatggtttagtttatgaaccagtggtgaactggctagaagggcctggatcagaacaactaagagcccagtggggcattg

SEQ ID NO: 847529 - DNA, 99 bp, Homo sapiens
tccactccgttacgtgtacatccaacaagatcggcgttaaggatctctctaggagctgacactcgaaccttcacgacccattcggatttttccaggact

SEQ ID NO: 847530 - DNA, 100 bp, Homo sapiens
ctatggaagcagaagaagctgaggatgaagaagatgttaacttaccaagactggttacacctggagctggaaattcaacctgaagctgatgctctttcag

SEQ ID NO: 847531 - DNA, 100 bp, Homo sapiens
aatgatcctggaatccaggaatgctatgatagacgacgagaatatcaattatctgactctaccaaatagcagagattgtcaagaggctgaatgctatctg

SEQ ID NO: 847532 - DNA, 100 bp, Homo sapiens
tgctgagccagctccagcagcatgaggaagagtcaagggcacagagagatgcaaagcgacctaaaattagctatcaagagctttgtttcccactgtggtg

SEQ ID NO: 847533 - DNA, 98 bp, Homo sapiens
agaggatggagagggcaacgtttggattgcaaagtcatcagccggtgccaaagttgctgaacctgtttgcatgagttgctcctgacggccctttagga

SEQ ID NO: 847534 - DNA, 100 bp, Homo sapiens
agagtacatgagacgatgaagcaaagcaattctgtggtgttcttggtcacacatttatggagtttctgaagggcagtggagattactgccaggcacagca

SEQ ID NO: 847535 - DNA, 99 bp, Homo sapiens
ctgaacttgatatgtctgaaagcaaaacaagaagtggaaaagtctttcagaataaaatggccaaagagtgtggccagatgcaaaataagtggctgatga

SEQ ID NO: 847536 - DNA, 100 bp, Homo sapiens
ttttcacctaccccaaaggagctggagagatgttagaagattcaattagcagagcctcacagacaatggccaaatgtgtcaaagctgtcacagagggtgc

SEQ ID NO: 847537 - DNA, 100 bp, Homo sapiens
tccacctcttcttgagagtgtcacatggattgttttaaagcaacctataaacatcagctctcaacaggtcacggtctagatcacattctcgatccagagg

SEQ ID NO: 847538 - DNA, 98 bp, Homo sapiens
gaggctgatcagaactatcagaactacatcttaagggggaaatcctcattgacgattcaatttgttgaaggccaatttgtggactcctacgatccaac

SEQ ID NO: 847539 - DNA, 99 bp, Homo sapiens
tctccgcgtcccgctcgctgggagagaggtacctctccttttccctctccctttccctaagaatctttggaagaactaccagaaacgagtgggaaaaca

SEQ ID NO: 847540 - DNA, 98 bp, Homo sapiens
atggaaaatggtactattttgatgacagtagtgtctccactgcatctgaagaccaaattgtgggcaaatgacacagctttgtgaactgatcaacaaga

SEQ ID NO: 847541 - DNA, 127 bp, Homo sapiens
tctttccccctttaacttagaggaacgaggattatacagaaatttgaatcactgcttcaaccacctgtgagaaattagaaaaagccaggaatgagttacaaacagtgtatgaagcattcgtccagca

SEQ ID NO: 847542 - DNA, 100 bp, Homo sapiens
tgaaaaatttggactcccgccagtggtggaggtttttaatctgctttttgtcactaatgaaagcaatactcaaaaaacctacatagtacattgccatgat

SEQ ID NO: 847543 - DNA, 99 bp, Homo sapiens
ggctgggaaggcgtgggcgacccggtgtgtggcgcgcccagagccccgcgtttcagccctagggaaggagaatcttatttatactgctgatccagaatc

SEQ ID NO: 847544 - DNA, 100 bp, Homo sapiens
atgtagaagatgaccacagagcagaactgctaaaacagctgggagactacagggtcaaggatgcattccaggaaagttctataaaaatataccatcaact

SEQ ID NO: 847545 - DNA, 98 bp, Homo sapiens
tcagctggaaaatcaaggactatctggaggagctgtgggtccaggctcagtacatcacagacgcagaaggtataattgaaatcctcaaaggaatgcaa

SEQ ID NO: 847546 - DNA, 100 bp, Homo sapiens
agcatttacccctatctagaggatataccagaccctggagtgaactggattccatgtagagacccctggaggtgcggtggctactaaagttcgaaggcac

SEQ ID NO: 847547 - DNA, 100 bp, Homo sapiens
cagaattgtcagatttcgctttgatgaatcaggtcccgaaagtgctaaaaagagtccctgtgaagcaggaagagtgagggcaggttcactgcagctcagc

SEQ ID NO: 847548 - DNA, 100 bp, Homo sapiens
caggaaccgtagagatggcttctgccggaaaaggaggacagctggccctgaaggaccctgttcatacagtgtcactgcagcagttcatctacgagaagct

SEQ ID NO: 847549 - DNA, 99 bp, Homo sapiens
tttgacaaaacataccaattcttgaatgacatccgagcgaaagagaaagagagggcttccctggaggccgccattgcagatgccgagcagcgtggagag

SEQ ID NO: 847550 - DNA, 98 bp, Homo sapiens
gagatggacggtcactcagcctatggaggctgaagccgacgtagcttctctgaacagacgcatccagctggttgaggaagagttggatcgtgcccagg

SEQ ID NO: 847551 - DNA, 100 bp, Homo sapiens
ctgaattgggaagttacagttctcgggatccttctgtcatagaaactcacatgagacaaatgcgctcagcttcaattgggtcctgatgaagaagctgttg

SEQ ID NO: 847552 - DNA, 100 bp, Homo sapiens
ttcttgcgctgcatcgaagcctcagacctcctgacagtgagtgagactgccaatgagccccctcaagatgaaggtaattccttcaattcaccccgcaacc

SEQ ID NO: 847553 - DNA, 100 bp, Homo sapiens
gagccatccaacatttagctgggatgaaagacagcaaggaggcccaggcatatgcagatgacaacagcttattgttcatggagacttcagccaagacagc

SEQ ID NO: 847554 - DNA, 100 bp, Homo sapiens
ggctcctcggccagcaagttcacaagcatccctgcctcgttttggtacaccattgtcaccatgaccacactgggatcgtcagtatttaaacagatcacat

SEQ ID NO: 847555 - DNA, 98 bp, Homo sapiens
ggcggatctcagaaggccagttcaaaggggccattaagtttaatgatggcctgagcttacaggaaagttgccgccttattgaagctctgtcctcatgc

SEQ ID NO: 847556 - DNA, 99 bp, Homo sapiens
tttaataatgatagaatgaagaccacaataaaagagacctctacttagctcagcaattcttaccttgtgctgattgccagtggttagatactctgagga

SEQ ID NO: 847557 - DNA, 100 bp, Homo sapiens
acaagtatatggggattccgcagatccggcagctttccgaaaggattggcagccaccatttgcatgtgatgttgataaacttcattttacgccacgtatc

SEQ ID NO: 847558 - DNA, 98 bp, Homo sapiens
ctgtttgccaggcgtgaaaaaatacctcactgtgacctacgcatgtggtcctatctgactcctgtacgggatgaggaagcagagtctttacggaaagc

SEQ ID NO: 847559 - DNA, 100 bp, Homo sapiens
gaccctgcagcatctaccgctcactgtagaccatctcaagcaggaaaatgtttcaacgtgcgcaagagttgcggtggcgggcagaggactaccacaaatg

SEQ ID NO: 847560 - DNA, 100 bp, Homo sapiens
tccagcgagtcgacttcccatcctgagttgtggatccttcaggttccagggatttcaccagtagcagtgaaagcctacttctgctaattttgactgttcc

SEQ ID NO: 847561 - DNA, 100 bp, Homo sapiens
ataattatcacaattactgatgggagcaagttgactaccaccagtggagtccaggatgagggttatgtaccgaaggactctaccgtgtcagcgggaataa

SEQ ID NO: 847562 - DNA, 98 bp, Homo sapiens
gtacatggttgtacaagtatcaatggacaaaaagacttgaagtaaccaagatccttctgtttgctgcacaagcatctcatcacctagtacccccagag

SEQ ID NO: 847563 - DNA, 100 bp, Homo sapiens
cgggtagagattggcttcgggctgagctagcagtgagcaccttttggcccaatgaatatcagtgccaaagagatggatgagactgttgctgagttcatca

SEQ ID NO: 847564 - DNA, 100 bp, Homo sapiens
tttgtacggcttagaggacttccctttggatgtagcaaggaagaaattgttcagttcttctcagggatccatctgtctctaagtctgtagaacgaatctt

SEQ ID NO: 847565 - DNA, 100 bp, Homo sapiens
ggatcagccacaaatgtacccccagtacacttactactatcctcattatctccaaaccaagttgagccccatatgggggttggcaggcagcagagaggcc

SEQ ID NO: 847566 - DNA, 100 bp, Homo sapiens
ccagacagacggctttggaatccaccagctacatccagctccctgagacttctccattgtggttggggtgctgttcccaatggcggtcatttttgtggtg

SEQ ID NO: 847567 - DNA, 100 bp, Homo sapiens
gggcagtcaccagcattgcctcgaccacactcacctctctctgctcatgcagttgacgaaggatcagagattggtgtattcgggcagactgcttcccgat

SEQ ID NO: 847568 - DNA, 100 bp, Homo sapiens
caaggaacacatgatggatggagtcacgaccaggaccttctgtgggactccagattatatcgccccagagatgctgcagttggagaagaaacttgaacgt

SEQ ID NO: 847569 - DNA, 99 bp, Homo sapiens
gaagaacttcgtgaagctctggagatctcccccttcttcaagacccacgagatgatgaggagtctgatgaggaagctgtgaagaaaaccaacaaatgtg

SEQ ID NO: 847570 - DNA, 100 bp, Homo sapiens
ggcgagcgaggaggatggcggagtcggggctcctgacggaattgagtgatctacagcgcgatccacctgctcactgttcagctggacctgtgggagatga

SEQ ID NO: 847571 - DNA, 100 bp, Homo sapiens
cctggaggggaagaagaagcagagagcgcagcccggcagcccctcataagaaccgaggccccggagtcgaagccagctgtcctgagagcacgtctctaca

SEQ ID NO: 847572 - DNA, 100 bp, Homo sapiens
gcgcctcaccgccaccagctcctggaccaccatggccaagaaccgcagggacagaaacagttggggtctagtgggacaatgtcatattataaatttggaa

SEQ ID NO: 847573 - DNA, 100 bp, Homo sapiens
cccgaacttgcgacaagttgccggagccgcggggcgcgggcggcggacagattgaccttcagagcgaggagaagcaggacaaggtggtgctccagtcaga

SEQ ID NO: 847574 - DNA, 100 bp, Homo sapiens
gatcaacaggatcctcttggagcagaagaagcaggaccgcggggagctgaagctgctgcttttgggcatctcgtccccggtgaagaagacagagatggac

SEQ ID NO: 847575 - DNA, 98 bp, Homo sapiens
cgggagaggatatgtagcgaggaggaacgcgctaaggcaaagcacctgagcttttcatcctactataaaggaggatttgaacagaaaatgagtaggcg

SEQ ID NO: 847576 - DNA, 98 bp, Homo sapiens
gaactcgtgattgtcggggggaaagacatccagggctccttgcaggcagggcaagaatcctttcgttccatcacaaggtcgtattacagaggtgcagc

SEQ ID NO: 847577 - DNA, 100 bp, Homo sapiens
gtacaaaggatttctcaaggactgtccaagtgggaggctaaatctcgaggaatttcagcagctctatgtgaaggtgtcgtgaaaactacccctaaaagcc

SEQ ID NO: 847578 - DNA, 99 bp, Homo sapiens
ggagctgaacgtggacagcctcatcacccggctgctggagggaacaggaaatatagtggtcattatgattagctatccaaaaggaagagaaattttgga

SEQ ID NO: 847579 - DNA, 100 bp, Homo sapiens
ccggtcctgcgcctcgggagtcggcgtccaggctcggagcgcgacacggagactaggtggcagcacatggattaattgatgtatgttgagtttatggagc

SEQ ID NO: 847580 - DNA, 98 bp, Homo sapiens
caccctcacctgccgtcagatcacacccatcttgccccatgactaccagggtgaaaatcctatttataagagtgccgtaacaactgtggtcaatccga

SEQ ID NO: 847581 - DNA, 100 bp, Homo sapiens
aaaacatcggttggatggataagaattttgataaaatcagagtgtggctgcaaagtgaaaagcttgaacgagatcatgaatcagacagataaaaatcaac

SEQ ID NO: 847582 - DNA, 100 bp, Homo sapiens
ggcccactttccccattcacaaaagcgtggatacccatcaacgaagttttgatattggaattcagattggctatcagcgacgcaataaggatgtgttggc

SEQ ID NO: 847583 - DNA, 100 bp, Homo sapiens
aggaaaattttctcctttgtgccagtggggcaagtgtccagagaatggctgggatgaaagtacacttgaactctttttacatgaacttgcaatcatggac

SEQ ID NO: 847584 - DNA, 100 bp, Homo sapiens
ctaccggactacgagtatctgggtgatcccattaagatactaatgccatcactgtctcctacaatggaagaaggaaacattgtgaaatggctgaaaaagg

SEQ ID NO: 847585 - DNA, 100 bp, Homo sapiens
cgccgaggacagtgcagccgagttgcgtctccctcgcgcgaggcaagccgattttttcagttgatattcaccctgacgggaccaagttcgcaactggagg

SEQ ID NO: 847586 - DNA, 100 bp, Homo sapiens
ttgacagcctttcagctgctgtttgcctggagggataaaacagctcgcagggaagatgaaagttacggagcctgaaccccaacctgctggccgtggtgac

SEQ ID NO: 847587 - DNA, 98 bp, Homo sapiens
tgctttttattacaagactacggagcataggaggaaaattcatcatctggatgctgaaagtaatccactgtgtcgtcgtcttcaactgaaggatatta

SEQ ID NO: 847588 - DNA, 119 bp, Homo sapiens
tttgacttggaagcaatgtttgaacaaactcgaagaacagctgtggaaagaagttgcaaaacactgggtttttcgttggaatatacgttgcacatttatggcgattctgagtgtgaggg

SEQ ID NO: 847589 - DNA, 100 bp, Homo sapiens
taccagatcatgtcagagagagagcttggttaacttgggagaaagtttcatctgtggatggagtattggcaactgcgatgtctgtggactgtcttgggca

SEQ ID NO: 847590 - DNA, 100 bp, Homo sapiens
aaggacagcctttccgcgcgggactccggggcgccacgggggccatgtaagcaggtattgttgcagcatctggcagtgagactgaggatgaggacagcat

SEQ ID NO: 847591 - DNA, 98 bp, Homo sapiens
ttaagatcgagcaaggagaagagccctggatattagaaaaaggattcccaagccagtgccacccagcagccaactcttcctgccaaataaatagagtc

SEQ ID NO: 847592 - DNA, 99 bp, Homo sapiens
acgaatctgcccacccctcctgtaacccagcctgtttcacttcttggcatgccagaggaacagagagaagggctccaggaagaactgattgacatcatc

SEQ ID NO: 847593 - DNA, 99 bp, Homo sapiens
ctagacctgaactcttcagataatcagagtggaggaagtacagccagcagcgcagttgtgtagcagttgagtaatgctggttagctgttaaggtggcgt

SEQ ID NO: 847594 - DNA, 98 bp, Homo sapiens
acaagaaggcggcggaagacaggagcaagcagctggaagatctggaagttactgtagctgatcacattcaaaaggtcatgaaactgaacttcgaagca

SEQ ID NO: 847595 - DNA, 100 bp, Homo sapiens
tggcgtcccgcgtagacgcagtggcctccaaggtgcagacagctgtgactatgaagggggtctccaattgagaaacatggcactgtttttcctgcactct

SEQ ID NO: 847596 - DNA, 100 bp, Homo sapiens
aagagtggacggcagagttttcaagctgtgacagatgaatctggaaaaccaggggctcatgtaactgtgaagaagctgtttgttggcggaattaaagaag

SEQ ID NO: 847597 - DNA, 111 bp, Homo sapiens
aaagaagtggacagcagtgccatcgcagcacatgtgtgtggccgcctcggacaagagacccaggttggtcaaagaaaaagtgatgtatgaaaaagaggcaaaacaacaaga

SEQ ID NO: 847598 - DNA, 100 bp, Homo sapiens
gacaaggccaaagagactgcagatgccatcactaaagaagtggccacagatgtctttaattccaaaaacctggccgttcaggcacaaaagaagatcttgg

SEQ ID NO: 847599 - DNA, 100 bp, Homo sapiens
agagcctatttacccagaagtagtccatatgaatgtctgtaaacctgtggaggagacacagcgcccgcccacactgcaggagatcaagcagaagatcgac

SEQ ID NO: 847600 - DNA, 100 bp, Homo sapiens
ctttcccaagcctggaagaactcgtcatgctctttgtagcgtggtgcttctgttgctcacaggttgctgaaaagccaggagtcaaaatgactgagcgctt

SEQ ID NO: 847601 - DNA, 98 bp, Homo sapiens
tgggcagcatgcagtgctttctgggacagaagtcggtcctaggccccccaggctctgaccttctttcccaggatgaggtggggccaccatttgcccag

SEQ ID NO: 847602 - DNA, 100 bp, Homo sapiens
gctgctgttgtccaacagaacgacctagtatttgaatttgctagtaacgtcatggaggatgaacgacagaccagtattaaagagggacagctattgaagc

SEQ ID NO: 847603 - DNA, 98 bp, Homo sapiens
ttttcaagtgccaaacggaggaatacctcgtatgcaacctcaggcttcagccagagtcaactgagagttcaaatacaacaattgaggatgaagatgtg

SEQ ID NO: 847604 - DNA, 100 bp, Homo sapiens
aagcaagcagttcagaagagccaaggaataaacatgcaatgaacccaaaagggggcccatggacgatttatgccccagggggctggaggccacacccggg

SEQ ID NO: 847605 - DNA, 100 bp, Homo sapiens
caattctcgagagaccagcaaggaatccaaatgcatcattcagatgcaaggcaactcgaccagtgctggagaatctggtaaaagcaccattgtgaagcag

SEQ ID NO: 847606 - DNA, 99 bp, Homo sapiens
ctgtccagacagttcttgaaggtgacaacttagagacgtgaaaaaccatacaagtgtcaaatttgcaatcagtcttttagaattaagaaaacattaaca

SEQ ID NO: 847607 - DNA, 98 bp, Homo sapiens
ggaggaatgttttaattcttcggaaataccaagtggtctctgttgaacaaattgaagcagggacaccaggccgactcagagtagtagctcagtccacc

SEQ ID NO: 847608 - DNA, 99 bp, Homo sapiens
tggaataaaaacagagtccgatgaaaggaatgggtctgggaccttaacagggagccatgagacagggtttcaccatattggccaggctggtctcgaact

SEQ ID NO: 847609 - DNA, 100 bp, Homo sapiens
ctgccgaacttggagccgctgattcccagtctcagccacagcgtcatctcccaaacgagcttccgggccgagtacaaggccacgggggggccagccgtgt

SEQ ID NO: 847610 - DNA, 100 bp, Homo sapiens
cttgagatgtgactgtttccatctattttctgcttgccaggtgaatcaggtctaggaaaatcgactctcataaacagcctattcctaactgatctgtacc

SEQ ID NO: 847611 - DNA, 100 bp, Homo sapiens
gtgatcgtgcccaaagaggagggcgtcatcagcgtctccgaggacagggcgccaatgcttcggcattagagaaagagattggtccagaacagtttccggt

SEQ ID NO: 847612 - DNA, 100 bp, Homo sapiens
ccattctagccgaggagaacctgcccttcgccaaggagatcgtctctctcatcgaggcccaaaccgccaaggtaagaatgattgatgttggctgatattg

SEQ ID NO: 847613 - DNA, 99 bp, Homo sapiens
ttagaagtgatcccaaaaccgagtcgttgaggaaaaatgctcagaaattactctcagaagccttggaattaaaggttgtgatgatgattggcttgccag

SEQ ID NO: 847614 - DNA, 98 bp, Homo sapiens
tgcagtctttagtcgcatttctaccagtgggaggaagtgagtatcatggatgaaaaaaatacaccaatccgaacctaccaagtgtgcaatgtgatgga

SEQ ID NO: 847615 - DNA, 100 bp, Homo sapiens
gcccgggacacccagacagatgagattgtcgcactgaagaaggtgcggatggacaaggagaaggatggtcacacaggccgcctcctgcgggcattgctgg

SEQ ID NO: 847616 - DNA, 98 bp, Homo sapiens
cgagaatggcttgtgaaatcatgcctctgcaaaggcaggaatttgtggatgcttatgtgaattatgtcttccaaatctcagttcatgaatggtacaca

SEQ ID NO: 847617 - DNA, 99 bp, Homo sapiens
aagtgaacatcatggatcagaacaacagcctgccaccttacgctcagggcttggcctcccctcaggcaaatcctgatcctaactgttgtcttggagtat

SEQ ID NO: 847618 - DNA, 100 bp, Homo sapiens
gtggactccgtgttggcagcagtgctgttaccactctgggtgatccagccaaaggtatgggcggagctgccattgccccacccacttctctggtagagaa

SEQ ID NO: 847619 - DNA, 100 bp, Homo sapiens
agctttttgagggcctgaagttcttcctgaaccgagaggtgccccgtgaggccctggccttcatcatcagcaggaccccggaggccgcagcgtcctgctc

SEQ ID NO: 847620 - DNA, 99 bp, Homo sapiens
gagcacggcctcttgcgctacgccctggatgagatgggggatatgagactttctactcggaatatcctgagtgttgcgtggatgtaaaacccatttcac

SEQ ID NO: 847621 - DNA, 99 bp, Homo sapiens
tgacagccacctgcccactttgtgatcagagccgtgttcggggagtctttcagctctggattctctggagtttgaatgtttccagtattggaaccccac

SEQ ID NO: 847622 - DNA, 98 bp, Homo sapiens
gaggcaggcgcccaccgccggcggtgatgcggctgtgaagccctagtcggttgtaaagagagagatctttgggaatgtccatccaataaacaatgttt

SEQ ID NO: 847623 - DNA, 147 bp, Homo sapiens
acaatgtctttgttccaccagagtcattgcaggaagtggatgagttccacctcattttagagtatcaagcagaggctggagttaatctgaagagcaccacttctcctctctctcctgaaaaaatttgccactgatatttttactgga

SEQ ID NO: 847624 - DNA, 100 bp, Homo sapiens
gttgtactcaacagtacctgaagatgcagagcacaaggcagaaaatttactggttaaggagtttgacggtgagaacatgtatatgagcatgacagagccg

SEQ ID NO: 847625 - DNA, 98 bp, Homo sapiens
gaacattactcttccagaagaggaggtggtataacagacagaaatctacaaaggatccttgagggttcaggtgctacagaattccactgttctgctcg

SEQ ID NO: 847626 - DNA, 100 bp, Homo sapiens
atgccgcccttcttcccctccgaaagttatgaagacagtatggagtttccagaccatagtagacatttgctacagtgtctgagcgagcagagacaccagg

SEQ ID NO: 847627 - DNA, 98 bp, Homo sapiens
ggcacctggaacaatggcctgcaagacggctatggcaccgagacctatgctgatggaggctggtggttcgtgagcacttctgaggagcagggctgggt

SEQ ID NO: 847628 - DNA, 98 bp, Homo sapiens
cttatctgcagcaagcagacctctctgctctggaggacatgcttccaacaaagagaaagaaatggtgactaggctttctcctgtttctcagaggattt

SEQ ID NO: 847629 - DNA, 100 bp, Homo sapiens
agcaggaagaggaggacgtgccagaccaggaacagagcagcagcatcgagaccccatcagaggaggagcagcaggccaacaccaacctggccaagtatcg

SEQ ID NO: 847630 - DNA, 98 bp, Homo sapiens
ctgatcttaccctgggacacgtaaatggtcttcagttaaagggtcaaaagcggctggtgctttccgaaagctgctcccgggactccatgagcagtcag

SEQ ID NO: 847631 - DNA, 100 bp, Homo sapiens
agatgaccctaattcagaaaagaagaagaagagggatactcccatgctgccaaaggaggaggacttcatccaacccagcagccgagaagaggcccagcag

SEQ ID NO: 847632 - DNA, 100 bp, Homo sapiens
cagtctttgcaatttatcatcgatgcgtttaagggacaggcatgcatgtagggaataccggattcataaagagctggatcatcccagaatagttaagctg

SEQ ID NO: 847633 - DNA, 100 bp, Homo sapiens
atacctacaatttggatacagataccatctcaaagggtaatcttccagtgatctcagtgaaaaccaaattcaggcaatcccaaggaaagctttccgtggg

SEQ ID NO: 847634 - DNA, 98 bp, Homo sapiens
aaacatcaaagaggtctagcaaaggggtctctctttttggcatgtcggccctgttactccctgggaactttgagtcttatttggaacttgtgaagtcc

SEQ ID NO: 847635 - DNA, 98 bp, Homo sapiens
agcgctttcccgagaccgtcctggcgcgatgcgtcaagtacactgaaattcatcctgagatgaggtcaagagcaatctgaatccaaatgcaaaggagt

SEQ ID NO: 847636 - DNA, 99 bp, Homo sapiens
tggattctaatggaatcaggcagttttgtgtccatgtgaacaacttggttccccctggaagtcctgggcccattactcgacatgggtcttacgacagtt

SEQ ID NO: 847637 - DNA, 99 bp, Homo sapiens
ccaattaggtcacttcaacctcttgttggaagattattcaaaaggcggatggcaggatgaaacctggccagatggttggactgcggtgacaagagacgg

SEQ ID NO: 847638 - DNA, 100 bp, Homo sapiens
atgctgcttttgatgtctgacaacgtggatcgttgttttgaaactggaagccgtgaggtggtggatgaaggcttgatccctggagatgggctgggtgccg

SEQ ID NO: 847639 - DNA, 100 bp, Homo sapiens
acataggcacctgcctgaggaagatatttcctggcctctctccagtgttcttgggtgtctctggggagtccctgggccagaccttcctccagactccagc

SEQ ID NO: 847640 - DNA, 100 bp, Homo sapiens
agcacgtggaattcgcgaagctgccaaagccttagacaaatgcacttttgtcttcctggccagtgttttactacaatgaggatggcaagtctggacaaca

SEQ ID NO: 847641 - DNA, 98 bp, Homo sapiens
ggagcacgtcatctccatcgaggcttcggaaccaaaaagaagcttcccagagccggggccaggagccccaagcgccctctagcagcaaacacagaagg

SEQ ID NO: 847642 - DNA, 98 bp, Homo sapiens
tgattcaagtcctgttctacctactgccaattggaaaggtttgtaaaagaatggacttggtctgccagagaatgttgaatcagggatttctgaaagtg

SEQ ID NO: 847643 - DNA, 100 bp, Homo sapiens
tgtgaaaaaagccatttccgaaggaacatcatttacagcgagcaatttcagcacagcaagtgtttagagaaaaaaaagagagtatggtcattcctgttcc

SEQ ID NO: 847644 - DNA, 100 bp, Homo sapiens
tcaaagccgggttcctggtgactgccagaggaggcagcgggattgtagtggcgcgccttccagatggaaattgaccttgtacaaataaaacagatgttcg

SEQ ID NO: 847645 - DNA, 99 bp, Homo sapiens
aaaataactttacactgacaatgccaatttttacatttctttcagaacaagggacactcaaactaccagagatacgaaaaccggtgaggtccaaacatt

SEQ ID NO: 847646 - DNA, 98 bp, Homo sapiens
ccacagcattaccactggttgtaaggaaagcagatggtggagctgaatatgccacttaccagactaaatcaaccactccagcagagcagagaggctga

SEQ ID NO: 847647 - DNA, 98 bp, Homo sapiens
tgctgtctgcctatgcgcgtcgctgtgcccaggaaggtgcctcacctccctggaggaaccagaccctctgccacctgatcgtgggagcttacggggcc

SEQ ID NO: 847648 - DNA, 100 bp, Homo sapiens
acttcatccagcccttatacaaagacctttcggctccgacagttagttaatatgtgcatcaacccagatccagagaagcgaccagacgtcacctatgttt

SEQ ID NO: 847649 - DNA, 100 bp, Homo sapiens
agagatatctgcaatgatgtactgagctttggatgtagtcgatggaaaatatgtggttcgagactcccaggaatttccactgcactgtggggaatcccag

SEQ ID NO: 847650 - DNA, 100 bp, Homo sapiens
ctggagtgatctatcaggcaccagacttgggatcagttataaactctagagtggaggcttggagtacccataatacagtgagcccaccctcgtggtcccc

SEQ ID NO: 847651 - DNA, 100 bp, Homo sapiens
tatgcaacagtttcatcaccatcaaagtcaaagaagttagagtgcccttctcctgcggaacaatgagggccccaaggctgttgcagctcctcgacctgat

SEQ ID NO: 847652 - DNA, 100 bp, Homo sapiens
cgaacttcagggtttccaccgttcgttcaagcttctcccgttggcaacggttacatcaagcctccggttccacctgcttctggcacgcacagggagaaag

SEQ ID NO: 847653 - DNA, 100 bp, Homo sapiens
gcagcatataagccaggcatgtctcccgaggagtgcaggcgcttcaccacagacgaaatggaggcaaacgaccattttaactttactggccttccccctg

SEQ ID NO: 847654 - DNA, 98 bp, Homo sapiens
tataaaggggtccaccctcacatcgtggagatggacaggagacctggaatcattgttgaaaacctcgtcattaaagacaaatttatcagaagatgggt

SEQ ID NO: 847655 - DNA, 100 bp, Homo sapiens
agtttgttggtgggaatcctcatcttcctgctgctggccgtgctgctctggaagccaccagctaagtaccttcttccagaggtgacggtgcttgactatg

SEQ ID NO: 847656 - DNA, 100 bp, Homo sapiens
cggttccctggagaagccacagcttctgcaaagacaggaggagtgggccctttgtgattgttgccaatgccaaaggcgctgtgactggggcaaaagatgc

SEQ ID NO: 847657 - DNA, 100 bp, Homo sapiens
cgcaggcgccgagactgacaacgcggtcccacaggcttttggttactccccttcccaccccatcccttaattttattcttttgaagagtgcatttcaagc

SEQ ID NO: 847658 - DNA, 100 bp, Homo sapiens
cctggcctgcgcgccgctgcccgcgccacagggatcgcttacacctgagacgaactacagaacagcacgtaccagaggtggaagtccaagtcaaacgcag

SEQ ID NO: 847659 - DNA, 99 bp, Homo sapiens
tgctgtggctcttcttccagagaatgacacaggtgaaaggtactaggttttgacaagcttgcatcatgcgtgagtataagctagtcgttcttggctcag

SEQ ID NO: 847660 - DNA, 100 bp, Homo sapiens
cgctgatactaacctcttattcagaatgtcccaacaggaacaagatcactcaaggtgaaggataatctactaataccagcactttgaatgaaaatttgtt

SEQ ID NO: 847661 - DNA, 100 bp, Homo sapiens
agaagggcatatgatggatgctttgtatgcccaagtcaagaagccgcggaattccaaaccctcacctgtagacagacacaggcagccatgccgcgcagcc

SEQ ID NO: 847662 - DNA, 100 bp, Homo sapiens
tgaacgagtgtgatattactgaatattgtactggagactctggtcaggtcagtaacagatccaagagatggaaagagagtagcgctcaaaaagatgccca

SEQ ID NO: 847663 - DNA, 100 bp, Homo sapiens
ctgccccaggtcatgcccacgttccttaacgtcattcgagtctgtgatggggccatccgggaaggtagtttggtgttcgtggttgggaaaatggatggct

SEQ ID NO: 847664 - DNA, 100 bp, Homo sapiens
cccaatcatgagcactgctttaatagggattactacagcatcccatttcccacacccactactccgctgactgggagggatggtagcctggccagcaacc

SEQ ID NO: 847665 - DNA, 100 bp, Homo sapiens
ggaacctgtgcctcgagaggtattaggcagtgctacaagggatcaagatcagctccaggcctgggaaagtgaaggtaactataactacccaatattgcag

SEQ ID NO: 847666 - DNA, 98 bp, Homo sapiens
cgacctggagcggggatacacggcaagaaataccgcccacgaatggatcaggaagtctctgaccaagccattagcagagaatgaagaaggagaaaaac

SEQ ID NO: 847667 - DNA, 100 bp, Homo sapiens
cactatctagctatgaccacgttgctcctggagatgagcacgccctttacctgcgtttcctggatgctcttaaaggtgctggagaatctggtaaaagcac

SEQ ID NO: 847668 - DNA, 100 bp, Homo sapiens
catgacgtccatccatttcgtggttcacccgctgccgggcaccgaggaccagctcaatgacaggttttgattcccaccatggccatcacccagtttcggt

SEQ ID NO: 847669 - DNA, 100 bp, Homo sapiens
cagctttggttggaagacctattatcagatcaaccaccaaagtgggaaacattgaaatcaagaataccaagctgctattttacacttgaagagggagcac

SEQ ID NO: 847670 - DNA, 101 bp, Homo sapiens
ccctggactaccaacatgtttctttcctgtggttccctgcaccagagaggacccgtaaaagaagccttgagccctataaaatttaacagatggggtctccc

SEQ ID NO: 847671 - DNA, 100 bp, Homo sapiens
agcatcatcctaaggacgcagctgtctgtgagggtccatgcctgcatcgaccattcctcaagaattttgtatccaaggcccaaaagtttgttacccaaga

SEQ ID NO: 847672 - DNA, 98 bp, Homo sapiens
gacgcagtcagctgcgtgattcccgtgattgcgttacaagctttgtctccttcgacttggagtctttgtccaggacgagttacatccatatgggagaa

SEQ ID NO: 847673 - DNA, 100 bp, Homo sapiens
ctggcctcgaggccgctgctgctggcgctcctgtcgttggttggtgtgaccccatatggttatgcatcccggtttgagatccactttgatgacaaatttg

SEQ ID NO: 847674 - DNA, 100 bp, Homo sapiens
gaacttggtggccagcgccgcgcccggggccgtgcgctctcgggccactcggccgcagatgcgctggctccctccctccgaggctacttctcagggctgg

SEQ ID NO: 847675 - DNA, 100 bp, Homo sapiens
aatttggaaacagtgttatctcaatcagtacagtctattcctttgtatctcatgccacggccaaattcagtagcagtggtaagcatccgtggcattcaag

SEQ ID NO: 847676 - DNA, 100 bp, Homo sapiens
atgagaagggcaggtggccgagagtgggtgtggaggaggaagactggatgccaatgatcctcattagtgaccagaaggatcccaaggatcgaatggttca

SEQ ID NO: 847677 - DNA, 98 bp, Homo sapiens
gtactggctatattatttgcacccagtcctgcagcgccagcagctggactatggcatctatgttatcaaccagatgcttcagaatccatctgagtttg

SEQ ID NO: 847678 - DNA, 100 bp, Homo sapiens
cagcaattcactgatgaccaactgcttgttctcaccgatcttcttgtgtcaccatgctattatgcatagaaagacatatctgaagagatggattaagaat

SEQ ID NO: 847679 - DNA, 100 bp, Homo sapiens
aatagggtctggcttcttttctgaagtgttcaagcagtggctgtatcctcttggggtctccacagagctcattggcctgtgcatctgtttcttctgtagc

SEQ ID NO: 847680 - DNA, 100 bp, Homo sapiens
ggcggaagctgcacgaggcggtgcgggccgtgcagagcagcacctccatcaggtacaacctcgaggagctctaccaggcatgtactggcattgaaaacat

SEQ ID NO: 847681 - DNA, 100 bp, Homo sapiens
tgcagctctaaaaaccatggctcggtccagcctagggtgaatgtttccccctccaagaaggggcccttgcagcaccacaacctgcttgtctgccacgtga

SEQ ID NO: 847682 - DNA, 100 bp, Homo sapiens
ctctacgaaatctttcgctccctacacaccctggttggacaggttcccgtgtcagtggctatgatgacacctcaagttatcactccccagcaaatgcagc

SEQ ID NO: 847683 - DNA, 100 bp, Homo sapiens
gaatgccacagcatcctccagcacctcagagtatctgcacaaccaccactgcatttttgcactttttcttcctggcttcattctgttgggttttgactga

SEQ ID NO: 847684 - DNA, 98 bp, Homo sapiens
acaacttcatccagcccttatacaaagacctttcggtggaagtgaagaagctctttccaatgaagactgtgaaaatgtttaccacttggtgtactcgg

SEQ ID NO: 847685 - DNA, 98 bp, Homo sapiens
gaatctatgagatgaacaagagactgcagtctcgcacagagaggatgtactgagtaaagatgctggggaatgtgcaatatgccttgaagaattgcagc

SEQ ID NO: 847686 - DNA, 100 bp, Homo sapiens
agaggggaagctgacagagatacctacagacggagtgctgtgccacgtggtggaggtggatacagcagtcggagaacatctggcagagacaaatacggac

SEQ ID NO: 847687 - DNA, 100 bp, Homo sapiens
cgggctttaagcggaccaagacgctcatggagagaactgtttccttgtctcagattctgaaaaagagttccacgtcctcccttatcgagtctttgttccc

SEQ ID NO: 847688 - DNA, 99 bp, Homo sapiens
gtggaggggcccaaggaatttccccaggagaagatgtgtctgcggctcttcaggtccagctgcagctgctgacagccattgtgaaactctttctaaaga

SEQ ID NO: 847689 - DNA, 100 bp, Homo sapiens
tttgttagaaaggagacccgactgcaactgctggattgctgcaaggctgagggacgagaacgagcagttggccaaagacctccgccagtggcagacaaat

SEQ ID NO: 847690 - DNA, 100 bp, Homo sapiens
gaatagagggtatgcatttatcaccttctgtggaaaggaagctgcacaggaagccgtgaaactggattatattccatcacaacaagatattctgcttgcc

SEQ ID NO: 847691 - DNA, 100 bp, Homo sapiens
gtctgctctccaaatatgcagaatgcaaatggctgttttcagaagttgaaacattgtagtcggtatatacatgacttatttccttcactcatcaagaatt

SEQ ID NO: 847692 - DNA, 98 bp, Homo sapiens
tcgttgtttgcgtgcaatgttcaccagtcagtgtttgaaggagaagagagcaaggttgaaaggattgttgacaaaaggaaaaataaaaaagggaagac

SEQ ID NO: 847693 - DNA, 100 bp, Homo sapiens
cccgaggccaggagccaggggcccagaaggcagttcaattaacctccagaagatggctgaacctgcaggaataccagagcaagaaactgatgtctgacaa

SEQ ID NO: 847694 - DNA, 100 bp, Homo sapiens
cccgccccatcggttgttgtctgggcggcaattggtgctgaaaattcagaaaaaatagatgagaattcagataaagagatggaagtagaagaatctccag

SEQ ID NO: 847695 - DNA, 99 bp, Homo sapiens
aggagtttttgttcagggaccagcggaacgaggctttctgtcgttaatagggtgttcctggctctatgccaaatgcatcctggactggaaacctcagag

SEQ ID NO: 847696 - DNA, 100 bp, Homo sapiens
gccaccccagtctgcgtgtacacgagggatgaggatgacgcggcatggcaagaactgcaccgcaggggccgtctacacctaccacgagaagaagaaggac

SEQ ID NO: 847697 - DNA, 60 bp, Homo sapiens
tgataataacataattcacagggatgtgaagaactgttcgtcaggtggcacaggagcagt

SEQ ID NO: 847698 - DNA, 100 bp, Homo sapiens
acagtcaatgtagccagcaggatggagtccacgggggtcatgggcaacattcaggtgtacaagttcagtgtaacagttgtaaaacctcagcaattcctca

SEQ ID NO: 847699 - DNA, 100 bp, Homo sapiens
gacaatggttagagaagaattttccaaatgaatttgcaaaacttactgtagttcgaagcattcagcaaacaatggcaaggcagagccaccagaaacgtac

SEQ ID NO: 847700 - DNA, 100 bp, Homo sapiens
agaaagggatgcctgttaccagccaatcattaaagaaattttaaaaaattttccaaaagagagatgcagaaaaatatggctcaggagactaaccagaccc

SEQ ID NO: 847701 - DNA, 98 bp, Homo sapiens
acaagctcagcctcatcaacttcagcctgcccgcccacgatggatgaagtgcgtggaggagacaggcacgttcttcgagcccacgctggcggctttgt

SEQ ID NO: 847702 - DNA, 99 bp, Homo sapiens
gccccggccacctcggcctcttcctgttgcaccaggttcttcgaaaactgaagcagatgttgaacaacaagggcatacataatcttgctgctatgcttc

SEQ ID NO: 847703 - DNA, 98 bp, Homo sapiens
cggggctctcacgctttctgctcaagtcctgtcctcttctgaccaaagaattgccaacactcctgatagctgaatgtgtgctggtttacatgactcca

SEQ ID NO: 847704 - DNA, 100 bp, Homo sapiens
ctttggtctcttcggaaagactgttccaaaaacagtggataattttgtggccttagctacaggagagcaccctggaggagaagaggttctgctggaacaa

SEQ ID NO: 847705 - DNA, 100 bp, Homo sapiens
agcagatgcggacgcttttttccttcctaggagaaatcgaggagctgcggctctaccccccggaccccagcatgagaccagatgtaagctctcctccatc

SEQ ID NO: 847706 - DNA, 100 bp, Homo sapiens
aagcaaaatattaaacttttagacctgaagccatacaaagtaagctggaaagcagatggtactcgggaatgaaagctactggttgattttaaagtgcctg

SEQ ID NO: 847707 - DNA, 100 bp, Homo sapiens
tttccagtacctgatgccctttctcctcaaccagtgtggatcccttctctattacctcaccttggcatcgacagctggcaggctgggaaccacagcgcct

SEQ ID NO: 847708 - DNA, 98 bp, Homo sapiens
acagtaaggctgaaatcattgaagtgcttggagtgcagaactgaaagaggaaaatggttctcctgaagaacatgcaatctatgtttgggatcatttca

SEQ ID NO: 847709 - DNA, 98 bp, Homo sapiens
aaccgcgatgtcaccctgagagtgaccggcgaggtgcacattggaggcgtgatgcttaagctggtggagaaactcgcgttacagtgtttctgccacct

SEQ ID NO: 847710 - DNA, 100 bp, Homo sapiens
ttcctagtcagagaattcaactttcttcttttcttcattcatgaaaatgcagatccactgagaaagggaataaggtggcattgcagacagtgtagccaag

SEQ ID NO: 847711 - DNA, 100 bp, Homo sapiens
ccgggctgccccgcaggatcatcaaggagggagcactggcagttgctgggtaatttgaagacgacggtggagggtttggtatcaaccaacagccccaacg

SEQ ID NO: 847712 - DNA, 99 bp, Homo sapiens
tttgatgatgatgctgaccagtttcctgacggttctggggctgctggtatggacgcttattgctggaactgagtacttccgggtccccgcatttggctg

SEQ ID NO: 847713 - DNA, 100 bp, Homo sapiens
ggctttcaaggatatgctgtattcagctcaggaccaggcaccttctgtggaagtttcagctcctggcatcagctctattcaaatctggttcagattttac

SEQ ID NO: 847714 - DNA, 100 bp, Homo sapiens
tccccccatctggctggaacacacatcagtcacggaatgaaagctactggttgattttaaagtgcctgggcctcacaggtttggagatgtcccagaataa

SEQ ID NO: 847715 - DNA, 100 bp, Homo sapiens
ctgatgatggacagaaaagaaagacagaaaaatagagcctctattaatggacacttctataaccatgaaaccctgcacttgatggaccagctggcaccac

SEQ ID NO: 847716 - DNA, 99 bp, Homo sapiens
acgccttggccaagatgacccaactccctcgagagtaaccaacgagtagacctttacaagtggaaagacggcagtggggaagttggcacaaccttacaa

SEQ ID NO: 847717 - DNA, 100 bp, Homo sapiens
tacatgaaggtcagcatcaatggtgttctcagctacccatgttgagctgcaggtggagctggagcaagaataccaagacaaattcaaaagactgcccctc

SEQ ID NO: 847718 - DNA, 98 bp, Homo sapiens
cttttaagaggtctgcctggttctgggaaaacaacattgtctcggtttatccagcatccaaaaaactttggactaattgcatcatacttggagaggaa

SEQ ID NO: 847719 - DNA, 100 bp, Homo sapiens
cccgaccccaagctctgccacgaaggtgccaccgtctctgctttctatccgtcaagatgataaagtcgtgtgcccgagaaccaaagaagtcttccacttc

SEQ ID NO: 847720 - DNA, 100 bp, Homo sapiens
gtgggggagagaataaaactccagcgagatccgggccgtgaacgaaagcagtgacggaggagcttgtaccaccgaacaagttgaaatcatcgcagaagga

SEQ ID NO: 847721 - DNA, 99 bp, Homo sapiens
tggaatgaaatcttccaagtccaaggatgttttgaactaactggacacagtgtgtttgattttactcatccatgtgaccatgaggaaatgagagaaatg

SEQ ID NO: 847722 - DNA, 100 bp, Homo sapiens
ctacttccacttcgtgttcttcctagcttccctgtatgtgatgatgaccgtcaccaactggttcaaacttaattcagtgcacaaatgagatgaatgtgaa

SEQ ID NO: 847723 - DNA, 100 bp, Homo sapiens
cacctggaaattgccttattggaaaaacatttcttacaagtgtatgctgacttgtaaagtgaagaagccagtggtgctgcgggtgttcttttggggtagt

SEQ ID NO: 847724 - DNA, 100 bp, Homo sapiens
ggtgacacggctgaaggaccttcttcgtgctcagggcctgggagatattattgataaccaagttttacaggaaaactccagtgattttcaatcaaacatt

SEQ ID NO: 847725 - DNA, 98 bp, Homo sapiens
ttggaaacgggtcaggattggcctggaggatatttggaatagcctctcttcagtgttcacagagatgcaaccaactactccagtggttttggcggcaa

SEQ ID NO: 847726 - DNA, 100 bp, Homo sapiens
aacgacagaaaaagggattacctccaattagatctaaaacactaagtgaggattgtcctgggctgatgagagtcactttacctgaagatacctgggaagt

SEQ ID NO: 847727 - DNA, 98 bp, Homo sapiens
ttgtgaaggacatcactaacgccttcaggaggaacccacacatgtcatggaaaatggaagatttgcaaaatacaaatattttacccatgtcatgatca

SEQ ID NO: 847728 - DNA, 100 bp, Homo sapiens
atcatggcggctgcgctgttcgtgctgctgggattcgcgctgctgggcacccacggagcctccggggctgcaggttacgggcaggacttgagtggcttcg

SEQ ID NO: 847729 - DNA, 140 bp, Homo sapiens
cagccacccaaaaagtttgccccggtagttgctccaaaacctaagtacaacccatacaaacaacctggaggtgagggggccttgccttagagatgtctctgaacaatttggaccctgacaagaagggtcaaggagaaatc

SEQ ID NO: 847730 - DNA, 100 bp, Homo sapiens
ttgaaatatttgatgctcaaacaaggaaacagatatgtattctggataaggtgaagtacaaggaggattatgagagatccagagggaagctcattggggc

SEQ ID NO: 847731 - DNA, 100 bp, Homo sapiens
aaataggactaagtcttaaactggatgtcctgtgaagtcaacgagtgccgaaaaattgagagtcttgaaaacttgtatttggattttgatgatgatgtca

SEQ ID NO: 847732 - DNA, 100 bp, Homo sapiens
accgggcgccccacgggccgaagccgaaaaatggagtgctggcatacattgggaattttcgcctgcttgcagagctttccagcccgtttgtgaatcagcg

SEQ ID NO: 847733 - DNA, 98 bp, Homo sapiens
cgctcgctgggagagaggtacctctccttttccctctccctttccctaagaaactggcgatggaatatgagaggagccctctggaaagaaaaggacag

SEQ ID NO: 847734 - DNA, 100 bp, Homo sapiens
ccttatattccagatttggaacttcgaaaagagtttctctattagaataccgtaagagacaacgtgaagctaggaaaagtggctctaagacagagaactt

SEQ ID NO: 847735 - DNA, 100 bp, Homo sapiens
ataggcttatgtcttgctgcagcacttaaatatagatccggtggtatggatgagaaaacaattgctttacttgttgctggactagtgatcactgtcattg

SEQ ID NO: 847736 - DNA, 100 bp, Homo sapiens
gacaaaattggagagactgccatgaagcaatgtttaactgctgaagagatcttttcccttcatggcttttcaaatgctacccaaataaccagctccaaat

SEQ ID NO: 847737 - DNA, 98 bp, Homo sapiens
aaagacggacagcccatcgtgtgaactatagagtttgtggacagatttatattggtccaagaaactggagacattgtcatttcaaatgcatatgtgga

SEQ ID NO: 847738 - DNA, 100 bp, Homo sapiens
gcaaggtcttcggtgcccacaaggactgtgaggtggccccactgcccaccatttacaaacgccagaagtgacctacggcatgatgagctccaatgtgtac

SEQ ID NO: 847739 - DNA, 99 bp, Homo sapiens
gtgtataaagtggtccaccaacaactgtggcacacgtgggtcatgtaggacatataattccacatcattttcaaaatttgagaagcaatgggcatcctg

SEQ ID NO: 847740 - DNA, 98 bp, Homo sapiens
tttgatcatctgtgcagcccccttcgccagccattttctctacaaagctgggggaggctcatatattgctgcaggaaaaaccatatggcatagttgaa

SEQ ID NO: 847741 - DNA, 98 bp, Homo sapiens
aattcggcaaggcagacttcgtgctgatggacaccgtctccatgcccgagttcatggccaacctcaggctcagtgaggacgtgtgcaaacgtggcttc

SEQ ID NO: 847742 - DNA, 100 bp, Homo sapiens
ggttctgcattcagcttttctgccccaactaacacaggcactactgttggaaaatggatataccttatttgattatgatgttggactgaatgatataatt

SEQ ID NO: 847743 - DNA, 99 bp, Homo sapiens
gaagaaggactcgcttggaggcaatatttgctgtgctcacaagcgtcttgacaaaggatgactggtggaatcttctgttgaaggccatatactccttat

SEQ ID NO: 847744 - DNA, 100 bp, Homo sapiens
gtgcactgtgtgtggccagtcatttaccaccaatgggaacatgcacaggtccattttagcttcctatctcctgaaggaaaagctcaacatcttgggcaag

SEQ ID NO: 847745 - DNA, 100 bp, Homo sapiens
cccctctcggggcaacccagacgtgcaacaaagtgcgatgactgctgtgattgcacctgccatcttatgcagaaatgacctgaagacagactgaaacaac

SEQ ID NO: 847746 - DNA, 100 bp, Homo sapiens
gacatgggctacccactagccgtgaaactgggaaccatcactcctgacggggcaggaatggcggcgctagatagtaaggcatcagggaagatgggaatgc

SEQ ID NO: 847747 - DNA, 100 bp, Homo sapiens
agaaacgcagacagtctcaagaaaaaattgatgacattctccaaactttactagatgctacatacaatttgccaaggcacgagtaacaagctcacgcagt

SEQ ID NO: 847748 - DNA, 98 bp, Homo sapiens
gcactactggcccctgatccggttcttggtgcccctgggcatcaccaacatagccatcgacttcggggagcaggtgcagaccatgaattacgtggggc

SEQ ID NO: 847749 - DNA, 98 bp, Homo sapiens
tcacttttgagtgcaactgccttccagattctgagcagagcactggttcagattctgaggtcctcactgagcggacttcctgctccttcagtactcac

SEQ ID NO: 847750 - DNA, 100 bp, Homo sapiens
gctcctgatgcctcagggcctgaagcaaaagtccaggaggaagagcatgaccttgttgacgatgacatcaccactggctgtcccttactccagagaattt

SEQ ID NO: 847751 - DNA, 100 bp, Homo sapiens
cttttcggagccacttcttcagagcaacttgcccgcactggtgtcacagatcaggccatctcggaaacgcaggtcccttggcgatgttgggaatgtgacg

SEQ ID NO: 847752 - DNA, 100 bp, Homo sapiens
agatatttttattgtaacccagataccattgcttcacaagatgatgaagaagttacaccagcaagagctgtatctcgtcattttgaggatactagttatg

SEQ ID NO: 847753 - DNA, 100 bp, Homo sapiens
gagtcgcagttaccaccaaacccaggaggagactctccctggaaaacttcccttccctttcgacatatctgaagagatggattaagaatgctttggatta

SEQ ID NO: 847754 - DNA, 99 bp, Homo sapiens
ctgaccagaacacagaggattatctcttccaagctcgatgcattctatttctcatcatttggctcataactggaggaaggcaccacttttggttcttgc

SEQ ID NO: 847755 - DNA, 98 bp, Homo sapiens
cgctgtcttcccgcttgcgtcagggacctgcccgactcagtggctgaccggttccctgatgtgttacctgcttctgctactgatccaaactgcagaac

SEQ ID NO: 847756 - DNA, 98 bp, Homo sapiens
gccgcgggacggcggtccccgggtggccctggcgcccggggagacggtgatcggccgcgggccgctgctgggatgcatacatagagacgtgaagccag

SEQ ID NO: 847757 - DNA, 98 bp, Homo sapiens
gtcgtggcccagcgagtggggacgcgccccgaaccaggcagcaccttcagaatgatgaggagcaggaggcactgccatctctggataaacctggctgg

SEQ ID NO: 847758 - DNA, 142 bp, Homo sapiens
ggaagcccgtgtttgacggcaggaagaatctatacacagccatgccccttccgattgggagggacaaggaggagctgacaagcacaagtgtggaacacatcattgtcaatcctaatgctgcctatgacaagttcaaggacaa

SEQ ID NO: 847759 - DNA, 100 bp, Homo sapiens
atcagaggactaaataccattccattgtttgtgcagatcacttctgtatgtaacttttttacatacattcgatacattcagcagggactcgtgaaacagc

SEQ ID NO: 847760 - DNA, 100 bp, Homo sapiens
ttagaggagaaatgccaaggaatttaagagaatacatggttgaaaaaatttacccacaaatacctggttttaaaatcaaagatgggaaaatcggagaaaa

SEQ ID NO: 847761 - DNA, 109 bp, Homo sapiens
ggtgatgcagggatgcctggaatagaagagaatgacctagcaaaagttgatgatcttccccctggtggataattactgtaccttcctcatggaaaaagttttatttaaa

SEQ ID NO: 847762 - DNA, 100 bp, Homo sapiens
cccagatccacgaagccctccaaatccagacaacattgctccagtgaactttgaggcgctgatcatcaccatgtcggtagtcgggggaaccctcctcctg

SEQ ID NO: 847763 - DNA, 98 bp, Homo sapiens
gttcgccaacacctgcgaggagtgtgggaagcccatcggctgtgactgcaaggtatcagacttggtgataattctgaattatgaccgtgctgtagaag

SEQ ID NO: 847764 - DNA, 111 bp, Homo sapiens
agtatgagacggacgccattcagcggactgaggagctcgaggaggccaagaaagaccacagcaagattctttcattcgtctcctcctagcctgggggaccaggctcgaact

SEQ ID NO: 847765 - DNA, 100 bp, Homo sapiens
gtgtacctgctttgcttctctgcaggctcccctgcaaactttgctgtgtacactgccctggtggaaccccatgggcgcatcatgggcctggaccttccgg

SEQ ID NO: 847766 - DNA, 100 bp, Homo sapiens
ctcaagcgaaaacaccgctttatcctgctgcgatccccagggaacaaggcatgaaagatggccagaagataacattccatggtgaaggagaccaagaacc

SEQ ID NO: 847767 - DNA, 98 bp, Homo sapiens
gaaacgtacctcccagtcagtgaacatgctggccaaaacacatccgtataatcctctttgggcacagctgggcccatggagagactgcctgcaggccc

SEQ ID NO: 847768 - DNA, 98 bp, Homo sapiens
ttgacgtgacgtcttaacaaaagttcccagtgacctgacagcagaggagcgtcaagaactggagaacatccgacggagaaaacaggagctgctggctg

SEQ ID NO: 847769 - DNA, 100 bp, Homo sapiens
gggcgacggcggctgcgggaagacgtcgctgctgatggtcttcgccgatggggccttccccgaggctcttgtcaggatggtgaagctgttcatcggaaac

SEQ ID NO: 847770 - DNA, 100 bp, Homo sapiens
taaccacactatttatatcaacaacctcaatgagaagatcaagaaggatggttacgaagtgacagtgctggtgcgggactcctccaggctgccatcagag

SEQ ID NO: 847771 - DNA, 116 bp, Homo sapiens
cgggaggtacagtgtgcatcctacaacaacaagccattcatgggccggttttatgagtgggaaccatttgcagaaggggtgagcccctccagactccgaataggagatcaagagtt

SEQ ID NO: 847772 - DNA, 100 bp, Homo sapiens
aagctgcaaagaagcatttgcagacgttgtctcatgggtaccgcttgccaactttggagaagtgcatataacgagcctctaaccccttcttctaatacca

SEQ ID NO: 847773 - DNA, 124 bp, Homo sapiens
ttcaatgtagtcaatgtgacatgcgtttcatacagaagtacctgcttcagagacatgagaagattcatactgacctgggcctgtccccacacctcactgcgctcatggcaggtggacagcccct

SEQ ID NO: 847774 - DNA, 98 bp, Homo sapiens
tgaagaggttcagctgtcctaatcctcactgccgaaagccccctctcccaacaactccgacacctgttccaagggaacctggccggaagcctctttct

SEQ ID NO: 847775 - DNA, 100 bp, Homo sapiens
tggcgattaagtggcctgctgaaatcatccagctagtgcacagatgaacagttcactactgcctcaagatgcagtgagcagtaatctaaggaaaagtggc

SEQ ID NO: 847776 - DNA, 100 bp, Homo sapiens
ctcgtgagttgggcttggtaccgtgctgcccagaatgcccttcgggaggaagccaccattcttcagagggcaatgaaggcacagaaatggaagtaccagc

SEQ ID NO: 847777 - DNA, 74 bp, Homo sapiens
catgctggaggtggctctcaccctggatgtgtgaccggaatggtggtcggcggcttcgacagtggctgatcgag

SEQ ID NO: 847778 - DNA, 100 bp, Homo sapiens
ccgattctattcagtaccaccttcagatggaggataagaatggacgttggtcatgttcggagtttgacctgaatgagattcgcctgatagtttaccagga

SEQ ID NO: 847779 - DNA, 100 bp, Homo sapiens
aagaatgatagcacagaaaatctctgtcagaactgcaatactggagtaaccgcttcctaaaccattttgcagaaatgtaagggtgttcggttgcgtgcat

SEQ ID NO: 847780 - DNA, 106 bp, Homo sapiens
actggcaaagcaggggtccttgtaccatgagatgggtaatagcctgcagctggtgttttgagaagccctactgctgaaaacttaacaattttgtgtaataaaaatg

SEQ ID NO: 847781 - DNA, 99 bp, Homo sapiens
gcgcactgggtacaggcgcgcgcttggctgtcgcctctgccgctgtgtttgggaggactcgaactggcgccagtagtattattgattccacagaataca

SEQ ID NO: 847782 - DNA, 98 bp, Homo sapiens
gagtctcacgttgaaacagaatgaagtgcttcctggagctaagccttttatgtcacctcggtaccctggaggtccaaggcccccattgaggataccta

SEQ ID NO: 847783 - DNA, 99 bp, Homo sapiens
aaacgtgaccctcatgttaagatagaagggaaggacactgatgactggctgtgcgtggattttgtgctttgctctcctggtgtcaccttcataataata

SEQ ID NO: 847784 - DNA, 100 bp, Homo sapiens
acctacgacgatcgggcctacagcagcttcggcggcggcagaggtgagaaagatcagtctaaagaaaaggagaagaaagtgaaaaaaacaattccttcct

SEQ ID NO: 847785 - DNA, 100 bp, Homo sapiens
ctgtgtggttgcaacggagataaattcccggaaccgcgattcggcgtgtcaggtgcctgaaagaagaccctgctaccatgtccctgctgcagagaagcct

SEQ ID NO: 847786 - DNA, 100 bp, Homo sapiens
aatcgaagcacggagaggcgccagtcggagcctcatggccttttcgtgccaaacccaagtctgaaatccacgtgtctatggccactccggtcactgtgtc

SEQ ID NO: 847787 - DNA, 98 bp, Homo sapiens
cagaatgcccagggccagtttctttatgcctaccgctgtgtcctaggccctcatcagattttgacagagttggagcacagtgggattggaagaatcaa

SEQ ID NO: 847788 - DNA, 99 bp, Homo sapiens
gaatcctgggggttatgtggcgtatagtaaggctgcaacagttactctggagaatgctggaggagaccttaaggatggccaccaccactatgaaggagc

SEQ ID NO: 847789 - DNA, 100 bp, Homo sapiens
cgtcaatggagtacacaaaggctgccggactcagcacacaccctgggccgatgggacggagtgcgagcctggaaagagagagcaggagattcggatgggt

SEQ ID NO: 847790 - DNA, 98 bp, Homo sapiens
accggagcccaagccgggtgctggcacatccgaggcgttctcccgactctggaccgacgtgatgggtatcctgaaaatttttactactggagatgtca

SEQ ID NO: 847791 - DNA, 98 bp, Homo sapiens
aaaacctgctgccaaagtctatagctcaatctgaaattgaagtgtctgtctctgcaaggaatatcagaaggctactaagtttccagcgatatcttaga

SEQ ID NO: 847792 - DNA, 99 bp, Homo sapiens
acgatcctgcctgcgtggtttactgtaataccagcaagaagtggttctgcaacggacgtggaaatacttctggcagttttgaatcaggaaattgaagcg

SEQ ID NO: 847793 - DNA, 100 bp, Homo sapiens
agatggctacaggccgcggaggaggaggaggtggagttgctgcccttccggagtccgccccgtgaggagaatggttctgaatgatgactgacgcgggttt

SEQ ID NO: 847794 - DNA, 100 bp, Homo sapiens
atggcgtctcaggcctggtaaccagccgcagcttccgtactgccagtgtcagcatcaaccagacaggtggatgagaatggcaaaattagtcgccttcgtc

SEQ ID NO: 847795 - DNA, 99 bp, Homo sapiens
tcagaaagggaatcttcagtcgcacgtgcagcgagtccactcagaggcaaaagtcaacaactctagcttaattggagtaggctatactcagactctgag

SEQ ID NO: 847796 - DNA, 99 bp, Homo sapiens
accactgcagccatgatctccttaacggacacgcagattaatgacagttcggactatcacaggaaatatctactatgcaaggtcaggaactaagattat

SEQ ID NO: 847797 - DNA, 98 bp, Homo sapiens
tcttccccgcgccctgcggggctgtccaacgccttccagctccggctcccgctgcctgcaccatgtccgccagagggcaggaagatcccaacagtttg

SEQ ID NO: 847798 - DNA, 100 bp, Homo sapiens
cacgggttttagaaaaacaagaattacagcagccaacctatgttgccctgagttacataaataggaaaatgtttataggaggccttagctgggacactac

SEQ ID NO: 847799 - DNA, 100 bp, Homo sapiens
aatactatgaagacaacaagcaattttttgactggatacacgtctgtttaactacgcaaaaggtaatgctggcatggcttactgggaccctaagtgtggc

SEQ ID NO: 847800 - DNA, 100 bp, Homo sapiens
aaaattgaaaaaatggttgacctcacccagctgagatctgtatctgtggacctgaatgttgatccctcgcttcagattgacatacctgatgcgctcagtg

SEQ ID NO: 847801 - DNA, 98 bp, Homo sapiens
agtctctgtccgggggcctggctaaggaaaccctattacctccagactgagatttccactagagcttccaagtcattgacaacaaaaacatcaaaacg

SEQ ID NO: 847802 - DNA, 100 bp, Homo sapiens
atgaagctgcagctaccagattaaaaggaatagtcccattagcaaaggaatgtagtaagccacaagaagcatttggctttgaacaagcagccagggacta

SEQ ID NO: 847803 - DNA, 100 bp, Homo sapiens
tgttggctctggacaacatgctgtactttgccaagcaccaccaagatgcctacatccggatacagatccacgggttttagaaaaacaagaattacagcag

SEQ ID NO: 847804 - DNA, 100 bp, Homo sapiens
ctctttctcttccggatgtcccggagcaagattctgctgaagtgatccagtctcgagtgaacgaccaggagggccgagaggaattctatgtacactacgt

SEQ ID NO: 847805 - DNA, 99 bp, Homo sapiens
tcccccagccccaccactccctgccgaagcccagcccctgatgtcccagcagacgcaaacatgcagatctttgtgaagaccctcactggcaaaaccatc

SEQ ID NO: 847806 - DNA, 98 bp, Homo sapiens
agcccagaataagattaagggttgtacaggctctttgaatatgactctgcaaagggctctgggtttgcagagagccgaaatgaccatgactgccaaca

SEQ ID NO: 847807 - DNA, 99 bp, Homo sapiens
tcttttttgctctccctcgagaagctccagatggcgtcttccgtgggcaacgtggccgacagcacagatcctctggacattaatcccagtgtagacttc

SEQ ID NO: 847808 - DNA, 100 bp, Homo sapiens
gctcacctttgaagaatacaccatcatgaaagttttgctgctactaagcacaattgccattacccagggaggagcaatacagctggctaacaatggtacc

SEQ ID NO: 847809 - DNA, 100 bp, Homo sapiens
gaagggcaggacgaggtgtcggcgcgggagcagcacttccacagccaagtgcgggagtccacggcttctctacagtttagcctttaatgccaggtttctg

SEQ ID NO: 847810 - DNA, 98 bp, Homo sapiens
gattccagttcgtctgcccacagccctccactcaacacaggaaggagaatgatccatctgtgagactgaaaattgcatcattgttgggtttattatca

SEQ ID NO: 847811 - DNA, 98 bp, Homo sapiens
caaatgtgccaacgacgtcttccagatattcctatcattccggatctggaggaagtacaggaagaagactttgttttgcaggtggcagcccctcccag

SEQ ID NO: 847812 - DNA, 100 bp, Homo sapiens
ggtctctcagtaatgctggggaccctgagatcgtcaagtctcccagcgaccccaagcaataccggcgaggattaaatccaccacacagggtgaaatctat

SEQ ID NO: 847813 - DNA, 98 bp, Homo sapiens
gcctccctgcgtggtggactgtggcaccgggtttgcctgcaatgagatttcattctctacatttaaaggacatcctttctgagctgctgtgaataaat

SEQ ID NO: 847814 - DNA, 100 bp, Homo sapiens
gaagatagtagaaaacagtctggatgctggtgccactaatgttgattttgactaaaggagaagttcaagtatcagataaagacacacacaactggagcag

SEQ ID NO: 847815 - DNA, 100 bp, Homo sapiens
gcatttcctcgtcgagcgcaacccaaggttaatgttgaagaaggaaaatgcggaagtcgtcatttgacaagttttataaatgagtatttgaagctcagga

SEQ ID NO: 847816 - DNA, 143 bp, Homo sapiens
cttttagaggctttatatcctaaacttttcaagcctgaaggaaaggcagaactgcctgattacaggagctttaacagtcctcgcagtccgcctgagagagtagagaagaccccctcccagaaccttcctgtaaggtctccccg

SEQ ID NO: 847817 - DNA, 100 bp, Homo sapiens
gaggatctggtgtaccaggcgaagctggccgagcaggctgagcgatacgacggaacctcggagagctgatagatcggtttgtggctgatttcaaagccca

SEQ ID NO: 847818 - DNA, 100 bp, Homo sapiens
agcctatttttcaagccaatctggaactggctcagctagaactgatcagctggttatattctgggcactaaatgaaggcgtttctaggcaatttgattcg

SEQ ID NO: 847819 - DNA, 100 bp, Homo sapiens
caaaaatccctagagagagcatcacaatataatattaggggtgttacgtataggctcactcaagtcccagaaatcctggatagaaagcactttgaccaag

SEQ ID NO: 847820 - DNA, 100 bp, Homo sapiens
gctttttgatggccatggcataaggaactctatcccaggaatacagctttgcattaggccgtggaggagctcctggagaccctggatctggaaaagaagg

SEQ ID NO: 847821 - DNA, 98 bp, Homo sapiens
aagtttgaggcattgacagttgtgattcagcacctgctgtctgagctgttccaaagacctaatgcgcttgctgtccagcagttgacagctgctcagca

SEQ ID NO: 847822 - DNA, 100 bp, Homo sapiens
cagtttgcatctctccctcctttaaacagcttctccgggtctcagcatgaatacagattctgttcatcttgctctgaaattaaataattctgaactcatg

SEQ ID NO: 847823 - DNA, 100 bp, Homo sapiens
cttgagaataaagatgagctctgaaaattgtttcgtagcagagaacagctctttgcatccggagagtggacaagaaaggagtaactattcccagtcagag

SEQ ID NO: 847824 - DNA, 98 bp, Homo sapiens
gagaatgagccagagggacacgctggtgcatctgtttgccggaggacctctgctcttccaggcaagtgaacatgtagccagtagtcctgcattggggg

SEQ ID NO: 847825 - DNA, 100 bp, Homo sapiens
cccatcagaagcgatgagccagcctgcagagccaagcctgatgccagcatgaacttcagcgagagggaagcatcgagactctgagtaacagctcaggctc

SEQ ID NO: 847826 - DNA, 100 bp, Homo sapiens
gacaggcttgtccatctgtaacttcattaagtgatagactggagtgatgttagaaaacacaaatatggtcacctatcagagtctgcatcccaatatcaag

SEQ ID NO: 847827 - DNA, 99 bp, Homo sapiens
taagaggcgtgattcactgaggagagaaacaggcctccttggagaccagctactacttttcagcatccttatgtgagccagaagatcagctgccatgtt

SEQ ID NO: 847828 - DNA, 101 bp, Homo sapiens
caaagcctgcaagaaagacgcctgccccaagctcgtccgcatggtgctgaatggctgaggaccttcccagtctccccagagtccgtgcctttccctgtgtg

SEQ ID NO: 847829 - DNA, 100 bp, Homo sapiens
accttgacagattccaccaacacttccgtgaccaagccattgtgagcgcagttgctaacaggatggaccaggttttctgtctcaactggtctctgacaag

SEQ ID NO: 847830 - DNA, 99 bp, Homo sapiens
ccgaggggaccatgtccgggaggcgcttccacctctccaccaccgaccgcgtcatcaaaggtaagaatgattgatgttggctgatattggagtgctcat

SEQ ID NO: 847831 - DNA, 98 bp, Homo sapiens
ctggagatcctgggcctcctgtgcaaaagcatgaattatatccagatcgagagacagaagattctgaaagggttcaatgaaatgagagtcatcttgga

SEQ ID NO: 847832 - DNA, 100 bp, Homo sapiens
cccgggacacgcaggaacggctccagcatcaagatccgtctgacaggaggaatttgtgaccctggaaattctcatgaaaatgacataatcctgtatgcaa

SEQ ID NO: 847833 - DNA, 99 bp, Homo sapiens
ttggcaagatgagcactctgcccctttctcctgggaaacaaagtgacaatgtcagtgcctactgcctgcatattgctgaggatgatggggaggtggaca

SEQ ID NO: 847834 - DNA, 100 bp, Homo sapiens
gttttgaaaagttcatgctgtcccttcattgaattttagatatgtcttctccgactactatgaagaagcctgaaaagccattgttcagctctgcatctcc

SEQ ID NO: 847835 - DNA, 99 bp, Homo sapiens
acgcgggcgagcggggctttggacgccggtggagacgcaggcgagggtgatgtgagcagagcccaggaatgccttatgtggatcggcagaaccgaatct

SEQ ID NO: 847836 - DNA, 123 bp, Homo sapiens
tttatattcagtattccaatcacagagaacttaagactgacaatctacctaatcaagctcaactccgatccaatatccgagaaattgagaaactttgtttgaaagtccgaaaggatgacctag

SEQ ID NO: 847837 - DNA, 100 bp, Homo sapiens
cataggattagatgatccaagtcaccaagaaattactgtctcaagtgatacgggcctcggcttcacaggatggggctgccagtgtcctgggcccctcctg

SEQ ID NO: 847838 - DNA, 98 bp, Homo sapiens
tgaccagcgtcacgctgctggtggcccgggtcttccagaaggctgtagaccagagtatcgagaaggctgcagctatgactccaccagaggaggaattg

SEQ ID NO: 847839 - DNA, 100 bp, Homo sapiens
ttctgtctgtccacgatagtgccaggcctatgttggagtttcttatctcagtcatcactatggtgcttctgacgttgatgactgtcacactggatcctcc

SEQ ID NO: 847840 - DNA, 100 bp, Homo sapiens
tcaatgggtagcctcaccatgaaatcacagcttcagatcactggacaatgtgttgaacatcattaaccagatcatggatgagtgcatcccccaggaccgc

SEQ ID NO: 847841 - DNA, 100 bp, Homo sapiens
tcttcctgggagccatcttccagctcatctgtgtgctggccatcatcgtacccattcccaagtcccacgaggcgaaagcatgtacctacatcagatctaa

SEQ ID NO: 847842 - DNA, 100 bp, Homo sapiens
ttatttcttcagcatggctcatattctacttcattcagaagatcaggtacacaaatgcacgcgacaggaaccaggtgtttaagatagaagtgctaatgaa

SEQ ID NO: 847843 - DNA, 100 bp, Homo sapiens
accgcgcacaggcggcggagccggtatgggcccgcctgaccctgggcgccgcgccgcacgagcaccagcctagagccagtgtgtgaatgagcttaaccag

SEQ ID NO: 847844 - DNA, 98 bp, Homo sapiens
ttggagatgagagagtcactgcagatggacgcatggaatatttgcttgtgatggagtactatcccaatgatagcagtgagattcacttcaaagtgaaa

SEQ ID NO: 847845 - DNA, 100 bp, Homo sapiens
gcttccagctcagcagggaaccctgcaggtgctggagaatctggtaaaagcaccattgtgaagcagatgaggatcctgcatgttaatgggtttaatggag

SEQ ID NO: 847846 - DNA, 74 bp, Homo sapiens
ctcctgtggtttttgattcaagtcctgttctacctactgccaattggaaagatccctgcatgtcactgagtcca

SEQ ID NO: 847847 - DNA, 100 bp, Homo sapiens
ccaggatcctgcacaggcagacgcgggccagcctcagcaccgacagccgacgcgcagatagcagagccatccttgggtgagaaggcaaccaaagtgcagg

SEQ ID NO: 847848 - DNA, 100 bp, Homo sapiens
agaatcaatgagaacacagggagcgtctccgtgacacggaccttggacagagaagtaatcgctgtttatcaaggcatccgcttcgatcctgaaattccgc

SEQ ID NO: 847849 - DNA, 100 bp, Homo sapiens
ctcactggaatattgacccttatttatccagaagattgatcatcatatgggttagctggaagtcgagtgtgctactcaactcaggagatttggagacaaa

SEQ ID NO: 847850 - DNA, 99 bp, Homo sapiens
tctacgttcgtgacatcaaacctcctgttgggccatttccgagaactcccatcagtttctgtatagtgtaaaagatacctttgtctggatatggaggaa

SEQ ID NO: 847851 - DNA, 100 bp, Homo sapiens
ccgaggaacgaagaaacagacattcaacatgattgcatttgaagtccatgggaagtgtatgtgtaagcacaacacagcaggcagccactgccagcactgt

SEQ ID NO: 847852 - DNA, 100 bp, Homo sapiens
tatgaggccagccgggaggacatctacaagcgggatttgtgtatcttagaggaccagacgaacaggctaaggatgagactgataatagaggaaagctctg

SEQ ID NO: 847853 - DNA, 100 bp, Homo sapiens
tgcggtgtgcctcgggtcggtgcaccgtccgggattttatccaccggcactgccaagatcagggtcccgggattcttgagctgtgcccagctgacgagct

SEQ ID NO: 847854 - DNA, 50 bp, Homo sapiens
ctgggcgccagcgcggctgcaggccaagaatgacaaaggacagatccctg

SEQ ID NO: 847855 - DNA, 99 bp, Homo sapiens
tgacagcacgcccagcccggacctgctgatggcccgcagcttcggtgacaagctccatgatgcgttatctgggtctggaaacccaaaccctcaaggatg

SEQ ID NO: 847856 - DNA, 99 bp, Homo sapiens
ctggaggctcaacggcagaagcttcaccacaaaagcgaaatgggcacaccacaggtcccagctagtccacagggaccagcagtgccatggaaggattta

SEQ ID NO: 847857 - DNA, 116 bp, Homo sapiens
tcatgaacccccctgagggagcagcggaggaaggaggagcagcagactcggacgtggacgcctttttccggacagcatttcagcaggaacttgatgcaaggcatgacaaatatgag

SEQ ID NO: 847858 - DNA, 100 bp, Homo sapiens
gaagacttaaaagatatattacatgctgcaaagcagataggtgatcccattaagatactaatgccatcactgtctcctacaatggaagaaggaaacattg

SEQ ID NO: 847859 - DNA, 100 bp, Homo sapiens
acctttccgagctgcttatggtgtctgccccaaaacactgatatttgcatttaatggggaacaaaagatgaagaaggaaaaggaatatattcactaagga

SEQ ID NO: 847860 - DNA, 100 bp, Homo sapiens
attaatgcaataaaacgcttccatctttatccagagaaaagacagctttgatttctggctgcaaaaaagatatgaggaagagctcctccccttccttgag

SEQ ID NO: 847861 - DNA, 99 bp, Homo sapiens
ttctctgtgagctcttcattagggcaccaaagcgaaggtttctgagtcccttcaacatgatcctgggaggaatcgtggtggtgctggtgttcacagggt

SEQ ID NO: 847862 - DNA, 100 bp, Homo sapiens
gttcttcctggagggaaagtgccgctttaaggagaactgcagaattgcaaccttgccaatggacctgatcggttttggttatgcagccctcgtgacattt

SEQ ID NO: 847863 - DNA, 100 bp, Homo sapiens
gtggacgcctacggagaaagtcagtgagaactacaagaccccaggctatgtggtcactccacacaccatgaatctactaaagcagcacctggagattact

SEQ ID NO: 847864 - DNA, 100 bp, Homo sapiens
gaaaagtcgcagcgagctggagccgccggagttggtgacaaagttcctgctgatataaggttaacttccatcaaatctaccacactaagagttgaccagt

SEQ ID NO: 847865 - DNA, 100 bp, Homo sapiens
gcccggcggtcgcgcctcaaccggctgtacggaatccaagctgccaaggggccaagggatgagctggggccctccttcccaatggcatctccccctggtc

SEQ ID NO: 847866 - DNA, 100 bp, Homo sapiens
ataaaattcctctaaatgcaattgaaatcatggcaggtccagaaagtgatgcgcaataccagttcactggtattaaaaaatatttcaactcttatactct

SEQ ID NO: 847867 - DNA, 100 bp, Homo sapiens
ctatctgctcttggttcaaacatcagggatacacagagaggtccattccaacacacagagaaattcagcaggtgacctggtactgcttgatgtatgtccc

SEQ ID NO: 847868 - DNA, 98 bp, Homo sapiens
attccaagtaactcttatttggctacagcatgctggccatagggattggaaccctgatctacgggcactggagcataatgaagtggaaccgtgagcgc

SEQ ID NO: 847869 - DNA, 100 bp, Homo sapiens
gggaatgcagtttgttttgttgcgaacacttggggcactatgaacgaagaggagcagtttgtaaacattgatttgaatgatgacaacatttgcagtgttt

SEQ ID NO: 847870 - DNA, 99 bp, Homo sapiens
catgcttcagatactacttacagtagacacaggttttgcactgattgcaaaaataaagtcctccgagcatacaatatccttattggtgaacttgactgc

SEQ ID NO: 847871 - DNA, 130 bp, Homo sapiens
gcatgaccgagatatagcacttcttgaccttatcaacttttttattcagtgttcaggctgtaaaggataacaaagccattgacctttgccgattgtgttggggacgaacttcctttaggatgggaaaccg

SEQ ID NO: 847872 - DNA, 100 bp, Homo sapiens
tccttctcgcggcgctcgagggaccatggccgatcctcgcgtgagacagatcaagatcaagaccggcgtggtgaagcgatatgaggccccaggattcctg

SEQ ID NO: 847873 - DNA, 100 bp, Homo sapiens
tagtgctggaagagaatggactgaacaggagacccttctactcctggaggtcagaatggcggcagtggagcatcgtcattcttcaggattgccctactgg

SEQ ID NO: 847874 - DNA, 100 bp, Homo sapiens
ttacctccgagggaaacaagaaaacatcaaagaggtctagcaaaggtaactataactacccaatattgcagccatggagtccatgcttaataaattgaag

SEQ ID NO: 847875 - DNA, 100 bp, Homo sapiens
ctcctcttctgggctgtgctggtcacagccacactctgcaccgctaggccgtccccgaccttgcctgaacaaggtggagccgccaccaaaatgcagattt

SEQ ID NO: 847876 - DNA, 100 bp, Homo sapiens
aatagatggcatcattgacaaggagccagatgaccaagatgctccagatgaacatgagtcgcctccacctgaagatgccccattgtacccccattcacct

SEQ ID NO: 847877 - DNA, 100 bp, Homo sapiens
aacatggagatcaagattatatctgtcataccctaatgatcccagcaagataatgtcctgtcttctaagatgtgcatcaagcctggtacatactgaaaac

SEQ ID NO: 847878 - DNA, 100 bp, Homo sapiens
cacacattgaatgggccaaggaaaaatcgagcagaaagaatgtctttcaggcccgccagctcatcctgcagtatggcttgaccctcagtgatctggatcg

SEQ ID NO: 847879 - DNA, 100 bp, Homo sapiens
tccacaagctgactgacgtcatccttgaagccgaccagaatgatagccagtccctggagctggtgcacaggttccaggcctgtttaaagaagaaaacccg

SEQ ID NO: 847880 - DNA, 100 bp, Homo sapiens
ggagcgttgcgagcgcgaatggcacgagctggagggagaatttcaagaactgcagatcacagatcttctcttgaggaagaacagaatttgttcattgatg

SEQ ID NO: 847881 - DNA, 98 bp, Homo sapiens
ttttcacttcatggatcagttatgcgccattcacttttgaagggaatttctgcccagatagtgtctgcagcttttgctggaacattatcagatggctt

SEQ ID NO: 847882 - DNA, 100 bp, Homo sapiens
ggattaggcaattctaaaacacctccaccagggcaagcaggaaaaagcgtcccaggatacaatggggatgccaagggagcagagatgcctgcagcccgtg

SEQ ID NO: 847883 - DNA, 98 bp, Homo sapiens
gcgaccagatcttccaggacgagacgggcaagaaccgcaccatggacctgctggactggagcagcctcatcgacagcaggaccaagctgtccaagcac

SEQ ID NO: 847884 - DNA, 98 bp, Homo sapiens
tctgaagaggtcaaagaaacgtggacatttcaacctacgaatgaagagggacacttcccttttcagtgatgaatttaaagtagaaacatcaaataaag

SEQ ID NO: 847885 - DNA, 100 bp, Homo sapiens
gctgaggcggccccggccccgaaattgttgccaaggtcagagaagtctcccagcccgactggacgcctccaccagaagtcacgcttgtgttgaccaaaga

SEQ ID NO: 847886 - DNA, 98 bp, Homo sapiens
ttcaagctggatttcctcccggacatgatggtcgagggccgcctgctcgttcctgacagaatcatgaacaggctgaacactttgccacgaggcttcgg

SEQ ID NO: 847887 - DNA, 98 bp, Homo sapiens
aagtgcaacttgacgggaacttttcaactgacttttacttttgacgaccaccatgactgagatcactgctgaagctaaaagatggcggcaaggcagcc

SEQ ID NO: 847888 - DNA, 100 bp, Homo sapiens
atgcagtcccccaggatacagggtcaaaggagagcacaaccatcgcagttggaagcccatggggcaggattcatcaaacgtgaggaagcctttggaaacc

SEQ ID NO: 847889 - DNA, 99 bp, Homo sapiens
tcttccaaaagcgcagaccacagttacatgtatggagaatggctggtctcctactcccagatgcatccgtgtcaaaatacaggtatcaggatgaagata

SEQ ID NO: 847890 - DNA, 100 bp, Homo sapiens
acaaacttggtataccttgctacaatagcagattctaatcaaaatatgcagtctcttttaccagcaccaaatttgtatcctactgtggggcttcaaacac

SEQ ID NO: 847891 - DNA, 100 bp, Homo sapiens
tcggaacattgttcatcgtgatttaaaagctgaaaatttacttctggatgccaatctgaatatcaaaatagcagattttgaagatgtaactgagtttctg

SEQ ID NO: 847892 - DNA, 100 bp, Homo sapiens
aacaatttctcctgctctgcagcttctgttcagggacagagcagaatgggctgatatagatccggtgccgcagaatgatggccccaatcccgtggtccag

SEQ ID NO: 847893 - DNA, 100 bp, Homo sapiens
gttatttacaaaaagtctgcccttcaacaacgacatctgtatgatcactctcattgtggggtttcggatttcttcagaggccccacagtatcaaatatcc

SEQ ID NO: 847894 - DNA, 100 bp, Homo sapiens
tcagctcgttggctggaagtgctgcgcacctacttggagctggtgctttgcgtgctggtcagcatccggaacaacaggaaggatctgagtctctccctgc

SEQ ID NO: 847895 - DNA, 100 bp, Homo sapiens
gaaggaatgttttgctagctgctaaaaccacctttgtcaccagaatgaatgaagtgcttcagatttaaatagttttactgcaatcacagcaaccaacccc

SEQ ID NO: 847896 - DNA, 98 bp, Homo sapiens
ttgttcctttggccacatatatgcgaatctataagaaaggtgatattgtagacatcaagattgactatccaccatttgaaaaaaacttttacaatgag

SEQ ID NO: 847897 - DNA, 100 bp, Homo sapiens
cgatggtcatggcgtatttcgtcgagaatttttggcttgagaatgccagactgtcatcagagatgaatacttctactgtcaacagtgccagggaagaact

SEQ ID NO: 847898 - DNA, 98 bp, Homo sapiens
gatgacgtgttgccttggagaaggacagcagagaataagctggacaccaaatacccgtacgattccacagacacatatccccagcatgcgcagtctct

SEQ ID NO: 847899 - DNA, 100 bp, Homo sapiens
ggagttcatctacccggagaagcaggagccctactcggcagaggtggggctggtgtccgagcacttctcgcaggccccgcagaggctgtccttctacagc

SEQ ID NO: 847900 - DNA, 100 bp, Homo sapiens
tggatgacgcaccagtcgtgcatgttcttggtgaagtcggccagcctgagcaagcggaggacctacgccggcctggtgcaggcctgagtgttccttccag

SEQ ID NO: 847901 - DNA, 100 bp, Homo sapiens
tcggcagcaagaacagagagagaggtggacagatctgagagatactgagtgttccaagatgtacatgttatgatatttgttgggtttggcttcctcatga

SEQ ID NO: 847902 - DNA, 100 bp, Homo sapiens
tgtgcactattctttcccaggaaccattggataaggataaagacatgcacatgatggtgtccaagccagaacagtgggtaaagccaatggctgtagcagg

SEQ ID NO: 847903 - DNA, 100 bp, Homo sapiens
tggcccattgcccccctcctcccctggctggagtgccctgcctggagggagccctcctggctgggggcaagatcctgaggaggatgaaggggctggccct

SEQ ID NO: 847904 - DNA, 100 bp, Homo sapiens
ggagccatgggtggtctgggctcagggtatggaaccggccttctttcagccaacagacattcactcatgaatgtgacagtgatgataacatgggtgccaa

SEQ ID NO: 847905 - DNA, 99 bp, Homo sapiens
ccagaaaatccaagtccggctagtacgcgaattggagaaaaagttcagtgggaagcatgtcgtctttatcgctcaggattcagagactgtttttgatat

SEQ ID NO: 847906 - DNA, 100 bp, Homo sapiens
agtgggttcgttgtatttgtgacatctgtgggtttaatccaacagaagaagttgatgaggaatctggattaaaggattcagaaccagagcgaaaacgcaa

SEQ ID NO: 847907 - DNA, 100 bp, Homo sapiens
acccggtcacacaaagcttcagcatgtcatgtgattggtttatcttggaagctaaagggcattgctcatcctgaagatcagctgaccattgacaatcagc

SEQ ID NO: 847908 - DNA, 100 bp, Homo sapiens
cgtcaacgccgtatccagcgactacgcggccgcggagacctacctgcggcgtcggcagctgctgctccgagggtcaaagaaggctcttccaagaaacatg

SEQ ID NO: 847909 - DNA, 98 bp, Homo sapiens
ttgcagaagtaccacaacagggacacctggttccagctgcagcacgtggacgctgactcggaagtgcagggttgtgagtcccggcccagcccctccac

SEQ ID NO: 847910 - DNA, 100 bp, Homo sapiens
gagaagtcctgcacaaattcactgtggatctcccaaagaaacacggaattcctcctgatcagcagagactgatctttgctggcaagcagctggaagatgg

SEQ ID NO: 847911 - DNA, 100 bp, Homo sapiens
atgctcagtttgatgcgtcacactacgacagtgagaaaggagggcagagcggcttgggtaaatccaccttaatcaacaccctcttcaaatccaaaatcag

SEQ ID NO: 847912 - DNA, 98 bp, Homo sapiens
cggccatgtccgaaacctacggagccaccagaaatggaactattgaaatttttcaggccagaaaacattacagtttcctcaaggccatcagtagagca

SEQ ID NO: 847913 - DNA, 100 bp, Homo sapiens
aaacctgaaaacattggaccacacaaagtcttactggtgttacctcattttgaaagtcttgggaaacaggaaaaaattcctaacaaaatgtcagcttttc

SEQ ID NO: 847914 - DNA, 100 bp, Homo sapiens
taaacaagaaagactggaagagatgtttccagatgaagtggacacgccccgtgatgtggctgctcgaattcggtgacttcatggtcatgacgattttctt

SEQ ID NO: 847915 - DNA, 100 bp, Homo sapiens
gcacaaggattctcgctgtgacagagacaacaccgagtatgagaaatagggccagatttgagtgtgtgaatttttgagtgaaacctggaacccaaatgag

SEQ ID NO: 847916 - DNA, 98 bp, Homo sapiens
cagaagtttgagaggaacttcattgctcaggggcatgaccattcggcccctggtagacctgttggctgtgaagaaaaagcaagagacgaagcgctcca

SEQ ID NO: 847917 - DNA, 98 bp, Homo sapiens
gccctgaaagatcgagcagaggcctatttgatagaggaaatgtatgatgaagctccgacagttagttaatatgtgcatcaacccagatccagagaagc

SEQ ID NO: 847918 - DNA, 98 bp, Homo sapiens
ggcgcggcccctagctttctccttctggtgtggggcccgaggccccttcacagatgtagtcactacaaatcttaaattgcgaaatccatcggatagaa

SEQ ID NO: 847919 - DNA, 100 bp, Homo sapiens
gagtgttccttccgctagtgatcctttgcaccctgcttggagacggacttgcttccggtggcagtcacagaccagacaagaaagctgaagcgtcatccag

SEQ ID NO: 847920 - DNA, 100 bp, Homo sapiens
ctgtacttctatatctacaagggggtccgcaaggtggaatatgtgatcaagtgtgacatgtcagctctgcagaagattctgtatcgccatatgcaagcca

SEQ ID NO: 847921 - DNA, 98 bp, Homo sapiens
agagcggctgatcgcagtccggagatgctcgtcagacacttgaggttcctcaaaaagagaaacataaaaagaacaaagacaagcacaaggccaagaaa

SEQ ID NO: 847922 - DNA, 98 bp, Homo sapiens
agcctcccgagtagctggaactacagattaacgtgacagtgtcaggtggacccacagccatcccacctccccctctggggagtgctgagagtgaggca

SEQ ID NO: 847923 - DNA, 98 bp, Homo sapiens
tgtactgtgtaacttttgatcgaactggcagacggatatttactgagatgttacagcccagatagctcttcagcctgcactgaagttcaatggtggtg

SEQ ID NO: 847924 - DNA, 115 bp, Homo sapiens
aatggaagcacctgcgggatacagtggagctacaacttctgaaggacccgtttgatggagctgcaccgccagtgggaattacttttggagaagatgcgagaaaaaggaatcaaac

SEQ ID NO: 847925 - DNA, 98 bp, Homo sapiens
tctctcaatatattctcacttatgggtataaaggctggcagtgatggtgaaagcataggaaactgccccttttcccagaggctcttcatgattctttg

SEQ ID NO: 847926 - DNA, 98 bp, Homo sapiens
tttctttgtcatgtagccaagactggagaaacaatagatgtgaatacagctgtgatggagttgctcatcatggcttacgcactgaagactgcctgtgc

SEQ ID NO: 847927 - DNA, 100 bp, Homo sapiens
cactttgggaagcagtgacatccaacctgtatcaagtcttctaatctgtgaacatgtcaccaggtgtcaagatgctgcaagtacataggactggactggg

SEQ ID NO: 847928 - DNA, 100 bp, Homo sapiens
gttattaataaagtcaccaggaatcgatgccaatactgtcgactccagaagtgctttgaagtgggaatgtccaaagaatatgtttctattgatatgccag

SEQ ID NO: 847929 - DNA, 100 bp, Homo sapiens
tgcgacagccacatggagacattcttgcgctgcatcgaagcctcaggccctgaagtactctttccagacccacgaccgcctctgctttgtcatggagtac

SEQ ID NO: 847930 - DNA, 100 bp, Homo sapiens
gaagatacagcatcccgaattgatgagttatttcaaaagagaagcagtgttctcactcagggatgttctgttcttgaaggactgtgtaggcccagaagtg

SEQ ID NO: 847931 - DNA, 99 bp, Homo sapiens
tccaagaaaaaaaccacaaatgtttttctgttttgcctgaatacatgatttaaacaagagatttccacagaagggaagatcagttttcctgccatccag

SEQ ID NO: 847932 - DNA, 98 bp, Homo sapiens
gcagaaatgggtgccggaatctgtctcctgatcatcattcagcttttgaagagggagaacagcagattgctcagttacatgggtctggattttaattc

SEQ ID NO: 847933 - DNA, 100 bp, Homo sapiens
ggtaaactcaatgcacagaaacttaaagaccttggagctgccactccgaaaccagtcccagaacccgagaaacagacagaccatacagttaaaattgctg

SEQ ID NO: 847934 - DNA, 98 bp, Homo sapiens
gacatccaccctgccggctggtgctccaagacaggacatcccctgcagcctcctctcgatatttctccctcgagtggctgggaaacttggcaagagac

SEQ ID NO: 847935 - DNA, 98 bp, Homo sapiens
ggaagtaaccccttccgggagcctagatcctgtgctttactctgaagactcgtttttctatatgagtggagaagacagctgttaccagggaggtcata

SEQ ID NO: 847936 - DNA, 100 bp, Homo sapiens
tggcagggagttctgttacgccatggaaaccgctctggtcacaccaatactgttgcagattgatgccatggacaatattaccaggcagaaccaattctac

SEQ ID NO: 847937 - DNA, 99 bp, Homo sapiens
aaaagactcagagactatataagtagcttaaagatgacaccttgcattccctatttaggtatgtgacgcattcccagactcttcagccaactgagcatc

SEQ ID NO: 847938 - DNA, 98 bp, Homo sapiens
caagtacccactggaccgtggttttgcaggaaatgtgaatctcaggagagagcagccagagtgaacaagttgaaatcatcgcagaaggataaagttcg

SEQ ID NO: 847939 - DNA, 126 bp, Homo sapiens
cgggggcgtacaggcgcagcggccgcagcagcagcggcagtcacaggcacatcagcaaagaggtcactcctggaagcaaggcggctctagctaatttatgtattggagatgtaatcacagccattg

SEQ ID NO: 847940 - DNA, 100 bp, Homo sapiens
cagagctgaggactgcctgtttgcaggcagtggccattcaccaccgagtagcagtctcacttctccaagccacgtgaacttgtctccaaatacagtccca

SEQ ID NO: 847941 - DNA, 100 bp, Homo sapiens
acgaattccaacttgtttcacgctatatcaggatgagataactgaaagggaagcagaaccatactatgttgaagatgacagcgatgcagagacctatgga

SEQ ID NO: 847942 - DNA, 99 bp, Homo sapiens
agcccactgagagtttacctctggagttcagtgatatattaataaggcagcggaaagaagaaatatgaatacggctccatcaagacccagccccacacg

SEQ ID NO: 847943 - DNA, 100 bp, Homo sapiens
tgactgaggattacccgctccatccatccaagatagaaactcagctcgtggtgggggcttgctggcaaggtttcacagatggcagtgttacattgaacaa

SEQ ID NO: 847944 - DNA, 101 bp, Homo sapiens
taaccaactgggttcctggcccgatggcatgttgtccatggaacaagtttctcatggcactcaaaatagagtccccctgggtgtgttttggtccttattcc

SEQ ID NO: 847945 - DNA, 100 bp, Homo sapiens
acaagccgtggaataggtgtatcaagtaatggtgcaaagcctgaaacttcaaatctcaacctgagccatccccagttcttagccagttgagccagcgaca

SEQ ID NO: 847946 - DNA, 100 bp, Homo sapiens
cttcaccaaaaatcaacagctgagggaacagcagaaagtccttcatgaaaccattaaagttttagaagatcgtgcaatgcgtgttttactatctaaatta

SEQ ID NO: 847947 - DNA, 100 bp, Homo sapiens
cgatgaccagtccaggcccagcctctcgaatgggcacacctgtgtagacaagttttggtattgtcggctttcgccaaatcacaaagtcctgcattacgga

SEQ ID NO: 847948 - DNA, 100 bp, Homo sapiens
ggagacatggccaacatcgcggtgcagcgaatcaagcgggagttcaaggaggtgctgaagagcgaggagggcattcttagcagggttacagaatctgtta

SEQ ID NO: 847949 - DNA, 100 bp, Homo sapiens
aggggataacttctatgtgattgatcaaggagagacggatgtagctttggatatgttaaatcctcatgttactttgcctgttttttacccacatcttaag

SEQ ID NO: 847950 - DNA, 100 bp, Homo sapiens
gagggtggaagctgggaaacccacaggaggcaaccacactagtttaggttcaacagagtttggaaaagatttctaaactggagcaggaaaaagaacattg

SEQ ID NO: 847951 - DNA, 100 bp, Homo sapiens
gttttttcgggcctgactgcacgcagtgtcctgggggcttctccaacccctgctatggcaaaggcaatgccacatccacgtcctccgagcctacatcaag

SEQ ID NO: 847952 - DNA, 100 bp, Homo sapiens
attcgcagtggtcgcttcttctccttgcttaacagagcgttccaaaaagaggactctccagctactttttattgcatcagtatgcagtggtttagagaat

SEQ ID NO: 847953 - DNA, 100 bp, Homo sapiens
taaaggccaacccttttggaggtgcttctcatgcaaaaggaatcgtgctggaaaaagtgtctgccatcatggatgttctcgcagaagcaaatggcacctt

SEQ ID NO: 847954 - DNA, 98 bp, Homo sapiens
gagacgagaagcctgaaaagtcgcagcgagctggagccgccggagagtatctgactgtcttctctcagatgattgcatttcatgatccagagctgagt

SEQ ID NO: 847955 - DNA, 98 bp, Homo sapiens
ctcctatctgagaaatccaggagtggaggaatccaatgggaactctggccaaggctttggtgttaagatgttgagtactgccaacatgaagagcagtc

SEQ ID NO: 847956 - DNA, 100 bp, Homo sapiens
cacctacagaaacaaaatgtcaacaaattgatgggtggctgagatctgcgttgaaatggagctgcgggacgagattctgcccagagcccagaacatccag

SEQ ID NO: 847957 - DNA, 100 bp, Homo sapiens
atcagatctgccccaaatgcagaggggaagacctccagtctataagcccaggaagccgtcttcgaactcaggagaagaattaaacaaccaccatgtcgag

SEQ ID NO: 847958 - DNA, 98 bp, Homo sapiens
tgcaggtccaaacattcaccgtggagaagctactggagcctctcataatccagatcaatgaactgagccatgttcaaatccctgttatgttgatgcca

SEQ ID NO: 847959 - DNA, 98 bp, Homo sapiens
aatatatcacccataatcggaatgtgatcacagagcctatttacccagaagtagtccatatggttttagatggagcaggattagatattgatttccat

SEQ ID NO: 847960 - DNA, 98 bp, Homo sapiens
aaaatcaaaagaaacttttgcccttatcagtaacacctgaggtaaatgaaattgcctttataaatacccttgaagcccagaataaacgtcatgatgtt

SEQ ID NO: 847961 - DNA, 100 bp, Homo sapiens
cacagctgctggtccgggccacgatggctgaagagcaactttctgagctacaggagtacgtggaccagcacctgggcagagcgtgccaggaagatgtcga

SEQ ID NO: 847962 - DNA, 98 bp, Homo sapiens
acaggtgtttcaaggaactaattctctggtgtattctggaggtcgaatggtcacatatgaacatctccgagaggttgtgtttggcaaaagtgaagatg

SEQ ID NO: 847963 - DNA, 98 bp, Homo sapiens
aacggcggcaaagccgagaaggagaacaccccgagcgaggccaaccttcaggaggaggaggctgaccggttccctgatgtgttacctgcttctgctac

SEQ ID NO: 847964 - DNA, 100 bp, Homo sapiens
ggcaccggatcaccaagacggagggtggattacaggaggtggcagaacagttagagctggaacggataggaccacaacatcaggcaggatctgattcatt

SEQ ID NO: 847965 - DNA, 100 bp, Homo sapiens
atttcttttgtcaattaggtcacttcaacctcttattggaagattatccaaaaggtgacagcgggaaggtgaccacagtcgtagccactctaggccaagg

SEQ ID NO: 847966 - DNA, 100 bp, Homo sapiens
aattgatgcacaaaataagctggaaaaatctgaggtcatatataccagaagttctgagattgaagagctgaaagccactattgaaaatctgcaagagaat

SEQ ID NO: 847967 - DNA, 98 bp, Homo sapiens
ctgaaaacaaattggggctcagagcttcttccacctgcccgttaacattcgaaaatgtcaaggcgttatctggaatgcgacacgtatggcgaaaggtg

SEQ ID NO: 847968 - DNA, 100 bp, Homo sapiens
tttatggagaccctgaaagacatcgtggagtattacaacgacagtaacggatcagactctgtgattttactgaaagtgaaagattcccagactccaactc

SEQ ID NO: 847969 - DNA, 100 bp, Homo sapiens
gcactgtcacaggagaactacacaatggttcttgatcaatatgaacgagaaggatttaacttcctagccaaggtgtttaattcttcacattccttcttag

SEQ ID NO: 847970 - DNA, 100 bp, Homo sapiens
gtccagccctgcgcagccgcccaccaagctgccagaagacgagccggacgcccaaggctacgagaggacgattgcaataaaatcagtggttctggaagta

SEQ ID NO: 847971 - DNA, 100 bp, Homo sapiens
ctccctgcaaagaaacaagagtgcttatcccagctaagctccaggaatcaggaaacccaggcccaacggcaggtggatgcaagaagaaatgttccccaaa

SEQ ID NO: 847972 - DNA, 100 bp, Homo sapiens
ctggtccttcatccccccaatctcccgtacctggcgagtccagctcgtcgcggatgtacagttacccagcacgtgtacctcctcctcctcctattgctcg

SEQ ID NO: 847973 - DNA, 101 bp, Homo sapiens
ccggctccgtggggccgtcttcccggcgagtccgcgacggtcgccgcccacggcgaggatcccatgacagattctgttgtcacgtctccttacagagtttg

SEQ ID NO: 847974 - DNA, 106 bp, Homo sapiens
ctggtgactttgaacatgctggtgccgctagccaagctgtcctgcctgggaaactgttaaggcagcaataatagaagagcagaaacgaagtgaaaaggctgtggaa

SEQ ID NO: 847975 - DNA, 100 bp, Homo sapiens
aaagtggtgcaacaacaacaaggcatacaactgaccacccaatgcagtgcatattaacaagggtagattttgcttattgacatgtgtgtgcagaactgtg

SEQ ID NO: 847976 - DNA, 100 bp, Homo sapiens
ccgccaatccacttcctgtggcaactacagggatcaatgtaaccactgtgcgggaatatctgccagaaggagacttttcaataatgacagagatgctcaa

SEQ ID NO: 847977 - DNA, 98 bp, Homo sapiens
tcaatgcatcatgtcaggcagcttatgatgccaatttgtcccatgcataagctgtggccatgactactgaagtaggctctgtgtctgaagtgaagaag

SEQ ID NO: 847978 - DNA, 98 bp, Homo sapiens
agtgggtgtcctcaagaaaggtgacttggtcctcgcggacgccaggacagagcgggatgccaccagcttgtccaaagggaagttccaggagctcctgg

SEQ ID NO: 847979 - DNA, 100 bp, Homo sapiens
cgttgtctaaatttcggtagccatggcacaagaatatattgctgattgttggaggttcttttggtcttcgtgagttttctcaaatccgatatgatgctgt

SEQ ID NO: 847980 - DNA, 100 bp, Homo sapiens
aatttcgatgagagaaaagagatggcaaccattcttagtaagatgccaaaaccaaaaccacctccaaacagagaaaagaaaccttgtttattccctgtga

SEQ ID NO: 847981 - DNA, 100 bp, Homo sapiens
gctttggaagagtatgcctgggtcccgccgggtctgaagcctgaacagacatggctccttactatgaagccttgtgcaaatccctcgactggcagataga

SEQ ID NO: 847982 - DNA, 100 bp, Homo sapiens
ccagtgaaacctcaggtgatattgctactgtgtgtgattcaggaacatggcaacccgtgtgtgtctcatcccagaaagagaagactttaaccactgtgat

SEQ ID NO: 847983 - DNA, 98 bp, Homo sapiens
atgttgtgaggcaggtgatgcggtttactatactgcttcatatgcaaaagatccacttaataactatgcagtcaagctttggggccatttggatcaca

SEQ ID NO: 847984 - DNA, 98 bp, Homo sapiens
actgcggcgcgctgctggacgaagagctctcctccttcttcctcaactatctcgctgacacgcaggcgatggatgactacagtgtgatcggccgctcc

SEQ ID NO: 847985 - DNA, 100 bp, Homo sapiens
cctgcgcagctccggccgcctggctccccatactagtcgccggaatttgctgattcccttggaattccgtttttggaaaccagtgctaagaatgcaacga

SEQ ID NO: 847986 - DNA, 100 bp, Homo sapiens
tgtcagcacctagaaaaacatgtgtaaacaggaacatcgataagtagtgtaaaaacttgcacaatgaaatccgaagccaaggatggagaggaggagagtc

SEQ ID NO: 847987 - DNA, 99 bp, Homo sapiens
tgtaatcacttatgtgtcttcgatttatgatgccttccctaaagttcctgagggtggagaagggatcagtgctacgtctggggatgaccttttccccaa

SEQ ID NO: 847988 - DNA, 99 bp, Homo sapiens
ttggacaacaacaagttggccagggtgccctcagggctcccagacctcaagctcctccagctctgcagcttccaagtcctggatgagctcggaagacac

SEQ ID NO: 847989 - DNA, 100 bp, Homo sapiens
agttttcagtacctcatagtggcaattgccttttcaaaaggaaaacccttcaggcaaccttgctacaaaaattaccaaatacacgctgatcgatgagcag

SEQ ID NO: 847990 - DNA, 100 bp, Homo sapiens
taaacaagacaaagtcaagcagaaagcgtttgtggagccgtattttaaaggtgatgaaagaaatgcactcggtgatggaaagagagccactattctgaag

SEQ ID NO: 847991 - DNA, 98 bp, Homo sapiens
gatcttcttgcatcaagttcagctcttccttggaacatcacagtacattttaagaagcctaaagaaactgttccaactcttgctccaaaaactctttc

SEQ ID NO: 847992 - DNA, 99 bp, Homo sapiens
agcactgactttcagctatggaatcggaaggaaaatcacctcggcagtgtttgaaggaaggatactgcaactctttgaagtacgcattttttgagtgta

SEQ ID NO: 847993 - DNA, 100 bp, Homo sapiens
cgtcttgcagccctatgagcatctcatctgcggcaagaacgccaatggagtctccccaggacagtgctatcacccgggatattaaccgaacattcccagc

SEQ ID NO: 847994 - DNA, 99 bp, Homo sapiens
gatctgcccgttgtgtttgtgaaacagagaaagataggcggccatggtccaaccttgaaggcaatctgtacagaagctggtctgatggccttaagagaa

SEQ ID NO: 847995 - DNA, 119 bp, Homo sapiens
agtataaaaacacagctcgacagtacgcctacttctataaagtcatccagtcggtggtggggagcggcagctggcagagagtcaacgcccagacggctgtgagatccccgagatatgcc

SEQ ID NO: 847996 - DNA, 100 bp, Homo sapiens
gatcattgtcgtcagtaccatatcccatgtccttatcaggaatttgcactacacaaattgaatgcagttgttaatgacttctgggcagaaatttccgagt

SEQ ID NO: 847997 - DNA, 100 bp, Homo sapiens
agccggggcagtttcagtctccaccccaaatgcagggaaatcgtggaacacatggtccagcactttaaaacacagatctttggggatcggaagcccgtgt

SEQ ID NO: 847998 - DNA, 100 bp, Homo sapiens
tttgcatctctgcccagcagatgacagcacctggagtgttagctggtcatacctggacctgcgagtgtagtgcgccgcgtggctcctcgtttctccatcc

SEQ ID NO: 847999 - DNA, 154 bp, Homo sapiens
ggatcttctgccgcaccaggctcatcctgtccatcgtgtgcctgatgatcacgcagctggctggcttcagtggaccaatattgatgatgttaagaagttcaaaccgggttacctggaagctactcttaattggtttagattatataaggtacca

SEQ ID NO: 848000 - DNA, 100 bp, Homo sapiens
cccagagtgcagagccgcctttccagcatgcaggggctgctcagatgaccttccatcagtgcccgtgtttgacagaactctgccagtgaagcaaatgcat

SEQ ID NO: 848001 - DNA, 100 bp, Homo sapiens
tgtggcagctgctctgaaccaggacctggacccggacccaaagtgccatgtctttaatgtgtcgtgaaaactacccctaaaagccaaaatgggaaaggaa

SEQ ID NO: 848002 - DNA, 98 bp, Homo sapiens
tgtgagaaaagcgagcctcttctgataactcaggatttacttgaaacaaaaggagaccctaatcttcagggacattagtcatgagtgccgagtgtgcg

SEQ ID NO: 848003 - DNA, 100 bp, Homo sapiens
acgactagaagcattgctagaagcagcaggatcactgcttttaccacggcacggtgagggagacagaactgtccagcgtcacgctcagcacttgccgagg

SEQ ID NO: 848004 - DNA, 100 bp, Homo sapiens
ctgcgctttgagctactgggctgtgagctgaacgagccccccaagatgaacccagtggtggagccactgtcctggatgctgggcacctggctgtcggacc

SEQ ID NO: 848005 - DNA, 100 bp, Homo sapiens
cacaggatgctgtagtagcaaatcagaaagatgaggtctatcttaatctggtgctggactatgttccggaaacagtatacagagttgccagacactatag

SEQ ID NO: 848006 - DNA, 100 bp, Homo sapiens
gttccagtgtcagtagcagaagctactctccagaaaggagcaaatcatactctttccatcagtctcaacatagaaaaaaggggccttgctgttcaacaac

SEQ ID NO: 848007 - DNA, 100 bp, Homo sapiens
gaccggatcctggagaacatctcgctgtcggtgaagaagctctgcttatgataatgtcaacaaagttcgagtagctatcaagaaaatcagcccctttgag

SEQ ID NO: 848008 - DNA, 100 bp, Homo sapiens
agcgcgagatcttcgaccgctacggggaggaagaacaactctgctcatggtgattacatgcaaaataacgagagcagcttaatagagcaagctccaatac

SEQ ID NO: 848009 - DNA, 100 bp, Homo sapiens
cgggtggaggtgtcctgcatggagtcttgtgaaatcgcgtggactgcaacacccagcagcgcggttttataggatcacattgacaaaagtaccatggagt

SEQ ID NO: 848010 - DNA, 98 bp, Homo sapiens
aagaggaggacaaaactctgccaaagcctggctctcctggcaaggaggaaggggctggccaaatccttgtagctgtcttcttgccccggtcagtgcca

SEQ ID NO: 848011 - DNA, 139 bp, Homo sapiens
gggagggcgctgctttccccggccacccggcgcgatgatccagaatgtcggaaatcacctgcgacggaaatcacctgctaagaagctgactaatgcattaagcaagtccctgagctgtgcttccagccgtgaacctttg

SEQ ID NO: 848012 - DNA, 100 bp, Homo sapiens
cgagcccgaagccgcggagccggtggtgccttcgctcgtggatcgatacttcactcgctggtacaaaccgggtgccgtgagcgatgtggagatgcaggaa

SEQ ID NO: 848013 - DNA, 100 bp, Homo sapiens
acgattaatggaagcccaggaggaaagacttggtgttattataggacattggctccctggattatcaagagtttgtagttgacattgaatccaggctgag

SEQ ID NO: 848014 - DNA, 100 bp, Homo sapiens
gtcgtgatccagaagtccagagctgaggactgcctgtttgcaggctgaccccgcactacatctacccaccagccatcgtgcagcccagcgtggtgatccc

SEQ ID NO: 848015 - DNA, 100 bp, Homo sapiens
ttaacagacaagacacttttcagaaagacaggaccggagtaggccctatgatacttttaacttgcactcgttggagaactccttaatggatatgataagg

SEQ ID NO: 848016 - DNA, 100 bp, Homo sapiens
acctggacctcggctacagactgctggctgtgtgtgctgcaaaccgagacaagttcaccccgaagtctgccgatacgtaggtaacctttccagagatgtg

SEQ ID NO: 848017 - DNA, 100 bp, Homo sapiens
ccttttccatgcactggaggagagatggatggtgacagttctacaacagatgcttctcaactaggaatctctgcagactatattggaggaagtcattatg

SEQ ID NO: 848018 - DNA, 100 bp, Homo sapiens
caacagctgtggccctgcagcaggtggtgggcccgggatccagcctcccctcttcccttccctggcaggtgtcgcagccccaggctgctcccagcccgct

SEQ ID NO: 848019 - DNA, 99 bp, Homo sapiens
aaatgcacttctatgagcttgtggaagacacaaaagatggcatctggctggttcaggaagtgctctctggcgtggtggtcatatcgagtaaggattcag

SEQ ID NO: 848020 - DNA, 100 bp, Homo sapiens
aaaattcttcaagacattgcttcgggaagccatccatttagccagaccctggaagctgtcctgaatttcaaatactctggaggcccgggccacactgaag

SEQ ID NO: 848021 - DNA, 100 bp, Homo sapiens
ggacaagtttgcagatcgggagcgcaaggtcgccctcaaggccatgatcaaaaccaccccatcctcaccaccacctgtgaggtaggaactgccatgatgg

SEQ ID NO: 848022 - DNA, 100 bp, Homo sapiens
attggaggcgagcgttgggtgtggaacatcattctcaccaccagtctcttctctgctatccagtcagttcgctgctattcccatgggtcacaggagacag

SEQ ID NO: 848023 - DNA, 100 bp, Homo sapiens
aatgccggctgcggaggaggatggactcggggagaaagaacaggccgcgttcttcacacacccccattcggcgtagtacccagagagctcaagatgtgtg

SEQ ID NO: 848024 - DNA, 100 bp, Homo sapiens
gcggccgtctcccctcgcacaccagatatggctcgtggacagcagaaaattcagtctcagcagaaaaatgccaaaaagcaagctggacaaaagaagaaac

SEQ ID NO: 848025 - DNA, 100 bp, Homo sapiens
cgccagcgcatgcaggactgccagcgggagctccagagcctgctggtggaggaggtcaagccactgatctggattgagtctgtcattgagaagttctccc

SEQ ID NO: 848026 - DNA, 101 bp, Homo sapiens
ataaaatcacagaactccccaaaagtttatttgaaggactgttttccttacagctccttgagaaagatcagtctaaagaaaaggagaagaaagtgaaaaaa

SEQ ID NO: 848027 - DNA, 100 bp, Homo sapiens
tccggctccggcttctgctgttgctcttctccgccgcggcactgatccccacagacaagttggatggcttgaggactggtactaaaaggaaacgtgactg

SEQ ID NO: 848028 - DNA, 101 bp, Homo sapiens
tctcccagcctggagcagccggaccagcccagaaggcagcggcggcccaggccagcattcccgcaatgaggacggggacttggttgccttttccagtgacg

SEQ ID NO: 848029 - DNA, 113 bp, Homo sapiens
aggacattcacttacgccaccgccatcactttcatcacatggatcctcatccagtttgcatttaggtataattgaaatcctcaaaggaatgcaagaattgggagtacatcctg

SEQ ID NO: 848030 - DNA, 126 bp, Homo sapiens
taatgaggctcagggatgcctgtaccatgatgtgatgctggagaccttgacacttatatcctccctggttttgcgtttggctccctaatatctgctgtcgatccagtggccactattgccattttc

SEQ ID NO: 848031 - DNA, 98 bp, Homo sapiens
tcagactggccaaaattcaatccctgctttagctcagggatggaggactaaagagagcaaaggtgaaggacatctttaaggaagagcagcagaaaaat

SEQ ID NO: 848032 - DNA, 100 bp, Homo sapiens
gagaattacaggaatcttctctcattggccagcaagttcagctccggcaagtcatttgattcacccggtgatgaaatgggggtcaaccagtctgtgggct

SEQ ID NO: 848033 - DNA, 98 bp, Homo sapiens
atactggaagagaataaccgaaaaattgcagaagcacaagccaaactggtcagccccagttgatgctgacagcaggacccagtgttgccgtccctccc

SEQ ID NO: 848034 - DNA, 107 bp, Homo sapiens
tggagtaaaggaagatgaattacaggccattcttaattacctactgactatgcatgaggacttatcaaactggtttcaaagcacagagctcaagtaatttacaccag

SEQ ID NO: 848035 - DNA, 157 bp, Homo sapiens
gaagcaaatcacgtacaaagactgagacaaatgctggcttgccctccacatggtttactggacagggtcataacaaatgcttcctgcagatttcacaaaactgcatcttactgacagtctccacccacaggtgacccacgtttcttctagccattca

SEQ ID NO: 848036 - DNA, 100 bp, Homo sapiens
aaacgcgttcaactggcggaagacctcagtgatggaaccagccctggaaggcacaggcaaagaggggaagaaagcatcctccaggaagcgtacattggct

SEQ ID NO: 848037 - DNA, 99 bp, Homo sapiens
acgtgagcccgctgcaggtgtgcggcccagtccgagacagcagaataagaaagccttgagttttgtgaaaaaccggagaagagaaactaaaaggacagt

SEQ ID NO: 848038 - DNA, 98 bp, Homo sapiens
aaggatatgctgtattcagctcaggaccaggcaccttctgtggaagatgctgtcttcgcaggtgccatgcctacaatggcaagcgtcaagctgtctac

SEQ ID NO: 848039 - DNA, 98 bp, Homo sapiens
ggcgctgtgcccacgaggcaggggcttttgtatttcctgcctctgccccacccccaaaggacctccaggtgcatggattggtgctgcccctcatgctg

SEQ ID NO: 848040 - DNA, 100 bp, Homo sapiens
aaagaaacctagcaacaaaaagaaagctgcgttaatgtttgcaaatgcagaggaagaatttttctatgagtacctgtttgaaaatggtagaatagataac

SEQ ID NO: 848041 - DNA, 100 bp, Homo sapiens
ccatcaccggaatgtctacagtggcatgaacggggctccatgggccttaccccttcggccagtcttaaacgggtgtcagcaagaagaaaaattaacaaaa

SEQ ID NO: 848042 - DNA, 98 bp, Homo sapiens
ccacgtgcagacatctacaaccttcgatctcctgacgacaatggctgccatccggaagaaactggtgattgttggtgatggagcctgtggaaagacat

SEQ ID NO: 848043 - DNA, 100 bp, Homo sapiens
gacactttggagggatccatggcacagctaaagaagggcctcgaaagcgggacggtgctgatccagtttgaggaggccagatgctccagtgcctgatggc

SEQ ID NO: 848044 - DNA, 98 bp, Homo sapiens
acaagcaagcatgcagcttactgcttgaaaggatatcacgcagcagcacctctgtgaccccctgacggtgtccctgattgagaagtgcacccggtttc

SEQ ID NO: 848045 - DNA, 75 bp, Homo sapiens
cttccagtgggaatccacattaagaagtacaatagcattcgcggaatcctatccatcttcttcaccgatatggtt

SEQ ID NO: 848046 - DNA, 100 bp, Homo sapiens
gtatcagtatggacgagaatggataactcacaagcgcctgattaatctctctgagctgaccccatacatcttgtgttccatttgcaaaggttacttaata

SEQ ID NO: 848047 - DNA, 99 bp, Homo sapiens
tgagtcttctggcaaacagtgtttgcctctggttcagctcatacaacagcttcttagcttgaggaaactaataggacactaactagtgatgttgccaat

SEQ ID NO: 848048 - DNA, 100 bp, Homo sapiens
ttaaccgggacactccatcgcctcagggcgcctcggaaaccaggagatcatgagatcactattatcttcaaagcccaccatgagtgtacagatcagaaag

SEQ ID NO: 848049 - DNA, 99 bp, Homo sapiens
atggagattttgatgtggatgatgccaaagttttattaggtgatgatgaacagtctacacagatggctgcaagttgggaagatgataaagttacagaag

SEQ ID NO: 848050 - DNA, 100 bp, Homo sapiens
tattacatgatgtcattcagtgattggggcaaaaaggccccgagtcacttcaggtggtgtgtcagagtctcccagtggattttctaagcacattcaatcc

SEQ ID NO: 848051 - DNA, 98 bp, Homo sapiens
gcaaaagcacaaggattctcgctgtgacagagacaacaccgagtatgagaaattggatttgaggctcctcccctccagggacaggctgcagctccagc

SEQ ID NO: 848052 - DNA, 100 bp, Homo sapiens
ccttccctcaagtgattcttctgcctaatcctcccaaagttcttagattacagccgtgcttcctcaaagactgggaaatgcacgtccacttcaaagtcca

SEQ ID NO: 848053 - DNA, 98 bp, Homo sapiens
agccaataggacatgatccaggaagagcagtaagggactgagctgctgttccacggcaaccttcaaatgacttgtttgaaatatttgaaatagaaaga

SEQ ID NO: 848054 - DNA, 98 bp, Homo sapiens
aagatgagccccaggtccagaagtatgatgactcctttgacgacgttgaccgcacactggatgaatggaagccttccaggccctggggtcagaagggc

SEQ ID NO: 848055 - DNA, 98 bp, Homo sapiens
tacatctccgaaagcaagctcttctagaagttgggttctcatgtatcagccatcttctgtaagggtgcccagtgtgacttcggttgatcctgctgcta

SEQ ID NO: 848056 - DNA, 100 bp, Homo sapiens
ctcatcggagcgtgtggatttgagccgccgcattttttaaccctagatctcggaatgtatcctgtcaggtataatgtcagtgaatggcaagaaagttctt

SEQ ID NO: 848057 - DNA, 98 bp, Homo sapiens
ggaacaagcaaggagtcatatatccttcatatgatccatcttagtgaagaattaggatacaggttaagagcaggcttatgtgatcgctgtgcagtaac

SEQ ID NO: 848058 - DNA, 100 bp, Homo sapiens
aaagactctgggactcttggtgccaacagagttactctgatggacaaccggaaattttctacacattttggaattcagttactcaggcactttcttctca

SEQ ID NO: 848059 - DNA, 100 bp, Homo sapiens
ccttaggtaatgcatgaaagcacatgtttcagtgccactcacataagaagtgcccggtctctgacattgacagagcctggacgttggaggaagccccagg

SEQ ID NO: 848060 - DNA, 98 bp, Homo sapiens
agagaatgagttaatctcctcagaaatcactaaatactactctgaggggcttagaaattaacagggtcctcagaatggttggaatgaccctccagctt

SEQ ID NO: 848061 - DNA, 100 bp, Homo sapiens
atacccaaaaacatgcattggtatagcccaccagaaaggacagatccaaaaggtaattctggcacttggagactatatgggagccacttgtcatgcctgc

SEQ ID NO: 848062 - DNA, 100 bp, Homo sapiens
atcaaagtccaccatgtgcttttgcacatccagtctccgtgaggccgggtgacgctccagaatgggagacaagccaatttgggagcagattggatccagc

SEQ ID NO: 848063 - DNA, 99 bp, Homo sapiens
gaagcaggttcaagagctgcaggcggtgtgttgtgctctccgaccccttgaaggactcttctcgaactcaggaatcctggaatgccttcctgaccaaac

SEQ ID NO: 848064 - DNA, 100 bp, Homo sapiens
ctgattgtaggtggtgtccagctccagactgtggtaatgccttgattggttgtgtcacctgtgcagtagttgaaaatggatatgagtacacaatttcagg

SEQ ID NO: 848065 - DNA, 100 bp, Homo sapiens
aaaagaagtagactatgaagcaggggatattccaacagaatgggaaggccgaatacatcaagcaatggtaacatctttaaatgaagataatgaaagtgta

SEQ ID NO: 848066 - DNA, 100 bp, Homo sapiens
gggatccttctgtcatagaaactcacatgagacaaatgcgctcagcttcaattggtaaatttttccataaccttatggagagaaaggactttgagacatg

SEQ ID NO: 848067 - DNA, 98 bp, Homo sapiens
gtgctcctgcttaaagaaatcagtccttcctttccgacttagtcctcgggaagaagtttcagactacaagctgtggaagacagaaaattgttcatagg

SEQ ID NO: 848068 - DNA, 100 bp, Homo sapiens
tgcggcctgtatcaccagaggagattagacgtagcagattagttactgtaaaatggggaaaggagaaatttgaaggtgtagaattgaatacagatgaacc

SEQ ID NO: 848069 - DNA, 100 bp, Homo sapiens
cgtcaaagtgcacagcttccccacactcaagttctttcctgccagtgccgacaggacggaggagatgttaaagtaacccatcttgcaggacgacattgaa

SEQ ID NO: 848070 - DNA, 99 bp, Homo sapiens
gtgcgagaactgcgcagacctggtggaggtgttaaatgaaagacatggatttgattgacatactttggaggcaagatatagatcttggagtaagtcgag

SEQ ID NO: 848071 - DNA, 98 bp, Homo sapiens
caaaaatgtgcatactcacagagttagagagagggatggtgcctaaaatgaccaatgtgtgatttcagtggaataaatggcgtccaaagtcacagatg

SEQ ID NO: 848072 - DNA, 99 bp, Homo sapiens
tctacgcctggttacccaagtgtcgactttatattcagagcaccaatcaaattaagcaagcctggggaacttcgtgaggaatatgaaagcttgagaaag

SEQ ID NO: 848073 - DNA, 100 bp, Homo sapiens
tcttgtctgctgccatgtgagacgtgcctttgaccttctgccatgattgtgaggcctccccagccacgtgaaactggaacgtaggtcccgcgcctgtgat

SEQ ID NO: 848074 - DNA, 100 bp, Homo sapiens
gcattgcagttggctgaaccttgtgtcaaccatccattccaggagccagctatctgagttttaacttctagtcatggcgaatgatcgcaggagagcacag

SEQ ID NO: 848075 - DNA, 100 bp, Homo sapiens
caatgtttgcgatgactttgatctttgctacggatgctatgcagcgaagaaatactcctacggttcatgaggacaaggaaggaatttactgaagaagtaa

SEQ ID NO: 848076 - DNA, 100 bp, Homo sapiens
gctggttcctcttgagggagctgcttctgatttggactgttaaatagggtgtgtgctggtggtgtctgtaatagaacagcttgctcaagttcacaactcg

SEQ ID NO: 848077 - DNA, 131 bp, Homo sapiens
cccgtccgacgtgccctcgggggtcgcgctgttcctcaccatccctttcgccttcttcctgcccgagctgctccttccagggagatactacagcaaaccttttgttacatttcatcaaatcaatgcctttg

SEQ ID NO: 848078 - DNA, 100 bp, Homo sapiens
ttcatactatattggagcccagtcaaattttacaaaacttaaggaagctgagtcataccctaatgatcccagcaagataatgtcctgtcttctaagatgt

SEQ ID NO: 848079 - DNA, 100 bp, Homo sapiens
tggtgcggcgcggggtgagcgtcgaggaggcgcaggagactgaccgcaacggcagggaattacagtttgaaaggctgacccgagagctggaggctgaacg

SEQ ID NO: 848080 - DNA, 98 bp, Homo sapiens
cgcagcctctgcggagccgggctcgggtcgccggagccgcgccccaccccgccagctccagagccacgtacgactcctacaactcttccaagagcagc

SEQ ID NO: 848081 - DNA, 100 bp, Homo sapiens
cattccttggaagttgagcaatggacatttactgggctatgagcactttgatatgcctcatgatattgttgcatctgaagatgggactgtgtacattgga

SEQ ID NO: 848082 - DNA, 99 bp, Homo sapiens
gtcattacacaccacatgcagcgatatgcagtttggtttggaggatcaatgctggcttccacgtttatgggaaaaacagatggagactattacaccctg

SEQ ID NO: 848083 - DNA, 98 bp, Homo sapiens
cagccggtccaaggcggtgcgctgggggccggggcgcgtcgcagaaaacaacagttttgttggcatgtgaagctccagtttcctcaaagtcaagctga

SEQ ID NO: 848084 - DNA, 100 bp, Homo sapiens
cagacctgccttccggggacagccagccctcgctggaccagaccatggccgcggccttcgtgttatagttttgccgctggactcttccctcccttccccc

SEQ ID NO: 848085 - DNA, 99 bp, Homo sapiens
gttgcagaagtgccgaaagagcactggactccggaaggactggcagcctccatttgcctgtgaagtaaaaagctttcgtttcactccaagagtccagcg

SEQ ID NO: 848086 - DNA, 100 bp, Homo sapiens
ctcaccgccctcagccagaagggctacgccagcggcgtcgagaggaccatcctgggtgctggccctgtgctggagatgtatgtccatccctgtgacgatg

SEQ ID NO: 848087 - DNA, 100 bp, Homo sapiens
caggaaggagtttaggaagaattttgccacctctctttattccatgattaagggactgttgacatttagggatgtggccatagaattctctctggaggag

SEQ ID NO: 848088 - DNA, 99 bp, Homo sapiens
tgatgatcacgcagctggctggcttcagtggaccagacagttaccttggtgacgagtttaaatcacaaatcgacgtggcgctctcacaggactccacgt

SEQ ID NO: 848089 - DNA, 98 bp, Homo sapiens
ctagcagtggcgatgacagctgtaaagcacgaacaggaatacatggaagtccgggagagaatacacagagccaatggagtctcactctgttgcccagg

SEQ ID NO: 848090 - DNA, 99 bp, Homo sapiens
ggcgtgactaggagcaggcaggtgcggctgcttcaggttctacttagccaaacacagtggtcgacagctcacactccagcatcatatgggttctgcaga

SEQ ID NO: 848091 - DNA, 100 bp, Homo sapiens
caagacaacttcctcaccagcaccttacaggcttctccagggaaagtgaccgaggcagtgaaagaggccattgacgcagggtaccggcacttcgactgtg

SEQ ID NO: 848092 - DNA, 99 bp, Homo sapiens
ttcactaaagaaaacttaacagcacctggaagtttctttcaagatggcttgaaaacagctgataagttgaaacagtacattgaaaaactggctgctgat

SEQ ID NO: 848093 - DNA, 98 bp, Homo sapiens
ttcacgccaacagtacctcattgctctttggcgactcttattgctccagcggcgccatgagcaaatgaaaaagaatttggaagcacagcacaaagaat

SEQ ID NO: 848094 - DNA, 98 bp, Homo sapiens
ttcccatgatgggcagatgctagtctcaggcataccataaagtctccaaaggatggcacagtaaagaaagtgttctacagagaaggtgctcaggccaa

SEQ ID NO: 848095 - DNA, 98 bp, Homo sapiens
caaccagacaccatctccattgcttctaggacctctcagaacacagtggacagtgacaaggaatcaaacattttaagtccagtgcaggatggaacaaa

SEQ ID NO: 848096 - DNA, 100 bp, Homo sapiens
agccatcggatggatgagcagtcacacagactttgaacccagtgacttgattgtaaaaatttacagagcggaatcatatgctggtctccaagagtttaaa

SEQ ID NO: 848097 - DNA, 100 bp, Homo sapiens
atgcagcatctgcgatgtgaggaaaggcacctccaccaggaggaacagcacagcatgctgggctctggatttaaagctgagcgcttaagagtgaatttga

SEQ ID NO: 848098 - DNA, 107 bp, Homo sapiens
ctacatctccgaaagcaagctcttctagaagttggcttttggttactccccttcccaccccatcccttaattttattcttttgaagagtgcatttcaagctgccaag

SEQ ID NO: 848099 - DNA, 100 bp, Homo sapiens
tgatgaagaagatccttcaaaattaaaagaggagcagcatggcatttcagtcactggtttgcagagtccaggtatagctaggcacttccgttttggaaac

SEQ ID NO: 848100 - DNA, 100 bp, Homo sapiens
agcacttccaccccctcctctcctcaatcctggcaggatggctccaggaggccagagctctactgaagcggcggcggccccgggggccagggggccgggg

SEQ ID NO: 848101 - DNA, 100 bp, Homo sapiens
tgggctaccataaacacatcaccttgatttttaatcccacgacagccctcagcgcctttttccaggagaccaacatcccctacagccaccatcaccacca

SEQ ID NO: 848102 - DNA, 98 bp, Homo sapiens
aggagtttcatgaagagcccaaaacctattacgaactcaaaagtcaaccgctgaagagcagattgccaacactcctgatagctgaatgtgtgctggtt

SEQ ID NO: 848103 - DNA, 100 bp, Homo sapiens
ttagagccaaactgtccaaggctttggcacttgtactcccagagtacctcatccacgctttcttctgtgtcatgtttctttgtgcagcagagtggcttac

SEQ ID NO: 848104 - DNA, 100 bp, Homo sapiens
aggagcttcatcaacgatatatgtcagatctaaaggaacacggaagtggagctgcagatgcaaaccaggcagaaggccatgaatcgaatttcattgccca

SEQ ID NO: 848105 - DNA, 98 bp, Homo sapiens
acagtgcttgcgaatttgaagagagtcctcctacaaatcacatacagctttgggatggatgccatcttcagggccatgtttatgagtggactaagtga

SEQ ID NO: 848106 - DNA, 99 bp, Homo sapiens
aaaaacaggtcccgatcccgaccccaaaagagtattcttggatcttgcacaggaaggaattaaagtgtacccgtgtaatgtggacaccacctctccgtg

SEQ ID NO: 848107 - DNA, 98 bp, Homo sapiens
acgggagtcggggtggtggcttctcggaaccgagccccgacaggctatgacgtagaagttctacagactttgaccaagttttgtttccccttctatgt

SEQ ID NO: 848108 - DNA, 100 bp, Homo sapiens
catctttcaagtgtttactcatttgcctgtatccgttacagcactgatgtgagtgtagatgaagtaaaagctttggcttctctgatgacatacaagtgtg

SEQ ID NO: 848109 - DNA, 98 bp, Homo sapiens
atgccttgagccctcagctccaacagcctctgcctcggtgcaccctctcattgaccccctggcctcagggtctcaccttacccggatcccctacccag

SEQ ID NO: 848110 - DNA, 100 bp, Homo sapiens
actcacaaagcaacaaatggaggcatatgaaattcctcatcgaggaaacactggagatgttgctgttgagaagacaatagatgtgcatcttcaaatgcag

SEQ ID NO: 848111 - DNA, 100 bp, Homo sapiens
tctctgcagaatttctgaaagttttccttccatctctgctgctctctcatttgctggccatcggattggggtggtgtaaattggtccaatgtaacttgcc

SEQ ID NO: 848112 - DNA, 100 bp, Homo sapiens
gtgacccacaaattgctatctgtctagattgtttacgaaataatgggcaatcaggggacaatgtagtaaagaaataaactatcaatcttgcccagactgg

SEQ ID NO: 848113 - DNA, 98 bp, Homo sapiens
cggagaccgatatggggatttctctgtgattgccatgactgatgtggaggcgggcacccaggaggtaccaaagcagtcagactcacagcctaattctg

SEQ ID NO: 848114 - DNA, 98 bp, Homo sapiens
tcccacagaggagctgaaggagtaggacagaagaactgtcaaattctggaatccttaaagccatgtccaagacatatggaaagttgatcatgtgctgg

SEQ ID NO: 848115 - DNA, 100 bp, Homo sapiens
agtgggactggttccaacgcgaggagctcatcgggcagattagcgacatccgagtgcagaacctgcaagccaaaagaatgcaatggtgtaaagattccag

SEQ ID NO: 848116 - DNA, 99 bp, Homo sapiens
acccctccatccactcggtgaatgttttccagggacacacggaagcagccagacacagtctccaacgccaccaaagcctccgtcgccaagcttcgagct

SEQ ID NO: 848117 - DNA, 98 bp, Homo sapiens
gtcgggctggctgccaccaccaggacggagaatgtgaccgttgggggctactacccagggatcatttctgtagatggacggcagatccgagtagacca

SEQ ID NO: 848118 - DNA, 100 bp, Homo sapiens
cctcgagaccaacgtggaggagctgtgggtggaagttggttaccacagagaagcgcttcctcaaagacagtttgtacaatgaaggaatcctaattgtatg

SEQ ID NO: 848119 - DNA, 101 bp, Homo sapiens
tgggaaagcccatcctttcaaaatcaacttagaatcagaaccacagatccagaatgaagagagtgtggtgctttttctggtcgcgtggactgtgacagaga

SEQ ID NO: 848120 - DNA, 98 bp, Homo sapiens
ccaaagccattgtcaagaccacagcagtcatctgcaccagtccagctgaactctggctctcaaatcgtcattgaattttgagaagcattctgaaaact

SEQ ID NO: 848121 - DNA, 100 bp, Homo sapiens
gctgtccctgcggcttctgggggtctgaccttgcttttaacttagaaggctatatttttgtattcctgaatgatatcttcacagcagcaaatggagttta

SEQ ID NO: 848122 - DNA, 100 bp, Homo sapiens
caggctcttgctagatcagcaccggaggtggaagactggtcctggagtacaatgccattggaggcaagtataaccggggtttgacggtggtagtagcatt

SEQ ID NO: 848123 - DNA, 100 bp, Homo sapiens
tctatattttttgactgctctgctcctctatgctggacatcaaatttccagggtattgctggaactgatgtagctaaagaagcatccgatattattctca

SEQ ID NO: 848124 - DNA, 98 bp, Homo sapiens
cccgccccgcggggggtgggcgcagctcgtcgcgctccgcacaaaagacacctatggctgccgatgaaggctcagcagagaaacaggcaggagaggcc

SEQ ID NO: 848125 - DNA, 100 bp, Homo sapiens
cccgcggcagcaggcactggagctggtggtgcaggaggtctccagcgtgctcaggtcggcggaggagaagggggcagctggcattttatgctatgtggga

SEQ ID NO: 848126 - DNA, 100 bp, Homo sapiens
caggttaatatgcagaagaaatccatataggatctttgagtatttgcaactcagcctagaagaggacttctgtaacgataagagttatatttcagaagag

SEQ ID NO: 848127 - DNA, 100 bp, Homo sapiens
gatcccgccgggaggtactttgctggaaattgcaagaacctattgatggcttggatgctctggtggtgacagcaagtcctcttctcttgactgaagaaat

SEQ ID NO: 848128 - DNA, 98 bp, Homo sapiens
atgaacaagttgtaacatttctaccagcttatgcttgtccacgatttttaagaattcagctcactaccctgggaaatcttacaccttcaagcactgtg

SEQ ID NO: 848129 - DNA, 100 bp, Homo sapiens
gctctcataagccaggtcttagaggctcccggagtgtatgtctttggagaacttctggagctggccaacgtgcaggagatcatggaagggaagtggttgc

SEQ ID NO: 848130 - DNA, 100 bp, Homo sapiens
cagaaagcggtagcatctctcaaggcaaatggcgtgcaggcacagatggctaagcactgtcacagaatagagcaatgagaagcacagctcctgtcctggg

SEQ ID NO: 848131 - DNA, 100 bp, Homo sapiens
gcgaaccgcagtatcatgctggccaagaagatcatcattaaggacggaggcacggtgatgacaatgggaagaaggccaacaaccccaaccactgcaactg

SEQ ID NO: 848132 - DNA, 100 bp, Homo sapiens
caaggacctgagtttaaacaaactggatttaagcgagagcctcactggttcccaggacatcaacctgaactggatcctccccgatacaaatgcacagaaa

SEQ ID NO: 848133 - DNA, 99 bp, Homo sapiens
caatcctctgcttccaggacaagtcctgcgcttggggatcctctgtacgcccgttcactgaggcggggtttcaccatgttgcccagactggtcttgaac

SEQ ID NO: 848134 - DNA, 98 bp, Homo sapiens
ggcctgcctgagccactgcgtgaggctagcactcatccgcttccgggtcaagaactcaatgagagcgacagttgaactctatgaagacagaaaagagg

SEQ ID NO: 848135 - DNA, 98 bp, Homo sapiens
agagcttcaagaacaagggccgcgatgtggaagtaccctcttagtggcatgggtttaccaacatttaaagaatggatccaaaatacccttggagtaaa

SEQ ID NO: 848136 - DNA, 100 bp, Homo sapiens
ggaacccgcagcaggactacgaactcgtccagagggtcggcagcggcacctacggggacgtctataagagaaagcatgggattatggcaaccacagaatc

SEQ ID NO: 848137 - DNA, 100 bp, Homo sapiens
tcagaacatattccacgcatgcggttgtcatgtatgctcgaggaactgactatagcatcttggagcaattggggcactgaagatgatgagacccagagtt

SEQ ID NO: 848138 - DNA, 100 bp, Homo sapiens
acgtggactacagtgacgccctcacggagaagcagtggctaaggaaaattttaagagcttgcattgaacaagtgaaaaagtattcagaattctatactct

SEQ ID NO: 848139 - DNA, 100 bp, Homo sapiens
gaaggatttggcaacagactttgtttcttggagtccacttccaattccaaggagtggcaaaattctattcagaagaatgcaggccttgcttttatcgaac

SEQ ID NO: 848140 - DNA, 98 bp, Homo sapiens
tgctgggcgacctgcaggcagcaccggaggcccaggtctccgtgcagcccaacttccagcaggacaagaccaagagtgcagatttccataagcgggag

SEQ ID NO: 848141 - DNA, 99 bp, Homo sapiens
gcggcccaggacaggcaggggctgcacgcggatgccgtgcgcatgctcaataccctgcagaccaatgccggctacctggagcaggtgaagcgccagcgg

SEQ ID NO: 848142 - DNA, 133 bp, Homo sapiens
gctgcctttgttgctgctgcacattaggttgcagtatgtggccagttatttgcctcagtaaaagacggggatctgatgagcttctttcttctggcatcattaacggaccttttaccatgaatagttctactcc

SEQ ID NO: 848143 - DNA, 100 bp, Homo sapiens
cagcaagacccgcgccgccgggacccccaggacgacgtgtacctggacatcaccggaatagccaggccagaagaaggaaggcctgtggtgagtgggacag

SEQ ID NO: 848144 - DNA, 100 bp, Homo sapiens
aagaagccaacagcgaggctttcagttctttggaattccattcttttccttattcttctgatgtggatccagttcaaaagaatgctgaaccgggagctga

SEQ ID NO: 848145 - DNA, 100 bp, Homo sapiens
aaaaagcagaaagtagatgaagatgagattcagaagatgcagtgaatgaaaactttgccattgatttgatagcagagcagcccgtgagcgaggtggagac

SEQ ID NO: 848146 - DNA, 100 bp, Homo sapiens
tgatctgctgggatcctagagctggaacagtttgcgcgataacaatatctcagaccgaggcatctgcaagctcattgaatgtgctcttcactgcgagcaa

SEQ ID NO: 848147 - DNA, 99 bp, Homo sapiens
gaaaattcacccttgtagagtcattcctgcctttgagcggactcccttttaaggaattgaatgatctggcacgggaccctccagcacagtgttcagcag

SEQ ID NO: 848148 - DNA, 98 bp, Homo sapiens
ggggccaaacacagaatcagcaaagaggaggccatgcgctggttccagcagaagcttatgtccctgatgccaaaaatgcacctactctttcctctaac

SEQ ID NO: 848149 - DNA, 99 bp, Homo sapiens
ttattccgacattcagagttgtttcctccatttgctaaaggaatagtgtttggtgctggagaatctggtaaaagcaccattgtgaagcagatgaggatc

SEQ ID NO: 848150 - DNA, 98 bp, Homo sapiens
cacctggaacaatggcctgcaagacggctatggcaccgagacctatgctgatggagtgatggaatggggagaagatattaaagcagtttcaaaagatg

SEQ ID NO: 848151 - DNA, 50 bp, Homo sapiens
ctgcggccccgtccggcccgggctgaacgtggtgtagtatgggaagaaac

SEQ ID NO: 848152 - DNA, 100 bp, Homo sapiens
tcctgatccaaacaagcttcattgttttcagctaacagtaaccccaggtgaatgaaaactttgccattgatttgatagcagagcagcccgtgagcgaggt

SEQ ID NO: 848153 - DNA, 100 bp, Homo sapiens
gaaaacaggagttgtgccccaacttgtgaagcttctaggagcttctgaattgccaattgtggaactcgtgtccctgaagccttgtaaagctgcggagctg

SEQ ID NO: 848154 - DNA, 75 bp, Homo sapiens
ctcaaagacattgaacacgcgttgtctgtgtcggttttcaataacaagaacagggtgagcccctccagactccga

SEQ ID NO: 848155 - DNA, 100 bp, Homo sapiens
ttgatatgtctttattactggagttcattgggtgaaatgtatagatgttgttcaggcttatatcaacagaatcaaggacgtgaacccaatgatcaatgga

SEQ ID NO: 848156 - DNA, 100 bp, Homo sapiens
ttttgaggacacttgtggagagctcgaattccagaatgatgaaattgtgcatgaatcatacaaaactcaatatagagcaatgtttgtaatgaattgttct

SEQ ID NO: 848157 - DNA, 100 bp, Homo sapiens
gaagctattgaaaaacagtacatttctgcaattgagaaacaggcacacaagtgtgaggagttgctaaatgctcaggtgtctgcttttggggcagagtttt

SEQ ID NO: 848158 - DNA, 100 bp, Homo sapiens
gcagccctgtgccttgacaagagcctcatccacaccgtgttgctgcaaaaggactatcagtgggacctgatgcagaacatcatgaatgacatgccgatct

SEQ ID NO: 848159 - DNA, 100 bp, Homo sapiens
ttaaaccagataacttcctaatgggtattgggcgtcactgtaataagcacctggaaatggagatggtggcagtaccagtgagacccctcagcctcctcgg

SEQ ID NO: 848160 - DNA, 98 bp, Homo sapiens
gaacttcatgaccctataaaaggtcatcgtgatgtcaggtcatgagaccatccgagtgctggaagtcggagtggatgcccaactccctgctgaggaag

SEQ ID NO: 848161 - DNA, 116 bp, Homo sapiens
tggcattctcttaaaacacaaatacagtttcctggtgggatgtgcctcaatctcagatgtcatagctcagattatgtttgagaccttcaacaccccggccatgtacgtggccatcc

SEQ ID NO: 848162 - DNA, 98 bp, Homo sapiens
agtcaagtgctgtaaggaagctgtgtgtgtcattgacatgtcctctttcacaaagtttgagataacaggtgtccgcaatgttgccagtgtctgtctgc

SEQ ID NO: 848163 - DNA, 100 bp, Homo sapiens
agcacccgagcaaaccccagcaagatgcggaggctgcctcggcggagcagaggaaccacacgctgatcatggtgttttccgagtacttcaaggagctgga

SEQ ID NO: 848164 - DNA, 98 bp, Homo sapiens
gcggggaaggtgactaccgaacaagacatgctgcctgccctgtgcttgtgggctgcaagtgggcagaaaaagtcctacctggagcgaagcgttaagga

SEQ ID NO: 848165 - DNA, 99 bp, Homo sapiens
ggccctgagcgcactctggagggattctggcatcagggaggctttcagccggagaagcgagtttcagctgtttcctccagcttatggaggcatatctga

SEQ ID NO: 848166 - DNA, 98 bp, Homo sapiens
aaggagttcgtgcaggcgtacgaggatgtgctggagcggtacaaaggcccggtacaagcagagccttgacccaactgtggatgaagtcaagaagctct

SEQ ID NO: 848167 - DNA, 100 bp, Homo sapiens
gagcttcattcagatgtggtggaatatgccaaggaaaaactggagagcttcatcaaaaatagtgatagctttgataaagccccccaagatgaacccagtg

SEQ ID NO: 848168 - DNA, 128 bp, Homo sapiens
ccgcctcatcttccaggtgctggatgctgtgaaatacctgcatgacctgggcattgtacaccgggatctcaaggtgtggcctctggaacctgactccgttaggacgaacatctgccccttcagggagg

SEQ ID NO: 848169 - DNA, 98 bp, Homo sapiens
agctatgcttggcagcagaaggatttggcaacagactttgtttcttggagtccacttccaattccaagtttaaaaggatgcttaatcgggagctcacc

SEQ ID NO: 848170 - DNA, 100 bp, Homo sapiens
gagaccgtgaccgagagcgtgaccgagagcgcgaatatcgtcatcgttagaaggcatcattcttaacaaagaagttaaatattggtgggaaaagagtaaa

SEQ ID NO: 848171 - DNA, 100 bp, Homo sapiens
gtatcttggccagggaactcaaacagcagatgcagctcaaagttatgaagtttcaggatgaattggaatctgggaaaagacctaaaaaaccaggccagag

SEQ ID NO: 848172 - DNA, 100 bp, Homo sapiens
agaagaagaagagcatgatcggcatgtccaccaaggtgtctgacccgtaccgggcggtggtcaaggtgagcacgtgttgggaaggcccgtggcaagggag

SEQ ID NO: 848173 - DNA, 100 bp, Homo sapiens
agagatcctggacctatgaatatccagtttgagccatcggatctaagatccaaaagctcaaagcttggattctgccgtgccactcacgaatggcgacaca

SEQ ID NO: 848174 - DNA, 100 bp, Homo sapiens
ctccagaactacctgtaaattatgtgaaacctccaaatgtggctcctcaagagttactgatctatgaaatggcagagaatggaaaaaattgtgaccagag

SEQ ID NO: 848175 - DNA, 98 bp, Homo sapiens
gcttcactgggcacccggcaagcagaacctgagctcgacctccgctcaattaaggaagtcgatgagattatgtttgagaccttcaacaccccggccat

SEQ ID NO: 848176 - DNA, 100 bp, Homo sapiens
tgcaataatggcgtgttccagtccacggagacgagttgtactgctgtcacaggaaatggacgctggattacaagcatggcagctcaggcagcagaagttg

SEQ ID NO: 848177 - DNA, 100 bp, Homo sapiens
gtacctggaggctcaacggcagaagcttcaccacaaaagcgaaatgggcacaccacaggcctggaaccgggaaccgaatatacaatttatgtcattgccc

SEQ ID NO: 848178 - DNA, 100 bp, Homo sapiens
gctacgtgtccctggcattttaggtgtcggttgggtagtgatggaatggggagaagatattaaagcagtttcaaaagatgaagcagtgatgttggtgaat

SEQ ID NO: 848179 - DNA, 100 bp, Homo sapiens
cgcctctcccacacgctgcggtgcccacccatatcccgcagagtctgccagtacagggaaacccaaacatgagtggtttctccagaaagattccgaaggg

SEQ ID NO: 848180 - DNA, 98 bp, Homo sapiens
cagctgggtccggggagcgccgccgccgcctcgatggggtgatctttgacgagactctacagaagtgcctggactcctacctgcgctatgtcccccgc

SEQ ID NO: 848181 - DNA, 98 bp, Homo sapiens
gctggatgagttcatgcaggctgtgacagacaacctggcatgggagggcaggattgtggtggtgggatttgctggaggaaacattgcttctgaaccag

SEQ ID NO: 848182 - DNA, 100 bp, Homo sapiens
gagatgtactgtgcttggctggaaaaccccaaaagtgtacataaggatgaagatgagctggattcccacaccatggtgaagactagtgtggagagtgtgg

SEQ ID NO: 848183 - DNA, 98 bp, Homo sapiens
aaatgtagttggagataaagtttttgtgatatccgacatccaaagcacgtccaacagacggatgtggctgcgacactggcgatagcacttggcttacc

SEQ ID NO: 848184 - DNA, 100 bp, Homo sapiens
agcagcagaagagaagaagaagcaggatgaactgaaacggattgccagagaattggcagaagatcgtgaagaagtcatgctacccacgctggaatgagac

SEQ ID NO: 848185 - DNA, 98 bp, Homo sapiens
gagcggagacaacagcagtgagcaagtggcccaccctcaggaccctcaccacccatcagagaagcctgtcattcactgccataaatgtggggagcctt

SEQ ID NO: 848186 - DNA, 100 bp, Homo sapiens
ctaacagccaatagaaaagcagaaagccgcctcttggtttgcgtcctgcactgaaaggaaatgacggattttacggagtctcgctctgtcacccaggctg

SEQ ID NO: 848187 - DNA, 99 bp, Homo sapiens
agagctgagccaagcgtttactgggcagctgttacgcaatggctgccatccggaagaaactggtgattgttggtgatggagcctgtggaaagacatgct

SEQ ID NO: 848188 - DNA, 98 bp, Homo sapiens
cctggaccaatgcatcttcccaccaccttaaaccactgatgaagatcagcttcgtgcaaagggttatgacaaaacaccagacttcattttacaagtac

SEQ ID NO: 848189 - DNA, 99 bp, Homo sapiens
gtttgtgagcctggactcgccctcctatgtcctgtacagtgtcttgggacaaggtgcgcattcctggtgtgctgcagcgattgggagtgacatactttg

SEQ ID NO: 848190 - DNA, 100 bp, Homo sapiens
tgggatccagtacgagttgaatcattgttcaaataaggtacaagaatattccacagatgtcctttgatgatacagaaagggagccagatcagacctttag

SEQ ID NO: 848191 - DNA, 100 bp, Homo sapiens
attacagaggagcccatggcatcatagttgtgtatgatgtgacagatcaggttgggcccatgagatgtgtgctctgtatattccggaggtacaatttgcc

SEQ ID NO: 848192 - DNA, 100 bp, Homo sapiens
gacatcttcaagccagtgcgcaagtggcagctgaaatatcctaaactaattctccgagaagccagcagtgtatctgaggagctccataaagaggttcaag

SEQ ID NO: 848193 - DNA, 100 bp, Homo sapiens
agctggcgtgagttatcttctggaaatgagtcttcaagctctgtaagacatgtccagcccagaatcaaatgcaggttccatctggatatggattgcatca

SEQ ID NO: 848194 - DNA, 100 bp, Homo sapiens
gtttattggatagcttggaaccacctggagaaccaggaccttccaccaatattcctgaaaatgatcgtcacagctacctgtctctggggatccctagtat

SEQ ID NO: 848195 - DNA, 100 bp, Homo sapiens
agatgctgcaggccatgggctggcgggaaggctctggcttgggacgaaagtgtcaaggcattacggctcccattgagtgattcatcagaaagtggcatgc

SEQ ID NO: 848196 - DNA, 98 bp, Homo sapiens
caggagatagttctaggagttgtgaaacttcaagtcaagatcttggattttacatcctgaagtccaaactctagatctacggagctgcgatatatcag

SEQ ID NO: 848197 - DNA, 100 bp, Homo sapiens
gagaagggcacggatcgccggcggaacgctccgagccaggatgataatgaagataattcaaatgatgggacccagccatccaaaaggaggcgaatgggct

SEQ ID NO: 848198 - DNA, 100 bp, Homo sapiens
ctgccctatgaacagcttaagcacttttaccgaaaaccttctccccagggcagcatctcatcacggcagttgctgaccatctatttaagctgaagacaac

SEQ ID NO: 848199 - DNA, 100 bp, Homo sapiens
agtcttttgatagatgtcataacagtatttggagaactcactgatgaaagggtgtttgtgagatatggttgaccagtgaagacacgggggcttatggcag

SEQ ID NO: 848200 - DNA, 100 bp, Homo sapiens
tggatttatggcaatgcttcctctggttttacattggttcttcattgaatggtactcggggaaaaagagcttattcagctgattctgaatcatcttacac

SEQ ID NO: 848201 - DNA, 100 bp, Homo sapiens
tctgcaccgctaggccgtccccgaccttgcctgaacaaggtgaaatgacaatggatgctctgttggctcgattgaaacttctgaatccagatgaccttag

SEQ ID NO: 848202 - DNA, 100 bp, Homo sapiens
tcaatcccatcatttccagaaaggacatcacaggatgcagcaccgaggcttcctcctcctcaccctcctcgccctgctggcgctcacctccgcggtcgcc

SEQ ID NO: 848203 - DNA, 98 bp, Homo sapiens
gcaagcactgacaagcagcacattctcaagagcacacagcagatcgccaaactgaggcagcaactacaacgcagtaaacagagtagtcgtcacagtaa

SEQ ID NO: 848204 - DNA, 98 bp, Homo sapiens
acacctcttcccggcccctgaagttggcactgcagcagacagctccctgggcaccaggcagctaacagatgccaagggcctctccaaccctagtgagg

SEQ ID NO: 848205 - DNA, 99 bp, Homo sapiens
ggatgggaagcagggtttgaccctcagattggtgtctactacatcgatcacatcaacaccacagatgaagatatccttgctaaaggaaaacagtccatc

SEQ ID NO: 848206 - DNA, 109 bp, Homo sapiens
gactttttgttggatccattccgaagaataagactaaagaaaacattttggaagaattcagtaaagtcacagggtacaggcatccttcacctgctattgttgcaagaac

SEQ ID NO: 848207 - DNA, 100 bp, Homo sapiens
cagattcggtccctgctgagtgtgagaatgggcaaagaagaagagaagctcatgattcgtggattagggaaccagtgacgacctgttccaggactcggaa

SEQ ID NO: 848208 - DNA, 98 bp, Homo sapiens
ggccggcgcgggagggctgtgtgatggcctcggagcgcccggagccggaggctcccaggccagtgccagtacttgggcttgccagtggcggattactt

SEQ ID NO: 848209 - DNA, 140 bp, Homo sapiens
gactgcggcgagtatacatgcaaagcttccaatgagtatggcagtgtcagctgtacagccacactaactgtgacagcctatatatgcaaacagatttgcagtaccaacctatgcagccaagcaacctcagcagttcccat

SEQ ID NO: 848210 - DNA, 100 bp, Homo sapiens
gccaagtgcgacagccacatggagacattcttgcgctgcatcgaagcctcaggagctccagaggagatgtaataccttaattactttgattgaaagagaa

SEQ ID NO: 848211 - DNA, 100 bp, Homo sapiens
tcagccgcattgacaggatgtttcctgaaatgtccatccacttatccagacccaatggaacatcagcaatgcttctggacattcggaaattctttggagt

SEQ ID NO: 848212 - DNA, 99 bp, Homo sapiens
ggcggccgcagtggcgtcctggagccctcctcaggaagaaggtagataatgactataatgcccttcgagaaagactcagcaccttgcctgataaattgt

SEQ ID NO: 848213 - DNA, 100 bp, Homo sapiens
ccaggcagaaggcctctctcctgatacagcaggcgctcaccatgttccctggaggtattgttgcagcatctggcagtgagactgaggatgaggacagcat

SEQ ID NO: 848214 - DNA, 100 bp, Homo sapiens
acaatgtactccagttgctggatatccaagcctctcagcttcggagaatggagtcttccatcaatcatatctcacagtgttctagaacagatcagacatt

SEQ ID NO: 848215 - DNA, 98 bp, Homo sapiens
agaaatgaccaacagataactgaggacaatggacctgcctgggcatagacttccttaaggaatcccagtcagaagttccagcctgccactgttctctg

SEQ ID NO: 848216 - DNA, 98 bp, Homo sapiens
ctggacaggatggattgccagggcttcctggcccgaaaggagagcctggccactgtttgtggaagatataatgacaatggtgctgtgtaaacccaaac

SEQ ID NO: 848217 - DNA, 100 bp, Homo sapiens
agacgcccgggcttgaccgccgcgaaggccaaccccgggaaggggctcagcaaaacccagcagctcagattcctgccaggcagcgggagattgaaatgaa

SEQ ID NO: 848218 - DNA, 148 bp, Homo sapiens
tttagaggctttatatcctaaacttttcaagcctgaaggaaaggcagaactgcctgattacaggagctttaacagaatgtttcctatggactcaaagccttcactgttaaaccccactggatctatactcgtctcatctccgttaaaa

SEQ ID NO: 848219 - DNA, 100 bp, Homo sapiens
cggcggcggcgggagccccaccggggtctgggactggggaactgcctccggcttcacggtggaaaagaggctgcttcaggcaccacacctcagaagtccc

SEQ ID NO: 848220 - DNA, 100 bp, Homo sapiens
tggaaagtacaggtcctgacagctgcaatgtgaggaaagtggaatgaacttggactttgaaggcaaactaacctggaatcaaatactggctctgctgttt

SEQ ID NO: 848221 - DNA, 98 bp, Homo sapiens
atccttgttgccgtcccttcgcctccttcaccgccgcagaccccttcaagttctagtcatgagaaaatttgtcaaaggatctttacttgatatctcaa

SEQ ID NO: 848222 - DNA, 99 bp, Homo sapiens
aagggttgtagacatggcggccatcagggaaatggctagtgatgagctgaaagagatgcggaaaaacttgaccaaagaagccatcagagagcatcagat

SEQ ID NO: 848223 - DNA, 98 bp, Homo sapiens
tcctctccagtggcatagtgtcattccaatgtgactgtccactacatttcactggccgcttctgtgaaaaagctgaaaatactccttgatcaagttga

SEQ ID NO: 848224 - DNA, 51 bp, Homo sapiens
tacccttcttggagcccacagggggctctggaaggggaggctcaccgtgtg

SEQ ID NO: 848225 - DNA, 98 bp, Homo sapiens
actttctttgtttatgtcagtaatttcacctggcccatcaaaattcagcacctgttcttcccggagcctatcagcaaagccattcccaaggctatggc

SEQ ID NO: 848226 - DNA, 98 bp, Homo sapiens
tggtctgttggacgtttttacacctgcaaggtctctggaggaattcaatgatgtgaatgatgagaagacagcagctgattacaagattttaggtggtt

SEQ ID NO: 848227 - DNA, 98 bp, Homo sapiens
ggtgacgtgtgcattgagtaaacgtttcagcaagcagatggtggaaattcttcacaaacataatattcagtttagcagttttgatatcttctcagatg

SEQ ID NO: 848228 - DNA, 100 bp, Homo sapiens
atgaaagtacttctcatggataaagagacggagtttccagatgtcttggaatgcactgtatctcatgcagtagaaaagataaatcctgatgaaagagaag

SEQ ID NO: 848229 - DNA, 101 bp, Homo sapiens
gagagctctcattttccccccttgctcgggatggtgccacaggaggctgtgcgggccccgctccgcttcgaatggatcagtgtgcgtgtgaccaccatgga

SEQ ID NO: 848230 - DNA, 100 bp, Homo sapiens
tcccaatttgcctccacttagtgagcggaagaatgcaaatggttatgagccttagagtttctgaactccaagtactgttgggctacgccgggagaaacaa

SEQ ID NO: 848231 - DNA, 100 bp, Homo sapiens
ccaagccccgctaggagccacctagactggatgcagagcatgctttgaagatactgctataatttgaaaatttgaaattagtgtttcagctgaaccatcc

SEQ ID NO: 848232 - DNA, 98 bp, Homo sapiens
actcccgcccacgtcccatttcgcccctcgcgtccggagtccccgtggccagttcgttcccacatgcagggcagcacaaggagaatgggcgtcatgac

SEQ ID NO: 848233 - DNA, 100 bp, Homo sapiens
cgagacctccgaaaagcgtttccgcagacagaagtggggagaagcggagtactactataattccttgacccagcagtacctttactgggatggggaaaaa

SEQ ID NO: 848234 - DNA, 150 bp, Homo sapiens
tcagcctttgaaaaaatgtctgtcacatatgatgattccgttggagtagaagtgtccagcgacagcttctgggagcttgccaattctgtaactccttgggatatcttgctgagcttaattgcagctgccactcatgatctggatcatcca

SEQ ID NO: 848235 - DNA, 103 bp, Homo sapiens
tttgagccagctcagcggtcagcagctgtaatggctgcttcgagagctgtgcccaggagtgaacaaccagccctacctctgtgagagtggtcactgctgcggg

SEQ ID NO: 848236 - DNA, 100 bp, Homo sapiens
ggcagctaattgcatggagtgtcgtgtggaccctgctgatagtctggggatatgagtttgtcttccagccagagactcatgccttgcctatgttccgtga

SEQ ID NO: 848237 - DNA, 99 bp, Homo sapiens
tgccatcggatgcatggaggccaaccagatttttgcagctcaagtggcagtcctcctttccagcccatcaaaagccacgtaaccattccaacagcccat

SEQ ID NO: 848238 - DNA, 98 bp, Homo sapiens
ccgcctggctccccatactagtcgccggacacattcagctaacgtattttagcaggtggagtgaggttgaagattcctgtgacagcgatgccatagag

SEQ ID NO: 848239 - DNA, 100 bp, Homo sapiens
aggctgaagaggaaagacaagagccgccctgcccagaaacgtccacatgtgggtactgcattcctaccggtgtgacagtctgcgctcctcagaccaccgg

SEQ ID NO: 848240 - DNA, 136 bp, Homo sapiens
gtaccaactgcactcgttttggcattgcagctaaatatcagttggatcccactgcttccatttctatatatggcagtgtatgggagaaattacatcgagcctttgccatttggagtggctttggtatgaccctgac

SEQ ID NO: 848241 - DNA, 100 bp, Homo sapiens
attatctaccacccgagatgccccaaggccactcattaccggaatgcaaagactgccatcgcaaattcatggatgtgtctcagctaaagaaacatctgcg

SEQ ID NO: 848242 - DNA, 100 bp, Homo sapiens
gtagctgccactgacattaatggagatgaggtcaagaatttgctccaaaaagtgtggcaataattggtcattctatgggtggccttgttgcaagagcatt

SEQ ID NO: 848243 - DNA, 51 bp, Homo sapiens
gcctccagtactggggatttgccaaaagaccattactgggacttccacccc

SEQ ID NO: 848244 - DNA, 98 bp, Homo sapiens
atacatgcaggggcttaaagaactaaagattatgtttgagaccttcaacaccccggccatgtacgtggccatccaggccgtgctgtccctctacgcct

SEQ ID NO: 848245 - DNA, 109 bp, Homo sapiens
cgagcacgcgtttcccgcaacccgataccatcggacaggatttctccgcctcagcccaacggggagttacagaatgtctgaaggggacagtgtgggagaatccgtccat

SEQ ID NO: 848246 - DNA, 99 bp, Homo sapiens
atggtttagctgcattgtcattttctatcagttctctgaccttgattggaatgttggcagctataacttacacatgtttgaaagatgtatggtgatctt

SEQ ID NO: 848247 - DNA, 101 bp, Homo sapiens
tctccccttccctgctcactcagagcaaagtcgtggtcaacactgacccagatgtagccatagctgtaacgtataaccatgatgggtcttatagcatgcag

SEQ ID NO: 848248 - DNA, 100 bp, Homo sapiens
ctccaaggggaggctcctcagagtgcactgagatcccaggaggatggccacatccccccgggctacatctcacagttgctttgaattacggaatttataa

SEQ ID NO: 848249 - DNA, 100 bp, Homo sapiens
tggactgcctgttggacttcttacccgagggggtgaacaaagagaagatcacaccactcacgctcaaggtgtcgtgaaaactacccctaaaagccaaaat

SEQ ID NO: 848250 - DNA, 99 bp, Homo sapiens
tggccacagcccaatcctgccactgctgacatctggggagactttaccaaatctacaggatccagctccaggtcccacaggggctcttcttccccacga

SEQ ID NO: 848251 - DNA, 100 bp, Homo sapiens
agcagttacttccactcaagaatcgtaggccaggctgatggagagctgaacattactcttccagaagaggttaatggtgcaatgtaagaaacctttaaaa

SEQ ID NO: 848252 - DNA, 100 bp, Homo sapiens
atgtccgggccagcataggtgctgggttcatttaccctttggtcggaacggagtctccccaggacagtgctatcacccgggatattaaccgaacattccc

SEQ ID NO: 848253 - DNA, 98 bp, Homo sapiens
acagtgatgaatggcggcatgaaggaaacgctcagcctcactgtagatgccaagacagagactgcggtcttcaaaagacttcacagagaatgcagttg

SEQ ID NO: 848254 - DNA, 100 bp, Homo sapiens
acacggcctgcactctgcgctttgagctactgggctgtgagctgaacggacattctgagcatgtgagacctgaggactgcaaacagctataagaggctcc

SEQ ID NO: 848255 - DNA, 100 bp, Homo sapiens
actcctcgctccttcaagcctccaccacctcgcagccggggaggcaactggagcgaaaccagcgacagttccaatgacaggatttacacagagagcaact

SEQ ID NO: 848256 - DNA, 98 bp, Homo sapiens
gcaatccttcggttacaagcggtttgatacaaggtctcgctgttctacctaggctgttctagaactcctaatgtcaagctatcctcctgcctcggcct

SEQ ID NO: 848257 - DNA, 99 bp, Homo sapiens
aagtttttgcaggaatgggtggactggctcttattgctgaaagactacccatgctatatccagaagtaattcaacaggaaacccagcgtttgctggcag

SEQ ID NO: 848258 - DNA, 100 bp, Homo sapiens
ttcaaagccaggcaccattcgtggggacttctgcattcaggttggcagtgactcgatggaaacagaagaaaagacaagcagtgcatttgtaggaaagaca

SEQ ID NO: 848259 - DNA, 100 bp, Homo sapiens
ggtggagaaggtggtagacaagttcatcaagcaaagggactaccaccagcaggcagtacatgaatcgaaaaggtggattcaacagacctttggatttcat

SEQ ID NO: 848260 - DNA, 100 bp, Homo sapiens
taagaatgattgatgttggctgatattggagtgctcattcacatgaacaaatatttccatggttcaagctgcttcagcaggacccccatctctgagaaaa

SEQ ID NO: 848261 - DNA, 100 bp, Homo sapiens
catacaccgagagagtgaggagccagacgacaagcacacactatggcgctgaaacggattaataaggtgacagagctgaatgaacctctctccaatgaag

SEQ ID NO: 848262 - DNA, 98 bp, Homo sapiens
ggctcctgtgtgcagctaatggtcgtcgtcggcatcctcctggcctacctggcaggtgaaaggtgtagcagtcactcggcctacacccacagcatcga

SEQ ID NO: 848263 - DNA, 98 bp, Homo sapiens
cgctatgccctgctgtagtcacaggagctgtagagaggaccccggtacatctgaaagccgggaaatggttcaggcgtgaacggcctggaggagcccag

SEQ ID NO: 848264 - DNA, 100 bp, Homo sapiens
cttggtgaatggagatgcagctcagcagttttgtaggaaattgtgagattgatttggagatcaaacgatatttttgtagagctggtgtgaaaagtatcca

SEQ ID NO: 848265 - DNA, 98 bp, Homo sapiens
cgggaccctggcccggtatggctgaagtcagcatcgaccagtccaagctgcctggagtcaaggaagggtcaacatatttcactggcacctattcacaa

SEQ ID NO: 848266 - DNA, 100 bp, Homo sapiens
atgtgggaccaaaatcaaaagtgcccccaagtacacaagttaagaaaacctcggatcaattctcagctggtggcacaacaagtggcacaacagtatgcca

SEQ ID NO: 848267 - DNA, 98 bp, Homo sapiens
ggagggcgaggaggacgagacggcggcggagtcggaggaggagccggactccagatggaccagcttttgggaaatatgattgaaatgtgggttgatcg

SEQ ID NO: 848268 - DNA, 122 bp, Homo sapiens
cagaaaggagttggggcttgatgaaggcgtggatagcctgaaggcagccattcaggcttatgtagacatgaggaagattggcagtagccggggaatggtttctgcataccctcgacagctag

SEQ ID NO: 848269 - DNA, 98 bp, Homo sapiens
gagaccatcggcgtggtccacctcgtcctgcgcaggcttctccaagagcagcaccagctctctagcagaaattgagaggatccagaatccagatctct

SEQ ID NO: 848270 - DNA, 100 bp, Homo sapiens
tccaacaacatccgcgagatcgaggacttggcctttaccctggaagagagacagcaattgaacattcatggattgttgccaccttccttcaacagtcagg

SEQ ID NO: 848271 - DNA, 99 bp, Homo sapiens
agcgagagaaactttggctcggtggtataagttgaaatccaaaccaggaaagaaggacaaggagcgaggagaaattgaggttgacatccagtttatgag

SEQ ID NO: 848272 - DNA, 100 bp, Homo sapiens
aagcctgcccagacggctcacctgtgcgggatggaacaaaagagaaaatattctctttggaatgggaaatcctctgcttgacatctctgctgtagtggac

SEQ ID NO: 848273 - DNA, 100 bp, Homo sapiens
gagagcagtccactgaaggttctttccctttaagatatgtgcaggatcaagttgcggcaccttttcagcgtgtgatgaatgcagactctgctaccatttt

SEQ ID NO: 848274 - DNA, 98 bp, Homo sapiens
tcacccagttagaagagatgaatccacaggttcccagttttccagacctgaagtgttttccaatcaaagcgaagagacgatctgtggatgttgaatat

SEQ ID NO: 848275 - DNA, 99 bp, Homo sapiens
gggaagtcgagcattgtgtgtgccatttgccttggtttagctggaaaacctgctttcatgggacgagcagataagattgtagggaatggaagtgaacag

SEQ ID NO: 848276 - DNA, 100 bp, Homo sapiens
aatgaaggaatcctctccatctggttcgaagtctcagcggtattctggtgcttatggtgcctcaggattgaaagaaggtggcaagaggaagaagcagaag

SEQ ID NO: 848277 - DNA, 100 bp, Homo sapiens
cggatatttaagtacaatggtgggcttaattttaggattgaaccagctgccctttgaccctgctaacaacaacgagcccctgcagtttggtagtgccagt

SEQ ID NO: 848278 - DNA, 99 bp, Homo sapiens
actgcagcctcgtgcggacgctcgtgcacagatacttattcgacaacgaagagaagcagatgctgcattattttcagaactccacagaaaacttcattc

SEQ ID NO: 848279 - DNA, 98 bp, Homo sapiens
ggatattaataagcgtacacttctggaaacagaagtcataaagagctgtctctctcgatccaatgaacaagaaaatgtttataggaggccttagctgg

SEQ ID NO: 848280 - DNA, 100 bp, Homo sapiens
gttcctgtaatagaaatgtgggcagatcaactgacatccttaaaggatttttagactctgaggagcagttggagctaatccacattatggaaatggaaac

SEQ ID NO: 848281 - DNA, 100 bp, Homo sapiens
gttgggtaccgcagtgtcctaagcctggaaagcaaattcaacacccaacagcttccttaatagcaaaggtagcaacagcccaggatgatataactggtga

SEQ ID NO: 848282 - DNA, 98 bp, Homo sapiens
cgcagctggtggcctcagtcatcgagaggctccatgacaattcaaaaggtgaagggattgctgtcacgtcttctcaaagttcctgtgtcagaccttct

SEQ ID NO: 848283 - DNA, 100 bp, Homo sapiens
aacaagattggacgttttgtgctcctggagctatttgatagtgaggatccccgggagcgtgagtacctcaagaccatcctgcaccgggtctatggcaagt

SEQ ID NO: 848284 - DNA, 100 bp, Homo sapiens
ggccctggccgctcacccgtggaaagtacaggtcctgacagctggttaaaaaaagtccttcatgaaaaagaaagatcttaagcagcatgatggattcaga

SEQ ID NO: 848285 - DNA, 98 bp, Homo sapiens
gcagctaccctcagctctagctgatactacagacagtacaacaggtgatactgtgcttgtccaccgagttcacagttatttagagcgtcatggtctta

SEQ ID NO: 848286 - DNA, 98 bp, Homo sapiens
gatgaaaagagaaaaatctcagctattcggtcatatagagatgtcatgaagatacctttgtctggatatggaggaacaagcaatcttattttggaagg

SEQ ID NO: 848287 - DNA, 100 bp, Homo sapiens
tgagctggaaggtcttggagcgaagagctcggaccaagcgctcagcaacagcagcagcaacagcaacagcagcagcagcagcagcaggcaccgccgcctc

SEQ ID NO: 848288 - DNA, 50 bp, Homo sapiens
tgctcatctgctccatcccgctcgtgggaaagaatatggcaaagctgatg

SEQ ID NO: 848289 - DNA, 100 bp, Homo sapiens
atgaccagatcctgcagctcacagagtcctgccaaatatcacaaaacctagatattatgaaggagaaagaaaataaagggtttttcagtttttttcaacg

SEQ ID NO: 848290 - DNA, 100 bp, Homo sapiens
atttgggttgcatccactttttggctgttctgaagagtgttactgtgaacattcatgcacaaatttttatgtggagcatccctaggccaacacccccagg

SEQ ID NO: 848291 - DNA, 100 bp, Homo sapiens
ggcaagagcttccagctgagacaccgtgagaattcagtttgcctgttctgtatgcaagttccgtagctttgatgacgaagagatccagaagcatctgcaa

SEQ ID NO: 848292 - DNA, 100 bp, Homo sapiens
ggaagcgctccgggcctggaatccctacgcgtccctttgggtttagcacgatgagctcaatcggcactggggacccagatgatgtggtaccagttggcca

SEQ ID NO: 848293 - DNA, 100 bp, Homo sapiens
ccggaggaggacaacgactaccaccgcagcgacgagcagacaccctgtagaccttgaatctgcagaaagcagctccgagccccagaccagctctcaggat

SEQ ID NO: 848294 - DNA, 100 bp, Homo sapiens
acaaggaagcggagaggcaagagattgtgtctgcagttcaatactgccatcagaaacggatcgtacatcgagacctcaaggtgagtagaagtgcctcact

SEQ ID NO: 848295 - DNA, 100 bp, Homo sapiens
gactcgcctttgccctggcaaacactggaatcctactttttctgtccagaatggctacaacagtccctgatggttgccgcaatggcctgaaatccaagta

SEQ ID NO: 848296 - DNA, 100 bp, Homo sapiens
caggggcataagagtttccaggtggtacaccggaggcagatgggtactggtagttaactctcaaggagaaatttcacggttgagcaccgaaaagaaagtg

SEQ ID NO: 848297 - DNA, 51 bp, Homo sapiens
ctcatctccactcagcgggcccagccatcagaagacctggtgccctatgac

SEQ ID NO: 848298 - DNA, 98 bp, Homo sapiens
tgaaaagttcatgctgtcccttcattgaattttaggtatcgtcagatcctggaaaaagccattcagttatctggagcagaacaactagaagctttgaa

SEQ ID NO: 848299 - DNA, 98 bp, Homo sapiens
tgctcctaaatgatcgcaaagtatccttgccagcacattacagaatatttttgttgaaccttcttgagaattcagagaaactgctgagtgaccactga

SEQ ID NO: 848300 - DNA, 100 bp, Homo sapiens
tgaagactttgaacgcactcctcagagtccgactctcccacctgctaaggggcactatgaacgaagaggagcagtttgtaaacattgatttgaatgatga

SEQ ID NO: 848301 - DNA, 99 bp, Homo sapiens
ggatatggagcctttggtgttgtctggtcctttgtcatccagcaaatcccaagcagcaacctgttcatggtggtggtggacagcagctgcctctgtgaa

SEQ ID NO: 848302 - DNA, 118 bp, Homo sapiens
gaaaaatgtttatttcaaaaattttataccttttatgaattctcttggacttgtaacatctaatggacttccagaggtcgagtttgagtggctgaggcagttttggtttcaaggcaat

SEQ ID NO: 848303 - DNA, 100 bp, Homo sapiens
ctgacactaaggaaatgctgaagcttttggaagacaactgttagttttgtggcttactgctgctccacccagtgtctgcagacttttgacctgctgagtt

SEQ ID NO: 848304 - DNA, 100 bp, Homo sapiens
gccgcgcaatgggcacccgcgacgacgagtacgactacctctttaaagcaaatggttatgagccttagagtttctgaactccaagtactgttgggctacg

SEQ ID NO: 848305 - DNA, 99 bp, Homo sapiens
gacagaaaagctttatggaaactgcaatggatgttggcttctggctgtgatgggtcggagattcctgatgaagtgaagctgattgggtttgctcagttg

SEQ ID NO: 848306 - DNA, 98 bp, Homo sapiens
tagccaatggtggtcatggagtagaagggagcgatactacagatgctgtctttgcaggtgccatgcctacaatggcaagcatcaagctgtctacactt

SEQ ID NO: 848307 - DNA, 100 bp, Homo sapiens
tttccaaggcatcagcacctcggtggccatcctctgtgaggagttcccacatgagctaggtggtgtgcagatcctgccttactaaactgtttgaagcaaa

SEQ ID NO: 848308 - DNA, 100 bp, Homo sapiens
tttatccaactgatcagggcttcctggattcagtgacagcagaagttgcctaccaggatgttgtcggaactgggaggaccatgaaagcactactcagcaa

SEQ ID NO: 848309 - DNA, 100 bp, Homo sapiens
ggacttctggccgcactttccaagctgggcaacacccctaacgagagctacctcaaccctgtccggaccttccccacaatcccagaagagcacgacctgg

SEQ ID NO: 848310 - DNA, 100 bp, Homo sapiens
aaatgagaagagtgttcaaaattcaattacacagctcatgcacaattagttcgagaagttgatgtggagaaggtgtctgcttttgagaatccatatgtag

SEQ ID NO: 848311 - DNA, 99 bp, Homo sapiens
gatgaagaggttggagatgggaccacatcagtaattattcttgagcaccatgtggcggagcacactgctgagagctacatgctgcagtggcagcgtgga

SEQ ID NO: 848312 - DNA, 98 bp, Homo sapiens
agctgaattcattgaggaccagtcaattctaaacttgcgattgtgccctgatcggatcagtctcatcaaggagtgtatttcccagtcccccacatgct

SEQ ID NO: 848313 - DNA, 100 bp, Homo sapiens
ggagacttgtgtgctctctctgcttgaagaactgaacaaggactttttttatgaagacatggagtccttgacgcagatgcttagggccttggcaacagat

SEQ ID NO: 848314 - DNA, 100 bp, Homo sapiens
aggctgctcttcatggctaatgaagcagacttggatgaagagctggtcattaagggatccatcctacagaactccaggtgctccttcagctccaaggaga

SEQ ID NO: 848315 - DNA, 98 bp, Homo sapiens
tacaaccagagcatatccctgcgccggcctcgcctcgcttctcagtcagtcaccacgaacaggggcactcggcatgctgccccagcactggagaagca

SEQ ID NO: 848316 - DNA, 100 bp, Homo sapiens
gaaaaagacagaactagacaaagatcagaatcaaaacacaaatcgcctaagaaaaagactggaaaggattcttggactccagaaggaagacgcttggtca

SEQ ID NO: 848317 - DNA, 98 bp, Homo sapiens
tagcaggttcctgagtcctcgagcgcgggaagaaagagtaacagattccctggataccctttcagaaatttcttcaaataaacagaaccattcttatc

SEQ ID NO: 848318 - DNA, 100 bp, Homo sapiens
tgggcttgccacgggggccacaaagatccaaaatacggagctggcatatacttcaccaagaacctcaaaaacctggcagagaaggccaagaaaatctctg

SEQ ID NO: 848319 - DNA, 109 bp, Homo sapiens
caaagtgccagcagattcagtgtcatgtgaggacgtgcttcctgcttcatagataagagaactgtcaagtaatccacctctggctaccatccttattcctcctcatgct

SEQ ID NO: 848320 - DNA, 100 bp, Homo sapiens
cacaaagcagcccaaccaaagggtgttgctctcttgccattcgtggatgagcgaaggctacgagctgccctagaagaggtatacccagacctcactccag

SEQ ID NO: 848321 - DNA, 99 bp, Homo sapiens
gactgacccctttcacaacatctgggatgatgagtttacacacctgtacacactgattgtgcggccagacaacacctatgaggtgaagattgacaacag

SEQ ID NO: 848322 - DNA, 98 bp, Homo sapiens
tcgcctgcttgcagagctttccagcccgtttgtgaatcagcggtgagtggtgtcattgagcaaacacgaagtcgggctcatccaaggatgagattttg

SEQ ID NO: 848323 - DNA, 100 bp, Homo sapiens
ccttgattgagcatgaaatgaagaacgggatccctgccaatcgaatcgtcctgggaggcttttcacagaacatacatatgatagttgagaaagacacata

SEQ ID NO: 848324 - DNA, 98 bp, Homo sapiens
gacgacacccgctaccacaccatgcaggcagccgtggatgccgtggcccgggtcactggccagcaccccgagcctacccgttccatcccgggctatcc

SEQ ID NO: 848325 - DNA, 99 bp, Homo sapiens
gatattccaagagagtctggtgtacactaataggaaagacattatattattttcggagtcaagaagataagagatccatcctgcaaagaaacctaatgt

SEQ ID NO: 848326 - DNA, 100 bp, Homo sapiens
cgtccgcggagatctctctcatctcgctcggctgcgggaaatcgggctgaagcgactgagtccgcgatggaggaacttagtgatttggcccgtgaccctc

SEQ ID NO: 848327 - DNA, 100 bp, Homo sapiens
gaaggtgtgtccggaggtttgcaggggtgcagtgtgtctggtcttatgagggggacttgatctcatcttcatgccaggccttgggtttgacaaacatggc

SEQ ID NO: 848328 - DNA, 100 bp, Homo sapiens
cacggatctggccaacaagacgcacccgtccatcttcgggatcttcgacgggcacgggggagaggagtatgctgctgctgttccgctttgcgtcctcgct

SEQ ID NO: 848329 - DNA, 100 bp, Homo sapiens
aacagcagatggctcgagaatacagagagaaaattgagacggagctaagagatatctgcaatgatgtactggtggtttgtgatgaaaatggttccaaggg

SEQ ID NO: 848330 - DNA, 98 bp, Homo sapiens
gtcttgaccggtggggccaggagaaggggaatgaagtagaggtgggacgtccaaggatgatgggcactgatcttatgccttcattcatccggcatggt

SEQ ID NO: 848331 - DNA, 98 bp, Homo sapiens
aggaaagctgtgaaagttctcaagctcccggagccctgcctgttccctgtccatccaggccagcagctgaaggagcctcacctgcctcccttctctga

SEQ ID NO: 848332 - DNA, 100 bp, Homo sapiens
cttaaggtgttaagtgtaaggatcttcatgatgaaatttctgtaaatgatctctctactttagttagaagatgccccaatcttgtccatctagacttaag

SEQ ID NO: 848333 - DNA, 98 bp, Homo sapiens
acagactcggcgacagctaacggggacgacagggaccccgagatcgagctctttgtgaaggtaagccgtaactttgagctggttggacgggttaactt

SEQ ID NO: 848334 - DNA, 100 bp, Homo sapiens
gcacagctcactgcagcaactttgacaaaactggaagaatttcgcagtaagacagcaacaggtgaagatgcaatgaccggggacacagacaaatatcttg

SEQ ID NO: 848335 - DNA, 100 bp, Homo sapiens
cagaattaattacagggctcgtccaactggtccctcagtcacacatgccagagattgctcaggaagcaatggaggcttctccagggaaagtgaccgaggc

SEQ ID NO: 848336 - DNA, 100 bp, Homo sapiens
gccacgctcagaaccagcaggctccttttggaacgggcgaaagagctaaatatcgatgttgttggtgtcagcacatggattaattgatgtatgttgagtt

SEQ ID NO: 848337 - DNA, 100 bp, Homo sapiens
gcagcaacatggaggaattcgactccgaagacttctctacgtcggaggaggacgaggactacgtgccgtcggcatacctccagataatctctctattcaa

SEQ ID NO: 848338 - DNA, 103 bp, Homo sapiens
cccgttgtgtttgtgaaacagagaaagataggcggccatggtccaaccttgaagacaaaacttacctggggtccctacttatggttttacatgcttcgggctg

SEQ ID NO: 848339 - DNA, 99 bp, Homo sapiens
tcttatccaaccttgcgctgcatccgctcgacctcgtgaagatccgcttcgccggttactataacaacagtaccaaggtggctgtgaaaaccctgaagc

SEQ ID NO: 848340 - DNA, 127 bp, Homo sapiens
atccacgggttttagaaaaacaagaattacagcagccaacctatgttgccctgagttacataaatagcgtgagtgcatctccatccacgttggccaggctggtgtccagattggcaatgcctgctgg

SEQ ID NO: 848341 - DNA, 98 bp, Homo sapiens
atgcgtttaatcacacaccaaaaactatgaatggagacatgagggctttagaaaagaactcaggaatttggaagcaggctataaatctcatgaattcc

SEQ ID NO: 848342 - DNA, 98 bp, Homo sapiens
gaatagaagagaatgacctagcaaaagttgatgatcttccccctggctgctttgctggctctgcaagaaaatggactagacgcaactacagtgaaaca

SEQ ID NO: 848343 - DNA, 100 bp, Homo sapiens
tgtgctttggaagagtatgcctgggtcccgccgggtctgaagcctgaacagatcttcccagacccgtcagattttgaccgctgctgcaaactgaaggacc

SEQ ID NO: 848344 - DNA, 100 bp, Homo sapiens
cgcgtgcgcggacatggcctcaaacggtggaatgaatcttacttgttgaatatcttctggttactagttggattcatttgtgaaagaatcattttcccct

SEQ ID NO: 848345 - DNA, 100 bp, Homo sapiens
tggtggcaggcctagcccaaggcatcagaggcccccttagggcccagatcgccacatcacagaatcgtatctatctcacagctgacaaccttgtgctgaa

SEQ ID NO: 848346 - DNA, 100 bp, Homo sapiens
cctaatagacctcctgatgctgtacttacagataccacctctcttaatcagttcctcagcactttgtttgcccccttaaactttgtcatggagaaagtgg

SEQ ID NO: 848347 - DNA, 99 bp, Homo sapiens
tcctccagcaacccatacctgatccggagaatcgaggagctcaacaagatgatcatgacgcagtcctgaggtttaatggggcacccacagccaacttcc

SEQ ID NO: 848348 - DNA, 98 bp, Homo sapiens
gccggggtagctcttcactcctcagcgcgacgtcgtgtcgagttcccaaaaagctccgcaggggctgtagggaggctggagtgcagtggcgggatctc

SEQ ID NO: 848349 - DNA, 100 bp, Homo sapiens
ctcaccatcgacggaattccagtctctgtggacaaaatgacccaggtatctcagatgaagacatcatcaacattactcttcctactggagtccccattct

SEQ ID NO: 848350 - DNA, 98 bp, Homo sapiens
tcaggactaagagaagtcacaaaacagcagatttcccaagagcagcggaaaatgatccagtcacaggaaatgggtcctgatgaatatgaagagatgga

SEQ ID NO: 848351 - DNA, 98 bp, Homo sapiens
agctggtaatattcttctgggtgaggatggttcagtacaaatagcaggcaaaagtcaacaactctagcttaattggagtaggctatactcagactctg

SEQ ID NO: 848352 - DNA, 100 bp, Homo sapiens
ttggcgtctattgaagtgttgtacttgtggaaagctcttccaaactgttccttccccaacctgcagaggatgagtcaagtcataggttagcttttcaaga

SEQ ID NO: 848353 - DNA, 99 bp, Homo sapiens
acgactccgtcgcagactacggacctgtctgggtctcagccgccaaagaccccgtccggtagagccctaatttgtttagaactgtaatatgcacagtta

SEQ ID NO: 848354 - DNA, 98 bp, Homo sapiens
tccactctgagctgaaatacagactgcggtgttaatatccttttcttctgattgttattaacaggcccctctcctacccagataccgatgttatactg

SEQ ID NO: 848355 - DNA, 100 bp, Homo sapiens
gcttccaaatacaagctgtatagggtgtacaactatgagcctttgacacagctcaagaatgtcagagcaaattactatggaaaatacattgctctaagag

SEQ ID NO: 848356 - DNA, 100 bp, Homo sapiens
gtacagttacctccgtgtgtcacaggaagactctttgtgggactacaatactggcagagtgggagcaccattagtttgctgtgaaatcaaattaaaaaac

SEQ ID NO: 848357 - DNA, 99 bp, Homo sapiens
ttgatccagccaccgaggcccggtaccgccgagagggcgctcggttcatctttgatgtgggcacacgtttggggctctatgaggagagagcacgatacc

SEQ ID NO: 848358 - DNA, 98 bp, Homo sapiens
atgcttgaatgaagcttccgttttacataatctgaaggatcgctactattcaggactaatctatattaaccagaagggctcggagaagccacttgagc

SEQ ID NO: 848359 - DNA, 100 bp, Homo sapiens
aagaggagctattctgatcttggacacatgacggaagtgtgtatttttgggccactccacggcaggtccctagcctgcaacatttatgtcgcatgtcaat

SEQ ID NO: 848360 - DNA, 100 bp, Homo sapiens
tcaactcccaggtctacagccggctcacagcacgagtttctgatgaagaattgaaaagaagagtagctgaggagctggcattggagcaagccaagaaaga

SEQ ID NO: 848361 - DNA, 99 bp, Homo sapiens
ttatatcctccaggaatactggccagatgaggagctctatgctggtgtgtacatcgattttatgggcactgatgcagccatcttccgcacacttggaaa

SEQ ID NO: 848362 - DNA, 100 bp, Homo sapiens
aatgagtacaactaccgctgctggaccacaaaccgctgccagaaaagagcagacgcctccgcctagacctgaagcctaccccatccccactcagacgtac

SEQ ID NO: 848363 - DNA, 98 bp, Homo sapiens
cgagcaacagtgtagtggcgtattccacatagcaaacagactgaccccaattcttggcattcagaaacattctcaggaaggtatggtgtttacacggt

SEQ ID NO: 848364 - DNA, 99 bp, Homo sapiens
ccaagtctcccaacaacagagacagattttggtttcagtaacctcttcactcctgggcagctgctgaagacctggtgtggcagccctccctatgctgca

SEQ ID NO: 848365 - DNA, 99 bp, Homo sapiens
ggagacttttggggggaaactaggtcgatggtcggcggcgcccggatgggcagctgaggtaccagctggaggatgagtctgcgcatttggatgaaatgc

SEQ ID NO: 848366 - DNA, 98 bp, Homo sapiens
aagaatcctcatgctcctactatccatttcaactacagatactttgaagtagaagaagctgatgttggtcgcattatgtttcagctcttctcagacat

SEQ ID NO: 848367 - DNA, 100 bp, Homo sapiens
tggatagcaatgatcccaatttccagatgccttgttcaacaggaacttaagaagtatggagttaccacaatagtaagagtatgtgaagcaacttatgaca

SEQ ID NO: 848368 - DNA, 99 bp, Homo sapiens
gcttttacttgtcattgcaagatgatgactttgagttcactggcagccacctgacagtaaggaatggctactcgtgtgtgcctgtggctttagcagaag

SEQ ID NO: 848369 - DNA, 100 bp, Homo sapiens
gtgcatctcagattcctgcagcatctgatcagctctgcaaggaagagagcttcacgtctctggtcaggaccgcctctttttcgtcatggaatatgtaaat

SEQ ID NO: 848370 - DNA, 111 bp, Homo sapiens
ggtgctggagctatacagcggcgtgggcggcatgcaccacgcgctgagagatattgatgatgttaagaagttcaaaccgggttacctggaagctactcttaattggtttag

SEQ ID NO: 848371 - DNA, 98 bp, Homo sapiens
agcctgcaagtgacgagaggagacttccttgcttctttggagaatgatatcaaaccatacctccctgcacttggctattcaaaacgggtccatctgat

SEQ ID NO: 848372 - DNA, 99 bp, Homo sapiens
aaatttgcaaatgatatacaacttctaaggtacaccctccatggtaactgtggacggaaccaagactcagaccaggctggtgaaactcatacctggcgt

SEQ ID NO: 848373 - DNA, 98 bp, Homo sapiens
cctgaagaaatttctgccatggttctcactaaaatgaaagaaaccgctgaggcttatttgggaaagaaggacttgaaagaggagattgatattcgact

SEQ ID NO: 848374 - DNA, 100 bp, Homo sapiens
tcctgactcttctatggacagtgtgtttgctcaaagtgatgacctggatagtgaagggtgcaatatgtgacttctgtgaagcttgggtttgccatggtag

SEQ ID NO: 848375 - DNA, 100 bp, Homo sapiens
cagcaccttggggcttccggctgcaagggggcaaggacttcaatgtgcccctctccatttcccggagtgtccccttggctggcatgggccgggctgccag

SEQ ID NO: 848376 - DNA, 99 bp, Homo sapiens
cagtgctctgcccatcatccagaagctagagccgcaaacacgctccctgaaatttggcaggcagactggaggtgaagagggagatggagcttctgggta

SEQ ID NO: 848377 - DNA, 100 bp, Homo sapiens
ggatccatttccatcggtccttacagccgctcgtcagactccagcagccaagatggtgaagcagatcgagagcaagaccgagtgtgtcagcagccaggac

SEQ ID NO: 848378 - DNA, 98 bp, Homo sapiens
gctgagctccccagtttgaggcggagcacacgccaaaagaccacgggctcctgtgctagtaccaggtcatactaagcattttagttccacctgccata

SEQ ID NO: 848379 - DNA, 100 bp, Homo sapiens
gtctaccagctttgggctgatgctgacatcagattattgcatcgagcttttagtgtcttcttattcaacaccgaaaataagcttctgctacagcaaagat

SEQ ID NO: 848380 - DNA, 100 bp, Homo sapiens
cgggatatgagcctgtttctggggcaaaaacattcaagaatgagagcgagaacacctgtcaagccgccagccctctcctggtgctattcacaattaactt

SEQ ID NO: 848381 - DNA, 100 bp, Homo sapiens
gctgacggagatggtgcagaagatggaggagatgccttcaattaagttgcagagttctgatggagagatatttgaagttgatgtggaaattgccaaacaa

SEQ ID NO: 848382 - DNA, 100 bp, Homo sapiens
agatgataccctgtgacttcctcatcccggtccagacccagcaccccatacggaagggtctgcatcacaaggtcagcaatctgaagatggtcttacggag

SEQ ID NO: 848383 - DNA, 99 bp, Homo sapiens
gaagattcaccaaataagctatatactttggttacctatgtacctgttaccactttcaaaagcaggaaactgcatatcttctggtttacatgaagatgg

SEQ ID NO: 848384 - DNA, 100 bp, Homo sapiens
ctccgtggccttagctgtgctcgcgctactctctctttctggcctggaggctatccagcgtatctgcccaaactggaacttatgctgtagacatttcttt

SEQ ID NO: 848385 - DNA, 75 bp, Homo sapiens
gaatggattgaaatctaatgaaccgaaactttggtctgaaccggacggcttttctcatttccacttgtacgtgtg

SEQ ID NO: 848386 - DNA, 51 bp, Homo sapiens
cacggagaacttcgctagccaggctgggccctgtctcaggcccccaggctt

SEQ ID NO: 848387 - DNA, 100 bp, Homo sapiens
ctcccaactctcctgcagaaatgggtcccagggctggtggttgctttgggtctacagctacgtcttacccgcctcctgcctcaacagcctgtgtggtggc

SEQ ID NO: 848388 - DNA, 98 bp, Homo sapiens
cttcctgtggttgtggcagcgacagcgatggagactgcagctcgacaggaatgctgagctcctgtgacggccacgacgggctgcggaggcaggactcc

SEQ ID NO: 848389 - DNA, 100 bp, Homo sapiens
ctggaccgccgcgactccgccgcgctgcgcacgcccagctttacttttagaagcccagtcaacaccatttcaggtcacaccttcaactatggcaaatatt

SEQ ID NO: 848390 - DNA, 100 bp, Homo sapiens
ccctcaacacggaccgcgcccgccgggcacacaagaatggtcacttgacatattcgatgccatgttccctgtcactcacatcgctggggagactgttata

SEQ ID NO: 848391 - DNA, 98 bp, Homo sapiens
actacattatgaacccaccactgggcaaagaaagtatccctttagttttccgtctgatgaaggttggccatttgcaaagtatcttggagcttgtggaa

SEQ ID NO: 848392 - DNA, 101 bp, Homo sapiens
ttggaagacagaccagagctacagcatgtggtcattgaatctttgggaattattatttataaagcactggactatggtttgaaggagaatgaagaaaggga

SEQ ID NO: 848393 - DNA, 99 bp, Homo sapiens
caaggatgagattttgccagagaaaggacgagcagcaagtcagggagcttaagtgtgaagcctcagtttaggtcatctggtggttcagaacactcaaca

SEQ ID NO: 848394 - DNA, 100 bp, Homo sapiens
gcagtcattacaacagccagccacatccactacagaaactccgactttgagagttttgacctgcctgaagagcaccagattgcgcacctccccttgagtg

SEQ ID NO: 848395 - DNA, 98 bp, Homo sapiens
ctctgaggggcttagaaattaacagggcatgctggaagatggactgccctccaatggtgtgccccgatctacagccccaggtggaatacccaacccag

SEQ ID NO: 848396 - DNA, 100 bp, Homo sapiens
tatggacgcagtcctgtcagactttgttcggtccacgggggcagaacctggtctggccagagacctgctggaagtcaagtccatcatctccagaaccagc

SEQ ID NO: 848397 - DNA, 100 bp, Homo sapiens
cagccaaaggctactttgacgccctggtgaagatgggggagctggccagcgagagccagggctccaaagaactcgggcagcgaggtcacaggccccacct

SEQ ID NO: 848398 - DNA, 98 bp, Homo sapiens
ccaacattgaccgtattacaaatgaatggtagtgtctagaaagggtatgtcccttcaagagagaggtgccaatgtccaaccggcctaataacaatcca

SEQ ID NO: 848399 - DNA, 100 bp, Homo sapiens
tgcagggagtatcaaatatgagaaagctaggccatctgaataactttactaagtagctgctgctggtggtgacaatgtcaaataacggcctagacattca

SEQ ID NO: 848400 - DNA, 98 bp, Homo sapiens
ggatgcaaaacctgtggatacagagggacagaggcctactgtacatggcacatgggtcatgatcagagttcgactcttgcccaacactctgttgaact

SEQ ID NO: 848401 - DNA, 100 bp, Homo sapiens
agatttgttgatgttcagccttccagtttaagccaacatgattatgatatgagggtggatgatttccttcgtcgcacacaagctgttgtcagtggccgga

SEQ ID NO: 848402 - DNA, 100 bp, Homo sapiens
tatgtcggatcctcagtgaaaataaaagccatgatagttcaacatacagagttgaaaacgaggcccactgcgactttgtgaagctgcgggagatgctgat

SEQ ID NO: 848403 - DNA, 100 bp, Homo sapiens
aagatcctacctgtccttccacagctcattatcccgataaaaaagactggatctccaattactgcgtcatgtgttggattaggcaattctaaaacacctc

SEQ ID NO: 848404 - DNA, 100 bp, Homo sapiens
gagtggtagaactagagaatgaaaagggagccttgctccttagttctatagagctggaggagctgaaagctgagaatgattgctgtgctaaggagacagc

SEQ ID NO: 848405 - DNA, 98 bp, Homo sapiens
aaaaatgaaccaagaaaaacaaacgtcacacatgaagaacacacagcggtggaaaagtttgcattgagactccttgcattccgccagatacacaaagt

SEQ ID NO: 848406 - DNA, 100 bp, Homo sapiens
cagtaaatcacagaacaaatgtaaaccctctcaaggtcctcacaagcttgaggaaggggaagtggccatgggccgagtggtgaaggtgactcccaacgag

SEQ ID NO: 848407 - DNA, 100 bp, Homo sapiens
gctggctggatctctggtgagacatttttcttccttctgtcacatcacacccaatgagcatgctcaccgcctggacatctttgcccacaacctggcccag

SEQ ID NO: 848408 - DNA, 100 bp, Homo sapiens
agaaatattggaaagacgctcgtcaccaggacccaaggaaccatttcctgcctgcgatggttcacataataaacacaatgaattgacaggagataatgtg

SEQ ID NO: 848409 - DNA, 100 bp, Homo sapiens
catgcagatccaaagctcttgctttgtccagttctggtgactcagtccgcagctatagttccagtaagaactaaaaaacgtttcacacctcctatttatc

SEQ ID NO: 848410 - DNA, 101 bp, Homo sapiens
gtccgcaagaccgggcagatctggcccaacgatggcgagggcgccttccatggagacgcaggccgccatggcatcagatgaaggcaaactttttgttggag

SEQ ID NO: 848411 - DNA, 98 bp, Homo sapiens
agactttgatcattgtgcagtctgcatagagagctataagcagaatgatgtcgtccgaattctcccctgcaattgtatcacggactgattcaccgagc

SEQ ID NO: 848412 - DNA, 119 bp, Homo sapiens
ttcaaaattaaaagaggagcagcatggcatttcagtcactggtttgcagagtccagatatttgttcagtcgaatcaaggtgaagaggaaacaacaagaatttcatattttacttttatt

SEQ ID NO: 848413 - DNA, 100 bp, Homo sapiens
gaccgcgctggcggccgcgagctcgcggagctgatatccttggaacagaagatcttattgtggaagtgacttccaatgatgctgtgagattttatccctg

SEQ ID NO: 848414 - DNA, 98 bp, Homo sapiens
atatgcctacagaatcatctgccatttatgccagtgttcttcctggagagttgatgagggggtacatgacccagtttcccaccttcccaagctggctg

SEQ ID NO: 848415 - DNA, 100 bp, Homo sapiens
gctgcagacggcgagacctcctgcacagtaatctatgccagcaattatgacaatgttagcagaccatgcagctcgtcagctgcttgatttcagccaaaaa

SEQ ID NO: 848416 - DNA, 100 bp, Homo sapiens
caggcgaagggaccgagcccccagaccaacaaggaactggatatgtcttgtcgttcaagacttgcaacactaaacgagaaattgacagcccttgaacgga

SEQ ID NO: 848417 - DNA, 100 bp, Homo sapiens
cacatgtcccctatagagattccaagctaacaagactactacaggattccctcgggggtaatagggcttcgtgggacacatatgcaacatgcctatgatt

SEQ ID NO: 848418 - DNA, 100 bp, Homo sapiens
ggggattcacgtggtggcggtggaaatttcggaccaggaccaggaagtaactttagaggaggatctggatgttggttcctgcaaacaagaactgacccta

SEQ ID NO: 848419 - DNA, 99 bp, Homo sapiens
ttaatagtggcatggaagatccatttgacgtgaagccctccaatatgctagtaaacacaagaggacaggttaagctgtgtgattttggagttagcactc

SEQ ID NO: 848420 - DNA, 100 bp, Homo sapiens
cgtccaggaatagaagtgacctgctttttcgcaaggcccgatgatgcacaacaaaaaatagaacctcatcacacagcagtgcttggagaaggtgacagtg

SEQ ID NO: 848421 - DNA, 100 bp, Homo sapiens
tattgctgttcctactccatctcctcccagtgtctttccaggtgcaacagatgggattggaaaagcctacgctgaagagttagcaagccgaggtctcaat

SEQ ID NO: 848422 - DNA, 100 bp, Homo sapiens
tgtccctgcgtggtggtgtcctgccctcacaagtgcagcgtccagactctcctgaggagcgagggcaccagtgtcttgtcacctggactccacataggac

SEQ ID NO: 848423 - DNA, 98 bp, Homo sapiens
cgtcgtggcaacgttgctggtgacagcaaaaatgacccaccaatggaagcagctggcttcactgctcagcctcctgacaaggtgatccgggcgggccc

SEQ ID NO: 848424 - DNA, 100 bp, Homo sapiens
atggaaataaaagttgaagaatctcttatgatgcctgcagtttttcatactgttgcttcaaggacacagcttgcattggaattgaatgatctggcacggg

SEQ ID NO: 848425 - DNA, 100 bp, Homo sapiens
aatgccggcttaccatctctaccatcatccggctctagaggacaaaatcccagtccttggcacaaactcaggaaatggaagccggagtctgttttttgtg

SEQ ID NO: 848426 - DNA, 98 bp, Homo sapiens
tttgatgcagaaattaccacattgaagacaatctcaaggaccaaaaaagaacttcgtgtgaaaattttcctgggctgctcagatggaagataaaaagc

SEQ ID NO: 848427 - DNA, 101 bp, Homo sapiens
cgagaatagctccgtccagcagattgaagaattagggtctgaaggaaaagtagaagaagcccaggggatgatgaaattagttgagcaattaaaagaagaga

SEQ ID NO: 848428 - DNA, 99 bp, Homo sapiens
ggaagcgtctttgctcaaggatcccagttttctctggatgacgtggatagctggaatggccttagtcatgaggcttttagacttgtttcaaggcgggat

SEQ ID NO: 848429 - DNA, 100 bp, Homo sapiens
gtggcagccgtggtggtggtggatatggtggcagtggggatggctataatggatttggtaatgatgacctggacaaatttgctgcagaagatatcattga

SEQ ID NO: 848430 - DNA, 50 bp, Homo sapiens
agagcagcttctgatatttggaggggagaaacacatctcatctttcctaa

SEQ ID NO: 848431 - DNA, 120 bp, Homo sapiens
cttggaaactttggctttggatgtcaatatttctgcttcctgcttccacttccgtgaccgttagggacaagacaggaagaagcattgcatgcatttattcagccagagattctggatggc

SEQ ID NO: 848432 - DNA, 100 bp, Homo sapiens
tcttaaattggagtcatatgaaatcactatgaatgggccgcgatgggcctcttggaacattggtgtgttcatctgcattcgatgtgctggaatccacagg

SEQ ID NO: 848433 - DNA, 100 bp, Homo sapiens
aagactggcaaaagcacaaggattctcgctgtgacagagacaacaccgagtatgagaagtttggtgcacctcgatttggaggaagtagggcagggccctt

SEQ ID NO: 848434 - DNA, 99 bp, Homo sapiens
tgatccacatgagagtccactctggggagaagcccaacaagtgtacgagcacagcaatggaggaaacagctatatgggaacaacatacagtgacgcttc

SEQ ID NO: 848435 - DNA, 98 bp, Homo sapiens
agaaaagaagaaatgctcatctgaaattcatcacctctctggagtcttcaaactgaccaagcattgaaaaggttttaaatgcacagagagcaggatac

SEQ ID NO: 848436 - DNA, 100 bp, Homo sapiens
taactaagctgcagggaaataaatcggctggccctactgcaatctactgcactcgagtattgctgacagacagaacgccttggaggctgagtggaggacg

SEQ ID NO: 848437 - DNA, 100 bp, Homo sapiens
aacacttcaaaaaaaatgttatttagaacagaaaacagtctgtggagagaatctgcctcctttaacttatgaccagattccacctgctcctacgaagccc

SEQ ID NO: 848438 - DNA, 100 bp, Homo sapiens
atcgcctacatcatgaagaccatgggcatgtcctccgacgacgcctacaggtctcaagaactgttttgagatgcaggaattcatctaattttcactgccg

SEQ ID NO: 848439 - DNA, 105 bp, Homo sapiens
gacgacagcaacccgaagacagggaaatttagcacctgttcttcccggagcctatcagcaaagccattcccaaggctatggctacatgcaccagaccagtgtgtc

SEQ ID NO: 848440 - DNA, 98 bp, Homo sapiens
cggggccagcgcatggggctgctgagaccgctccggacgtgcgaagcgttcgcggtgcggtagagccagtggcagccccagctgcagcagctacgtga

SEQ ID NO: 848441 - DNA, 100 bp, Homo sapiens
cccaaaactacagttctgtcactcacttacacagtattgggaaatctgtgaaagacatcacttagtgctcttacccagctgatgaaaaagatgccccatt

SEQ ID NO: 848442 - DNA, 100 bp, Homo sapiens
acgagatccagttcctgcgaacttgttctaagaacggaagcatctgggctggatggaatttagcatcaagcagagtcccctttctgttcagagtgttgta

SEQ ID NO: 848443 - DNA, 98 bp, Homo sapiens
ttgtcactccccggcggcagcacgaaagtaccatgtaccttctcaaaccagatttcatgaggcggcctgatcgaacatttgaccccttctctgaaact

SEQ ID NO: 848444 - DNA, 100 bp, Homo sapiens
ccacatccctgtggagaagatctgtgagaagcttaagaagaaggacagccagatatgtgagcttaagtatgtttccccctttctagggtgaggatggttc

SEQ ID NO: 848445 - DNA, 98 bp, Homo sapiens
cagggttggaaagaggcaggtacggaagctgagctgcagagttagccggcatctgacagaaaaattttaaaattggtggtgaatggtggacatggatc

SEQ ID NO: 848446 - DNA, 100 bp, Homo sapiens
gcgagaagccctacgagtgcaacatctgcaaggtccgcttcaccaggcatagaatgtcaagctaaccaggcgtccgctacttcagaagagtgtactgtcg

SEQ ID NO: 848447 - DNA, 100 bp, Homo sapiens
tgacagcatatttttttagtcacaagcttattgaattgatcggccacatcagggccagaccagttatcactgtaaatgctggtcttgaagtgtaccctag

SEQ ID NO: 848448 - DNA, 50 bp, Homo sapiens
ctcaacatctctcagagacgaaagtggatgattcaacagccacacaaagc

SEQ ID NO: 848449 - DNA, 100 bp, Homo sapiens
gttctatgaaaacaagcaaatcgagtgcacctgggatgacaaaaagtcatagtggtgtgacaagacacaactcagatgggaagttcatcgcccgggcaca

SEQ ID NO: 848450 - DNA, 100 bp, Homo sapiens
ccacgtgaaatggcagctatgtgtcttggattggctcacagatgtgggcgctatctccaactgtctttgcacttctgagtaagaatctgatgattgtgca

SEQ ID NO: 848451 - DNA, 100 bp, Homo sapiens
ccctcccgcatcgcttccgtctggttcggggctaatgaggtttcaacagcctgctccgtggctgtctttggcaatcagatgtctttggtggacttgggaa

SEQ ID NO: 848452 - DNA, 98 bp, Homo sapiens
tcacaagctgcaccagcttctaaccgaggctgatcccttatccaacatggttctaaccttcagtactaaagaagatgcagtttcctttgcagaaaaaa

SEQ ID NO: 848453 - DNA, 100 bp, Homo sapiens
aacagcttcgtagtgaagagaggcgtctacaagagcgattgctacacatggacagtgatgatgaaattcctatcaggtgcaagaaagcctttgaggtgaa

SEQ ID NO: 848454 - DNA, 98 bp, Homo sapiens
cctcccactgcaagtccaggatactcggtgtgctgggtgcatcatgtaactggcatgtgggtgtaccctttcctggaacacattggcccaggagccag

SEQ ID NO: 848455 - DNA, 98 bp, Homo sapiens
tcgtcagcactgactttcagctatggaatcggtgggcagaaccgaggtggtccggagcagcctgcatcccgtgttctccaaggtcttcacggtggact

SEQ ID NO: 848456 - DNA, 99 bp, Homo sapiens
tctagtggcggaagccttcgtctcccagattgcagttgggacccctgattttagcaggatggcccaatggaatcagctacagcagcttgacacacggta

SEQ ID NO: 848457 - DNA, 100 bp, Homo sapiens
aaaaccacacacaccagcaagatattgacgacctcaagcggcagaatgctcttctggagcagcaaggtgacagtttcctgaggagaggggtgtatccagg

SEQ ID NO: 848458 - DNA, 100 bp, Homo sapiens
caagaacgagtcgggcagccgctccaatgaggactttatcagctcagactccaaggtccgcgcagccacccgggaacagtcagaatataaaaaggaagca

SEQ ID NO: 848459 - DNA, 131 bp, Homo sapiens
ccaggcaatgagatttaccgcaagggcaccatctccttctttgagattgatggacgtaagaacaaggagctatgaagacatgattggtgaggaggtgccatcggatcaatactactgggctcctttggccc

SEQ ID NO: 848460 - DNA, 101 bp, Homo sapiens
ggtgtcatggctattgagcatgcagattttgcaggtgtggaacgcctagctcttgtcacaggcctggtctccaagtcctctcctaagaagcctcgtggacg

SEQ ID NO: 848461 - DNA, 100 bp, Homo sapiens
gaacgtgggcgaggctggccggagcctgctggagtcgccgggactcaccagcggcagcgacaccccgcagcaggacaatccatttgaaccacagcgacgt

SEQ ID NO: 848462 - DNA, 100 bp, Homo sapiens
tcgagacatttcaagtattggtcttaaaacagtaattggagaacttcctccagcttccagtgggtaatctacagttgctgcagaactgcctggcagtgtt

SEQ ID NO: 848463 - DNA, 100 bp, Homo sapiens
gaacaaacagctagagctgccgcggggatgggaaatgaaacatgatcaccagggcaagtgcctccacttctcattcagagaattcagtgcatacaaaatc

SEQ ID NO: 848464 - DNA, 98 bp, Homo sapiens
ctaactgtagcccttcctgtgttcctggttatcctcttctgctgttctggaaagggcaaacttgaagataaatcttttgactccagctctttagagga

SEQ ID NO: 848465 - DNA, 99 bp, Homo sapiens
tgagagggacgggcgccggccatggagcgcacagcaggcaaagagctggccctggacactcctgggtttattgtgaaccgcctcctggttccatacctc

SEQ ID NO: 848466 - DNA, 100 bp, Homo sapiens
tcccagtgtggccgtggctgacactaaagactttgtagccatcaacccgagtgcagtttcgatggaaaatgaagtgtcgagttatagcagtgctggattg

SEQ ID NO: 848467 - DNA, 100 bp, Homo sapiens
ggaaatgctaacctggtatttatgcttaaaagaaacagtgaggtggcgaaattcacatactcactgtctgtggcaaatggcattgggccagagaagaaac

SEQ ID NO: 848468 - DNA, 99 bp, Homo sapiens
acgccatcaggctcaacgaggaactcaaagtggatgaggaaagctgttacaggcgctggaacgcggacgggagcgccagctgcgtccgctgtgggaacg

SEQ ID NO: 848469 - DNA, 100 bp, Homo sapiens
tggccagatgactaagacatataatgacatagatgctgtcactcggcttcttgaggagattgaaaaggaagatcaggccaaccccaaagaagaagtgacc

SEQ ID NO: 848470 - DNA, 100 bp, Homo sapiens
tctgttgcagcgagccccagattattgcccagagacaatggatttgaagcattcattaccatctggacttggtctctcagaaacccaaattacatctcat

SEQ ID NO: 848471 - DNA, 98 bp, Homo sapiens
gccgttcccgccccgctcttccctgggtggactggaggaggccgcgccgatgaacctgaccgagcatgacgtatcccagactttactcaaggcaacac

SEQ ID NO: 848472 - DNA, 100 bp, Homo sapiens
tggtggattatggatcagatccaaatcagtggaatgaatcttacttgttgaatatcttctggttactagttggattcatttgtgaaagaatcattttccc

SEQ ID NO: 848473 - DNA, 99 bp, Homo sapiens
gaagcggatcgcgtggactggaagtcacactgcggcggtgtcatggagaaactccagctgggcccagagattctgcagcgggaaaatccaaggcttatt

SEQ ID NO: 848474 - DNA, 98 bp, Homo sapiens
tttgattgttccagagccaaagggggtgaaacctaaacatttgtcttgcattggagtctgttcttttttgctggctgctagaatagttgaagaagact

SEQ ID NO: 848475 - DNA, 100 bp, Homo sapiens
acgttcggctactacttaataatgacaatctcctcagggaaggggcagcacaggaatctaccagcagggaaaacaatactcatcctgaatggagctttac

SEQ ID NO: 848476 - DNA, 100 bp, Homo sapiens
aatgatttagtcaaaaatgaaaagatgggaacagcagaaaatcaaaacaagctctttatgagaatggcatctaagagcagcccgacggccatggaggctg

SEQ ID NO: 848477 - DNA, 100 bp, Homo sapiens
actgaagaaatatgtaggagctgtccagatgctgaaaagagaaggtcaaacagctgaagtgtaatgttcaagctcagaaatgccttatgtggatcgtcag

SEQ ID NO: 848478 - DNA, 51 bp, Homo sapiens
attgtggaagaagcatccattaaggcagctgcagttgcactttcctccctg

SEQ ID NO: 848479 - DNA, 100 bp, Homo sapiens
ctgcccccttttcctggtgcatgtgaagttatcaaaaacagatgagaactggactgatgaccaactgcttggttttaaaccatgcaatgaaaaccttatt

SEQ ID NO: 848480 - DNA, 100 bp, Homo sapiens
ctggccctgacccagacctgggcggattcctctggaataagcagaattgcagatggattcaatggaattttctctgatcattgttacagtgtctgttcta

SEQ ID NO: 848481 - DNA, 99 bp, Homo sapiens
gcacgcccaggaggagcaagtccgatggagaggctaagcattcagccagcaacagtccttcgtacagattctccaggaggtgaatgactttgcaggcca

SEQ ID NO: 848482 - DNA, 98 bp, Homo sapiens
gagaccctcacggagctgggcgacgagctgaccctgggagacatcgacgtatgatgggggatgatgaagatgcctgtagtgacaccgaggccactgaa

SEQ ID NO: 848483 - DNA, 100 bp, Homo sapiens
aaaaaaggaaccaggatacatccgaattctgcttggtcagaatcgtgatggcattgtgttcagcactgatgactattttcaccatcaagatgggtacagg

SEQ ID NO: 848484 - DNA, 100 bp, Homo sapiens
gacaaaaaaggaaagtctgggttcagtctttagagaagaaagctgaagacttgagttcattaaatggtcagctgcaggacatggatttgattgacatact

SEQ ID NO: 848485 - DNA, 99 bp, Homo sapiens
gtgaactcattgttaagcacaagttcacgaaagcctacaaaagtgtggagaggttccttcaggaggatcagatcagcttgaacgggtctttttacgact

SEQ ID NO: 848486 - DNA, 100 bp, Homo sapiens
aaccttttggattacaactgttcatcctcacctatgcaaagaaagggaagctattgctgggattttgaggagaacaaaatccagtctcatagcagaggag

SEQ ID NO: 848487 - DNA, 99 bp, Homo sapiens
ctagaggggattgcagaatctccaacaactttacagcgatgccctcctagctagccgtcacgggatggagggcttcatggactcagggacacagacgga

SEQ ID NO: 848488 - DNA, 101 bp, Homo sapiens
tgaagcaaaagcctttcatgattatataagaaggctgactgcacaatcacaatggctgactcagacttcctggctttaatgactggtaaaatgaatcctca

SEQ ID NO: 848489 - DNA, 100 bp, Homo sapiens
tcatcacgccgaccccactttgtgaaacagcctgggaagaacagtgcatcatacaaggttgcaaagaaattatctttgaagatgaatgaggttgacttct

SEQ ID NO: 848490 - DNA, 100 bp, Homo sapiens
gaataacccctgaggctccagccgtcaccgcaaagtttcccgaggagacccgcctccccggccgctgcgcaggtacttgaagaagcagaagctcaacatt

SEQ ID NO: 848491 - DNA, 100 bp, Homo sapiens
ctcctgcctcagcctcccgggtagctgggactacagctattccaatagaaactgctaagcaaaatcctaatgttgctttggtccttacttcttatggagg

SEQ ID NO: 848492 - DNA, 98 bp, Homo sapiens
cctcagctatcgccgctgactgtgcccctgtggaaggaggaatcccttggcaccatgtcctgtgtgcattataaattttcctctaaactcaactatga

SEQ ID NO: 848493 - DNA, 99 bp, Homo sapiens
ggaaggagccctgcaactggcgccgccctgaccccaagattccagatgttcctgtggaccccagtccagtttaatgagtggtgttaagaataatgttgg

SEQ ID NO: 848494 - DNA, 99 bp, Homo sapiens
tgggaggtcatcgaaggctaccgggcccagcacagccagcaccgcacgccctgcaagggaggaaccaacgtccaagaggcccagaagatactcaacaac

SEQ ID NO: 848495 - DNA, 98 bp, Homo sapiens
atgagatcctctcactgaatgggcagctgatggttggagttgatgtcagtggggccagcgagcccacagcctcggtgccccccgagtcggacgtgtac

SEQ ID NO: 848496 - DNA, 98 bp, Homo sapiens
cacctttgggggccagatcatggcctggatggagaatgtggccaccattgcagccagtttcaggcagacactggaagaactttgccctggtccccctt

SEQ ID NO: 848497 - DNA, 100 bp, Homo sapiens
tcaccatgggccacctcttccagaagctggctatctatgtgcctgctgatgacttgactgaccctgcccctgctactacgtttgcccatttggatgctac

SEQ ID NO: 848498 - DNA, 100 bp, Homo sapiens
aggcgcagcgcttccagtggtagcagcagtaccaggctaaagaacgtgccaatggaatggagcttgatgggcgtaggatcagagttgatttctctataac

SEQ ID NO: 848499 - DNA, 100 bp, Homo sapiens
tctcaccaaacatcttagggcagataatgcctttatgttacttactcagaactttgccagggttaaaatgcaggtaacaatgtcactatcctccttggtg

SEQ ID NO: 848500 - DNA, 100 bp, Homo sapiens
aggcggaagctgcattcatggaagaagagtgtgtggacactccaaagattgatatcagtaaatgccattatttagtggatttggacaccatgagagaaac

SEQ ID NO: 848501 - DNA, 100 bp, Homo sapiens
cgacagatccgacatcgacgcagtctactgtcagagatggctttggattccccgttctgtgtgctgctgtctggctcctgaacccagctgtagaggtgtg

SEQ ID NO: 848502 - DNA, 100 bp, Homo sapiens
gaccaaaggaagatgagaactcttggtttaacttatttgtgattcatcagaacaggtgccactgattaatgaacttgaatcagcaatacatcagctgtac

SEQ ID NO: 848503 - DNA, 106 bp, Homo sapiens
ccaaatgctgcagcatcaagcccgaccgagcccaccactgcagaattactgatttagggaacatcaaaagaagattatatttatcaacggtccataaggaactatc

SEQ ID NO: 848504 - DNA, 100 bp, Homo sapiens
gacgtacctggacaagcacatggaggctcagcgggccgaggagggctttgttcgcgggggtcacagctctcatggctgcagctagcgtgaccccccctgg

SEQ ID NO: 848505 - DNA, 100 bp, Homo sapiens
aagatgaacacagtattgaaatgcatttgccttatacagctaaagccatggaaaggtatgttcaggcagacgcatatatttacacacatacaatggagcc

SEQ ID NO: 848506 - DNA, 101 bp, Homo sapiens
gatggatatcaggggtcacagacatttcatggggctccactaacaggtcagcacgagggaccattgcccaggcagcatgctggattattgccagaatctct

SEQ ID NO: 848507 - DNA, 100 bp, Homo sapiens
tattaaatggatggctccagagtcaatcaattttcgacgttttacctcagctagtgacgtatggatgtttggttatgggagaagatatcccagaaaaaat

SEQ ID NO: 848508 - DNA, 100 bp, Homo sapiens
cgacagctcacccaggaactatcaccaggacatcacaggtgacatttactatttcaacttcgccaacgggcagtctatgtgggaccatccatgtgacgaa

SEQ ID NO: 848509 - DNA, 98 bp, Homo sapiens
gcactttttgatcagcatttgtggggtgaatagcgaaccaagcctcttgccttactgtgttctaggtcagtggcttcaaagactccagttggattcat

SEQ ID NO: 848510 - DNA, 100 bp, Homo sapiens
agctttaacttctcttattaaagcaggattaacatttaaccatgatcctccactctcacaaaaccagggactgttcagtcttacactgaatgaacgtttc

SEQ ID NO: 848511 - DNA, 100 bp, Homo sapiens
caccccgccagctccagagccacgtacgctccagatgaagatgagtgagcgggccgcctcgctgagcaccatggtgcccctgcctcgcagcgcctactgg

SEQ ID NO: 848512 - DNA, 100 bp, Homo sapiens
cactccccttccccggtcagacacgtgcgggcaccgaccccatctccggtcagaaaaatggctacaaacttcctagcacatgagaagatctggttcgaca

SEQ ID NO: 848513 - DNA, 132 bp, Homo sapiens
tgaattgtataggaaagtaccaaatctgcgaattctggcctgtggtggggatggaacgggaatgaaagctactggttgattttaaagtgcctgggcctcacaggtttggagatgtcccagaataaggcacaa

SEQ ID NO: 848514 - DNA, 100 bp, Homo sapiens
gcctcgggcgccccgcagccccccaacatcctgctcctgctcatggacgactgtggacgaatgtggaacctcgctctgtggctgtgttcccttggcactc

SEQ ID NO: 848515 - DNA, 100 bp, Homo sapiens
caatgcagttccttaaaagctgcttccagtgggaatccacattaagaagtacaatagcattcgcgcaagtgaacaatggcctcaccctcagtgaccttcc

SEQ ID NO: 848516 - DNA, 100 bp, Homo sapiens
gttcctccccggctttctcctcctcctccagttaccaccctcctccctagcataaagatgtacagttacccagcacgtgtacctcctcctcctcctattg

SEQ ID NO: 848517 - DNA, 100 bp, Homo sapiens
tgcagatcgtggcaggttgatcggcggcttgcctgacgtggtgaccatcatggaagggaaggtaccgaaagcacagtaatcactggtgtcgatattgtca

SEQ ID NO: 848518 - DNA, 100 bp, Homo sapiens
aaagttggttacaaaggcatatgctgacacacagtggagacaaacctttcaagtacaagcccaccaccaacagcagttgtaaggctgccctggaggaacc

SEQ ID NO: 848519 - DNA, 99 bp, Homo sapiens
gcgggcagaggatgcagtggaggccatcaggggccttgataacacagagtttcaaggactgagcagggggaggaacatttaagctgatggaagtggaag

SEQ ID NO: 848520 - DNA, 98 bp, Homo sapiens
ggaatttctgcagaagctgcttccaggatactacatgcttcttggacacttaatgattgttggcaagaaatgtgctgctgatctgggcctgaataagg

SEQ ID NO: 848521 - DNA, 98 bp, Homo sapiens
ctggagccagtcttgaggtcctacatctccgaaagcaagctcttctagaagttgatactgcttctaaactaggacccatagaagctatccagaagtca

SEQ ID NO: 848522 - DNA, 138 bp, Homo sapiens
tccctgttgctcaccccgcaggagaacgagtccctcttcactttcctcggcaagaaatgtgtgggcccggcaggaagatgggctcccgtggacagggactcttgctggcgtactgcctgctccttgcctttgcctctg

SEQ ID NO: 848523 - DNA, 100 bp, Homo sapiens
tgggatgtttgtgttttattgcgctcattggcagacttatgtttcaggcatgttgagatttggaaaggtgcagacgtatgtcggctttggcgtatccatc

SEQ ID NO: 848524 - DNA, 98 bp, Homo sapiens
ttggtgtctcacctttaactctccttatgctgggtgaaaacaaagattcgagtggtgaatgcatttcgtagttctttatatgaagggttagaaaaacc

SEQ ID NO: 848525 - DNA, 50 bp, Homo sapiens
gcccggccgagaccccgtctgggagagtgtatccagaagctactgtcagg

SEQ ID NO: 848526 - DNA, 100 bp, Homo sapiens
tcatggaagtggtctgtcgagatgcttgtgatggtcatgagattggaagggttggatggcaagcatgtggtgtttggcaaagtgaaagaaggcatgaata

SEQ ID NO: 848527 - DNA, 100 bp, Homo sapiens
atgttgttagcagtttttgaagaagaagctcattcacacagaagacccatttaatgatgaacatcaggagaggcaagaggtggaaatgttggctaagaag

SEQ ID NO: 848528 - DNA, 100 bp, Homo sapiens
tcctccaaaagcagctctcactatcagaaaacccaactacagttgtgaacgccttcattttctgcctgaagccaaagagttcaagacacgtctggggatc

SEQ ID NO: 848529 - DNA, 100 bp, Homo sapiens
ccgcagcacgagctcaaattccgagcaatggctgccatccggaagaaactggtgattgttggtgatggagcctgtggaaagacatgcttgctcatagtct

SEQ ID NO: 848530 - DNA, 100 bp, Homo sapiens
ctgaagcaaaagatcagcgaggagcagcagcagctccagcaggcgctggctcctgctcaggttgccaacttggcctgttccatctcaaataatgaagaag

SEQ ID NO: 848531 - DNA, 100 bp, Homo sapiens
ccaaaactgcacagtggaaggcactttccatgaatactgagaatgccaaagtaaccagatctaacatgaggtatgccattgcattggccttaagggaaaa

SEQ ID NO: 848532 - DNA, 100 bp, Homo sapiens
aaaagatctaaagtcacccggcggccaaaggccagtgactaccaacgtttggaccagaaggcttatctaattaactgtgtttggaactgctataaataca

SEQ ID NO: 848533 - DNA, 100 bp, Homo sapiens
aggggatggattttttaccatgaaatatgagaatcaggaaacccaggcccaacggcaggtggatgcaagaagaaatgttccccaaaacgacccagtgaca

SEQ ID NO: 848534 - DNA, 116 bp, Homo sapiens
gttcgtgaaagctttctgcccagagctcctggaccaatgcatcttcccaccaccttaaaccactggcagctgtttctgatcaggaaaggaagaaaatgaagcgcaaaggagatcgg

SEQ ID NO: 848535 - DNA, 98 bp, Homo sapiens
gatcaccatgaacgaggagtacgagacgaggttcctgtgcaactcttcacagatgcatcaccctatacagatgaaacctgctgacagtgagaagaaca

SEQ ID NO: 848536 - DNA, 99 bp, Homo sapiens
aagcagatggaaaatacgtcttagttgctgggctcaatgaatcgaatgaatgtgaacttcttcatctgtgaaaaatcttttttttttccattttgttct

SEQ ID NO: 848537 - DNA, 100 bp, Homo sapiens
acagaatcctctgaaacttccacaggcttggaagcgtttgtgtctgctgccaagaagctaccacgagaagatgtgtatgatgttgtggaagggtatataa

SEQ ID NO: 848538 - DNA, 100 bp, Homo sapiens
aatcaatgcgtggaattctcctacacttcctatttatgaggccttattccactgctggggattgatgtgtgggagcacgcttactaccttcagtataaaa

SEQ ID NO: 848539 - DNA, 100 bp, Homo sapiens
agagccggagcctgtaaaaccatggaaagaagttcctaacagacaaataaaaggctgcttaaaggtaaaatcaagatttgagttctgtgaacctgcattt

SEQ ID NO: 848540 - DNA, 100 bp, Homo sapiens
gaggttcgcggctctaacggggctttctacaaggttgtcggggtaccagttgggtctgctttaccttcaacagtgaagcaggctgtggcgatcagtggtg

SEQ ID NO: 848541 - DNA, 100 bp, Homo sapiens
atcaagttcctgtacaaccagaagcgacacaggctctaagtatgcagtcatctccaaatggccagtttgtagcgccaagtgatattcagttgaaatgcaa

SEQ ID NO: 848542 - DNA, 98 bp, Homo sapiens
agaatcagatagtgatgaagaagaggaatccaaagagccccctatcaagcttccaaagaggaacttgtctctggaggccctggctgtcttccacaaat

SEQ ID NO: 848543 - DNA, 98 bp, Homo sapiens
gaaaacacccggccttactgaggaacaaagggttatgaagacagtatggagtttccagaccatagtagacatttgctacagtgtctgagcgagcagag

SEQ ID NO: 848544 - DNA, 100 bp, Homo sapiens
tgaagattcaccaaataagctatatactttggttacctatgtacctgttaccactttcaaaagtatccaaaccttgaaacctttgctctagatgtcaggc

SEQ ID NO: 848545 - DNA, 99 bp, Homo sapiens
caaagtcctgggattacaggtgtaagccactacggctggcctattattgctgtattctaacttattcatctcctatggaggtgttcctgctcatatgtt

SEQ ID NO: 848546 - DNA, 100 bp, Homo sapiens
ttcgtggtgaaggtccggggcttgccctggtcttgctcggccgatgaagtgcagaggtttttttctgcttcagctttagctgcagctgcctctgttcagc

SEQ ID NO: 848547 - DNA, 99 bp, Homo sapiens
aacccctcatcagcctgccaagacaaagatgattattttcctagaatccccaaagagcagtggcagtccatggcttggttgaagctagaaattttcctg

SEQ ID NO: 848548 - DNA, 100 bp, Homo sapiens
caagcagagactggtcttgaagagcagcttagcgaaagaaaccctctctgagttcttgggcacgttcatcttgattgttatggtggagaattcagacttt

SEQ ID NO: 848549 - DNA, 100 bp, Homo sapiens
atttgtatagagatgtgatgttggagaactacagaaacctggtctccctagtaggtcccattagtccaccacagccaccttcagtcagtgcatggaataa

SEQ ID NO: 848550 - DNA, 98 bp, Homo sapiens
acgtggaccctggaggagacctggccactgtcaacagtcagctcaagaagctgcagggacatcaaagacgtcagactggatggcgagtcccagtgagg

SEQ ID NO: 848551 - DNA, 119 bp, Homo sapiens
gcacgagcagatcctggtcctcgatccgcccacagacctcaaattcaaaggtgttggagagcacaatggctgaacaagtccttcctcaggctttgtatttgagcaatatgcggaaagct

SEQ ID NO: 848552 - DNA, 123 bp, Homo sapiens
cctaaatgccgactcagtggaacaatcttttgttggattgaaacagctaatcgaaagtccatcagcttgataatggaggagaacaatgactccacggagaacccccaacaaggccaagggcgg

SEQ ID NO: 848553 - DNA, 100 bp, Homo sapiens
gtgaatacaaaaagatacatcaagatatgatcagagatcttcttcgtttatctacaagttcatacagtcaggtttttcatagtctcctcaaggctcacgc

SEQ ID NO: 848554 - DNA, 100 bp, Homo sapiens
caggatttaatgaaacctgcttgagatggagaagcatcaagacagctgatatggaggagatgtatttaatgagacgtgcaggtaccatcaggaagcagcg

SEQ ID NO: 848555 - DNA, 100 bp, Homo sapiens
aggaggaacctgtctttaaagctgtccctgaagtgacagcggagagaaccaggcagcccagaaaccccagggacctccgaaacaatcttattagtagtat

SEQ ID NO: 848556 - DNA, 123 bp, Homo sapiens
tagaaatgacagatgaaggcagtccccatccactagtaggaagctgctttgaagacttagcagagaggactactgagcccagccaggctgtatgccattgctgccaaagaaaaagatattcaa

SEQ ID NO: 848557 - DNA, 100 bp, Homo sapiens
ctgtccccagagcctcagtttgtgcaggacaccgacatggaacagggactcactggggctggatagaacttatactggcttgcagactcttggagcagag

SEQ ID NO: 848558 - DNA, 98 bp, Homo sapiens
gtcccttccccacctccacgcccctccgcagagtgctactcgtgagcagtagtcgccatccagacagatggattgtccctggaggaggcatggagccc

SEQ ID NO: 848559 - DNA, 100 bp, Homo sapiens
gctcgcacatttgacttggaagcaatgtttgaacaaactcgaagaacagctgtggaaagaagttgcaaaacactgggttgcaccattactcagacttcta

SEQ ID NO: 848560 - DNA, 99 bp, Homo sapiens
ctggacaagaagattatgacagattacgccccctatcctatccgcaaacaattgcttccaagtatgatcatcaggcagaagaagatcttcgcaattgga

SEQ ID NO: 848561 - DNA, 100 bp, Homo sapiens
tgtctcgctccgtggccttagctgtgctcgcgctactctctctttctggcctggaggctatccagcataactgtgtccagaggacccccaggccatccgt

SEQ ID NO: 848562 - DNA, 100 bp, Homo sapiens
tgtttggtggtctcttcccacggacgcgcgagacaatgaggagggtttcagtgagctcaaccctttagctttatacacgacatccagtggagggccagag

SEQ ID NO: 848563 - DNA, 98 bp, Homo sapiens
cgccgcgggcacggcgaggggggcggccgcctcaccggtttcagcaaccaaggagcacacaccctgatccttgattggtgaaaggatacacaaaatca

SEQ ID NO: 848564 - DNA, 99 bp, Homo sapiens
tatgtgatgatgaccgtcaccaactggttcaagtacatggactatatcgcacaacaggtgctagttttgagaaggcccaacaggagtttgcaacaggtg

SEQ ID NO: 848565 - DNA, 99 bp, Homo sapiens
aacatttcagcaaactatgctgccttcaataagctatacagaaatggatcctgtcatcattgcttctgaaggagtagagaaatttaaaaatgaaaattt

SEQ ID NO: 848566 - DNA, 99 bp, Homo sapiens
aaagggaaggtcattgtcatcgtggggcatgtggcaaaacacacagctgaggccctggagagtgaatttgtttcctgccagcttcaccaatggattgat

SEQ ID NO: 848567 - DNA, 100 bp, Homo sapiens
cagtggtggtggtgggggtagcagaaactaatctggattcactccctctggttgatacccactcaaaaaggacacttctgattaagacggttgaaactag

SEQ ID NO: 848568 - DNA, 100 bp, Homo sapiens
cagtttattcagcagcagaccaagctgtttgtagaacagctggaggagttcatgacaaagcctcagaatattctgttgacaagtgaatctccattgggtg

SEQ ID NO: 848569 - DNA, 100 bp, Homo sapiens
cgatcctccggatattacctgtggagaccctcctgagacgttctgtgcaatggacaagagcgaggaaggtgaggacaacagaagctcagagagtgaagag

SEQ ID NO: 848570 - DNA, 50 bp, Homo sapiens
caaagcgcagaaatgttggatttgaagtgctgccacgggacctggagaag

SEQ ID NO: 848571 - DNA, 100 bp, Homo sapiens
atgtggaggagatgtactgtgcttggctggaaaaccccaaaagtgtacataagcggacaaggcaaaatctcagcaagttcggacctctagtacaataagg

SEQ ID NO: 848572 - DNA, 107 bp, Homo sapiens
gcaagcatggcaaagactggcaaaagcacaaggattctcgctgtgacagagacaacaccgagtatgagaagaagctgaagtcttcagcagaaccctgacctaggtag

SEQ ID NO: 848573 - DNA, 99 bp, Homo sapiens
acagctctgcggctcgggccctgagggtgtttgtgaaccgaagtttagcaatggaaaagataaagtgttttggttttgatatggattatacccttgctg

SEQ ID NO: 848574 - DNA, 100 bp, Homo sapiens
cttcgtctgcacttaccttggaagccaatatatcttcacagaaatggcctcggttcgattgagtgaaacagacttcaaagttatggcaagagatgagtta

SEQ ID NO: 848575 - DNA, 98 bp, Homo sapiens
agcccagaggatcggaatgacagatagaggatctgacgaactactctcaggcagtgttctcagtagtccgaactctaatatgagcagcatggtagtta

SEQ ID NO: 848576 - DNA, 100 bp, Homo sapiens
cgggaggaaggaacgaggcaaggagctaaagcagcgtgcgttcagccctggggctccacaagttcttccctgtgtgaacactgggtgagccggctcccgg

SEQ ID NO: 848577 - DNA, 100 bp, Homo sapiens
ctacagttctgtcactcacttacacagtattgggaaatctgtgaaagtactgctttaaggagaatgaaaacgttacagttgataaagcctgttttctgat

SEQ ID NO: 848578 - DNA, 130 bp, Homo sapiens
tcaacaggggggccaacagggtaccagagccaagaccctcggcctcctcccccgccgccttcctgcagagatcccactggcattgttggtggtaggcctgggcgggggcagcctccccctctttgtccac

SEQ ID NO: 848579 - DNA, 98 bp, Homo sapiens
tatggacaaagttcttctcaagtatacagaatataatgaacctcatgaaagcagaaccaactcggatattgttgagggttgccacaccatttggaggt

SEQ ID NO: 848580 - DNA, 100 bp, Homo sapiens
gtttgggatcatccagaagcatctgaagaccatggatcacaaccggaaccgcaggatgatgcagtttgcttggcagagctataagcgttatgcaatgggg

SEQ ID NO: 848581 - DNA, 98 bp, Homo sapiens
gagcttcaggttgtccgagcatctgggaaggagaatgaagttgaagaggtaaaagaggagggtccaaaagagatgactttggatgagtggaaggctat

SEQ ID NO: 848582 - DNA, 100 bp, Homo sapiens
agagggcgacaagttcaagctgagtaagggggaaatgaaggaacttctgcacaaggagctgcccagctttgtggggaaaaggacagatgaagctgctttc

SEQ ID NO: 848583 - DNA, 100 bp, Homo sapiens
aaaagttttattttggcaagagttggatcaacccagagctattgccttagatccttcaagtgggcatgttacatggaattggaaaatttatagttgaaat

SEQ ID NO: 848584 - DNA, 98 bp, Homo sapiens
tggagacaagacgctggaggaccgattctttgagcacgaggtagacgggaaagtcagtgtgaatggagagacggttcatagagaggaggagaaggaaa

SEQ ID NO: 848585 - DNA, 100 bp, Homo sapiens
ctgagcgttgtcgccgccgctatggggatggttctgtgaagggaaagaactgcacaacactcctgatattcaaatccactgtgagggaggggacctccat

SEQ ID NO: 848586 - DNA, 101 bp, Homo sapiens
taatgaatcgggcacctctgcagctgcagaagtgaaccggcaaatgctgcaggaactggtgaacgcaggatgcgaccagatggtcagtaggacagaaggta

SEQ ID NO: 848587 - DNA, 100 bp, Homo sapiens
agaagagaagacaatgagaagtaatctagagggctctgtgtatgaatgacaaggataccttcagccagctcattctggatgaatgaatgattacactaag

SEQ ID NO: 848588 - DNA, 100 bp, Homo sapiens
ctgtccactgcacagttcgaggggccaaggcagaagaaatcttggagaagggtctaaaggtgctggggctgctggtgtgggcgctgattgcggacacccc

SEQ ID NO: 848589 - DNA, 139 bp, Homo sapiens
tagaagcagagacaccaggacagaaaagacagtgttctgctttcatggagttcacagaagagtcgaggagggtgaaaggttgagccatgcagtaggctgtgcttttgcagcctgtttagagcgcaagcagaagcgggag

SEQ ID NO: 848590 - DNA, 99 bp, Homo sapiens
acagatcgcgagcggctgcggaccatttataaccgcgacttcaagatcaggtcaacaggacatactgctgtggcacctaccgagcaggtcctatgcggc

SEQ ID NO: 848591 - DNA, 100 bp, Homo sapiens
gggataccttactgctcctgcaccacggggacttctcagcagagcttctcaataggtttggcatggacaagatctatgaaggccaagtggaggtgactgg

SEQ ID NO: 848592 - DNA, 99 bp, Homo sapiens
gcttccgtttgttggtggaggaggtggcaggcctcggcgtgctgaagctgctgaaagatggcagaagaagtggtggtagtagccaaatttgattatgtg

SEQ ID NO: 848593 - DNA, 100 bp, Homo sapiens
cctatttagtagagttaagcccagcttaacctggcttctcagtctgtattggaaggactcaatgcttgttttgaccaccgaggagaaatctatgtgcctg

SEQ ID NO: 848594 - DNA, 98 bp, Homo sapiens
ctgtgtagaatttctcaccaaacatcttagggcagataatgcctttatgttacttactcaggtggttcatcatgacccatgccgtgggggtgcaggac

SEQ ID NO: 848595 - DNA, 99 bp, Homo sapiens
tttaccaccaatgggaacatgcacagaataagaaagccttgagttttgtgaaaaaccggagaagagaaactaaaaggacagtagaaaaggcttttccag

SEQ ID NO: 848596 - DNA, 100 bp, Homo sapiens
aagaggtcactgctgggcagactgtcttcaacatcttgcctggtggcttggatctgatgactttgaagagggtgtggcctgcttctcagcgagacgtatt

SEQ ID NO: 848597 - DNA, 100 bp, Homo sapiens
cggcgctgacggactgggggcgccgcccgcgcccgggaccgacccctctgctcgcggccgcgcctttgaggttataaacaacttgtgaaatgagtgattt

SEQ ID NO: 848598 - DNA, 99 bp, Homo sapiens
cctttcctaccgcaccacgggctccacctacctgcacccgctcagcgagctcctgggcatcccgctggaccagtctggctcttgctgattgaattcctt

SEQ ID NO: 848599 - DNA, 100 bp, Homo sapiens
tgcgacggccactgttctctgggacaatgcttttgcagagcctctggactgtgctgctgccatctcggctcactgcaacctccctgcctgattctcctga

SEQ ID NO: 848600 - DNA, 98 bp, Homo sapiens
ttccgtgctgtcctacgaaagcctggtccacgccgtggccggagccgtgcaacaatggtgtggttggtgaatatggcagaaggagacccggaagctca

SEQ ID NO: 848601 - DNA, 100 bp, Homo sapiens
ggtctcagcccaggacctccaggggaacaatgaggcctacgcagagctcatcgtccttgttaatatgatcctctgttgaagcaagaagacaaactgtatg

SEQ ID NO: 848602 - DNA, 98 bp, Homo sapiens
gactcaggagcaaatcagtaatactggcattgctcgggtaccacttgctggagctgctggaggccctggggttggtagggcagctggtagaggagtac

SEQ ID NO: 848603 - DNA, 100 bp, Homo sapiens
atgagacaattgaagctcaagcagagcttacagtgcaagacgtgaagccctccaatatgctagtaaacacaagaggacaggttaagctgtgtgattttgg

SEQ ID NO: 848604 - DNA, 100 bp, Homo sapiens
tgcttggtgtcgtttttccttgagctgaacgtcttgcaacagtggccgcacgcatagagcttggggcttccttggtcgcacccaccacctgcctgcccac

SEQ ID NO: 848605 - DNA, 99 bp, Homo sapiens
ggacatcccccagaccaagcaggacctggagctcccaaagtccagaatgacagggtccagaaactggcgagccacgagggacatgtgtaggtatcggca

SEQ ID NO: 848606 - DNA, 100 bp, Homo sapiens
aatggttagaattgaaactttggagcagaaacttacctgtctggaactcatacagaaaaatgtgagttcaagggttccctatctggcagtaatgcaggaa

SEQ ID NO: 848607 - DNA, 98 bp, Homo sapiens
cagtgacaaatttttttaagcagacattccactgcccttctcccaaaaagatgtcttttcgaaaaatggatcccagctgtacaataggattttactgt

SEQ ID NO: 848608 - DNA, 98 bp, Homo sapiens
gggaggaaaccagacccttactgtaaatgtagagggcactaaaacattgccagatgatcagattccagacagcattggaaaagacatagaaaaggctt

SEQ ID NO: 848609 - DNA, 117 bp, Homo sapiens
tgagacgagcgaaccccgcgtggctctgggacgcctgccgcctgcggccgaggaggactggaatgaaattgaccccattaaaaagaaagaccttcatcacagcaatggagaagagaa

SEQ ID NO: 848610 - DNA, 99 bp, Homo sapiens
gaattcacaacctcaaacccgttctccgctccctgtgctgtcaggaatctacaggacttggctcgtatttacattcgacgcacacttagaaatttcata

SEQ ID NO: 848611 - DNA, 100 bp, Homo sapiens
gaagcgccttggggacaaacatgcaacattgcagaagagcaccaaggaggttcgcagctcacggcaccgaaagcgaaggaagctcctgctcctcctaaag

SEQ ID NO: 848612 - DNA, 134 bp, Homo sapiens
cggtttccggtgcaggtggggaaaatggcggtgtctacagtgttctcgacttcgtcgctgtgtatcgcattaagttcaaggagagctttgctgagatgaacaggggctcgaacgagtggaagacggttgtgggc

SEQ ID NO: 848613 - DNA, 100 bp, Homo sapiens
ccctgtatgacattccttacatgtttgaggcccgggaatttcttcgaaaaaagcttattgggaagaagatgatccagatcctgatgatggatttaactat

SEQ ID NO: 848614 - DNA, 98 bp, Homo sapiens
tcaagtttaagggtactttggtgcatgaagctcaactcaactatttctacatctctcctggaggccatcaagccctgtcgtcctatgaccaacaatgc

SEQ ID NO: 848615 - DNA, 100 bp, Homo sapiens
atcttgacttaccaccctacaaaagatggcatgaattgatgcttgacaaggcaccagtgtatgagaataatgttatcactattgatctggttcaaaattc

SEQ ID NO: 848616 - DNA, 100 bp, Homo sapiens
atgatggccacgcgtcggactggtctgtctgagggagatggtgacaagctcaaggcctgcgagactgtggatattcataaggagaaagtggcacgaagag

SEQ ID NO: 848617 - DNA, 100 bp, Homo sapiens
attttctcttcttctgaaaaagagatcttggggcctttggctactttgaggtcacacatgacattaccaaatactccaaggcaaaggtatttgagcatat

SEQ ID NO: 848618 - DNA, 99 bp, Homo sapiens
tggaacatggctagcaggaatgcttactgttgcgtggttcgttattaacagagtttctccacctggtggtgatttttctgatccagttacatctgccac

SEQ ID NO: 848619 - DNA, 100 bp, Homo sapiens
ggagccccaaccgcgctgccgggaatgcagagagcaaccaatgtcacctaccaagcccatcatgtcagcaggaacaagagaggtcaggtggtggggacca

SEQ ID NO: 848620 - DNA, 100 bp, Homo sapiens
ttctcccggctggacgccccggtggactacttctaccgaccagagacccagcaccgctgcaagtgtccactgcttgggaaagtgtgggaagctgacttgg

SEQ ID NO: 848621 - DNA, 100 bp, Homo sapiens
tacgctggagaagatgcaacgatattcccagacacccgatgccatttgctgcaaaaaacatgttttatgatgaacgctggaaggaaaagcaggaacaggg

SEQ ID NO: 848622 - DNA, 100 bp, Homo sapiens
aggaaaaataatcaacatatattctcctttcgtactgtttaaatcacaggaagaagcggctttaagacaaaatgtgaaaggaccacccacccaccgtctg

SEQ ID NO: 848623 - DNA, 136 bp, Homo sapiens
acggaggtcaagtttaagggtactttggtgcatgaagctcaactcaactatttctacatctctcctggaggatcaactcactatcctgaaggtccattctcccaagaagaggggacagaaagacagatctatttgt

SEQ ID NO: 848624 - DNA, 98 bp, Homo sapiens
gacttcccattatgtgattgccatctttgccctgatgagctcctgtttagccactgcagaaatggaatctagttcatcagactactataataaagaca

SEQ ID NO: 848625 - DNA, 98 bp, Homo sapiens
gcagcattccagccaaaaatacatgatgtcttaagcacaagaaatgaaaataagctgcttcctaaacatcctcatttagtgcggcaaaagcgcgcctg

SEQ ID NO: 848626 - DNA, 98 bp, Homo sapiens
gccactgggttcttcaaaggataaactacctacatagaggacatacctttggttaaaggagctgccgtcagagcactgcagcctgtggtgttgaggct

SEQ ID NO: 848627 - DNA, 151 bp, Homo sapiens
tgggtcccaggcagcatcctggcgcccctcaccaaagccacagcagcagaaagtagtgacgggagcatcaaatatggtttggagtgcctttttcgatactacagttatggcctggaaaagaagttccggctggacatattcaaggattttc

SEQ ID NO: 848628 - DNA, 98 bp, Homo sapiens
atcgatcctcaggatctgcaggtccaaacattcaccgtggagaagctactggagcctctcataatccaggtaggagcaacggtgggaatgccctctga

SEQ ID NO: 848629 - DNA, 98 bp, Homo sapiens
cagacactccagagtgaacagcctttacaggttgccaggacttgcaattgtgaccaaatatattacaaagggctggaaagaagttcatgaattgtata

SEQ ID NO: 848630 - DNA, 98 bp, Homo sapiens
ccggaccccacctggacggctggggccacttgtggtcgccgggagtggcctcgtggtctatgcggacggacctctgaacttggaccgcaaggtggaag

SEQ ID NO: 848631 - DNA, 100 bp, Homo sapiens
atgcgaccacagaaggaaattcaacagaacttagcataaatgctgaaggatcgcattgtatcaatgacacttgataaagaatatgatgttgctgtggaag

SEQ ID NO: 848632 - DNA, 100 bp, Homo sapiens
gtgtgctgacgacctgctacaacagaagtacagcagttgcaaggagtttacagtttacaggaacagcacttctggactttatgttctgacgtttatgttg

SEQ ID NO: 848633 - DNA, 131 bp, Homo sapiens
gatgaacaggctcttgcacacaaagaagagacatgatgtatttgcatccttccctgcttcagccaggtggtactttggaaagattgggagaaaggatgcagagaggcagctgctttcaccaggcaaccccc

SEQ ID NO: 848634 - DNA, 100 bp, Homo sapiens
tgctgcccgagcggacgtagagcatcggacgcgggcgccgtggcgctgggcaggagggcgaagccatgacgtcagtcagaaaatgatccacagtctattt

SEQ ID NO: 848635 - DNA, 98 bp, Homo sapiens
caagcgaagccttgaaaaagctgccctgagacggtgtcccgccgaaaggtgactgaacttgaatgtgttagtagccaagcaaatgcagtacatactca

SEQ ID NO: 848636 - DNA, 100 bp, Homo sapiens
ctgaggatttagagaataatggcagtaagaaagatggcgtgtgtggtgatttcctgaaggaaatataatgatctgttcatcgaagtagaagatattgttg

SEQ ID NO: 848637 - DNA, 98 bp, Homo sapiens
tcgccgccatggcccgctggatcccgaccaagaggcagaagtacggggttgatgacatgtgaaaaagtccttgatttgatgtgctacatggtactccc

SEQ ID NO: 848638 - DNA, 99 bp, Homo sapiens
gccaagcaaataaagtagccaaagaagctgctaacagatggactggtggagccgccaccaaaatgcagattttcgtgaaaacccttacggggaagacca

SEQ ID NO: 848639 - DNA, 100 bp, Homo sapiens
ctgtatccagttatctatgatagcaatggtgtcgtcctttcaatgcctcccatcatcaatgttgaagactgggatagtttccaagctattttggatcata

SEQ ID NO: 848640 - DNA, 98 bp, Homo sapiens
tttccgcgcgggactccggggcgccacgggggccatgtaagcagtactggagaaaatgaaactgggattgacccatcaagatgcttggctcaataaga

SEQ ID NO: 848641 - DNA, 100 bp, Homo sapiens
gaaagacatggagattctcttaaaaaggtctctaattaacagaagatggcaaagcccagccacagcagctatgtccttcagcagctaaacaaccaaagag

SEQ ID NO: 848642 - DNA, 98 bp, Homo sapiens
taaagaaaaacaagcatttgtcaaaacagttaaaggcccagagacggaaagtacaaagactagtaaaatacatccttgcccttaaggagctaagtacc

SEQ ID NO: 848643 - DNA, 100 bp, Homo sapiens
cagaacagcatcagtgttttttaagggaccaggaaaagtggtgatggttgcaatttgcatcccccttacccaggaatggaacaacctccacaccatcctt

SEQ ID NO: 848644 - DNA, 98 bp, Homo sapiens
gggcaaagggaccacggtcaccgtctcctcaggtgtctgacttccagcaactgctggcctgtgccagggtgcaagctgagcactggagtggagttttc

SEQ ID NO: 848645 - DNA, 100 bp, Homo sapiens
acgacgcgggcgagcggggctttggacgccggtggagacgcaggcgaggtatgatctcgtgaaatcttgagagaaactgaatgacgaatgaaactattgt

SEQ ID NO: 848646 - DNA, 100 bp, Homo sapiens
ctttttcttggcgattatgtggacagaggttattttagtatagaggtcaatacttctgcgaaggctctgtagtctgatgggaactgtattcttgcttcgc

SEQ ID NO: 848647 - DNA, 99 bp, Homo sapiens
ctgtgtggaccaggtggacggctttgagtgcatctgccccgagcagtgggtgggggccacctgccagctggactactccaaaggattcggcgggaagta

SEQ ID NO: 848648 - DNA, 100 bp, Homo sapiens
agtgaatgggggctgaatgtgcgagtccatagctgaagaggagcgccagatggtggaggaatacacttatttatgaagttgaatttttaggagaagaagg

SEQ ID NO: 848649 - DNA, 98 bp, Homo sapiens
gcagcagcaaaggatgagcggaaccttggaaaagatttagaaatgccatgttaaagagcatctgtgaggttcttgatttggagagatcaggtgtaaat

SEQ ID NO: 848650 - DNA, 100 bp, Homo sapiens
aagtgaaatggtagaatatatcacccataatcggaatgtgatcacagagcctatttacccagaagtagtccatatgggctcattgtcatccccaagccag

SEQ ID NO: 848651 - DNA, 100 bp, Homo sapiens
tttgtgaagctgggaatcatttcatcaatgtaatgttgtctcatcccaatcacacaggattcactccttctccagttgcacagccacacccttcagctgg

SEQ ID NO: 848652 - DNA, 99 bp, Homo sapiens
ctgtataaaatggatcccactaaacagtacaaggtgatgaagactatccctctatacaatgcacgtgacacaagctgacctcaagagctccacgttttg

SEQ ID NO: 848653 - DNA, 100 bp, Homo sapiens
agtaaacggggctgctggtgggccgcgtcgaagacatggaccagggctacggagatctgggcggaccccggcaaatacgccctgatgggagctgctgccc

SEQ ID NO: 848654 - DNA, 99 bp, Homo sapiens
gagaggatgcgcaaggtggagagccgcggggaagggggcagagagtacaacagggtctggattcccgatcctgaagaagtttggaagtctgctgaaata

SEQ ID NO: 848655 - DNA, 99 bp, Homo sapiens
atggagctggtccgctgcatccgccatatattgtacaatgaacagaggttggtccgagaagccaacaatgatggcacatttcctagaggcagaatccta

SEQ ID NO: 848656 - DNA, 98 bp, Homo sapiens
tgcctccactgaaaactcagcttggtgactgcactgtagcaacccaggcctcaggagctacagggagctggccgactgcacctggcacatggcggaga

SEQ ID NO: 848657 - DNA, 100 bp, Homo sapiens
ctgtgtgtgtggggaggagaggacctctgccactctcaccgtgaaggagctagagccggtgcaggccacgcagaacaagacagggaagtatgtgccgccg

SEQ ID NO: 848658 - DNA, 98 bp, Homo sapiens
gaggcgtcgctgattccagagagctaaagccgatggtacggttcctggagcagcagaacaagatgctggagaccaagtggagcctcctgcagcagcag

SEQ ID NO: 848659 - DNA, 98 bp, Homo sapiens
tcacatcgtggagatggacaggagacctggaatcattgttggaagcattgccatcattgtgcctctcgtcctcttggtgactttgataaccaccttag

SEQ ID NO: 848660 - DNA, 100 bp, Homo sapiens
tttgctatcgtatccacaggcatcacggacaaattattggattccagcacagtgactcacttattcaagataactgaaaacattggttgtgtgatgaccg

SEQ ID NO: 848661 - DNA, 98 bp, Homo sapiens
gccatcacctggatgcctacgtgggaagggacctcgaatgtgggaccccagcccctctccagctcgaaatcgttggagcaaaacgtcccactcactgg

SEQ ID NO: 848662 - DNA, 100 bp, Homo sapiens
agattgcagggagtatcaaatatgagaaagctaggccatctgaataactttactaagaatggcttcctttgggtggaagaggaaaattggtgagaaggtc

SEQ ID NO: 848663 - DNA, 100 bp, Homo sapiens
ccagtccacggacacttcaggctatggccagagcagctattcttcttatggccagagccagaacactctagaggacaaaatcccagtccttggcacaaac

SEQ ID NO: 848664 - DNA, 100 bp, Homo sapiens
aatgctaaatttgtgaatgctgtgtatgataccttacttaatactccatgctgtgacctacaagcaaactaaatagccaacatttctgaacccctaagtc

SEQ ID NO: 848665 - DNA, 100 bp, Homo sapiens
gacacctgcaagactgtgaggtttaaaaacaaaatctgtgttgagagatgtggaattagaagaagctattagaagaagtcttgaggaaatgtaattaaag

SEQ ID NO: 848666 - DNA, 113 bp, Homo sapiens
tttacagatacttgccagaactaatacagctgatgaaatacctgaccttttctgctccagcaattctgtggtgttcttggtcacacatttatggagtttctgaagggcagtgg

SEQ ID NO: 848667 - DNA, 100 bp, Homo sapiens
tagagaaagacagatggaagtctttaagacttttggaacagcgatcgtaatcaatcctgagaaagacaaagacatggtccaagacctgttggacttcaag

SEQ ID NO: 848668 - DNA, 116 bp, Homo sapiens
cgacatgacggacaacatcccgctgcagccggtgcgccagaagaagcggatggacagcaggccccgcgccggatctctcgtggaagaggaagaccaacacatgaaattgtcccttg

SEQ ID NO: 848669 - DNA, 98 bp, Homo sapiens
agctttctaacaatgagtggtgctactgcttccagaagcctggaggcattgaatgccccagaggagcccgaaacctcccaggcttggtgcaggaagga

SEQ ID NO: 848670 - DNA, 98 bp, Homo sapiens
tggaattgaccctcaaaacatgttcgagttctgggatcggaacggggccgactacgctgtttacatcaacacagcccaggagtttgatggctctgact

SEQ ID NO: 848671 - DNA, 99 bp, Homo sapiens
gtactgcgagcagtatgtctcctatttctgcaagatgtcaagattgttgaacaccccagaggatgttaagcaagtttttggacagaccacaattcatca

SEQ ID NO: 848672 - DNA, 98 bp, Homo sapiens
aaggaaagagctgggcccactgcctgatgatgatgacatggcttctcccaaactcaagctgactctctggcctgacaaccaatgttgtggacattatt

SEQ ID NO: 848673 - DNA, 100 bp, Homo sapiens
aacaagcaagtccttggcctcagcaaacttgcgagtgatgactcgtggcactgcctccagcccctcctatagattcatattgaatgatgggacaatgctt

SEQ ID NO: 848674 - DNA, 98 bp, Homo sapiens
tggtttgcaacatccttcttctggataacactgtacaagctttcaaagtcaatgaggtgttgcccatggcccccggggccccacaagttactactaca

SEQ ID NO: 848675 - DNA, 98 bp, Homo sapiens
cgaggccaaccttcaggaggaggagtagatatgtttgacgacttctcagaaggcagagagtgtgtcaactgtggggctatgtccaccccgctctggag

SEQ ID NO: 848676 - DNA, 98 bp, Homo sapiens
gcgcatctacttcctggaggagcgcatgcaacagaagtatgaggccagccgggaggacatctacaagcggtgccggtggtggtgtgcacattgagccc

SEQ ID NO: 848677 - DNA, 100 bp, Homo sapiens
ttttcagagaccttggcgataaagcatcaattcctgaagattgccaagcccctctccagcctcactccactgattgctgcagctaaggaggcaacaaaga

SEQ ID NO: 848678 - DNA, 113 bp, Homo sapiens
ctaatgtcgaatatattccctttgatgaaatgaaggaaagaatactgaaaattgtcactggatttaatgggtaaaaatgttgtacatcagctctcagtaaccctagaagactt

SEQ ID NO: 848679 - DNA, 100 bp, Homo sapiens
tctgcggagccgggctcgggtcgccggagccgcgccccaccccgccagctccagagccacgaggactcacgaatggcagtggaagatacatctctgctgc

SEQ ID NO: 848680 - DNA, 99 bp, Homo sapiens
agatccgctgctgctgaggagaggagcgtcaacagcagcaccatgggtcagcccaaggccaaccccactgtcactctgttcccgccctcctctgaggag

SEQ ID NO: 848681 - DNA, 100 bp, Homo sapiens
ggactaatagctggcaaatttctgttccatcagcgtttgtttgtgcaaatatcttactggatgaagcttttactgctaaaatatctgactttggccttgc

SEQ ID NO: 848682 - DNA, 98 bp, Homo sapiens
gcaggacaccgacatggaacagggactcactggggatcttgagccagatgattgtgcatccatttacatctttaatgtagatccacctccatctactt

SEQ ID NO: 848683 - DNA, 98 bp, Homo sapiens
gaacacctccggccccggtgactgaagagatgctacagcgggttggatggcaagcatgtggtgtttggcaaagtgaaagaaggcatgaatattgtgga

SEQ ID NO: 848684 - DNA, 100 bp, Homo sapiens
gagactgcaatggggacacgccaaacctgagtttctacagaaatgagatccgcttcctgcccaacggggatcattccagaataacagtaaatactagaaa

SEQ ID NO: 848685 - DNA, 99 bp, Homo sapiens
tcaactcctgaaagaacactctgaacttcaggagtacttgattcttcagaaaacctccaaagtagatgtggactcaagtggaaagaaatgcaaagagaa

SEQ ID NO: 848686 - DNA, 100 bp, Homo sapiens
cccaaggaggcggtcaccgtggccgtgaagatgttgaaagaacaagcgagtgagcatcaataaagatgagctgaagtcaacgtcaaaagctgtcgaaacc

SEQ ID NO: 848687 - DNA, 100 bp, Homo sapiens
gtaccagcactccaatttgtatgccatatcaggccctcagtaccgcctggagaagcagagcgagcccaatgtcgccgttgacctggacagcactttggag

SEQ ID NO: 848688 - DNA, 98 bp, Homo sapiens
tcttctaagctgaataaagctgttttggaactgtcaggtacctcaaagcgtttttcgttggaatatacgttgcacatttatggcgattctgagtgtga

SEQ ID NO: 848689 - DNA, 99 bp, Homo sapiens
gaagcagagcaatgggagagaagcagaatattcggacaaacacggacagtatctcatcggacatggtttgaggagttcctacagcggaagtggtcctct

SEQ ID NO: 848690 - DNA, 98 bp, Homo sapiens
ctccctctaagtaccaccgaactcgatctgggggagccagggatgaacgatatcgatcagttgattatggaagattcccacaagagtaccacgtcaga

SEQ ID NO: 848691 - DNA, 100 bp, Homo sapiens
gaaataatggaaatcaatgaaaaactcgcagaagctgaaagtgaagctgccatgaaagagattgaatccattgtcaaagatagcagactccttgaaagca

SEQ ID NO: 848692 - DNA, 100 bp, Homo sapiens
tcacaacttggttcaatgggtagcctcaccatgaaatcacagcttcagatcactgcggccctccaggcactgaagcgtaagaagaggtatgagaagcagc

SEQ ID NO: 848693 - DNA, 51 bp, Homo sapiens
gaggaactcagccctgattgcgtcttctcaagtcttaggattgcagcaaca

SEQ ID NO: 848694 - DNA, 98 bp, Homo sapiens
catggccgatgggggcgagggcgaagacgagatccagttcctgcgaactgagatattgatcaacaagagatgattccaagtaagaagaatgctgttct

SEQ ID NO: 848695 - DNA, 99 bp, Homo sapiens
aaatgtccggcaagatcgagaaagcagatgatttcaagctttttagatcagcaagccatcctgtttgtggacactgctgatcgcctggcctcgttagct

SEQ ID NO: 848696 - DNA, 98 bp, Homo sapiens
cacttttgagtgcaactgccttccagttggtgtgaccccatatggttatgcatcccggtttgagatccactttgatgacaaatttgatgtgtcttttg

SEQ ID NO: 848697 - DNA, 100 bp, Homo sapiens
gacaccttctaagagtttggcgagtcagtgactgaagcgcccgtccattccaaggatatgacagcgcgtgatctgctacagcagagatacacccttccaa

SEQ ID NO: 848698 - DNA, 100 bp, Homo sapiens
accggaggtgcctaagaaaattgtggtagaagaaaaagtacgtgttcctgaagagcccagagttccaccaactaaaggtcccgaggaggtagaaatcaag

SEQ ID NO: 848699 - DNA, 110 bp, Homo sapiens
tgaaaaaatgtctgtcacatatgatgattccgttggagtagaagtgtccagcgacagcttctgggagatcaacctctccacttctcctacacctgcacagttaataagcc

SEQ ID NO: 848700 - DNA, 100 bp, Homo sapiens
aaaggaaaagttggtgattctctgctagatgttgtggttgaaaataatctagatattgatggctttggccaagaagcttgagagaagaaaaatttcagaa

SEQ ID NO: 848701 - DNA, 100 bp, Homo sapiens
gcaaaagctctaagggataaagacgggcaggtcgatgcccgattctttggacaacatgacaggtctccaattgagaaacatggcactgtttttcctgcac

SEQ ID NO: 848702 - DNA, 100 bp, Homo sapiens
gatggctgtcccctggagccccactgccctgaggctctggtaggctgtgggcagatagagaatctcagttccaagatgagatgggattctccaacatgga

SEQ ID NO: 848703 - DNA, 100 bp, Homo sapiens
caatattgttgcacagactagctcagattattgctactctgtattcagatcttcatgtgtctcttctaagctgaataaagctgttttggaactgtcaggt

SEQ ID NO: 848704 - DNA, 98 bp, Homo sapiens
caacattgattatgtttactatattctcattttttgctgagcagtgtgctggaattgatgttcgtctgtgtgatgttggtgaggccatccaagaagtt

SEQ ID NO: 848705 - DNA, 100 bp, Homo sapiens
tcattatttattgatgataagctgaaaaagggagtcaaagggtctgttcggcacttgaagtactccttgtttaagaaatcactactgggcagtgtttcgg

SEQ ID NO: 848706 - DNA, 100 bp, Homo sapiens
ttttttatccgtggagagcgactcagggacaaaatgggccgttgctccagggagaactgcaaatatcttcatccacccccacatttaaaaacgcagttgg

SEQ ID NO: 848707 - DNA, 100 bp, Homo sapiens
tttaaagctgagctgcgaggaaaatggcggcgggagagcttttcatcctactataaaggaggatttgaacagaaaatgagtaggcgagaagctggtctta

SEQ ID NO: 848708 - DNA, 100 bp, Homo sapiens
ctcaatatctgtcttcggtggactccttcggcagtccacccaccgccgccgcctcccagacacagaaactgatgaccagcaacttgaggaagtaccatta

SEQ ID NO: 848709 - DNA, 98 bp, Homo sapiens
ctatgatgccaacgtgtccttcaatgtttcccgggagctcttcttcatcaacatgtggcagaaggttttaaatgcacagagagcaggatacaaggcag

SEQ ID NO: 848710 - DNA, 100 bp, Homo sapiens
agacttggactgagccacgctactggcacctcttgcaaatagtctctcaggggacttctcagcctccattaattgcgtctcacagatttcaagcctggct

SEQ ID NO: 848711 - DNA, 100 bp, Homo sapiens
gcctccagcctgcgcgctctgcgaggacacgctctgctgcggagatcagctggacatcatctccatggcggagacaaccatgatgccagaggagattgag

SEQ ID NO: 848712 - DNA, 98 bp, Homo sapiens
gccggaccggggcgggtccagtcccgggcgggccgtcgcgggagaggatgactttgacaacgatgtggatgctctgctggaagaaggcctttgtgccc

SEQ ID NO: 848713 - DNA, 104 bp, Homo sapiens
gaccccgaactccaggacagcatccaggcctcattggacagcattcgaggaagatgttaccgagtacttcagtgaattccttagtgcaggggaacggagtcttg

SEQ ID NO: 848714 - DNA, 60 bp, Homo sapiens
ccatgagagtttggcttggattatctcaacattctgttgtggccacagatgtctttaatt

SEQ ID NO: 848715 - DNA, 100 bp, Homo sapiens
acgagactgtctcagcccatccctacaagccaagctataacatcagaaatggtgaatgaatacaagaaaattcttttgctgaaaggatttgagctcatgg

SEQ ID NO: 848716 - DNA, 98 bp, Homo sapiens
cgatcctgccggagccccgccgccgccggcttgctcaaatagctataactgtaccaaagacatggaagaaaccaaaagatcggacccgaaccactgaa

SEQ ID NO: 848717 - DNA, 98 bp, Homo sapiens
tggaaaatgggagctgtatatcccaccaaagcagaataaatctgtactcgtgcctcatggatccaaattaaaggagatgagtatgatgtatgtgccat

SEQ ID NO: 848718 - DNA, 99 bp, Homo sapiens
aaggaaacctttccaacacagatgtccaagctgccaacgcaaatctgtccaaggctgcctggggagcattggagaagaatggcacccagctgatgatcc

SEQ ID NO: 848719 - DNA, 98 bp, Homo sapiens
cttgccgactgaaagggacatctacagggctgagtgtttggtcccttaagctcctaggatttttagatgttgaaaatactccctgcgcccggcattca

SEQ ID NO: 848720 - DNA, 98 bp, Homo sapiens
gcagtcaaccctaaacagtggactcaacttcaaagacgttctcaaggagaaggcagacctggggacacttgacattcagggacgtggccatagaattc

SEQ ID NO: 848721 - DNA, 98 bp, Homo sapiens
gaactgagcccaggccacagtaccctattcacgctctgtgcttgtgccaaggatctgctgtatatccttccaactcacattcaggcagcaagagccgg

SEQ ID NO: 848722 - DNA, 100 bp, Homo sapiens
catgccccgctacgagctggctttaatcctgaaagccatgcagcgggtgatgacacaatgactggtgatgggggagaataccttaggcctgaggacctaa

SEQ ID NO: 848723 - DNA, 98 bp, Homo sapiens
cctccgttcctaccatgagactagcaagatgaaagtgctgagattcattgcagaggcgcgggcggtgatgaactttgtggttcgctaccggccagacg

SEQ ID NO: 848724 - DNA, 51 bp, Homo sapiens
agttgttactactatacctaatgcagcaaatattttggtgatgggtgtgga

SEQ ID NO: 848725 - DNA, 99 bp, Homo sapiens
agctgctcaaacagcagcttaaagatcagtatttcatgcaaagacatcagctacttaagcgccacgagaagagtaaagctaaaacattttgagaaattt

SEQ ID NO: 848726 - DNA, 100 bp, Homo sapiens
atttcttcgagacactcatataaagatactgcttctaaactaggacccatagaagctatccagaagtcagtccgattgtttgaagaaaagaggtaccgag

SEQ ID NO: 848727 - DNA, 98 bp, Homo sapiens
gcctgatgcgatatagctacctcagattggagaaaatttgcctcaaagcgagtctcaaaggtgttcctggatttgggtatgactttgcagctgtcctt

SEQ ID NO: 848728 - DNA, 100 bp, Homo sapiens
ctgaactagatgaagaatacctaatagaactggaaaaaaacatgtcggatgaagagaaacaggtgatgatgaacagtctacacagatggctgcaagttgg

SEQ ID NO: 848729 - DNA, 100 bp, Homo sapiens
gtgacatatcgttggacccagaattgagtgtggtgctcaccttgggcacatttttgatgatgggcctcgtccaactgggaaaagatactgcataaattcg

SEQ ID NO: 848730 - DNA, 100 bp, Homo sapiens
cagatttcccaagagcagcggaaaatgatccagtcacagctggatgaaaaagaaagtcggcgtctgttccaacagatcctttctggtgtggattattgtc

SEQ ID NO: 848731 - DNA, 100 bp, Homo sapiens
agaagatgacgacctctggaacaggtacaggtttgcagattccgccagcagcacagcaagctctacagatgagtggctctttggcatttggtgctgtggc

SEQ ID NO: 848732 - DNA, 100 bp, Homo sapiens
ttggcagccgttttttgagagcagtgaagacctaggaaaggacgttgaatttgaagttgttggtgatgccccggaaaaagtggggcccaaacaagctgaa

SEQ ID NO: 848733 - DNA, 99 bp, Homo sapiens
ggcaatcatggcgccacctgtgagatactgcatccccgatgctggctatgagtttgacatctgcttcacctcagtgcagaagagagcgatccggaccct

SEQ ID NO: 848734 - DNA, 100 bp, Homo sapiens
gatgctatgagtgtggcgaaaagggacattatgcttatgattgtcatcgttacagccggcgaagaagaagcaggccaaggcaggtgaagcaccaactgag

SEQ ID NO: 848735 - DNA, 99 bp, Homo sapiens
gcctccctcgtgagttgggcttggtaccgtgctgcccagaatgcccttcgggagcgatgcggtttcactatggtgtccaggctggtctgcaactcccgg

SEQ ID NO: 848736 - DNA, 100 bp, Homo sapiens
cccagagccaagtgcgagcccagcgggagaaaatcaaggaggcatcatgacggtgatgtcagctctgtcggtggccccctccaaggcccgcgagtactcc

SEQ ID NO: 848737 - DNA, 99 bp, Homo sapiens
atggctgcggccgccgcctccgcctcccaggatgagctgagatctcattttgcccaacggtggtactccagcaggtacttcaagtccagcttcttcatc

SEQ ID NO: 848738 - DNA, 100 bp, Homo sapiens
tgaaggtggtgtgttttttctggatatcacattttcatcagattatccatttaagccaccaaaggacatggatttgattgacatactttggaggcaagat

SEQ ID NO: 848739 - DNA, 100 bp, Homo sapiens
ttggagacaagtctttggtgatgaaaagaaatattggctacttccaatattttcaagaaactggcgatggaatatgagaggagccctctggaaagaaaag

SEQ ID NO: 848740 - DNA, 99 bp, Homo sapiens
tcctcaaactgactttgcagccacggagagaaactaaagttacagagtggagaggtaacaaaagaagagaggcagcctgcatcagcccagtccacccca

SEQ ID NO: 848741 - DNA, 100 bp, Homo sapiens
ttttgttgaattaagtgaaactgccagcatactcatgcatgcaacagcacattctctggtgcttgtggatgaattagaaccaaacttgttttctcatgat

SEQ ID NO: 848742 - DNA, 100 bp, Homo sapiens
tgatttggaaaataattctgaaactggagagttacagcctgtactacctgaaggagcttcagctgcccctgaagaaggccgaagaacagttgagaattgt

SEQ ID NO: 848743 - DNA, 118 bp, Homo sapiens
ctcctgcttcgtgggctaccagctgctgtctgatggtgtctcctgtgaaggtgtaaactgttttacaagaaagacaatgagtttaaagagaaaggcataggtactctgcatttaaaac

SEQ ID NO: 848744 - DNA, 100 bp, Homo sapiens
gcctgagccacctccgtcatctgggcccggggcctcaccgcgcaggctgccaaacgagggattctttcatctggtcggggcagaggaattcattcaagag

SEQ ID NO: 848745 - DNA, 98 bp, Homo sapiens
gacagaatcccatctgatggtcaccagtcaatctttgaggtttccccacttgctctggagcgggactgtgctgaagaccatgctggacatcctgcaga

SEQ ID NO: 848746 - DNA, 100 bp, Homo sapiens
aacataaaaagaaacgcctagtacaaagtccaaattcttactttatggatgtaaaatgtccagcactgaagataaaataccctcatcaacttgatcagaa

SEQ ID NO: 848747 - DNA, 99 bp, Homo sapiens
ccggtcggtttccggatgaaacgaggagccagaaatcccatgctgttggcccccaggaaatccgagagcgagccacagtcttgcagacggtatttgaag

SEQ ID NO: 848748 - DNA, 100 bp, Homo sapiens
tccgctcatcaccctggagactcaggtgtctttcctgaagactatcttcccgtctcaaaatggacatgatggatccacggatgtacagcagagagccagg

SEQ ID NO: 848749 - DNA, 100 bp, Homo sapiens
tgttggagcagtagacttctcacatctttttgtcacttcatcgtttgactggacagtaaagctttggacaactaaggaaatggaagttccagtattaccg

SEQ ID NO: 848750 - DNA, 98 bp, Homo sapiens
tttcctgctggtggcaaccgcctacgagacactcaagcttcttccagaccagctggtcttgcttctggagcatctcttggagcagaagactctgagcc

SEQ ID NO: 848751 - DNA, 100 bp, Homo sapiens
cccctgacctggctcaccctgtggcagaagtgggcaaggtggcagagaaggaaggatggcctctggacatccgagtggttttttgctccactcaagcctg

SEQ ID NO: 848752 - DNA, 100 bp, Homo sapiens
taccatgtcagccttcccagtagctgggaccacagtgaatgccaccaggatctgaacccaagattccagcctcggtcaccaccctgaccctgagaatgcc

SEQ ID NO: 848753 - DNA, 98 bp, Homo sapiens
tctccgcggaaatgttgtccaaagttcttccagtcctcctaggcatcttattgatcctccagtcgaggcacgcttaaaaaggcctcttaagagccttg

SEQ ID NO: 848754 - DNA, 98 bp, Homo sapiens
gaggatggcggagtcggggctcctgacgctgcctgtggaggaaccgattgtgtccacagatgaggtcatcttcccactcaccgtttcactggatagac

SEQ ID NO: 848755 - DNA, 50 bp, Homo sapiens
caacaacaaaatgccactttcaacacataaggccatgtggaagtgttaca

SEQ ID NO: 848756 - DNA, 99 bp, Homo sapiens
cgctctggggctcgccttgtatctcaacaccctgagtgcggatttctgctatgatgacagaaatgcactcggtgatggaaagagagccactattctgaa

SEQ ID NO: 848757 - DNA, 127 bp, Homo sapiens
gggaagagaacttagatttgacctgtgcaaggacctcagcagcttggacacagcccactgcagaggagctcttacaggcaaaacaggatcttcaagatctgctgattgccaaagaggagcaagaaga

SEQ ID NO: 848758 - DNA, 100 bp, Homo sapiens
agaccaacagaggggcaaatcagagtgaagaggaagccagaagatgggagagacatttttgaagtttttctatatgagtggagaagacagctgttaccag

SEQ ID NO: 848759 - DNA, 100 bp, Homo sapiens
atggcgctgcggccaggagctggttctggtggcggcggggccgcgggagctggcgcggggtccgccgggggaggcggaacttcagcgagagggaagcatc

SEQ ID NO: 848760 - DNA, 130 bp, Homo sapiens
atgagctggcctatgacccaaattatatgtcaccttttgcacagtttgcatgtgacaatggattgaatgtgagagtgtaaacaggaacatcgataagtagtgtaaaaacttgcacaatgaaatccgaagc

SEQ ID NO: 848761 - DNA, 99 bp, Homo sapiens
tgaaatcaaaaccttcatgccgattgcatgggcagcagcttatggtctgtgcaacactagggaccactggggtctgtgcatttgactgcctgtcagagc

SEQ ID NO: 848762 - DNA, 98 bp, Homo sapiens
agatggcggacagtgcggaactaaagggaatgaaagctactggttgattttaaagtgcctgggcctcacaggtttggagatgtcccagaataaggcac

SEQ ID NO: 848763 - DNA, 98 bp, Homo sapiens
cagtggggatggctataatggatttggtaatgatggtggttgggatccatatgcagggacttgggtgtgatgaaatgctgcagggttttgctgttgca

SEQ ID NO: 848764 - DNA, 100 bp, Homo sapiens
ctggtcgcctggaggaagccggaggcctgcgtggaggaggcgccccgcgcagctggctggcggagcatgagcgccccagctgctgatgcaaggaatcccc

SEQ ID NO: 848765 - DNA, 98 bp, Homo sapiens
tgatattgaggatgacaggctggcagctatgttcagagaatttacccagcaaaatttgagcattatgaaagatgagccagaagaggctgagttaattt

SEQ ID NO: 848766 - DNA, 100 bp, Homo sapiens
cctccgcctccgcctccgccggcgcatcgcggacgcccagcagatccctttaagatgtaccatgatgatgacctggcagatttggtctttccctccagtg

SEQ ID NO: 848767 - DNA, 137 bp, Homo sapiens
gatcccactggaagacatccctgaagacgatgacgagtgctcggcctggctgcacaagctctaccaggagaagggactttgaacatgtcggggatcgccctcagcagactcgcccaggagaggaaagcatggaggaa

SEQ ID NO: 848768 - DNA, 100 bp, Homo sapiens
gagagtaaactgaaacaagtatatatcccaacctacatgacgacagagatgatggtgtggattattgggccaaaagaggaagaggtcgtggtacttttca

SEQ ID NO: 848769 - DNA, 100 bp, Homo sapiens
gttccttgcaaagggcacgtatagcattggtaaagaacgatcgtccagtggaggcctactctgtgtatgatgaagacattgggtactgtcaagggcagtc

SEQ ID NO: 848770 - DNA, 100 bp, Homo sapiens
cggaccccccaacaccctctacgaaggcggctacttcaagctgactttggtgtgtctgccaagaatctgaagactctacagaaacgagattccttcatcg

SEQ ID NO: 848771 - DNA, 101 bp, Homo sapiens
cagcacttctaccagtggatatatttttggtttcttacatgaaaaatcaaaatggtacatttaaggattcaatacttgagaagaccagtgcttactccaga

SEQ ID NO: 848772 - DNA, 100 bp, Homo sapiens
tgatagctctttggatttaccaacagttagtggccagcatcctcctgctgcagatgtgattgatctcactggagatgataaagatgatcttcagagagca

SEQ ID NO: 848773 - DNA, 99 bp, Homo sapiens
cgagcgttgggtgtggaacatcattctcaccaccagtctcttctctggttcctaaaagtaaagctttagaggccaccaaattggcaattgaagctggct

SEQ ID NO: 848774 - DNA, 99 bp, Homo sapiens
accatcactgatgctcccggctttgaccccctgcgagatgccgaggtcctgcggaaggccatgaaaggcttcggtcaccttcttgactcctttgcccgt

SEQ ID NO: 848775 - DNA, 105 bp, Homo sapiens
agttgagaatttatcctcaagagtcagctggcagagctgtaggtaaaacttgcctactgatcagttacacaaccaatgcatttcctggagaatatatccctactg

SEQ ID NO: 848776 - DNA, 99 bp, Homo sapiens
ctcagtgtcctcatctgtgaagtgagacctgtcatttactccatcctttatagtgatgctacaggacgaagaggaatggataaaaacattggcgagcaa

SEQ ID NO: 848777 - DNA, 98 bp, Homo sapiens
gagcgacgtggctattgtgaaggagggttggctgcacaaacgagaaaccaccatcatgggttcgggtcccatagaccccaaagaacttctcaagggcc

SEQ ID NO: 848778 - DNA, 99 bp, Homo sapiens
cagcttgttcctgaggctgagccggagaacaagattgtggaccagtgtgagaggctgcagttacagagtgctgccatcaccaagtatgtggcggacgtc

SEQ ID NO: 848779 - DNA, 99 bp, Homo sapiens
tttttttcccctgaccacgttcgcgatggtgaaaggtgtagcagtcactcggcctacacccacagcatcgaccttgtgaacccagcgacctgactgcct

SEQ ID NO: 848780 - DNA, 100 bp, Homo sapiens
gtgagttcaacatgatagagcagagtggaccaccccatgaacctcgactactccaaaggattcggcgggaagtatggggtgcagaaggatcggatggata

SEQ ID NO: 848781 - DNA, 98 bp, Homo sapiens
ccaagtgatcattaataaagcttttcttggttccttcagtggtgttggtagtaaaatgggttacaaaataaatgccatttgaacagtgccatctgtca

SEQ ID NO: 848782 - DNA, 100 bp, Homo sapiens
ccgaggccgggaggccgtgcccggaggcatgtcagagcgggagcgacaggtgatgaagaagctgaaggaggtggtggacaaacaacgcgacgagatccgc

SEQ ID NO: 848783 - DNA, 98 bp, Homo sapiens
ccgaacttgcgacaagttgccggagccgcggggcgcgggcggcggacagattgaccttcagagcgaggctaacctctgctttgtggacattgacaacc

SEQ ID NO: 848784 - DNA, 100 bp, Homo sapiens
aatgaagaattattttgcaccactggatgttgtttactggcagctggctaagagtcttgggcaggctggtgaaattgagcctgaaacagaaggaatacta

SEQ ID NO: 848785 - DNA, 99 bp, Homo sapiens
gccctaccgtgtgcgcagaaagaggaggcgctcacagtgaacactagtctgaatgtataccgaaataaagatgccttaagccattttgtaattgcagga

SEQ ID NO: 848786 - DNA, 100 bp, Homo sapiens
atgctcgatgctcaagctgcagctgaaagagaaggatgaactcatttcccaacttcaggaagagctgaagattctagtgttccagaaactccagataatg

SEQ ID NO: 848787 - DNA, 99 bp, Homo sapiens
tctcccctgcccagtggatggtccagacccaaggaaggagtgaattgaaagctaaggaggggctcagataaccctacctcctgcttcatggagaaagtt

SEQ ID NO: 848788 - DNA, 100 bp, Homo sapiens
ctcctcgccagcagccgtccggagccagccaacgagcggtggtccattatggctgacatgcaaaatctggtagaaagattggagagggcagtgggccgcc

SEQ ID NO: 848789 - DNA, 100 bp, Homo sapiens
cctgattatgtatggcgcggatctcaacatcaagaactgtgtggcagatatgctgttggagctctgtgtcaccgagttggaggatgtggccacagactcg

SEQ ID NO: 848790 - DNA, 98 bp, Homo sapiens
gaagccggagtgtaggcggcagaggattcgctcccagagcagctgcggccaggcccgatttcccgccaaccactcggggcgacctcgggtgcctcgct

SEQ ID NO: 848791 - DNA, 132 bp, Homo sapiens
gtgctctcaaactttactttgcctcatttgaggagtgggaacaggcttcggcgaacacaaaggtgaagctcgtgtgtggagtgccacggtacaatcagacgacagatggacagtgtgacaaaagtgtcagaa

SEQ ID NO: 848792 - DNA, 98 bp, Homo sapiens
acaaattatgctgcagcatattgtactggcctgctgctggcccgcaggatatttgaatggtggtacttccataagcatggcacatcttttattgagca

SEQ ID NO: 848793 - DNA, 98 bp, Homo sapiens
taaagaaaaagacaaatacaagtgaaaaaaatagactaatggattaacgtccctgtcgtgtgacattttctgacggaagtgaaaatgtgacaggattg

SEQ ID NO: 848794 - DNA, 100 bp, Homo sapiens
agattgctgtaaaaaatttcaggattggtactacaagaataaccagcataagctgactttatcgatgaggccagatgacaagtatcacgagaagcaggca

SEQ ID NO: 848795 - DNA, 100 bp, Homo sapiens
atgcgctcaaaggcaaaaagggatcttaccaacagtatcattacagctgtgttcctttcagtagttgccatcttggccatgcaagaaaagaaaagaaggc

SEQ ID NO: 848796 - DNA, 100 bp, Homo sapiens
acttgtgaacattcaagtgaagcaaaagcctttcatgattatgtggtggtatcatggatacagaaatgtctgaagatatagaccacaacttaactcctac

SEQ ID NO: 848797 - DNA, 100 bp, Homo sapiens
tacacctctctaaaattgctgcctctggtggggaagtggaaggttggatggcaagcatgtggtgtttggcaaagtgaaagaaggcatgaatattgtggag

SEQ ID NO: 848798 - DNA, 100 bp, Homo sapiens
atttgctgtcagccatgaacggatggatgtgatgcctgctagccaaaaggaaaaagcttgtggtgaaggggggcaaaaaaaagaagcaagttctgaagtt

SEQ ID NO: 848799 - DNA, 101 bp, Homo sapiens
cccaactcccaccccatccagtggaatgcaccacagccatctcacatttccaagtacattctcaggtggagacctgaatactcccccagttgcaagaggcg

SEQ ID NO: 848800 - DNA, 99 bp, Homo sapiens
tgagagccccctggatgggatctgcctcagcgaatcagacaagacagccgtgctcaccttaataagagaagagctctactttacgaagtgtttctactg

SEQ ID NO: 848801 - DNA, 99 bp, Homo sapiens
agacgctgcccgcgggcccggccacggcggagccaagggctgaagaagatgcagagcagcctgaagctggtggactgtatcatcgaggtccacgatgcc

SEQ ID NO: 848802 - DNA, 98 bp, Homo sapiens
ttgctcccaatatctactttctgtttttttcctatggcattgttgtaggtgcaattaaaaactagcatttctagtcagtatgtaattcggatgcagcc

SEQ ID NO: 848803 - DNA, 100 bp, Homo sapiens
ccaccttcagagcgtcacggcgtacgccctcatggggaaaatctccccggtgactttcagctgaagacctaactgcagcatgtctgtatttggagatggg

SEQ ID NO: 848804 - DNA, 100 bp, Homo sapiens
gactcctggcagaggctgagagtgaactttcatgcactaaagaaaaggtagctacagcaagctgggtagcaggcagatccaaaggatatcatgaagtttc

SEQ ID NO: 848805 - DNA, 100 bp, Homo sapiens
gcaccacgaagtatttatggttgcagatcaggtgcaaacggggcttagagagaaagagacttagtgataaaactgggcctgtagctcaagagaaaagttg

SEQ ID NO: 848806 - DNA, 100 bp, Homo sapiens
gagtggatgaacatgtgcttggtgtcgtttttccttgagctgaacgtcttgcaacagtggccgcacgcatagaagttaccccccaagcgtccagaactcc

SEQ ID NO: 848807 - DNA, 100 bp, Homo sapiens
tcgcaatcttcctgcattgtacacagaggcggaggagctgtaccagaagagagtgctgaccataaccggcatctgcatcgccctccttgtggtcggcatc

SEQ ID NO: 848808 - DNA, 100 bp, Homo sapiens
gaggctgtggtggatctttctgatatggctcgtggacagcagaaaattcagtctcagcagaaaaatgccaaaaagcaagctggacaaaagaagaaacaag

SEQ ID NO: 848809 - DNA, 100 bp, Homo sapiens
ctttcttatactctagaatatacaaagacaaaaggagattctgatgaagaagttattcaagatgctgcagaaccttggcctgaaaatgctacattatatc

SEQ ID NO: 848810 - DNA, 126 bp, Homo sapiens
cttgacacggatatcacctttgccactgacattgcagagctgtgggctgtgttccacaagttcaaagttcgatcctttggtacagaagacagaccgacagatcgtccaataccacctcgagatgaa

SEQ ID NO: 848811 - DNA, 100 bp, Homo sapiens
gtttgtgcaggacaccgacatggaacagggactcactggggtggtatgtgtgcaacagagagaaattatgcgaatcactccaggctgtctttgttcagag

SEQ ID NO: 848812 - DNA, 99 bp, Homo sapiens
gagaacttagaggatgcttctcaatgcaagaagttaagaagctctttcgaatcaagttgtccccaacagtgggaacagcgcttaaagtttttgaaacaa

SEQ ID NO: 848813 - DNA, 100 bp, Homo sapiens
cagctctgcgccgatctatgcacgcagatgctggagaagtccccttatgaccaggctgctttgactctcccgcgaagacctttccttcactgttctactg

SEQ ID NO: 848814 - DNA, 98 bp, Homo sapiens
tggccgtgccctggggctgagccctcaggccaagactaaggggctgcagagcggggtggacattggcgtcaagtactcggagaagcaggagcggaatt

SEQ ID NO: 848815 - DNA, 98 bp, Homo sapiens
aaggggagctggtgggaggattggatattgtgaagacagtaaacacagtggatcattcccattctactacagtggaaaagccaaacaatgagacagga

SEQ ID NO: 848816 - DNA, 98 bp, Homo sapiens
caacttgtccacgacaccggctacttctcagctttaccatccctggaggagacctggcagcagcttgcctgggaccagtggcagggaccccggaacct

SEQ ID NO: 848817 - DNA, 98 bp, Homo sapiens
aaagaagaagatggagaagaaatagttacctatgatcatgtagaaatccctgaaaatcctgaggcatatcttaaaatgaccacaaaaactttgaaagc

SEQ ID NO: 848818 - DNA, 100 bp, Homo sapiens
ttcagcaggattcaggagcgtggcgaccaggctttcactgagagagaagctactgaccatgatgcccacggaggaagagcggcagaagattgaggaagcc

SEQ ID NO: 848819 - DNA, 100 bp, Homo sapiens
cgaagacctccctaccatggtcaccttgggcaattccttcctccacaaactgtgctctggacagtcattttgtttactcattcagccctgttgcaggtcc

SEQ ID NO: 848820 - DNA, 100 bp, Homo sapiens
actgttactaccatggacatgtacggggatattctgattcagcagtcagtctcagcacgtgttctggtctcagggaccagttactctccacaagaaaatt

SEQ ID NO: 848821 - DNA, 99 bp, Homo sapiens
tacgataggccttatgaggattcctcacaacattactacgaaggagctgcttttctaacccaaactgtatgtcttgatgacactacagtaaagtttgaa

SEQ ID NO: 848822 - DNA, 99 bp, Homo sapiens
gcaactttaaagaagcagaagaagtctttgaaagaatatttggtgatccaaattctcatatgggagaaaactggttgtcctggatgtttgaaaagttgg

SEQ ID NO: 848823 - DNA, 100 bp, Homo sapiens
gcttggagatctggggaggggagcagtatgaaatctccttcaagaaactggcagacctttcacttcgtatccaacaaattgaaacaactctcaatatttt

SEQ ID NO: 848824 - DNA, 100 bp, Homo sapiens
gtcgctggaaagcacccgtcgtatgctgcaactggttgaagaggtttgacttgcagtatccagaggaaatgtggagaaacacagttgtacagaagggaag

SEQ ID NO: 848825 - DNA, 105 bp, Homo sapiens
cctaaagtccagagacagagcactaattaggcgcagttgtgtagcagttgagtaatgctggttagctgttaaggtggcgtgttgcagtgcagagtgcttggctgt

SEQ ID NO: 848826 - DNA, 99 bp, Homo sapiens
gatgacgaacatgagaatgaatcgaaacatgaagaactggcaggtttctaagcatgaattgaggaacagaagaagcagagcagatgatcggagcagcat

SEQ ID NO: 848827 - DNA, 124 bp, Homo sapiens
ggaaaaaacacggaagaggaagaggaaagcaaaggagtcagggatggctcttcttcagtatatgccatccgcgaggcagccaccagcaacctgaagaagctagtggaaaagtttgggaaggagt

SEQ ID NO: 848828 - DNA, 98 bp, Homo sapiens
ctggacggctcgggcgctggaggtacaagggatttaaaggcaactgttccatgaccttcattgatcagtttaaagcactacaccagtgtaacaagtat

SEQ ID NO: 848829 - DNA, 100 bp, Homo sapiens
catcccctgagcgcctgctgggtattgggagagttgctgctacatctttaggaaatttgactaaccatggttctgaagatttaccccttcctcctggctg

SEQ ID NO: 848830 - DNA, 100 bp, Homo sapiens
gacggctccaccatcgtccccggcgagcagggagcggagtaccagcacttcatccagcagtgcacaggatacttttgtggaactctatgggaacaatgca

SEQ ID NO: 848831 - DNA, 100 bp, Homo sapiens
actcacagagttagagagagggatggtgggtatacctcagttaccatgtgccaaagcattatacaactatgaaggaaaagagcctggagaccttaaattc

SEQ ID NO: 848832 - DNA, 100 bp, Homo sapiens
gtccaattcttcctcggtgcgctggcaggcccactgtctgacactgcacatctacaggtgaaattcgatgctactgtgatgctgcccactgtgtagccac

SEQ ID NO: 848833 - DNA, 99 bp, Homo sapiens
atcagtggctgcatcacgggaggagctattggtttcagagctactcagctgcttaagctggcccacaagtacagaccagagacaaagcaagagaagaag

SEQ ID NO: 848834 - DNA, 100 bp, Homo sapiens
cgggacggggcgcgaagccggaggctccgggacgtggatacaggacaactacacctttgcccaacctgggattcaaatgaaagtgaaaatgttagaagaa

SEQ ID NO: 848835 - DNA, 99 bp, Homo sapiens
gcagttccagaaattcttatgccggtctagatccaagcaaccaggcatcctctggtatcacgattccaaaacccccaaagccaccagataagccgctga

SEQ ID NO: 848836 - DNA, 98 bp, Homo sapiens
gccaaatgcacagccaagcctagcagctcgggcaaggatggtggaggcgagaacactgaggagtgctgaagctgctgaaagatggcagaagaagtggt

SEQ ID NO: 848837 - DNA, 100 bp, Homo sapiens
ctgccgcgacgcccggcccgcagggcagagaagttgatgacgcctgagatgttttcagaaatcctctgtgacgatctggatttgaacccgctgacgtttg

SEQ ID NO: 848838 - DNA, 100 bp, Homo sapiens
catggtgcagaaataccagtccccagtgagggtgtacaaatacccctttgaattaattatggctgcaagaaactatattcagtctttgactcagatgccg

SEQ ID NO: 848839 - DNA, 100 bp, Homo sapiens
aaatataagaaaacgtcccagaggtgtgttcatcctcgaggtggtgtgattcagagtgtttcttcatggaagcatggctcgggcacgcagtatgttagca

SEQ ID NO: 848840 - DNA, 100 bp, Homo sapiens
ctaagtactccggttcccagcttctgcaaaaggcagttcaattaacctccagaagatggctgaacctgcaggaataccagagcaagaaactgatgtctga

SEQ ID NO: 848841 - DNA, 100 bp, Homo sapiens
cagaaactgaggggacataatcatcactcagtagcgtggggtagagcagcggctgccatgctcttctgtggcttcatcatcctggtgatctgtttcatcc

SEQ ID NO: 848842 - DNA, 100 bp, Homo sapiens
gcaagaccactttgggctggaaatataatttcgctaaggagtttgtgatcagtgatcggaaggagctggaggaagatttcatcaagagcgagctgaagaa

SEQ ID NO: 848843 - DNA, 98 bp, Homo sapiens
tgccgttacggccatcacggcggccgcagtggcgtcctggagccctcctcagttcttcgtgccatgaaggaggacagtgaaaaagttccgagcttgtt

SEQ ID NO: 848844 - DNA, 100 bp, Homo sapiens
gggtgtatgtgttcatcaaggacaattgcatgcacttacagagctgtcacaagatgaaggtagaggcacattatacaaatacagacctgaagaagtagat

SEQ ID NO: 848845 - DNA, 100 bp, Homo sapiens
actggatgtcaagcattgtgcatagttttcttcgattgttgcaacatcccttgcgagaatacagattctgttcatcttgctctgaaattaaataattctg

SEQ ID NO: 848846 - DNA, 100 bp, Homo sapiens
aagatattctaaacctggagagttctccaacagcttcaggttcatcagtgaattttgaagattgcaccggtcgacaaaggacagcctatttttccctcga

SEQ ID NO: 848847 - DNA, 98 bp, Homo sapiens
catgagccccctgaggccccagaactatcttttcggtggtttgtgatgaaaatggttccaagggctatggatttgtacactttgagacgcaggaagca

SEQ ID NO: 848848 - DNA, 101 bp, Homo sapiens
aaggaataatttatgaagctccgttgactaccgtggagagatcataatttggggttcaagattccaggtagttgatgtcacttggcgatattcctgcaaac

SEQ ID NO: 848849 - DNA, 100 bp, Homo sapiens
atggcagccatttatttgtcccgtgtggatatcaaagtattgcagagtgccttagcagccatccgacatgcccgctggttcgaggaaaatgcttctcagt

SEQ ID NO: 848850 - DNA, 100 bp, Homo sapiens
gacccagctcttccaggactttgagccagtccagaccctgctgctgtcttcaaagaagacaggggcaagtgtccgagtggtgaatcagctacttacagag

SEQ ID NO: 848851 - DNA, 100 bp, Homo sapiens
tgtgagtttccttttggttccaagcagaaggaggtctgcatcaatccctaccactataagagagtagaaagccctggagttgatccctgaattttattat

SEQ ID NO: 848852 - DNA, 98 bp, Homo sapiens
tgtctcaccccagctctggaagctcctgcaaaatcttccttattctgaaaagatgacagttttgtttgtctacaatggccctcatatgctggaaccaa

SEQ ID NO: 848853 - DNA, 100 bp, Homo sapiens
tttaatcaacatcttggcaagagtcttctggtccctgttgacccatatgaaggattaaggcctcaggatcttcgtagactaaaagatatgcttattgtgg

SEQ ID NO: 848854 - DNA, 50 bp, Homo sapiens
ggttgaactgtggagtgtgtggttacagaatgtctgaaggggacagtgtg

SEQ ID NO: 848855 - DNA, 100 bp, Homo sapiens
aactgaggaatcctttgcaaagggcctacttgaagaagtggtcagctaaaggaatccaggttgttggttggactgttaatacctttgatgaaaagagtta

SEQ ID NO: 848856 - DNA, 98 bp, Homo sapiens
gttttgtttatataactcaagttgtttggctaaattcttcaggccaacactggacaaattgatgacccccaggagcagcacagagtcatcagcagcaa

SEQ ID NO: 848857 - DNA, 100 bp, Homo sapiens
ccaccctgaattgcccttgtaggacccagaacagctaccagcagaatcaggtagattttcgttccgtcacccaggctggagtgcagtggtgtgaccttgg

SEQ ID NO: 848858 - DNA, 98 bp, Homo sapiens
tgctggacacagagcagtcgtatgtggagtcgctgcgcaccctgatgcagattattcagagctgggagagcttcccccacgatctcctttagaaccag

SEQ ID NO: 848859 - DNA, 100 bp, Homo sapiens
aacaccaagatacctgtggaaaacatccttggagaggtcggagatgggtttaaggtggccacaaagcgggcacaggcctggtgctacagcaaaaacaaca

SEQ ID NO: 848860 - DNA, 99 bp, Homo sapiens
tccgatccaagtgaagccagctgccagtgagggccgaggagtcccatgagcgtgtaagcaagcgtctacatcagagattccaggcctgggtagataaat

SEQ ID NO: 848861 - DNA, 98 bp, Homo sapiens
acgatgagtgcgggcgacgcagtgtgcaccggctggctcgttaagtcgccccccgagaggaagctacagcgctacgaatgaggggagaatcatacttc

SEQ ID NO: 848862 - DNA, 100 bp, Homo sapiens
tccatcacccaccaacaacaccacaataatccacagccaagatctttaaatggatgagatggctaccactcagatttccaaagatgagcttgatgaactc

SEQ ID NO: 848863 - DNA, 98 bp, Homo sapiens
ctagcacaggacagccacctgctgtcgggccagctgcccacggctgaccccgcactacatctacccaccagccatcgtgcagcccagcgtggtgatcc

SEQ ID NO: 848864 - DNA, 98 bp, Homo sapiens
gctgccagcacacctgtgcccagtgcccccatcgacccccaggcccagctggaggctgacaagcgagctgtatacagttttgagtatccgaggagccc

SEQ ID NO: 848865 - DNA, 100 bp, Homo sapiens
caccatggggaatgggatgaacaagactattgcccagaagaaaagatgtttggttttcacaagccaaagatgtaccgaagtatagagggctgctgtattt

SEQ ID NO: 848866 - DNA, 100 bp, Homo sapiens
cgggggctcagagatccaagtgcgcgccctggcgggtccggaccaagccatggaattccatgaacacttgcacagcataggcaccaaggaaggtttgaag

SEQ ID NO: 848867 - DNA, 100 bp, Homo sapiens
gctttacgatgtcacttgggaagaggacgggaggggcaagctgcggccaaccaaggccaagagcgagcggaagaagaagagcttcggcctgctgccccca

SEQ ID NO: 848868 - DNA, 100 bp, Homo sapiens
caagggccatcgtggtggatcctgttcatggatgtggacgagtgctcactagcagaaaaaacctgtgtgaggaaaaacgaaaactgctacaatactccag

SEQ ID NO: 848869 - DNA, 100 bp, Homo sapiens
ccctgagcctcctgcaacacctgcggcctcactgggacccccaggaggtgaccctgcaggtcccagaacagttttcttctgggctccaattatgaaatgg

SEQ ID NO: 848870 - DNA, 100 bp, Homo sapiens
gaccgtgctggtctttctcaacctcatcttctggtgcagggacttcacagcccacacgggctacgaggtgctgctgcagcggcttctggatggcaggaag

SEQ ID NO: 848871 - DNA, 100 bp, Homo sapiens
gccatctttcttacaacgggcattgtcgtgtcagcttttggactccctattgtatttgccagagcacatctggacttggaaaaggagagtgacacacccc

SEQ ID NO: 848872 - DNA, 98 bp, Homo sapiens
tgcttgtaaactgaagatgtcaaattggcagggagcaattgacagttgtttagaggtaatgagggatcctgcaagcaaaagatcaagaggatttggtt

SEQ ID NO: 848873 - DNA, 99 bp, Homo sapiens
gccagtggtgctgcgggtgttcttttggggtagtgtctgggatccagtacgagttgaatcattgttcaaataagcctcgtgcaagccgaatactggcat

SEQ ID NO: 848874 - DNA, 100 bp, Homo sapiens
tgcgtgcgggcggaggccggcccccgagagccgccgacatgaagaaagacgtgcggatcctgctggtgggagaacgaagaggagcaggacttggatggtg

SEQ ID NO: 848875 - DNA, 100 bp, Homo sapiens
gcaattaccttaccgactaatatccagaggagaataatttggaagactgttgtgggaaactttgagggaaattttgagtcactggaccttgcggaatttg

SEQ ID NO: 848876 - DNA, 98 bp, Homo sapiens
aggtgacacaatcatctactattcatgatgttaagcaaaagtttcacaaagcatatgatgtgatgccagccacttactgtgaaattgatttagataaa

SEQ ID NO: 848877 - DNA, 100 bp, Homo sapiens
ttatgctaaatataaagaaacaagattgaaggaaaaggaagatgcactgactagaactgaacttgaaacacttcaaagttctgccattactgcaatagcc

SEQ ID NO: 848878 - DNA, 98 bp, Homo sapiens
ccgttaagtcccccaaagatgagatttacctgtgagatgtttcatcccaacagttctgccggagacttccatttggcctcaatgtgaaattaaagtag

SEQ ID NO: 848879 - DNA, 126 bp, Homo sapiens
cttacattacctgctatatctgtaaagggtatctgatcaagccaacaacagtgacggaatgcctccatacatagttactggaggtgaactgtttgaagacatagtggcaagagaatactacagtga

SEQ ID NO: 848880 - DNA, 98 bp, Homo sapiens
aaagcctctggaagaggtgaagttgggaaactgcggattgccaagttttaaaatcaaagatgggaaaatcggagaaaattgcccttccccatggccag

SEQ ID NO: 848881 - DNA, 98 bp, Homo sapiens
tgacacatcagcatttgtttcccttagccagcccgagcaagtaaagattggacagcctttcctgcctcagggaagaagagagagacagactacagtga

SEQ ID NO: 848882 - DNA, 100 bp, Homo sapiens
tgatgttgtcaagaagggcgctatttgtacttctaaatactccagtccttttccatgcactggaggagaggtgagtggcagtgtgatgagtgtttatagt

SEQ ID NO: 848883 - DNA, 98 bp, Homo sapiens
gaaggagaacaccccgagcgaggccaaccttcaggaggaggagcgttgggccggagcactagcctcacggagaaggatctgaaagaagccaaggcgcg

SEQ ID NO: 848884 - DNA, 122 bp, Homo sapiens
ctgggaaggcgtgggcgacccggtgtgtggcgcgcccagagccccgcgtttcagccctagggaagacggtctggaaaatcccgaagcagaagcccgtattcatctaggcattcaagatctcg

SEQ ID NO: 848885 - DNA, 100 bp, Homo sapiens
gttttgcgtgtgttgaaagtacaattctattgcacatcaatgatatcatcccagggaccagttactctccacaagaaaattcacacaaccacagtgctct

SEQ ID NO: 848886 - DNA, 100 bp, Homo sapiens
atgctgcctggcttgctggcacctctcaggaccctctctggaacccctgaagacttaattcagtgcacaaatgagatgaatgtgaacatcccacagttgg

SEQ ID NO: 848887 - DNA, 99 bp, Homo sapiens
ttttgctgtctcctcctaatacggaaggaaaacaggcttcgttggctgcagacttctccatcactcaatttaagcatcttggccggttgcttatggtgc

SEQ ID NO: 848888 - DNA, 100 bp, Homo sapiens
gccagatgttcctggggttactgtaaatgggaaggacaggcagagctaaacaagggggaaatttgcagtggtgagaaaatgtataaagaaagattctggg

SEQ ID NO: 848889 - DNA, 99 bp, Homo sapiens
gctttgggaaactggaatcctcaaaatgctgtggctcttcttccagagaatgacacaggtgaaagctggccaactggctggaaactcctctgttgagat

SEQ ID NO: 848890 - DNA, 100 bp, Homo sapiens
tggcggttcatggagagcaaggagaaggatcgccaggtgctggaggacttcccaacgcccgacggccatggaggctgaagagacgatggaatgccttcag

SEQ ID NO: 848891 - DNA, 98 bp, Homo sapiens
caagtttgagaatggaggccacggggggttcctggagtcttttaagcgggtcacagaaagtcgagagagccaaatgacgattgaggagaggaagcagc

SEQ ID NO: 848892 - DNA, 100 bp, Homo sapiens
gagaacgcggctaaagttctgatggagtctatgggtaaaacatcagggaagctgtttgatagcagtgatgatgacgaatctgattctgaagatgacagta

SEQ ID NO: 848893 - DNA, 99 bp, Homo sapiens
tgaactgtcaggcgggaaaacaggttaatgttgaagaaggaaaatgcggaagtcgtcatttgacaagttttataaatgagtatttgaagctcaggaata

SEQ ID NO: 848894 - DNA, 100 bp, Homo sapiens
ccccctcctgtgaggctagatgagtgaaagctggacattgaagaagccaaaatctgtttccaagaaactaaagagtgtattccgagtaccagatctgagt

SEQ ID NO: 848895 - DNA, 100 bp, Homo sapiens
caacttctgctacagacgactcagattttgcctaccattttacagtatttgtcttctattttggagcctttttattggaagcagcagccacatccctgca

SEQ ID NO: 848896 - DNA, 98 bp, Homo sapiens
tttccgacttagtcctcgggaagaagtttcagactacaaggtcccagtagggatggcacaatcagcgaggacaccatccgagcctctctcatctctgc

SEQ ID NO: 848897 - DNA, 100 bp, Homo sapiens
gcgtcggccacgttcagcggacacgggagcaagatggcgattccgggcaggcaaatggagatgtatgcatttcgattcttcatccgcctgtagatgaccc

SEQ ID NO: 848898 - DNA, 100 bp, Homo sapiens
tatcatggagggacattactatgatccacgaccgagaggagcggaagctgctgctggaccctagcagcccccctaccaaagctctcaatggagccgagcc

SEQ ID NO: 848899 - DNA, 100 bp, Homo sapiens
gaacctggcttttagctgaactaaggagaaagtcctacaacagtttggcgtgcaacatggggcttgagaaaggccaatggagatcttcgtggatgatgag

SEQ ID NO: 848900 - DNA, 100 bp, Homo sapiens
agagaggctgcctcctgcagcccccatagcagctcctgcccctcctaaagctgaagccaaagcgaaggctttaaaggccaagaaggcagtgttgaaaggt

SEQ ID NO: 848901 - DNA, 100 bp, Homo sapiens
aagacagtcctcgtcagcactgactttcagctatggaatcgaaagacttccgagtgcaggaactcccactggctcgtattaagaagattatgaaactgga

SEQ ID NO: 848902 - DNA, 100 bp, Homo sapiens
ggaagtggaaccggatatttaagtacaatggtgggcttaattttagaatttcagaaactgtggaggagtgtcactgtagattccatggacgaggagaaaa

SEQ ID NO: 848903 - DNA, 100 bp, Homo sapiens
catacagatcactggtcctttcttgctcccatgagaacaccaagagcccgatttcaaatggctgtactcatgaggcatttcatccttcatgaagccattc

SEQ ID NO: 848904 - DNA, 100 bp, Homo sapiens
gttcattctccttaacctgctaaagggacagagcagaatgggctgatatagatccggtgccgcagaatgatggccccaatcccgtggtccagatcattta

SEQ ID NO: 848905 - DNA, 100 bp, Homo sapiens
gaccgtgaagattccaagttcaggagaactcgaccggcaaatcctgatcctaactgttgtcttggagtatttgggctgagcttgtacaccacagaaagag

SEQ ID NO: 848906 - DNA, 100 bp, Homo sapiens
acctgtatctgtgcaggcaatgtgcaaagtggaagatgctttctacaaaggtgaactcaggctgaatgaggaaaaattatggaagaaaagcagaacggtg

SEQ ID NO: 848907 - DNA, 98 bp, Homo sapiens
tgctctgtgggcgggcggcagcgatgttcggccaggtggctccaaggagaggaagcagtgatgcattgagaaagacagaatccattgatgtaatggat

SEQ ID NO: 848908 - DNA, 100 bp, Homo sapiens
cagaggtggaagtccaagtcaaacgcagaaggactgcctcactgagcaaccaagaagcacagcaatggaggaaacagctatatgggaacaacatacagtg

SEQ ID NO: 848909 - DNA, 100 bp, Homo sapiens
agaaaaaggactagaacacgttactgttgatgacttggtggctgaaatcactccaaaaggcagagagcaaggtccgtggtcctgtcagtggaagcccgga

SEQ ID NO: 848910 - DNA, 100 bp, Homo sapiens
tctcagaagatcagagaactagagtctatgatcggcatagacccaggtggcgggacaggcttcattgggacagccctaacccagctgctgaatgccagag

SEQ ID NO: 848911 - DNA, 100 bp, Homo sapiens
cgagttactcatgagaccagtgcccatgaaggtcagactgaggtccaagcatctcattttgaaggcctaatcacaaccatagttgggtatatacttttag

SEQ ID NO: 848912 - DNA, 98 bp, Homo sapiens
ggtaccgtgctgcccagaatgcccttcgggagtcaccattactttaagtactgcaaaatctcagcattggctctgctgaagatggtgatgcatgccag

SEQ ID NO: 848913 - DNA, 98 bp, Homo sapiens
cgggatctcggctgtccttcctcccggtactccaaagattcaggtttactcacgtcatccagcagagaatggaaagtcaaatttcctgaattgctatg

SEQ ID NO: 848914 - DNA, 99 bp, Homo sapiens
caccttagtttgcaccgagagaccatttgcagcgggtgctccatacttgcttgcagtgcctacgtggctctggctttgggtgataacctcatggctttg

SEQ ID NO: 848915 - DNA, 100 bp, Homo sapiens
acaagagaatgctgcttatctaccagatatggctgaacatgaccaatggagatcttcgtggatgatgagacgaagttgacgctgcatgggttgcagcagt

SEQ ID NO: 848916 - DNA, 99 bp, Homo sapiens
ttggatccgcgggacaagaaaattcatgcgatcttgagccagatgattgtgcatccatttacatctttaatgtagatccacctccatctactttaacca

SEQ ID NO: 848917 - DNA, 103 bp, Homo sapiens
agctgttcccaaaaagccagaagtcccaccagcaaaaggggaacactgtgaagaacatgttgcttttttcaaacagatttttggagaccaagctctaatgagg

SEQ ID NO: 848918 - DNA, 98 bp, Homo sapiens
aaagttcaaaaactgaaggactctgaagctgaggttgcactgctgtgatccatcctcatctcctaaagatgcatcctgacttatctccacacttgcac

SEQ ID NO: 848919 - DNA, 98 bp, Homo sapiens
aaaatgtgtgtgaattggatttgatcttccatatggataaggctggaatcgatggagaaagcatcggcaactgtcctttctctcagcgcctcttcatg

SEQ ID NO: 848920 - DNA, 137 bp, Homo sapiens
gaacagaaagaagaaaacaagggaggagaagacaagctaaaaatgattcgggaatatcggcaaatgaaaacctcgtcattaaagacaaatttatcagaagatgggtgcacaaagaaggctttagtggcttcaagagg

SEQ ID NO: 848921 - DNA, 98 bp, Homo sapiens
cggcatttcctccctgaagcctccagctttgtgtccctggtgatgttggaacattaatgatggaacatggccaaacttcagtcatgatcctgaagcca

SEQ ID NO: 848922 - DNA, 98 bp, Homo sapiens
cagaaaagaagaaatgctcatctgaaattcatcacctctctggagtcttcaaactgaccaagcattgaaaagagtgttgcggagataggaacatggga

SEQ ID NO: 848923 - DNA, 75 bp, Homo sapiens
ctggagctgggccaggccgtggaggttgaatataagctgggattccaagtggacaatgttttggcaatggatatg

SEQ ID NO: 848924 - DNA, 100 bp, Homo sapiens
ctcagcgtcctcatgtggggggtaaaccactcggtcctagcttactctgccaccactgcccggcaggaggaagttccccagcagacagtggccccacagc

SEQ ID NO: 848925 - DNA, 100 bp, Homo sapiens
ctttgtaacacccggaagtctgaagaggaccattcttagtggcactggggaaatcttggcacccagaagaattcaactgcgctcactgcaaaaatacaat

SEQ ID NO: 848926 - DNA, 98 bp, Homo sapiens
aaaggcgcaagtcgagaggaaactgttgtgcctcttcatattggcgatcctgttgtctgcaagctttcttcctggtggcagatgacatcatggattca

SEQ ID NO: 848927 - DNA, 100 bp, Homo sapiens
agatcatcaagcgcaagcacaccctaccgaattacaagatcaggttttgcactgattgcaaaaataaagtcctccgagcatacaatatccttattggtga

SEQ ID NO: 848928 - DNA, 100 bp, Homo sapiens
cctgttcagtactgtgggtgatatttgcctttagtgcactcttctccttcacagtaaagtggctggtagtaggcctgtatcgattatgtggttcggcagc

SEQ ID NO: 848929 - DNA, 98 bp, Homo sapiens
aactcgggcagaacggtctggataatggttccctgtattgaacactgatatacaaggaatgaatagaagtcaagaaaaacagacctggtgggaaaaag

SEQ ID NO: 848930 - DNA, 141 bp, Homo sapiens
tactgttctatcaattgatttcaaaccttcagaaatagaagttggagtagtgacagttgaaaatcctaaattcagcagctaccaggaggcagcctgaacgtgtcagggcctgggcacgacacttgcctttcttggaggagt

SEQ ID NO: 848931 - DNA, 99 bp, Homo sapiens
tggacctaaatggcgcagcatgattttgttcctgcttggctaaatttctcaacaccacagtcagctaagtgtgttaacagggcacaaccattatgtgat

SEQ ID NO: 848932 - DNA, 101 bp, Homo sapiens
gaagcttggaacttctggacaagaaaaggcctggtttctggtggcctctatgaatcccatgtagggtccaggatgtgaagctgcagcccccagaagttgtg

SEQ ID NO: 848933 - DNA, 100 bp, Homo sapiens
atctgagggagaagcacaagatcatgcacagagaccagatgatgtgcttctgcatcgcactcatgatgagattgtcctcctgcattgcttcctctggccc

SEQ ID NO: 848934 - DNA, 100 bp, Homo sapiens
tatggagcgattttgcagatgggtacaggcatccttcacctgctattgttgcaagaacagtcagaattttacatacactactaactctggttaacaaaca

SEQ ID NO: 848935 - DNA, 100 bp, Homo sapiens
caaaaggctgggcgtagtggctcacacctgtaatcccagcactttgggaggccaaggagggcagatcacttcagacatgaagacatcttatccatcctca

SEQ ID NO: 848936 - DNA, 98 bp, Homo sapiens
aaataatccagagatttccacagaaggactgggatgatacaccttttccacagggaattgagttgcagggagaaggttttaaggtgaaaacgaagaaa

SEQ ID NO: 848937 - DNA, 100 bp, Homo sapiens
cgggtgggagtgacccgattttccagaagtggagcagatcgaggctattgccaagtttgactacatggggcggtccccgcgtgagctatccttcaagaag

SEQ ID NO: 848938 - DNA, 100 bp, Homo sapiens
cttgactcgtttggatcacaaccgagctaaagctcaaatgcgctggctccctccctccgaggctacttctcagggctggaagtcccgtcagttctgctga

SEQ ID NO: 848939 - DNA, 98 bp, Homo sapiens
aagatgaagtaaatgtgaagtcacatcagagggagcatcaaaatattcaggacttggatgttgtgggtgatggtatgcagtgtcctccttcacctttg

SEQ ID NO: 848940 - DNA, 100 bp, Homo sapiens
gaagacgagatccagttcctgcgaactgataaacgaagaggctggggacactgagaggacccagtcggcattggcactgagcagagcccggtccaccaat

SEQ ID NO: 848941 - DNA, 100 bp, Homo sapiens
cccactcagaaggtgccctctttgcaacatttcaggaaaacagagaaagaagtgataggagggctctgtagccacataaagaagatccctaatagtcatt

SEQ ID NO: 848942 - DNA, 100 bp, Homo sapiens
ccaaaaatgtgcatactcacagagttagagagagggatggtgggtttgaaagtattcttgaagggctgtttggacctgcattattaaaagatctcagttt

SEQ ID NO: 848943 - DNA, 100 bp, Homo sapiens
gtcacttacaacattaatcagatactgcatttaagcatatgtaagtggaactcagaaggcaacattccctgaacatactcttccaccagaatctcctcta

SEQ ID NO: 848944 - DNA, 100 bp, Homo sapiens
tacccctctaaagttcttggataaagcaaggtcacggcctccccacatcctttggctgaagcccacagtcctcatccatgaagcctcacccaccatgttt

SEQ ID NO: 848945 - DNA, 100 bp, Homo sapiens
ggcaggatgaaagtgagcagtccagaaagcggcttatcgaacagagccgggagttcaagaagaacactccagagggatgccagatgatatgaacttcagt

SEQ ID NO: 848946 - DNA, 99 bp, Homo sapiens
agcagccaacttcttcgccaaattaaagttttacaagatttaacctgtcatcaagacctgggattttggtgtaccttctccaggcaaattccgttcccc

SEQ ID NO: 848947 - DNA, 100 bp, Homo sapiens
tctcccgggatgtctcaggaattgagaacaatgacgaccaatagctcagatcctttccttaacaggaaatctgaaatagagtactatgctatgttggcta

SEQ ID NO: 848948 - DNA, 98 bp, Homo sapiens
gaacttgccctgtctcctcgcagatgagattaatcctaccatatgaaagatttattaaaggagaagaagataagcccctgcctccaatcaaacctcgg

SEQ ID NO: 848949 - DNA, 100 bp, Homo sapiens
ggcgtcttccgtgggcaacgtggccgacagcacaggcttgctatgggtgttctccaggatcaaagtgtgactgcagtggcataaaaggggaaaaggtgag

SEQ ID NO: 848950 - DNA, 100 bp, Homo sapiens
atggatgatgttgaagttgtttatacaattggtcatgagtgacactgaatatgcagagtggctgaggaatcattttttagctgaaaccagcattgacaac

SEQ ID NO: 848951 - DNA, 129 bp, Homo sapiens
tgccgctgttctttgtttccccggtgtctgttgcagcttgcgtttggggctttcgacatgacaggtcactagagaattatatccagatcgagagacagaagattctgaaagggttcaatgaaatgagag

SEQ ID NO: 848952 - DNA, 99 bp, Homo sapiens
ccgaactcgggttctgacaagatggccgggctgccccgcaggatcatcaagttagaacctggcccattagatgaaacccagatcgctactatattaaga

SEQ ID NO: 848953 - DNA, 100 bp, Homo sapiens
caccacgtactggctagacttatacttctcaaatcttaatttcctaaagatgcatattggatatctaaatagagatatcaagaaatgaagatatgcattt

SEQ ID NO: 848954 - DNA, 98 bp, Homo sapiens
cgctcatggattctgcctgacgagttccagctctttgttgctcagatgtctcacgcagccaccagtgccttctgccgttccattaagctgcagtgtga

SEQ ID NO: 848955 - DNA, 98 bp, Homo sapiens
gcctggcctcgaggccgctgctgctggcgctcctgtcgttgggtatgtacaagctgtgaggacaacgcagaagccaatgggttttgtgtagagtgtgt

SEQ ID NO: 848956 - DNA, 100 bp, Homo sapiens
cagatctacttgaaaaattaagtgaattgatttggttggaatgctcttttaccgatgctttaacatacagccactagatctggaaagcatgaagactggg

SEQ ID NO: 848957 - DNA, 98 bp, Homo sapiens
gaactttgaaaaaaatgttggaagccattgggctgccagaggaacccgaccagaacctgtccagccctgaggaggtgttccactctggccactcccgc

SEQ ID NO: 848958 - DNA, 100 bp, Homo sapiens
gctgcgcatcgagtttgagcagaatctggcggccaacgagcaggcggagaacctgtggagtacgtacgcgcacgcgggggcgtttgtggagaagaaaggt

SEQ ID NO: 848959 - DNA, 100 bp, Homo sapiens
attgtatctgtttttctcagaagagaattccacaagggcatgatgccattgtcacactcctgaagcattataagagaccacaagatgaattgccctgtaa

SEQ ID NO: 848960 - DNA, 100 bp, Homo sapiens
gctgaggtccactactccctcctgaaaggtacaggtttgcagattccgccagcagcacagcaagctctacagatgagtggctctttggcatttggtgctg

SEQ ID NO: 848961 - DNA, 138 bp, Homo sapiens
gagcgatttgacaggaacatcgcctctttccatcgaacattccgagaatgcgagagaaagagcctccgtcaccacatacttcttggacacttaatgattgttggcaagaaatgtgctgctgatctgggcctgaataag

SEQ ID NO: 848962 - DNA, 99 bp, Homo sapiens
gaagattcaccaaataagctatatactttggttacctatgtacctgttaccactttcaaaagaggaatgccagctcctgagcaggcctcattggtggag

SEQ ID NO: 848963 - DNA, 100 bp, Homo sapiens
tgacagtgatgataacatgggtgccaaaaatacttcaataggagaagaatttatatccacagaagctggctcctctcattcaaaaaaaacaactggctct

SEQ ID NO: 848964 - DNA, 100 bp, Homo sapiens
cctgccgtccaggctgtgtatcaaaagttcaaaaggtgatgacctatcaacagccattctcaaacagaagaaccgtcccaatcggttaattgttgatgaa

SEQ ID NO: 848965 - DNA, 100 bp, Homo sapiens
cttcctcctcctcccgcgacggcttcaacggaccacaccaaaatgccatctcaaatggaacacgccatggaaaccatgatgtttacatttcacaaattcg

SEQ ID NO: 848966 - DNA, 100 bp, Homo sapiens
ccgccttggtagcagcgggtgacatggaaggggcagtacaagcttacgtctctgctcttcagtacaatcctgtggttgctgtatatggaactttatctga

SEQ ID NO: 848967 - DNA, 100 bp, Homo sapiens
aggcccatgtcaagaaggcctgagatctcccaccatcagctacagccaatttgtcagtcacgtgattttacaacgagatgctgctctccatagggatgct

SEQ ID NO: 848968 - DNA, 98 bp, Homo sapiens
tggggcccaactgctactatgacaaatccaagtcgttcttcgacaacatctcttctgaactcaagaccagtgatgaaaagcgggaatgtgctccggct

SEQ ID NO: 848969 - DNA, 100 bp, Homo sapiens
tgtttcaatattggaagcgctttgatttacagcagctgcagaacccttaggagaaatcttgagagtggacagcaattgtgaagatcgccagagagttctg

SEQ ID NO: 848970 - DNA, 100 bp, Homo sapiens
actagaacaagaagaagaggagaggaaaaaggaagagagcactgcagccagtgaaaccactgaggtcagcccaaggccaaccccactgtcactctgttcc

SEQ ID NO: 848971 - DNA, 100 bp, Homo sapiens
agaagagatgctggcgtgaaggggcaatggatttagaagtaccggtattggccaggaacatccccgggaatgctgccgtggtgaagcatgaagtcacagg

SEQ ID NO: 848972 - DNA, 128 bp, Homo sapiens
tccagggaaggaagcaaagcaaatggagaatggcatgctggtgacggacagtgcagggaagcaactgcagaggggtttttctgtaagactgaagatgacttcaatgattggtgccagcaagtcaaaaa

SEQ ID NO: 848973 - DNA, 100 bp, Homo sapiens
tagagcttttacagaaggatgtggtacagctccatgctcctcgatatcagtctatgagaaggagatgccctgtatccaagcccaatatgggacaccagca

SEQ ID NO: 848974 - DNA, 100 bp, Homo sapiens
gatgatgcggaaattaaccccaagggagatgcagttaaagacttgatgcttcgctttctgggtgaaaaagctgcagcaaagagacaagtcctaaatgccg

SEQ ID NO: 848975 - DNA, 100 bp, Homo sapiens
cgagctcagttatggcacacacagtgggacctagacaaagggagagggtgaccgacatcccaactagcaattctgtggtgttcttggtcacacatttatg

SEQ ID NO: 848976 - DNA, 99 bp, Homo sapiens
ccggagtccggatccgatcccgctctgcacattccaaaggcactgtttagtacagctgttgaaatgaagataaaacaatcagcagaacaactggaagat

SEQ ID NO: 848977 - DNA, 98 bp, Homo sapiens
caccttatcttagagttattcaaggggatggagtagatattaataccttacaagaggtctattctggataagcaggttttgtgaagacatttattctt

SEQ ID NO: 848978 - DNA, 99 bp, Homo sapiens
tgaatgtgcgcatttccattatgagaatgttgagttcggcagcatacagtactatactggcaattgctggagaagattttgcaattgttgcttctgata

SEQ ID NO: 848979 - DNA, 98 bp, Homo sapiens
tgccatggccttctacgttgtgaaaatggaaccgcggggaaaggcgaatgggtgcttttgaatgtgttcgtaaagtgtatcagacagatggactaaaa

SEQ ID NO: 848980 - DNA, 122 bp, Homo sapiens
tgacctgattgcctgcctgcttcagggctgctatcaacgaagagatatcacaggagctgaaggtccccctagaggagtatgtccacaaacgctaccccgggctggtgaaggtggtaagaaat

SEQ ID NO: 848981 - DNA, 113 bp, Homo sapiens
aaaaaaagagaaacctgggtgaactttcacggacaacctcagaggacaacgaagtgttcgatgatgtctttctacctaaagatattgacctagacagtgtggatatggatgag

SEQ ID NO: 848982 - DNA, 100 bp, Homo sapiens
tccaaccacgtcccgctctccccagcatttccacagacctgccacagcatgttccgaagagatgattggaagatggaagtggagggttaaataatgaaat

SEQ ID NO: 848983 - DNA, 99 bp, Homo sapiens
cattggtatctacggcctggacttctatgtgactccagcgggaggaagaagaggcctttgccagcagtcagagcagccaaggggcccaatccctcacat

SEQ ID NO: 848984 - DNA, 98 bp, Homo sapiens
ccaaaactgaaagaagtggatgatgtgcttggtggagcagctgcctgggagaatgttgactctactgcaggatgctggtcgtttactatatattggcc

SEQ ID NO: 848985 - DNA, 99 bp, Homo sapiens
acattatctggttttgtaataacacgaatgtgaaggctgtgtctgagactcctgcagtgccaccagtttcagaagatgaggatgatgatgatgatgatg

SEQ ID NO: 848986 - DNA, 100 bp, Homo sapiens
aggcctggaagaaattgacagagctttgggcattcctgaacttgtcaatcaggaggatttgacagctaaggatattgaagaaattattgatgagctcaag

SEQ ID NO: 848987 - DNA, 100 bp, Homo sapiens
gttcacgaaagcctacaaaagtgtggagaggttccttcaggaggatcagcacctggctgcagtggaagaaagaaagatcaagtccctggtagctctcttg

SEQ ID NO: 848988 - DNA, 100 bp, Homo sapiens
gagaagccagtcacgccgggagctggtacacagcctcaggatttccatttaaacagggttaatttggaagaatcttcaggagtggaaaactctccagctg

SEQ ID NO: 848989 - DNA, 100 bp, Homo sapiens
tttggaggcagatctggaaacagtgtagcagcattggttttccaaaaaatgtgagactttttcttggacgaattcagaagtgtatgctgacttgtaaagt

SEQ ID NO: 848990 - DNA, 98 bp, Homo sapiens
cttaaatggggatctggtggtcgtgaaactgcttcccgaggagcattggaagacaggtgatttggcttctgcacagttaggaggagcaccaaaccgat

SEQ ID NO: 848991 - DNA, 51 bp, Homo sapiens
ccacggccggaatggcagcaagctcagattgatcgtgtcctgtgctgaaga

SEQ ID NO: 848992 - DNA, 100 bp, Homo sapiens
aaataagctatatactttggttacctatgtacctgttaccactttcaaaaagtttgccagatccggcccggtgcctgggttccaggaggacacgctgcag

SEQ ID NO: 848993 - DNA, 100 bp, Homo sapiens
ctccagaaaacctaccagaagcttgggaaggagctggaaaatttggattatttagccttcaaacgtcagcaggcacctgaatggacagaagaggacctca

SEQ ID NO: 848994 - DNA, 100 bp, Homo sapiens
agaaggacctggagccctgggatgcaggtgaactcacagccaatgaggaacttgaggctttggaaaatgacgtaaaagcgtggatacccatcaacgaagt

SEQ ID NO: 848995 - DNA, 98 bp, Homo sapiens
tctcttcactcgagagatgaggacactgaaattcagagaggggaagtgatttgcctcagcttgtactgtaatcaaatgcaaagcagctgtgctatggg

SEQ ID NO: 848996 - DNA, 100 bp, Homo sapiens
ctggactgatctccatgtcctgttgtggggcttttacagcctttggaggaagcagaccagcccactacagagccaggcatggtcctggacagtgtggaag

SEQ ID NO: 848997 - DNA, 98 bp, Homo sapiens
aaccactacactcctgtgcgtacggccaagcagactccagtcatcaccatatttaagggtaaagtggaagaggtggagctgcctgtggagaaggtgga

SEQ ID NO: 848998 - DNA, 51 bp, Homo sapiens
ggggactactggtgcctgcgctgaaaaagttacagcagatgaatggaacag

SEQ ID NO: 848999 - DNA, 100 bp, Homo sapiens
agcctctgcaaatctgggacaaaaagatctgggacatgagcgatgatgagaccatctgagatggccccgctgtggggctgacttctccccggccgcctgc

SEQ ID NO: 849000 - DNA, 100 bp, Homo sapiens
gagaaggacaacacctacttagccagtccgagagtcttgatcagatccccaacaatgtggcccatgctacagagggcaaaatggcccgtgtgtgttggaa

SEQ ID NO: 849001 - DNA, 100 bp, Homo sapiens
agagtcagcggtatattagttcagttaccactaccaggatcaaaatggtttcaatcccagaatactatgaaggcaagaacgtcctcctcacaggagctac

SEQ ID NO: 849002 - DNA, 99 bp, Homo sapiens
ccaaattatagagctaattacaactttcggggcatgtacaatcagaggcctccccatggccacccatggaccagtcggcattcacttcctcccttctgc

SEQ ID NO: 849003 - DNA, 100 bp, Homo sapiens
ggatgtatataccaaagtgaaatgtaaaatagagagtttcaatattgatcactatagaagcaggattggggtgcccaacagaagaaagcaaatagatcat

SEQ ID NO: 849004 - DNA, 100 bp, Homo sapiens
tgacccagcagggactccaaggggtggagctgggaacattcctcataaagcgagtcgtcaaggagttgcaggtgagcgagtgctgtgctttcatgggcct

SEQ ID NO: 849005 - DNA, 100 bp, Homo sapiens
ctgaaaggaaatgacggattttgctggtctccaatttctggcctcaagtgatcctcctgccccagcctacgaagtagtcgtgattacagacatgcttcac

SEQ ID NO: 849006 - DNA, 98 bp, Homo sapiens
tccattggctgttcttcgagtagctgggccctggggcatgagtacagtaccagaagttatcgttgcacggcactgtggacttcgagtctttggcttct

SEQ ID NO: 849007 - DNA, 100 bp, Homo sapiens
agatagcggacatagctccagaaggaggggaagcatttctagtggcgtttcttacgaagagtttcaagtgaggagatgttaaagtaacccatcttgcagg

SEQ ID NO: 849008 - DNA, 98 bp, Homo sapiens
aatcacagaagaaatgccactgttggagggttgccacaccatttggaggttttgaaaaagcatcaagaatggttaaatttaaagttccagattttgag

SEQ ID NO: 849009 - DNA, 100 bp, Homo sapiens
ttggtaatattgctggtgacaatgcagaatgcagagattttgttttgaattgtgaaatacttccacctcttttagaggccttaaagcggctgacaatgac

SEQ ID NO: 849010 - DNA, 100 bp, Homo sapiens
caacatctgtgtcctctaccagacctcgctgacaactctcacacagattcggctgcagatactcacaggtgacatcactcaaaaaggatatgaaaagaaa

SEQ ID NO: 849011 - DNA, 98 bp, Homo sapiens
tagacagtgatcaagaagatcccctaaaaaaggatctatgtttatgaaaataaaaaggaagcattgcaagctgtcaagatgatcaaagggtcccgatt

SEQ ID NO: 849012 - DNA, 100 bp, Homo sapiens
atcggtgatgccgcaaagaatcaagttgcaatgaaccccaccaacacagtttttggtaagaatgattgatgttggctgatattggagtgctcattcacat

SEQ ID NO: 849013 - DNA, 100 bp, Homo sapiens
gacttcgtcgccaagctggccaacaacacgcaccagacaaaactgtgtggagttttatcctatattcataattacattgtggatggctgggtggtatttc

SEQ ID NO: 849014 - DNA, 98 bp, Homo sapiens
agaacactattcacaaagattgcctgcagtttattgaagtgtcggaggaaggcttccagattccagctacaataacagaacgatataaagtcggaaga

SEQ ID NO: 849015 - DNA, 100 bp, Homo sapiens
agctaataaagagaaccgagaggcacaaatggctgccaaactggaacgtttgcgagagaagaaacctgctcctccaaagccagagcccaagcctaaaaag

SEQ ID NO: 849016 - DNA, 100 bp, Homo sapiens
cctccaacttagtgatgaagagatgagtttgtttacagctgttgtcctggtatctgcaggtttctttacctccagaaagaagaatattggccccttgaat

SEQ ID NO: 849017 - DNA, 98 bp, Homo sapiens
cggcatgctggagaagctggagttcgaggacgaaggtgcaacattagaggaaatcaatcagcactgggactggctggaacaaaatctcctccacacct

SEQ ID NO: 849018 - DNA, 99 bp, Homo sapiens
tttggggcaccacagagatgcgggcaccagaagtcatcagaatgcaagataaaaatccatacagctttcagtcagatgtatatgcatttggaattgttc

SEQ ID NO: 849019 - DNA, 100 bp, Homo sapiens
ttggacacagatcaattacgtgtattcatggagtatggacccaacttccccagtgtgtgggctctggatcagtatcattatacgaggtagaaagatgtca

SEQ ID NO: 849020 - DNA, 100 bp, Homo sapiens
aatgtgagatgtctccagcatttttacggacccaatcatgagcactgctttaatagggactcgctgattcttgagaagagtcaaaactggagctctcaaa

SEQ ID NO: 849021 - DNA, 100 bp, Homo sapiens
attacagctggaaacaattgatttgctcttacgtatttgtgtgacttgactcttcaaacacaaaggacatggatttgattgacatactttggaggcaaga

SEQ ID NO: 849022 - DNA, 100 bp, Homo sapiens
ctcgatccgcccacagacctcaaattcaaagggttctatggcctggatgagtctgacctcgacaaggtcttccacttgcccaccaccactttcatcgggg

SEQ ID NO: 849023 - DNA, 100 bp, Homo sapiens
aggcacatgtacgacgtggaacagcattctgtcaactagaattgtatgtagaagccttcaaacagtggccgagctgcagaactccttgccaaagaacagg

SEQ ID NO: 849024 - DNA, 100 bp, Homo sapiens
agctgtcagttttctgtggatgaagggcatccgcttcgatcctgaaattccgcaaacactacgactagagtttgctaaggcaaacacgaagatggccaag

SEQ ID NO: 849025 - DNA, 100 bp, Homo sapiens
acacgggcagcgtgggcatgtctctgaccatctggacggtgtgtggggtcctgtcactatttgatacagctgcccgtctttcatatcagaaaaatgctgg

SEQ ID NO: 849026 - DNA, 100 bp, Homo sapiens
acttccttgtgaaacctcctagtagaaaaagttcttgggacaaacttcatttgtgaacagagtatctgtcaggcaagagctgctgtgatggtttatgatg

SEQ ID NO: 849027 - DNA, 100 bp, Homo sapiens
agaaagccctaccacaagaagcggaagtatgagttggggcgcccagctgccaacaccaaggtcagaatggcggcagcggagcatcgtcattcttcaggat

SEQ ID NO: 849028 - DNA, 100 bp, Homo sapiens
ctgcgggagcagctgccccgctacctcatgggggagacgcagctgtgcaccacaagcattcaacagaaggtgtcaaattgacagctctcaatgacagcag

SEQ ID NO: 849029 - DNA, 100 bp, Homo sapiens
taatggctgcactctttgtgaattcgatacagtcgacttgtctgcagtagataaaagttttagagacagtctttgatgaagtcatcatggtagatgtctt

SEQ ID NO: 849030 - DNA, 100 bp, Homo sapiens
cgaagaagagaccatccatatttccagatgtcatgggaacagacatgtcttggagaggtgcaccctgggatctgtccaggatcagaaactcttggagcca

SEQ ID NO: 849031 - DNA, 100 bp, Homo sapiens
agaagaaacagatcaaacctatgagaatgtcctggctgagattcagtctttcgaactgcctgttgaagctactttaaggacctcagcagccatgtcgaag

SEQ ID NO: 849032 - DNA, 99 bp, Homo sapiens
caagatcaacgcgagcaagaatcagcaggatgacggatctgactgcagccatgagcagcaatgagtgcttcaagtgtggacgatctggccactgggccc

SEQ ID NO: 849033 - DNA, 100 bp, Homo sapiens
cagacagatcgccggggaggcagcgcgggatcccagcctcaggcgtgcgcggacggtgtgcggatgcaccagcaaggaatactgaagaccgatgatctca

SEQ ID NO: 849034 - DNA, 100 bp, Homo sapiens
ggacactgctgtggacagtctcagtgctgcaactactactatgaactctggtgcagttgtgaaaaacttcaggacaaaaatgtttcatttaaggacttgt

SEQ ID NO: 849035 - DNA, 110 bp, Homo sapiens
ttttctgttttgcctgaatacatgatttaaacaagagatttccacagaagtgtgtgcaggaacggagaataaactgagctctctctctgacctggaacagcagtaccgag

SEQ ID NO: 849036 - DNA, 99 bp, Homo sapiens
ttggacgtcctgcagggtcgtgtggctgagctggagcacggtcagcagatccggaagctcatcaaagatgggctgatcatccgcaagcctgtgacggtc

SEQ ID NO: 849037 - DNA, 100 bp, Homo sapiens
ccctttttaatattggccaatcatcaagacaagccagcagctcgctcagtacaagagcggatattcaactcctttgtttacactgagaaaatctcaaatg

SEQ ID NO: 849038 - DNA, 100 bp, Homo sapiens
gagttgaagcagttttctcagctgcctgctaacatagctgtttgcagttctaagcgggtccatatggaatatttgctggtagggatgcctccagaggact

SEQ ID NO: 849039 - DNA, 100 bp, Homo sapiens
tgaagacagatgcaccaacgagaggctgacccgcggctgattgagtccctctcccagatgctgtccatgggcttctctgatgaaggcggctggctcacca

SEQ ID NO: 849040 - DNA, 152 bp, Homo sapiens
gctgcgtgttgtccacccaagatggagttcctcctggggaacccgttcagcacaccagtggggcagtgcctcggaaaccctgatagattggtgtgatgaaaaggaacttaatttgatattaacaactggaggaacaggatttgcaccacgag

SEQ ID NO: 849041 - DNA, 100 bp, Homo sapiens
ccagcctgcaccatcgagatgcttcgagtcctggaggaggatccccaagtagggggagtcgggggagatgtccaggttggacacgagttgccgctggttg

SEQ ID NO: 849042 - DNA, 100 bp, Homo sapiens
actggtgtgcttttattactttcatctatacacttccagtgtcgaaggctggacaggttctgtacagagtaatgagatgtgtgacggctgcaaaccaggt

SEQ ID NO: 849043 - DNA, 100 bp, Homo sapiens
tgatgaactggaactgaaaagaagtcttttatgtagagactctgcctatgacagtgaccccgagtatagctgtatgcaggagctattcttgaagtttgtg

SEQ ID NO: 849044 - DNA, 98 bp, Homo sapiens
tcagttctgatacattggagaccattgctcctggtgtcagttgtacccgaggcgttctcagcagcagcaagtacctgtggtggatttccaggctgaac

SEQ ID NO: 849045 - DNA, 98 bp, Homo sapiens
tgctgcttgagccaggtcatcgcaagtttgacatccgcttactccatctggaagcatttctcttatcaaatcaatgcatttaattaaaaaccctgtga

SEQ ID NO: 849046 - DNA, 100 bp, Homo sapiens
cctgactctctgaggctcattttgcagttgttgaaattgtccccgcagttttcaatcatgggttatgataattcagagagcagtgttcggaaagcttgtg

SEQ ID NO: 849047 - DNA, 98 bp, Homo sapiens
ccagctcctgaacaagacatggaaggaaatgagggcaacttctgaagacttcaacaagaaaacgttgtgtgacgtgatcctcatggtccaggaaagaa

SEQ ID NO: 849048 - DNA, 100 bp, Homo sapiens
cagggctacgcgcgctccgcgcagctcaggtcagccatgtcatctgagcctcccccaccaccacagccccccacccatcaagcttcagtcgggctgctgg

SEQ ID NO: 849049 - DNA, 51 bp, Homo sapiens
cgaaggagaagagagtactggcaggaacgactgaagctggtgactgttttg

SEQ ID NO: 849050 - DNA, 100 bp, Homo sapiens
tctttgcgtcaggctcggacgacggcagtgtcatcgtctgccatggcatggtgtacaagttgaagtcaaagaagggcttgttccggtttcagaggatcct

SEQ ID NO: 849051 - DNA, 100 bp, Homo sapiens
tccacgggttttagaaaaacaagaattacagcagccaacctatgttgccctgagttacataaataggattgttaaaatgagtcttcggaagcaaacccct

SEQ ID NO: 849052 - DNA, 100 bp, Homo sapiens
gtgggcatgatccataatcggtttcaaggtgcggcagcggatcggctactgcccgcagtttgatgccttgctggaccacatgacaggccgggagatgctg

SEQ ID NO: 849053 - DNA, 98 bp, Homo sapiens
tcaattttgcatgagaggattgaacaagagattgagatggaaatgaaaggccttcatggtgaaacacctcttggagtatacccaggcaacagagtcta

SEQ ID NO: 849054 - DNA, 98 bp, Homo sapiens
agacactggggacctcggaaggcacttctgcgggcagccaccctcgggctgcatacgccccatggctgggggttatggagtgatgggtgacgatggtt

SEQ ID NO: 849055 - DNA, 100 bp, Homo sapiens
taagatgtgacttgctcctgcttgccttcctccatgattgtgaggcctccccagccacgtggaactagtcgacttcaatgttcctatgaagaacaaccag

SEQ ID NO: 849056 - DNA, 100 bp, Homo sapiens
gggaagttcctttttgaagtagttccagtaccttccactggaagaatctcaaacagcgctacttactcaggatcagtggcaccagccaactcagctttgg

SEQ ID NO: 849057 - DNA, 100 bp, Homo sapiens
caaagcatctgagattgaatacaagctgggaaaggtcaacgaccggtggcagcatctcctggacctcattgcagccagaatcttgccctgtcgctcaagc

SEQ ID NO: 849058 - DNA, 98 bp, Homo sapiens
ggaccagagcccctcacgggcaccagggcttcgccagcgggccagcaacaaagtgcaagttcacatggatgcagtggagccaaccacaccagcatcac

SEQ ID NO: 849059 - DNA, 121 bp, Homo sapiens
gtgctcaattttctggctccctcgactggttgatcagcagattggaaagactggaagcttcttcagagatgggagcctcactgtattgcccaggctggtcttgaactccggagctcaagtg

SEQ ID NO: 849060 - DNA, 98 bp, Homo sapiens
ttcaaatggaaattagatgcaatattgaaaaacgtgcccaatttgttacacatggatttttacataccgttgctcaaaagagggctgcaagaagaaag

SEQ ID NO: 849061 - DNA, 99 bp, Homo sapiens
cctgggcttgccaaaggagctcactctctgggtggacccatgtgaggtgtgctgtcggtcccatgatgtgaaaaatggaggtgaacttactcatcccac

SEQ ID NO: 849062 - DNA, 99 bp, Homo sapiens
tgaagctgaatgatggtcacttcatgcctgtcctgggatttggcacctatgcgcctgcagaggtgctgtacttctttgcagtatacaaggactagcagt

SEQ ID NO: 849063 - DNA, 99 bp, Homo sapiens
taccgtgaagatcccattgtctatgaaattcatccaaccaaatcttttattagatcatccagcgggaggtattcactatgaaatgtgcatagaatgtcc

SEQ ID NO: 849064 - DNA, 98 bp, Homo sapiens
ggcaagtggacattttactggctcaattttcggctttgtgagaaaccttaccatcaaacacgatggccagcaacgttaccaacaagacagatcctcgc

SEQ ID NO: 849065 - DNA, 100 bp, Homo sapiens
agttgttggaaattctggcattctgttagacagtgaatgtggaaaggagattgacagtcacaattttgtaataagtttcgagaggcccgtgccatgagac

SEQ ID NO: 849066 - DNA, 98 bp, Homo sapiens
tgaaccgtcctggaatagaatgagaaagatcagtctaaagaaaaggagaagaaagtgaaaaaaacaattccttcctgggctaccctttctgccagcca

SEQ ID NO: 849067 - DNA, 100 bp, Homo sapiens
agaataaagccaagctcatctctgagacccggaggaggttcgaagctgagtatgtgacaggatttgaagcctagcaacattgttgtgaaatcagactgca

SEQ ID NO: 849068 - DNA, 100 bp, Homo sapiens
gtcagcacggagagaagctaagaagtctttcaatgatgatgctatgctgatcgagaagtttgtagacacaccgagttagttgaatccatggacatgaaac

SEQ ID NO: 849069 - DNA, 100 bp, Homo sapiens
ttgttgcctctcagcaggtggctgcccaggcatctgcatctggaatgtttcctggacaaagaaggtttccacttgagcggcacagtgacagaacctgcaa

SEQ ID NO: 849070 - DNA, 100 bp, Homo sapiens
tttaaaaagaactgttgagttttatcattttcgttaagtgaccgtgcgcagcgctgtaactggccaaatccttgtagctgtcttcttgccccggtcagtg

SEQ ID NO: 849071 - DNA, 100 bp, Homo sapiens
gtctggcatggactgctcttcctagggacagggtggagagattcaaccagttagcgtgaaagttggagataaagttcttctcccagaatatggaggcacc

SEQ ID NO: 849072 - DNA, 98 bp, Homo sapiens
ctgccactacaacaaaactgtctcaggtgtttttggctgaatacacaggacctctgctaatatacctcctcttttatttgaggatcccatgtatatat

SEQ ID NO: 849073 - DNA, 100 bp, Homo sapiens
acagcaataccaccttcagtacttggcaagatttgatgctcttgtgctcagtgacatcattcagctgattgggcagaaagtggcccatgctctggcagag

SEQ ID NO: 849074 - DNA, 98 bp, Homo sapiens
ggagcccgcgcgggctctgctgcgctggtggcggagcccggggcccggagccggcgcccccggcgcggaaagtgccagcgatgccgcccctctgcaga

SEQ ID NO: 849075 - DNA, 100 bp, Homo sapiens
aggctcctgtgccccgcgggcccctcctggctcccttggctgtcttctgcttgcttagactacttgcagagttttaaggaccaagaatcgccttcagccc

SEQ ID NO: 849076 - DNA, 100 bp, Homo sapiens
gctaataaatgtgtcttctgttggcgctttttgcctgaattcatcaatggagactttgattctattaggcctgaagtcagagaatactatgctactaagg

SEQ ID NO: 849077 - DNA, 99 bp, Homo sapiens
ttacaagcagcaagtgcgcggttggggccactgcgaggccgttttaggcctagtgatgaccactttgtacagatcatgtgtatccgaaaagggaagaga

SEQ ID NO: 849078 - DNA, 100 bp, Homo sapiens
catggagagcaaggagaaggatcgccaggtgctggaggacttcccaacggtctcagctgagtctgctctgatcacccaacaagacctagctccccagcag

SEQ ID NO: 849079 - DNA, 98 bp, Homo sapiens
cgaactccgatgtgcgcccattgtaaccaggtcatcaggtgctgatccttttagaggcagccgtggaagaggaaaagagatcagaagagaaaaggata

SEQ ID NO: 849080 - DNA, 100 bp, Homo sapiens
tactggactctacgtggatcagtatttgtatcactactgtgttgtggatccccaggagccactgaggcggctcccagctgcgttggcgacatggccgaca

SEQ ID NO: 849081 - DNA, 100 bp, Homo sapiens
aaaagacggacagcccatcgtgtgaactatagagtttgtggacagatttatattgggaccagttactctccacaagaaaattcacacaaccacagtgctc

SEQ ID NO: 849082 - DNA, 110 bp, Homo sapiens
ctgggccgtgtataggttgtcaaaattcacaaggcaaggtgactttgaaagtgcaggggacaactccactgtttcctttgccatcgtgcaagccagtccgaaggaccagg

SEQ ID NO: 849083 - DNA, 100 bp, Homo sapiens
agcattcagggaatttaggtgtagccagaagaaaatcagaaacatctgccaaagaaggtctgctgctttggtgtcagaggaaaactgctccttatagaaa

SEQ ID NO: 849084 - DNA, 100 bp, Homo sapiens
gggtggtctggagaccatggagaccctcacggagctgggcgacgagctgaccctgggagacatcgacggttccagcaacagatagaaatgctttaagttc

SEQ ID NO: 849085 - DNA, 98 bp, Homo sapiens
cgagatccagttcctgcgaactgtatcagcatagtgttgagtgggcagcagagctgatgcgtagacaggggcaggatgagagtacagtgcgcagaatc

SEQ ID NO: 849086 - DNA, 100 bp, Homo sapiens
acacatctgaatttgatatccttgttattggaggaggagcaacaggaagtggctgtgcgctagatgctgtcaccagagaaaacggttgtgaagataattg

SEQ ID NO: 849087 - DNA, 99 bp, Homo sapiens
ctggaggagtgcgagctgggaaccccgaccagccccggctcagggtcccccttcctggtggctgtgaaggtgattgtagagaaggctccaaaagccagg

SEQ ID NO: 849088 - DNA, 99 bp, Homo sapiens
agctatgcaaatatagaacactaaagtgttacatgacagatgtatgagagaatggatcttggagaatgtctgaaagtccatgacctggctttaagagcg

SEQ ID NO: 849089 - DNA, 100 bp, Homo sapiens
gtaccttcggatcatatctcatgaggctgtaggctccttcaacccgtggctgatagctgaaaggtttcctgggagaaggtggcttaaggctgagacactt

SEQ ID NO: 849090 - DNA, 98 bp, Homo sapiens
atacttacagatgtaaatgttggactcatggtttttccaaaaccagtgaccgcattggaatatacattcagtaggtctgatccaacttcgtatgcagg

SEQ ID NO: 849091 - DNA, 100 bp, Homo sapiens
gtcgggttattcgagtgaccgagaccgcggccgggaccgaggatcaatgaactgagccatgttcaaatccctgttatgttgatgccagatgacttcaaag

SEQ ID NO: 849092 - DNA, 100 bp, Homo sapiens
atcatggcggatggcccccggtgcaagaggcgcaaacaagccaatcccaggaggaaaaacggaggagacatcacagctttcccagatcgggaggaaaaat

SEQ ID NO: 849093 - DNA, 100 bp, Homo sapiens
ggccccctggcagtggccgctgtgctatatcacaagatgaacaatgagaagcaggcagaagattgcatcacacgcattagtgccagcagtagttcccaag

SEQ ID NO: 849094 - DNA, 100 bp, Homo sapiens
caaaattgcagatctgtgccatactttcatcaaagatggagcgggaagtcgagacaacatgagtgtgattttgatctgttttccaaatgcacccaaagta

SEQ ID NO: 849095 - DNA, 100 bp, Homo sapiens
gcccatgaaaaaggatgttgaccggacagggaagcagctcgagagtgtcgtagaaagaagaaagaatatgtgaaatgtttagaaaacagagtggcagtgc

SEQ ID NO: 849096 - DNA, 122 bp, Homo sapiens
ccaggtgacagtacacgtgggcaacgtacgtcagacggcagtggtggaaaagatccatgccaaggctttacaggaagtatggtgctggcatctgcttggcttctagagagtcttacaatcgt

SEQ ID NO: 849097 - DNA, 100 bp, Homo sapiens
cgagggcgaagacgagatccagttcctgcgaactggtggcttatctgcattcaaaaaatttcagtaaagcagatgttgcacagatggtcagaaaagcacc

SEQ ID NO: 849098 - DNA, 99 bp, Homo sapiens
gaaaaaccatggtatcctcagtggacgggacctgcagttccttcttcgagaaaccaaggattctggactctacttataatatccctaactgctggattc

SEQ ID NO: 849099 - DNA, 126 bp, Homo sapiens
tggtggagccaaggaaacaggatgctgatagtctccagcgggcctggactgtgggctggtgtgtggaactgggaatgctggcagactttgtgtcccagacttctccaatgatcccctccattgttg

SEQ ID NO: 849100 - DNA, 100 bp, Homo sapiens
actttgggagagaacaagggagcctcttattcttgaggaagaaagggagatggtgctgttgaattgtgggaactagatgagaatgagacacttattgtca

SEQ ID NO: 849101 - DNA, 100 bp, Homo sapiens
ggctggtctctactcctgggctcaagcagtcctcctgcctcagtctcccaaagtgctggaattacagggtcaccttcaggccattcagaggaggaaagag

SEQ ID NO: 849102 - DNA, 98 bp, Homo sapiens
gtctcgagcccgggaagtgcgttttgctggatgactgtactctgcagctctctcacaatggcgcctacctggatttggaggccaccctggcagagcag

SEQ ID NO: 849103 - DNA, 98 bp, Homo sapiens
cctggtgtaacacatcgacctccaagtgcaggtaacacagattttaacattatggcagggaggcatcagaatcgtagttttcctcttccaggagttca

SEQ ID NO: 849104 - DNA, 51 bp, Homo sapiens
caagtttgttcccaacttgcccaagaaacatgcccctgattcagtgcctct

SEQ ID NO: 849105 - DNA, 99 bp, Homo sapiens
taagaccaagtcctcgctggactgctcagggtgccagacctcatcgtctgtcctcccatgactcacctgtgtgagaaaatcatctccacgctgccttcc

SEQ ID NO: 849106 - DNA, 99 bp, Homo sapiens
gtgggacgcttcatcatgggcatagatggagggcgtctgtgaggaaatgacctacgaggaaattcaggataattatccactggagttcgccctgcggga

SEQ ID NO: 849107 - DNA, 100 bp, Homo sapiens
gaaatttctgccatggttctcactaaaatgaaagaaaccgctgaggcttatttgggaaagaaggtggccgtttgttgcatctgtttttttgttattcttc

SEQ ID NO: 849108 - DNA, 100 bp, Homo sapiens
gaaaaattcttcagattggaaaataccacaggatggagactacgagtttataatctgcaaaatggcttcaatgctgagtaagagtaccgttgaacgcctg

SEQ ID NO: 849109 - DNA, 100 bp, Homo sapiens
caccgaagttctacgtggccctaacaggcacttcctcactaatatcagggcttattttgtgcattcccttattcgtggaagcagccttagaaagactgac

SEQ ID NO: 849110 - DNA, 98 bp, Homo sapiens
ctaatagaggcccaagatgaagagaatcatgctgttgtgtgtgagattaaagagtctattgttggggaaatcagacgggaaattgtaagtggactttt

SEQ ID NO: 849111 - DNA, 98 bp, Homo sapiens
tggaaggacatttggcaattgtggagaagttaatggaagctggagcccagatcgaattccgtgatatggtgatgcctggacttactgcatcagtaaaa

SEQ ID NO: 849112 - DNA, 128 bp, Homo sapiens
cagactgaggaagacccggaaacttaggggccacgtgagccacggccacggccgcatagggaagaaggagaaagggccaacccctgaagaagcaatacagaaactgaaggagacagagaagatactga

SEQ ID NO: 849113 - DNA, 99 bp, Homo sapiens
ctccatcactggcgtcaccatgggggctgtgctgggtgtcttctccctcgccagctgggttctgatctacaatggccaactggacatcatcgtggcagc

SEQ ID NO: 849114 - DNA, 98 bp, Homo sapiens
aaacagccgcggcgggcaggccaggactgtcagtgcccgcccctcggggcagtacaacaaacacctcttcgtgcacattgggcatgccaaccattctt

SEQ ID NO: 849115 - DNA, 99 bp, Homo sapiens
aagataccagatcatgtcagagagagagcttggttaacttgggagaaagtttcatctgtggatggagtattggaaacatggatctaaatgccttgtgca

SEQ ID NO: 849116 - DNA, 98 bp, Homo sapiens
ttggaggcagagaagttcgacctgcaggagaagttcaagcagcagaaatatgaggttcctgccatctccctggcttatgagcaggctgagagtgacat

SEQ ID NO: 849117 - DNA, 101 bp, Homo sapiens
ccagtggtgacctatgtgtgtgatcttgaagggaacagattgttccaggacacgaagggagattcttccaggttactgaaagcacttcctttgaagcttca

SEQ ID NO: 849118 - DNA, 98 bp, Homo sapiens
gcctgaggaccggcaacatggtgcggtcggggaataagcttaaagaaagtggttattgtacaggtcatgaaccagattccctggagttcagtactgta

SEQ ID NO: 849119 - DNA, 98 bp, Homo sapiens
ggagcgcgagaaggatatcctgacggccatcgccgccgacctgtgcaaggagaatgtcaaaatactccaggagagaagcattgcttatatcaactcgg

SEQ ID NO: 849120 - DNA, 98 bp, Homo sapiens
tggcctggtttgatactgacctgtaaatcatcctttagggaacgacagtgggtagatgattttcctctccaccgaagcgcctgtgaaggagattcaga

SEQ ID NO: 849121 - DNA, 100 bp, Homo sapiens
gcgccacgctcagcagcatcagacacatgatccgcaagaacaagtaccgccccgacctgcgcatggttcgccaagcagcttttcagtctctgggaccttt

SEQ ID NO: 849122 - DNA, 100 bp, Homo sapiens
aactttcgtatcacaaaagcagatgctgctgaattctggagaaagttttttggagacaacattgatgttgatgggacaatgacagtggactggaatgaat

SEQ ID NO: 849123 - DNA, 98 bp, Homo sapiens
aggattggtcagctatccagaatttctgtgagcaggtgaacactgaccccaatggtccacaggtcctggctaccctgggaagagacaagaagtaaatg

SEQ ID NO: 849124 - DNA, 50 bp, Homo sapiens
gagctggacccggaccggttttgggtgcccttcttcctgttcattgtctt

SEQ ID NO: 849125 - DNA, 60 bp, Homo sapiens
tctgggtttgagtccagcagtgctttagatcatccagacttgaaacatatcgacccagtg

SEQ ID NO: 849126 - DNA, 100 bp, Homo sapiens
agcacccccctttgtaagatttgtaacaaaaattaatatgaatggagtaaatagttctaatggagtggacagtctcatcgaactcaaggaatcttcagca

SEQ ID NO: 849127 - DNA, 98 bp, Homo sapiens
tccgcagcctggcatggcttctggggacctttacgaggtctcctctgagcctccggcctccataagacccaaaacagatgacacctcttcccagtccc

SEQ ID NO: 849128 - DNA, 100 bp, Homo sapiens
ttctgcagacctggaagaggtagctcagaaatgtggcttgtcttacaaggccaagtataaggagcgagggacggtcttggctgaggaccagctagcccag

SEQ ID NO: 849129 - DNA, 100 bp, Homo sapiens
ttctgggccagtggccacgagatgctgatggggccttcacctgctgcaccaatgacaaggccacccagcctaccaggacatcctcggaaagtatttattc

SEQ ID NO: 849130 - DNA, 100 bp, Homo sapiens
agaacgactacaaaatattgaggcccacttgcggttacagacagtatacaagaagagtcttggagatgacattagttccgaaacatctggtgacttccgg

SEQ ID NO: 849131 - DNA, 98 bp, Homo sapiens
tatgattaactgtatcaagcaggaacaagctcgtaaatcccaagagttacagattttccggagtctgaaaaattaactttgtttattgcaaacatgtg

SEQ ID NO: 849132 - DNA, 100 bp, Homo sapiens
gcatagctttgagcgaattctcactaagttcagctcttttgagtcttttatgacatcaagagaaatgatcccagaaagaaaaaatcaagaaaaagaatct

SEQ ID NO: 849133 - DNA, 100 bp, Homo sapiens
agtaatgctcttgatatcatcttccaaactgatctaacagggcaaaaaaagggctggaaacttcgctatcatggagatcagaaacttgcccaggccaaag

SEQ ID NO: 849134 - DNA, 99 bp, Homo sapiens
gctggctgtagctggccaaggagttctcgattaaagaggaaggggcagtgctcacatttctgggcagaagatgtgatggtttgcttcgggaacatgttt

SEQ ID NO: 849135 - DNA, 100 bp, Homo sapiens
gagacatgtctgagactcctgctcagtgtagcattaaggagggatttgttcgtgttgaccgagattatgtgctgaagtctgcagagctggcaaaagctgg

SEQ ID NO: 849136 - DNA, 98 bp, Homo sapiens
ccttcttcaagagaaatggagcccttctccaagttgtggaagctgatcgaggaagcctaagcaggctctgtgaagtgggaatagtggtatttgagtca

SEQ ID NO: 849137 - DNA, 100 bp, Homo sapiens
cacgactatagccagcagtgtgacatttggagcataggcgtcgtaatgtacatgttgtaagaatgattgatgttggctgatattggagtgctcattcaca

SEQ ID NO: 849138 - DNA, 100 bp, Homo sapiens
aaggaaagcaccatgacgtccatccatttcgtggttcacccgctgccgggcaccgaggaccagctcaatgacagtgaacagagtatctgtcaggcaagag

SEQ ID NO: 849139 - DNA, 99 bp, Homo sapiens
agaaatgtgagccgtgccttccttactcagcagacagaagacagatgcaggacactgggccatctatgttggcgatggatatgtggttcatctggcccc

SEQ ID NO: 849140 - DNA, 100 bp, Homo sapiens
caaggacagcttttttcctgcaagtgtaatgttcaagctcagaaatgccttatgtggatcgtcagaatcgcatttgtggttttctagacattgaagaaaa

SEQ ID NO: 849141 - DNA, 100 bp, Homo sapiens
ttgtgtgcatcaacagtgatggactcgctgattcttgagaagagtcaaaactggagctctcaaaaaatggaccatattctgatttgctgtgtttgtctgg

SEQ ID NO: 849142 - DNA, 100 bp, Homo sapiens
aagatgacagacttggacaacatgtcccaacattacatcccagttacttttcacatagaaccatatagcaatcgagatgatcaaaacatgtacaaaaatg

SEQ ID NO: 849143 - DNA, 100 bp, Homo sapiens
aaaaggaaccttcattaacagatgccattccctctcacccaagagagatctgaaactggacaatgtcctgttggaccacgagggtcactgtaaactggca

SEQ ID NO: 849144 - DNA, 99 bp, Homo sapiens
cttgggggaaaacttcaaagagccggatcgcaggctccctgcctactcccccaccggggatttcaggtcaccgacgatgagggcgcacctgctgtcctg

SEQ ID NO: 849145 - DNA, 99 bp, Homo sapiens
tagaggagcgcaggcctggtgcaaacagactcaagaggctcggagaaccagcttggcaataagagctaactgccatcaagagccatcagtatgtcttca

SEQ ID NO: 849146 - DNA, 98 bp, Homo sapiens
attacctccatgcaaattgggtgcttcacagagacttgggcaagtgtccagagaatggctgggatgaaagtacacttgaactctttttacatgaactt

SEQ ID NO: 849147 - DNA, 100 bp, Homo sapiens
tattgcgcgtggaacggctgcttttggaaggtcctgcaaccctggttccagtctggcaagcattgtagacctggctgctgaagactgacggggcccaggg

SEQ ID NO: 849148 - DNA, 100 bp, Homo sapiens
gacgggcagccccggactctaccattgaagagttggagaaggagatgctgaatgggcaaaagctccaaggaccgcagacttctgctgaagtgtaccgcat

SEQ ID NO: 849149 - DNA, 98 bp, Homo sapiens
aaggccttattgttgaagacctagtagaagaggtgacagagtctcgttctgtcacccagcctggtgtgcagtggttcaagccattctcctgcctcagc

SEQ ID NO: 849150 - DNA, 100 bp, Homo sapiens
atgtgtccgtggcgctcgagttcctggaccgtgagagcatcaagctcgtgtccatcgatccgacgtatcctgaagggaaagtccattcagcagagagctc

SEQ ID NO: 849151 - DNA, 98 bp, Homo sapiens
ctgattgacactctgcagcaccaagtgaaatctctggagcaacagctggccagcattggctgtgatgactacttaggctccgacaaagtcgtggacaa

SEQ ID NO: 849152 - DNA, 100 bp, Homo sapiens
cttacattgaagatgctgctgatgtggatgctcgaaagcagttgtgtaaaattgaatacccttgaacccttggaggatcaagacctgccaatgaatgagc

SEQ ID NO: 849153 - DNA, 98 bp, Homo sapiens
agaatgaagatgaaaaagtcaccttgtctttccctagtactctgcaaacagattggcccggatcctcgttcgcctgccggcactcaggctgatgagct

SEQ ID NO: 849154 - DNA, 98 bp, Homo sapiens
atccagaatgtcggaaatcacctgcgacgggtagagttggctttgtgggacacagctgggcaggaagattatgatcgcctgaggcccctctcctaccc

SEQ ID NO: 849155 - DNA, 99 bp, Homo sapiens
ccatcttcgacaacatcctcaaggacaactacacctttgcccaacctgggattcaaatgaaagtgaaaatgttagaagaactcgtgagccggattgatg

SEQ ID NO: 849156 - DNA, 100 bp, Homo sapiens
tgggactccgagcattctgacttgaccgaagctgttgttcggaatctagcaacacatctttatcttcctgggatgcctgaaaacttcatgcctcctgttc

SEQ ID NO: 849157 - DNA, 100 bp, Homo sapiens
gctgaccgctcaagagattctacatcagtttggtttcactcagaccgtattctaccttgtaaatactgttatttgtatatactgtaaatgatgacatcgg

SEQ ID NO: 849158 - DNA, 99 bp, Homo sapiens
agtatggccccaggtgacacaatggccgcaggctccatggcggctggcttcttccaggttctgctccagacgagcccttaccacgttgactcactcctg

SEQ ID NO: 849159 - DNA, 99 bp, Homo sapiens
cctaacccatgttattgaaggctttgtgattcaggagggattggagccatttcctgcaatgaacaccagggaaagtggcaaagcttcatccagtctagg

SEQ ID NO: 849160 - DNA, 98 bp, Homo sapiens
aagttgactaccaccagtggagtccaggatgagaccaagagcagtgatgaccttttagctggaatggccagaggggtaacggtgactaatggtgttaa

SEQ ID NO: 849161 - DNA, 100 bp, Homo sapiens
tgaaaaggaaaccacagccgtgactgagaaatttactacagaagagaaacggaaacccttttccaaagagaaatgaagaagaaaactgtatgtaccctaa

SEQ ID NO: 849162 - DNA, 98 bp, Homo sapiens
tgtcctcaccagtcgggacttcagctgaacctctgagtgccaaggacaccactggaactcacaaagaaacaagtgttgaaaatgttaaaggctgtgct

SEQ ID NO: 849163 - DNA, 100 bp, Homo sapiens
cttgcatttagcagtttacaaggactcagcccaggagagtgttattactcgagatattcatcgtacatttcccgcacatgattactttaaagatactgga

SEQ ID NO: 849164 - DNA, 100 bp, Homo sapiens
gacgctatggcgcactggagtaccctgttcctggcagagtaccgggcgtcaaagcagaacgctttgaagaaggaatgacggtaaagcactgtgcattgtc

SEQ ID NO: 849165 - DNA, 100 bp, Homo sapiens
aggaagataagctgaggcacttcagggagtgcttttatattcccaaaatacaggatctgcctccaggtgatgggcagaatctgtttacgaaagacgtgac

SEQ ID NO: 849166 - DNA, 115 bp, Homo sapiens
agaacttctcctcccaggttgtggaacgacacaacaagccggaagtggaagtcagcttcagcgcctgctcctggtcatcactaaccagatttacttggagtacatgtgaaagaaa

SEQ ID NO: 849167 - DNA, 98 bp, Homo sapiens
ttctttcctgtccagagccacccctagctgtccccctgagatgaagaaagagacaggtgcagttcaggagcagatgagatccaagggaaaccgagata

SEQ ID NO: 849168 - DNA, 99 bp, Homo sapiens
atggaagaagatggaaaaaacttgtttaatgggtgctggagaatctggtaaaagcaccattgtgaagcagatgaggatcctgcatgttaatgggtttaa

SEQ ID NO: 849169 - DNA, 116 bp, Homo sapiens
gcaccgcgcctgctgccgggttgcgctccgtgcacctcttgcggcatgcttcatgatgatccaagcagaagaattcctgctgaaatggcattgtgcagcccattctttagcattcc

SEQ ID NO: 849170 - DNA, 99 bp, Homo sapiens
cctactgcacagcagaagctctgaatcgtgttcctgaatgaaagaagtcagcgagtaaccagctcataaatcacatcgaacagtttttggatactaatg

SEQ ID NO: 849171 - DNA, 98 bp, Homo sapiens
ggcgaagacgcgaccgcggcgcgagtcaccatgagtgaccagtggttggactcttggcggcgcttaccctgaacctgagtgttaggggagagggaatc

SEQ ID NO: 849172 - DNA, 99 bp, Homo sapiens
tcatccacctgctgcagatggggcaggtgtggagattgccatcacgaaagccaaagtggatttctccagtgtggtgtgcctgcccccttccgtcattgc

SEQ ID NO: 849173 - DNA, 100 bp, Homo sapiens
gggagtattatgaaaagatctgcacagccagaggacaacacatcacacacaagaaacagttgtgctcatgtgatgggggcctcagcactaggaaggagtg

SEQ ID NO: 849174 - DNA, 98 bp, Homo sapiens
cgtaggtactgtgtgaggcccaacagcggaatcatcgatgcaggggcctcaattaatgtatctgatccatttgaaccacagcgacgtctccccgcgaa

SEQ ID NO: 849175 - DNA, 100 bp, Homo sapiens
gcccgccaccggctccctcgggagctcatcttcgtggggcgtgaggagtgtgagctcatgctacagccctgccaggagcccggaagtgggtccgcacgag

SEQ ID NO: 849176 - DNA, 98 bp, Homo sapiens
ccactggcagctcatgaagcagtattacctgctggaggaccagacaggcctcctgctccacgacgtgaccatggccgggctgcaggagctgcgattcc

SEQ ID NO: 849177 - DNA, 98 bp, Homo sapiens
ttcagtgttccagaagatacagtttcaagctgcacaggcctgggcacatgggagtccccaaaattacattgccaaggctgttcgctgctacgaatctt

SEQ ID NO: 849178 - DNA, 98 bp, Homo sapiens
ttggtttggaggatcaatgctggcttccacgaattaaacaaccaccatgtcgagcaaaaaggcaaagaccaagaccaccaagaagcgccctcagcgtg

SEQ ID NO: 849179 - DNA, 100 bp, Homo sapiens
ggagttggtgttgctgaattgctttttaacacaattcaggcagctgacattgataccaggaatttgctgattcccttggaattccgtttttggaaaccag

SEQ ID NO: 849180 - DNA, 100 bp, Homo sapiens
acttttcaaaatgctttggtgggaagaagtagaggactgttttgctgccaaacaaggtgaatccgacccagagaggaaagaaacaaggcagaaagtagac

SEQ ID NO: 849181 - DNA, 135 bp, Homo sapiens
ctgcctataatcaagtaaaaacaatagctcaaggaaacctttccaacacagatgtccaagctgccaagtgagaagccttataagtgctcatgggagggatgtgagtggcgttttgcacgaagcgatgagctcacg

SEQ ID NO: 849182 - DNA, 100 bp, Homo sapiens
ggaggagcacagcagatggagggacagatccaggacgaggtcgcggagcagaaccccctttcgcttaagtgaaaaagaaaacgcccactcctggatcttc

SEQ ID NO: 849183 - DNA, 98 bp, Homo sapiens
tagaagaaggaatcatatatggctcacatgtttatgttctgacttcgtattaggttgaactcccaccacctgatcttggaccaagttctgcactaaat

SEQ ID NO: 849184 - DNA, 124 bp, Homo sapiens
ctactgtccaagcacagtctcagccccatggggtatatccaccctcaagtgtgatggactgagctgtgtccaatgattgaagccaggaagaatcatgggctggtatttgtaaaagacaagatat

SEQ ID NO: 849185 - DNA, 124 bp, Homo sapiens
agcgaacgcaggaaagtcaggctaaaagtgtctgctgctgctgccgccccccactccgcctccgggagagatttgagttctgtgaacctgcatttgttgttggtaattgcctccagatagcttc

SEQ ID NO: 849186 - DNA, 99 bp, Homo sapiens
agctcaggagtatgagcctcccggaggacggcatgagttctggacacttcaggagtcctcagctagtgacatggtcgatcgtaaagctgaaaattgaaa

SEQ ID NO: 849187 - DNA, 99 bp, Homo sapiens
ggggggatggttccatcatggcgtcaatgcagtctcacagaaagttctccgctcccagacatgggtccctcggcttcctgcctcggaagcgcagcagca

SEQ ID NO: 849188 - DNA, 98 bp, Homo sapiens
tgcagctgcacttgctccgggcgctggcgcaagttggtacgccttattacatgtctccagagagaatacatgaaaatggatacaacttcaaatctgac

SEQ ID NO: 849189 - DNA, 100 bp, Homo sapiens
ctgcatgaatagaccagtaagaggtattatccatgcagcagaagagaaggactggaaaactgcgtactcatacttctatgaggcatttgagggttatgac

SEQ ID NO: 849190 - DNA, 100 bp, Homo sapiens
gtggccacatactttctcagaaaccttcacatcttggtcaagcaaaagttcaaacagaccctccctcagttccaatatgtgacctgtatcctaatggtgt

SEQ ID NO: 849191 - DNA, 99 bp, Homo sapiens
gttcactagtaatctggcctgtgcctaccttttaatcccagctggaaaatctcagtaagaatgatggtttttggattcaaagcataaaaaccattacaa

SEQ ID NO: 849192 - DNA, 100 bp, Homo sapiens
caaggttctcgaggtgcatgctaccgtcttctgtcccccgctgcgctttgactaccacccccatgatggggatgagcatggaggagcaggacttggagcg

SEQ ID NO: 849193 - DNA, 98 bp, Homo sapiens
aaaccaccaaaccaatttctcctgcaaaccagggtatcagagaccactttacctgcattgtgaaggtactttttaccctactgtacacacaggctctt

SEQ ID NO: 849194 - DNA, 100 bp, Homo sapiens
gaatggatttctgtctggtgataaagtgaaaccagtgttgctcaactctaagttacctgtggatatccttggaagagtggatagatacttctcaagacat

SEQ ID NO: 849195 - DNA, 136 bp, Homo sapiens
gagccaccaaagatttccaacaaggttgatgtatggtcggttggagtcatcttctttcagtgtctttatggtagaaagcatgtttgggaaaataacaaccctttccaaattgtcttggttaagggaaataaactta

SEQ ID NO: 849196 - DNA, 100 bp, Homo sapiens
ttgaagactcctacctgaaacatacggagattgacaatcaatgggccatcttggacggaacttgatactaaatttgggactctttgctgcgggagtttgg

SEQ ID NO: 849197 - DNA, 100 bp, Homo sapiens
taccaccagaagctatccacaacttcgcagagatatctaacagtgatacgccttcaccaccacctggtttgtcaaaatccaatccagtcatccccatcag

SEQ ID NO: 849198 - DNA, 100 bp, Homo sapiens
gatctacgttccaattggggccgtaccatggcggagaagactcaaaagagacacgaatgcagagtttgagtccagatcccaaagcccagtacacaagtat

SEQ ID NO: 849199 - DNA, 100 bp, Homo sapiens
ccggacttttgctaactgcggcgggcgagacgttctcagctgttgaaaatggacagatagatgtgttaaggctgttgcttcaacacggagcaaatgttaa

SEQ ID NO: 849200 - DNA, 100 bp, Homo sapiens
gacgacttctatctcgtagtgtgcagtgcctgtaaccaggtcgtcaagccacaggttttccagtcgcactgcggttactcactataaacaatatccaccc

SEQ ID NO: 849201 - DNA, 132 bp, Homo sapiens
acaagagtggccctgcaggctgagaaactggaccaccatcctgaatggtttaacgtgtacaacaagagctctgcgtgcctcttgctgtgccctacctggacaaacccccaactccgctccacttctaccggg

SEQ ID NO: 849202 - DNA, 98 bp, Homo sapiens
agctagaaggttggctttcacaagtacagtctacaaaaagacctgctagagccattattgccccggatgaactcttccgacaaagcctggcaaaactg

SEQ ID NO: 849203 - DNA, 143 bp, Homo sapiens
ccgctccgagtgccagtgggagcggatccctgagctcgtcaagcagctgtcggccaagctcatcgccaacgactcattctgatgaaggaaagagcgtccctgtgcagctgcgtgtccttcagttctttggctctgattccgtg

SEQ ID NO: 849204 - DNA, 98 bp, Homo sapiens
tctggtattcaacaaataattgagtgctttcgatcagagccggggccatccagtcttggcagcatgctcatgcctgtccaggagactgcctgggaaga

SEQ ID NO: 849205 - DNA, 100 bp, Homo sapiens
tgatgctctctctccagtccttgctgaagagactttccgttacatgagtgtggtcactcacctgtctaccactcccgtgaaatggcagctcgtgccttgg

SEQ ID NO: 849206 - DNA, 98 bp, Homo sapiens
ccttaagagaggatcgcccaatccacatgcttttccagacatcaaggagcacgtgaaacagctagagaaagcggtttcaggcaaggagccgagattcg

SEQ ID NO: 849207 - DNA, 100 bp, Homo sapiens
ccagagccaggagttctctggccgctctctggacaggatagccgcttcccaaagatcctggagaacctaagactccaaaaacgtggtactggaggagtgg

SEQ ID NO: 849208 - DNA, 100 bp, Homo sapiens
agattgcaacagtgattcacaggtgtttccctctttgaatgtgcaagatttaatagagtgaaaacagagctcccataaaatggaaggagacccaaagggg

SEQ ID NO: 849209 - DNA, 100 bp, Homo sapiens
tctggagcttattaaactggacatttctagaacatttcctaatctctgcattttccagcaagtagtaagcattaataatgtctttcatctttgagtggat

SEQ ID NO: 849210 - DNA, 99 bp, Homo sapiens
cggtgcaggagtcggcggctcagttgtccatgaccctgaaggtccaggagtacccgaccctcaagatcctcagacagattctaagcctcctgagggatt

SEQ ID NO: 849211 - DNA, 100 bp, Homo sapiens
caacaatgagtacaactaccgctgctggaccacaaaccgctgccagaaaaaaatttctacacccagaccatcttctccaggtggactacctgaagaagat

SEQ ID NO: 849212 - DNA, 100 bp, Homo sapiens
gccgggacacctggaagccgagaaatgtggttgggcttgacattcaggatgagatgggcaggcacgaagtgggccacatcgacaactccatgaagatccc

SEQ ID NO: 849213 - DNA, 100 bp, Homo sapiens
cgcagatcagaggtagtcggacctttcccgctggcgcgcagcctcagctaggattacggggcgctgaaagacatcgtgatcaacgcaaacccggcctccc

SEQ ID NO: 849214 - DNA, 100 bp, Homo sapiens
cttatggcggcgctggagagggggcgctgagctgttgggtggcccaccctcaggaccctcaccacccatcagagaagcctgtcattcactgccataaatg

SEQ ID NO: 849215 - DNA, 100 bp, Homo sapiens
tctataagaacatgtttttctaagccctttttgtgccaggtgtcccgttaacgtctctgttagttcagagatttctgagggaaattcctatttgttaagt

SEQ ID NO: 849216 - DNA, 98 bp, Homo sapiens
ccgaaacatcgcctccatctgtaatatggaataaaggttggggagactacacctgacaaacttttcactcttatagaagtggaatgtttaggggcctg

SEQ ID NO: 849217 - DNA, 100 bp, Homo sapiens
tcggaggagaagctgcaggagaaagtatggaagctccaaaaggaaagataccagattgatcttgatcacctctgcctccccagcacctagtcttccttgg

SEQ ID NO: 849218 - DNA, 100 bp, Homo sapiens
gctgctgctgaggagaggagcgtcaacagcagcaccatggttctggacatggcaagacatgtgccactctatcgggcactgctggaattgcttcgggcca

SEQ ID NO: 849219 - DNA, 100 bp, Homo sapiens
tctcctccttcttcctcaactatctcgctgacacgcagtctctggctgatgaacttgctcttgtggatgttttggaagataagcttaaaggagaaatgat

SEQ ID NO: 849220 - DNA, 98 bp, Homo sapiens
ctgcaaaagagaaacatggattacttctttcgggagcagctgggccagagtgtgccttccttgaatccagaagctggcaaacagcatcagccatgcag

SEQ ID NO: 849221 - DNA, 116 bp, Homo sapiens
cctgcaatttgaagatacatgagacagcagccaaacccccagggaattaccttcagaattacagggaatttttgataaagaagaggtggacgttaaagttgaagacaagaaaaatg

SEQ ID NO: 849222 - DNA, 100 bp, Homo sapiens
ggtgccaagactctgtcttcgcccagtaataggccttctggagaaacttctgttccacctcctcctgcaggcaatttcttgcaaccaccaccgaggcccc

SEQ ID NO: 849223 - DNA, 100 bp, Homo sapiens
gcggtgcattcagacacgggacaccaacttcgggacgaactgcatctgccgcgtgcccaaaagcaagctggaagtgggtgcagaagctggatacctacca

SEQ ID NO: 849224 - DNA, 98 bp, Homo sapiens
tccaacaactcccctcggacctcagtatgggctggaacctgacacttggcatgacagtggcccgcctgaactgtaagcactgtgggaagccggtgatc

SEQ ID NO: 849225 - DNA, 98 bp, Homo sapiens
ttaacatttgccttgtctctacaatgatgaccagtgtcccagtgaaggaacgagtgaaggtgtctcagaactggagactggggcgctgccgagagggg

SEQ ID NO: 849226 - DNA, 100 bp, Homo sapiens
ggagggatccttctgagaagtgaagccatttggactttctgggcccgacaacaagctcaaatacgtcaccaaatggcagaggacagcaaagcagattact

SEQ ID NO: 849227 - DNA, 100 bp, Homo sapiens
cggcgagtatacatgcaaagcttccaatgagtatggcagtgtcagctgtacagccacactaactgtgacaggtcttcatcctccaggtccacctttagca

SEQ ID NO: 849228 - DNA, 100 bp, Homo sapiens
ctcctccaagaccgtgctggtctttctcaacctcatcttctgggccaaagaggtgctgaaaaaatatttggagtccaaggaggatgtggctgatgcactt

SEQ ID NO: 849229 - DNA, 98 bp, Homo sapiens
ggcagagaagggccaggagaggagcactttgaggacatggcctccgacgaggacatgtgactaataaaggtaccagaagaatatggctgcacaaatac

SEQ ID NO: 849230 - DNA, 100 bp, Homo sapiens
acaaagccagagactggaccaagcagacagtgggggcaacaggacacagcacagggtttgaaagtattcttgaagggctgtttggacctgcattattaaa

SEQ ID NO: 849231 - DNA, 98 bp, Homo sapiens
cagcgggctttgccagcaaaaccgaaacaggtattatcctgcttggtacagatcgcttcagtcagaagatccctgtttaacaatgcagagagggccaa

SEQ ID NO: 849232 - DNA, 100 bp, Homo sapiens
gttacaggaatgttctccaagcagcaatccaaaagagtctcaaggatccttcaaataacttcaggacatggcccatgaacatggacatgagcatggacat

SEQ ID NO: 849233 - DNA, 100 bp, Homo sapiens
gaaaatcagctggttctgctgcttggtttcaacacctttgatttcattaaagtgttgcggcagcacaggatgatgaattatgtttgagaccttcaacacc

SEQ ID NO: 849234 - DNA, 100 bp, Homo sapiens
ccgctacacacgggccaatctggctagtaaaaaggacagaattgaatcacttgaaaagaggctcgagattgagaggatccagaatccagatctctggaat

SEQ ID NO: 849235 - DNA, 99 bp, Homo sapiens
tatgaagtttctaagtgaaagccttatgtggcatatttcatcacaagttgctgaacttaagcataccctcggggaagtctgggtacagaagacatctga

SEQ ID NO: 849236 - DNA, 100 bp, Homo sapiens
gtcggtgttccacgtgaagctcaccgacagtgccctgagggccttcgagagctaccgcgccagacagggccgccttcaacaacaacgtgagcgtggccta

SEQ ID NO: 849237 - DNA, 98 bp, Homo sapiens
catgatcatctcagctgctggccctaagcgcccaccaccttcttgctgttcagccagaaatctgccatcagtcggatgatcccggacgaccagcacag

SEQ ID NO: 849238 - DNA, 100 bp, Homo sapiens
tcattattgtggcaggtttttggcagtgccactggcctagctcgatattatccaggcatgttatgttacccagagaactttccaaacaagtacctaaaac

SEQ ID NO: 849239 - DNA, 100 bp, Homo sapiens
cactacctacaacaagcacattaacatcagcttccacagttgtctatcaacgtctatgactacaactgccatgtggacttgatcagactgctcaggctgg

SEQ ID NO: 849240 - DNA, 98 bp, Homo sapiens
gcgagttggtcggtcccggggtcacccgctacgggaagcaggcctcgccacagagacgtctcccacaacctgctccgggcgctggacgttgggctcct

SEQ ID NO: 849241 - DNA, 99 bp, Homo sapiens
tctgacagtcgaacaaattcaagatgatgtagaaatagactctgatggtcacacggatgcttttgtggattttatggaagaccttgggttatggaacag

SEQ ID NO: 849242 - DNA, 101 bp, Homo sapiens
ctgaactgcacctgtggtctttgaagaataccttacacattgcggaactctaagaaggagctgatgtggaggagcagctgagacagttcaagatgacgacc

SEQ ID NO: 849243 - DNA, 100 bp, Homo sapiens
cctcaagtactgtaatcacccaggcaccatcctctaacaggccaattgtttttgattacgaagatgcaggctaccagactgcagaacttgtaaaaatgga

SEQ ID NO: 849244 - DNA, 100 bp, Homo sapiens
gcacgtccaccaacctgaccatgacctttaacaaccagctgaccactgtccacaaccaggccatggatcatctgcagtcattcattgcagattgtgatcg

SEQ ID NO: 849245 - DNA, 100 bp, Homo sapiens
cgccggtgtcctggcctcttcctcagcttagaccatgctcagcctccaagcagccttgtcatcgacaaagaatctgaagtttacaagatgcttcaggaga

SEQ ID NO: 849246 - DNA, 100 bp, Homo sapiens
gctggaagaactgcgatgcttttttcactgctaggaaaggatccaaacaggtaccaaccaagaagctgaagaaatatgagaaagaatatcagacaatgcg

SEQ ID NO: 849247 - DNA, 99 bp, Homo sapiens
ctggaagttataacgctacacgaagaactaagaatattattagcacaagagcaccatactttgaggggtgagcccggagagccaggaccaaaaggagga

SEQ ID NO: 849248 - DNA, 100 bp, Homo sapiens
ttgatcttattgttctcacaatgccagttcctgagattctgcagcttcaaggtgacatcaccacctgtacaaattctgagctgtctaacccctctgaaac

SEQ ID NO: 849249 - DNA, 100 bp, Homo sapiens
cacctctttgtacatcttctgcaattactcgaattacgttcctacagtgtttgagaattacacggccagttttgaaatcgacacacaaagaatagagttg

SEQ ID NO: 849250 - DNA, 100 bp, Homo sapiens
aaagcgccgccggccaggcccagctgtggccggacagggactggaagagaggacgcggtcgagtagaccaagctccacgaagatctctgtgagaagagga

SEQ ID NO: 849251 - DNA, 101 bp, Homo sapiens
aatttgcacatccttcgaaaagctgccaagttgaaaatggacgagtaatcgcctgctttgattcattgaaatttgaaggatgacctctaggaagaaagtgt

SEQ ID NO: 849252 - DNA, 100 bp, Homo sapiens
cacgcataatggatgaaaggaaccgacaggtaaaataccatgaagattttgaaaaaacaaaggggagaggctttactcccgtcgtggacgatcctgtgac

SEQ ID NO: 849253 - DNA, 100 bp, Homo sapiens
cccgcggtctcaacccagttaaccggaagctcttcgtgggcggtcttgactggagcacgacccaaggtaggtggggaaggggtgtcaggtgggtactgca

SEQ ID NO: 849254 - DNA, 98 bp, Homo sapiens
tcaaagctcgccagtacccttggggtgttgtacaaggtgtctctacatgccattttgcctgggcttttcattctgaggctgaagaagaactgattaat

SEQ ID NO: 849255 - DNA, 100 bp, Homo sapiens
gtggaggcgcgggaggcctcggaggaggacctgctggtggtgcacacgaggcgctatcttaatgagctcaagagcagcccgacggccatggaggctgaag

SEQ ID NO: 849256 - DNA, 99 bp, Homo sapiens
ctcagcctggtgagggtgatgttcgggaggaggccttgtccacaggtttaccgacaagactgtgaaactttcgggatggtggtgaaaatgctgattgaa

SEQ ID NO: 849257 - DNA, 100 bp, Homo sapiens
cgggctcgtgtgctgcacacagcctcctcatcaccacggaagggaagctgtggagctgggggaagacaggcgcgatgatggactccccgttcctggagct

SEQ ID NO: 849258 - DNA, 100 bp, Homo sapiens
cggctagccggtggagctcacgtttattcaacattccatgccattgcagtgtcaactaggcctcagttacttttcagtttgcccaaattgagcccatctc

SEQ ID NO: 849259 - DNA, 100 bp, Homo sapiens
tctgtgaatgcccctgaattttacccttcaggttattcttccagttacacagtagctggtaatgagagctaagaggagaaaggatgggggatggtgaagc

SEQ ID NO: 849260 - DNA, 100 bp, Homo sapiens
gcgggctgcactggccatccagcaactggctgagggactcacagctgatgacctgctgctcgtgctgatctcagtcattgctgtgcgtgtgaaggaagag

SEQ ID NO: 849261 - DNA, 100 bp, Homo sapiens
gtgggaggattgactgctgctggggctgggctcgccagtcttggggacagtgtcagcggcatttgtttacctgagcaatctgctgtatcccgtgcccctg

SEQ ID NO: 849262 - DNA, 100 bp, Homo sapiens
actccccctgaagttcatctaagatcttcattcttcaaagcaacacagtcactcctggcggcaaaccaaacaaaaccagagtcatctggggaaaagtaac

SEQ ID NO: 849263 - DNA, 100 bp, Homo sapiens
tgcgccctgtctggaccatgattggcaaagcctactccactgagcacaagcagcagcaggaaggtgcgaagcccagcggtgcagagtccagcaaaggtgc

SEQ ID NO: 849264 - DNA, 100 bp, Homo sapiens
ggtgtaaggtgcgcagcagaaagcatttaaccagcatggctacttcatattttggaaagcagtttttaagacaaggtatctgcttcatccggaccagccg

SEQ ID NO: 849265 - DNA, 100 bp, Homo sapiens
ggacttctgaaggtgttcttcggaatagaaagtcacaccattataagaaacattaccctaatgaggcttatgtagacatgaggaagattggcagtagccg

SEQ ID NO: 849266 - DNA, 100 bp, Homo sapiens
ttccacatcagatgcttcacctgtcaaggtcctccagcagcctgacctgagtgggttagtgatccagagaaaccagcaggccaacttggtcaggaaggtt

SEQ ID NO: 849267 - DNA, 100 bp, Homo sapiens
gtgacttgactcttcaaacacaaagggatggtctcactgtgttgctgatcttgaactcctgacctcaagcaatcctctgtcttggcctcccaaagtgttg

SEQ ID NO: 849268 - DNA, 100 bp, Homo sapiens
agaggaccggaggctctggatggaagccatggatggccgggaacctgctattgcacattatgaacaatctgctgattattacaaaggagaagaatccaac

SEQ ID NO: 849269 - DNA, 98 bp, Homo sapiens
gtggaccccaagaagaccattcagatgggatctttccggatcaatccagatggcagccagtcagtggtggagggtcctgagaacattatctgtagctg

SEQ ID NO: 849270 - DNA, 98 bp, Homo sapiens
tcagaacaagttaaatccacaggagactacaaccaaactggcttccctaaaagaactgcatcaactccaagccagaatgcctccaactcaggccgaaa

SEQ ID NO: 849271 - DNA, 98 bp, Homo sapiens
gcagggcaacgctgtgaccctgggagattactaccagggccggaggattaccatcaccggaaagtatggtgtttgcgaaaacttgcggaagctggaga

SEQ ID NO: 849272 - DNA, 100 bp, Homo sapiens
tcggaggaaccggctccttgcgtcccgcctccctgggagctccgcacgggagcactcactgtgggcctcgtgcgacagtgtcaaacaatccatggacgag

SEQ ID NO: 849273 - DNA, 95 bp, Homo sapiens
ccggaacccaggctcggaagggccatcaccatcgaggctgagccaagagctgatggcagccgccggaccacccgctatgacatcgacatgaccaa

SEQ ID NO: 849274 - DNA, 98 bp, Homo sapiens
tctccaactgtgggaactctttccagcttgtgtctggcgaggattaaatccaccacacagggtgaaatctatctccatgacaacattcacacaacagg

SEQ ID NO: 849275 - DNA, 98 bp, Homo sapiens
tccgtgcaacgctggcaagtctcaaagtcgccacagatggagttccgtgttctcagaacccaacagaggcaatagaagcctggatcaactttaataaa

SEQ ID NO: 849276 - DNA, 51 bp, Homo sapiens
aggaggggcaggaaattctttgaaggatctgtgccagttcagaagcaggcg

SEQ ID NO: 849277 - DNA, 100 bp, Homo sapiens
cgtcaagcggcagaagtccaagtcttcccagtcgtccaccctgagccactccaatcgaggtactactacaaacgggagatcctggaacgggtggatggcc

SEQ ID NO: 849278 - DNA, 100 bp, Homo sapiens
ctggtgacatcatcattgacggaggaaattctgaatatagggacaccacagtttttcgttggaatatacgttgcacatttatggcgattctgagtgtgag

SEQ ID NO: 849279 - DNA, 100 bp, Homo sapiens
gtttctgcatttagtgagataagatgaccagctgaactcagaagaaaaaaagaagagaaagcagcgaaggaataggacaaccttcaatagcagccagctg

SEQ ID NO: 849280 - DNA, 100 bp, Homo sapiens
agttcatcaagcaaagggactaccaccagcagaaaccaccatcatgggttcgggtcccatagaccccaaagaacttctcaagggcctggacagcttcctt

SEQ ID NO: 849281 - DNA, 101 bp, Homo sapiens
ccccgggtcatccctggctccaggaccgccttctttggctacacagtgcagcagcacgacatcagtggcaataagtgggccatgaagcccccaggaggaga

SEQ ID NO: 849282 - DNA, 100 bp, Homo sapiens
ctctggggagttcagagaaattggaacagtgattgatcagattgctgaaacactatgggaacaggatggggaaggccaacgcattgacatccagatgaag

SEQ ID NO: 849283 - DNA, 100 bp, Homo sapiens
gtgttgcccgttatgcatgagagtcaccatgctcaaagtgaatatattaagatgttcgacaaggactgataggcgttggcctgataaatgtagaagatcg

SEQ ID NO: 849284 - DNA, 100 bp, Homo sapiens
ggaactagtgccggcggctctccaccccccaggctggaggctctcaggtcatttttaccaacccattggagatagtgaagattcgtctgcaagtagctgg

SEQ ID NO: 849285 - DNA, 99 bp, Homo sapiens
tttcacaattgcagcagatgaagatccattggtaaattgatcaggatttttggcctaccctccaaagaaaagttctggacatggcaagacatgtgccac

SEQ ID NO: 849286 - DNA, 99 bp, Homo sapiens
gagaaactgccacatgaaaaacaccacaatcaaccttattgtggcattgcgccgtacattcgagagtttgagtctctagtgatccctgaaaagttccag

SEQ ID NO: 849287 - DNA, 100 bp, Homo sapiens
ccaaaccttggccagtaccatcgacagagcataagtacctctggcttcccctctcttcaactaggtgtggatgaatggaacatagctcgcctcaatacag

SEQ ID NO: 849288 - DNA, 100 bp, Homo sapiens
aagatcctggagccaaagatgttgtccaccttgacagtgaaaagattctttcttgtggagaagttattcatgtgaagatccttggaattttggctcttat

SEQ ID NO: 849289 - DNA, 100 bp, Homo sapiens
tttatgttctattgtgcgcactggcaaacgtatgtttctggaacattgcgatttggaatatgatgattattctccaccgtctaagagaccaaaggccaat

SEQ ID NO: 849290 - DNA, 101 bp, Homo sapiens
atgagtcagggacaaccaatgggaaactatggtcccagaccaaatatgagtatgcagccaaaccaaggtgttgacttcaaaatcaaaactgtagagctaag

SEQ ID NO: 849291 - DNA, 100 bp, Homo sapiens
tttgaaaggcatctgatttcactgccatgtctttgaacagcagtgcacagtgcagtcttcttcgtggctgaacaggttatcaagtgcaaggctgcagttg

SEQ ID NO: 849292 - DNA, 100 bp, Homo sapiens
acagaaaagtattgtggcatcttagaaaaacacttgaatttgtcttccaaaaagaaagaatctcagcttcaggaggtagctacagcaagctgggtagcag

SEQ ID NO: 849293 - DNA, 99 bp, Homo sapiens
tggattataaggatgtcatccccatggctgatgcagcaggcatcatccgctatgcaattggggatcgcctgaaggacctgaacagccaggcagacagcc

SEQ ID NO: 849294 - DNA, 100 bp, Homo sapiens
cgaattagccaagaaacacaaaccacagatcctcatgatgccaaatggagcggagtccctgaaagatttttgccaggaagatctggaagaagaggaaaac

SEQ ID NO: 849295 - DNA, 98 bp, Homo sapiens
tccgacctaccatgttccctccgaaggacccagaaaagctgcaggccatgcacctggagcgatgagaaaccaccggcaccatctcaagtacagctgat

SEQ ID NO: 849296 - DNA, 100 bp, Homo sapiens
ctctcttctcagctgtgcacaagatagaagagggacatattggggtatattacaggctgcgggcctctcgggtgcttcttgtcggcttgaaaggacttgg

SEQ ID NO: 849297 - DNA, 99 bp, Homo sapiens
tccactctcccagagtgctccaacgggactgaaccacatgggctggccagagcacacaccaggcactgagtttgaaacagctgagacacttctaaattc

SEQ ID NO: 849298 - DNA, 98 bp, Homo sapiens
gcccagccctcttcactcgctgccaagggctacagaagtgtgcatcccaaccttccttctgacaagtcccagcccacacatcttgctgacttcactca

SEQ ID NO: 849299 - DNA, 100 bp, Homo sapiens
ctggatgcccagctggacgcctataatgcgagaaaacaagggcagctgcgttccctgcacctgacatgtgacagcgccccagttgggagccagggcacct

SEQ ID NO: 849300 - DNA, 98 bp, Homo sapiens
cctgtattcttaccattgaaagcattgaacctggccacatcccaggtaccgtgaacatccccttcacagacttcctgagccaggaggggctggagaag

SEQ ID NO: 849301 - DNA, 98 bp, Homo sapiens
tgcaggtcctggatttatttctcgattcgctgtcggaggagaatgagaccctggtggagtttgctattgatgccatggacaatattaccaggcagaac

SEQ ID NO: 849302 - DNA, 98 bp, Homo sapiens
cctgtccttcgagaccatcgacaagatgcgccgcgccagctcctactcctccctcaactccctcatcgccacacccactcgcccgggtctatggccac

SEQ ID NO: 849303 - DNA, 98 bp, Homo sapiens
cgagtcctgccgcctcccgggagtgccgtgcgccgcagcccgggcccaggccccggcagcgcctgggacaaggttctgatctacaatggccaactgga

SEQ ID NO: 849304 - DNA, 99 bp, Homo sapiens
acacattcagactacaagtccagacccaggagagcaaggcccagaaagagccgtgctggtatagaggactctaagaagtggggcatgctgtttctggtg

SEQ ID NO: 849305 - DNA, 98 bp, Homo sapiens
ggaaacgtctgctaagactgcttccaatgtagaagagcggagcttggagattatgacccatataaacatactgcaggatatgtatctgagtaccggtt

SEQ ID NO: 849306 - DNA, 123 bp, Homo sapiens
ccaccattgaagactcctacctgaaacatacggagattgacaatcaatgggccatcttggacgaccagcatctcagacatgtcgaaaaagatgttttgatccctaaaataatgagagaaaagg

SEQ ID NO: 849307 - DNA, 98 bp, Homo sapiens
acatgaacagcctgctacagacgttatttttcacgaatcagctacgaaaggatgaaatctgtaagtacagacctgagaattctgttgctaatgacact

SEQ ID NO: 849308 - DNA, 98 bp, Homo sapiens
ccccaggatgccgtgggccgcagccactcaggactgtcaaaggtttggtgcacctcgatttggaggaagtagggcagggcccttatctggaaagaagt

SEQ ID NO: 849309 - DNA, 100 bp, Homo sapiens
ccagattggacatatgtaaagggacatcagtatatctggatcatcaggtacaagaaaattccccaggacacagagctggtttggagcctttctttgattt

SEQ ID NO: 849310 - DNA, 98 bp, Homo sapiens
cgtggccttagctgtgctcgcgctactctctctttctggcctggaggctatccagcggtgaatcatttgatgtaaaagacttgactccataatctgca

SEQ ID NO: 849311 - DNA, 99 bp, Homo sapiens
ggctgccggcatggcacattacaacttcaagaaaattacggtggtgccgtccgccaagctccagtgatccacaagctcagaaatacatcgcggaaagta

SEQ ID NO: 849312 - DNA, 100 bp, Homo sapiens
cctggaactcccacctccacagacccgtccgggtgctgaaagtccacggatgctatccctggtcaaatcagagctcagttcctacccccggttgcgagag

SEQ ID NO: 849313 - DNA, 100 bp, Homo sapiens
ttctgaagactgccctcatccacgatggcctagcacgtggaattcgcgaagctgccaaagccttagacaacaaggaagatgtccgagcaactgaaaaaga

SEQ ID NO: 849314 - DNA, 100 bp, Homo sapiens
caacttgctaatggcaggcattttacaagcctctacagctttacgttccagtccaataatgagaaaaaaagtatctttaaatacgtatacacctgcaaag

SEQ ID NO: 849315 - DNA, 98 bp, Homo sapiens
agagagtcgtaaacatcctgtggactacacaccgtttaacaagatgcaacagtattctggggctgaaaagacagaagttttgagtgaagaccttcttc

SEQ ID NO: 849316 - DNA, 100 bp, Homo sapiens
ggaagtcactcataagcgcgctcaagattcctctgtgacgagggtgcaggtatctctggggactacatcgatcgcgtggacgagcccttgtcctgctctt

SEQ ID NO: 849317 - DNA, 100 bp, Homo sapiens
agcttacattttatgtaagagaaacagaccagagttcctccgatggccaggaaccttttagtacttccgagtactcagggagtctctcaggttgctcctg

SEQ ID NO: 849318 - DNA, 100 bp, Homo sapiens
gagctggggctaaaaaaatatggagacattccagagtatgtcctggcctatattgactatctttctcacctcaatgcatatagcactttctacattgtgg

SEQ ID NO: 849319 - DNA, 100 bp, Homo sapiens
agaagaagcggaaaaaagaaaactctagaagtctggatgtcggtgggcctctgagatatgccgtttacggtccgtagttcgtggtccttcgccggtgtcc

SEQ ID NO: 849320 - DNA, 50 bp, Homo sapiens
cggtgctggagaacttcgtgggccgtcatccgtccttggctcaggatttg

SEQ ID NO: 849321 - DNA, 100 bp, Homo sapiens
ttacaactcacctcttgggatgaagatgcctgggccagcaaggaactctaactccttgccactcaagaaatgtcctccctttcagaatatgccttccgca

SEQ ID NO: 849322 - DNA, 125 bp, Homo sapiens
tgtccagccacatcatatcacagtatcagttaaggagcttgatttgtttttggcatactacgtgcaggagcaagccctgcatgaattccccaatgacatcttcacaaacgaggatagaagacaag

SEQ ID NO: 849323 - DNA, 100 bp, Homo sapiens
tttccctcccgtgagttctggcacaggctatgtggaggagatatagagccaagaaatatttatgtaaagtgaaagctgcctgcaagattcaagcctggta

SEQ ID NO: 849324 - DNA, 100 bp, Homo sapiens
gctgtctgcccattgatagaggccagattgtcttggaagttccaaagttgcaacgatttctaatccacattcatctcaatggaaggatcctgccttaagt

SEQ ID NO: 849325 - DNA, 100 bp, Homo sapiens
tccagaacttgcagcaacaataggatcagttcgacagcttagacaagcatacacaatggggaattgacttcttggaaagatatgccaaatttgttaaaga

SEQ ID NO: 849326 - DNA, 98 bp, Homo sapiens
atggagctgctatggtggtcatggcttttgatgaagaaggacaggtcaattacaaggatcgtagtccctgttacggctaccagtgggtgtcagaagaa

SEQ ID NO: 849327 - DNA, 100 bp, Homo sapiens
tctacgcacacagtgaagcatgccaaggtgtacacctgcactatctgcagtcgggcatacacatcaacagccagctaaaggtgtggatgagcaaatacgg

SEQ ID NO: 849328 - DNA, 98 bp, Homo sapiens
gtgatcgcgctgatgttcctggcctggggggaagggaaatcctcattgacgattcaatttgttgaaggccaatttgtggactcctacgatccaaccat

SEQ ID NO: 849329 - DNA, 99 bp, Homo sapiens
tggatgttgaagacgaggaagatgatgaagagatcctttcccggagttcagttatgggtgtgagaggtttgcaaggatttgtgggaagtacctgcccac

SEQ ID NO: 849330 - DNA, 100 bp, Homo sapiens
accagcagctgaaaccaattggctctggggcccaagggattgtttggtatgtcgagagtaccaacgtggcaattgcaaccgaggagaaaatgattgtcgg

SEQ ID NO: 849331 - DNA, 99 bp, Homo sapiens
aatattccacagatacaagtgacactgctgaaaaataaagctccaggattagggaaagtcaatgagcttacgatgtgaagaacttcatcttcatgcaga

SEQ ID NO: 849332 - DNA, 99 bp, Homo sapiens
ggaaattggtttgaaatacaaactgatcctagaactaatgaaggcatcctgaaagtggtgaagattcatgatgttgctatcaaaagttgagaaattgtc

SEQ ID NO: 849333 - DNA, 100 bp, Homo sapiens
ctgcgccttccacactgtgcgcttgggcctttggagtgacgctgtgggaactcatgactctgggccagactccctacgtggacattgaccccttcgagat

SEQ ID NO: 849334 - DNA, 98 bp, Homo sapiens
gggaagattttggtagagaagaatgaacattgtattgagaacaatatagatttgcaggtgttccactgtgtccactttgagtgtccagagcagcagag

SEQ ID NO: 849335 - DNA, 100 bp, Homo sapiens
ctgaatgaagtgcccgcccctctaagcccggagcccggcgctttccccgcaagatggacggtttcgccggcagtctcgtacgaggatgtcgtccaggaaa

SEQ ID NO: 849336 - DNA, 98 bp, Homo sapiens
gccgatgtgtgagaagaccaccatcaacaatgagtacaactaccgctgctggaccacaaaccgctgccagaaaaaatcccgccgcatcctgcttcctg

SEQ ID NO: 849337 - DNA, 98 bp, Homo sapiens
gcagcttttccggcctgacaacttcatctttggcacacaagccatgccccctcttttctctttgggataccaccagtgccgctggaactatgaagatg

SEQ ID NO: 849338 - DNA, 99 bp, Homo sapiens
aaggatctccagcaaactggaaaagaaaagagaagttgcctcaggttacgaggtcttggcacaattatatgtgtaatgctcggaagacgttcctgaagc

SEQ ID NO: 849339 - DNA, 100 bp, Homo sapiens
gtcaagttgctcccatcaaaattagccagcgttctcttttcccatcatagagtgactgttttgcaggaatgaggggagaatcatacttcatcggaatgag

SEQ ID NO: 849340 - DNA, 126 bp, Homo sapiens
agaaaagattcccgttcctgttgcaaagaaaaaggaagctcccccagctaaagacactcgcctatggggacatgaaccacgagtggatcggcaacgagtggctccccagcctgggcctcccccagt

SEQ ID NO: 849341 - DNA, 99 bp, Homo sapiens
gctccccagcagagagcggccccacaacaaaagaggtccagcccctcagagggattgtgtccacctgagacaaagcatggaggacacaagaatgggagg

SEQ ID NO: 849342 - DNA, 98 bp, Homo sapiens
ctggctctgaaggcgaacgcttcgctggccatttaggagctctgctcaaagccagacgggagcttcctctgcagaagggagatattgtttacatttat

SEQ ID NO: 849343 - DNA, 100 bp, Homo sapiens
aggcgattggcatcgatctctccatcccttccgaggcccgacttcggcaacttgttccagcgatggcatgttcctctagaactccagatgacaagacaaa

SEQ ID NO: 849344 - DNA, 100 bp, Homo sapiens
actggtcgtcttcagttaatggcaagacttgcagagggttcgctatcctgatcgcatcacactgatccggggcaaccatgagagtcgccagatcacgcag

SEQ ID NO: 849345 - DNA, 100 bp, Homo sapiens
agaactgaagaaggaatataatgcattacatcaaagacacactgagccattatgcagatgtagatcctgaaaaccagaactttttacttgaatcgaattt

SEQ ID NO: 849346 - DNA, 98 bp, Homo sapiens
gcagctccggccgcctggctccccatactagtcgccgacggtctggaaaatcccgaagcagaagcccgtattcatctaggcattcaagatctcgtagc

SEQ ID NO: 849347 - DNA, 100 bp, Homo sapiens
aggagcctgtgaggcgttctggagctttaaggtagtgggcagcagtcagtgacaggtgtaacctctgtggatgacagcaacagttactggaggatacggg

SEQ ID NO: 849348 - DNA, 100 bp, Homo sapiens
gtacgggaagaacttcttcagaattagaaaggagctgcttcccaataaggaaacagctcggggaccagttctacaaggaagccattgagcactgccggag

SEQ ID NO: 849349 - DNA, 100 bp, Homo sapiens
cttctctggaggagaccagacttttgtactttgctccaaatacgagaacactcctatgccaccttcaccagctgtacaagtgcagggccagcctaacagt

SEQ ID NO: 849350 - DNA, 126 bp, Homo sapiens
ctcatcttcatggaaacgtctgctaagactgcttccaatgtagaagagcccatcgccgaagcaccattcaagttcgacatggaattggatgacttgcctaaggaaaagctcaaagaactaattttt

SEQ ID NO: 849351 - DNA, 98 bp, Homo sapiens
ggaccccgagcaccgggccctctgcgacctggggccctgggtgaagtgctccgtcgcccttgcctccagaagcctggagagttgatgacctgatagag

SEQ ID NO: 849352 - DNA, 98 bp, Homo sapiens
tggagcggccgccttccagcgcttaccttacaaatttgaagtacagcagatgttagaagaacctcagtggggattagtatttgaaaagacaagatgga

SEQ ID NO: 849353 - DNA, 99 bp, Homo sapiens
ggcggctgccgcacaatcccgggttgtccgggtcctgtcaatgtcacgtgctggagaatctggtaaaagcaccattgtgaagcagatgaggatcctgca

SEQ ID NO: 849354 - DNA, 99 bp, Homo sapiens
gtaagcctttggtcataatcgctgaagatgttgatggagaagctctaagtacactcgtcttgaatagtagagacagggtttcgccatcttggccaggct

SEQ ID NO: 849355 - DNA, 98 bp, Homo sapiens
tcttccccgcgccctgcggggctgtccaacgccttccagctccggctcccgctgcctgcaccatgtccgccagagacacgaagatcgattgagaagtt

SEQ ID NO: 849356 - DNA, 100 bp, Homo sapiens
ccaaggaaaactgggtgcagagggttgtggagaagtttttgaagaggtggaatgaatcttacttgttgaatatcttctggttactagttggattcatttg

SEQ ID NO: 849357 - DNA, 99 bp, Homo sapiens
gcgtgcgattcttccagcagatatgaagctgagatgccgcggcagtttcccaagctgaacatctctgaagtggatgagcaagtccggctcctggcggag

SEQ ID NO: 849358 - DNA, 98 bp, Homo sapiens
taaatcgtttctccaaagacattggacacttggatgatttgctgccgctgacgtttttagatttcatccagatcatcagaaaagcccttactgaggaa

SEQ ID NO: 849359 - DNA, 100 bp, Homo sapiens
tgagaagcatagccctgtctatcattctggttcgtgctggccttggtctggattcaaaggaactcaacagaggcaattattatcccgactgcaaatcgac

SEQ ID NO: 849360 - DNA, 100 bp, Homo sapiens
cccacaccaatccaagccctgaccttggcacctgccatccgtgacaaactggacatccttggggctgctgagacagatacatccagaaagtgcccagaag

SEQ ID NO: 849361 - DNA, 98 bp, Homo sapiens
tggactcttcttgagaaattgctctgcctctaagacaactctgcctgtgttgaccttattcacaaagggaatcccaggatttcctggaaaccgaggat

SEQ ID NO: 849362 - DNA, 98 bp, Homo sapiens
tacagcccagacgcccaggcgtgccttgtttttggattcagttctcctgtgtgcatggctttccaaaaggagaaattttctgtatcagcaaaaatccc

SEQ ID NO: 849363 - DNA, 100 bp, Homo sapiens
gcaaggaagaaattgttcagttcttctcagggcgagctgcatgtctccaaactcttcaaccatcccaatatcgtgccatatcgagccacttttattgcag

SEQ ID NO: 849364 - DNA, 98 bp, Homo sapiens
gatgtcagcaatgtcgcttcaaaaagtgtctgtctgttggaatgtcaagagatggccccagaggtgatccgaatgcaggataacaacccattcagttt

SEQ ID NO: 849365 - DNA, 99 bp, Homo sapiens
ttgtgtgtggacattcaggaattctcctgccaccgcgtggtgcttgccgcagccagcaactatttcagaactttacagactagcatggcaaagcttctc

SEQ ID NO: 849366 - DNA, 100 bp, Homo sapiens
aggagtggactagggtcgccggggaagcggggtccccgtgaaggaagcactccccggcatcattaagcagggggtgaactgcttagaatctcagggccag

SEQ ID NO: 849367 - DNA, 100 bp, Homo sapiens
caggactccaaaatggcgtcagttggtggatgaagacctgatcattgaagttcaccagttatttttctcaagaatgtgaataacaatgggatttgcactc

SEQ ID NO: 849368 - DNA, 100 bp, Homo sapiens
aactacccctggaacaagttgccggccaacgtgagacagcggaggaaatatttgagagtgtaggagatcgagagctaagacaagtctttgaaggacagaa

SEQ ID NO: 849369 - DNA, 100 bp, Homo sapiens
cggcttcctgactggagcattcaccttaggctatgcagcagacagactctatgtttgggaatgggaaaggataccggggcaagaaggcaaccactgttac

SEQ ID NO: 849370 - DNA, 99 bp, Homo sapiens
ttggagctgccgccgccgggactcccgtcccagcagctggagaccatggccaaaatggaggtgaaaacctcacttctggacaatatgattggagttggg

SEQ ID NO: 849371 - DNA, 100 bp, Homo sapiens
agccgccttccccaggcagtggaaccttcgggctccttatcctagaaggaaaacatcaccatggctacagaaattggttctcctcctcgttttttccata

SEQ ID NO: 849372 - DNA, 100 bp, Homo sapiens
tcaggggaagatatgcatcagttccatcgagccattactacagggcaattgaaggaacagactaaaaatcgtgtcctggaaggaaactacaggtactacc

SEQ ID NO: 849373 - DNA, 100 bp, Homo sapiens
aagggccttcacttcagccttcagacccaagtcttggcagacaacctagtagaagaaagccaatggtggaatctaatcagaaaagctcattccaagaaat

SEQ ID NO: 849374 - DNA, 99 bp, Homo sapiens
aagcctgaatgcagtactgaagaactgctttcaattctaagtatcgtcagtatttaaacagatcacatcatgcgtgagtacaagctagtggtccttggt

SEQ ID NO: 849375 - DNA, 100 bp, Homo sapiens
cgctcctctggccgcccctccctccgcgcggggacccctggcgggcggcaggaggacatggccagcgacgccgtgcagtgaaagaattcttagccaaagc

SEQ ID NO: 849376 - DNA, 100 bp, Homo sapiens
cctatccaccgtgttgcagatatatctgggtttgctgggggaagcgggccaggaaccagccctggcagaagtgttccaccagttgcacgatcctcaccgc

SEQ ID NO: 849377 - DNA, 100 bp, Homo sapiens
gtcgtcatggctggctacgaatacgtgagcccggagcagctggctggctttgataagtacaaggtataagtgtgctagcggagtgtctagattgtcctga

SEQ ID NO: 849378 - DNA, 100 bp, Homo sapiens
tccagcgccgtaagcgaggcctccttctcctacaagaaacttggcctcctagcccttatcaatgaagaaagccattttcctcaagccacagacagcacct

SEQ ID NO: 849379 - DNA, 98 bp, Homo sapiens
cagcatgacgtgaggccgtggatgcaggcattaagtgggaagccgtgtccgccttttaagattgtgattctggatgaagcagattctatgacctcagc

SEQ ID NO: 849380 - DNA, 100 bp, Homo sapiens
gctgcgggacgacaacgagcagctcatcacccagtacgagcgggagaaggcgctgcgcaagcacgctgaggagctgtttgcagacaaggtcccaaagaca

SEQ ID NO: 849381 - DNA, 101 bp, Homo sapiens
cagagtcattgcaggaagtggatgagttccacctcattttagagtatcaagcagggtatccattactgtcagctgagatagaagaaatagaagatgcacaa

SEQ ID NO: 849382 - DNA, 100 bp, Homo sapiens
cacagtcacacaagcttatcatctttgatgctcgacaaaacagtgtcgctgataccaacaagtaatagttatgcacgagtgcgagctgtggtgatgaccc

SEQ ID NO: 849383 - DNA, 134 bp, Homo sapiens
agagccgagtgcagaagatctgggtgcccgtggaccacaggccctcgttgcccagatcacagcaatggccaaagatgaacgagtgaacctgctgtccttcactgggagcactcaggtgggaaaacaggtgggcc

SEQ ID NO: 849384 - DNA, 98 bp, Homo sapiens
tggaggggtggtgaccatcgaaaggagcaagagcaagatcaccgtgacatccgaggtgcctttctccaaaaggtgttcattgaggatgtcagcaggga

SEQ ID NO: 849385 - DNA, 98 bp, Homo sapiens
aagagaatggctgtgctgacttttttatccgtggagagcgactcagggacaaaatgttgagaaaccaaggcagtatcatgagcaggaagaaacacctg

SEQ ID NO: 849386 - DNA, 99 bp, Homo sapiens
agagatcctgagagcccgagcgcccagcgccgcgccgggagggggattcccgaagtcttccgttttctgagaatgtgagtgctgttcaaaaattagact

SEQ ID NO: 849387 - DNA, 99 bp, Homo sapiens
tggaggttcgcggctctaacggggctttctacaagttacagaatgtctgaaggggacagtgtgggagaatccgtccatgggaaaccttcggtggtgtac

SEQ ID NO: 849388 - DNA, 100 bp, Homo sapiens
tgaatcccctgtttgagaaaaggcctaagaattttggcattgattcccaaatgctggaaaatcctctttgctaagttgtgtttctcatgcaaaacctgca

SEQ ID NO: 849389 - DNA, 130 bp, Homo sapiens
aagcaaatgaaatgttgcttgagaaacttcgccagcgaatacatgataaagctgttgctctggagggaaaactgcctttgcttctgagccggatgaaggaagtagggaaagtatttcttgctaccaacag

SEQ ID NO: 849390 - DNA, 100 bp, Homo sapiens
ctgtgtgtggccatggtgcattacaaccagccgcggcggcttaccacgaccctgtgcccaggaagtacacgagaagctccgaggatggctgaagtccaac

SEQ ID NO: 849391 - DNA, 99 bp, Homo sapiens
ttcttggatcttggaggtggtgtaaaggaagctcaagtatatcaagcattcaaattgctcacagctgatcctaaggccggtctaattgaagccaacgga

SEQ ID NO: 849392 - DNA, 98 bp, Homo sapiens
aaaaaggatcaagtgactgctcaggaaattttccaagacaagttatgaagacagtatggagtttccagaccatagtagacatttgctacagtgtctga

SEQ ID NO: 849393 - DNA, 100 bp, Homo sapiens
acgttcggctactacttaataatgacaatctcctcagggaaggggcagcacaccccatctgctttgatatgattgaagaagcatacatgacaaaatgtgg

SEQ ID NO: 849394 - DNA, 98 bp, Homo sapiens
atgcagaacagccagactgctgtcagcctcagagaacttgaggaagagaacacgagcttgaagtatcagatgtagaaggtggtgatggactgcagctc

SEQ ID NO: 849395 - DNA, 98 bp, Homo sapiens
cgccggctactgccgcttcagttctcccggtgtggccacgagtcgggaggctactcacagtcgaactacaactccccggggtccggccagaactacag

SEQ ID NO: 849396 - DNA, 100 bp, Homo sapiens
tccattccaaaaaaataagaaaaacagaaaaataataattacatctgcaaagaccttatttccagagacggagtttcgtcatgttggccaggcccatttg

SEQ ID NO: 849397 - DNA, 100 bp, Homo sapiens
cggagcccgcaactgggggcatcatggagggaactcgaatcatttatgacagaaagtttctgttggatcgtcgcaattctcccatggctcagaccccacc

SEQ ID NO: 849398 - DNA, 99 bp, Homo sapiens
tgtcagtttgagactgcccagaagaagtgccaggaggcgattaatgctacttgcaaaggcgtgtcctactgcacagtgaaacaaagagtcctcttcgtg

SEQ ID NO: 849399 - DNA, 100 bp, Homo sapiens
agatcttcacagcacagttcctgggaaggtggagccaccagcctctccttgtttaacggatgaagagtcccggaaaaattgggaagaatttggaaatcca

SEQ ID NO: 849400 - DNA, 100 bp, Homo sapiens
ccacactgaggagcgcggccagccctgctcgcagaattaccgcctcttctttaacatccacagttatttcaggaaattcttctagtgccagcgtttcctc

SEQ ID NO: 849401 - DNA, 100 bp, Homo sapiens
ctaccttatgagctcggttttcttatgcttataagagtggaacaggtacggggctgatgttgacgtcaaccaccacctgactcctgatgtccagcctcga

SEQ ID NO: 849402 - DNA, 100 bp, Homo sapiens
agggctctgatcaagcggatccaagccatgattcccaagaatctccagccaagtcctccgtgctcgtggtgggaatcgtcatcggtgtcttgctactcac

SEQ ID NO: 849403 - DNA, 100 bp, Homo sapiens
accttataaaaagcagcttaatgaggaactccagcggcgctcttcagcattaggaatatatgcagaacatgtcctgcggcccaagaatcttggacttgca

SEQ ID NO: 849404 - DNA, 100 bp, Homo sapiens
tcaaacaaggaaacagatatgtattctggataaggttttggaactgaaagaacacaaactggatggcaaattgatagatcccaaaagggccaaagcttta

SEQ ID NO: 849405 - DNA, 100 bp, Homo sapiens
caccgtaaatcactgaatcttgttgattctcctcagccactcctagaaaaggcttcccaggaagaatgaagcagtcaacttgcataaggcctgtcttgac

SEQ ID NO: 849406 - DNA, 51 bp, Homo sapiens
ctcctttggaaggatctctctgatccggcactccacccagagcctctttga

SEQ ID NO: 849407 - DNA, 100 bp, Homo sapiens
gggaaagtaattttgtttgccgaagtgacccccacaacgatgcgtctcctggatgggggtcccttcagtgttgtacgacgatgtatcaacagagaaactg

SEQ ID NO: 849408 - DNA, 100 bp, Homo sapiens
cactgaaaggaaatgacggattttcgggacgaccctgggacagtctccactggggcagatccagctgaccatccggcacagctcgcagagaaacaagctt

SEQ ID NO: 849409 - DNA, 100 bp, Homo sapiens
agaagctgaatccaaacaagccactgaggaagttacatttcacttcacttcttaataacataggatggcactggatctttaaaacgcagtggttccttta

SEQ ID NO: 849410 - DNA, 100 bp, Homo sapiens
ctaagggaagaaaagttttgggtgatggggacaacaagccaaagagaagggaatttggtgctgccaggttgccagatttctaagaaggagtttgaagagg

SEQ ID NO: 849411 - DNA, 100 bp, Homo sapiens
gcaaacaactccgcaaacgaaaaagaacgacatgatgcaatcttcaggaaagtaagagggaatgacactgtgcgctttgctttggatgtcctggctattc

SEQ ID NO: 849412 - DNA, 99 bp, Homo sapiens
ggcaggccaggagcggttccagagcatgcatgcctcctactaccacaaggcccatgcctgcatcatgattctggtcttggatggcaaactgcttcgcac

SEQ ID NO: 849413 - DNA, 100 bp, Homo sapiens
gaactacagaacagcacgtaccagaggtggaagtccaagtcaaacgcagaaggactgcctcactgagcaaccaagaatttgaaagaagccaacactaaac

SEQ ID NO: 849414 - DNA, 125 bp, Homo sapiens
taagtgatgttaatgatgatgtcaggagggcagcagtagaatcacttgggttcattctattcagcgcggagacccacatcaagggcttcacactgaacgatgctgccaacagccgcctcatcata

SEQ ID NO: 849415 - DNA, 127 bp, Homo sapiens
cggacgagaagccgctccggaggaaacggagcgctgccctgcagcccgagcccatcaaggtgtacggacagatgaggagcgggaaggcctcctgcaccctggagaccgtgtgggaagacaagcacaa

SEQ ID NO: 849416 - DNA, 99 bp, Homo sapiens
ctgccctacgcctggtcaaacctggaaatcaggctgaccagtgcaccggtcttcagggcttcttggttttccacagctttggtgggggaactggttctg

SEQ ID NO: 849417 - DNA, 100 bp, Homo sapiens
cagaagtacattgtacaagaaaatgcacttgaatttggacagtgaaaaggcccttaaaaaggagctgtggccctcaagaatcttcaaattaaagaaaatg

SEQ ID NO: 849418 - DNA, 100 bp, Homo sapiens
ggaagcgcgggcggacgacagaggatgccgaaccactccaaaatgctgagccgattatcaggattagcaaatgttgttttgcatgaattatcaggagatg

SEQ ID NO: 849419 - DNA, 100 bp, Homo sapiens
aaccttattctggccaacagtgttaagtataatgatggtgttatctgaaaaggttagtcagctgatggaatggactaacaaaagacctgtaataagaatg

SEQ ID NO: 849420 - DNA, 98 bp, Homo sapiens
cagaatggttatctacacacccttctcatggcaatcgagttgagtacttggatagacttatacctcagccctttctaaggcacaaaatgatgtgatgg

SEQ ID NO: 849421 - DNA, 100 bp, Homo sapiens
ggggtgtgtgggaccatgtccagccctctccagtgtatccacagccccgacctttgatgagaactcagctgtccagaaagctgccttggaagacacactg

SEQ ID NO: 849422 - DNA, 100 bp, Homo sapiens
tggatgatgagagtctgaaagagctattcagtcagtttgccagttcacgtgagcgtgtccagcggctacgggagcctggggagcagcgggtcgcaggagc

SEQ ID NO: 849423 - DNA, 100 bp, Homo sapiens
acagagcatcataatggcatagcagagttactggaaatattgggaaggtggcccacaaactctttaacaacttgaaataaatgtgtggacttaattcacc

SEQ ID NO: 849424 - DNA, 100 bp, Homo sapiens
ctggagccaagcccctcttcaggagtaaggaactggttgagtgggtgctggaagaggtggcccagaggtcccatgctgtgggatccccaggcagccccct

SEQ ID NO: 849425 - DNA, 99 bp, Homo sapiens
aactttccatttctcatggtcaacatttttattattaaatcaactctttcagcttctgtaaacagccgcaaagacaagtctttaagggtaatgagccag

SEQ ID NO: 849426 - DNA, 100 bp, Homo sapiens
ccggcttcaatatcttcacccagcatggtgagatcggactggaactgttcggctgcgaccagaaatttattttcctgagtaaattgccgagaattaagaa

SEQ ID NO: 849427 - DNA, 100 bp, Homo sapiens
agattcaatgaagtggccgcacagtatagtgaagataaagccaggcaaggggtgtcttcagtgccctgggtttgcctgtgacccaatgcccactgggact

SEQ ID NO: 849428 - DNA, 100 bp, Homo sapiens
ctggacaagcacatggaggctcagcgggccgaggaggagtacgagagggcctccaaagtggaccagtttgtgacgcgcttcctgctgcgggagacggtga

SEQ ID NO: 849429 - DNA, 100 bp, Homo sapiens
agtggacaagaaaggacatttctgggggtagtagaatgcttgaggcctggaatttaaacctgagccactatctgaagtttcaagccacagtcgaggaagg

SEQ ID NO: 849430 - DNA, 100 bp, Homo sapiens
atccagagtgttactggcttacaaattggattgagattccagagtgtttgagggatagttatcccagacctgatcagccctgttacctgtatgtgatagg

SEQ ID NO: 849431 - DNA, 98 bp, Homo sapiens
attacctgaaggtgaaacagattgagccagaaggaagacaatgctggtgggttgcctatgaaaaagaacattttaaaggccagcagtttctgcttgaa

SEQ ID NO: 849432 - DNA, 100 bp, Homo sapiens
gtgagaagggccggcggattcgggaactgactgctgtagttcagaagaggtttggctttccagagggcagtgtagagttcatagccctgatgaagcaagt

SEQ ID NO: 849433 - DNA, 100 bp, Homo sapiens
atcaaatgctcaagatttaccccgaaaccaaaaggaccttcgggagaaaaactgggaagcaatggaagcattggcatcaactgaaaaaatgctgcaggac

SEQ ID NO: 849434 - DNA, 100 bp, Homo sapiens
caccaattgacaacggttcaaaaatcaccaactaccttttagagtgggatgagggaaatcctcattgacgattcaatttgttgaaggccaatttgtggac

SEQ ID NO: 849435 - DNA, 98 bp, Homo sapiens
agatgagtgagcttgaccagttacggcaggaggccgagcaacttaagaaccagattcgaggatgtaaacagctggaaagaactttgcttcaatcatta

SEQ ID NO: 849436 - DNA, 99 bp, Homo sapiens
gcagaagcttcaccacaaaagcgaaatgggcacaccacagattgaaactgcttctgccttggctagaggccagaattcatgagggctgtgaggagcctg

SEQ ID NO: 849437 - DNA, 98 bp, Homo sapiens
agcctaagagaactatggcaacatcaggtgactgtcccagaagtgaatcgcagagtacccaaaggcaagtggaacagctctaatggggttgaagaaaa

SEQ ID NO: 849438 - DNA, 101 bp, Homo sapiens
tgcaacctggaacccctagtctcaagagatcctccagcctcagcctccctgtttgcagaaaaaacttcagcatgtgccaggaacacaacctcaccttgatc

SEQ ID NO: 849439 - DNA, 98 bp, Homo sapiens
ggacctcctcaatatagacgatactgcaaaaaggaaatctgggtcagagacgagctgtacgctcagaaactgaagtacaaagccatcagcgaggagct

SEQ ID NO: 849440 - DNA, 98 bp, Homo sapiens
caggaaccccgctggcagatgaccaggaccagtctctggtgcctgacaaggagggagtgaaggagctcgtggataggagaaagaagcatgccattcat

SEQ ID NO: 849441 - DNA, 98 bp, Homo sapiens
ttcaccagcactgtctccaccctagagggtcatgtaggtacaacagcaaccaagaagatcgatgtctacctccctctgcactcgagccaggacagact

SEQ ID NO: 849442 - DNA, 99 bp, Homo sapiens
ggaagcccaccgactttgaggatctggaggacggagaggacctgttcaccagcactgtctccaccctagagtcctcctgcatatgcccaagaggattgg

SEQ ID NO: 849443 - DNA, 56 bp, Homo sapiens
gtttggctttccagagggcagtgtagagccggggatctgacaacagactggctcac

SEQ ID NO: 849444 - DNA, 98 bp, Homo sapiens
ttatccactcattggcagagaagcttgttctagaacagatcagacattttgtaatgatgcctgaaataaacactaaccacctcgacaagcaacaggtt

SEQ ID NO: 849445 - DNA, 99 bp, Homo sapiens
gagccctgggcgcgggggcggcgtgtcaggtggttgcggagctggtaaggtactccaaagattcaggtttactcacgtcatccagcagagaatggaaag

SEQ ID NO: 849446 - DNA, 100 bp, Homo sapiens
aagaaaacaatcacaaaactgaagcctaagagagaaactgtcctagttgtccaggtacaaattctgagctgtctaacccctctgaaacggaatctgagcg

SEQ ID NO: 849447 - DNA, 100 bp, Homo sapiens
agcgtggacgccggatgagttgcttttaggcttgctggcccgcggggctgtccaggcacgcgaggcccctcagttgattgcttatgcgtcaactgcagat

SEQ ID NO: 849448 - DNA, 112 bp, Homo sapiens
agtaatcagtttgtggatcttgaggcaactaactatgatggtgtcattccacacatccacaaatctctgattgggaagaaaggacaacagaagactgtctaaaggatgcctg

SEQ ID NO: 849449 - DNA, 100 bp, Homo sapiens
aagcagaaggagtctttgaaaaaggtggctgtacttttgatgatggtccaggggcctgtgattaccaccaggatctgtatgatgactttgaatgggtgca

SEQ ID NO: 849450 - DNA, 100 bp, Homo sapiens
cgcccaagtggcggggactactggtgcctgcgctgaaaaagggaatagcatttcaaggttcagtggaggagaaccccaagagcaccaaaatggaaagatg

SEQ ID NO: 849451 - DNA, 99 bp, Homo sapiens
gcagagggattgatgtccgaagaagaaaaatctgggacatgtatggaccacaaactcagttagagaggtccagtgctttgtgtggtaatgagcagcaat

SEQ ID NO: 849452 - DNA, 100 bp, Homo sapiens
tcgggaggaattagaacaatacacaactgaaattgtgcagaacaacctcctggggtcccagggcgcacatcttctgcagaaagccgtcattacacctgat

SEQ ID NO: 849453 - DNA, 100 bp, Homo sapiens
gtgaagaccatgacaggaggccgagcgcagagcattggcaggaggggcaaggtggaacaggcttacaaataccttcgagaagaagtcaaaacttttcaag

SEQ ID NO: 849454 - DNA, 100 bp, Homo sapiens
atcattcacgacacagaaaccaagatggaagaattcaaggaccaattacctgctgatgagctgcggggtattgaatttgaggctgctctcagcattactg

SEQ ID NO: 849455 - DNA, 100 bp, Homo sapiens
ctcggcctcatcagcccggcctacctcttcctctggcccgaagccttcctttatcgctttcagcgatggcaagccggcaggtggatattgcaactcaggg

SEQ ID NO: 849456 - DNA, 99 bp, Homo sapiens
ctggacgtgggatccacacagctcagaacagttggatcttgctcagtctctgtcagaggaagatcccttggtgtggatgaggtcaccattgtcaacatt

SEQ ID NO: 849457 - DNA, 100 bp, Homo sapiens
caccttgtccaggcgggcctcccgtttctggctccgggctgagcttcctggagaagaggaagctcctgacccctgaggattaccagcgatttctagacct

SEQ ID NO: 849458 - DNA, 98 bp, Homo sapiens
cacgcataatggatgaaaggaaccgacaggtagagatgacgacacaacagacagctgatgtatacgggtaatttggttagggagaagagggttagaga

SEQ ID NO: 849459 - DNA, 100 bp, Homo sapiens
agaagctggggccttgacaatttgcacttagtgaaagactggagaactgtgaatgaagtctgtgcagataataatcatgtccggacgtggacagtaacac

SEQ ID NO: 849460 - DNA, 99 bp, Homo sapiens
ttgaacatgctggtgccgctagccaagctgtcctgcctggacatgcacatgatggtgtccaagccagaacagtgggtaaagccaatggctgtagcagga

SEQ ID NO: 849461 - DNA, 100 bp, Homo sapiens
tttccggagggattccatcatagagtcattcaggagagcaggaaagaaaaggccatccctgtggatgtcgcgctgccacagaagtccagcgaaaaggcgg

SEQ ID NO: 849462 - DNA, 100 bp, Homo sapiens
aaaatacagccaagatcttggcaaagcttctccctcagtatttagaccaggccaccaggaaaccctccccgaagaatgggtagaatcaatcatctgcgtg

SEQ ID NO: 849463 - DNA, 100 bp, Homo sapiens
ggaccatctacaagagccaaatcaagattgcgtttctcaaagtcctacaggtccctccagctacaaggtgggcaccatggcggagaagtttgactgccac

SEQ ID NO: 849464 - DNA, 100 bp, Homo sapiens
agctgcgtccggcaggagacgaagagcccgggcggcgctcgtacttctggccactgggcgagcgtctggcagaccttctctgatggatgacctctgtgaa

SEQ ID NO: 849465 - DNA, 98 bp, Homo sapiens
cccttcctcatggatacggggtcccgggaggcagccttcaccagggacctgcccaggaaaccagcagatgcccaggaagaagctggcccagcggctgc

SEQ ID NO: 849466 - DNA, 112 bp, Homo sapiens
ggaaaactaagcagtgatgaagacctcgaaataattgttgatcaaaagcagttccttcagtgatccttaaagagtggtctgcctataaagggaagtcacctcaaacccctga

SEQ ID NO: 849467 - DNA, 100 bp, Homo sapiens
agaaattaatcgattaaggcagaagatacaggcagaacatgctagtcatggagatcgagaggaaataatgagtactatactggcaattgctggagaagat

SEQ ID NO: 849468 - DNA, 99 bp, Homo sapiens
gccactctctcctgggcccccaaagacaaatccagtaggaagaatgtgctggaggtgcggctggaagtatttcgggcagaggagctgatggcatgtgca

SEQ ID NO: 849469 - DNA, 100 bp, Homo sapiens
atttcgttcggcgtgttgagcagcgaaagatcctactggacatgtcagtgtcctttcacacccatgtgaaagaggtgctggagaatctggtaaaagcacc

SEQ ID NO: 849470 - DNA, 100 bp, Homo sapiens
gtcttgaggtcctacatctccgaaagcaagctcttctagaagttggacatggatttgattgacatactttggaggcaagatatagatcttggagtaagtc

SEQ ID NO: 849471 - DNA, 99 bp, Homo sapiens
gcagtagtatagagctgaccaagatgctatgtgagatcttgaaagtgggcgagttgcgttactcactataaacaatatccacccaacacaagcaaagtt

SEQ ID NO: 849472 - DNA, 98 bp, Homo sapiens
gaaatgattccaccatcagacagggccagtttacaaaagtatttgactacagtcattccttatgagaaaaaaaacggaccaccgtctgttgaagatct

SEQ ID NO: 849473 - DNA, 100 bp, Homo sapiens
cacacagatgggacgtatgcctatgatgccgacttcagctgctgcagctccttcaaattgctatcactgctgggtgcaaaaccaccacctctgctgtcat

SEQ ID NO: 849474 - DNA, 100 bp, Homo sapiens
cccggacagagcccgtggtcgcgcagtgtacacttgactgtgaagtggctgtgagagtgggtggagagttcttctttgaccctcagcctgcggatgcctc

SEQ ID NO: 849475 - DNA, 100 bp, Homo sapiens
ataatgttctgtcagttcccaccacagatgtgtctcagctccctccaccttctcaagatcagtctcaggtttcctatcctgggagcaggagagtgtgcct

SEQ ID NO: 849476 - DNA, 100 bp, Homo sapiens
cccggaaaacctaaccatgaagacttgaacttaatacagcaagaaagaccatcaagtttaccagttgaaaggattgttgacaaaaggaaaaataaaaaag

SEQ ID NO: 849477 - DNA, 100 bp, Homo sapiens
aagctatctagggacgagatctagaatcaactgagagagatgcttaaaaatcaccagttactttaatgagtgtgatgaatgcagactctgctaccatttt

SEQ ID NO: 849478 - DNA, 98 bp, Homo sapiens
acaaagtctagttcagaggagagtagatccgagatatatgtaggttcagctgcagcccggaaagaaatcataagaaacaaaattcgagcaattggcaa

SEQ ID NO: 849479 - DNA, 100 bp, Homo sapiens
atcaggaagaaatggaggaagaagcagaaatggaaattgacagaattctctttgaaattacagcagagatcctgcatattttgatgaaaattggctaaac

SEQ ID NO: 849480 - DNA, 100 bp, Homo sapiens
ggaggacgggctccgtggctggttcccggcgagctacgtgcagttgctggaggacttggaccctctgtggaacacccgagtacctagcccccgaagtcat

SEQ ID NO: 849481 - DNA, 100 bp, Homo sapiens
gtattcatcaataatgaaatgctgactaaggaacaagtttcttcactagttgaagaaggagaaaaacagaacaaacgttttaggccgtcaaaaatgtctt

SEQ ID NO: 849482 - DNA, 119 bp, Homo sapiens
tggctatccagacgctctggtcatactaaagaacacatctggaaggctgaccggttccctgatgtgttacctgcttctgctactgatccaaactgcagaacttctcattcatccccaag

SEQ ID NO: 849483 - DNA, 98 bp, Homo sapiens
ctaagcaaattagctgagaccacagataaagtcaaacaaggcttttgggaagaatttgaggagttgagaagttagtccattacttctctgacaaagcg

SEQ ID NO: 849484 - DNA, 100 bp, Homo sapiens
gagaaattgcagcagtcacccaaacctggggagaaggtcgcccggctcatggagatgggattttccagaggtgatgctttggaagccctgagagcttcaa

SEQ ID NO: 849485 - DNA, 99 bp, Homo sapiens
ttctaatcagagaaagtgaaagccaaaaaggagaattctctctttcagagaatgatgaggagcaggaggcactgccatctctggataaacctggctggt

SEQ ID NO: 849486 - DNA, 98 bp, Homo sapiens
caaagaaatcactgaagggaaaacagtccagatccccgtgtatgactttgtctcccattcccgcgtatagcttctggcctgggcttggcctggattgt

SEQ ID NO: 849487 - DNA, 100 bp, Homo sapiens
atgaatgtggtggaataagtgctagtatcggacatgatcctcatcttttatacactcttagtgctgtccagctggttgtcttcttgcctgccctgtgtcg

SEQ ID NO: 849488 - DNA, 99 bp, Homo sapiens
tttgatttattggaccaactggcaacagaaaatgaaaagtagtgtggcacagataaaagttatgcttcctcctggagcccagcattctgatgaaaaggg

SEQ ID NO: 849489 - DNA, 100 bp, Homo sapiens
tcagcttatctacaatcatatcacactttggagacatgctgtccttcaccctgacggccttcgttgagctgatggaccatggcatagtgtcctgggatac

SEQ ID NO: 849490 - DNA, 98 bp, Homo sapiens
ttcccggctcccaggtttattctcccatagcatgtggttagttgcaaagtgtcccagttcattcatctttacctgatgggctgtaattacttttggat

SEQ ID NO: 849491 - DNA, 98 bp, Homo sapiens
acaggttcttaagtgagatgctgaagagtttggaagatctgaaggatgaagttgtgatatgtccatacgattccaatcatcacatgcctaaatcatct

SEQ ID NO: 849492 - DNA, 98 bp, Homo sapiens
tacaaatgtcgcttgagaccctgaatgaggtgctggcggaggagtccatagtatgtctgcagaaagccctaaatcaccttcgggaaatatgggagcta

SEQ ID NO: 849493 - DNA, 100 bp, Homo sapiens
cggcgccagccactcggagctaatccacaatctccgcatcttcccaagggattgttgaagaaacttctgaagagggaaactctgtacctgcttcacaaag

SEQ ID NO: 849494 - DNA, 100 bp, Homo sapiens
ggccaacgacctgtttgagagtgggaacatgacgcaggtgcaggtgtctcttctcgccctggcggggaagcaggaagtcattatgcaacttacacatatt

SEQ ID NO: 849495 - DNA, 98 bp, Homo sapiens
ggccggtagctgcagctggagcagtggcgtttggaggagactcgttcgggaccgagtgagatcgaagatggagagagacatcttggcagaagtgaatc

SEQ ID NO: 849496 - DNA, 100 bp, Homo sapiens
gcgcaaagttctgagaacattacagcagatcaagaaatccagctcaatccccaaagctccagagatagatccagtagagtgtttggtggcagataactct

SEQ ID NO: 849497 - DNA, 100 bp, Homo sapiens
tggttcagatgattttttctaataatgctgatcaacagctaacagcaacacagaaatttagaaagctgctttctaaagcacaagtggaagtgctgtccgc

SEQ ID NO: 849498 - DNA, 100 bp, Homo sapiens
gaagtatatgttgaagtggcctatcccaggacaggtggcactctttcagacggtctggaaaatcccgaagcagaagcccgtattcatctaggcattcaag

SEQ ID NO: 849499 - DNA, 100 bp, Homo sapiens
agccgcggtggcagtgcaaaaggctggcagtacagaacatccatgatagcagtcttctgtaaatcgaacttttcaagaattctctgaaggaaccaagtag

SEQ ID NO: 849500 - DNA, 99 bp, Homo sapiens
gtaaactcacttttggagatagcagctccgattggtgtcatggaccaaagtcttatgaaggattttcctggcgctgctggggagatttcagcctatgga

SEQ ID NO: 849501 - DNA, 115 bp, Homo sapiens
aaaatcgggcgagtgtttttgatgccatttttttccatcagacacaggtcaaaactcgcacccctgctttgatgcggcctggaagaattgatagaatcatctatgtgcctttacc

SEQ ID NO: 849502 - DNA, 114 bp, Homo sapiens
ttctggacaaacttctgcgatacgaccatcaacagagactgactgccaaagaggccatggagcacccatacttctgaatgactggcaattacctactaacaaaccctcttcttc

SEQ ID NO: 849503 - DNA, 100 bp, Homo sapiens
caaaattctgaactcaggacttggcaaaatatgagtgatgccatggcaattttgcacaaactacagacaggcctggatgtaaatgtaagattcactggtg

SEQ ID NO: 849504 - DNA, 99 bp, Homo sapiens
acagatgatggtgaaactcatgaagcccaggacgattcaggactcacagaaaccctctgtacccagtcatgggccaaagacaccgtcatgcaagggggt

SEQ ID NO: 849505 - DNA, 100 bp, Homo sapiens
tctggacgagaatgaggctaccatgtgccaggtctgccatgtgaatctggaggggcagccgttctactccaagaaggacagacccctgtgcaagaagcac

SEQ ID NO: 849506 - DNA, 99 bp, Homo sapiens
aagtctacgctaactgtatggtgattgatcagttggtagctggcagtgttgtgatggcttttgaagaagtatgcccggacagaatagatctgattcata

SEQ ID NO: 849507 - DNA, 98 bp, Homo sapiens
ctgcccacagcctagcagtcgggaccgtactgaggatattgacggccaagcactcctgcttctgacccttccgacggtgcaggagtgcatggagctga

SEQ ID NO: 849508 - DNA, 100 bp, Homo sapiens
ggttaacttggataagctgaaggaaagagctcaaagatttggtttgaatgtctcttcaatctccagaaaggaatcttgcctccacaccacgagtcccatg

SEQ ID NO: 849509 - DNA, 98 bp, Homo sapiens
tggaggatcacctagtaacacacgctacctctttctgggtgactatgtggacagaggctatttcagtatagagggaaggagcatcaatattgattcac

SEQ ID NO: 849510 - DNA, 100 bp, Homo sapiens
gacaaaaggagcttttgccactgactcggccgtgtcctgacacctccagacacatgtgtatggtaatgcgaggtgtacagaaaatgaacagcaaaactgt

SEQ ID NO: 849511 - DNA, 135 bp, Homo sapiens
gtgtcccggcaccccgcacccgggcacacaaaaaacgggtcgcccgcgattctcagggattgatcgcctcttcagggcaagtgtccagagaatggctgggatgaaagtacacttgaactctttttacatgaactt

SEQ ID NO: 849512 - DNA, 98 bp, Homo sapiens
ctgaagcaactatacttctttgctatttccacctatgtgcagaggttcagaaaagagaccctcgtgactggactgcacagttcatggaggctgcagat

SEQ ID NO: 849513 - DNA, 100 bp, Homo sapiens
aacaatggatggcaactccctgctctcggtaccaagggtttaatgaagaaattcattcgatgttctacacgtgtaactgtgggaactattaaaaaatttc

SEQ ID NO: 849514 - DNA, 100 bp, Homo sapiens
gccagcaatcctcagacgcctcacttaggacaagtattttgaaggtggcgtctcatctgtctacctctgggatctggatcatggctttgctggagtgatc

SEQ ID NO: 849515 - DNA, 100 bp, Homo sapiens
gccttcacctgaatgacatctacctccatcaggaccccagatgtctgacagccctgtgtgacaccaagataagtaacttatctatgtcaagcagtagccg

SEQ ID NO: 849516 - DNA, 100 bp, Homo sapiens
cctggccatcatcccaggtagagctgccctcttccttctccgcagcttttctcatcctgcaaagcaagggacagcgatggtgagaaaagtgatgacaact

SEQ ID NO: 849517 - DNA, 100 bp, Homo sapiens
ttgctcctctctccttggcctctcctgggatcggcccaaggccagttctccgcaggttttcaaatggaacattttgatgcatcacttagtacctatttca

SEQ ID NO: 849518 - DNA, 100 bp, Homo sapiens
tgcttccagaaaaatctcaaggaaaagtattgcaagcaacagtagtcgctgttggatcgggttctaaaggaaagtcttgctggaggtttgttaaatttat

SEQ ID NO: 849519 - DNA, 98 bp, Homo sapiens
tttgctcctggtggaacagttgttgcagcaagcgattcagatgctgaaattttcttctaaggagaaatatcccttatttacttttgtaaatggtcatt

SEQ ID NO: 849520 - DNA, 114 bp, Homo sapiens
caagatctgtgctgaccacaggaattggatctactagtgcagatcaacaacccctccccgtcgtaaacgctgaggaatgatgtggcaagaatgccatgatgttctttaaaaaaa

SEQ ID NO: 849521 - DNA, 100 bp, Homo sapiens
ggcagatggaaatgtctcggattttgataatgaagaagcaggaggatgcattagcacaacaggcctttgaagaggctcggagaaggacacgcgaatttga

SEQ ID NO: 849522 - DNA, 117 bp, Homo sapiens
tccgggaacatggctcgcttcgctctgactgttgtccggcagcagaagtcaattcatctggaaagactatctctgagtcagacttaaaccactctttttcactaactgatttacaag

SEQ ID NO: 849523 - DNA, 100 bp, Homo sapiens
ggctggcagagcataagtacatccagtggatgacaatcgagcagcagaagaatggtgtgcctaccctttaatgctgcagtttaagagaacttgtattgtg

SEQ ID NO: 849524 - DNA, 100 bp, Homo sapiens
gctgccccggcgcaccgactggaccgggaaggagcatcccaggacctaccagaatctggcctccccatggccacccatggaccagtcggcattcacttcc

SEQ ID NO: 849525 - DNA, 98 bp, Homo sapiens
tccaaagcctgcgcgagaggagccgggacacgcctagcgcgggctccaggaggctgaaccgtctgagcccagaagtgctgaggtgacgaggaagccca

SEQ ID NO: 849526 - DNA, 98 bp, Homo sapiens
agcacaccaactacaccatggagtgagtttatggtcgaggagcacgagctgcggaaggagaggatccaggaggattacaacgacaagtactgggacca

SEQ ID NO: 849527 - DNA, 100 bp, Homo sapiens
gggcggcctgccccgccggagcagcatcatcaagctgctcatgtttcccacctggagaatgtgtcagaggaagaaatgaacagactcctgggaatagtat

SEQ ID NO: 849528 - DNA, 100 bp, Homo sapiens
cggcttggctgtcttctccatgctgtgttgtttctggcccgttggcatcgctgccttctgtctagcccagaaggtgtggtatctgtgcgctttgaagaag

SEQ ID NO: 849529 - DNA, 100 bp, Homo sapiens
ccaactcagaggacgaggcctccttcaagtccgagctgcagttctcagaggtgctggccaagtggaggtgcttctttcaccaaatggctgtggagcaagg

SEQ ID NO: 849530 - DNA, 100 bp, Homo sapiens
agctggccaaagcctgcccagacggctcacctgtgcgggatggaacaaaaggccaagaaagcagagaactcatcaaatgaggaggaaacgtcaagtgaag

SEQ ID NO: 849531 - DNA, 100 bp, Homo sapiens
tgagtataagcagtgatgaggtcaacttcttggtatatagatacttgcaagagtcaggtcctcagccagcagagccacgttccttatgagcaccgtgggt

SEQ ID NO: 849532 - DNA, 100 bp, Homo sapiens
tggtctaccgacagccggggaccgcggccatgggagggctcgcaggtactaggttttgacaagcttgcatcatgcgtgagtataagctagtcgttcttgg

SEQ ID NO: 849533 - DNA, 99 bp, Homo sapiens
tgtgttagaaacactttgcctctgcaaagtttttcttcccccagtccctcagctgctgctgctgctcaggaggtcagatctgccactgatggtaatacc

SEQ ID NO: 849534 - DNA, 98 bp, Homo sapiens
tgttccacaaaaaagacagtgccaatcaaggctgtgttcgaaaagtttacctgaaggacaccgccacagcagaggtcacagggattatggacccagaa

SEQ ID NO: 849535 - DNA, 100 bp, Homo sapiens
ctccacaccagcggcagcatgcatctgatgctctctctccagtccttgctgaagagactttccgttacatgagtttattacagaggtcagctgggaagag

SEQ ID NO: 849536 - DNA, 98 bp, Homo sapiens
atggctcgctgcagctctgggacactgccaaagctgcagggccactgcaagtctataaagaacacgctcaggagtatatcctttcgggctctgatgac

SEQ ID NO: 849537 - DNA, 100 bp, Homo sapiens
ttctccctggtgcaagaggaacccagcttctccccagactcactggagttcctgctgcacttgacttaattacctcagggtttgaatgccggtgtggaaa

SEQ ID NO: 849538 - DNA, 98 bp, Homo sapiens
aacagccacggaagattaagcagacttcacagagaatgcagttgtcttgacttcaggtctgtctgttctgttggcaagtaaatgcagtactgttctga

SEQ ID NO: 849539 - DNA, 98 bp, Homo sapiens
acaatccctggctttgatggagtagtcaagggagtcctcttggtatatgatattacaaattatcaaagctttgagaatttagaagattggtatactgt

SEQ ID NO: 849540 - DNA, 100 bp, Homo sapiens
ttgaagacaccgtatgaggtgaatggacagccagccaccacaatgaaagaaacctttcaacgaagtctaaaaataggaagcttccagaaccaccagacaa

SEQ ID NO: 849541 - DNA, 100 bp, Homo sapiens
ggtggataccgtcaagctggccaagcacaaagagcttgctccctacgatgagaactggttctacacgcgagctggtcaaaatgcagatcttcgtgaaaac

SEQ ID NO: 849542 - DNA, 75 bp, Homo sapiens
tgtgtcaccgactaccacaagcagtacgccccgaggtgctccgtctgctctgagcccatcatgcctgagcctggc

SEQ ID NO: 849543 - DNA, 129 bp, Homo sapiens
catccttgactccatcgggcgcttctttggcggtgacaggggtgcgcccaagcggggctctggcaagatcaaggatctggattttgcataactggtaaaatagaagctggttatatccaaactggtgac

SEQ ID NO: 849544 - DNA, 100 bp, Homo sapiens
ggaaatggaagcccagtcctctcctgttcttatttgctttatatatcatgtgtgttcctcactcagggccatcgatgcacccctcggagctaatagcgga

SEQ ID NO: 849545 - DNA, 100 bp, Homo sapiens
tgacttaggccagccctacagcagtgctgtttactcattggaggaacagtaccttggcttggctcttgacgtggacaccactgaagatcctggtgtcgcc

SEQ ID NO: 849546 - DNA, 98 bp, Homo sapiens
cgctgacaactctcacacagattcggctgcagatactcacaggctgttgctgcgaatcccactctactccttcagtatggtgctagtggataagcatg

SEQ ID NO: 849547 - DNA, 100 bp, Homo sapiens
ctggcctcctctgtgcgcagcgacatggcctcccgccggctctctgcccaggcccacccagctgagagggactgtatagcagaaccctggctggtagcat

SEQ ID NO: 849548 - DNA, 98 bp, Homo sapiens
gggtccagccgtccccagaacgcagatcagaggtagtcggacctttcccgctggcgcgcagcctcagctaggttgcagtattttacagagctagccca

SEQ ID NO: 849549 - DNA, 100 bp, Homo sapiens
gccgattatataaaatactgggagtttgcagatgaaggcggtgagcctgaacacacctggctgactgagatgctcgagaattggaccaggacctccctgg

SEQ ID NO: 849550 - DNA, 100 bp, Homo sapiens
aggaacctcgccatccagaaacgagccaaactcaggctgtaccttgagcagctcaagcaactggtgcccctgggccccgacagcacccgccacaccacgc

SEQ ID NO: 849551 - DNA, 100 bp, Homo sapiens
aatctctgcagatggccgtacgtgtgaaggagcaagtggattacatctcactaaacatgaaaactttcatggtgggttggatgccatatcagttggggat

SEQ ID NO: 849552 - DNA, 120 bp, Homo sapiens
aaagtacctcgtctcaaaacctggctgctatcagagaagaagggtgtttggggtgtgttttacaaagaatagaacatttggattcaggtgatctggccagatttcctgaagtggtatttg

SEQ ID NO: 849553 - DNA, 100 bp, Homo sapiens
ctggatcatccccttccgcacccgcctcggactctattggattacaatactgtgatgagactgttcctgtaacttttgatccacacacagaatttcttgg

SEQ ID NO: 849554 - DNA, 100 bp, Homo sapiens
gacctgattcctcagacctctgccctatcggaagggaagcagaaaatgatcaggtctcaggtttctaagcatgaattgaggaacagaagaagcagagcag

SEQ ID NO: 849555 - DNA, 100 bp, Homo sapiens
gttcccatggttgccggctcccctctcaggacaacccagatgtgcaacaaagtgcgatggaatgctttgtgtggaaagcttcagtgtgagaatgtacaag

SEQ ID NO: 849556 - DNA, 100 bp, Homo sapiens
tcaaatatgtctgccttctctcaagttttctctcacccatccatgggaagccctgctactgctggattagcgccagatgggagctcggaatgtctgagct

SEQ ID NO: 849557 - DNA, 98 bp, Homo sapiens
gctccttaccttcctggactgattcagacattagatcagcaacagttcttcacagaggaagaactaaaagaatatgaaaatattattgctttacaaga

SEQ ID NO: 849558 - DNA, 98 bp, Homo sapiens
gcaaatgcaactagccaatgccatgatgcctggtgccccattacaacccgtgagttttccgtctgatgaaggttggccatttgcaaagtatcttggag

SEQ ID NO: 849559 - DNA, 100 bp, Homo sapiens
actaccaccagtggagtccaggatgagataaacaggggtcacatgacgacagaagccaagagggctgcaaagatggaaaagaagatgaaaattttgcttg

SEQ ID NO: 849560 - DNA, 100 bp, Homo sapiens
gcctcactcccagtagtttctgcatttagtgagataaggagaccctcctgttcttaactgtgggcgatgagaaaggtggtggactcttcttactggcagg

SEQ ID NO: 849561 - DNA, 100 bp, Homo sapiens
cggctgccggctgacgtctccttgcgatggagcatatccggacgaccaagggaaggtattcatgtaaatcaagaattactgcaaatatctccttgtatca

SEQ ID NO: 849562 - DNA, 98 bp, Homo sapiens
ggggtcctcagcgtggtctgcctgctgcactgctttgaaacatgattcccgtgacagaattccggcagttctctgagcagcagcctgccttccgagtg

SEQ ID NO: 849563 - DNA, 100 bp, Homo sapiens
gctcaaggcacaggtggcccgatcccagcaggacattgaaagttaagtgggcagaccaacatccacctcagcaaaaacttcttcctgacgaatcgcgcca

SEQ ID NO: 849564 - DNA, 100 bp, Homo sapiens
agtctcaatatctgtcttcggtggactccttcggcagtccacccaccgccgccgcctcccagcttcgtagatcagaagtcggttgtcggtctcactggac

SEQ ID NO: 849565 - DNA, 100 bp, Homo sapiens
cccacagccactgttgctgagcagggagaggatattacctccaaaaaagacaggggagtattaaaggtaccattgttggatactggtgacatcatcattg

SEQ ID NO: 849566 - DNA, 100 bp, Homo sapiens
gccgctgaagctgccgccgttgcctccgccgccaagagtgagcgagcggacccgcgatgggttggctgctttacctgagaatccaccagctatcgactgg

SEQ ID NO: 849567 - DNA, 98 bp, Homo sapiens
tggccatgtgcgcaggggcagaagtggtgcacaggtactaccgaccggacctggaaatgagtggcttatactctcctgtcagtgaggatagcacagtg

SEQ ID NO: 849568 - DNA, 98 bp, Homo sapiens
cacaaacgagggccaagaggatcacagcttgtggcccaggtccttgaacataaagctataggctttgtgatggtggatgccaagaaagaagccaagct

SEQ ID NO: 849569 - DNA, 100 bp, Homo sapiens
aatgtacctgtgactcaaatttagaaaaagacaaagaggctgaatatgcaggacaggtgaccaagaatatggcccaggtgaccaaagccctggacaaggc

SEQ ID NO: 849570 - DNA, 99 bp, Homo sapiens
gtgtttgagaattacacggccagttttgaaatcgacacacaaagaatagagttgagcctgtgggacacttcggagttgcatgctgagaatttgaaaaat

SEQ ID NO: 849571 - DNA, 98 bp, Homo sapiens
gatgattcaggagtgtttgaccagacagcccttgcaattgagcatgtcagggaggacatgtatgcccaggactctatagagctactaacaacatctgg

SEQ ID NO: 849572 - DNA, 99 bp, Homo sapiens
gcatgaaggagctggagcggcagcagaaggaggtgtccagagagtggacgaaggtgggtggaacactgtacaaggggccaagaacagtcgggtactgga

SEQ ID NO: 849573 - DNA, 98 bp, Homo sapiens
ctcgaccccttctgcccggcgcttcggcccgggccgctcaggtgcagtttcaggagtcagtgaccttcaaggatgtgtccatagatttctcttgggaa

SEQ ID NO: 849574 - DNA, 99 bp, Homo sapiens
gaatcccaagagcacctttaagaaagccgacggctctgaagtcagcttcttagaatactacaggaagaaatggatgaaaagaggctgctggatccaggg

SEQ ID NO: 849575 - DNA, 98 bp, Homo sapiens
tcactcgctgccaagggctacagaagtgtgcatcccaaccttccttctgacaagtcccaggcagttggctgggataacatggcattcatcttcctcaa

SEQ ID NO: 849576 - DNA, 100 bp, Homo sapiens
actctcacctgtgtgcctttgggaaacctgattgttgtaaatggtcaccatggagtaacaagtatgaccctcccttggaggatggggccatgccgtcagc

SEQ ID NO: 849577 - DNA, 99 bp, Homo sapiens
agaccctctcctttccctttgagaccgtgaagagaaagatgcaggctgaagccgacgtagcttctctgaacagacgcatccagctggttgaggaagagt

SEQ ID NO: 849578 - DNA, 100 bp, Homo sapiens
gagatccgagagctctgcttctctgaaaagcgtgtggctttctggacttggagtctgatgacttttcacagtaccaactcaaaggcttgcttaaaaagaa

SEQ ID NO: 849579 - DNA, 102 bp, Homo sapiens
aggaatttatcgtatttctaaagcaaggttagcatggcctcattgaaagaactagatcaaagactctttgaaaattacatcgagttgaaagcagatcccatc

SEQ ID NO: 849580 - DNA, 100 bp, Homo sapiens
cacatcttacagatacagagatcatgactttggtagatgagactaacatgtatgaaggtgtaggaagaatgaattgaatgatctggcacgggaccctcca

SEQ ID NO: 849581 - DNA, 99 bp, Homo sapiens
ctgtgtcgtgtggcagcacatcctattttgagaagagatttaaatttccatgtcttcttggaatataatcaagatgcggtggatgaattttattccaag

SEQ ID NO: 849582 - DNA, 99 bp, Homo sapiens
cctctgtgtccctgtgacctgcagatattgggagatccacagctaagacgccgggactccctggaaacctagaaatggctttacaggaagtatggtgct

SEQ ID NO: 849583 - DNA, 98 bp, Homo sapiens
ccgagtttatctggagtgtagagtcactggaaaccccactcctcgagtcagaagaagtaccgtcagcatccagatgctttgaagtttaccagtattaa

SEQ ID NO: 849584 - DNA, 100 bp, Homo sapiens
tgtgggaattacagaaactggaggctcaagaccacctttaatcctacaatctcagtctctaccttgttcatcacctcgagatgttccaccagatatcttg

SEQ ID NO: 849585 - DNA, 100 bp, Homo sapiens
tggagagaaaacctctgcgaggaaagggaaggagcaagccgtgatggtcagtaggacagaaggtaacattgatgactcgctcattggtggaaatgcctcc

SEQ ID NO: 849586 - DNA, 101 bp, Homo sapiens
gaaaaagggaatttcaacgtggcccatgggctggcatggtcatattacatcggatatctgcggctgatcctgccagctcaaaagccaaaagtctctgagaa

SEQ ID NO: 849587 - DNA, 100 bp, Homo sapiens
ttgaatgtgtcaaaaccaaacaccctcagctccacattgagagcaaaatctacaagatgatgcagggaggagtgtacgttcctgatgagtgggaggtggc

SEQ ID NO: 849588 - DNA, 100 bp, Homo sapiens
cgagtccccgtacggccacccggcggcacggggtcactctggtgcccattgaggagttcagcccggagttcgtggagccccgggtcagctgcatcagcag

SEQ ID NO: 849589 - DNA, 100 bp, Homo sapiens
atgataatgaaaaaacgtcttgaagagtttcaacttatgagaggtattcagtaatccaccaaagatccttactgttcaagaaatggctggattgaataac

SEQ ID NO: 849590 - DNA, 98 bp, Homo sapiens
ggtttcgggatctcggtgctgcagacggcgagacctcctgcacagcctgacatttaccccggtaactgctgggcatttaaaggctcccaggggtacct

SEQ ID NO: 849591 - DNA, 100 bp, Homo sapiens
ggtggatgaccccaagaagccacatagttgttgcccaaatctcttggtacagaatgtttttgtagaaacacacaacaggaattttccattggtggcattc

SEQ ID NO: 849592 - DNA, 99 bp, Homo sapiens
gcgacgtctacactgagtcggaggcgaaggtctccgtgaggccgggtgacgctccagaatgggagacaagccaatttgggagcagattggatccagctt

SEQ ID NO: 849593 - DNA, 99 bp, Homo sapiens
cgacggcgagcccttgggccgcgtctcctttgagatagcagactccttgaaagcagggtccttgtttagtgcatctttgcccacatacaccacaacata

SEQ ID NO: 849594 - DNA, 100 bp, Homo sapiens
cgtcaagctcatcggcaccaactgcatcatctatcccgtcaacagcaaggacctgcagcacatctggaaaataatgttgagtttccatgaagaacaggaa

SEQ ID NO: 849595 - DNA, 100 bp, Homo sapiens
acatcttctggacctttgtccagatcaacccagaacgccatgaccgcaggctgaatcacttcagggtctgcagtgacatcactctgtacaaggctaaaac

SEQ ID NO: 849596 - DNA, 100 bp, Homo sapiens
accccagctactgtcagtccccacgtggctctcccgtgtcatctcctcagaactcgccagggcacaggtgcccgaccatacactgggaaagttggtgctg

SEQ ID NO: 849597 - DNA, 98 bp, Homo sapiens
agataaatcatcagaattaacaaggcttgaatctgtattacccagaagccctgctgagctccaccttctccagccaagccccggaccccaaggtgacc

SEQ ID NO: 849598 - DNA, 100 bp, Homo sapiens
ccaagaagaaggagagtaaagtcagcatgagcaaaaactccaaactcctctccaccagcgccaagaggagccgcaaagacagcctggaaagtgacagctc

SEQ ID NO: 849599 - DNA, 99 bp, Homo sapiens
gacaggatgcagaaggagatcactgccctggcacccagcacaatgaagatcaagatcccagatgcagtgactggttactacctgaaccgtgctggcttt

SEQ ID NO: 849600 - DNA, 100 bp, Homo sapiens
agcgagccccactgctcggggaggaggagccacggccggggacagtttaaggaagaaatctctaaacgttttaaatcacatactgaccaacttgtgttga

SEQ ID NO: 849601 - DNA, 99 bp, Homo sapiens
gaaattgaaattacctccgagggaaacaagaaaacatcaaagaggtctagcaaagaaaattttaagagcttgcattgaacaagtgaaaaagtattcaga

SEQ ID NO: 849602 - DNA, 100 bp, Homo sapiens
caatgtgacacaaggaaagtattctacagcatctccatcctctcctgagcacttgcctgcaacacccgcggaatctccagcccagaggttcgaagctcgg

SEQ ID NO: 849603 - DNA, 100 bp, Homo sapiens
taaagattacagagaaaaaaccaacaccttcctgtgcagtcctgttggaatttgtcgttgaggacttccacatggagattggcacaggaccagactcaag

SEQ ID NO: 849604 - DNA, 100 bp, Homo sapiens
gatatcaactggctcagaattgaatgaagattaccctaaggaaaatgattcatcatccatctggaacttctcctggtctctcagctggggccactgtcgg

SEQ ID NO: 849605 - DNA, 100 bp, Homo sapiens
tatgacaaacttctctcagccaagaacaaagactacatgagcatcattcgcatgtggctagatttcattcatacctgtgaaaagctctgccatgaaggag

SEQ ID NO: 849606 - DNA, 100 bp, Homo sapiens
tgggggctcctgtttctctccgccgcgctctcgctctggccgacgagtggagaaaaatatgcttttaaggctattaaccagggtggccttacatcagtag

SEQ ID NO: 849607 - DNA, 98 bp, Homo sapiens
aaggtcgtattgaatggtgttgtagacgagctcatctgcgcctttgtttagaacgcttaaaagttctgattccactaggaccagactgcacccggcac

SEQ ID NO: 849608 - DNA, 100 bp, Homo sapiens
cgtcatggataggcagaagaaagaagaggagaaggagcagtccgtgctcaacttctggcaagtatgaggcaaggatttcacagaagaacttggagcaaaa

SEQ ID NO: 849609 - DNA, 100 bp, Homo sapiens
cgctgtcgctgccgctgcccctgctgctgccgctgagagcagggccccttagcctctgggtttgcgctagcagcgtaagaattcttcaaagaactacttg

SEQ ID NO: 849610 - DNA, 100 bp, Homo sapiens
gcccggggacggcgaggccctcatgtaccacacggttatcaatactctggctgaccatcatcatcgtgggactgactttggtggaagtccttggttacat

SEQ ID NO: 849611 - DNA, 98 bp, Homo sapiens
gaattccatcggacatggtgtttcttaggacttcagaaaaagcagaggaggccttggtgccctatagcaagcccagtttcccatctccaggtggccac

SEQ ID NO: 849612 - DNA, 98 bp, Homo sapiens
agggatttctggattctctacgggatctcatagcagattcaaatccaatggtccttcagtcttggagactataagggagcctctgcacccagggaaaa

SEQ ID NO: 849613 - DNA, 100 bp, Homo sapiens
ccacttaaggacattgtggcaatcatcctgaatgaatttagagccaaactgtccaaggctttggcaccaaatttgtatcctactgtggggcttcaaacac

SEQ ID NO: 849614 - DNA, 100 bp, Homo sapiens
ctacttatacaactttctaaagagacagaaggcaccaagatcaaaattgataagtgtgcttaagctccattgggtgtgatattcctggctggtatttgtg

SEQ ID NO: 849615 - DNA, 50 bp, Homo sapiens
aacgtgccatggagacgcttaacggttacaagatgttcacctaagattga

SEQ ID NO: 849616 - DNA, 111 bp, Homo sapiens
ccatgcccctgaaggcctcgctggagatcgagtaccaactcaggtgcctaaaaggccagaggggcttctcaggccaacctccttttgatggaatccacattgtcaaccatt

SEQ ID NO: 849617 - DNA, 100 bp, Homo sapiens
ctcgttccttgtttagaggactaggccccaatttagtgggggtagccccttccagtcttcccaagggattgttgaagaaacttctgaagagggaaactct

SEQ ID NO: 849618 - DNA, 100 bp, Homo sapiens
ccggcccacagtgggggtgtgcaaacccgagagaactggaaagggagtttcgtgctccaactttggcatccctagaaaactgcatgaagctttctcagat

SEQ ID NO: 849619 - DNA, 98 bp, Homo sapiens
tctcggaaaccagaccaaccctatgaatggctttcatataaacagatatatttttgccatcatggatcagtttggagatatattagaaggtgaagtgg

SEQ ID NO: 849620 - DNA, 100 bp, Homo sapiens
cctcccgagtagctgtgattacaggcgggcaaaactgttccgatttgcctctgagaacgatctcccagaatggaaggagcgaggcactggtgacgtcaag

SEQ ID NO: 849621 - DNA, 99 bp, Homo sapiens
gtgcctggggctgaacgcggctttctgcacactagcaacttcagacgtcagcaggcggaaatggctgattccaggtgcagagtattccatctttactgg

SEQ ID NO: 849622 - DNA, 98 bp, Homo sapiens
gaacaggtgaagaatatgtctgccagtgaggatgcctttgtggaactgtacggccccagcatgcggcctctgtttgatttctcctggctgtctctgaa

SEQ ID NO: 849623 - DNA, 100 bp, Homo sapiens
agtagagcggagcctggcgggcgtgggaacccaggccccgccgaggcggccagccactgaggcggctcccagctgcgttggcgacatggccgacaccccc

SEQ ID NO: 849624 - DNA, 98 bp, Homo sapiens
cagagcagaaaacgcctgtgttccaccgttcaccatcgaggtgaagatgttggtgaccttcaaggatgtggctgtgacctttacccgggaggagtgga

SEQ ID NO: 849625 - DNA, 100 bp, Homo sapiens
gcctctgccccttggtgggctgaagcttcatggagcaggatggcccaatggaatcagctacagcagcttgacacacggtacctggagcagctccatcagc

SEQ ID NO: 849626 - DNA, 100 bp, Homo sapiens
ggttgtctgtggccggaggctgatcaggacttcatagacctcacgttgtcgaagactcaacgaaagactccaaccgttattcataaacattaccaaatac

SEQ ID NO: 849627 - DNA, 100 bp, Homo sapiens
cagaaatcctactccacccataggaagacccacgtccacacctactcctcctcagctgaagaaatcaggggagaaacccctgcttggtggaagcctgatg

SEQ ID NO: 849628 - DNA, 100 bp, Homo sapiens
gtgacctacactagtcgcgggagccacgcagaggacgccggaacaccctggaagccgagaaatggatggtccagcagtttggggtggattttgagaagag

SEQ ID NO: 849629 - DNA, 98 bp, Homo sapiens
gatttcttgctggttgaatacctccctctccactcccatcttcaggctccatgttcatgcatgtcttttaacccggaaacaagaagactgtccatagg

SEQ ID NO: 849630 - DNA, 100 bp, Homo sapiens
gaagagacaggggacacgctctatgccccctattccacacattttcagctgcagtggtgaagttcatggatgtctatcagcgcagctactgccatccaat

SEQ ID NO: 849631 - DNA, 100 bp, Homo sapiens
ctttgtatgcccaagtcaagaagccgcggaattccaaaccctcacctgtagacagaagttgattcaagtcagttgagacgccagttgtgtggaggaagtc

SEQ ID NO: 849632 - DNA, 100 bp, Homo sapiens
attttactgtgtggtagcaggaagaagattggaaaaaggtgctgcagcaggaagaagctgggatctgattgaacaggtggcgggacaggcttcattggga

SEQ ID NO: 849633 - DNA, 126 bp, Homo sapiens
ccaagaacaagtttggctgtggccctcctgttgaaataggaccaattcttgcagttgatccactagggttaccatccattgacccatcaggcagctccccatcttcctcttctgctcctctggcaa

SEQ ID NO: 849634 - DNA, 98 bp, Homo sapiens
ttgctcctccctgcaactaactccattcttaattggcattcccatcaagagcaccatggacaaccccaccaccacccagtatgccagcctcatgcaca

SEQ ID NO: 849635 - DNA, 100 bp, Homo sapiens
atggcatattcagatcagtagaagcagatttcttttggatagtgatgggaaaagtggtggacttgctttgtgaagagacagttcatgaacaagagtcttt

SEQ ID NO: 849636 - DNA, 99 bp, Homo sapiens
ttctactgacgaagcttggaagttgcagaaggaacctagaaagattgtacaatgaatggtgattctcgtgctgcggtggtgacctcaccacccccgacc

SEQ ID NO: 849637 - DNA, 98 bp, Homo sapiens
gaaatataacattcttggcacaaatactattatggataagatgatgctccatagtggaagtaacagtttactaagtaagctcattcatcagtcttatc

SEQ ID NO: 849638 - DNA, 100 bp, Homo sapiens
tcatgttgctggagaaggatgtgaaccctgggggcaaggaggagaccccagggcagaggccagccgccctgcccacccttggagccaggcacacagtgac

SEQ ID NO: 849639 - DNA, 98 bp, Homo sapiens
agatggcagtggccacatactttctcagaaaccttcacatcttggtcaaggcaaggatatcctgaaggatactatagttccaaaagtggatggagcag

SEQ ID NO: 849640 - DNA, 99 bp, Homo sapiens
tgttgccctcgcttctcagatccccgccggaagtggaaaagtgttttaggcttccagagtagaaatctgatattacttcgtttgattcttcgaccacta

SEQ ID NO: 849641 - DNA, 98 bp, Homo sapiens
tgtcggaggtctcatctttgaactactgccggagcttctgccaggtctccaattgagaaacatggcactgtttttcctgcactctacccacctattgc

SEQ ID NO: 849642 - DNA, 102 bp, Homo sapiens
aaatctttgggaaagtcagtattttatatagcaagtttggaatttcagctgggcagcttcgatcccaccacctgtagccactgaggttcacaggctctgttt

SEQ ID NO: 849643 - DNA, 100 bp, Homo sapiens
gtttgtttacagctgttgtcctggtatctgcaggagcgagctggacgccactgtggggctctgagagtcctgaattcttactgggttggtgaagattcca

SEQ ID NO: 849644 - DNA, 100 bp, Homo sapiens
ttcgctacacagcaatgcatcgaggatgataatgaagataattcaaatgatgggacccagccatccaaaaggaggcgaatgggctcaggagatagttcta

SEQ ID NO: 849645 - DNA, 98 bp, Homo sapiens
acgtggaaaagcaagcttcagaaaagcaagttgcgctcttgaccaatgagagatatttgaagattggatttgaggctcctcccctccagggacaggct

SEQ ID NO: 849646 - DNA, 99 bp, Homo sapiens
tgaacgtcaccgaggagaagtaccaggaggcgttggccaaggctttggctagatcagagtctaagagagatggaggttttaaaaataattggagctttg

SEQ ID NO: 849647 - DNA, 98 bp, Homo sapiens
tgaacagccaggcctctgtggcctaagtaacttgggaaatacgtgtttcatgaactcagctattcaggtgtttaatgaacgctgccgaattcacttca

SEQ ID NO: 849648 - DNA, 100 bp, Homo sapiens
agatctggctcaccgaatagccagtggcgaagaggtgacttctgggggaacagaaagcatactgatggcctgcaaagcatatcgggatctggcctttgag

SEQ ID NO: 849649 - DNA, 100 bp, Homo sapiens
ctgtgccacctcctcctttagaaaactgatcttaatacagcttcgtagatcagaagtcggttgtcggtctcactggactacaatcaaggtgccagcagga

SEQ ID NO: 849650 - DNA, 98 bp, Homo sapiens
acaatcgaatacgaacaacaaagtacacacttctgaattttgtgccaagaaatttatttgaacaatttcacagactgcagcgagaatctgtttcactg

SEQ ID NO: 849651 - DNA, 99 bp, Homo sapiens
tctgccgtgaatcattcctgcagatgaaaaagtgtgacttggcagctggaacatttatcctatttccactttgttggacgaataatgggaatggctgtg

SEQ ID NO: 849652 - DNA, 98 bp, Homo sapiens
gactgcagaaaatcaacctatcctccttcaggaccaacattgcttcctccacagtttcctcaggaaaaaccagtgatcagtgtttatccaccaatacg

SEQ ID NO: 849653 - DNA, 100 bp, Homo sapiens
agaacagcacgtaccagaggtggaagtccaagtcaaacgcagaaggactgcctcactgagcaaccaagagttcattttccagacactgaaagagcagaat

SEQ ID NO: 849654 - DNA, 100 bp, Homo sapiens
atgatccttacggaaaaggaacagattgttcctaaaccagaagaggaggttgcccagaagaaaaagatcacaaaatttgtccaggatagacatagagcta

SEQ ID NO: 849655 - DNA, 100 bp, Homo sapiens
ctcctttaccccagaacctcctttacacagtatcagaacgaatagaaggacagtctgtggaagtttccaatattgtggacatccgaaaagtatataaccg

SEQ ID NO: 849656 - DNA, 129 bp, Homo sapiens
ttttctcccgaaggaagattatttcaagtggaatatgccattgaggctatcaagatatccatttggggatgaagtctactttgacagctagcaaggcgacatgcaactgttgttgaatgatgacagcaa

SEQ ID NO: 849657 - DNA, 100 bp, Homo sapiens
gatcacttgaaaatgctccatgccactggtgggacaggccctgaaaaggagcctttaaaagtcaattctactccatttggcaaagagggaactgaaatct

SEQ ID NO: 849658 - DNA, 100 bp, Homo sapiens
tcccagccagtcctcccagaagccaaagagaagccagcctctaagaaggaacggatagctgatgtgaagaagaggacaagaattttgggcagatttgaat

SEQ ID NO: 849659 - DNA, 106 bp, Homo sapiens
ttcaagaacaagggccgcgatgtggaacaaaaaatcccagaagtgggatgaaatgaacatcttggcgacgtatcatccagcagacaaagactatggtttaatgaaa

SEQ ID NO: 849660 - DNA, 98 bp, Homo sapiens
gtgtttggcacccacaaagaccatgaagtttcaacgcttgacacagctataagtgctgtaaagaactcttcatcttggcttatacctatactgcctga

SEQ ID NO: 849661 - DNA, 100 bp, Homo sapiens
gaaaagatccctggaatatgaagagacacagtatggtagccacacccccagattcgggaactggagcctctcctctgtcacagtgacaatccatctcagc

SEQ ID NO: 849662 - DNA, 100 bp, Homo sapiens
catgtcggctttcgacaccaaccccttcgcggacccagtggatgtaaaccccttccagaccttcactgcctggtgtaactcccacctaaggaaagccggc

SEQ ID NO: 849663 - DNA, 100 bp, Homo sapiens
ctggggcacacaggaggcaccttggataagctggagtctattcctggattcaatgtcatccagagcccagagcagattgaagaaggtattgttgtaatgg

SEQ ID NO: 849664 - DNA, 100 bp, Homo sapiens
gagaggtgccaagactctgtcttcgcccagtaataggccttctggagaaacttctgttccacctcctcctgcaggtagatgacattaatgctgataagaa

SEQ ID NO: 849665 - DNA, 100 bp, Homo sapiens
gtcagtgtgaaaaaggaagcttccaggataaaaactcccctgagatgtgccggacgtgtagaacaggcccagctcaacattggcaatgtgctccctgtgg

SEQ ID NO: 849666 - DNA, 125 bp, Homo sapiens
ttccttgcggaaaggatgttggcggtccctgtgacctgtggagacacggccagatctgccctccaaaatttcagcagatttcaaggagccgccatccctgccagggaaggagaagccatccccga

SEQ ID NO: 849667 - DNA, 100 bp, Homo sapiens
tgtgaagctgggaatcatttcatcaatgtaatgttgtctcatcccaatcacacagatgctgcacaacaaacatgtcatggtccgtgtgggaggaggctgg

SEQ ID NO: 849668 - DNA, 100 bp, Homo sapiens
tcgagatgattatcgtaggaggagtcctccacctcgtcgcaggcttgcttccggcgtcatggctcaaagggccttcccgaatccttatgctgattataac

SEQ ID NO: 849669 - DNA, 100 bp, Homo sapiens
cgggcaggccttccgagaggaacctctatgccgacatcgacgccgcctggcaggccctgcgcaccagcagtaccatcccactgatatcacgggcccgctc

SEQ ID NO: 849670 - DNA, 100 bp, Homo sapiens
acaataaacaggacctttttgaggagttgccatgaggactgtcaggtttgtgaaatgaagaactgtaataaatgcatctattttgaagctaagaaaaaac

SEQ ID NO: 849671 - DNA, 100 bp, Homo sapiens
ttggcttatacacctctggatgagaagagccttgctttattactcaattatcttcacgatttcctaaacttagcagtgtctgcaaaaacgaatcttttcc

SEQ ID NO: 849672 - DNA, 100 bp, Homo sapiens
agttcaacatcctcctggccaccgactcctacaaggagacttcctgtgatcagagtgaaggttctggttcttcagaagaggatgaatggagaagtgacag

SEQ ID NO: 849673 - DNA, 98 bp, Homo sapiens
cttaaaaagccaccgcggctccaggagtcctgtgactcagtgccctgtgggacatcgagaccggccagcagacgaccacgtttaccggacacactgga

SEQ ID NO: 849674 - DNA, 100 bp, Homo sapiens
cactaggagtatgccagatggaagaaccattgttagtgaacgtggacaaagctgttgtctcagggagcacagaagctaggcagctggaagagaaagaccg

SEQ ID NO: 849675 - DNA, 100 bp, Homo sapiens
gaaatgattgaatctggtgttatcaacttaaaagatgccacctctaagctactcccgagcccggagaggacccacgcgtgacccgggccaagtacttcat

SEQ ID NO: 849676 - DNA, 100 bp, Homo sapiens
agaagtgttccccaaagcaaattatagtgctaatttccaatgttccataagcgtggcaagaaaaatgggaagttctcggatcttctggatgacctgaaat

SEQ ID NO: 849677 - DNA, 98 bp, Homo sapiens
agaaaaggccagtgttgtccctactgcatagtgaaactggaacgccaagctgaagaagaacgaatacggaagcacaaagcagctgctgagaaagcttt

SEQ ID NO: 849678 - DNA, 98 bp, Homo sapiens
aggactttagtgaggatcaggggtacccagaccctccaaatccctgtcctgttggaaaaacagatcgcctgataggcttgccagaggggcgtgctcgc

SEQ ID NO: 849679 - DNA, 100 bp, Homo sapiens
gaatcatggatgaatttcagcatatttcttcaagaaatgtctctttttaaacagcagagccctggcaagcggcagtacatacctgtgaaaatgaagagca

SEQ ID NO: 849680 - DNA, 100 bp, Homo sapiens
agaagaaggagtttttgcagaaggagcaggatctgaaagctgaaattgagaagctttgtgagaagggcagaaggaggaacatatgcagcagaaaaaagag

SEQ ID NO: 849681 - DNA, 100 bp, Homo sapiens
accttgaatggcgactagatgtacaggtctggctctgggagaggagtggacagcagctggttgagatacatccccatctggagacaggactgccactgac

SEQ ID NO: 849682 - DNA, 98 bp, Homo sapiens
cctttgatcccctgacctgcattaccttggactttccttatcccagttgattgtgcagaatacactgcctgtcgcttgtcttctattcaccatggctt

SEQ ID NO: 849683 - DNA, 98 bp, Homo sapiens
tgaagattttgacagtcgtagatacaaatttttggatgatgatggatccatttctcctattgaggagtcaacgctcctaactgggcaactcaagattc

SEQ ID NO: 849684 - DNA, 100 bp, Homo sapiens
tggcaaccaacggtgcccatgtcaaccacagaaacaagtggaatgtggaggctgtggacccacgaggtcgaacattattgcatcttgctgtttccttggg

SEQ ID NO: 849685 - DNA, 98 bp, Homo sapiens
ccaaacaacatctcctgctattccttgggctgcctttcctgcagggagatgcagttaaagacttgatgcttcgctttctgggtgaaaaagctgcagca

SEQ ID NO: 849686 - DNA, 99 bp, Homo sapiens
cttcctggacagcttgcagaacctcagatataattactggtgctcaagaagtggaaatgatgacaaaacagttaggagcccatctggaacaactaaaaa

SEQ ID NO: 849687 - DNA, 100 bp, Homo sapiens
aatattaaggactatattgatgaagctgagaaagttgccaaagaagccaaagatcttgcacatgaagctacaaaactgcttccaatcagaagactataca

SEQ ID NO: 849688 - DNA, 100 bp, Homo sapiens
ctacagaagaggagaaaacggaatctaatcaggaggttgctaacccagaacactatattaaacatcccctacagaacagtattcagcaagcggaaatggg

SEQ ID NO: 849689 - DNA, 99 bp, Homo sapiens
gagatgaacccaacctagtgggtgtaatacatcatgaactgcagggttcaaaccttgtactactcagctgatcacaagctgcttgatgggaacctacta

SEQ ID NO: 849690 - DNA, 51 bp, Homo sapiens
tccggctgctgcaggcccagctgcaggatggacactccacagctgaccttg

SEQ ID NO: 849691 - DNA, 100 bp, Homo sapiens
gttttctctgctctgccaacactagtggaatatgatcacatcccaggtagtaagcattaataatgtctttcatctttgagtggatctacaatggcttcag

SEQ ID NO: 849692 - DNA, 100 bp, Homo sapiens
ggctaccatgttctctcgcgcgggtgtcgctgggctgtcggcctggaccttgcagccgcaatgttaccttatcccatatcacacaactggtcctcagcca

SEQ ID NO: 849693 - DNA, 98 bp, Homo sapiens
aaaagagcatctcagagcgccgggaggatcgcaagctggatgagcttctaggcaaggaccacacgcaggtggagcgtgaggatcatccccggagagga

SEQ ID NO: 849694 - DNA, 100 bp, Homo sapiens
ggccaagaggaagaccccaccagtgagatccactgctccagattttaacagcttctctgtggatgatgagtgcttagtgaagttacttaaaggatgttgc

SEQ ID NO: 849695 - DNA, 98 bp, Homo sapiens
acacataaagtttccggaaatcttagatttggctcctttttgcacccttaaatgtaagatgagctttgatccaaaccttctccacaacaatggacata

SEQ ID NO: 849696 - DNA, 98 bp, Homo sapiens
tggttattgttttcctgatgtctgtgggtaccctctatgaaaaacagaatggaaaagagtcttctggtcttatatccagatggccaggctcagatgat

SEQ ID NO: 849697 - DNA, 100 bp, Homo sapiens
ttgcttgatcaggtggaacagattcagaaggagcaggattaccaaaggatgataacaatggataatgcagaagaatatgtggatttgatgtttgactttt

SEQ ID NO: 849698 - DNA, 100 bp, Homo sapiens
aggtgacctgactctctgaggctcattttgcagttgttgaaattgtccccgcagttttcaatcatgatgaagactggcccatttgcagagcactccaacc

SEQ ID NO: 849699 - DNA, 100 bp, Homo sapiens
cattaatggatgttccagtatttaaagctattcaaccagatggaattcatacccagccaatgcagaactctccctggagcaggaacagcgtctcaggaac

SEQ ID NO: 849700 - DNA, 100 bp, Homo sapiens
ccttgagtgcagctccccctataagcctcggcctccacagcttattcagctgattctgaatcatcttacactaccagacctgtgtagattagcacagact

SEQ ID NO: 849701 - DNA, 100 bp, Homo sapiens
atggggtaggaaggagacacagttccatggatcagaaggcagacaagcagcttttcagatgcaaatgcttgctcatcagtttggaaggaatttggctccg

SEQ ID NO: 849702 - DNA, 98 bp, Homo sapiens
cgccgcgccgagcggaggaggaggaggaggcgaggaggagagactatctgccgacaccccaggccatcgagccccaggccatcgtgcagcaggtccca

SEQ ID NO: 849703 - DNA, 100 bp, Homo sapiens
ctccttgcctgttcgcagtgctctcagtgctatcacccttactgtgtcaacagcaaggaattcctggtgactggaagggggagtgactcaggccctcaac

SEQ ID NO: 849704 - DNA, 100 bp, Homo sapiens
atactgtctgcgacatgtggaaaatgacggttataagaccatttatttctttggagacaaaactatgccagatgaatattctatctttcctcagacatac

SEQ ID NO: 849705 - DNA, 100 bp, Homo sapiens
atgaacctaaatggatgggtggagctgagggggcacacagtatgatcaaaatcacattatcctcaacactgtcagcaaagagaagtttacacaagtgtgg

SEQ ID NO: 849706 - DNA, 98 bp, Homo sapiens
taataggagtccagctattgctgctgttgagtaagccatatcaaagacttcattgaaaaataccaaggatctcaaagaagtcctccgttttccctggc

SEQ ID NO: 849707 - DNA, 100 bp, Homo sapiens
cagacagcggcatacagaatgcctatgaccggcgtcgagaatttcaactggttgtggtggagagctgtctggggccacaggctccttcagcagccccggg

SEQ ID NO: 849708 - DNA, 99 bp, Homo sapiens
ctactgcacccagtatggcgaggcagtagcagaatcccatggtagccaggtgggtgaaggggagcgaggacgttctacctgccttgaagaagacacctg

SEQ ID NO: 849709 - DNA, 100 bp, Homo sapiens
cccctggatgggggaccacaagatcctcatcgacagtgttatctacaaacttctggcatcgaaaagtgaaggaatcagggtacaagctcttaaggcaatg

SEQ ID NO: 849710 - DNA, 100 bp, Homo sapiens
atgctgaccgagaggcacgagaactctggtcccggctacagtctcagcttttagcaagaagccacggtcagtggaagtggccgcaggcagccctgccgtg

SEQ ID NO: 849711 - DNA, 100 bp, Homo sapiens
tcattgtttgtcaccacaaaaaggacaggaagaacttcagatgtcacttttaaaattgaacaatgaatatgaagtaattaaaagtacagctacaagagac

SEQ ID NO: 849712 - DNA, 100 bp, Homo sapiens
ccttaagttcgtcgtcttcatcgtcgcggttctgctgccgtcagcctacgctgtgtccctgctgcgggagtgtgtgaagttgcggccctcggaccccacc

SEQ ID NO: 849713 - DNA, 100 bp, Homo sapiens
atccatgctgaaagaatgcctggttggcagaatggccattaaacctgctgttctgaaaggtgagctgatcaaccttgccatgtactgtgagaggataagg

SEQ ID NO: 849714 - DNA, 99 bp, Homo sapiens
tgaaaaagctaaggatatctttattgaagctcacctttgtctaaataagtatatgaatgacctaaaggtacaaataaagacggagagagaacagtgcca

SEQ ID NO: 849715 - DNA, 100 bp, Homo sapiens
ttccatgcctctaacactcatcttcaaaagactgaaactgttcaggttccattatcaaaacgagcaaaatttgttggacctggtggctataacttaaaaa

SEQ ID NO: 849716 - DNA, 100 bp, Homo sapiens
ggatcctacagctcccaggagccccgaactgttgaaaaaatgtcatcaatgtgtcgaaaccattgtgaaggctaaagaccagcaagctgcagaagcaaat

SEQ ID NO: 849717 - DNA, 99 bp, Homo sapiens
aagcctttcgcggagaaaaggctgacatgcccgtcctatatgacagtctgcgggccaggcatcgacatccgcaacgactatcagcagctgaagcgcctg

SEQ ID NO: 849718 - DNA, 100 bp, Homo sapiens
atgttcacgtgacatcaagaggaagcggaaaccagtggccacagcatctttgtctagccccagtgcaggtggctgtgaagcacgtggtgaaggagcgggt

SEQ ID NO: 849719 - DNA, 50 bp, Homo sapiens
tttaagtcatcgttctaggataggagagacagcgtctggagaccatcctc

SEQ ID NO: 849720 - DNA, 100 bp, Homo sapiens
cagcaccacctttttggggaagatttacctagctgccaggtgtgatccctcacatccacaaatctctgattggaaagaagggacagcagaaaactgctta

SEQ ID NO: 849721 - DNA, 100 bp, Homo sapiens
gcactgtgtgtagcagcgtgtccaaggcaagaactgaaaactctgagtgatgttcagaagtttgcagagataaatgtttccaagccagcgccctactggg

SEQ ID NO: 849722 - DNA, 100 bp, Homo sapiens
gtgtctgaactgaagaagcttgggctcacttccacaaatgcactacaaatactgtggcagcatataatttaacttggaaatcaactaatttcaagacaat

SEQ ID NO: 849723 - DNA, 100 bp, Homo sapiens
ttaaaaagctgctgaagaaagctgcttcaagcacttttccagccattaactccaggctctcgagaatttgaagatgttgtaaatattctccattcttctt

SEQ ID NO: 849724 - DNA, 100 bp, Homo sapiens
cggcggcgacgctgacacctcccaccatggacagcttcgacttagccctgctccaggaatgggacctcgagtcactgtgagcctccattatggcatgctg

SEQ ID NO: 849725 - DNA, 100 bp, Homo sapiens
tatcataagtcatgtgctcttgctgaggacccacaagaacttcgagatggattccaacatcctgctagacttgttaagatcttcagtttagatcttggag

SEQ ID NO: 849726 - DNA, 100 bp, Homo sapiens
cctgcgccggctcctgcaaatgcaaagagtgcaaatgcacctcctgcaagaaaacggagcgtgctttggacaccatgaattttgatgttataaagggcaa

SEQ ID NO: 849727 - DNA, 98 bp, Homo sapiens
ccaaggcatcacatgagcatgaagataaaagtcctgaaacagttttgcagtcgctctcgtgggcgcctgcggtgggaactactcagccatgtcttctg

SEQ ID NO: 849728 - DNA, 100 bp, Homo sapiens
tccagatgggaagcgctttgtgactggaggtcagcgtgggcagttctatcagtgtatggcccactgcgtgaccttggttcagctgtccatttcctgtgac

SEQ ID NO: 849729 - DNA, 100 bp, Homo sapiens
aaagagaaattgatgagagaaatcgcccactttctgatgaggaattagatgctatgttcccagaaggatataaggtcaagagcaatctgaatccaaatgc

SEQ ID NO: 849730 - DNA, 99 bp, Homo sapiens
ggagggtatggttggcatggaattgaatttcatctgtctgtgggaattgtaagcaagtggaatgcagtagccctctgggcctgggatattgtggttgat

SEQ ID NO: 849731 - DNA, 146 bp, Homo sapiens
aggccaccctggaaagccagaagaaactcaactggtgtcgagaagtccggaagcttgtggcgctgaaaacgaacggaagatgttaccgagtacttcagtgaattccttagtgcaggggaacggagtcttgaattccagggatgcgg

SEQ ID NO: 849732 - DNA, 98 bp, Homo sapiens
agagcaaacagattcagtggcctgcattggctggacgtaaagaaagaagtgatgcactcaattctgcaatagataaaatgaccaagaagaccagggac

SEQ ID NO: 849733 - DNA, 100 bp, Homo sapiens
attgatccgatggtggttactggactctaagttctacctggagggcgaggtcctgtttgtgagtgtgggcagcatggtggagcactaccacacccacgtg

SEQ ID NO: 849734 - DNA, 98 bp, Homo sapiens
tttctaccaggattctggggtgtttctcctcctttcctccctcccagatcttctcacgaccagattatcaaaaattctcatgattaaaaaggaacata

SEQ ID NO: 849735 - DNA, 100 bp, Homo sapiens
ttcaacagttattagaaatttttaattctggaattctagagcctaaagagcaggaatcatggactgtggacttaaagagagatctacttcagagccagca

SEQ ID NO: 849736 - DNA, 100 bp, Homo sapiens
tgctgatggtcctctagctaggcttaaaaaagcaatttttagtccagagctctatgaaaacattgctgaatggattgtgattgaatcagcagaagtatct

SEQ ID NO: 849737 - DNA, 100 bp, Homo sapiens
ggacttgcttttgttgaactgtattaaaggtggaagaaggtccatatctttttctgtgggtgcttcaagtgttgttggaagtggaggcagcagtgacaag

SEQ ID NO: 849738 - DNA, 99 bp, Homo sapiens
agaggcaccaaatctggcctgggggcccgagaagcttcctctcaggtactccaaagattcaggtttactcacgtcatccagcagagaatggaaagtcaa

SEQ ID NO: 849739 - DNA, 100 bp, Homo sapiens
ggaggtgaaccatcgagagattctgcgtgagcacctgaaggaagagaaactccatgccaagaaaatgaaggatgttgagaaagagaaggaaacccacagt

SEQ ID NO: 849740 - DNA, 98 bp, Homo sapiens
gcaggtctcccccacggatgaggagaagggatctcaagggcatttccctttgcccacctcaccttttcatatttggtaaactgtatgcatttgcctcc

SEQ ID NO: 849741 - DNA, 128 bp, Homo sapiens
ctgcaaccccgcagagcgcatccatcaaagctttgcgcaacgccaacctcaggcgagatggagaaacaattgcagcacttacagacataaccaacttgaaccatctggaatctgatgggcagatcaca

SEQ ID NO: 849742 - DNA, 100 bp, Homo sapiens
caaagtctggcagctgggccgcgactacagcatggtggagtcgcctctgatctgcaaagaaggagaaagcgtgcaggtctcctccgggctggggctgagc

SEQ ID NO: 849743 - DNA, 100 bp, Homo sapiens
aattaccgtatgcagtcccccaggatacagggtcaaaggagagcacaaccatcgcagttggaagcccatggggcagagctgtaggtaaaacttgcctact

SEQ ID NO: 849744 - DNA, 98 bp, Homo sapiens
cagctgtacagccacactaactgtgacagttgatccacctgaagaattaggagctagtatttctgtcacaacagatgagctagagaaattgctctata

SEQ ID NO: 849745 - DNA, 98 bp, Homo sapiens
ttttgaatgcagatgttcaaggaattcattctgagaatggaccagttttggttgaagaactgggaaagaaatctctcaggattaacactgcagagtaa

SEQ ID NO: 849746 - DNA, 99 bp, Homo sapiens
ttataaaatgtgcatcttaaggagacatactgatatttctcagggcgagaggtcaatgatcttaaaagaaaatctccttcagatctttggaaagaggat

SEQ ID NO: 849747 - DNA, 98 bp, Homo sapiens
gtcaagttcgacctcaaggtcatagaggcaggcatgtttgctccaacacagaggacagaaggtatctccacatcagacatcatcacccgaattgtgcg

SEQ ID NO: 849748 - DNA, 100 bp, Homo sapiens
aaagcggcgttatgacaggaagcagagtggctatggtgggcaaactaagccgattttccggaaaaagacgtgggttggcaataagagaagaaagatgagt

SEQ ID NO: 849749 - DNA, 98 bp, Homo sapiens
gagaccaagggaataaagcaagatcttatccacagactccaggcatatcttgaagaacatgctcctggcaaccactatttgagtttctgcctctacaa

SEQ ID NO: 849750 - DNA, 98 bp, Homo sapiens
ggaagcggatcgggtggagtgaaggtcacgtcgccatggtgcagcagtaccgcgtcgccatgactgccaaggactgctccatcatgattgcactgtct

SEQ ID NO: 849751 - DNA, 98 bp, Homo sapiens
gggctgagccaggccccttctcagattgcaaacagtggttctgctggattgataaacccagctgctacaggtgctcctcagcaagtgatgactcaaat

SEQ ID NO: 849752 - DNA, 99 bp, Homo sapiens
tctgcctcatgactgatgccaattattccccttgtggccccctgtggtgtgacatgtactccctctccggggatcccatcaaagctggacgactcctct

SEQ ID NO: 849753 - DNA, 100 bp, Homo sapiens
ccatgaagcagagacagggattaagtcaaaagaagcaagaaagtacattttcaactgtttagatgatatggcccagttctttattggtgaaaacatgaat

SEQ ID NO: 849754 - DNA, 99 bp, Homo sapiens
agcggatccaagccatgattcccaaggatgtaattggctgtactcaggagatggatttcattctttggcctcggaatgatattgaaaaaatcgtctgtc

SEQ ID NO: 849755 - DNA, 98 bp, Homo sapiens
tgcgtgcaatgttcaccagtcagtgtttgaaggagaagagagcaaggttgttggaaaggacaccaatgtcatgttggtggctttggcagcaaaatgtc

SEQ ID NO: 849756 - DNA, 100 bp, Homo sapiens
cgcgccgacggctgctcaaacatcaggtactatactggcaattgctggagaagattttgcaattgttgcttctgatactcgattgagtgaagggttttca

SEQ ID NO: 849757 - DNA, 98 bp, Homo sapiens
tcagccatgtgaccctgcccttctaccccaagagcccacagtcttggccagtctgcgaactgtacgaaacaactttgctgcattaactaatttgcaag

SEQ ID NO: 849758 - DNA, 100 bp, Homo sapiens
agtgaagagtctggagtttatctggagtgaggtggccggttcttggtgggatctgagcaggtatattcagcatgcagctttactttttcaaagattcctt

SEQ ID NO: 849759 - DNA, 100 bp, Homo sapiens
agtataataccaagaaagccccacttgaaatgtagacaaccaatttcctgggcaagctgctccacctggattcccagtgtatcccgcgtttagcccactg

SEQ ID NO: 849760 - DNA, 100 bp, Homo sapiens
gagagttgtgagaaaagcgagcctcttctgataactcaggatttacttgaaacaaaaggagaccctaatcttcaggcaggtatgtttattcctaaaacga

SEQ ID NO: 849761 - DNA, 99 bp, Homo sapiens
atgaagatagctccagagagcatccccagtcttgaggctctcactagaaaagtccacaacttccagccagaacccatattaactatggagtcaaagggg

SEQ ID NO: 849762 - DNA, 98 bp, Homo sapiens
cgcagcgggcagtgtggctcataagccacgaaccgggaactccactttgtggcaccgtgagattctccagacttcacagagaatgcagttgtcttgac

SEQ ID NO: 849763 - DNA, 100 bp, Homo sapiens
ctttcagagtatcttgtcgctgcagtggaactattggaaaggccttcactgcacaggaatggaagttggatacactttgtgacttgtacgagacactgac

SEQ ID NO: 849764 - DNA, 100 bp, Homo sapiens
cataggtcccggttggtagagggtttgagtccgcatcgccacagctgaaggctgcgagggactaagagcagagtcttgagagctgatgacaataacatgg

SEQ ID NO: 849765 - DNA, 100 bp, Homo sapiens
gaggaggcgcggaaccatggccgatgggggcgagggcgaagacgagatccagttcctgcgaactttgctgatatgtgttcaagatgagtgggatgggaga

SEQ ID NO: 849766 - DNA, 100 bp, Homo sapiens
atttctatcacccctagggagagaggatcggggacccgctgatcttccagctcccctcacccaacgtcgtgtttctgagtcccttcaacatgatcctggg

SEQ ID NO: 849767 - DNA, 100 bp, Homo sapiens
cttttgtgtattttgagagaatagatgactcaaaggaggtacttaaacttcacccttgtttagcccctattaaggttgctttggatgtaggaagaggccc

SEQ ID NO: 849768 - DNA, 100 bp, Homo sapiens
gcaacagaagtttatcaaggctgtcacacatcaagttaaatttggtcaacaaaatccacgtcaggtgagcccattggcaggggtaccaaagtgatcctcc

SEQ ID NO: 849769 - DNA, 100 bp, Homo sapiens
gcttgttgaatggcttcagagtcaaatgtctgttatgttctgaacccacacatgttttcggaaggaccagatggctgacactggctaatgggaaccaaaa

SEQ ID NO: 849770 - DNA, 100 bp, Homo sapiens
gcggggcgtgcgcgtcctcctccccaggcccgccgcctccctgccaagaattaaacaaccaccatgtcgagcaaaaaggcaaagaccaagaccaccaaga

SEQ ID NO: 849771 - DNA, 98 bp, Homo sapiens
agacaccgaccccacaggccgtcccggatctcagcggacacaggcaggagcgccccatcatttgacgcaactactcctacccaccgtgcaccctgacg

SEQ ID NO: 849772 - DNA, 98 bp, Homo sapiens
agtatagtcaatgaattaaagacaagaaggtttccaatcagcacaccaatgactttgccctgtacacagaagccatcaagtttttcaaccaccctgaa

SEQ ID NO: 849773 - DNA, 99 bp, Homo sapiens
gacactaccagctatccttaatactttgttgacactgcaagaggaaggggaacagtttgtgaagaaaatcggtggtatttttgccttcaaggtgaaaga

SEQ ID NO: 849774 - DNA, 100 bp, Homo sapiens
tgaattagctagtagggagaagacagaagataaagataaaccccttatttataaagcagcagccgctcttctaaaacattcaaaccaaagaagaatatcc

SEQ ID NO: 849775 - DNA, 100 bp, Homo sapiens
aagaagttgccaaatttgaagcagaacgatcaaaagccaagtggcaaacgcaaaatgatgcttcaacacccaggccaggtctctgcctcggaagtgagtg

SEQ ID NO: 849776 - DNA, 100 bp, Homo sapiens
ctggaccaagatcgagcccagcgtcaacttcctcaagtcgcccaaaggtaaataccagctgtcccctacagtgaatatgccccaagatgacactgtcatt

SEQ ID NO: 849777 - DNA, 100 bp, Homo sapiens
ggaattattcatcaagaagaggccctttagcagatatcaacatggcaggagagcccaaaccatacagaccaaaacctggaaacaagaggcccctttctgc

SEQ ID NO: 849778 - DNA, 99 bp, Homo sapiens
accccgccagctccagagccactcttattgttacaggtatcgctgtgctgctcggagccagaacacacctgatagctctgcttcgaatctgggattccg

SEQ ID NO: 849779 - DNA, 98 bp, Homo sapiens
tggcattggaacttcctgttctgatagcgtggaaggctacagatgcacatgttgaatggagctcttctggcattgctgtttcctgtggtaaacactcg

SEQ ID NO: 849780 - DNA, 98 bp, Homo sapiens
tgaattatggcagcccagtcaagaaatcctgcaggacggactggactggtgggccgggggcttttggggcgatggggcccaaatcacgctgcagatcc

SEQ ID NO: 849781 - DNA, 100 bp, Homo sapiens
tcccagtctagtgaagaaactgtcaagcacctcagtgtatgatttgacaccagatgcagagagaacttgtttatgcaagaggagatggccctggggcccc

SEQ ID NO: 849782 - DNA, 99 bp, Homo sapiens
cctcacccaggcccctgtcaagaaggtgccggtggtgcgagtcttcggagcgaccccggcagacctagaggatcaagacataatgggagcatttttaga

SEQ ID NO: 849783 - DNA, 100 bp, Homo sapiens
gtcactgaagtcacaacttgccaggaggttgtcatagccttagctcaagcaatagttgagccccatatgggggttggcaggcagcagagaggcccctttc

SEQ ID NO: 849784 - DNA, 100 bp, Homo sapiens
gctataatgggtatggaggaggacctggagggaacacgggtctggctgagagaaaatggccagcattttccaagtactgtaaattcctgtgcagaaggca

SEQ ID NO: 849785 - DNA, 99 bp, Homo sapiens
tgaaagtcagtttctgaggaatttcatcagccaccattggttcaggcaatcttcagcggtgatccagaggagatccggatgctcatccataaaactgaa

SEQ ID NO: 849786 - DNA, 98 bp, Homo sapiens
ctgagattgaccctgctggttttgaggacttgccgaacctacaggaagtgaaacttccattttagaagaatacagtatcaattggactcagaagctgg

SEQ ID NO: 849787 - DNA, 100 bp, Homo sapiens
caatggtcatgctttcaacgtggagtttgatgactctcaggacaaagcaggtgtctcttttgacaagacttcagctacctggcttgctctgtccagaatt

SEQ ID NO: 849788 - DNA, 100 bp, Homo sapiens
ctggtggtccgcaacagctcggcacccattacactgatgctcgggtgctttcttctgcgacctggtactcatctacctcatcaaaaagagagagttttac

SEQ ID NO: 849789 - DNA, 100 bp, Homo sapiens
tgacggctctgtaggctttggaggaagtcctgatgaacttggagaaaccacactagatgccatgatcatggatgggtcttggtcttgatgccaagtttgg

SEQ ID NO: 849790 - DNA, 98 bp, Homo sapiens
aggagcagccctggtgtcacctatcagtaaaaggcaatgaatcgctccctggctaatgtgattcttggaggctatggcaccacttcaacagctggtgg

SEQ ID NO: 849791 - DNA, 139 bp, Homo sapiens
tgcacctttgagcaatggtctttgctgtgccttctctactgatggcagtgttttagctgctggttggaaagacttcaaatcatgcaatagttcttgcccagctcatcactaaggggaaatgctatggattacatgcctt

SEQ ID NO: 849792 - DNA, 100 bp, Homo sapiens
atttactgtaaacaattggacagaagaatgcactcaccttgtcatggtatcagtgaaagttaccattaaaggagggacattgcttgggcctccagactct

SEQ ID NO: 849793 - DNA, 99 bp, Homo sapiens
cgcttaccgcatctggctggagccctgcattcgcggcgtgtgcaggcaaaatacatatctcagtgcattgatgagatcaagcaggagctgaagcaggac

SEQ ID NO: 849794 - DNA, 98 bp, Homo sapiens
cattatgcagttcttggacttggccatgtgagatacaaggctacacagagacagatcaaagcagctcgcatgaaaacagccctggaagtctgccctgg

SEQ ID NO: 849795 - DNA, 99 bp, Homo sapiens
agaaacctagcaacaaaaagaaagctgcgttaatgtttgcaaatgcagaggaagaatttttctatgagtcacccacaaaagctgtatataatgccagac

SEQ ID NO: 849796 - DNA, 100 bp, Homo sapiens
gtttctgacttttctgtatcgttattccatctctgggcctcatgtccttccaattgagaacttcctggggttgaggcatgtgaaaattataccttccgat

SEQ ID NO: 849797 - DNA, 98 bp, Homo sapiens
agctggggcgaagaaggttcttggagttgatcaatctgaaatactttaccaggcaatggatattataagggagtaactattcccagtcagaggcgcta

SEQ ID NO: 849798 - DNA, 100 bp, Homo sapiens
cccactattcgctcagaaactccaggagcatccccccggtccttcagaatccaaacacgctttccgtcctaccaacgcagccaccgccacctcacattcc

SEQ ID NO: 849799 - DNA, 98 bp, Homo sapiens
ttctaaagcaaaaaaaggaaaagagaaggaaattgcaaaactaaaacgacccacagcacttaaaaagtgtattgagagtgagaacacttggagagatt

SEQ ID NO: 849800 - DNA, 100 bp, Homo sapiens
ttgtaatgatgggccgacaccagtacataaatgaagacgagtatgaagtaaatttgaaagactttgagccacagcccgaaagcgtggatacccatcaacg

SEQ ID NO: 849801 - DNA, 100 bp, Homo sapiens
cttcactttcttcattcacaatcccaagcgccaggaccttgaagttgaggatcattttacttctccagatgaatatgatgaccctactgtgctctatgaa

SEQ ID NO: 849802 - DNA, 100 bp, Homo sapiens
cggctggcagggtggacctcaggagcctcctaaaaccacagacacgatgaggcgagtggtacgacagagcaagtttcggcatgtatttgggcaagcggtg

SEQ ID NO: 849803 - DNA, 100 bp, Homo sapiens
atatattgactactgccacaattccgatttgcttggaacggtagaagaaatccttccaagcctctcagaaaatatcagtgtttgggggatgaaagattct

SEQ ID NO: 849804 - DNA, 100 bp, Homo sapiens
tgactgatgaagggaaggaaatcatgtcaagcgaagccttgaaaaagctgccctgagacggtgtcccgccgaaagtgaacagagtatctgccaagcccgg

SEQ ID NO: 849805 - DNA, 100 bp, Homo sapiens
ttatgaattccatctaaccagacaagaaatagtatcattattcaacgcatttggaagtaggtggcaagtgggagaaaccatcagaaattttggaaatcaa

SEQ ID NO: 849806 - DNA, 100 bp, Homo sapiens
ccagtctgaatgacatttctgataaaccggagaaggaccagttgtccagtgtacagaagcttactggaaggagtggccaactagttaaaggtttgacacc

SEQ ID NO: 849807 - DNA, 98 bp, Homo sapiens
cgggcccaggccccggcagcgcctgggacaagcaatacgaggattctctccaccacatagaatctgcagttttgaagaggcaaagggtttggatagga

SEQ ID NO: 849808 - DNA, 100 bp, Homo sapiens
ccatatcatctctgctgatacgagggtggaacgcatgtcctgaagcgtctgtagaggcttctggtgaaatcgcattatgcaagactggatttcctgaaga

SEQ ID NO: 849809 - DNA, 100 bp, Homo sapiens
tagcgctcgtctggcggagctgggaatgaggggagaatcatacttcatcggaatgaggagcccagggcagcagggacacgtccctgaagatggaggactt

SEQ ID NO: 849810 - DNA, 100 bp, Homo sapiens
gtcacgccactgccatgtgccatcacaggttttataggatcacattgacaaaagtaccatggagttttatgagtcagcatattttattgttcttattcct

SEQ ID NO: 849811 - DNA, 98 bp, Homo sapiens
ctgggtgtgaacggcaaagtgctggagtgcttccatcggcgcactggacagaagtgtgccctgaagataatattcgctgaggactaccagcgtgtgga

SEQ ID NO: 849812 - DNA, 100 bp, Homo sapiens
tgcacggtatgaatgtgctccggtgaaaccttttttctgcaggatccggaggaaacctcgggactacaccatcaaggtgcacatgaacctgctgctggcc

SEQ ID NO: 849813 - DNA, 100 bp, Homo sapiens
ttttattcccagccagtaaaacaagtggcctttacacagggcaggttgaatataagaaaggctttgaagagagtaagacccggtttcacctgcccatgga

SEQ ID NO: 849814 - DNA, 117 bp, Homo sapiens
caacaccctcattgctttcttcattttgactacgataaaagagtggacacagatatctaccagatatcttcgagagcagttggccaagatttctgacttttaccacatggcctccag

SEQ ID NO: 849815 - DNA, 100 bp, Homo sapiens
tatgtggatgcagcatataagccaggcatgtctcccgaggagtgcaggcgcttcaccacagacgaacatttccccagaggagctcaaaatggagttgccg

SEQ ID NO: 849816 - DNA, 100 bp, Homo sapiens
cagcagcgtcctccccaccccacctgccaccgaggccccctcttcgcctcctccagaaagtcagaaacatggccctggatgatgtcgtgatcctgaatgt

SEQ ID NO: 849817 - DNA, 100 bp, Homo sapiens
ggagaagaagggcctcttcctgaagcatgtggagtatgaggtttccagccaggcaacagcattattgagaaaagcccttacagaagagtgtggccgtagg

SEQ ID NO: 849818 - DNA, 98 bp, Homo sapiens
actatgcccactctcaccagcctcccatcttccaccgacaagccgtcggagaacattacgtggtagaggtcaagcttccagccagaatgtttgagtca

SEQ ID NO: 849819 - DNA, 99 bp, Homo sapiens
ggccatcttggctcctcccacgtttcataaatttctaaggtctacttccccagcaggacagcatcattctcctatatcttctagacatcactcatcttc

SEQ ID NO: 849820 - DNA, 99 bp, Homo sapiens
agcaattggcttttacccatctgaagagaaggacataagcagctctatgaccaatagcacagctgccagtagacccccggtcaccctgaggctggtggt

SEQ ID NO: 849821 - DNA, 100 bp, Homo sapiens
caactgacttttacttttgacgaccaccatgactgagatcactgctgaagggatccttctaaagtaaatattctggtacctggtgctggactaggaagac

SEQ ID NO: 849822 - DNA, 100 bp, Homo sapiens
tttatccaactgatcagggcttcctggattcagtgacagcagaagttgcctaccaggttcaaaccttgtactactcagctgatcacaagctgcttgatgg

SEQ ID NO: 849823 - DNA, 100 bp, Homo sapiens
ggtcttgtagcagcgcctcctcggtcaacatggctgaacaggagcctcgttctctgtcagaatcgccctacttgccctacctcatggctggcccttccgg

SEQ ID NO: 849824 - DNA, 100 bp, Homo sapiens
ctgcatcctaagactcgaaggcagcacaggacctggaaaaattacatgtacagagccagatggactccttcggacaaactacagttctgtgttaacaaat

SEQ ID NO: 849825 - DNA, 98 bp, Homo sapiens
tggaggaggtgcggcacagcgccgccgaggaggaggacgctatccacgccctcttcggcagcatgcaggtccagggttctgatcaagcaggaaagaag

SEQ ID NO: 849826 - DNA, 100 bp, Homo sapiens
tggggacaacagtgacgaagagaactgtctcctggtgaccgagcacccgcctccgggcatcttcaactgaacctagaaagattgtacaatgaatggtgat

SEQ ID NO: 849827 - DNA, 100 bp, Homo sapiens
ggataagctcatcagcgtggaggacctgtggaaggcatggaagtcatcagaagattctgacaatggagatattaattatgattatgttcatgaattgtca

SEQ ID NO: 849828 - DNA, 100 bp, Homo sapiens
agaggactctatacagggacgtgatgctggagaattataggaacctggtctccctggaggatcagcactgccagtggagatgggcgtcactactgctacc

SEQ ID NO: 849829 - DNA, 100 bp, Homo sapiens
cgcgcacagtccctccacgcggaaagaagtaccttcgccggtcaccggctcctgcagggttccttgcattgactccatggagagtatatcacctgatttc

SEQ ID NO: 849830 - DNA, 100 bp, Homo sapiens
tgggcttctctgaggcggcgagagatggtcaggtctggagctcgaccgggccagatcaaaggtccatcatcaaaacaccaaagactcaagacacagaaga

SEQ ID NO: 849831 - DNA, 100 bp, Homo sapiens
aagaaagaaaagaagaggaggaattaaattttaatgaagatattctgtgtccacatggagccaggtgagaatttcaaggattatcgacttcatattgcac

SEQ ID NO: 849832 - DNA, 100 bp, Homo sapiens
ctttagtggcagcatgaagcgcaccccgactgccgaggaacgagagcgcgaagctaagattgccctcttagactcccccacagctttaagtatggaggaa

SEQ ID NO: 849833 - DNA, 99 bp, Homo sapiens
tgggacccccaagcggtgtctctcatcctgactggggatccagagtaggagggagcctttggtggggatcgccaacctgaagatccagctggccaagct

SEQ ID NO: 849834 - DNA, 100 bp, Homo sapiens
tcgactgcatcctgatggaacagttctctatggactccgtgtggagacaatcaatgatggaaacttccacattgtggaactacttgccttggatcagagt

SEQ ID NO: 849835 - DNA, 100 bp, Homo sapiens
gcgggaggcggtggcggcggctgcccggggccaacatgaccaggtcccaggtgtgtgatggcggctgcaatctgtcttgtgggtattaatgcaatcttca

SEQ ID NO: 849836 - DNA, 100 bp, Homo sapiens
tatcgagagtcggaggccaaacacaccgtatttcatctgtagcattcaagacttcaaactgagatcatgatgcagccgtccttttggatttctttttaat

SEQ ID NO: 849837 - DNA, 98 bp, Homo sapiens
ccgagctacttcaacggaaactagctcatctgtagagactgatttgcaacccttccgggaagccatagctctgcatgattcaaggcctcttccagatg

SEQ ID NO: 849838 - DNA, 99 bp, Homo sapiens
tcagcagagcaaccagagttctactacgatgagtttggtttccgtgtgtacaaggaaggtccttgaatgggcaagagggcacatgaagtacggcgtcct

SEQ ID NO: 849839 - DNA, 100 bp, Homo sapiens
atgatcatgatacagttgataaaattgttgaagctcattcacacagaagacccatttaatgatgaacatcaggagaggcaagaggtggaaatgttggcta

SEQ ID NO: 849840 - DNA, 98 bp, Homo sapiens
aatcccattctctggctggagacacagatggcctcaaatgagagagatgctatatcgtggtaccaaaagaaggaagaggcatctccctacactttggt

SEQ ID NO: 849841 - DNA, 98 bp, Homo sapiens
aaagaccactggatcccaagagtgaagctcagcttcagatcgggagcggtgccgagaaaaatttccttactagatgacatttcatcgcaatgtccgat

SEQ ID NO: 849842 - DNA, 98 bp, Homo sapiens
gaggccgtccagcagatggcggatgccctgcagtacctgcagaaggtctctggagacatcttcagcagggctgacgcgccactatgtagcgggtttcg

SEQ ID NO: 849843 - DNA, 99 bp, Homo sapiens
tattctagaagcaactgaggagtttctacaaacattttggaaattacaggtctgggacctgcgccagaacaagctaacctacaccatgagaggccatgc

SEQ ID NO: 849844 - DNA, 99 bp, Homo sapiens
cgttctccccgtccgcccgaagatggtgatggaacaaggagattggctgattggaggagatcttcaagtcttggatcgagtttattggaatgatggtct

SEQ ID NO: 849845 - DNA, 100 bp, Homo sapiens
caattgcaattattattggggcattcttcattccagaaggaacttttacaactgcctcatgatgatcctgagacttgtcttgttgctgctctgagcatct

SEQ ID NO: 849846 - DNA, 100 bp, Homo sapiens
tcttgataaaaagagatgtggggggattctcgacctgctaacagaactggaccttttcggaatttgctgattcccttggaattccgtttttggaaaccag

SEQ ID NO: 849847 - DNA, 112 bp, Homo sapiens
gcagtacagcggcaagatcaagcactggaaccgcttccgagacgacgagcctgtggagtgggagacacctgacctttctcaagctgagattgagcagaagatcaaggagtac

SEQ ID NO: 849848 - DNA, 100 bp, Homo sapiens
ggtgctgctggttagtgtgctctgagggagggtccgagccagccgctgttttgccggaggagcccctcaggccacactacccgaagcagtccttcaccac

SEQ ID NO: 849849 - DNA, 100 bp, Homo sapiens
aaccagctggaggaaacctgtagcctagggcagctgaaaaagttggatgaagatagtttaaccaaacaaccagaagaagtatttgatgtcttagagaaac

SEQ ID NO: 849850 - DNA, 98 bp, Homo sapiens
acctttgagcatacaccgagagagtgaggagccagacgacaagcacacactatggcgctgaaacggattaataaggggaagatggtgaaaggaatggg

SEQ ID NO: 849851 - DNA, 99 bp, Homo sapiens
ttctattcactaaaaccatgtgtctgaactgaagaagcttgggctcacttccacaaattagtttatgccaacgtgacttcattcatacagatgaaccaa

SEQ ID NO: 849852 - DNA, 100 bp, Homo sapiens
ggagcaaccccaagtcaccacaaaaacctatcgttagagtcttcctgcccaacaaacagaggacagtggtggtgatggcacttctcaaatactggccaaa

SEQ ID NO: 849853 - DNA, 50 bp, Homo sapiens
ctggaaaatccgcaagaccatcatgcagtgcgcgtcccgggacgactggc

SEQ ID NO: 849854 - DNA, 101 bp, Homo sapiens
gcggaggaggaggaggtggactctgccgacaccggagagaggaagcagttcaggtacttttgaagcattctgcagatgttaatgctcgagacaaaaattgg

SEQ ID NO: 849855 - DNA, 100 bp, Homo sapiens
gcaagactccgtgaaatgatagagaagagacagcctcctaaatccaaaaggataactgggatgacgatgatgatgaaaaaaaagaggaagcagaagtaaa

SEQ ID NO: 849856 - DNA, 99 bp, Homo sapiens
gggcctggagctaggcaaggtggtgactaagaaattcagcaaccaggagacctgtgtacggccccctcccgcaaagctttgacaaagagtgggtggcca

SEQ ID NO: 849857 - DNA, 100 bp, Homo sapiens
ttgggagaaatccccactcctccaagaaccaacccccaaattggctgggacaggggtgagcccctccagactccgaataggagatcaagagtttgattca

SEQ ID NO: 849858 - DNA, 99 bp, Homo sapiens
agaaaaggagatcgtattatatcgatggtctgtcttctgctgatcccaactctgattggaatgcaccagcagaagagtggggcaattgggtagacgaag

SEQ ID NO: 849859 - DNA, 103 bp, Homo sapiens
gcaactggcggagtacaacgcgcctgcgcattatcagactcagggacaggctggaacctcgccccggaatgaaagctactggttgattttaaagtgcctgggc

SEQ ID NO: 849860 - DNA, 100 bp, Homo sapiens
atattatggaacgaaagatcctgttccaggctattctgttccagcagcagaacacaggtgaaattcgatgctactgtgatgctgcccactgtgtagccac

SEQ ID NO: 849861 - DNA, 98 bp, Homo sapiens
cagactttttcaccatttggacaaataatggaaattcgagtctttccagataaaggatattcatttgttcgaaggaacccagccagccggcggaatgc

SEQ ID NO: 849862 - DNA, 100 bp, Homo sapiens
agtggtgtttgggggcttttatcttttctttttcacagagaagatcttgaagattcttcttaagcagaaaaatgagctgtcccctttcctccaacccaac

SEQ ID NO: 849863 - DNA, 101 bp, Homo sapiens
ctgatgaaaatccagacaaaagcactttagaaaaagctattggatcactgaaggaagtaatgacccactacttccttcattggactgcaaggtatttctgt

SEQ ID NO: 849864 - DNA, 100 bp, Homo sapiens
tgggaccatgtccagccctctccagtgtatccacagccccgacctttgatgagaactcagctgtccagtgcaacaggtgatcgagaaccacatcctcaag

SEQ ID NO: 849865 - DNA, 100 bp, Homo sapiens
caacggcttcatcagcaccttggggtcttcaaagcttcacctttctccaaaggcagatgtgaagaacttgatgtcttatgtggtaaccaagacaaaagcg

SEQ ID NO: 849866 - DNA, 100 bp, Homo sapiens
tgcggcagacgggctcccccgggatgatctacagaacccttgctggcctcagaacaccagcgccctccctccggtgcagccctgcctggccgggggcccc

SEQ ID NO: 849867 - DNA, 99 bp, Homo sapiens
gtactggctggatgcgttcctcaagcccagcctcgccaggactaccttaagggactgagtatcattggggttaatgttgaagaaggaaaatgcggaagt

SEQ ID NO: 849868 - DNA, 98 bp, Homo sapiens
gcgcttcccctttccagagagccagaaagaaagaccctcctggatgacttccttctcacgtacactgtcttcatgacaactgatgacttgtgccaggc

SEQ ID NO: 849869 - DNA, 100 bp, Homo sapiens
agcacattcttgctacctccagtcaagacaattctgtgaagtatccatatattcctgcacatattacaaagcctaaggaacataagaagttgtttctggt

SEQ ID NO: 849870 - DNA, 100 bp, Homo sapiens
aaagcgggaagactcatcggagcgtgtggatttgagccgccgcattttttaaccctagatctcgattacgatgaggacctggtgcaggaagcttcatctg

SEQ ID NO: 849871 - DNA, 100 bp, Homo sapiens
atgcaggttcctatgcgtcactaggtggagcttctggtgatgaaggccctttcggtggggctggtgaaaggcagtatagacgaggtggacaaacgagtcc

SEQ ID NO: 849872 - DNA, 100 bp, Homo sapiens
acatcatccagctgcctcaaatcgtcgtagtgggaacgcaggtaccaaagcagtcagactcacagcctaattctgataacctaagtcgccatggtgaatg

SEQ ID NO: 849873 - DNA, 60 bp, Homo sapiens
ccctgccctgggctggaacgaccctggtctgctgagaacagacccagtccctgaggaagg

SEQ ID NO: 849874 - DNA, 100 bp, Homo sapiens
ggagagaaaggtcaaaatcaagactatagaggtggaaagaatagcacttggagtggtaagaatgattgatgttggctgatattggagtgctcattcacat

SEQ ID NO: 849875 - DNA, 99 bp, Homo sapiens
acacaagaagcatccttaggagctctgcagaacctcacggccggaagtggaccagttccagcaacagatagaaatgctttaagttcactctggggaaag

SEQ ID NO: 849876 - DNA, 100 bp, Homo sapiens
gcacctttgccgtgtacctcaatagcactggctaccggacagtgccctgaggagctgaaacccatgaaggatggctctggctgctacgaccactccaaag

SEQ ID NO: 849877 - DNA, 99 bp, Homo sapiens
tccaatctgagcgtgctgcggacggcgctgcggtacatccagccctcccaggcccaatacttcaaagcatcctacctctgctcaatatatattacttgg

SEQ ID NO: 849878 - DNA, 100 bp, Homo sapiens
cccaaaccatgttccctgtgaaggtgaaagtggagaaatcagtatggaagctccaaaaggaaagataccagattgatcttgatcacctctgcctccccag

SEQ ID NO: 849879 - DNA, 98 bp, Homo sapiens
ccgggttacaggacttgatggagccacctatacagtgctgttcattggcacagccgcagctacgtcttctcctccctggccacgtcggctgtctcctt

SEQ ID NO: 849880 - DNA, 100 bp, Homo sapiens
ggtggacgtgtacaacccgacgaggaacgaatgggacaagatcccgtccatgaatcaggaggatttgacagctaaggatattgaagaaattattgatgag

SEQ ID NO: 849881 - DNA, 98 bp, Homo sapiens
gtggaaaccagagcagtacctcgtgtatactacgctatcgaacttgaaatgcaggctcgagctcatggactttcccttattccatccacgggtctctg

SEQ ID NO: 849882 - DNA, 98 bp, Homo sapiens
aactatggcaacatcaggtgactgtcccagaagtgaatcgcagtcaccaggtgtcaagatgctgcaagtacataggactggactgggcaggctggggg

SEQ ID NO: 849883 - DNA, 100 bp, Homo sapiens
cagtcggtcgtccgctggacaagcacgagggcgcgctcgagacgctcctgaggaatctttgtctgaagtggaagaaaaatacaagaaagccatggtttcc

SEQ ID NO: 849884 - DNA, 100 bp, Homo sapiens
aagaagcccagcttttccatcctggagatctacaggatttatcaaatcgagtcactgtcaaggattcgataaacaagtggatgtgtcatatattgccaaa

SEQ ID NO: 849885 - DNA, 100 bp, Homo sapiens
ggccaggagtagtatcttcttcagagaacttaaggctcgttatcggaaagagcaaacattgcttaagcaactgccttgcattccattggtagaaaatttg

SEQ ID NO: 849886 - DNA, 100 bp, Homo sapiens
caacattaacactattatttgtgatcttcagcctcaacagtgatatggagaatgcagaaaacattctcacagtgatgagagatgccggaattgagcctgg

SEQ ID NO: 849887 - DNA, 100 bp, Homo sapiens
atcgggctcatctgctggcagtatacaagcgaaggacgggagccgaagctcaagctggaggcaaagctggaaaggacagtgggaaggccaaggctaaggc

SEQ ID NO: 849888 - DNA, 100 bp, Homo sapiens
gtagcccagaagcaaaagagacccacagatttggatgtagatacgttagccagtttacttaggcgtctctggccgagcctctttttgtggaaaacgacag

SEQ ID NO: 849889 - DNA, 100 bp, Homo sapiens
attttactactgagctgcaaagatatgaccacattctgaagtgggaactcttccagctggctgacctggatacataccagggaatgctaaagttgctctt

SEQ ID NO: 849890 - DNA, 98 bp, Homo sapiens
ggagctgttttaaaagttaggcaagatctggtcaaagaattaactcctgaggagagagcccaaaagattgccaaagccatgcgcaaacagtcttctga

SEQ ID NO: 849891 - DNA, 100 bp, Homo sapiens
attttgattttcaagttggagaagacccacctttgtttcctagtgagaaccgagtcagtgctcttacccaggtgtttaagatagaagtgctaatgaatgg

SEQ ID NO: 849892 - DNA, 100 bp, Homo sapiens
gaaagagattggtccagaacagtttccggtcaatgagcactattttggattagtcaattaaaatggcgaaactggaggaacttgaagaaattgatctcag

SEQ ID NO: 849893 - DNA, 100 bp, Homo sapiens
gggatgctgtactccttgtctttgcaaacaaacagatgaacaggaagcggtgcaggaggttcctagagttgttcagaatcctccaaaaccagtcatgacc

SEQ ID NO: 849894 - DNA, 98 bp, Homo sapiens
tggcccagattctgccaattcgttttcaggagcatctccagggcccgcactaagagcctaactgaaatcccgcgaggatcaaccgagctcgccgaaag

SEQ ID NO: 849895 - DNA, 100 bp, Homo sapiens
aaagagtcaacagcagtggcaacaggaggcaagtgaggcctatctggttggcctttttgaagacaccaacctgtgtgctatccatgccaaacgtgtaaca

SEQ ID NO: 849896 - DNA, 98 bp, Homo sapiens
gaaagaacacgctttgttgcttctaaacctctggaggaggagcttcttctcagcctgttgataaccatgttagcccatcttccttcttgggccagaca

SEQ ID NO: 849897 - DNA, 100 bp, Homo sapiens
gatggctggagacaacaaactccttggacagtttactttggactatacaggctccaacccaagttccagtggttgtgtctcctaggaatcagcagttgca

SEQ ID NO: 849898 - DNA, 100 bp, Homo sapiens
cgaccaggaccacagcggcaaggtctccaagtcccagctcaagcagtcctgcgttaactgcggccgggaggctatgagcgagtgcaccggctgccacaag

SEQ ID NO: 849899 - DNA, 129 bp, Homo sapiens
cgccatcctcggcgcgactcgcttctttcggttctacctgggagaatccaccgccatccgccaccatggagggtgtgaagacagagaatgaccacatcaacctgaaggtggccgggcaggacggctccg

SEQ ID NO: 849900 - DNA, 99 bp, Homo sapiens
aagaatatgcctgttcctgtgatgtggaggaaattttccgcaagataatgagtgtgtatatggcaactaccctgaaatacctttggaagaaatgccaga

SEQ ID NO: 849901 - DNA, 98 bp, Homo sapiens
gcgaccgtggtgacatgattaccatcagtttcgatacaagcggcgagtttatgcccagaacctcatcgatgataagcagtttgcaaagcttcacacaa

SEQ ID NO: 849902 - DNA, 100 bp, Homo sapiens
agaagagcttgaagatctgaacaaagaaatcaagaaaactgcgaataaaattcgagccaagttaaaggcatttaaatcaaacggtattgagatggattgg

SEQ ID NO: 849903 - DNA, 100 bp, Homo sapiens
tacacgcaaagatattcaaactctaaaccatctgaattggctcaatgatgagatctgggtgaggaagacaagtgacagcaccaagatgaggatctacctg

SEQ ID NO: 849904 - DNA, 100 bp, Homo sapiens
agatctggttgaacctgtggattgtgcagttgctgccagtgccgattgcaggaggagatgttaaagtaacccatcttgcaggacgacattgaagattggt

SEQ ID NO: 849905 - DNA, 117 bp, Homo sapiens
aaataatgaagaagaatctttttggctgttagatgctcttgttggaagaatactaccagtgttcatccgcagggagcaggccaacaacatcctggcgagggtcacgagggccaattc

SEQ ID NO: 849906 - DNA, 99 bp, Homo sapiens
caggagccccaggacagaggagagcaaagcagacagtccacccccatcctacccaacacagcaggatttgtactgtgttcgcagtgacctggggaacct

SEQ ID NO: 849907 - DNA, 100 bp, Homo sapiens
atgcctggaccctgctcagaggactctatacagggacgtgatgctggagaattataggaacctggtctccctggggatcagcagtgagtcacagaagtgc

SEQ ID NO: 849908 - DNA, 100 bp, Homo sapiens
actcacggtgagggaatggaccgacacgggtattgtaccgctgagggaaaggagcgggactccggacctccaggagtaaacggagttccctctcgaagtc

SEQ ID NO: 849909 - DNA, 98 bp, Homo sapiens
tcgatgtgctctgcgtgttgctgggaaaatgttctgctgctgccctggatgttcttgcaaatgtgtatcgtgatgaactgctgccacatattttgccc

SEQ ID NO: 849910 - DNA, 100 bp, Homo sapiens
caaatgttggctgaaattcatcccaaggctggtctgcaaattttcgacaatgaagccaaagacgtggagagagaagtttgctttattgatattgcctgcg

SEQ ID NO: 849911 - DNA, 98 bp, Homo sapiens
gcttgctcaccagacaacatctctaggtgaatcagtggctaacctggttagaaactgctgaagaagaagaatcagaggaagaagctgactaaagaacc

SEQ ID NO: 849912 - DNA, 98 bp, Homo sapiens
ttctttaagggctacgggaagatcctggaggtggatctgaagaacgggcactgcctccttacctgtgaggaatgcaaaataaagcatggattaagtga

SEQ ID NO: 849913 - DNA, 99 bp, Homo sapiens
ttccccagcagacagtggccccacagcaacagaggcgcagcctcaaggaggaggagtgtccagcaggctcccagccaacctctgataaaccctcccagc

SEQ ID NO: 849914 - DNA, 101 bp, Homo sapiens
cttgaggcagaaagtggagattctgaatgagctctatcagcagaaggagatggctttgcaaaattgtagtgatgatgaagatgttgcaccattgtcagcca

SEQ ID NO: 849915 - DNA, 101 bp, Homo sapiens
caaacctgtcgccacagagcagctgttgagcaccttcctaactgtaggtctttcccgcggtgacttcccttgggctgaatgaacaggagctgttatttctc

SEQ ID NO: 849916 - DNA, 100 bp, Homo sapiens
atctaagaacaagaggggcgtcctgccaaagcatgccacgaacgtgatgcggtcctggctcttccagcacatcgggatctttaatctcatgaagtacgac

SEQ ID NO: 849917 - DNA, 100 bp, Homo sapiens
ccaccagcccttccccaggggctgcagtgcctctgagaaagtccaggagaaagaggaagggaggatggaatcagatgcttgtgaccacaccagaaaaatg

SEQ ID NO: 849918 - DNA, 100 bp, Homo sapiens
cggaagcttgtggcgctgaaaacgaacggttccaatggtcctcagctgtttacaatagagcaatggggcagtcctgagaaactgcccagagctcacacat

SEQ ID NO: 849919 - DNA, 100 bp, Homo sapiens
agggattgggaaaatctcttcagggtgcttttgaagatgatgatatcacgcacgttgaaggaagtgtagatcctattcgagatatagaaataatacatga

SEQ ID NO: 849920 - DNA, 98 bp, Homo sapiens
gcgtctccgcttctgctgcctgccgggcgggctccggtggccggtcacccaacctgcctgcagtttaccctgaacatgaccgaggctgtcaagaccta

SEQ ID NO: 849921 - DNA, 100 bp, Homo sapiens
ctactgtccaagggatcgctgatgattacgataaaaagaaactagtgaaggcgtttaagaaagtacatcatgggctttatcagtaaggagcgggagcggg

SEQ ID NO: 849922 - DNA, 100 bp, Homo sapiens
ggcgacagcaacagctctgccggctggaagcatgttggaacaggattccaggagaatgaaccctagtgtgagccctgcaaatcaaaggaggcaccttcta

SEQ ID NO: 849923 - DNA, 100 bp, Homo sapiens
ttgacaagaaacataaatctgaaactgatacgagcatcatcttctgtgaggctgtggccatctacggcatcatcatggcaattgtcattagcaacatggc

SEQ ID NO: 849924 - DNA, 100 bp, Homo sapiens
aatcacagactcctatttgaagtatttgacgaaaatagactgatggccatcacagcagtgacccttggagctcctccagtgggatgaatcagcctggcta

SEQ ID NO: 849925 - DNA, 100 bp, Homo sapiens
gtatcctgcagaatcaccagattattttgtggattttcctgttccattttgtgcctcctggacacctcagtgttaaaagatcactgaagttggatggtct

SEQ ID NO: 849926 - DNA, 99 bp, Homo sapiens
gattctctcccaggccacaagacatttcctgctcggaaccttgtttactaattagccccccaagatgaacccagtggtggagccactgtcctggatgct

SEQ ID NO: 849927 - DNA, 100 bp, Homo sapiens
taactcagttgaccccaagagcagtggaagtaaagatacacaaccacggaaggctaccttgcctccccatggccacccatggaccagtcggcattcactt

SEQ ID NO: 849928 - DNA, 100 bp, Homo sapiens
tgaaccggagaccccgaaaacggaagcgcagggagaaggaagaggtgtttgaaaagttttagttactatccagcagaaaacttgatagagtacaaatggc

SEQ ID NO: 849929 - DNA, 100 bp, Homo sapiens
gaaaatggcggacgggaaggcgggagacgagaagcctgaaaagtcgcagcgagctggagccgccggagtggtgatcatgtgtgcgagcagtgacaccatc

SEQ ID NO: 849930 - DNA, 100 bp, Homo sapiens
aaagaaattgtttttctcattaagctttacagtcgaagctctgtaagaagaaaacactttgtgggccagatattgcagctgtagaagaatggttagtaag

SEQ ID NO: 849931 - DNA, 99 bp, Homo sapiens
tcacccccgacgaagatgaccacctgctctcacccacgaaaggcatctgtcccaagcaggagaacattgcagccaaactggcaagacgcagtcaagaac

SEQ ID NO: 849932 - DNA, 99 bp, Homo sapiens
tttatgttctactctgccagggaagaaattgtgataggaactgagggaaaagcttcactctgaccatcactgtcttcacaaacccaccgcaagtcgcca

SEQ ID NO: 849933 - DNA, 98 bp, Homo sapiens
ggcgacgtggtgtgcaccggctggctgaggaaatcgcctcccgagaagaagttgaggcgctatagctgaggcttcgaagacctcagaggacttctctc

SEQ ID NO: 849934 - DNA, 100 bp, Homo sapiens
ggggagagacggccaagcagcaccagcgtgcctttgggtgataagggatgacgtccggttgtttgccttcgtgcgcttcaccaccggggatgccatgagc

SEQ ID NO: 849935 - DNA, 98 bp, Homo sapiens
tggttacatggagccccactaccaatccaactcaagtcggaacagctcttcaggttttctataatcttggaactttgaaggatactattaccagtgtt

SEQ ID NO: 849936 - DNA, 100 bp, Homo sapiens
gccaccccccacaatagggtatcatttttacgggccttctggagatgcttccgaactgtgggcaaaaatggcggcacagaaaactgaatctgtagataac

SEQ ID NO: 849937 - DNA, 100 bp, Homo sapiens
acaggccctccagaatgagctggagagactgaaagaggtagctacagcaagctgggtagcaggcagatccaaaggatatcatgaagtttccagggccttt

SEQ ID NO: 849938 - DNA, 100 bp, Homo sapiens
aggaaggaaaagaagaaccacagaattatacagatagtagttcctcttctacagagtcctcccagagttcccaagttttgtgcggactgccattcctttc

SEQ ID NO: 849939 - DNA, 98 bp, Homo sapiens
ctaaatgtgcacccaatacctggggccacagcattaccactggttgtaaggcctactgaacttgacgcactggtatttggccatctatacaccattct

SEQ ID NO: 849940 - DNA, 100 bp, Homo sapiens
tgctatcttgtggatcttctgagtaacggaggacaattcaccatagttttctttaaggacccagatgatgtggtaccagttggccaaagaagagcctggt

SEQ ID NO: 849941 - DNA, 100 bp, Homo sapiens
ggaagcttcgaggcatgatggtcgactacaagaagagggcggagcggagacgggagtattatgaaaagatcgtacagagcatgccagcgcctcagctaat

SEQ ID NO: 849942 - DNA, 100 bp, Homo sapiens
aaaatgtgtaagacgggatattctcttctgtgctgtcaaggatgtaggtgcaaaaaactacagacatctctgtgctgtttattacaacaagaatcctggg

SEQ ID NO: 849943 - DNA, 98 bp, Homo sapiens
aagcggggacccagaccctggagcctcagttggaagcagccgatccagcctgcggagcctgtggggcaggcgcccagacaccatgtcacaaccctcca

SEQ ID NO: 849944 - DNA, 98 bp, Homo sapiens
acaacacattgctgagcttgaaatccaggtcaaggttttaaatggcatctgtgacaaaacaatccgatctaccacagatcctgtgatgagccagtgtg

SEQ ID NO: 849945 - DNA, 99 bp, Homo sapiens
ctaccccactcctgggccgtccctgaaggaaaatatgttgtgttcttcttttaccctcttgacttcacctttgtgtgccccacggagatcattgctttc

SEQ ID NO: 849946 - DNA, 100 bp, Homo sapiens
tagatcaagatcagcttcactcagaagatctaggtctggttctataaaaggatcgaggtatttccacaacaaaggagagagcgggaagctagaaggcagc

SEQ ID NO: 849947 - DNA, 99 bp, Homo sapiens
aacggccaacaggctctttggagagaaaacttgtcagttcctctcaatccatagccgggtggatgtcatcagacacgtggtgaagaatggtctactctg

SEQ ID NO: 849948 - DNA, 98 bp, Homo sapiens
tcgactcagacgtggataaagataatcccggttatggaggttttgatgactatggtggctataataattacggctatgggaatgatggctttgatgac

SEQ ID NO: 849949 - DNA, 100 bp, Homo sapiens
gagcggccccagtaaaggctatttatcctttgcattgtctcatgatcagtggatggaaccacaccctccaagattatcagcagaagaagcagtgcagaag

SEQ ID NO: 849950 - DNA, 98 bp, Homo sapiens
tcggccttccttcagttcaactggaaggcggacgtggtggagtcctggatcggcgacattgactacagcaccgtgctcctcggcatgctggtgacgca

SEQ ID NO: 849951 - DNA, 100 bp, Homo sapiens
ccatggaaaaagtgacttgagcaggtacatgatgttgattgatggcacaaatgaagtttttatgattgatagagacaattcagtatttcatgtttcaaat

SEQ ID NO: 849952 - DNA, 100 bp, Homo sapiens
atgaggccagccgggaggacatctacaagcggtactcgctggtgcgtgatgtggtctcctcactgcgccggcaccgcatgcacgagcagcagtttgccca

SEQ ID NO: 849953 - DNA, 100 bp, Homo sapiens
gttgaaaaatgcggttaaaaaggtgatgggtatctttaagagcagcttattccaagctttgctaggtcttgggctggcacgaagagctgcccggccagag

SEQ ID NO: 849954 - DNA, 99 bp, Homo sapiens
tcaggggtacagtaccaaaccaaggttgatggtaccacttaaaatggttgcccacattcccaaatcagatgctttgtactttgatgactgcatgcagct

SEQ ID NO: 849955 - DNA, 98 bp, Homo sapiens
tgaggatggaagacagctaaggcgagggagcctgggaggagccctgactgaactaagttcagaaaatcttagaacttgctttaagatcatcaatggtt

SEQ ID NO: 849956 - DNA, 100 bp, Homo sapiens
ggtgatggagattttgatgtggatgatgccaaagttttattagctgtgtgttctcatttcacccaaaacctttggacagtgcagggcatagaagattcat

SEQ ID NO: 849957 - DNA, 98 bp, Homo sapiens
tcaagagcctcattatctaccacccgagatgccccaaggtcagtcttcactgtttccaatggaagatggattcttggatgatggccgtggggatcagc

SEQ ID NO: 849958 - DNA, 117 bp, Homo sapiens
tccgattcaagtattacagcttttttgatttgaatccaaaggtagcagatatcaagagagttaacaatctcatcagtgatcaagacttttttgcccttaggtctatcaaaattccag

SEQ ID NO: 849959 - DNA, 100 bp, Homo sapiens
tccccatcttggactttgtggaacagaaatgtgaagaaacctcattgccttctctgaagacggctctgacccctatgtccgcatgtatttattaccagac

SEQ ID NO: 849960 - DNA, 99 bp, Homo sapiens
ccgcagtgggtcccggacaaggagggcccggcctgccccgcacctgagctgccctcgcccccctctgctggctacagccctgcaggacagaagcccgag

SEQ ID NO: 849961 - DNA, 98 bp, Homo sapiens
aggatacaatctaccacctacagccaagtggcagatttgttattggtgggcctcaggtcaatgagctgaaggagaaaggcaacaaggccctgagcgtg

SEQ ID NO: 849962 - DNA, 99 bp, Homo sapiens
agcaatcctgctacctcagcctcctgagtagctgggaccatacgccaccatgcccagatatgaagcaacagcatgtcatagaaaccttgattggcaaaa

SEQ ID NO: 849963 - DNA, 100 bp, Homo sapiens
aggaatatatcctgactgattgtacatctccgttcatggatgcattaacagccaatgggacaaccaacatacagacatctgttacaggagtgactgccag

SEQ ID NO: 849964 - DNA, 100 bp, Homo sapiens
gctagctttggcgaggggacggagccggatcaggagccgccgccgccatatcaggctgtggaaccctactaatattggatccagatgaagctgggctaag

SEQ ID NO: 849965 - DNA, 100 bp, Homo sapiens
attttacccttcagtcggcccaagaaatcaaaataaaggaaacacatttcatatactgcaggaggtatttaactgaaaggaatatctgcttcactgttgc

SEQ ID NO: 849966 - DNA, 100 bp, Homo sapiens
gcccatgcgagtacctgaggaaggcttttaaagaagcagttttttcaccgagccctaaaagtaatgaaaatgaaatatgataaagacataaagaaagaaa

SEQ ID NO: 849967 - DNA, 98 bp, Homo sapiens
tcgcggtggattcagaggaggtcgtgggggccgggagtttgcggattttgaatatagggttgtttgcattcgctccacttggaatgctctctctccaa

SEQ ID NO: 849968 - DNA, 98 bp, Homo sapiens
gcaaggtttaaaccttgcagctactgctgctgttactgcagcagtaaagttctttatagctccaagctctacagattcttcaaatatattgagaatag

SEQ ID NO: 849969 - DNA, 99 bp, Homo sapiens
atggaggtctacatcccgtcctttcgctatgaagagagcgacctggagcggggatacacgtgaatgatttgggaggggacttcaaaggagttggtaaag

SEQ ID NO: 849970 - DNA, 98 bp, Homo sapiens
tcatgaaagattttgaggagatgaggaaggctggtatctttcagagtgtaaagtaatcttggaatataaagatcctgggaagactctgcctgaagccc

SEQ ID NO: 849971 - DNA, 98 bp, Homo sapiens
ctgagcggccggcggcgcgggcccggcggcggcggcagcggggtccgggtccggagcgccacactgaagcaggagatgggcggcatcgtgactgagct

SEQ ID NO: 849972 - DNA, 99 bp, Homo sapiens
tgggaacctgtggttcagaactggcattatttccaagaagccccaaggagatgacgaccattggtggcaaatcccaccaaatattttggttgtgagctg

SEQ ID NO: 849973 - DNA, 98 bp, Homo sapiens
acatggtcccatgagattcccaccttctttatctgaaacaaacaaaatttacatagtacatgacgaagttaaggataaagcttttgaactagaactca

SEQ ID NO: 849974 - DNA, 100 bp, Homo sapiens
cgaggagcacagccgggccgctgcgaagagatcctgaaggagctagacgagtgctacgagcgcttcagtcgcgagacagacggggcgcagaagcggcgga

SEQ ID NO: 849975 - DNA, 99 bp, Homo sapiens
tcagcctggtggacatgatcataaaagctgatcgtttctacagatgggagaagctataatggatttccagttcttaggaacaatttatttgaaagacct

SEQ ID NO: 849976 - DNA, 98 bp, Homo sapiens
tgtgagtgtgggcagccgcacactggagacccagctggatgccctcttggctgcactgcactcccagattgtcactgctgttccaagggcacacgcag

SEQ ID NO: 849977 - DNA, 98 bp, Homo sapiens
ctgctcggagaggtgggagccagatacttccaggctttggtgaataatatgtcctttgtaagatataaagaagtgtatgccgctgcagcagaagttct

SEQ ID NO: 849978 - DNA, 100 bp, Homo sapiens
aaagaagcagcttccttttctccatggatggaaacagactgaccagtgacaaaaaattctgctcccctcatcaggcaaggcaggctgaggtaaagcggct

SEQ ID NO: 849979 - DNA, 99 bp, Homo sapiens
tcattataccttcacccagcatttcatccctcgtcgaaaggattggattggcatctttagaatcaaggagttgttgaagaagctggagcagctttcaga

SEQ ID NO: 849980 - DNA, 100 bp, Homo sapiens
ccgagcgccaccatgaactcgctcttcaggaagagaaacaaaggcaaatacagccccactgtgcagacccggagcacatcccgctctgggctttaaacgt

SEQ ID NO: 849981 - DNA, 100 bp, Homo sapiens
taacgacctgaagattgaagtgattgagaagctcttcgccatggacacagaggccaaggaccaatgcagtacccagttttcaggaggcctccagaacttc

SEQ ID NO: 849982 - DNA, 98 bp, Homo sapiens
cccagtgccgggagcgcatcaagccatgaaccagagaatcagtcagagtgctccagtgaaacagccaccacccctggctccccagagcccacagggag

SEQ ID NO: 849983 - DNA, 98 bp, Homo sapiens
gctgtcacccagacccgcggtgcgacagagtggccacaaactcaaaggtgcgggagcaagtgcggctggagctgagcttcgtcaactcagacctgcag

SEQ ID NO: 849984 - DNA, 99 bp, Homo sapiens
tcagaggtggccaataagttcgccaaagcgacaggagctgctcccggggagctttctgtgaagtgagaccagatgataaaagaattctggaattttaca

SEQ ID NO: 849985 - DNA, 98 bp, Homo sapiens
tcgcgcgcggggcctccgcgcccccggctgctgctcacgccccgcccgggagccaggttcatgtgaaaatggcggatgaggctgtctgtgttggccca

SEQ ID NO: 849986 - DNA, 99 bp, Homo sapiens
gaaaactaggaatctatgatgctgatggtgatggagattttgatgtggatgatgccaaagttttattagagggaatctggaaaaattgcaatcaaaaca

SEQ ID NO: 849987 - DNA, 99 bp, Homo sapiens
accagtacagggtcttggatgagaacatgacttttggcatcattcagagccaggtgcataaggcaaatccaatacgcaagtaccagggtctggagataa

SEQ ID NO: 849988 - DNA, 99 bp, Homo sapiens
tgaaccaaaagctgtgagaacaactacacgttacgctattcgttgtggtccaaaacagtttacctcttatctaacagccaaaactggacaagccaaggc

SEQ ID NO: 849989 - DNA, 100 bp, Homo sapiens
cccaaccctttcagtaaatacttggaagataacagcgacctcttttctgaacagggccggtgcataaacttctcccgagttccatctcagtaaaagggaa

SEQ ID NO: 849990 - DNA, 100 bp, Homo sapiens
taggagctggggggagagaggcagtccagccgcaggggccacccgaacagtctctcctcctcacagaagcctggatggatagaatgacagaagatgctct

SEQ ID NO: 849991 - DNA, 99 bp, Homo sapiens
ttgaactctcagtggtcctacctggggatattatcaaatctactactgttcatggcagaggaagaaattgttgagcttccagatttggattacctgcga

SEQ ID NO: 849992 - DNA, 99 bp, Homo sapiens
ccgaatcgcagggagtcgccgctggagaggggctcggcgcccggcggggactgcagttaagggaagaaagtcggaggctggctttggctgcgaaaagag

SEQ ID NO: 849993 - DNA, 99 bp, Homo sapiens
gcgggacaagaaaattcatgcggtggtgatgatgtccagcaactctgtgaagcaggagaagaggagtttttggaaatcatggcactcgtgggcatggct

SEQ ID NO: 849994 - DNA, 100 bp, Homo sapiens
tgacaagaccaaggtcaacaaggacaacaatgagatcgtggacaagatcatgggcaaaggacagatccagattgggaaaatgaggtacgttagtgttcgc

SEQ ID NO: 849995 - DNA, 99 bp, Homo sapiens
atgtaagtgcgtttgaaggcttccacaccctctactccaggcttgatcatgatttaaaacatgctcacgaactccgccaggctgcattcaagctctatg

SEQ ID NO: 849996 - DNA, 99 bp, Homo sapiens
ggggcaaagacctacccagatactgattccttcaacactgtagcagagatcactgggagcaaatatccagaacaggtggtattaaagataatcaaacat

SEQ ID NO: 849997 - DNA, 100 bp, Homo sapiens
agttcgtctcttacgtctgcggaagtgcagctgcctcagttcttagcgcaggtccagcccagaatcaaatgcaggttccatctggatatggattgcatca

SEQ ID NO: 849998 - DNA, 100 bp, Homo sapiens
ggatggctccgcaagtcccccccggagaaaaagttgaagcgttatgcgtctgtagaggcttctggtgaaatcgcattatgcaagactggatttcctgaag

SEQ ID NO: 849999 - DNA, 98 bp, Homo sapiens
acccctcagtacccttctgcagagcagcctaccccccaagccctttatggggttgagcggaccctggtgcttcctgggagtcagacagcattcgactt

SEQ ID NO: 850000 - DNA, 100 bp, Homo sapiens
ggagacggaaggagcctggagccagggcatgttggcagataaattgaacatgactccagaagaagctgaaaggtggattgtaaatttgattagaaatgca

SEQ ID NO: 850001 - DNA, 99 bp, Homo sapiens
tgacatgaaaaaaatgcattatgtggaccctgaccatgtaaaggagatctattgggaaactgattataaccactcgggcaccatcgatgcccacgagat

SEQ ID NO: 850002 - DNA, 98 bp, Homo sapiens
tgcctcccccgctacagcacccacagactgacaggctgacttgccccaaagggctcccgtgggctcccaaggtcaggcttcctgtgtccagtaccggt

SEQ ID NO: 850003 - DNA, 100 bp, Homo sapiens
ctctttgatgagtttgacaagaacatcatttacagcgagcaatttcagcacagcaagtgtttagagaaaaaaaagagagtatggtcattcctgttcctga

SEQ ID NO: 850004 - DNA, 98 bp, Homo sapiens
ccttggaggaactctatttagatgctaatcagattgaagagcttccaaaggcatgatgagagcaagattaggaaagcttacttcagacttgcacaaaa

SEQ ID NO: 850005 - DNA, 98 bp, Homo sapiens
gtgctttagctgcattcatatcgagcctgtgtggaaagaagtcattcaagaactggaagaattggcttcagtatcagacacagcacagcagccatctg

SEQ ID NO: 850006 - DNA, 51 bp, Homo sapiens
ggcagaggcacttatgcttgtcagggaccagttactctccacaagaaaatt

SEQ ID NO: 850007 - DNA, 98 bp, Homo sapiens
tgcttaaagaaatcagtccttcctttccgacttagtcctcgggaagaagtttcagactacaaggtgatctgggctcttgggatctgctcatttgcctg

SEQ ID NO: 850008 - DNA, 98 bp, Homo sapiens
gaagccctgaaatgaattcaacaattaatattcatcgcacttcttctggagaccaggcgacagaagaagaggaaggtggttattcctgtggtactgca

SEQ ID NO: 850009 - DNA, 99 bp, Homo sapiens
ttggataagcacttggaatcacgggttgaagctgtagtgatggtcctaaatagcatgagtgtcagctggagcgcccggatccagattttcttaaccttt

SEQ ID NO: 850010 - DNA, 51 bp, Homo sapiens
gtggatccaagatggcgacggcgatggtgggcaccatgtccttgaagcttc

SEQ ID NO: 850011 - DNA, 100 bp, Homo sapiens
taaagaacagacatgaaaaagtacaagagaattgtattgatcttgttggtcgtattgctgacagatgtgttcagagcaacattgttttgttgacacaagc

SEQ ID NO: 850012 - DNA, 100 bp, Homo sapiens
gatgccggactccggaacagcaagaactgcaccgaaccagatatgaggccccaggattcctggcgaggtcctcctccccttttccagcagcaaaggtttg

SEQ ID NO: 850013 - DNA, 98 bp, Homo sapiens
ccgacgtagctttaggcagcttacaactcacaagtgcatgggagattcctgcatcttttgcgctctcaagcgtgacgacagcatgtacgatccctgaa

SEQ ID NO: 850014 - DNA, 99 bp, Homo sapiens
ggaaccgttgattggagatatgcccttagttggagctttgtctatcttcttccttaggaaaccagtaagaagacaagaggtttcttctcctagaaaaga

SEQ ID NO: 850015 - DNA, 100 bp, Homo sapiens
tactcactgtgtaagaagatagaacagtgtgactacccacctcttccttcagatcactattcagaagaagtttgctgtaatggcacaagagtatttgtgc

SEQ ID NO: 850016 - DNA, 100 bp, Homo sapiens
ttatctatctgtatatctctcttttggctgccagacccaaatactattttgcatggacgctagtccccagaagaccatgtctgtgttgagctgtatctgt

SEQ ID NO: 850017 - DNA, 121 bp, Homo sapiens
agcacttccctgccactcctctgctcgattatgcactggaagtagagaagattaccacctcgaaggctcctcgacctccaaaacaacccaatgttcaggatttccagttctttcctccacg

SEQ ID NO: 850018 - DNA, 98 bp, Homo sapiens
caggtcccgaaagtgctaaaaagtccgtggtggatgactggattgaatcatataaacaagacagggacatcgcacttctggatttaatcaactttttt

SEQ ID NO: 850019 - DNA, 100 bp, Homo sapiens
gctgggtcacttcaattttgatacacgtggagcagctggaaactgttctgagcaggaagggcagcagttgcgctacaagtcagacctgatcggcatgaag

SEQ ID NO: 850020 - DNA, 98 bp, Homo sapiens
aaacacaccgtatttcatctgtagcattcaagacttcaaactgaacacttcagttatggaagatcaaaatgaagatgagtccccaaagaaaaatactc

SEQ ID NO: 850021 - DNA, 99 bp, Homo sapiens
tcgataaatcagacagaacagttaatcctcaatttaagcctgatctaacccctagaaacagataacaacgaacttgatgcaagtgataggtttgccaag

SEQ ID NO: 850022 - DNA, 100 bp, Homo sapiens
tgaaccggagaccccgaaaacggaagcgcagggagaaggaagaggtgtttgaaaagatgttgctatgaggacagattcatcaaaaatgactgacgtggag

SEQ ID NO: 850023 - DNA, 99 bp, Homo sapiens
agcagccttactcaaccttctgataacctgcttcattattgttatgtacactgctatcttaagacagtgatctgacacaaacacagctgaagcaaacag

SEQ ID NO: 850024 - DNA, 98 bp, Homo sapiens
tggacatgctttcccatccacaggtcactctcattcactcccaagtggccctggctgacaaggagctcctgccctccgtccggcaggaagtgaaggag

SEQ ID NO: 850025 - DNA, 136 bp, Homo sapiens
atggcagtgaccaaggagctcttacagatggacctgtacgcgctgctaggcattgaggagaaggcagcggacaaagagataccccatgtttccccatcactcgaggagtctgggcagagactggactacaccgtgg

SEQ ID NO: 850026 - DNA, 99 bp, Homo sapiens
gcttgagttggtcgggggcagcggcagctggcgctacgtacatctttgggaaaagtggtgggcttatcctctacacctggccagccaatgacaggccca

SEQ ID NO: 850027 - DNA, 99 bp, Homo sapiens
agaagcgggcggcgcgggggagatgaatgtttggaatggttttggaaaaaattattattcctgaaattcagaaggtatctggaaatgtagagaaaaaga

SEQ ID NO: 850028 - DNA, 98 bp, Homo sapiens
cgggagtcggggtggtggcttctcggaaccgagccccgacaggctatgacgtaggcatccgaggaggctttcgtgaaggaatccaaggaggagacccc

SEQ ID NO: 850029 - DNA, 100 bp, Homo sapiens
gaaggagtatgcacgaaacaaaaacatccattactatttcatggccctgaagaatgatgaggcctccgatgaagcagaggaaagtggatcacagggaaaa

SEQ ID NO: 850030 - DNA, 100 bp, Homo sapiens
gcctggacccctactattgcaacaaggttaatttggagtggcccctggagtcagtttcctacaccatccgaggccccacccagcacgagctacagcctcc

SEQ ID NO: 850031 - DNA, 98 bp, Homo sapiens
agcttcttcagaagaaagtacctgtgaaggaaatcaagcatggagaatggtggaaagcaaagtcccttttaacaaaaaaagaaggcttcatccccagc

SEQ ID NO: 850032 - DNA, 100 bp, Homo sapiens
tctgcaatccaagccgactgatgactggagaggatggctactatttcaccaatctgcattgatgttgatgggacaatgacagtggactggaatgaatgga

SEQ ID NO: 850033 - DNA, 100 bp, Homo sapiens
ggaccaggttccaagagtcacaattgctcagggatatgatgcgctaagctccatggccaacattgcggggtcccgttcttgttatcagttggagaaaacc

SEQ ID NO: 850034 - DNA, 100 bp, Homo sapiens
tctatatgaacaatccgtctggatcacggatgtaggaagtgcttaacagagcgttccaaaaagaggactctccagctactttttattgcatcagtatgca

SEQ ID NO: 850035 - DNA, 100 bp, Homo sapiens
atgggggcgagggcgaagacgagatccagttcctgcgaactacacgtaagcagcacagtgaggccaccaacagcagcaaccgagtcttcgtgtactgcgc

SEQ ID NO: 850036 - DNA, 114 bp, Homo sapiens
gtcagtcagagagccttgggccagagttccaggggctctgggagtggctgccaggttgcaagaaagctcaagtagcctatggagaggatgcaaggcttccagctgatgccctca

SEQ ID NO: 850037 - DNA, 100 bp, Homo sapiens
gaatacagagatatggaatcagatattaagaatgcccgagaagggactaggagtccaagaacagctcatgaaatcagtttaaagagaagctatgaatcag

SEQ ID NO: 850038 - DNA, 99 bp, Homo sapiens
cagagtccttctgtcggttggtcctggagcggcgcagccggagtggggccgtgagcctgacaggacatttgaaattaagattggacagcccactgtttc

SEQ ID NO: 850039 - DNA, 98 bp, Homo sapiens
gagaagaagaggagtcattcttctccatcacagattcctaaaaagattctcagagagatggaaaacttgatgactagctccaccctaccgcccctttt

SEQ ID NO: 850040 - DNA, 99 bp, Homo sapiens
tgcaatcatttgcaccaaactgagccagagaagttccctcttttaacataaaggtgcaacaatcgaacacagtgtatagtagttactgggtcagatgtg

SEQ ID NO: 850041 - DNA, 100 bp, Homo sapiens
ctcttcaatcatgagagtcccagaagagatgaccagctgaactcagaagaaaaaaagaagagaaagcagcgaaggaataggacaaccttcaatagcagcc

SEQ ID NO: 850042 - DNA, 98 bp, Homo sapiens
gtatccaccagactcacagttttgcggggtgctggagaatctggtaaaagcaccattgtgaagcagatgaggatcctgcatgttaatgggtttaatgg

SEQ ID NO: 850043 - DNA, 100 bp, Homo sapiens
tcatgccagcggctggaataaggtcccaagctctttaaggagcccagtagtaaatcaaacaagccgattattcacaatgccatatcccattgctgcctgg

SEQ ID NO: 850044 - DNA, 100 bp, Homo sapiens
gacgtccacgtccggatctgtaaccaagagattgtcaaatttgacctggaggtgaaggcgcttattcagttgctctaggtcgtaaccagcctttgaaaaa

SEQ ID NO: 850045 - DNA, 100 bp, Homo sapiens
attcaagtacacagctgtgacagacactcccaacctccttcatgcgaaattcagcaaccagataacgaatgaggttgcacgttttcaaaaaatacctaat

SEQ ID NO: 850046 - DNA, 100 bp, Homo sapiens
accgagatgcccctgaggggggctttgatgcagtactccaggcagccgtctgcaagatccttacaataaatgaggatggatcacttggtttgaaaacccc

SEQ ID NO: 850047 - DNA, 100 bp, Homo sapiens
ggacagcttaacaagtctgattctaaccagtatattggggaactgaaagatcagatagcagagctgaatcatgagtcaagagaatccatcccattaaatg

SEQ ID NO: 850048 - DNA, 100 bp, Homo sapiens
ctggattataaggatgtcatccccatggctgatgcagcaggcatcatccgctatgcaattgggatgcagaggccaggatgtgggcccagccctgtgccag

SEQ ID NO: 850049 - DNA, 98 bp, Homo sapiens
ttcaaaaatcaccaactaccttttagagtgggatgaggagtagcccatcgaagccagagcagtgaaggagtcagttctctcagcagctcgccctctaa

SEQ ID NO: 850050 - DNA, 99 bp, Homo sapiens
aggcctggctcgcgcctctcccaggacccgcctggctgcgagatatgtcctggaccggatcaaaggctcactgctgccccggcctggccacaactttgt

SEQ ID NO: 850051 - DNA, 113 bp, Homo sapiens
cctgtcaccacctcctcctcaaaggatgaggaggaagaagaagaagaaggagacaaaataatggcagaactccagcaaaatgatgcttcaacacccaggccaggtctctgcct

SEQ ID NO: 850052 - DNA, 100 bp, Homo sapiens
caggaagaacgtgctgggtcacatgcagcagaataaaagccgccctcattctaggggagaatataatgtttacagcacctttcaaagtcatgaaccggag

SEQ ID NO: 850053 - DNA, 104 bp, Homo sapiens
ttccttccgctagtgatcctttgcaccctgcttggagacggacttgcttccgaacactggaactattttggggctgatgagaatcttggtccagtggctgtgag

SEQ ID NO: 850054 - DNA, 99 bp, Homo sapiens
gcggggaaaatggcggacgggaaggcgggagacgagaagcctgaaaagtcgcagcgagctggagccgccggagaaactaattctgaagcaagcccttat

SEQ ID NO: 850055 - DNA, 100 bp, Homo sapiens
acagccaggcgggacgcgcacagtccctccacgcggaaagaagtaccttcgccggtcaccggctcctgcaggcatctgggctgatgggccgtaccctgca

SEQ ID NO: 850056 - DNA, 112 bp, Homo sapiens
ctggagttcattgcggagcatgaggacgtgtgggggttttctaaatagctttgaggagttacaggctgaggaatgcggcatcctcaatggatgtgaaaatggtcgctgtgtg

SEQ ID NO: 850057 - DNA, 98 bp, Homo sapiens
acgatgtcaccaacaaggcctcctttgacaacatccaggagatcaaagacgctggccttcagacctgatcagactcccaggggcagccaccacatgta

SEQ ID NO: 850058 - DNA, 100 bp, Homo sapiens
gaggcggaaggactcctggaatgccacaaatgcaaatacttgtgcactgggagagactgaggctgatgtgaatccaaaggcctatccccttgccgatgcc

SEQ ID NO: 850059 - DNA, 99 bp, Homo sapiens
caaactttactttgcctcatttgaggagtgggaacaggcttcggcgaacacaaagggttacacatcattttggaatgactgtatatcatctggattacg

SEQ ID NO: 850060 - DNA, 98 bp, Homo sapiens
gctgctatatggcaagcactaaaccactatgcttaccgagatgcggttttcctcgcagaacgcctttatgcagaagagatgtggtctcactatgttgc

SEQ ID NO: 850061 - DNA, 98 bp, Homo sapiens
aggatgatccagttggaccttttggacaggaaagtgtaacatcagttacagaagaaaatattctctttggaatgggaaatcctctgcttgacatctct

SEQ ID NO: 850062 - DNA, 99 bp, Homo sapiens
gctcatatgacattaacagacaagacacttttcagaaagacaggtgatggaactgtactggaacaatgggagaagctggtagcttataggaagccaaga

SEQ ID NO: 850063 - DNA, 99 bp, Homo sapiens
ttcgctggccatttaggagctctgctcaaagccagacgacagattacatcaatgccagtttcatggatggctacaagcagaagaatgcttacattggca

SEQ ID NO: 850064 - DNA, 99 bp, Homo sapiens
agcgaccatgggggacaccatccactgatcagtgaggaggaggacctgcacctggggacatcgttttctgcagaaaccaaccgaagggatgaggatgca

SEQ ID NO: 850065 - DNA, 98 bp, Homo sapiens
gcaccagctccccgacacccccttcctctgcaggccatgccacaaagtcattcccctcttcccccagcaaggggggttcctgtcctagccgggccaag

SEQ ID NO: 850066 - DNA, 100 bp, Homo sapiens
gaacgaacatcttctggacctttgtccaggcctttagtgaatttgagattgagcagcatcaagaatgtgcttatgaccacttagaagtatttgatggaga

SEQ ID NO: 850067 - DNA, 100 bp, Homo sapiens
tcttctctcagtgcctccatgaggagtataggagcaagggcgtctttgtgcagataccatggagtagtttgaaacaggaacaaaatcttctgaaagctcg

SEQ ID NO: 850068 - DNA, 98 bp, Homo sapiens
gagcaaacagaggcgctcatccacagagccacatctgttaggtttctgagtcccttcaacatgatcctgggaggaatcgtggtggtgctggtgttcac

SEQ ID NO: 850069 - DNA, 99 bp, Homo sapiens
gggacggctctgtaggaaggaacttggttccccctccctcagcttccgccccaaaaggaggatcagctgatttattcggaggatttgctgactttggct

SEQ ID NO: 850070 - DNA, 98 bp, Homo sapiens
gtgctgctgcaggacaggagggtggagaacgtggacctgacctctgtgcttaactcaggcctgggacagttgatcttgaaagaagagatggagaaaga

SEQ ID NO: 850071 - DNA, 100 bp, Homo sapiens
aagcagagaaaacagcaagcaacagccatcatgaaggaagtccatggaaatgattatgtttgagaccttcaacaccccggccatgtacgtggccatccag

SEQ ID NO: 850072 - DNA, 98 bp, Homo sapiens
ggacatcgtgtaccggcagctgaatggggcccagaagacacctgctttgagtttggtgtttttcctgccatcctgagtttcccacttgattacccgtt

SEQ ID NO: 850073 - DNA, 100 bp, Homo sapiens
aagaccgctgtgtggaggtagccgcagcgccagcaccaggttatgaagacagtatggagtttccagaccatagtagacatttgctacagtgtctgagcga

SEQ ID NO: 850074 - DNA, 100 bp, Homo sapiens
aagcttgtgacggagccgctggtgctgaagtcagaggagaaggcagagcccccccaggctatgaatgccctgatgcggttgaaccagctgaagccagggc

SEQ ID NO: 850075 - DNA, 139 bp, Homo sapiens
atttgtactgtgttcgcagtgacctggggaacctgctcaaagccctgggtcgcttggaagaagccaagggccgccgggccggagatggatggagggaccggggatttgggaactcgaaaacgagctgagggaagggagc

SEQ ID NO: 850076 - DNA, 100 bp, Homo sapiens
aaatattttgttatatgggcttctcatatcttacccacagggtcccagggctggtggttgctttgggtctacagctacgtcttacccgcctcctgcctca

SEQ ID NO: 850077 - DNA, 100 bp, Homo sapiens
ggtattcaaaggacaccgtaaagcagtctcttatgcaaagtttgtgagtggtgaggaagaggatggagatgaagatgaggaagctgagtcagctacgggc

SEQ ID NO: 850078 - DNA, 99 bp, Homo sapiens
gaggaggagcaggagcgcggagccgcgagccccgagccccgagcccggcgcctggctgagtacaaattgtggctactaatttgccccctgaagatcaag

SEQ ID NO: 850079 - DNA, 100 bp, Homo sapiens
ggaagacataggccaaggagccagacttcctgtgttaactccttcctctgccactttttaccttggggacctcaggtatgatctcgtgaaatcttgagag

SEQ ID NO: 850080 - DNA, 99 bp, Homo sapiens
gagaaggaaagcaccatgacgtccatccatttcgtggttcacccgctgccgggcaccgaggaccagctcaatgacagagctctgtgacgatgacccgcc

SEQ ID NO: 850081 - DNA, 99 bp, Homo sapiens
gagaggagcatgaatggagcaaaatggcggatcatgtgcaggcccgatgagagaaagggaaagttaaggatgctggagcagaacaatggatttctcttt

SEQ ID NO: 850082 - DNA, 98 bp, Homo sapiens
aaaaagctctgaaggacttgctgaaatgggtcttagagacaaaacttgccaatggcacttccagtatgattgtgcccaagcaacggaaactctcagca

SEQ ID NO: 850083 - DNA, 100 bp, Homo sapiens
ctcgggcctccacgttactgcgggacgaagagctcgaggagatcaagaaggagaccggctttggtgcttcccgtgctgctgttgatgctggctttgttcc

SEQ ID NO: 850084 - DNA, 98 bp, Homo sapiens
tgtccaagttccggcacaccgaggctcggccgccccgccgcgaggagccttcacgtaaatgggtccagtcatgcctcccagtaagaagccagaaagct

SEQ ID NO: 850085 - DNA, 100 bp, Homo sapiens
aggtcatcagggagacttgtgtgctctctctgcttgaagaactgaacaaggttgaaaggattgttgacaaaaggaaaaataaaaaagggaagacagagta

SEQ ID NO: 850086 - DNA, 51 bp, Homo sapiens
tttgtaccaggctgtttgtgatcgtatcagatggagtcttgctctcttgcc

SEQ ID NO: 850087 - DNA, 100 bp, Homo sapiens
gaaaacgtaatgaggatgaagattcaccaaataagctatatactttggttacctatgtacctgttaccactttcaaaacaacaaatggtcattcagaatg

SEQ ID NO: 850088 - DNA, 100 bp, Homo sapiens
ctacaaggaatctgagggtgccctcaatgagcacatgaccagcttagcttctgtcctaaaggtaaaaatgcatttgcaaagggagaaaatgaaggccaaa

SEQ ID NO: 850089 - DNA, 100 bp, Homo sapiens
cgtggaattcaggtccaatttatatatagaggagaccttgcctattttgatggacttagtgagactattcttgctgtggggcttgtgaagccaaaagcag

SEQ ID NO: 850090 - DNA, 100 bp, Homo sapiens
ctgctcaggagcgcctaataccacttgatatccgccaggcatcgtgggtgtggctccaggaggacttcctgcagccatggaagggatcatccctggaggc

SEQ ID NO: 850091 - DNA, 100 bp, Homo sapiens
aacaaattagaatcagattatatggccgcatcttcacaactccgtcttacagagggcaatgtgtatgtgaagtgcccatcaattgctgcagctattgctg

SEQ ID NO: 850092 - DNA, 100 bp, Homo sapiens
acggctcgatgctggacatacttgaccggggtcatcctagggaaaacactatcctctgagatcccagatcatgagttgctccttcacatgttcccactct

SEQ ID NO: 850093 - DNA, 100 bp, Homo sapiens
ttgcatgggaaaatcatggaagttgattactcagtctctaaaaagctaaggtgagcatctcctggaccaccctcaagcttcaggtgagctgagcttctaa

SEQ ID NO: 850094 - DNA, 99 bp, Homo sapiens
cgacaccgaaaactccaccgtagcccttgccaaagattacgtgtgaaaatgaacttgtgcaaacccaaccccatgctgataatccatctaatactgtca

SEQ ID NO: 850095 - DNA, 100 bp, Homo sapiens
aaggtttgaaggaaagaaaactacaaaaagcagtggagagctttacctggaatattaccatcttaaaggttgctgctgactcagccattctagaagttct

SEQ ID NO: 850096 - DNA, 98 bp, Homo sapiens
tgcagttccgggagcaggaggtacggaaccagggccaggcgaggaccaactccacctccgccaaatttgagtccctctttaggacgtatgacaaggac

SEQ ID NO: 850097 - DNA, 98 bp, Homo sapiens
tgccaagaagaacgacattcccttcgagctgcgcatcgtggatctgattaaaggttcagcaggccccgttcacccgctggtcgaccccctgactgccg

SEQ ID NO: 850098 - DNA, 112 bp, Homo sapiens
aaacacagcagttgcaccctgttttgcaaaaaccatcagtgtttgggaatgattctgatgatgatgatgagtgctgtccccggcataggtccatctctgcagaagccatttc

SEQ ID NO: 850099 - DNA, 131 bp, Homo sapiens
gagttcctcgcatccactcagaggaaggagtttggggacaccggggagggctgggaggtatgaaggaaagtcctgtgattcccctgtcggaaagtgagctcctggctgacatccttgaagaggtgaggaag

SEQ ID NO: 850100 - DNA, 100 bp, Homo sapiens
atcatgttgaagctaaacccatatgcaaagaccatgcgccggaacaccattcttcgccaggccaggaatgtctctagcatcaattcacgctttgccaaag

SEQ ID NO: 850101 - DNA, 100 bp, Homo sapiens
tcagaagtaattgtggaccctatacaggaatagccaggccagaagaaggaaggcctgtggtgagtgggacaggaaatgacatcaccaccccaccgaacaa

SEQ ID NO: 850102 - DNA, 100 bp, Homo sapiens
actgcgtgacttgccatgagaccaagtttgccaagcattgcgtgaagtgcaacaaggccattacacaaggaggtaaatataaactctctgaagacaaggg

SEQ ID NO: 850103 - DNA, 100 bp, Homo sapiens
gcagcaaagaagagcaaaagaaagcaagaaaaagaacgaagaaaagccaatcgtgcagaaaatccagacagaaagagttctccatggagtgtctgattac

SEQ ID NO: 850104 - DNA, 100 bp, Homo sapiens
atgcttggagcattctcattcgagaggcacagttttgaaacctttgatgtgaacagctttgaacaattttgcatcaattacgctaatgaaaaactgcaac

SEQ ID NO: 850105 - DNA, 101 bp, Homo sapiens
ggcgcagaagtacttccagatcttctccgaggagaaggacccgctctggcaggaccccatcctgttctcggggaccctgcgcatgaacctggaccccttcg

SEQ ID NO: 850106 - DNA, 100 bp, Homo sapiens
actgctaacctagggctactgttgattttgactatcttcttagtggccggatatccagctacatcttcagtgacccttgtagatgtgagtgccttgaggc

SEQ ID NO: 850107 - DNA, 100 bp, Homo sapiens
gtcgaaccccgggacacgcaggaacggctccagcatcaagatccgtctgacaggctttttctcctccgtgacagccagagtaatccaaaggcatttgtac

SEQ ID NO: 850108 - DNA, 99 bp, Homo sapiens
ttcttctgggcccacgaggcagctgtcccatgctctgctgagcacggtgggccaaagggaagtgaccatccccccaaatcgggtcctgagctatcgagt

SEQ ID NO: 850109 - DNA, 98 bp, Homo sapiens
tcaacatgcctctgacaatctctagtataattctgaaataatcagcagaaacggaatggaatgccaagaatctgcattgagaataactaaacattgtt

SEQ ID NO: 850110 - DNA, 99 bp, Homo sapiens
taaaaccttcaagtctctggagaatgctattgaatggagattgttcagagattttcaatgatgggtataagctcagtggattttacaaaatcaaacctc

SEQ ID NO: 850111 - DNA, 98 bp, Homo sapiens
tcattgcctttcttcgtagcacctttgctgtattcacacaccttcctgtagacatagctgacattgagaatgaagagaaccgctactgtctattcatg

SEQ ID NO: 850112 - DNA, 100 bp, Homo sapiens
taattatccaaataaattgcaagcattctatccaaatgtatctggagtccatctttcaccatcttctcctgagattgtactggaccgtgaccactcttct

SEQ ID NO: 850113 - DNA, 100 bp, Homo sapiens
gccaagctgtcatcacaaaagagttgattgaaattatctctggtgctgcagctctattgaatttagtggaagcttttgtagaagatgcagaattgaggca

SEQ ID NO: 850114 - DNA, 100 bp, Homo sapiens
ttattgggcttttccaagtaaagctcttcatgcaaggaaacataagttggaggttctggaatctcaggagccctctggcacaaatggaagaagaaagaag

SEQ ID NO: 850115 - DNA, 98 bp, Homo sapiens
taaggcagaaccctagccttccagctgccagggggcttaatgaactgcaaagaacatccatgatagcagtcttctgtaaatcgaacttttcaagaatt

SEQ ID NO: 850116 - DNA, 100 bp, Homo sapiens
agtcttccaaccagagcttgtgtagcgtcagatccttgagtgataaaggagtagagatcgtcagtatttaaacagatcacatcatgcgtgagtacaagct

SEQ ID NO: 850117 - DNA, 100 bp, Homo sapiens
gtgatccctcaagactggtccacggagtgtatgaccacaaacagccatcaaggctgcagtgcaatggtgcgatctcagctcaccacaacctctgcctccc

SEQ ID NO: 850118 - DNA, 98 bp, Homo sapiens
ggttgttggcattttcttcctctctgctgtcccccttgtgtgtctggagctccggcgtgggatcccggatatagatattaacctggctgcagagccaa

SEQ ID NO: 850119 - DNA, 100 bp, Homo sapiens
ccgggttgctgtgcgactattctccgggagccgtccgtgtcaccgccggaacctggcgcagaaatacaggtatcaggatgaagatacacctcctcaagag

SEQ ID NO: 850120 - DNA, 98 bp, Homo sapiens
agggaaatgggaatgtacacgataattaaagagtaaagttgtgctcaacgtttgcagaaaaaacttcagcatgtgccaggaacacaacctcaccttga

SEQ ID NO: 850121 - DNA, 100 bp, Homo sapiens
ataaaactcgctgacttcggccttgcccgcatctatagtttccagatggctctaacctcagtgattctttgtgggaaagagattcctcgctggatcaatc

SEQ ID NO: 850122 - DNA, 100 bp, Homo sapiens
gcgaagtcgcagcgccagacccaaggcccccgagtgagcgcgggcgccgaggttcgaaaacatggccaaaagaaatgccgagaaggaactgacagatagg

SEQ ID NO: 850123 - DNA, 98 bp, Homo sapiens
ttgccatttcgctgggatttttgggtggtgcaaaggcccgaaggagaaccaccactcagatggaattgctgtatgcagatagcagtgaactagcttca

SEQ ID NO: 850124 - DNA, 98 bp, Homo sapiens
cagaggaaatgacaatggagcaactagaggctatgactggtggagagcagctaaaagctgaggaagagagggctcgacgagaggaggaggagaacagg

SEQ ID NO: 850125 - DNA, 100 bp, Homo sapiens
agagagagaggcagagagggagagagggagagtgacagcagcgctcgattctgaggttgggaccaagaaggaactatctattttaaaccaaaaattttcc

SEQ ID NO: 850126 - DNA, 100 bp, Homo sapiens
ttgtcctacctgaagtatgccattagttcccagctattcctgcaccaactgacctgaagttcactcaggtcacacccacaagcctgagcgcccagtggac

SEQ ID NO: 850127 - DNA, 100 bp, Homo sapiens
aaagatagagattccggtacattatgcaggctttagaaaagaactcaggaatttggaagcaggctataaatctcatgaattccacccagaatcacattta

SEQ ID NO: 850128 - DNA, 100 bp, Homo sapiens
ccagaaggaatacgacttcagtgtttcatgaagtattttacagacgaaatgaaagtgaactggtgtcacaaggagaccctcacgcagggcttagagttct

SEQ ID NO: 850129 - DNA, 98 bp, Homo sapiens
aagccgttgcctccagcaccacttctaatggtgtcagttgtacccgaggcgttctcagcagcagcaagtacctgtggtggatttccaggctgaactga

SEQ ID NO: 850130 - DNA, 98 bp, Homo sapiens
acgcccaaatggatgagcaagacctaaatgagcctcttgccaaagtgtcccttttaaaaggaacacatataactgtggtttcccattcaagacctgtg

SEQ ID NO: 850131 - DNA, 98 bp, Homo sapiens
tttacgtctagatttccatgcccatggaagcatgttgacatagcggctttattgataaaatacaacacgtgtgtaaatgcaacagataagtgggcgtt

SEQ ID NO: 850132 - DNA, 100 bp, Homo sapiens
gaagacagagggttttcttttgaggctgccaaacgagggattctttcatctggtcggggcagaggaattcattcaagaggtcgaggtgcagttcatggcc

SEQ ID NO: 850133 - DNA, 100 bp, Homo sapiens
tcattcttgcagcatttcgtgacctgggaggaaggcaaggtgctcatctttgatgactcctttgagcacgaggtatggcaggatgcctcatctttccggc

SEQ ID NO: 850134 - DNA, 100 bp, Homo sapiens
gagaaagagcgcgagcgagcgaggcctgggccttgcctgagggccgtgatgacctgagacaagatgctgtcatgcaacaggtcttccagatgtgtaatac

SEQ ID NO: 850135 - DNA, 98 bp, Homo sapiens
tactgtaacccagaaaatgatagaatgagaatgaagtatggaaaacctcggatcaattctcagctggtggcacaacaagtggcacaacagtatgccac

SEQ ID NO: 850136 - DNA, 100 bp, Homo sapiens
acacaccgtcagagaatagtaatgagtttgagtgggaaggaaaatatatgcagatgatgaacattcttaagccaattgcctttgatgttattcatttcat

SEQ ID NO: 850137 - DNA, 100 bp, Homo sapiens
tccaaaattttaccccctcccccctgagcccgaggtgctgacgtcgcaaaaaaattggatagttattattgcagcagaactcctaaaaaatgcagatgaa

SEQ ID NO: 850138 - DNA, 98 bp, Homo sapiens
ctcagaaatcactaaatactactctgaggggcttagaaattaacaggaaatctcctgcaaagaagctgagccatgcaattagtaaatctttggggtgt

SEQ ID NO: 850139 - DNA, 100 bp, Homo sapiens
aagtagatgataaagatgatgatatccttctcaaccttgtgggatgtgaaaactctgttactgaagggcagctgcaatgactctccgcacggtattattg

SEQ ID NO: 850140 - DNA, 100 bp, Homo sapiens
gagacactgccaagcagccttagccctagtgtagagagagcctccttttcacctgaccagaagaggctggggtgagtttcccgtcagagttcaagttcat

SEQ ID NO: 850141 - DNA, 100 bp, Homo sapiens
taggggctcgtctacaggagctcacattagcccccagtttccagcttcaggtgtgaaccagacccccgtggtagacgggataaaaacattcagatggcag

SEQ ID NO: 850142 - DNA, 100 bp, Homo sapiens
aacagagctgggtccgggtgtacgtaccaaaagaattggtggagctccatttgaagctgatgaggaaaattggcaaatctgttactgcagacagatggga

SEQ ID NO: 850143 - DNA, 98 bp, Homo sapiens
acagatgaagacagatgcaccaacgaggtgttaagccccacctacaagcagagaaatgaagacttcagaaagctctttaagcagcttccagacacgga

SEQ ID NO: 850144 - DNA, 50 bp, Homo sapiens
atatggacaatgaatctgcaaaggaatatgtgtgtcttctgatcaaaatc

SEQ ID NO: 850145 - DNA, 98 bp, Homo sapiens
acgcgctaaggcaaagcacctgatctgagtgggacatacttttgaaggatgtgcaatgttcaatcataagtgtgacaaaaactgacaagcaggaagct

SEQ ID NO: 850146 - DNA, 100 bp, Homo sapiens
gccagtataaaaacacagctcgacagtacgcctacttctataaagtcatccagactccagggattagagctcgatctgcaaggcttcagtggttttgtga

SEQ ID NO: 850147 - DNA, 98 bp, Homo sapiens
cgaatcggctgcggtttgctgggaacggagggctgcagcgcccaccctgcgccagagaccagataaaattactcagaagtatcaacttcatgaagtca

SEQ ID NO: 850148 - DNA, 99 bp, Homo sapiens
gcagtggtcgcttcttctccttggtggtaatcactcaaggaaaaggaattatcagagtaacaatagttcctgttactgacttgatatggtctctgccag

SEQ ID NO: 850149 - DNA, 98 bp, Homo sapiens
ccaccgagtggctcaccatccagggcggcctgcttggttcgggtctcttcgtgttctcgctcactgcatatccccccacgtccatgtccaggagcccc

SEQ ID NO: 850150 - DNA, 100 bp, Homo sapiens
gaggacgacgacgatggggatatcgatgctattaacattctgaaggagatgaaagagaaggatgttcttatcaaagatacaacagccttgtcctttttcc

SEQ ID NO: 850151 - DNA, 99 bp, Homo sapiens
aaaagaaattgctgcagattttactttatgtgagaaaatctacaatttcttcgagacactcatataaagatacagctgcccgtctttcatatcagaaaa

SEQ ID NO: 850152 - DNA, 100 bp, Homo sapiens
cgagaacatctactctttcaactacaccagccagcccgaccaggagagcgaagacctggagaaacagaacgcggctctacgcaaggagatcaagcagctc

SEQ ID NO: 850153 - DNA, 100 bp, Homo sapiens
gaggccagattgtcttggaagttccaaagttgcaacgatttctgtttccacttgagcggcacagtgacagaacctgcaatacaatcggagccagaaactg

SEQ ID NO: 850154 - DNA, 99 bp, Homo sapiens
ttgggtgacatctgcctgagagatctccaagaattacagcatccgcacttccactaatagccaagtagacaagctgaccctgtcagggagtgacagcgt

SEQ ID NO: 850155 - DNA, 98 bp, Homo sapiens
ctcctggcatctgccggctgctccgcaccccggggtcccaggaagggcggcccaggagccaaaaacctgtatatcatctccgtgaaggggatcaaggg

SEQ ID NO: 850156 - DNA, 100 bp, Homo sapiens
gggaggctttcagccggagaagcgagtttcagctgacataaccagtgcggtgcaatccaagcgaagaaaatccaagtaaacaagcaggactgcgacttga

SEQ ID NO: 850157 - DNA, 99 bp, Homo sapiens
agccgccggccgctagcgtcagcgccagccagcactttcagaccatgctgaagtctaaattgaatgtcttaacactgaaaaaggaacctctcccagcgg

SEQ ID NO: 850158 - DNA, 101 bp, Homo sapiens
ggcgcgggcaggagcctggcgaggatgcaccttcccctgccttggaaagcatactggagcatagtgaaagagtctattttgaagcttcaaacttagtgctg

SEQ ID NO: 850159 - DNA, 99 bp, Homo sapiens
agggagccagtttatgtatgttgtagacacaagaccaaagaatgcatctactcatgcctcgaaatctcctgacagtgttaatggaagtgaaccaagcat

SEQ ID NO: 850160 - DNA, 99 bp, Homo sapiens
gttaggtcacccacaccttataaaaagcagcttaatgaggaactccagcggcgctcttcagcattagaaaaatcctcagatcatgtatctagaacagga

SEQ ID NO: 850161 - DNA, 100 bp, Homo sapiens
ttcctggcccgacgccatgggagtgacttggctgttttggagtcagcggaagatcaccaaggccagggagtggttccaccgcactgtgaagattgactcg

SEQ ID NO: 850162 - DNA, 100 bp, Homo sapiens
tttgccgaagtgacccccacaacgatgcgtctcctggatgggttttaaaatcaaagatgggaaaatcggagaaaattgcccttccccatggccagcttgt

SEQ ID NO: 850163 - DNA, 99 bp, Homo sapiens
taaaaatgaaagaacgggaagaagcatgggttaaaatagaaaatctagccaaagccaatccccaggtgcctaacacgaggtatacagtatgttcagtac

SEQ ID NO: 850164 - DNA, 98 bp, Homo sapiens
gcgcccagcgcagtcgctccgagcggccgcgagcagagccgcccagccctgccagctgcgccgggacgaacccttaggagaaatcttgagagtggaca

SEQ ID NO: 850165 - DNA, 99 bp, Homo sapiens
tccaaccgagtggtctgccgagaagccagtcacgccgggagctggtacacagcctcagtttgtgaagtgtggatatgcaggctctaactttccagaaca

SEQ ID NO: 850166 - DNA, 98 bp, Homo sapiens
gcttttgatatctggggccaagggacaatggtcaccgtctcttcaggcaatactgaacactgcgcagcttgcagaggtctcctggcagccctcattag

SEQ ID NO: 850167 - DNA, 99 bp, Homo sapiens
aatagactggtgcgcccaggggaggaagataatgcagccataagcgagagaaaacctcttgtgttggaagggattgatttggggccatgtacaagcaaa

SEQ ID NO: 850168 - DNA, 100 bp, Homo sapiens
gttcaagatcttgaaactagcaggtggcagagctggggttcatctgtctccatgtgctcagattaaagccttccatctgaagtatgatgaagttcgtctg

SEQ ID NO: 850169 - DNA, 98 bp, Homo sapiens
ctaccatggaccatcctgctggtcagcactgcggctgaaaaagttctatggtccacaaaggcggaagatgatgtttatgggatttatccgtctgggag

SEQ ID NO: 850170 - DNA, 100 bp, Homo sapiens
ttctgtagaccagctccaacaggattccatggtagctgggatgttagggctcaggtgcttacatgttgcagaagctaattgaagagacagataggtttgt

SEQ ID NO: 850171 - DNA, 98 bp, Homo sapiens
cagcattaccactggttgtaaggccctggatggggatttctctgaagacaaccgcaataagtgtcgcatcgccaccgcacccttgattgaagctgtgg

SEQ ID NO: 850172 - DNA, 100 bp, Homo sapiens
tgactccagccccagccccaagggcagagggatgtcaaaccctgaagtgatccgagctctggagcgtggataccggatgcctcgcccagagaactgccca

SEQ ID NO: 850173 - DNA, 100 bp, Homo sapiens
agtcagcaaaaccgagcctggcctgaggcaggctgcgcgggaggccaaagccatggccattgccacgtcggttccacttccaaacatgagttccaggccg

SEQ ID NO: 850174 - DNA, 101 bp, Homo sapiens
ggctttcctacaactcatgcccagcagcagcaagcaggcattgaatgccccagaggagcccgaaacctcccaggcttggtgcaggaaggagagcccttcag

SEQ ID NO: 850175 - DNA, 98 bp, Homo sapiens
gccatttcaaagaatatagatggttttgaaaagttcatgctgtcccttcattgaattttagtcgcaatgtatctgctgagcaaaaagatgaaaacaaa

SEQ ID NO: 850176 - DNA, 100 bp, Homo sapiens
cctgctgaagttcccatgatgtcacccaatggatccattcctcccattcatgtgcctccaggttatatctcacagatgcaggacaagtactccaaaagtg

SEQ ID NO: 850177 - DNA, 100 bp, Homo sapiens
tctgaatccagaagagtcactaaggcagcacagtcagtgctgatttcattatttgaactcaataccccagagtttacaatgttattaggagctttaccaa

SEQ ID NO: 850178 - DNA, 100 bp, Homo sapiens
gctaccggcgggagctgggtcaccggcttgaggggctgcgtgaggcgcggaggcagatcggtttgggcttggccagccaggaagaatacctggttctgtg

SEQ ID NO: 850179 - DNA, 100 bp, Homo sapiens
caagaggcccctcgaaacgccccccgaggtggtctgcaccaagcgcagcaacacgggagtcccctgcctcaagattctcctcagcaaaggcctggggctg

SEQ ID NO: 850180 - DNA, 128 bp, Homo sapiens
gccgagggctgtttcctggcgtgcggccgctgccaatcactcccattggggtgacagcggccatgagggtgatacaattctggagactggagaagtaattccaccaatgaaagaatttcctgatcaac

SEQ ID NO: 850181 - DNA, 98 bp, Homo sapiens
taaagccatattggagtagcgaggaatctgattccaagcaaaaaccagatcgaggagactggcagagggaaagaaagttcaactatggtggtggcaac

SEQ ID NO: 850182 - DNA, 100 bp, Homo sapiens
ctctccttggaaggtcttttgagggctaaaaaggtcctgtaagaagcggcatagcacccgtggtgcatgaatcatattctaagaactcagccactcaggt

SEQ ID NO: 850183 - DNA, 99 bp, Homo sapiens
catcaccaacatagccatcgacttcggggagcagactccgacctgagcatgcgcacactgagcacgcccagcccagccctgatatgtccaccgaatctc

SEQ ID NO: 850184 - DNA, 100 bp, Homo sapiens
cccagggcgacggtcagcttgttaattcctggctgcaggaatccttcaactgctttctaccaagcgttccatttgaacacgttaaaggaatcaaagagcc

SEQ ID NO: 850185 - DNA, 98 bp, Homo sapiens
agctcgagtgagcggactgcccaggacttcggaactagacgaggaaactttgagggaaattttgagtcactggaccttgcggaatttgctaagaagca

SEQ ID NO: 850186 - DNA, 99 bp, Homo sapiens
ttcggagaatggagtcttccatcaatcatatctcacagggatcagtgtcgtttagggatgtgactgtgggcttcactcaagaggagtggcagcatctgg

SEQ ID NO: 850187 - DNA, 99 bp, Homo sapiens
ttagatggtacgcgttgctatacagaatctttggatatgtgcatcagtggtttatgccaagccatcgaagacggcaatttggaggaaatggaagaggaa

SEQ ID NO: 850188 - DNA, 100 bp, Homo sapiens
tttagatatgaaagtgattttgatagaagactttcgagagtgtatacaaatgacagggttacttgattagctgtgtttggaactgctaccgatacatcaa

SEQ ID NO: 850189 - DNA, 99 bp, Homo sapiens
ctgcgggagggtactgagaatgagcggagccgccaaaaatatgctgaggaggagttggagcagataaggcatggcagtcagccaacagcaggcatcatc

SEQ ID NO: 850190 - DNA, 100 bp, Homo sapiens
ctcccttcatgtctgggtcatgcaaactgaaaccgtgtcagttcagtcttcggtattggggaagggtgtaaaacatcgacccccaccaatcaaacttccc

SEQ ID NO: 850191 - DNA, 100 bp, Homo sapiens
agcagctttgtgctggagccccatttccatgggatgacgatgtcgataccaagaagcagaagaccgacgaggatgactagacagcaaaaaaggaaaagtt

SEQ ID NO: 850192 - DNA, 100 bp, Homo sapiens
ctctccattgacaaaatccatctcattaatgacaatcagccatcctggattggacaattgatgaactcccagagggcgctgtgaagcctccagcaaacaa

SEQ ID NO: 850193 - DNA, 100 bp, Homo sapiens
ggggaggaagaatgccggtcacagcccaggaggagaagtacgtggaggaacttgcagcagtgaggcaaaccctccagacagacctggagacatccattcg

SEQ ID NO: 850194 - DNA, 98 bp, Homo sapiens
cctgtgacctggccgatgaggaagtactgagcctgttggaggaactggcccggaaacaggaggaccggaaggagagttttacatggaagtggcttaca

SEQ ID NO: 850195 - DNA, 99 bp, Homo sapiens
gttactacccacagatccttaccaacaaggaggcggaaaaggtgctgaggagacgctgaccggaaaggagattgagattgacattgaacctacagacaa

SEQ ID NO: 850196 - DNA, 100 bp, Homo sapiens
gacagggcacaccaaactccatctgggggctgttgtggttccgactataaacagtacgtgtttggcggctgggcctgggcctggtggtgtatctccgaca

SEQ ID NO: 850197 - DNA, 121 bp, Homo sapiens
ggagattttgtgaatatggtggaaaaaggaatcattgacccaacaaagaggccttcgaggaagaggcccacctccttcatgggcctctgagcctgaacgcccatccattcttagtgcatca

SEQ ID NO: 850198 - DNA, 100 bp, Homo sapiens
ccgcgggaggacactgagggcatcctgctcatctcacaccctgcatggaatcaggctcctcagccaggacacagggataaaagaatcagagtgtctcaac

SEQ ID NO: 850199 - DNA, 100 bp, Homo sapiens
tagaggatataccagaccctggagtgaactggattccatgtagagacccctggaggttttacttggaagaacctccaggaacacagaagctttattcagg

SEQ ID NO: 850200 - DNA, 98 bp, Homo sapiens
ccaccccaagtacaggattggagtgggggcacccgtgtacatggccgccgtcctggaatacctgacaggtttgaaatatctccattcagctggcattt

SEQ ID NO: 850201 - DNA, 100 bp, Homo sapiens
cgagtccgcgggaagatggcggcgccgctcatccccctctcccagcagatccaaaaagttggcagctcttgcagaagccttaaaggaagtctcccttaca

SEQ ID NO: 850202 - DNA, 99 bp, Homo sapiens
tcggccaagaaattagacaagaaacattggaaaagaaatcctgataagaactgctttggtttggattcaggatttgttcctagtgtccaagattttgat

SEQ ID NO: 850203 - DNA, 100 bp, Homo sapiens
ctgctctaggattctcaccacgtactggctagacttatacttctcaaatcttaatttcctaaagtttgccaaggcacgagtaacaagctcacgcagttgg

SEQ ID NO: 850204 - DNA, 100 bp, Homo sapiens
gaggaaagcagtgacaaagaaagaagttgtcattctttgcacgcctcaagtactacagccttccagcagccttcccagacccacagatcacacccaggga

SEQ ID NO: 850205 - DNA, 100 bp, Homo sapiens
aaagaagacggtgggatcaggagatggatgggttgacaccacttcactgtgctgcacgaagtgggcatgaccaagtggtggaacttctgttggaacgggg

SEQ ID NO: 850206 - DNA, 99 bp, Homo sapiens
ccagtatgttgtcagggtccaagatgtgtcttgctgaatcagggctctcttatccctgccatcgacttacagtgggaagaagatcttcacctgcacaga

SEQ ID NO: 850207 - DNA, 100 bp, Homo sapiens
ccggccccggcgaggaggcgcggaaccatggccgatgggggcgagggcgaagacgagatccagttcctgcgaactgggcgtgaatactttttctcccgaa

SEQ ID NO: 850208 - DNA, 100 bp, Homo sapiens
aaactttatttcctcccagaagacactccccagggcagaaatagcgaccatggcgagaaactatgttccaacttcctgtcaacaatcttggcagtttaag

SEQ ID NO: 850209 - DNA, 98 bp, Homo sapiens
gcttctggcaagaggtgctgatatcaacacggtcaacgtggacggcttgacagccctgcaccagcttgtacctccttttaaacctcaagtaacatctg

SEQ ID NO: 850210 - DNA, 98 bp, Homo sapiens
agaccaatggacagcagaacagatacagtacaacaagcacctgttcgtgcacattggccagtccagcccaagctacagcgacccctacctcgaagccg

SEQ ID NO: 850211 - DNA, 100 bp, Homo sapiens
atggagaacccaccaagccccgctaggagccacctagactggatgcagagcatgtgagctttctcttaagtgtgccaagctgccatccaactttcttgag

SEQ ID NO: 850212 - DNA, 99 bp, Homo sapiens
ttaggccagcgggagccctaggggcccggaccttgctcctgctgtcggaaaaggtaacagaagatggaactcgaaatcccaatgaaaaacctacccagc

SEQ ID NO: 850213 - DNA, 100 bp, Homo sapiens
ccacagtgctcaccacccaccaccactggtgaccctggcaaagatgagagtgcacatttcgtcctgcctgaaggtccaggagcagatggccaactgcccc

SEQ ID NO: 850214 - DNA, 138 bp, Homo sapiens
aagaaatgtcagctgtctatatagaattcacagaatattactatccagatggaaaggattttccaagagtcctatccaaagaagagaaattacactatggaaattgtaccatctgcttctctggatacatttccttca

SEQ ID NO: 850215 - DNA, 98 bp, Homo sapiens
atcaagattgcagaatacatcttcaagacctggaatgtatccgttatttgccatacagtaaccagagacctccaactaggggcccccaaactgtatcc

SEQ ID NO: 850216 - DNA, 100 bp, Homo sapiens
gctcaggaaattttccaagacaataatatatttggtctgcggcctgtcgattatacagatgatgaaagtatgaaatcgctattgctgctaccagagaaga

SEQ ID NO: 850217 - DNA, 100 bp, Homo sapiens
ggtgcatgttagtgctcaagagcctcattatctaccacccgagatgccccaaggtgacttaagagattaaaattaatttggttgctgttggttctgaaca

SEQ ID NO: 850218 - DNA, 100 bp, Homo sapiens
aacagtgatcgctaagaactttgccgataccttaggatacaacatagaacctattatgctctatcagggtccaaattccaagcctgtagtgtccttcatt

SEQ ID NO: 850219 - DNA, 100 bp, Homo sapiens
ctgcaagctatcaaatctgaggtcttattttgttgagtcgaaagtgaaattttcctttggccaacgtgacagatgtaacccttcctcgccttaaggcctt

SEQ ID NO: 850220 - DNA, 100 bp, Homo sapiens
cgcagaggacgccggaacaccctggaagccgagaaatgtctggctcttgctgattgaattcctttggtgcagtttagcatgttcctctgtgttctgcatc

SEQ ID NO: 850221 - DNA, 99 bp, Homo sapiens
ctccaatctttctacatcccagaatggttggaatccattttcgtacccatacaaaaaactggattatggaaaatgggagctgtatatcccaccaaagca

SEQ ID NO: 850222 - DNA, 99 bp, Homo sapiens
ctgtcactattaaatatgactttcatgaaatatgtggattccaatctctgttgcttcatcccaggaaagatagcagaatcctatttccaggaggaggac

SEQ ID NO: 850223 - DNA, 100 bp, Homo sapiens
ggagcagttgtacttggaaaaagttgcagcaatatcagtactacagtgcaggcctgctctccacatatgaccctttctatgagcaacaacggcacctact

SEQ ID NO: 850224 - DNA, 98 bp, Homo sapiens
cagagaagagcacagaatgtaccagagagtctccggagtagagatgaagagagaatttctaaacctggggctgtctcaactcctgtaaagcatgctga

SEQ ID NO: 850225 - DNA, 98 bp, Homo sapiens
atggagaaggagaggctgcggctgaaacagcaagaactgcttcggcagggtactatttttctgcctggaaataaagtttctgagcatccctgcaatga

SEQ ID NO: 850226 - DNA, 98 bp, Homo sapiens
acccaaaacactgctggtataaactgcgagacatgtactgatggcttcttcagacccaaagggggagccaagaagggaccaagtatattcaaaacctc

SEQ ID NO: 850227 - DNA, 100 bp, Homo sapiens
catgatgcatttactgtcatcaagaactgtaatacttctggaatccagacagaatgtgatgtaaattggagtcaaccaggtgaaaagaagttaactgggg

SEQ ID NO: 850228 - DNA, 100 bp, Homo sapiens
ttcaacaacatcatccagtaccagtttgatgggctgagccaggcccctcctgtgtcttggaatggagagcgggagtctgatgtggtccaggaactgctca

SEQ ID NO: 850229 - DNA, 98 bp, Homo sapiens
tccacccccagagagatcgggctcaggacctgtgagcagctgctgcagtgtttcggggtatggtgctgggtgcagatgcagtgtggctctggatagca

SEQ ID NO: 850230 - DNA, 99 bp, Homo sapiens
ggagtctccgcgtcccgctcgctgggagagaggtgcagaggccaagaccgttttgcccaagaaggagaaaatgaagctgaggcgtgagcaatggttgca

SEQ ID NO: 850231 - DNA, 120 bp, Homo sapiens
aattgtacacatttccaccgtgcagatcctcacagaaggcttccctcctggaggagcaagtaatactgcagacacattgtttcaagaagtattaggtcggaaagacaaggcagattccac

SEQ ID NO: 850232 - DNA, 100 bp, Homo sapiens
aatccagtgtcttctcccgggatgtctcaggaattgagaacaatgacgaccaatagctcagatcctttccttaacagaaactggcgatggaatatgagag

SEQ ID NO: 850233 - DNA, 51 bp, Homo sapiens
ggagaaaatacggcattgctaggtaaaattgcggagttgctctctccgggc

SEQ ID NO: 850234 - DNA, 98 bp, Homo sapiens
aaaacaaaattctgaactcaggacttggcaaaatcgtactcataatcagctctgcatacatctgaagaacaaaaacatcaacgtcttttgtccagcct

SEQ ID NO: 850235 - DNA, 100 bp, Homo sapiens
tcaatctctttcgaagccattcagtcctcaatctccttttccttggctaccctaatccttcccctctaccaccggatatggctcctgggcagagttatca

SEQ ID NO: 850236 - DNA, 100 bp, Homo sapiens
ggagctgtggataacgggaggtgaatttccatgtcaacatagtcctgcatgcatatgcgctagaacttctatttgatcagttgcatgaaggagctaaagc

SEQ ID NO: 850237 - DNA, 100 bp, Homo sapiens
agatggaacaaagactgttgagtatgctccatgtagatcacggaatgaaagctactggttgattttaaagtgcctgggcctcacaggtttggagatgtcc

SEQ ID NO: 850238 - DNA, 99 bp, Homo sapiens
cagcctcgaggtggagaagaaggacaagcttgcggccagaagcctgtcttagatgttcatgcagaactagacagaattacacgaaaaccagttacagtt

SEQ ID NO: 850239 - DNA, 99 bp, Homo sapiens
gctgttggggttgatggtgctgaaaaaaaggaagactacaatgaaacagctccaatgctggagcagatgcatggtcatggaggctatgattctgatttt

SEQ ID NO: 850240 - DNA, 100 bp, Homo sapiens
atgttttaatgattcttccatatgtggcaattgtccaagaaaaggatacattaattgtttggtcagaagcagagaactatgatttggctctgagttttca

SEQ ID NO: 850241 - DNA, 98 bp, Homo sapiens
tctggaagaggctggggagtctgtgtccttccagctgcagatacggaggggcaagattcttgccaagagaattaatgtgcgtattgagcacattaagc

SEQ ID NO: 850242 - DNA, 100 bp, Homo sapiens
aattttgagtctgaggattattgtatggctgtgtgtaaagcgatgagcagtggaccaatccagctatggcagtttcttctggaattactcactgataaat

SEQ ID NO: 850243 - DNA, 100 bp, Homo sapiens
tttttccctctaccttaaggatgtgcaggatcttgatggtggcaaggagtatgtaggaaaccttcccagaatatttgactactcgcctttagatccaaca

SEQ ID NO: 850244 - DNA, 98 bp, Homo sapiens
aagacctaaatgagcctcttgccaaagtgtcccttttaaaagacttctaggccactgggaagaagcagcccatgatcttgcccttgcctgtaaattgg

SEQ ID NO: 850245 - DNA, 100 bp, Homo sapiens
ccccccacaatagggtatcatttttacgggccttctggagatgcttccgaactgtgggcaaaaatggcgacatatgtagagtgtgtcggtcagaaggaac

SEQ ID NO: 850246 - DNA, 112 bp, Homo sapiens
gaagaagcagctgaagacggaggcagctccacactgtgaactaagctaaccggcctcctgcaaagctcaacctgctaacctgccaggtgaagaccaaccctgaggagaagaa

SEQ ID NO: 850247 - DNA, 99 bp, Homo sapiens
tgctttcttttcctcagaactactatattcagtggctaaatggctccctgattcatggtttctctggaaacccccctggtaagtgtggaggaggcggga

SEQ ID NO: 850248 - DNA, 98 bp, Homo sapiens
ggtgaccctagagtctgaacgcaacagaattcagatgcgtagcttgcagcagcagttctccaggtgcgaaattgaggcaactcttgagaggctaaaga

SEQ ID NO: 850249 - DNA, 100 bp, Homo sapiens
actttctccttggagaacacttattattggttggcaaccagaattcaattcgtcataatctgtccctacacagcaagttcattcgtgtgcagaatgaagg

SEQ ID NO: 850250 - DNA, 99 bp, Homo sapiens
ttaaagccaaggatttacaagatgaactagcaggcaatagtgaacaaagggtgccagatgcaattaaaaagtgtcagagggctggaattactgtgcgga

SEQ ID NO: 850251 - DNA, 98 bp, Homo sapiens
ttcaaggactttgatgttggcgatgccgctcctgacatcactggccataaacggagtgagaacaagaatgaagggcaggatgccactatgtattgcaa

SEQ ID NO: 850252 - DNA, 98 bp, Homo sapiens
aattcaactttcttcttttcttcattcatgaaaatgcagatccactgagaaagggaataagcccttagagatttgtttgattccatggataaaacttc

SEQ ID NO: 850253 - DNA, 98 bp, Homo sapiens
tgagagcgcccactcgagcgccccgggagccagagggcgggggtcctcgccgggaccctcctgtgggcccagggagttactggaggtgaactgtttga

SEQ ID NO: 850254 - DNA, 98 bp, Homo sapiens
tcaggaatgtctggaagaaaaagaaaagctagcatatctttgactgatgacgaaggtatggcctcacaagtcttggtctacccaccatatgtttatca

SEQ ID NO: 850255 - DNA, 100 bp, Homo sapiens
ggagggatcttgtcccaggacaggtgaaatgacaatggatgctctgttggctcgattgaaacttctgaatccagatgaccttagagaagaaatcgtcaaa

SEQ ID NO: 850256 - DNA, 100 bp, Homo sapiens
gttccccacctgcgattgcgtcgtgtaatgttcaagctcagaaatgccttatgtggatcgtcagaatcgcatttgtggttttctagacattgaagaaaat

SEQ ID NO: 850257 - DNA, 98 bp, Homo sapiens
tttccctctccctttccctaaggagtcttttagtcctgctatacagctgcaccttgtacatcaagctccatgtaatgttcctccttacctctcaaaga

SEQ ID NO: 850258 - DNA, 100 bp, Homo sapiens
gacttgtgtggaagcagttatcaaagtggggatgtgacacgcaccaggagaggggaacagacaacacatgagcaagatggattctggatatactctgagt

SEQ ID NO: 850259 - DNA, 120 bp, Homo sapiens
agttgctgcttttccaggaatgaaagacattcaggatcaacttgaacgaatatttctggacccagatgatgtggtaccagttggccaaagaagagcctggtgttggtgcatgtgctttgg

SEQ ID NO: 850260 - DNA, 100 bp, Homo sapiens
cagggacccgctaagctgatctcctgtacagtagtgctacttaaaatatgctggggaccatcaccatcacaggatctttcgaagatggtttggctgcctt

SEQ ID NO: 850261 - DNA, 100 bp, Homo sapiens
caagaaggagagcaattgaccttgaaattaaagagcgagaagctgaaaattttcatgagagaatggatcttggagaatgtctgaaagtccatgacctggc

SEQ ID NO: 850262 - DNA, 98 bp, Homo sapiens
acgagatccagttcctgcgaactacattcacggcatggtgtaactcccacctccggaaggcggggacacagatcgagaacatcgaagaggacttccgg

SEQ ID NO: 850263 - DNA, 99 bp, Homo sapiens
ttatcaaagaactgagagtgattgagagtggaccacactgcgccaacacagaaattatgtattccataaaacctaccaactcatggattcccaagatgt

SEQ ID NO: 850264 - DNA, 100 bp, Homo sapiens
ccatggccgatgggggcgagggcgaagacgagatccagttcctgcgaactggtatttagagaaattcaatcagagacgatggaactaaagctggcccttc

SEQ ID NO: 850265 - DNA, 98 bp, Homo sapiens
cacaccatgatggcgatgctgtagctgatggagacctaatctgggagcctgcaagtgacaacagcctttgcggtccttagacagcttggcctggagga

SEQ ID NO: 850266 - DNA, 100 bp, Homo sapiens
ctcagaagagtgagagagagctattagagattgtgaagaagaatttcgatctccgccctggggtcattgtcaggatgaaggtttaaggctcagaaaggta

SEQ ID NO: 850267 - DNA, 50 bp, Homo sapiens
cccaacagcaggaatagctcccgggtggcattgtgtgtcccagagtgccg

SEQ ID NO: 850268 - DNA, 98 bp, Homo sapiens
atctgaatctctactctttatcaggatatggaacagatgctatcatctacttaaaggtgcagcggaactgctgcctgacgctctgcaacttcagcatc

SEQ ID NO: 850269 - DNA, 99 bp, Homo sapiens
gcaccaatggcttccgtgctgtcctacgaaagcctggtccacgccgtggccggagccgtggtgtacttgaaggggaggtctggagacaagatgattcac

SEQ ID NO: 850270 - DNA, 100 bp, Homo sapiens
tggacgcggatttttggcctcatactctgttatagataaacaagtgtaaacaggaacatcgataagtagtgtaaaaacttgcacaatgaaatccgaagcc

SEQ ID NO: 850271 - DNA, 98 bp, Homo sapiens
caagatccgcaaggccgcccgggaactgctgacgcttgatgagaaggacccacggcgtctgttcgaagagctgctgcccaaagggagcaaggaggaac

SEQ ID NO: 850272 - DNA, 98 bp, Homo sapiens
tgaacattcaagtgaagcaaaagcctttcatgattatagcatcctggccagaacaagccaaggagccaagacgagagggacacacggacaaacaacag

SEQ ID NO: 850273 - DNA, 125 bp, Homo sapiens
ggtgtgttcttctctggactccttagatgactctgtggtgggtccctcagcccttctgagctctgtgctgaacaaggctttgctctctgtacatgatactgtggctcagaagaattacgacccag

SEQ ID NO: 850274 - DNA, 99 bp, Homo sapiens
gggagacgggtgaggtacaggctcagtctgcggccaagactccgtcctgcaaggcctgtgttgcctactgcttcatcaccatcccctccctggcgggca

SEQ ID NO: 850275 - DNA, 99 bp, Homo sapiens
gtacttctggccactgggcgagcgtctggcagaggcggggtttcaccatgttgcccagactggtcttgaactcctgagcttaagcaatccacctgcctc

SEQ ID NO: 850276 - DNA, 99 bp, Homo sapiens
tgacatcgctaccatggtctccggcagcagcggcctcgccgccgcccgtctcctgtcgcgcagcttcctccggctgattgttgtgacattggccgtatg

SEQ ID NO: 850277 - DNA, 99 bp, Homo sapiens
acatgcccgctcacctgcgctgtgatgcctgcagagctgtggcttaccaggcccgccaagctgccccctgtgtgctattctttgatgagctggattcga

SEQ ID NO: 850278 - DNA, 100 bp, Homo sapiens
cctcctgggtagctgggactacaggtctccaggaaacctagagaaaaaccgttatggggatgtaccctgcctggaccaaactagagtgaagctaacaaag

SEQ ID NO: 850279 - DNA, 100 bp, Homo sapiens
catgtcccaagatgaaatataaggtttttagaacttcagccataaaaatgggcagaattttccttgatcatatcggtggtacccgtctgttttcttgtgc

SEQ ID NO: 850280 - DNA, 100 bp, Homo sapiens
tcatcttttccatcgccttcatcactgtccttatcttcaaggggtctgctgggagccagccattgaaggtgctggagcagagagagatatggtattggag

SEQ ID NO: 850281 - DNA, 100 bp, Homo sapiens
cctggtctgggccatgtctggctgtgatgctcgggagggagactgttgttcccggagatgcggcgcgcaggagctgccaaggccatgtctgttccatcat

SEQ ID NO: 850282 - DNA, 98 bp, Homo sapiens
atcaactgggagaatgtaactgaaagatacatggcttgcaaaaagtaaaccacgatcgttatgctgaaatccagactccaaaatgatgcaaatcaacc

SEQ ID NO: 850283 - DNA, 100 bp, Homo sapiens
gtcacctactgtaccagagtttcagggcatccgcttcgatcctgaaattccgcaaacactacgactagagtttgctaaggcaaacacgaagatggccaag

SEQ ID NO: 850284 - DNA, 100 bp, Homo sapiens
caatagttctaagcaaaaaattccagcagatggagtccacaggatcagagtggactttaagttacgcagctccttcaagcaagctttcgggaagaagaag

SEQ ID NO: 850285 - DNA, 99 bp, Homo sapiens
gagtacagggaagtctataagctttgcaacagaattacagagtatgatgttaatgatcctgctctgaggggaggcaacctgttcccaaaccagctgcct

SEQ ID NO: 850286 - DNA, 99 bp, Homo sapiens
tttctcctcagggaagttttctggaagacacaacaggggagcagttcctcacttatcgctatgatgaccaggagtcatactccatgggtttatgtgata

SEQ ID NO: 850287 - DNA, 98 bp, Homo sapiens
cggtttccggatgaaacgaggagccagagataattgacgaccttgccaacctagtggagaacacagatgaaaaacttcgcaatgaaaccaggcgggta

SEQ ID NO: 850288 - DNA, 100 bp, Homo sapiens
ggcgcagggcacggtgggcgcctacctgtttagctgctgtggagggatttcctacaaggactggtctcagaacatgtatttcaactgctcagaagacaac

SEQ ID NO: 850289 - DNA, 100 bp, Homo sapiens
taaccaccgtactgaagttccctgatgatcagactcagaaaattttggaaagagaagatgctcggctgatgtctccccgagtgaaagaatcaatatcaaa

SEQ ID NO: 850290 - DNA, 100 bp, Homo sapiens
ccgggatcgtgaccgagaccgtgaccgagagcgtgaccgagagcgcgaatatcgtcatcgttagaagtcataccctaatgatcccagcaagataatgtcc

SEQ ID NO: 850291 - DNA, 100 bp, Homo sapiens
tgggcgcagttcttcatccacccactaatgatcagagatgcaattgaccgtgaagttgaagctgttgatagtggttcttatagaaaattggaacgatatg

SEQ ID NO: 850292 - DNA, 98 bp, Homo sapiens
gtcaagacgatcatagtcactgttaatgtggagctcaaatatgccttattttgcacaaaagactgccaaggacatgaccagcagctggctacagcctc

SEQ ID NO: 850293 - DNA, 100 bp, Homo sapiens
attttctttccccctttaacttagaggaacgaggattatacagaaatttgaagtgaacagccatataccaggaataggataccagatttttggaaatgca

SEQ ID NO: 850294 - DNA, 99 bp, Homo sapiens
tctgtcttccttttgggctctgtgcaactgcagctacagtggaaaaaagcaaactgctcttgatcccaggtggtgatgatgtccagcaactctgtgaag

SEQ ID NO: 850295 - DNA, 100 bp, Homo sapiens
gactactataaagctttggaagatgcagatgagaaggttcagttggcaaaccagatatatgacttgatcatcactgttgaagaggcaaagcgcaggaaga

SEQ ID NO: 850296 - DNA, 100 bp, Homo sapiens
caatccagaggtacgctacgaagtctgtgacattcctcagtgttcagaagtttctgatgaagaattgaaaagaagagtagctgaggagctggcattggag

SEQ ID NO: 850297 - DNA, 100 bp, Homo sapiens
tccaactggccaatacaaatcccttgtatccgagccttttgtggcagatgaatatattgaacgtcttgtatggagaaccccaggaggaggctctagaggt

SEQ ID NO: 850298 - DNA, 100 bp, Homo sapiens
ttctttaatggatcagattcctatcaaattccttattcgacaggctcaagggctgcagcaggagttgggagaagttgattcaagtcagttgagacgccag

SEQ ID NO: 850299 - DNA, 98 bp, Homo sapiens
ctcagacctgccaatttaccagagataattgataacaccctgtaacagctgaaatccaactcaagtcggaacagctcttcaggttttctataatcttg

SEQ ID NO: 850300 - DNA, 100 bp, Homo sapiens
attgcccttcgggaaatccgaatgctcaagtagccagagaagtccatcacctggtcccaatcatacttctaatagtagtaatgcatcaaatgcaacagtt

SEQ ID NO: 850301 - DNA, 100 bp, Homo sapiens
gggaagctttcaacagactggacttctcaactgccattctggattccagaagatttaactacgtggtccgggaacagatggagtcggataactgttcagg

SEQ ID NO: 850302 - DNA, 100 bp, Homo sapiens
acgaagcctgcaagagtgacatcaaaaacttctgttccgctgtgcaatatggcaacgctcagatggactctgtgactacatgactaataaaatatggcag

SEQ ID NO: 850303 - DNA, 100 bp, Homo sapiens
ctgctggaccacaaaccgctgccagaaaaatgtgggaagaatatcctgatgtttatggggtcaggcggtcaaaccgaagcagacaagaaccatcgcgatt

SEQ ID NO: 850304 - DNA, 103 bp, Homo sapiens
ttggcctcatgctatcttcattggatcttctttggaaaggggtttgtgaccatgactctggaaagcctagaggaaatacaggatgtcagctgtgcttggaaag

SEQ ID NO: 850305 - DNA, 100 bp, Homo sapiens
gacctcgtcccggcccctgcagtccggatactcacgccagaaggcagaggacatgaatgtcaagttggagggggagccttccgtgcggaaaccaaagcag

SEQ ID NO: 850306 - DNA, 100 bp, Homo sapiens
ggtcggccagtcatgtatcaaagactgtttgttcaacatatctacaatctcggtactacagatgttgaacgtcgacgcatttacgatatcgtgaacgtcc

SEQ ID NO: 850307 - DNA, 99 bp, Homo sapiens
tctgggttacgtggaatgtgtttgttatctgcttctatttggaggctggggacctctcaaagactctaaaatagagctcaagcttgagaagagagaacc

SEQ ID NO: 850308 - DNA, 100 bp, Homo sapiens
acaggactttgggtctgggtgagccttctcgtggcggcggggaccgtccagcccagcgattctcagtcagtgcatcagagaatttagatgagctgtcttc

SEQ ID NO: 850309 - DNA, 115 bp, Homo sapiens
gctgtaaggagccgcggcggggggaaaatggagcccttcaccaatgggcaattttgttgttacagactgcagaagaccaagatacttacaatgttgcaataagaaattacggcag

SEQ ID NO: 850310 - DNA, 100 bp, Homo sapiens
cccagcagcggcaacatgaaatcaacctgatcgcttaccgagaagcccacaattactcagcgctgccattttatttcaacggaatctcgctctgtcaccc

SEQ ID NO: 850311 - DNA, 98 bp, Homo sapiens
ggatagtgacactgaggtgccaaaagagacaggagactctctccatcatgtgaagatacagcaaaacagcagctgtctgcaagccaggaagggaaccc

SEQ ID NO: 850312 - DNA, 100 bp, Homo sapiens
cgcaactgatctctggcagaactgtagcacctcttcctcaggaaatgtccaccactgtttctcatcatcaccaaacggtcccttcaataatcaggagatg

SEQ ID NO: 850313 - DNA, 142 bp, Homo sapiens
ctttggagtcaaacccttctgaccatccaagggcaagcacaattttcctgagcaaatctcaaacggatgggtgataaaagaaaatgtggctgaagttacccgaagttcagcttgcagtgtaattcagaagagttaagaccag

SEQ ID NO: 850314 - DNA, 101 bp, Homo sapiens
gttggtgctcctggagccaaaggtgctcgcggcagcgctggtccccctggtgctcgtggtttccctggaactcctggacttcctggcttcaaaggcattag

SEQ ID NO: 850315 - DNA, 100 bp, Homo sapiens
cctagactttttacttctgtgatggcagtacacaggtcagtgctgacagttgcttgtgaacaaactgaagttctgctttttgaccctatatcttcaaagc

SEQ ID NO: 850316 - DNA, 100 bp, Homo sapiens
ggggagctaagtccccagattggaggaggctggctctggtcttcgatgcacaggagtggccgttatggaacgcagacccaacatgagtgaagtttcctgc

SEQ ID NO: 850317 - DNA, 100 bp, Homo sapiens
gttcccccagtctgcagaaacactggcaacatttacaaaggattggccatttgatgatggagctccaccccctaatcagatagtagatgattggttaaac

SEQ ID NO: 850318 - DNA, 100 bp, Homo sapiens
gtctacttctctttggaggatgagctcaaaagcaaggtgtggacagttctgtgttcgaggctctgcccaaggcctcagagcaggcggagctgcctcgctg

SEQ ID NO: 850319 - DNA, 101 bp, Homo sapiens
tctctaatggccttaaaaagaaaagtctagatcacagtggggctctaggaggtctgcaaccaaagattcattaataatcatagatgaattgggaagaggaa

SEQ ID NO: 850320 - DNA, 99 bp, Homo sapiens
caacttcatccactcgctggactcctcccacatgatgctcaccgccctgcactgctacagacggatcaacgtgggctcccggttccaggcagaaatccc

SEQ ID NO: 850321 - DNA, 100 bp, Homo sapiens
cgttgtttgcgtgcaatgttcaccagtcagtgtttgaaggagaagagagcaaggcagccttaagtgccttgaaacaattttctgaacaaggactggatcc

SEQ ID NO: 850322 - DNA, 100 bp, Homo sapiens
tacactctttttctgtggaggctccagtttcctgtatgcattggatggaagtgacagtagaaagcagacttcgcatatcatttaagtggatggttcgagc

SEQ ID NO: 850323 - DNA, 100 bp, Homo sapiens
tcagattatgcccagtatatccagcagggattctcctgagaatgatattcctatggagatcaccacggcagaaccacaggtttccgaggcagtatatgac

SEQ ID NO: 850324 - DNA, 98 bp, Homo sapiens
gaggaaaggaaagatgtgttcgggtttttctagaacacggagccaaacaggcaggactcgtgaaattgtgatgccttctaggaactacaccccataca

SEQ ID NO: 850325 - DNA, 100 bp, Homo sapiens
aacttctttggcaagtggacattttactggctcaaatacaaatacttggaacagttggcagctgaggagcacgagaaggagctgagaagccggagtgtga

SEQ ID NO: 850326 - DNA, 98 bp, Homo sapiens
gatgcttgtcttcctgagagtgattggaggtctccttgccttggctgatctctcaaaggccttggttctgacagaaattggccccaaacgtgaccctg

SEQ ID NO: 850327 - DNA, 98 bp, Homo sapiens
caaaattacaagtggaaatccacaaggattcttttcaatacatcctaaaacaggaatgacatctcggtctggtacagatgtcgatgcagcaaacctca

SEQ ID NO: 850328 - DNA, 98 bp, Homo sapiens
ccaggcccagcctctcgaatgggcacacctgtgtagatgctgttcccaaaactgctaatacactaccttctaaagaagctataacagttcagcaaaaa

SEQ ID NO: 850329 - DNA, 98 bp, Homo sapiens
cttgtccactgtccgccagacctgctgctgcttcaatgtccgcatcgcaaccaccgccctggccatctaccatgtggcataatcaccagcaacacccg

SEQ ID NO: 850330 - DNA, 136 bp, Homo sapiens
ggaggcttcgcgggaagacgcggcggcggcggcggaggatgagcctgcagagcgcgcagtacctccggcaaagggtggaggttatgaaagtgaagatgcctatcaaaatgctgaactagttttcctggatatccac

SEQ ID NO: 850331 - DNA, 99 bp, Homo sapiens
ctgcagaaaattttctagttttggggagacaattacaaacatgttttatcaatgcagctaagagtgatggtgatgattttaattacatcattgcatttt

SEQ ID NO: 850332 - DNA, 100 bp, Homo sapiens
gctgaacttaaaaagcagtctaaacctgtgaccacccctgaagaaattgcacaggtataatttggcttcctgagattctgccttagcaagaaaggagtgg

SEQ ID NO: 850333 - DNA, 99 bp, Homo sapiens
ggaacgggagccaacatggcagcggggttcgggcgatgctgcaggaaaatgtcactgaaattcacaaatgcaaaacggattgaaggacttgatagtaat

SEQ ID NO: 850334 - DNA, 100 bp, Homo sapiens
ggaatctgtcttggaggacatcagaagtttagcagccactgctgcatcaggggcttttgttccaccaccaagtgcacaagagatacctgtggtctctgca

SEQ ID NO: 850335 - DNA, 98 bp, Homo sapiens
tcaaacgggcagcctggctgctgcggggccgtggggtcttccacaacggtctcaagggtctctctgtggtggagcaagagaaactggacaacctgatg

SEQ ID NO: 850336 - DNA, 98 bp, Homo sapiens
atgcggagagcagtctgcttccctgcgctgtgcctgctccttaatcttcacgctgcaggaaggactaaggatgcttatttcaagagatctagattgta

SEQ ID NO: 850337 - DNA, 100 bp, Homo sapiens
aacggggacatcgtccagccagtcctcaacccagacctcctgacagtgagtgagactgccaatgagccccctcaagatgaaggtaattccttcaattcac

SEQ ID NO: 850338 - DNA, 99 bp, Homo sapiens
tgcgggtgaggagtcgcgaggaagaggcggaaggcgccggaaggagatctattgggaaactgattataaccactcgggcaccatcgatgcccacgagat

SEQ ID NO: 850339 - DNA, 100 bp, Homo sapiens
gacgggcctgaagcagaggcagcaggtgtggaaacaggaagagaactagaactggaagtaaagcattgaagatgtgactgaattgctgcaatctcatgat

SEQ ID NO: 850340 - DNA, 99 bp, Homo sapiens
acgggtccggaagcaccatggacccccggggaaacgcgccggcggcgaaggagccgagccccgtggccattaagcagatgaatcttcagcagcagccca

SEQ ID NO: 850341 - DNA, 98 bp, Homo sapiens
cctgccaatcccccctcacccaggcccctgtcaagaaggtgccggtggtgcgagtcttcggagcgaccccggcagctgaaacagctttaagagaattt

SEQ ID NO: 850342 - DNA, 99 bp, Homo sapiens
agggatacatgccctacctcaacaagtacatcctggacaagattcttcaggagatgatgaaagagattgactatgatggcagtggctctgtctctcaag

SEQ ID NO: 850343 - DNA, 98 bp, Homo sapiens
gagaggcaggcaggggatcccggacgggtcaggcccagccccaggcccagtggtattactgaattcactgaatgtggatgcagtatgtgagaagctga

SEQ ID NO: 850344 - DNA, 100 bp, Homo sapiens
aaggtcatttgtgcactcacttccagccgcagattcttatacatcgtcaatctagatgcccctttcgaaggtcaccgaaagatctctcgccagagcaaat

SEQ ID NO: 850345 - DNA, 100 bp, Homo sapiens
cggacatctccctggacgaactcatcaggaagcgcggggcggcggcgaaaggacggccattctggaggaaaacaaggagaagctgccacttgacatcaac

SEQ ID NO: 850346 - DNA, 100 bp, Homo sapiens
ttacagaagagaggtgatgcaagcaacagccactagtgggtttgccagtggaaaacgtactcaggaaaagtggggatttccaatgtgccactatttaaag

SEQ ID NO: 850347 - DNA, 98 bp, Homo sapiens
ctgctctggctgcgttgcactgtggaagaccacctgagtcaccagttaactatggtagcccacccagcattgttcctccagtcatccgggtgtatcca

SEQ ID NO: 850348 - DNA, 100 bp, Homo sapiens
ggacctgcgctgactaggtccggggaaggacagagttcattcaaagaggcaggatttcaatcacaggggttggatttctcaactgtgttttagaaacttt

SEQ ID NO: 850349 - DNA, 99 bp, Homo sapiens
tcagccttcccagtcagctgtgagagatcagttggccttatttcctcagtggaaatctactcactatgatgtggtagttggcgtgttgtcagctcgcaa

SEQ ID NO: 850350 - DNA, 100 bp, Homo sapiens
cgggcagctacacatcttgaaagagaagctcttcctgtgagcctgggagctcccatcgaccatggcagtcctactttgacttgatcttggtggatgcacg

SEQ ID NO: 850351 - DNA, 99 bp, Homo sapiens
tgatagcttatggttctccattgtgatgaaagcacatggtacagcgagtaaccagctcataaatcacatcgaacagtttttggatactaatgaaacacc

SEQ ID NO: 850352 - DNA, 100 bp, Homo sapiens
attggacccctggaaaccatgcatctcaatgcagaagtaattcgccaaaatgacgaacacaaagggaaagaggagaggcacccgatatatgttctctagg

SEQ ID NO: 850353 - DNA, 102 bp, Homo sapiens
tagagattgtgaagaagaatttcgatctccgccctggggtcattgtcaggattttataacctgacagcgtgctggaacttctctgctggactcctggactcc

SEQ ID NO: 850354 - DNA, 100 bp, Homo sapiens
gtgaccacgcgaggcggaaagaagaaatccgaggaccggcgacgcctagaacagatgccatggacaatattaccaggcagaaccaattctacgataccca

SEQ ID NO: 850355 - DNA, 99 bp, Homo sapiens
ccgggaccgccgccgccgccgccaccatggattggccatttgatgatggagctccaccccctaatcagatagtagatgattggttaaacctgttaaaaa

SEQ ID NO: 850356 - DNA, 134 bp, Homo sapiens
ctgtaaacctacttcattaggttgctgtgaagttaaatgagttaatgagaagaatatcaggcagatgctggaaccctacatggatgagaacttcatctccagagcctttgccaccatgggggagaccgtaatga

SEQ ID NO: 850357 - DNA, 100 bp, Homo sapiens
cgctccgctgtacctggatcctgctcctctgggttgaaacccgggcgccgccaagatgccgtattttcctgacagcagcccttggatttcccgaggcttt

SEQ ID NO: 850358 - DNA, 100 bp, Homo sapiens
atgtgaacacgaacactctaattgcctcctgatagcacacagaaaggtagatcgacacttgagaaagctggatcaggaactggctaagtttaaaatggag

SEQ ID NO: 850359 - DNA, 99 bp, Homo sapiens
ctgctaaatagcaaagaccaggaagtgctgcttcaaacgggcagggctctaggaaacatatgttacgatagccagtgtggtgatggtggtcttcagtga

SEQ ID NO: 850360 - DNA, 100 bp, Homo sapiens
ttggtacaagcctgagatctccagggagcagggaaatggtgttcacactggccctgaatcaagggaacaccagttttcacatgctggcagaagcaatggc

SEQ ID NO: 850361 - DNA, 105 bp, Homo sapiens
cactgcgcagaccagacttcgctcgtactcgtgcgcctcgcttcgtgcattgctaaggaactgattccagaagccactgagaaatacttaggaggaacagacgac

SEQ ID NO: 850362 - DNA, 100 bp, Homo sapiens
atccggagagcggcgaagaagcggtgacccttgtggaggatatgcagagagagcttgggagactgagacaacagatatcaacatggcaggagagcccaaa

SEQ ID NO: 850363 - DNA, 99 bp, Homo sapiens
cctattgctggctctgcagggctctgatcaagcggatccaagccatgattcccaagatctaccagagcctgttcctgcggggcctgtccctggtgggct

SEQ ID NO: 850364 - DNA, 98 bp, Homo sapiens
ccatttctcctcctttgacagggacatcagtggagccttctcagacccacaggctcatggatttgagatcttatgctccaaatgtagcccacattttt

SEQ ID NO: 850365 - DNA, 98 bp, Homo sapiens
atggaagtcattcttgtgccagaggagtgtgccatattccaatggctgagccgttttgccccaaaacgagagaggaagtcctggctgagcaaggttgg

SEQ ID NO: 850366 - DNA, 98 bp, Homo sapiens
gactcagaggccgccatcaaccgccagatcaacctggagctctacgcctcctacgtttacctgtccatggtgggagctgctctaagaccagccttttc

SEQ ID NO: 850367 - DNA, 100 bp, Homo sapiens
accaaacccaggaggagactctccctggaaaacttcccttccctttcgcttttctgcaattagataaaaaaggaccacaaaaacatcactttgatcagcc

SEQ ID NO: 850368 - DNA, 98 bp, Homo sapiens
cctgggttatgctcaaggaagactagagatttgcttggaacggtagaagaaatccttccaagcctctcagaaaatatcagtgtttgggggatgaaaga

SEQ ID NO: 850369 - DNA, 99 bp, Homo sapiens
gtggcccagcatctaactaacacggtttttattgacagagctctgatagttgttccttgtgcagaagcccccaaatacatcaagatgtttgtactggat

SEQ ID NO: 850370 - DNA, 98 bp, Homo sapiens
ctcccttcagctttggtccctcggggcgtctgggcagcctacgctttccggatgaagaacaagctgtggtactttgaatttggcacctcggagacttt

SEQ ID NO: 850371 - DNA, 99 bp, Homo sapiens
aaacattccctattcctaaagctttcgttggcaatcaactaccttttgtaggatttacatattatagcaatcgtaggtgggaacctaaattattctgca

SEQ ID NO: 850372 - DNA, 98 bp, Homo sapiens
gcagagacaggccgaggagacgcgggccttcgagcagctcatgaccgacctcaccctgtcgcgggtacggacattgctgcaggagaagaggttgccat

SEQ ID NO: 850373 - DNA, 98 bp, Homo sapiens
gccggggccgccatggagcccgactcggtgattgaggacaagaccatcgagctcatggcctttgaactggccacaggtgactatttgtttgaacctca

SEQ ID NO: 850374 - DNA, 100 bp, Homo sapiens
gggaatacccactttgctgtggtcacagtggagaaggaactgtacacttgggtgggtctggtggttccagtcatcaggaatgtggaagctatgaattttg

SEQ ID NO: 850375 - DNA, 100 bp, Homo sapiens
attctctcctgactcttctatgctgtgttcagtcggagccagtaaagcaggacttatgtacagcatttgggaaggatgtactgaaattagtagaagctag

SEQ ID NO: 850376 - DNA, 100 bp, Homo sapiens
catgagacagtagtcaaatactcaggtatatgccctcattttgcttaagacctctggccagagcagggcatggaagattccttttaaaaagtaatactga

SEQ ID NO: 850377 - DNA, 110 bp, Homo sapiens
tgatgatgaggacatgctggctgacagcatctcaggagtgggacctgatgcagaacatcatgaatgacatgccgatctacatgtactccgtgtgcaacgtgatgtctggc

SEQ ID NO: 850378 - DNA, 100 bp, Homo sapiens
ggacgagctggagaaggccatcaccacgcagaacgtcaacaccaagtgcatcaccatccccaggcttgtaatgagccagtgctgcgccgtgttgctgtgg

SEQ ID NO: 850379 - DNA, 100 bp, Homo sapiens
gatcttcacattggaacaaggagaagatccatggttattagagaaagagaaaggatttctaagcaggaactccccagagccagcccctgggcaacaaagt

SEQ ID NO: 850380 - DNA, 100 bp, Homo sapiens
gaaacaggacatacacatggacacctgtcaatggcacagattacaggactctgacttgaagaaaacagtggatgaaagtgcacggattcagagagcatac

SEQ ID NO: 850381 - DNA, 98 bp, Homo sapiens
ctaagcaaaaccctgcagaacggctgcctaatttacagcaaccatgagtattggtaaaggttttcaaggtgtcatgaaaagatggggatttaaaggcc

SEQ ID NO: 850382 - DNA, 100 bp, Homo sapiens
ctgactatgaccccaccattgaagactcctacctgaaacatacggagattgacaatcaatgggccatcttggacgttgttgacctcctgtactggagaga

SEQ ID NO: 850383 - DNA, 100 bp, Homo sapiens
gacaatagccgcaacctagttggcagaggaagctcaccccgaggaagtctctcgccacgactgtggatattcataaggagaaagtggcacgaagagagat

SEQ ID NO: 850384 - DNA, 100 bp, Homo sapiens
tccgcgggggccccgaggacgcggaggtggaggtagagccgtgcaagtttgccggccccagggcccaggcaaccactgagaaaacggaaccgaatagtca

SEQ ID NO: 850385 - DNA, 100 bp, Homo sapiens
gaataacacagagacgggcacatgccagggcagctcccccagtgaccgtcgagactgctacaagtaccaggtagagcagctgacagaagagcagaaaaat

SEQ ID NO: 850386 - DNA, 99 bp, Homo sapiens
aagagaactgtctcctggtgaccgagcacccgcctccgggcatcttcaactgtactccaaagattcaggtttactcacgtcatccagcagagaatggaa

SEQ ID NO: 850387 - DNA, 99 bp, Homo sapiens
tgcactatggaaaccgagtcacagacctcatccaccgggagtcagatgagtttcctagacaaggagcggagggcacagtgttccctaaatctatagaaa

SEQ ID NO: 850388 - DNA, 98 bp, Homo sapiens
tcaccggagtgcccgagggggaagcacgatttacggaaggaaactgttaaggcagcaataatagaagagcagaaacgaagtgaaaaggctgtggaaga

SEQ ID NO: 850389 - DNA, 100 bp, Homo sapiens
agcaaagcccccacgcccagccaggagcaccgccgaggactccagcacaccgaggatgctggctccacctggaccagggattcatgtggagtttccttgg

SEQ ID NO: 850390 - DNA, 100 bp, Homo sapiens
ggccctacatgattgtaatggagatgtgaacaaagctatcaatatattgctggaagggaattcagacacaagggagacgtggtgggcggtccttcctgtg

SEQ ID NO: 850391 - DNA, 100 bp, Homo sapiens
actgactcctacttcctctgtatagagcaactgttgaactcagctgcctgtagtgtggcaaagcgctccctggcctttcaaagcaagaggactgctgtgg

SEQ ID NO: 850392 - DNA, 100 bp, Homo sapiens
atataatggccaagaggaatcagaaacctgaagttagaaaggctcaacgagaacaagctatcagagggtggtgaaggcagatattgtaaactacaaccag

SEQ ID NO: 850393 - DNA, 98 bp, Homo sapiens
tggagtcttgttcaactgagaacttggagcttcggaagaaggtagaggttctagagaacactaatagttggcgagctttagcccctctcctccttctc

SEQ ID NO: 850394 - DNA, 100 bp, Homo sapiens
tggtccatcaaatttttggagggtatctcagatcacgcggaatcagtttagacttgaaattcagtttttcctgaaactgatcagaagttagtgacacctt

SEQ ID NO: 850395 - DNA, 100 bp, Homo sapiens
ctgctgagccccatggattcaacctctttcctagggtgtgtcccggcatggatatccggaacaacctcactaggttgcatgagctggagaattgctctgt

SEQ ID NO: 850396 - DNA, 99 bp, Homo sapiens
gcgagtgaggaaaggaggtactgtagcagatgacaacactctaggcatcctgatcggggtcctggttgggagtcttctggtggctgcacttgtgtgttt

SEQ ID NO: 850397 - DNA, 100 bp, Homo sapiens
ggtgtgggacttgtgggccaagcaggagggaaagaatttcctcagtatgtttcagaaaattatcctgagagacagaactgttcaggacactttaaaaacc

SEQ ID NO: 850398 - DNA, 100 bp, Homo sapiens
aatcggagttgcagccaaaaatcaggtcatcatcagatttgaaatatttaaagtggatacaaaactatttcagcaatgcagacaattaagtgtgttgttg

SEQ ID NO: 850399 - DNA, 100 bp, Homo sapiens
tacagaaagagtcaacagcagtggcaacagaagcatcaagtgtacctgatttgtgaacctatcttgcttcagttggtttcctcctaaatattaggcagat

SEQ ID NO: 850400 - DNA, 99 bp, Homo sapiens
gaggccgtccagcagatggcggatgccctgcagtacctgcagaaggtctctggagacatcttcagcaggttgaaggtcgaggagctggaaggcgagcgg

SEQ ID NO: 850401 - DNA, 98 bp, Homo sapiens
gcgcggcgctggactggagcagaaccccaggactgcgcccccgggagcgggcgcccagaggacgcacagacattcgggtgcttcagccagaacaaccc

SEQ ID NO: 850402 - DNA, 99 bp, Homo sapiens
tgggatattatcgatgagttcatctaccagggcccttctagcccaatccagagctgtaccatggcagagacaagagaagaggagacagtgtcagcagaa

SEQ ID NO: 850403 - DNA, 100 bp, Homo sapiens
gaccttctgccatgattgtgaggcctccccagccacgtgaaacttgagcatgtttttgaacacattaacaccgaagttctacgtggccctaacaggcact

SEQ ID NO: 850404 - DNA, 100 bp, Homo sapiens
atttcatccaccacattacttaggtgccgacgccaccgccgagcccatgatcctggaacagtacgtggtggtgtccaactataagaagcaggagaactcg

SEQ ID NO: 850405 - DNA, 99 bp, Homo sapiens
tcaggacaacccagatgtgcaacaaagtgcgatggagcatctttccttgaagaagtacattattgacattgtggttgaaagtacagctccagcagaagc

SEQ ID NO: 850406 - DNA, 99 bp, Homo sapiens
tgtgttcttctctggactccttagatgactctgtggtgggtccctcagcccttctgagctctgtgctgaacaagctactggtcagaagttatatgtaag

SEQ ID NO: 850407 - DNA, 100 bp, Homo sapiens
ccgggccgggggcatcgagaccatcgccaatgagttcagcgaccggtgcaccccggaaaacgggtggctggaggccctcagatgatccagctcagcctgg

SEQ ID NO: 850408 - DNA, 100 bp, Homo sapiens
tagacccagcacagaagtgcctgtacaggagtgtgatgttggagaactatagcaacctggtgtccctagggcttgataagatgatggtggataaggatgg

SEQ ID NO: 850409 - DNA, 100 bp, Homo sapiens
tcgtcgggagtgatcacctaccctacagcaaatctccttggaccggctgttgggggaaaaaagtgttagccgtctctcccggatctgcaagggggaaaaa

SEQ ID NO: 850410 - DNA, 100 bp, Homo sapiens
actcctgctctccgagaagcccttactaaacaaggttgctccttgagggcaggacagttcttatggctttatccgttgcgtaagcacagagaggtctgcg

SEQ ID NO: 850411 - DNA, 100 bp, Homo sapiens
agatgacactgaagacaaatttttttgccactagaaacatgtgcaacgagttactgccgataatgaaacctcatggtgatggaggacgaggagaaggcag

SEQ ID NO: 850412 - DNA, 98 bp, Homo sapiens
ggaactgaatatgatcatcatgcttccggacgagaccactgacttgagaacggtggagtacatcttcacagacaagaccggcaccctcacggaaaaca

SEQ ID NO: 850413 - DNA, 100 bp, Homo sapiens
gtgggtgccgatttctgtctctggtacttaaacttcacccttgtttagcccctattaaggttgctttggatgtaggaagaggccccacattggaactaag

SEQ ID NO: 850414 - DNA, 100 bp, Homo sapiens
cagccttcctgcataccctggaccagcagaaacctagagtgcatcgacaccccaggagtgattagtcgtgtgtcccagctattcaaaggccaccccgatc

SEQ ID NO: 850415 - DNA, 99 bp, Homo sapiens
ttaggaatgcgccttataggaaatacaagccttatttaccacttcataccaatggtcgacgatggctgctttgctggctctgcaagaaaatggactaga

SEQ ID NO: 850416 - DNA, 98 bp, Homo sapiens
gttattcgagtgaccgagaccgcggccgggaccgagggtattagaaaactactcggatgctccaatgacaccaaaacagattctgcaggtcatagagg

SEQ ID NO: 850417 - DNA, 100 bp, Homo sapiens
ggcagcttcgtggcgtgtgcggtttcgacccggtcacacaaagcttcagcatgtcatgtgccggttgttatgacaatggaaaacactatcagataaatca

SEQ ID NO: 850418 - DNA, 101 bp, Homo sapiens
tcgggagctcatcttcgtggggcgtgaggagtgtgagctcatgctacaggcctcaggcccaggcccaaggccaagtgagagagcccaggccacaggacatg

SEQ ID NO: 850419 - DNA, 100 bp, Homo sapiens
tgcttgtccacacgacgctgcatggagtactggcccttggagctcggtaagagcttctgttcgtgtgcagggaaagcagctcacagacgccgttaaaacc

SEQ ID NO: 850420 - DNA, 100 bp, Homo sapiens
caatacataaagaacagcgtaactccagacatgtcactctctgaaagagaacaaagtaattttctgaagggaagctgcagaatatggaaaacatatattg

SEQ ID NO: 850421 - DNA, 98 bp, Homo sapiens
gggaggcgcggagcgcgcgtgtggtccttgcgccgctgacttctccactggttcctgggcaccgaaagcccaacctcagcgcttgcctcagcttcaga

SEQ ID NO: 850422 - DNA, 99 bp, Homo sapiens
aagaaaaagagcaaagataagaagagaaaaagagaagatgaagaaacccagcttgatatgttggctatggccactcggacgcagatgttctgcaccagt

SEQ ID NO: 850423 - DNA, 100 bp, Homo sapiens
ggacctggaaatgtacagaaagaagtctcatcttcctttgaccacgttatcaaggagttattcattttggacctggagaaagttcttcagaagatgctgt

SEQ ID NO: 850424 - DNA, 98 bp, Homo sapiens
ttattccacgaggaggagtacctggaaattaggccataaaattttgagtagaaaaatccagaaatttgaaaatcagtatcgtggtagagagctgccag

SEQ ID NO: 850425 - DNA, 99 bp, Homo sapiens
gacatcatgagggccgttaccattacgatccatctccgattcctccattgcatatgccatggctgttatcttctcaaattttagcattataacaacagc

SEQ ID NO: 850426 - DNA, 100 bp, Homo sapiens
ctggaaagttcctcaagatggagactttgactttcttgaagtacaatcttgttgtgtgtttattccaaatgatagcctgccttccccaagtacaattgta

SEQ ID NO: 850427 - DNA, 100 bp, Homo sapiens
cctcctttttggtttggttttggaactgactccgagggttgggagagcgcgttggtggcgacggccgagtcagatggatagctcccagttgatccattgt

SEQ ID NO: 850428 - DNA, 100 bp, Homo sapiens
ctgactccacttctatggtgagagagaggagtgcatcaaagattactcccagggtctccctctgttgtccaaggctggagtgtagtagtgctatcgcagc

SEQ ID NO: 850429 - DNA, 100 bp, Homo sapiens
gatgacctgccggggctggcacactttttggagcacagtgacttgatggagggtgagctctattctgctctcaaggaagaagaagcatccgaatcggttt

SEQ ID NO: 850430 - DNA, 101 bp, Homo sapiens
gctgccgccatacgcgctctccctgtttaggattggaggctgttgtcattggagaagttcatgagaatgttactctgcactgtggcaacatctcgggactg

SEQ ID NO: 850431 - DNA, 101 bp, Homo sapiens
agaagaacaagaagtaggcattgaccccttgtccagttactctaacaagtctggaggtatgaacgctgccgtccgtgccgtggtgcgcatgggtatctacg

SEQ ID NO: 850432 - DNA, 100 bp, Homo sapiens
ttctagctttgtaggagcatggcttggagcacttcctattccactggattgggaaagaccatggcagatactggtagacacagtctgggccctctcttac

SEQ ID NO: 850433 - DNA, 98 bp, Homo sapiens
cataatggagctactgtactggctattggaaggaggagattctgaagataaggagggtaatgccctgtacttcaagtctgccagaaatgttacagtga

SEQ ID NO: 850434 - DNA, 100 bp, Homo sapiens
gaccagctctctcttcagaacagagccaatggcttggaatgagcaattctgtggtgttcttggtcacacatttatggagtttctgaagggcagtggagat

SEQ ID NO: 850435 - DNA, 100 bp, Homo sapiens
ggagagaggccgcgtcctgggcagagagctgacgtccctgcgcctgtgcttcccccaggtggagccccacgccaccattgcggagatcaagaacctcttc

SEQ ID NO: 850436 - DNA, 99 bp, Homo sapiens
tggtgatggccgtggtgttttccaccttggtgtgtctcagcaggctctacactgggatgcatacggtcctggtgcgagaagatgtactaaattcattga

SEQ ID NO: 850437 - DNA, 100 bp, Homo sapiens
acacctactttatagtcctgattcaagtgttggcggatggaagggaggagactcctgaccctcagaatggaaatgggtcctgatgaatatgaagagatgg

SEQ ID NO: 850438 - DNA, 99 bp, Homo sapiens
aaaaacctgagaacttcctgatctctctcgctgtgagacatgtctgagactcctgctcagtgtagcattaagcccaaagcagtgtccacaccagcacca

SEQ ID NO: 850439 - DNA, 98 bp, Homo sapiens
ctgcaagactctggagccagtcttgaggtcctacatctccgaaagcaagctcttctagaagttgggtgggtatatggctgccaaggtccagaaattgg

SEQ ID NO: 850440 - DNA, 98 bp, Homo sapiens
tgcctcaggagcggaacaacgtcggcgagcgggctgcaagctttcttcctggtggcagatgacatcatggattcatcccttacccgccggggacagat

SEQ ID NO: 850441 - DNA, 100 bp, Homo sapiens
gagtacaacctgaacttctcaggaagcagtactattcaagagaatcgcctaccagaggaatgacgatgatgaagaggaggcagcccgggaacggcgccgc

SEQ ID NO: 850442 - DNA, 100 bp, Homo sapiens
caagttgctgcttcagcaaaacaagaaatttcaaaacttgatcaaggatctcatagatcagaacatactggagcctgtaacccgtgcacagagggtgtgg

SEQ ID NO: 850443 - DNA, 100 bp, Homo sapiens
gcagcccttgccttgagtcagtgcgccgctctccagcccgcttgaacgattattttcgaaataccagtatttcgactccagggggatgttcatttctata

SEQ ID NO: 850444 - DNA, 100 bp, Homo sapiens
atcaacctggagctctacgcctcctacgtttacctgtccatggaggttccccaatacaactcatgagggtttcaatgtcaccctccacaccaccctggtt

SEQ ID NO: 850445 - DNA, 98 bp, Homo sapiens
agaaggagagcaattgaccttgaaattaaagagcgagaagctgaaaattttcatgagataatcttccttcattctaattcaattgcaagagtgggagt

SEQ ID NO: 850446 - DNA, 100 bp, Homo sapiens
tcgtgtctacggcaactccacagagaatctggtggacagtaacaaactttggtgaaatttcaggaaccatagccattgaaatggataagggaacctatat

SEQ ID NO: 850447 - DNA, 98 bp, Homo sapiens
gagctggtgcagcaggaattgggatcgtgtcgctgcggtttcccaaaccactccttatgatccagtgaatattcaagagagctacatttgaagcctgt

SEQ ID NO: 850448 - DNA, 100 bp, Homo sapiens
cgccgcgtcttcccggtctcctttcccggccgcacaggggtgataaaagaaaatgtggctgaagttacccgaagttcagcttgcagtgtaattcagaaga

SEQ ID NO: 850449 - DNA, 100 bp, Homo sapiens
ctggacttcatggacacctttgagcctttccagggtatttcagtgtctgtagacaagatggaatcatctccatttaatagacggcaatggacctcactat

SEQ ID NO: 850450 - DNA, 99 bp, Homo sapiens
agctccacccatcaccccagaacaccccgcagaaagtgcctgtgcatcaggccaacccatggccagcacagacatgatggaataaagactgagcactac

SEQ ID NO: 850451 - DNA, 51 bp, Homo sapiens
ggcggccgcagctgccacaaaccagattacatgaagcagatgacatttgaa

SEQ ID NO: 850452 - DNA, 98 bp, Homo sapiens
tgactcctacttcctctgtatagagcaactgttgaactcagctgcctgtaggaacttggatacgattggtgttgctgttgatttgattcttctgtttc

SEQ ID NO: 850453 - DNA, 100 bp, Homo sapiens
ctttgagcgcgccctggtcgagaactgccttgtcccagacttatggatccgttacagtcagtacctaaaactaattctgaagcaagcccttatagttgtg

SEQ ID NO: 850454 - DNA, 100 bp, Homo sapiens
aataaacgcctgaaagaagctacctgcaagctctatttttaccagatgctcttggctgtgcagttgtggacatcggatacccaaggagacgaagctgaag

SEQ ID NO: 850455 - DNA, 100 bp, Homo sapiens
ggtgctgctgcagatcgacaaagatgtccggctttcttcgagagtcacccagctccttcagctgagcgtaccatccagcagtgttgtgaaaatattctgc

SEQ ID NO: 850456 - DNA, 98 bp, Homo sapiens
ggcgcggcagagtccccgtacgcctacagtaacgggtcctctgccctgcggacctgtgagcagcccctccagtgtgagattttccaccagttgggatg

SEQ ID NO: 850457 - DNA, 100 bp, Homo sapiens
tggattccctggatttcctggcgccaatggagagaagggcggcaggaggcctgtgggagcaaatctgtgtatgacggcccggagcaggaggagtattcga

SEQ ID NO: 850458 - DNA, 98 bp, Homo sapiens
caaattgctgcttgtccaaatcaggatccactgcaaggaacaacaggtgctggagaatctggtaaaagcaccattgtgaagcagatgaggatcctgca

SEQ ID NO: 850459 - DNA, 100 bp, Homo sapiens
agctcacagagctatgaacagaatatcaaacagattggcacctttgcctctacttccatggagtcactgattcatcactttaagttgtatactgagggct

SEQ ID NO: 850460 - DNA, 100 bp, Homo sapiens
cctagaacagtgccctctgcagctgaataacccttttaacgagtattccaaatttgatggcaaggtagctacagcaagctgggtagcaggcagatccaaa

SEQ ID NO: 850461 - DNA, 100 bp, Homo sapiens
catctggtcacctcccactgcaccaaacggtgaggggaagtggcttcgaaacattgactattaccgtttagatggttccactactgcacagtcaaggaag

SEQ ID NO: 850462 - DNA, 100 bp, Homo sapiens
tcgggagtccttggaactgtggtccatggtaaagttttacaggtatttcgaaaaaagcctggttttggtacagctcttccagaacccacgggaagaacct

SEQ ID NO: 850463 - DNA, 98 bp, Homo sapiens
tgccaccaacagaataaaataaaagatcttcaaaaggagcagaaaactttacaggtattactcagcacagaaattcaggagacacagacaagttcttc

SEQ ID NO: 850464 - DNA, 100 bp, Homo sapiens
gtcgacctgacttcttttgagcagttggcactacccgtcttgaggaatgactgtttgcaacctctaagcatgcaggctctcccagcccagcctgagtcct

SEQ ID NO: 850465 - DNA, 50 bp, Homo sapiens
aagtcggcttccatgcatccctaccagcgatatttcacagttcttgccga

SEQ ID NO: 850466 - DNA, 100 bp, Homo sapiens
gcgactttggccggacttttgctaactgcggcgggcgagacgttctcaggtgttcttctctatgggcctccaggctgtggtaaaacgttgattgccaagg

SEQ ID NO: 850467 - DNA, 100 bp, Homo sapiens
cctcaaagagctctggtccttgctgcactttattatgccggagaatctgcgggccaggcatcgacatccgcaacgactatcagcagctgaagcgcctgga

SEQ ID NO: 850468 - DNA, 102 bp, Homo sapiens
tccccatcattgtttgcggcataactgcagcagcgaacattaagaattacggcagtcggccaaacgcaccctagtgggaatgagatctcgaaaccaaggtgg

SEQ ID NO: 850469 - DNA, 99 bp, Homo sapiens
gttcgggtatgaggctgggactaagccaagggattcaggtgtggtgccggtgggaactgaggaagcgcccaaggtatcagaagagcaaggtcaagaaaa

SEQ ID NO: 850470 - DNA, 100 bp, Homo sapiens
atggaggagaacctcatggatgttgagagtttgttccagaaatatcacagtaggcgtagctcaaggatcaaagctccatctcgtaacaccatccagaagt

SEQ ID NO: 850471 - DNA, 74 bp, Homo sapiens
cagccaggtccttcttctaatattattggccagtctgtggaagaagctatcagctgtgttggggtggaagagga

SEQ ID NO: 850472 - DNA, 100 bp, Homo sapiens
cttgccggctccctacggtgccgtgtgtgcgtgagagaagaccagtctttcctctaggaaaacctcacagcacgggtagctctgaacggattcagctctc

SEQ ID NO: 850473 - DNA, 100 bp, Homo sapiens
gtccacctcccttcagaggcagaaacacagcaatggatgcacaggaagctttagctagaagattttggaaccagtactagcagtggaggactctttggaa

SEQ ID NO: 850474 - DNA, 101 bp, Homo sapiens
aacagataatcgtccacgtaatccaagagaggctaaaggaagaacaacagatggatcccttcagaataacaagcctttgtattcatttgaagataatgcag

SEQ ID NO: 850475 - DNA, 98 bp, Homo sapiens
ggagagtgagagaaaggctggaagacgaggcaaagatgccttttgatgccaacaaactgtattgcagtgaagtgctggccatattgctccaggacaat

SEQ ID NO: 850476 - DNA, 99 bp, Homo sapiens
gaagacaaagagtggacatttgtcatagaaaataaatctcctgcaaagaagctgagccatgcaattagtaaatctttggggtgtgtacccacgagagaa

SEQ ID NO: 850477 - DNA, 122 bp, Homo sapiens
cgggaaccccgagaggagagcccagcccctggtggaggcggcttggcggagattcggagccgtcagcaggtgagacgtggtcttgtaacacagtggttaagaatgtgactttggagccagcc

SEQ ID NO: 850478 - DNA, 100 bp, Homo sapiens
ttgtggtactggagggtagtaccgcaacctttgaggctcacattagtgattttaccaaatgttgcaagaactctggagttcttatggtagtaaaatgccg

SEQ ID NO: 850479 - DNA, 100 bp, Homo sapiens
ttaaaacaaacacagccagagcgatatattcatctggagaaccttttggccaggtcttactttgatcctcgtgagtactatggactacaaattttggaaa

SEQ ID NO: 850480 - DNA, 100 bp, Homo sapiens
gattctgctggggtggaactgctgtccatcatttgatgatgaaatactcagaattcagggcaggggtgtccgtctatgatgctgctgcagattgctgatg

SEQ ID NO: 850481 - DNA, 100 bp, Homo sapiens
tctgggcttcaagacacccaaggagattatgtttgagaccttcaacaccccggccatgtacgtggccatccaggccgtgctgtccctctacgcctctggg

SEQ ID NO: 850482 - DNA, 99 bp, Homo sapiens
ttccatcggtccttacagccgctcgtcagactccagcagccaagatggtgaagcagatcgagagcaaggactatcctattaagtgtaatctcactgctt

SEQ ID NO: 850483 - DNA, 100 bp, Homo sapiens
accttcaatccagttccaaggactccacgggacgtatttcattagctagtccacgtcagctttttaaggcttctaatatgacccagcgatggcaacacag

SEQ ID NO: 850484 - DNA, 100 bp, Homo sapiens
ttacgtctctgctcttcagtacaatcctagtactgggatttaatgaatttgtctgaaaaacatgataagataccagaaatctgggaaggccataatatag

SEQ ID NO: 850485 - DNA, 100 bp, Homo sapiens
cttctcttctgagcagaagcagctgttgaagtctggcaagttctccggcagttctccggcgcccccaagccagccgcagggtctgagctatgcggaggac

SEQ ID NO: 850486 - DNA, 100 bp, Homo sapiens
agaaatctgggatggattccctgatggctggttgaactcatggacctgatacttttctcttgagaagcaaaccagcccaaaagaaaaatggcgtttgttg

SEQ ID NO: 850487 - DNA, 100 bp, Homo sapiens
ggacctggtgtgggatgggagaactccgctgagaccctgcaggaacacgaaacagatgccaaccgagagggaagagcagcgaagaggcacaaaaagagag

SEQ ID NO: 850488 - DNA, 100 bp, Homo sapiens
ccatccgggcgccacagaagcacgtcaccttctaccaggacctggactggctgactcgctatggttacctgccgccaccccaccctgcccaggcccagct

SEQ ID NO: 850489 - DNA, 98 bp, Homo sapiens
gctgcgcacggactgctggagatggtggagtccgtcatgctgaagacgtggtggcccgtgtgccaggaagtcagctcacgctgggctacatggaggag

SEQ ID NO: 850490 - DNA, 98 bp, Homo sapiens
cgcaggcccagatgcgcgcgatgctggaccagttgatgggcacctcccgggacgttactaaaccaaggagatttaactgaaagacggacatgagcgtg

SEQ ID NO: 850491 - DNA, 100 bp, Homo sapiens
ggtgcagcagatcatgagtgacccagccatgcgccttatcctggaacagatgcagaaggacccccaggcactcagcgagaaggtgaagcagatgcacctt

SEQ ID NO: 850492 - DNA, 100 bp, Homo sapiens
ttcggcgagtgcttaacctacctcccaacaccattatggaatacaaaactcacaccgacagcatcaagttcctcagtggtgtgctgaatattgtctttcc

SEQ ID NO: 850493 - DNA, 100 bp, Homo sapiens
ctggaccctgcccagcagaatttgtatagagatgtgatgttggagaactacagaaacctggtctccctagatcgatgctatagaagacaaacaagggaag

SEQ ID NO: 850494 - DNA, 98 bp, Homo sapiens
tgtaccctaaatatgggagataagaagtatgaagacatggaaggatgaagtgaagctgccggccaaactgagcatcagcaaatcgctgaaagagtcgg

SEQ ID NO: 850495 - DNA, 100 bp, Homo sapiens
acctgaaacctcaccttgcacagctcacagggagcaagcagattgaatgtaagtgacttggaaaaggaagaggagttgccagaaacagctaaaatgtcag

SEQ ID NO: 850496 - DNA, 100 bp, Homo sapiens
atgaaacgaatgcataaagctgtccagaaagatctgccaagaccatcagaaatgtgtcttgctgaatcagggctctcttatccctgccatcgacttacag

SEQ ID NO: 850497 - DNA, 100 bp, Homo sapiens
ttcacatgtaattcagaaattagggacagcaatgtacaatgcctgccgggatgtggaggccccctcaagtaatgacaaggccctgggactcctgtgtggg

SEQ ID NO: 850498 - DNA, 99 bp, Homo sapiens
gataagcgctttcgcttggcgctgggcagcttcgtggaggagtacaacaacaaggagttccgattctgaagaggcatttgagaccccggagtcaacgac

SEQ ID NO: 850499 - DNA, 99 bp, Homo sapiens
gatgatcgagaggatctggtgtaccaggcgaagctggccgagcaggctgagcgatacgacggacttggatgttgtgggtgatggtatgcagtgtcctcc

SEQ ID NO: 850500 - DNA, 100 bp, Homo sapiens
acaataggattttactgtcgaaatgttcaggacttcaaacgagcttctgaagaaatcaccaagtctgaacaggaattaagaataactcaaagtgaatttg

SEQ ID NO: 850501 - DNA, 98 bp, Homo sapiens
cctggaaacgaggcactcagttggaagagtccagcaagggaagaaggagaaagggccaacccctgaagaagcaatacagaaactgaaggagacagaga

SEQ ID NO: 850502 - DNA, 99 bp, Homo sapiens
tgggtgctgatctccaggatgacatgcgaagatgccaaatcatccgagacatgattggaccggaaaagactttggcacttgaaaataactatgaagtta

SEQ ID NO: 850503 - DNA, 100 bp, Homo sapiens
gaggctgaggcatccgggagctggcgtaatgcctggccgcagtgtgattctcaaagttggattggtggaaacaatgaaccattgacaggctttacatggc

SEQ ID NO: 850504 - DNA, 100 bp, Homo sapiens
tctcctgactcttctatgctgtgttcagtcggagccagtaaagcatgtaaacaggaacatcgataagtagtgtaaaaacttgcacaatgaaatccgaagc

SEQ ID NO: 850505 - DNA, 98 bp, Homo sapiens
gacacacattcatgtcgtgagttgctaaggatagcagacaagttcacccaacataactttcaagagatcctttcccggagttcagttatgggtgtgag

SEQ ID NO: 850506 - DNA, 100 bp, Homo sapiens
gcatctacaaccctgaagtgcttgatatcacagaggaaactctgcattctcgcttcctggaggtggctctcgggggctggtccatgggcggctgtggcgt

SEQ ID NO: 850507 - DNA, 99 bp, Homo sapiens
tgtcaaagacttagcttttaaattaaaaaggaagctattcaccattgagactatagtgataaaaacctgtgctacacatccatttctcagcaacggctc

SEQ ID NO: 850508 - DNA, 98 bp, Homo sapiens
cagaagaagagcagaaaatagcagccaggaaccaagaaaacttggagttccgattctgaagaggcatttgagaccccggagtcaacgacccctgtcaa

SEQ ID NO: 850509 - DNA, 117 bp, Homo sapiens
agtgaaaatacagccaagatcttggcaaagcttctccctcagtatttagaccagtggtccatgctgtggacggcaccgccgagaacgggatccaccccctgagctcctccgaggtgg

SEQ ID NO: 850510 - DNA, 98 bp, Homo sapiens
aaaaaatgaatcaaaagaaaatctctaaatgcagattccagaaaaattacagcacatctcagtgaatttgcaagtgatcggaagttgcacccatcaaa

SEQ ID NO: 850511 - DNA, 100 bp, Homo sapiens
atcatcaaggccttcagaaacatccctggtggaatgaatcttacttgttgaatatcttctggttactagttggattcatttgtgaaagaatcattttccc

SEQ ID NO: 850512 - DNA, 98 bp, Homo sapiens
ggcaaacgcctggatcagccacaaatgtacccccagtacacttactactatcctcattatctccaaaccaagaccctcaaactgacacaagacctaca

SEQ ID NO: 850513 - DNA, 98 bp, Homo sapiens
atcagtggattgaaggctactgcaccgtggagctgaggccaggaacaggccatgaagagggctcatgactgggtggaagaggatcaaaccgtggtgtc

SEQ ID NO: 850514 - DNA, 100 bp, Homo sapiens
cctgctgcacccacgaatctgcccacccctcctgtaacccagcctgtttcacttcttgaacactcctatgccaccttcaccagctgtacaagtgcagggc

SEQ ID NO: 850515 - DNA, 98 bp, Homo sapiens
ttctccaggatggcagaggcggaattgcacaaggaaaggctgcaagccatagcagatgttgcttcagagtgtgaagtcaaatgcatgccaacattcca

SEQ ID NO: 850516 - DNA, 100 bp, Homo sapiens
aaagaccatgcgccggaacaccattcttcgccaggccaggaatgtttatgatagttctcaatctcatgagagcttctcagactggcgaggtgaactactg

SEQ ID NO: 850517 - DNA, 99 bp, Homo sapiens
ttgaagtggcctatcccaggacaggtggcactctttcaggatctcattttgcccaacggtggtactccagcaggtacttcaagtccagcttcttcatct

SEQ ID NO: 850518 - DNA, 115 bp, Homo sapiens
gccgacatgaagaaagacgtgcggatcctgctggtgggagaacgttatggccacaccgtgcccttgtcagatggaggtaaggccttctgcatcatctactccgtcattggcattc

SEQ ID NO: 850519 - DNA, 100 bp, Homo sapiens
aagctgtctgtgaatgcccctgaattttacccttcaggttattcttccagttacacattggtagctggcagtgttgtgatggcttttgaagaagtatgcc

SEQ ID NO: 850520 - DNA, 100 bp, Homo sapiens
gtaccgactgcttttggaataaaaagattcccaggatgtgagcaacacgggaccgttggtgacaaagttcctgctgatataaggttaacttccatcaaat

SEQ ID NO: 850521 - DNA, 100 bp, Homo sapiens
gtgcagtcttatcgaaggatgtgcatgaaggacagcctcttctcaatgggaaatcctcattgacgattcaatttgttgaaggccaatttgtggactccta

SEQ ID NO: 850522 - DNA, 98 bp, Homo sapiens
agtcctgatgacacagccctcagcgagagtgccaaccaggccttcctgggtttccaggcctgaggtgcccgccctggccccaggagaatgaaccagcc

SEQ ID NO: 850523 - DNA, 100 bp, Homo sapiens
agagagccgtaggcaggaccccgggacaccctggaagccaggaaatggtctcggtccagctcgacttccagctcaggctccagcaccagcactggctcaa

SEQ ID NO: 850524 - DNA, 100 bp, Homo sapiens
tcaagaactggttatacttgaaaccataatgctacaaactctagcttcaaaagcagtggactgtcttttggattcaaagtgggcaaaggccaagaaagga

SEQ ID NO: 850525 - DNA, 98 bp, Homo sapiens
cataaacgtcagtgtgcccaccacccttccctctgccacgcaggtgccgatggaagtccttaagcatgcagcagattggaataaatatgatgaccgat

SEQ ID NO: 850526 - DNA, 98 bp, Homo sapiens
cagaacaattctttagaagtggccatacaaacaactgggctgttctgagagaactcgatgccaccgcaacggtattggcgaaccggcaggatgaaagt

SEQ ID NO: 850527 - DNA, 100 bp, Homo sapiens
ggacagggagctggttggggaggaccagaaatcaggaatgccaagcaagatgtcgatgatgaatatggcgtgtcccaggcccttgcacgtggcctgcagt

SEQ ID NO: 850528 - DNA, 100 bp, Homo sapiens
ttggagaatgtctttcctgacttaagggctcccattgtgagagctagtggtgtgatcgttctgcagtgggagcgtgtgactgcggaagctgtgaagccac

SEQ ID NO: 850529 - DNA, 99 bp, Homo sapiens
gcagaaaccccgttgacaaggcactgctttttcatgacggccatgtcaaaggacgccctgaatctggcgcagatgcaggagcagacgctgcagttggag

SEQ ID NO: 850530 - DNA, 100 bp, Homo sapiens
ttcccccaaagaagaaacaagttatttcttgtaatgtctgtcagcttcgctttaactcagatgtgtgccaaaaggttgaggcctctgggtttgaattcac

SEQ ID NO: 850531 - DNA, 100 bp, Homo sapiens
ggcctccaccctggcaggaatcccaatttgcctccacttagtgagcggaagaatgataacggaggagatgatggatcaggcaaatgataaaaaagtggct

SEQ ID NO: 850532 - DNA, 99 bp, Homo sapiens
ttacaacaggtgctccagctgaaggtgcgagaagaagtcagaaatctacagttactcacacaagggctaaggaatatgagagtttaatggaaaccaaaa

SEQ ID NO: 850533 - DNA, 100 bp, Homo sapiens
cggaagaatggcagtgctcaaactcaccgaccagagagaagaggtactcccttatagggactcgtaaagacatagagcatctggaaattaactgcctcca

SEQ ID NO: 850534 - DNA, 99 bp, Homo sapiens
ggttatgaaatattttgtgttacttgtaacagttcaaagactctgcttgcctcagcttgtaaggactttgcctcccgggccaaactggcagttcaaaaa

SEQ ID NO: 850535 - DNA, 98 bp, Homo sapiens
gcagaagaacaagaagttgagaccgagaatgtggaaacagctgttccatttcctccaagtcaccggcttacagcaaaagaagtgtttgataatgatgg

SEQ ID NO: 850536 - DNA, 99 bp, Homo sapiens
cgactcttcgggaaagcgaaacccaaggctccgccgcccagcctgactgactgcattggcacgggcatatcgatgcatttacttcaaaactttttctac

SEQ ID NO: 850537 - DNA, 98 bp, Homo sapiens
tactgtggtgaagaaagtgagcgaggagtcagaaactcagccactggttgccttggtaggcaataaaagatagtgacaacctctggtgggacgccttt

SEQ ID NO: 850538 - DNA, 100 bp, Homo sapiens
gattttcagttctgggaaaatggtgtgcacaggagccaagaggacataagcagctctatgaccaatagcacagctgccagtagacccccggtcaccctga

SEQ ID NO: 850539 - DNA, 98 bp, Homo sapiens
aaacaaggactctctgtataaggaaaacctcttttttgtgatggagtacctcaacggaggggacttaatgtaccacatccaaagctgccacaagttcg

SEQ ID NO: 850540 - DNA, 100 bp, Homo sapiens
gtacttgaagatttgcataaagccaacattcgcaccgtcatggtcacagatgtacctgtgtggtctaagctggaatctggtcaccttccatccatgcaac

SEQ ID NO: 850541 - DNA, 99 bp, Homo sapiens
tcctcgccagcagccgtccggagccagccaacgagcggcacataaagttaacagcctattggatgcatactcaggcctgttaagtaatgaatccatgat

SEQ ID NO: 850542 - DNA, 100 bp, Homo sapiens
agagtaggcacgtcaaaagttttggagtattgtgaggattgagatgactggagtgtgtgtggcctggagagttgctcaataaatatatgttgccttccac

SEQ ID NO: 850543 - DNA, 50 bp, Homo sapiens
tggaggtgccctgagctctgccacccccagctctaccaggagatccagga

SEQ ID NO: 850544 - DNA, 100 bp, Homo sapiens
gaactgactaatggggaagacacagaggatgaggaacaggccgcccgcctgaagaaactacaagagcaagagaaacaacagaaagtggagtttcgtaaaa

SEQ ID NO: 850545 - DNA, 100 bp, Homo sapiens
gaagacgagatccagttcctgcgaactgagtgtgaggaagaggctgtctgtgtcattatgtgtgcgtcggtcaagtataatatccggggtcctgccctca

SEQ ID NO: 850546 - DNA, 100 bp, Homo sapiens
ctgcgggatcttcaaccacctcgagcggctgctggacgaaggctcgggttatgtatgattttgctgctgaacctggaaataatgaactgacggttaatga

SEQ ID NO: 850547 - DNA, 60 bp, Homo sapiens
agctttgcgcaacgccaacctcaggcgagatgggggaatggtttcagctttcgcccattc

SEQ ID NO: 850548 - DNA, 99 bp, Homo sapiens
gtaatgaacttgctcacaacatccgccgccactgtgacttgcagtcatcatccattaccacaaaattaggtttgttggagactgaaccgttgcaaggaa

SEQ ID NO: 850549 - DNA, 100 bp, Homo sapiens
gggatggtcaacaggcagcacagccgaggcgtggtgtccctcgtggccgttcacccctccaccgtcaacccgctcgggaagcagctcttgccaaaaacct

SEQ ID NO: 850550 - DNA, 150 bp, Homo sapiens
tcgctcctcgatcgaggacgacttcaactatggcagcagcgtggcctccgccaccgtgcacatccgaatggcaactcaagcatcccaaccttgttaacctcctggaagtcttcaggaggaaacggaggcttcacctggtgtttgaatatt

SEQ ID NO: 850551 - DNA, 98 bp, Homo sapiens
gagaaaaatctcagctattcggtcatatagagatgtcatgaaggtgatctttgacgagactctacagaagtgcctggactcctacctgcgctatgtcc

SEQ ID NO: 850552 - DNA, 99 bp, Homo sapiens
gatgttcctcccttagaccgagaagtaggaggatttccagactgtattaccatcatttgagctcttctcaaagtatggaaaattatattcaaaagctgg

SEQ ID NO: 850553 - DNA, 99 bp, Homo sapiens
tgcctgtgtgagcagtctctggacaagatgaccacactccaggaatgccagtgcatcttttgcacagcttttgtatgccagaagaagggtttaaaggta

SEQ ID NO: 850554 - DNA, 98 bp, Homo sapiens
ggctgtggcaaatgtgactgccatggagtgaagggacaaaagttggttgaatctggcgatgtggaacccatggatatggagggctgactatatacacc

SEQ ID NO: 850555 - DNA, 98 bp, Homo sapiens
cagacagagctattccagcaccagcagaggtgagcgtcctgaccaccctggagcgtaggttcaacctgcagagcgctgacgtgggtgtgatcgctagc

SEQ ID NO: 850556 - DNA, 100 bp, Homo sapiens
ggggtcaacctcactctggatggggtcaagtcctggctgaagccacggctgggacaggaagccacaggtccatgcctttttagagcagtggggactcgtt

SEQ ID NO: 850557 - DNA, 100 bp, Homo sapiens
acgagcagtgatggctgaaaaggatgctttagaaaaacacgatcagctcttagacagctcctctggtgcaagtgtggtagctattgacaacaaaatcgag

SEQ ID NO: 850558 - DNA, 99 bp, Homo sapiens
cggcttcggagcgggagtgttcgttgtgccagcgactaaaaagaggtggaaaaatgctaatcactgaaagaaaacattttcggtcaggaagaattgcac

SEQ ID NO: 850559 - DNA, 100 bp, Homo sapiens
acccacgtggagaagccgtatgagtcctacacagggcagaatgtgaagctacggtgctcagctttaagggctactgggaaaaactgaactccaacctaga

SEQ ID NO: 850560 - DNA, 98 bp, Homo sapiens
ggtggaggatgtggtgctgcccgagaaggtggacgtgctggtgtctgagtggatggggacctgcctgctggtagtgtgccagtatttgaaaaatccca

SEQ ID NO: 850561 - DNA, 98 bp, Homo sapiens
ggtgttaaaaaatgataatgtgcataaaattcaacccagctttcaaagtccagtcaaaatatcagttaaacttgtggttccgtgggttgatatccaga

SEQ ID NO: 850562 - DNA, 100 bp, Homo sapiens
acctggtcttcactgacgcctctccccagggacctctggtcctcaatcgagttcctctacgaagaacacaccagaaatttgtcattgccacttcaaccaa

SEQ ID NO: 850563 - DNA, 98 bp, Homo sapiens
atgtcatttcatccaccacattacttagatactgcttttgcaaaaaataaagatgatggaaaatggtactattttgatgacagtagtgtctccactgc

SEQ ID NO: 850564 - DNA, 51 bp, Homo sapiens
cggtgcttctatggcaggatatggctttggtatcaggatggtgctggcctc

SEQ ID NO: 850565 - DNA, 98 bp, Homo sapiens
gaaatacaaatgaaccaagcacacgtgtccgagtaaaatatacccaggaccataaacagatgaaaggtagaccaagtctgattttagatacacctgct

SEQ ID NO: 850566 - DNA, 98 bp, Homo sapiens
gacaccttctaagagtttggcgagtcagtgactgaagcgcccgtccattccaaggcgagataagctttggatttgcatggagttttgtggaggtggtt

SEQ ID NO: 850567 - DNA, 100 bp, Homo sapiens
tggagaccaagctgaagccactgagaaaagactactgttcgaagatttttggaagaatactgagaacggcataaagtgaagatcgacatttaaaaaatga

SEQ ID NO: 850568 - DNA, 100 bp, Homo sapiens
ggtgggagtgacccgattttccagactccccgtggaacagagttgttgttcagcagaaataatcaagagttgacatcataccaggtaaaaaatagaagcg

SEQ ID NO: 850569 - DNA, 99 bp, Homo sapiens
ctgcagaagtgaaccggcaaatgctgcaggaactggtgaacgcaggatgcgaccaggttataaacaacttgtgaaatgagtgatttggaagatgatgag

SEQ ID NO: 850570 - DNA, 98 bp, Homo sapiens
agggtatactggctcctcttgtgaagtcatgaatgaaaaacttcagcactgcatggaactaacagatctaatgcggaatcacctgaatgagaagaggg

SEQ ID NO: 850571 - DNA, 98 bp, Homo sapiens
ttgcccaccaacttcagagatttgtccaagcgggtccatatggaatatttgctggtagggatgcctccagaggactggccacattttgcctagataaa

SEQ ID NO: 850572 - DNA, 100 bp, Homo sapiens
aaatgaggctggaagcagctcctgctcagccacagtcactgtcagagagaaagccacagatggctccctgcagagcgaggactgggccctcaacatggag

SEQ ID NO: 850573 - DNA, 112 bp, Homo sapiens
acatatccaggattctgatccagttgaggcactgaaataatctagaaccaccttcaaatttcttataaagagagatgaagataaaacgttacctgcagagtcgggatgtaca

SEQ ID NO: 850574 - DNA, 100 bp, Homo sapiens
acttaagaagcaatttaatgatgaagaaactttgctacagcctcctttgaccagatccatgactgttggtggccttgtcagcttcaaggctttaattgaa

SEQ ID NO: 850575 - DNA, 100 bp, Homo sapiens
aactttcaaaggttggacaagttggaatacacaccaaggcttggtttattgctggaatctttttgctgttgactattcctatatcactgtgggtgatatt

SEQ ID NO: 850576 - DNA, 98 bp, Homo sapiens
tcaccattggagctcatcagactgaccgtgtcttacatcagttcagagagagctttcagcagaggccaaggcagcattgcttgaatttgaagaaaggg

SEQ ID NO: 850577 - DNA, 115 bp, Homo sapiens
ccttggaagactatgtagtattgatgaaaagagggactgccataacattcccaaaggttttagctaaagaagatactgaggcagctattcaatcaatattatacaaagaaaattc

SEQ ID NO: 850578 - DNA, 100 bp, Homo sapiens
atatttggaggacatcccagaccctgaagtaaactggatcccctgtaataatcgtaacagacctttccaaagtgaaactgatgagatttgatgatccact

SEQ ID NO: 850579 - DNA, 100 bp, Homo sapiens
acggggtcctcttctgcaaggtccggctgctggatggaggggattttgtcagcttgtcgtcaaggagttggggacttttcccagccagacacctctccgg

SEQ ID NO: 850580 - DNA, 50 bp, Homo sapiens
gccggagcgaggccaccgaggagggcggtattggtaaaggttttcaaggt

SEQ ID NO: 850581 - DNA, 100 bp, Homo sapiens
aagatcttcaatgacaacagcctcagtatggaggccttccagcaccgttctgtgtcctggtcgcagttcaacaaggactacaaatccctccaggatatca

SEQ ID NO: 850582 - DNA, 98 bp, Homo sapiens
atgaagataacagtgaaatatcagattcagaggatgacagttgcaagtcctcgaaaatttccccttgctcaaactgaatcgcttctgatgaaaatgcg

SEQ ID NO: 850583 - DNA, 98 bp, Homo sapiens
tgttggttatgagagatttttgggacctgaaatcttttttcatccagagactcacatttcaagacttcctcctggtgcggtggcaggacagtctgtgg

SEQ ID NO: 850584 - DNA, 98 bp, Homo sapiens
tacttgcagcatattacctatcaggagaggagatgttaaggacatgttcacttccagatctctcaaagctgttcagaacccttatggatgttcccacc

SEQ ID NO: 850585 - DNA, 100 bp, Homo sapiens
gccatgaggccaaaggcagttgtattgacaaggcgcctctgtcgaagagccttctgctggtccccagtgccctctccctcctgctcgccctcctcctgcc

SEQ ID NO: 850586 - DNA, 100 bp, Homo sapiens
aagcacacactatggcgctgaaacggattaataaggagtacaagatcctcagcatgagagaattattactgtgtctactaatggaagtattcacagccca

SEQ ID NO: 850587 - DNA, 136 bp, Homo sapiens
cttaaatatcatccagataaaggaggtgatgaggttatgttcatgaggatagcaaaagcttatgctgcgcctactgaacttgacgcactggtatttggccatctatacaccattcttaccacacaattgacaaatg

SEQ ID NO: 850588 - DNA, 98 bp, Homo sapiens
caggagaactggtcgccatcaagaaagtattgcaggacaagagatttaagtcaacgcaaaatcatgctgccgtgttccgtgtgggaagcttgttgcaa

SEQ ID NO: 850589 - DNA, 98 bp, Homo sapiens
atcttcggactcctcagatgccaccaacaactccatccagcagtttcttcaccaagaaagggctattgcaagacacgaagtccgagaaattgagcagc

SEQ ID NO: 850590 - DNA, 100 bp, Homo sapiens
gggttccgatttcagcatcggggcagacaccgccctgaacactatcaccgacctggactgggcagcctttggggtcatgacccttccctccatcggcatc

SEQ ID NO: 850591 - DNA, 100 bp, Homo sapiens
agcactgacacggcctgcatcgggcccacgctcagctcactgaaaactgaagctaatttggaagttttgaagtcaattcctagtgaaaaattaatgattg

SEQ ID NO: 850592 - DNA, 99 bp, Homo sapiens
tacttttcatggtgcatggaaggaaagccaatgcgcagattacatgaagcagatgacatttgaagcccaagcctttttagaagctgtgcaattcttccg

SEQ ID NO: 850593 - DNA, 100 bp, Homo sapiens
tctgatcctccacttcagagaacagggcttccagctgatcttaccaagatgcatctcacagaaaaccctcatccacaggtgactcatgtgtcttctagtc

SEQ ID NO: 850594 - DNA, 100 bp, Homo sapiens
cggacaccatggacaagttttggtggcacgcagcctggggactctgcctcgtgccgctgagcctggcgcagatcggttgcaccattactcagacttctaa

SEQ ID NO: 850595 - DNA, 100 bp, Homo sapiens
ggcacagtggagcagctctgaagatgcaaaggaacatcatcttcagcgggctatttcagcacagcaggtgtatggcgagaagagggataatatggttata

SEQ ID NO: 850596 - DNA, 98 bp, Homo sapiens
gccaagctcagcggatggccgaaaatctaggcttcgttgggcctttgaaaagccaggatcagctcagctactatttaataaaacaaaatctgtagaat

SEQ ID NO: 850597 - DNA, 100 bp, Homo sapiens
tttgacagtcgctcagaagcagaggctgcaaagaatgctttgaatgctgcctctaagaatcaaacttcactcttgggagaaccaccaaaagaaattcggc

SEQ ID NO: 850598 - DNA, 99 bp, Homo sapiens
ttaccttgagcaatctgaatttgagcatgccaccgcctaaatttttcaaaaggtgatgacctatcaacagccattctcaaacagaagaaccgtcccaat

SEQ ID NO: 850599 - DNA, 100 bp, Homo sapiens
tatggattaaattttttgctgatggagagctggaatctatgggattttcagctcgatacaatttcacacctggaatctccgtatgttatgatgaagaaaa

SEQ ID NO: 850600 - DNA, 98 bp, Homo sapiens
ttttcttccctgatcctgatctcaaaattgttctatagtttaaactttcagttatcccagatcactgaagctgagatggctgatgaagtaatttgcag

SEQ ID NO: 850601 - DNA, 50 bp, Homo sapiens
atcgtcttcctcttcagccatccagggccaattcctgtccccccagcagc

SEQ ID NO: 850602 - DNA, 100 bp, Homo sapiens
actccaaacagtggttatacacagtctcagttcagtgctccccgggattactctggctatcaacggggatatcagtatgaacaacattactcagttgcca

SEQ ID NO: 850603 - DNA, 100 bp, Homo sapiens
gcaagcacgaggagcggcaggacgagcatggctacatctcccggtgcttcacgcggaaatacacgggcccagatcattgatctgatgatgctggtcatcg

SEQ ID NO: 850604 - DNA, 100 bp, Homo sapiens
acaagacacccagttaaaattcaactgtaggtcccgacatctgtggccctggcaccaagaaggttcatgtcatcttcaactacaagggcaagaacgtgct

SEQ ID NO: 850605 - DNA, 100 bp, Homo sapiens
tcgagcttcgaagtgacatgtacattctcaatgagagcctcacagacccagccatcgttaaggagatccaggctacctggtatgagaaactgcacgagtg

SEQ ID NO: 850606 - DNA, 100 bp, Homo sapiens
agagagcttgaaaaattcagctacagaagctgcaaaaccagctaaacctgatgagaaaggagagatgcaggttcaaaccttgtactactcagctgatcac

SEQ ID NO: 850607 - DNA, 99 bp, Homo sapiens
aaggaccggcacaaggacgttctcaagtggggcgatgaggtcgccatgggctactcacactccttggtgatagcaagagatgaaagtgagactgagaaa

SEQ ID NO: 850608 - DNA, 99 bp, Homo sapiens
ctgaacaaggagtggaagaagaagtatgtgacgctctgtgacaacgggctgctcacctatcaccccagcctgcatagtccggcagcgtcttctcttgag

SEQ ID NO: 850609 - DNA, 99 bp, Homo sapiens
tctcctgtgtggcgatggtcttcctgctggggctcatgtttgagaagaatgtcttccaagcaagccacctctccatttgcctgtgcagctgatggagag

SEQ ID NO: 850610 - DNA, 100 bp, Homo sapiens
cgacagcctggattataaggatgtcatccccatggctgatgcagcaggcatcatccgctatgcaattgggtgagaacaacatgcccagaaccaacaaaac

SEQ ID NO: 850611 - DNA, 100 bp, Homo sapiens
ccagagtgactggtaccttggaaacctgtggaaaaatcaccgcccatggccagcccttggaagaggctacaacacaggtgttgacttcaaaatcaaaact

SEQ ID NO: 850612 - DNA, 100 bp, Homo sapiens
tttggaaagacccaggagaagccgcccaaagaactggtaaaatgtcggttccaggaccttaccaggcggccactgggccttcctcagcaccatccgcacc

SEQ ID NO: 850613 - DNA, 100 bp, Homo sapiens
cacagaatttcgagtgctgctcttggcttggaagttccaggctgcaaccatgtgcaaattcaccaggcagtagaagatggtgaaagaaacaacttactac

SEQ ID NO: 850614 - DNA, 98 bp, Homo sapiens
tcgcccaagccgcgtccccagagagcgccctgagagaacagggtggccgcttggtccagatggtctgtcttctgctgatcccaactctgattggaatg

SEQ ID NO: 850615 - DNA, 100 bp, Homo sapiens
acattgtgaagctcctgggagcctactatcacgacgggaagctgtgggtcagtttaggggctggtgcaaaggatgagttgcacattgttgaagcagaggc

SEQ ID NO: 850616 - DNA, 98 bp, Homo sapiens
gggacctcactgactacctcatgaagatcctcactgagcgtggctactcctttgtcaccactgctgaacggaaaccaccgctctttaacatgaatgcg

SEQ ID NO: 850617 - DNA, 100 bp, Homo sapiens
actcagatcctgcaaagtcctgaaagagccagacttctcagaggtcagtctgttcaacaagtgggaccccagggccttctgtatgttcagcaaagagagc

SEQ ID NO: 850618 - DNA, 100 bp, Homo sapiens
gtacccatcttggagggtacggaccccacatgaggagccatgtccattggagcccgttcccaatcagctcgtacttacttggagagacatatgtctgaat

SEQ ID NO: 850619 - DNA, 107 bp, Homo sapiens
tcaaaagaaagctcatcaagccagagctggagtatctcagtttcttcactagttgaagaaggagaaaaacagaacaaacgttttaggccgtcaaaaatgtcttgcag

SEQ ID NO: 850620 - DNA, 100 bp, Homo sapiens
tctcctgcccggcctatgcctacgtgctcacggtcaacgagcggggcaaccactgcgagtactgcttcaccagactttccgcctctatcgggagtacaag

SEQ ID NO: 850621 - DNA, 100 bp, Homo sapiens
catgtctgtgaaatagcagaaggcattgtttcagactctatcccttttactattcagcgactatgtgaattgttaacagatccaaggagaaactatacag

SEQ ID NO: 850622 - DNA, 109 bp, Homo sapiens
actggaaacaatggcatttacagaaagagtcaacagcagtggcaacaggtgcttgaagtttctgggaagtcggcatccaaccctggtgcttcccttggtgccagagctt

SEQ ID NO: 850623 - DNA, 100 bp, Homo sapiens
tacctgtctccgtaccccttcatgagaggcgagcacaactcgacctcctatgactctgcagttagtcctatctgactcctgtacgggatgaggaagcaga

SEQ ID NO: 850624 - DNA, 98 bp, Homo sapiens
agaggtgtcccttcaaagatgtgagagagaaaagtgagtttattctgaagagcatccagcactttgatatgcctcatgatattgttgcatctgaagat

SEQ ID NO: 850625 - DNA, 100 bp, Homo sapiens
gatgtgaaagcacctgctatgttcaatataagaaatattggaaagacgctcgtcaccaggacccaaggaaccaggggtcctggtcttcatgatccttgtg

SEQ ID NO: 850626 - DNA, 100 bp, Homo sapiens
acatttatgatgagcagccccccaatgtcgaggagtggagcttactcacatagcatattggtatatcaaaatgaaatgcaaggaaccaaaaataacataa

SEQ ID NO: 850627 - DNA, 100 bp, Homo sapiens
ttttcacctcctgtgagcagtgggaaaaatggaccaacttctttggcaagtggacattttactggctcaagcaagagtacagcactgcatctgctctgta

SEQ ID NO: 850628 - DNA, 98 bp, Homo sapiens
ctgattctaggacaaaggaaattgaagccattcatgcaatcttgagatcagaggatgtaacagtccctcccaagcctgtctcgctccatcctttatat

SEQ ID NO: 850629 - DNA, 99 bp, Homo sapiens
ccccatgtgttactgctgcagctgggaacaactttcttcaaactggagaaaactggttgtcctggatgtttgaaaagttggtcgttgtcatggtgtgtt

SEQ ID NO: 850630 - DNA, 98 bp, Homo sapiens
tcatattccttcatctaccatggctcagccgggaactctgaacctcaataacgagtttggtgccctggttgtcagatgttggaaagcagtaggacgga

SEQ ID NO: 850631 - DNA, 98 bp, Homo sapiens
cggtatgttccgggctcttcgggatcttctaacacactacccacagcagatccttttacaggggtggagttcgtggttcccaggactggcttttattg

SEQ ID NO: 850632 - DNA, 98 bp, Homo sapiens
gaggcctgcaaattcatgacaggattattgaggtaccaaccaagaagctgaagaaatatgagaaagaatatcagacaatgcgagagagtcagctgcaa

SEQ ID NO: 850633 - DNA, 100 bp, Homo sapiens
cttcagttaacacctatgaacagtctggccacctctgtattcagcatagctattcctgttgatggtgatgaagacaggatttttagactctgaggagcag

SEQ ID NO: 850634 - DNA, 98 bp, Homo sapiens
aagtcctgaaacagttttgcagtcgatggatctgagaacgctgtctgggcttggtaccaagagctggtatttcacagcagcgaccgcctcacagacga

SEQ ID NO: 850635 - DNA, 100 bp, Homo sapiens
gccgaggacaaccgcagccacagcgcccacttctttgagtttctcaccaaggagctagccctgggccaggaccggactttgcctcccgggccaaactggc

SEQ ID NO: 850636 - DNA, 98 bp, Homo sapiens
aggaggaggctatagcaatcgctaacgcagctgatgttgggttagcaggatgtggtggatacccaccctggtctcacgttcctgaaagatgctccaga

SEQ ID NO: 850637 - DNA, 98 bp, Homo sapiens
atacccagggagcggaagacgcgaccaactccaggcacagcggagccggcgcggggtccacaaagcccactttccttgtggaactgtccagagtgctg

SEQ ID NO: 850638 - DNA, 100 bp, Homo sapiens
tgtgtgcaaaccagaacaggtggccaaacaaattgttaaagatgccataatatttgaatggtggtacttccataagcatggcacatcttttattgagcaa

SEQ ID NO: 850639 - DNA, 98 bp, Homo sapiens
ttgctgatctgagctcagacctgccaatttaccagagataattgataacaccctgtaacagctgaaactgatagtgcatcagctgacccaggtaattt

SEQ ID NO: 850640 - DNA, 100 bp, Homo sapiens
agaagcagaattatacctagaagtctactaatggacagttagtcacccacctacatgttgagagtccgaaattgaagttcagaggaagaattgccttcca

SEQ ID NO: 850641 - DNA, 74 bp, Homo sapiens
cagacatctccaactgtgggaactctttccagcttgtgtctggtcctgtccaaaatgcattgctgtcttcacaa

SEQ ID NO: 850642 - DNA, 98 bp, Homo sapiens
ctttccacccacaaagattgaacgacatgccatgtactgcaatggtctgatggaggaagatacagactgaaccggccgctgacactctcggagaagat

SEQ ID NO: 850643 - DNA, 100 bp, Homo sapiens
acaagattcatactcctgatgctactgacaacgtggcttctccacagtcaccaaaccagttaagtgggcagaccaacatccacctcagcaaaaacttctt

SEQ ID NO: 850644 - DNA, 100 bp, Homo sapiens
ttttgctgtaacaaacgcctataaaagcttcgatgatgaagaatcagtggatggaaataggccatcatcagctgcatcagccttcaaggttcctgcacct

SEQ ID NO: 850645 - DNA, 100 bp, Homo sapiens
ggagctcatcaaggacgggaagtcactcataagcgcgctcaagatattgactcggagacaaaaagaggccaagaccaagagtgacagtgggacagctgcc

SEQ ID NO: 850646 - DNA, 100 bp, Homo sapiens
gagcttgtccgggatcattggagccgaccaagtctcttctctagtgatccctgaaaagttccagcatattttgcgagtactcaacaccaacatcgatggg

SEQ ID NO: 850647 - DNA, 99 bp, Homo sapiens
gtgaagtcaaatgcatgccaacattccagttttttaagaagggacaaaagaaaatgtcttcatgaggtctggtggtctttttccctgacaatttgtatc

SEQ ID NO: 850648 - DNA, 100 bp, Homo sapiens
aagaaaacagagcgacgagcaagaagcagcccaaagtcgaatgattcagacttgcaagtttgcattgagactccttgcattccgccagatacacaaagtt

SEQ ID NO: 850649 - DNA, 100 bp, Homo sapiens
caaatttcatactaattttctcaaggaaattgagcaacgacttgccctgtggccgaaatagaactatttgtgaacagacttgattcagtggaatcagttc

SEQ ID NO: 850650 - DNA, 98 bp, Homo sapiens
ggaaggtgcaaggggtgtttttccgtaagcatactcagtgtggacaacagtgagtatatgcggaatggagacttcttacccaccaggctgcaggccca

SEQ ID NO: 850651 - DNA, 100 bp, Homo sapiens
ctttaccaagaatggaaggaaaaagttcctgaggcacagaaaactgaatctgtagataacgagggagaatgaattgtcatgaaaaattggggttgatttt

SEQ ID NO: 850652 - DNA, 105 bp, Homo sapiens
attcttcgttctgtgcggcgacctcatccacgccatgccagggcattcttcttgagcaccgagaaaaagaatttggagacaaagtaaacctactttctgttctgg

SEQ ID NO: 850653 - DNA, 98 bp, Homo sapiens
ttccatgtgaggggaagggtccaacagtcctggtcattcagactgcagttccccagatttgactgatgaattagctcagaagttatttgatgtttcag

SEQ ID NO: 850654 - DNA, 98 bp, Homo sapiens
cctacagaaacaaaatgtcaacaaattgatgggaggaagttaagtcttcagagcctactgaggatgtggagcccaaagaggctgaagatgatgataca

SEQ ID NO: 850655 - DNA, 99 bp, Homo sapiens
tctcaccttgtatgctttacgcccgccatgttcatagaggataaagcagtagacaccctggcttacctcagtgacggtgacgcccgagctgggttgaac

SEQ ID NO: 850656 - DNA, 100 bp, Homo sapiens
taacactcaagcaaagaagagttgagcacaatcaggctcttgcagccaatgccggaacaggatttgctgttgctgagcctcaaatcgcaatgttttgtgg

SEQ ID NO: 850657 - DNA, 99 bp, Homo sapiens
aagcaggcccgttggaagtggttgtgggaagatggtgaaaggaatgggaggtgctatggatttagtgtccagtgcgaaaaccaaagtggtggtcaccat

SEQ ID NO: 850658 - DNA, 98 bp, Homo sapiens
ggagctgacggtggaggttcgcggctctaacggggctttctacaaggagatgagtatgatgtatgtgccatttgtttggatgagtatgaagatggaga

SEQ ID NO: 850659 - DNA, 100 bp, Homo sapiens
gcctacagaacctagcctatcagctggggctggatgagtgtcgaagaattccatccactgacgccaacctgccatctggcggtaagggcttcaaactccg

SEQ ID NO: 850660 - DNA, 98 bp, Homo sapiens
gaccctcatcacaccatgggagactacaaagatgacatggcctttgatgtgtcctggtttgcggtgcactcttttggcctggacaaggctcctgtgct

SEQ ID NO: 850661 - DNA, 99 bp, Homo sapiens
gaagaggaagctgcgggagaagcggcgctccaccggcgtggtcaacatccctgccgcagagatgctggcatcaccatctacatcaggtcagctgtctca

SEQ ID NO: 850662 - DNA, 99 bp, Homo sapiens
accgctctggtcacaccaatactgttgcagattgtggacagtttgcggttgtgaagaaatgccgtgagaaaagcaccggcctccagtatgccgccaaat

SEQ ID NO: 850663 - DNA, 100 bp, Homo sapiens
ccctattccttcacatgtaattcagaaattagggacaggcttgctgcaacctcatttagagagggttgccatcgatgctctacagttatgttgtttgtta

SEQ ID NO: 850664 - DNA, 100 bp, Homo sapiens
ctccatcccttccgaggcccgacttcgccggcacagtcttcactaccgtagaagaccttggctccaagatactcctcacctgctccttgaatgacagcgc

SEQ ID NO: 850665 - DNA, 100 bp, Homo sapiens
ggcaagggcaacttcgcggtggtcaagcgggccacgcacctcgtcaccaaggccaagccaatggagatcttcgtggatgatgagacgaagttgacgctgc

SEQ ID NO: 850666 - DNA, 100 bp, Homo sapiens
cttctacctcacggtcaagagagcgaactgcagcctggagctacccccggccagcggtccggccaaggacgctgagggtgatcttgatactgcagcagta

SEQ ID NO: 850667 - DNA, 100 bp, Homo sapiens
ctggagagggggcgctgagctgttggggttactcctggatggagcacctctgatagcaatccacaaagccaggtattacaagaggaaagatggcttagcc

SEQ ID NO: 850668 - DNA, 98 bp, Homo sapiens
aaattgtgacatatgatcttctgtcagtcatttgccatcatggaactgcaagtagggagaacattaatatctgctggagtcctgatgggcagaccatt

SEQ ID NO: 850669 - DNA, 100 bp, Homo sapiens
tccccaccacccgtgccaggcaggcacccgggccctggcacctgctgcctgcccagaggccacccagcctcctagacagttttttcaagggggaacatgg

SEQ ID NO: 850670 - DNA, 100 bp, Homo sapiens
ggaagacctgcgtcctttttcgtttttcggatgatgccttcaatactacctttatttccaccataggcccttaatctcacttgcaacgtgtggggagacc

SEQ ID NO: 850671 - DNA, 100 bp, Homo sapiens
acagctgctaaagtggcatcctgggattttgttgaagccacacaaagaacaaattgcagttgtttgagacgaacaggaggcattgaactcaatcatgaac

SEQ ID NO: 850672 - DNA, 100 bp, Homo sapiens
ggttctttccattgtgtctgccagcagggtttctcaatctctgcagatggccgtacgtgtgaagtgatgaaactacagaatctgtttgtagatgattcag

SEQ ID NO: 850673 - DNA, 100 bp, Homo sapiens
gaaggacctggtgtcggcctgtgacctcctgggtgtaggggccgagtacgcccgggtggtgggatctgaatacacacgtgacaaatggcctacagctgtg

SEQ ID NO: 850674 - DNA, 100 bp, Homo sapiens
gatccacagctaagacgccaggacccactggaagcctagaaatggtggatcatccatgccatggagtatgaacttcagatccgtggcggagacaagccag

SEQ ID NO: 850675 - DNA, 98 bp, Homo sapiens
actcgagtcctgccgcctcccgggagtgccgtgcgccgcagcccgggcccaggccccggcagcgcctgggacaaggagctagagttaatgccaaagac

SEQ ID NO: 850676 - DNA, 100 bp, Homo sapiens
aggaaattccaggcgcacatccgtgtccaaggggaggctcagaaagtggagcggctcatagaggcgttcaggtatcgagaaccttccctgcgaacttcag

SEQ ID NO: 850677 - DNA, 98 bp, Homo sapiens
tcctgcagatggccaatgagaaagccctgaagcagaagggcatcaccgtgaagcagaagagtgcgcggctttccctccgagaaggactttgaggacta

SEQ ID NO: 850678 - DNA, 99 bp, Homo sapiens
gtgcttccagaggagcccaaagattttgaagatgtaactgagtttctggaagaggtcattgaagccttgatattggatgaggaagttagaacatttcca

SEQ ID NO: 850679 - DNA, 60 bp, Homo sapiens
aggcctgagcctctgcgtctagaatataacaccagcaatcctgacttgttgctagtcata

SEQ ID NO: 850680 - DNA, 100 bp, Homo sapiens
gccttcctggagctcttcatcctccgcctggcgtacagctggtctcttgtggctcagcgccgtgcggaggttgaagcgtacctgcggaggtcgcaccagg

SEQ ID NO: 850681 - DNA, 100 bp, Homo sapiens
ggtacccggactcagccgccagcctcagcacctgtgccggcctcagaatccacattcatctcaatggaaggatcctgccttaagtcaacttatttgtttt

SEQ ID NO: 850682 - DNA, 100 bp, Homo sapiens
tgtaagtggtgaagccaatgacagtagctggaatgacataaaaaactctggatatatatcacggtggaatgaatcttacttgttgaatatcttctggtta

SEQ ID NO: 850683 - DNA, 100 bp, Homo sapiens
cactccaaaagagcaccctgatgttcagcttctggaggatgctgagaaaagcctttcagctgtagctggaaaggttgtgaaaggaggtttgcccgttctg

SEQ ID NO: 850684 - DNA, 112 bp, Homo sapiens
agcagccaagccggggcagtttcagtctccaccccaaatgcagacatgtcatgctgcccaaggacatagccaagctggtccctaaaacccatctgatgtctgaatctgaatg

SEQ ID NO: 850685 - DNA, 100 bp, Homo sapiens
gtcaccaagtacaccagctcgaagctccagtcaggccaacaccgacgcgcagctgggaggaagacaggacccttgacatctccatctgcacagaggtcct

SEQ ID NO: 850686 - DNA, 98 bp, Homo sapiens
gagcacttatctgcgccccctgctggttgtgcgaaccccgggcagcccgggaaatctccaagtcagaaaggtccggtgtctaaaagactatggagaat

SEQ ID NO: 850687 - DNA, 99 bp, Homo sapiens
gcggaggctgtagtggggctggtggtgcttccaactgcgggacaggaagtggccgtagcggcttgttggataaggtttgcccttgcatctcatttcctc

SEQ ID NO: 850688 - DNA, 100 bp, Homo sapiens
agaaatcctggcggcgaagccctggactaaggagattcttacagaagcagagattgatgctcaccttgttgctctagcagagagagactaaacattgtcg

SEQ ID NO: 850689 - DNA, 99 bp, Homo sapiens
ttgccctgtctcctcgcagatgagatctaattatcatggacctgcgacagtttcttatgtgcctgtccctgtgcacagcctttgccttgagcaaaccca

SEQ ID NO: 850690 - DNA, 100 bp, Homo sapiens
tagctgaggagctggcattggagcaagccaagaaagaatccgaagatcagaaacgtacttgattctaaagctcgaaaggcctgctatagttcagaatatc

SEQ ID NO: 850691 - DNA, 99 bp, Homo sapiens
ttgagatggcctgtctgataactgactctgatctcaacattttggctgaagaaggatttgatgccctggatccctttattcccatcctggtttccaact

SEQ ID NO: 850692 - DNA, 98 bp, Homo sapiens
ctgaacaaagtctgctcaaatctcctgctgtgaaccagcagaatttttgaacaggacagagcgggatgccaccagcttgtccaaagggaagttccagg

SEQ ID NO: 850693 - DNA, 98 bp, Homo sapiens
ctcacctgaggactcacactggctgagtcatcactagagagtgggaagggcagcagcagcagagaatccaaaccctaaagctgatatcacaaagtacc

SEQ ID NO: 850694 - DNA, 98 bp, Homo sapiens
gatgatcggtttcccagacggggtgatgactcaagacctggtccttggagaccattagtcaagccagatgcggcaggccagaaggctgtcgaaccctt

SEQ ID NO: 850695 - DNA, 100 bp, Homo sapiens
ccggcgctggtggcggggcccggtgcatggcggtctgtcggcggagtcgccctcgggggctgtcagcatgtggagagggccaaatgtgaactgtgttgac

SEQ ID NO: 850696 - DNA, 100 bp, Homo sapiens
tcttccattgtcaaacccagtacagaaggattcacgagaagaaaattggcaagagtggagacaaagagatgagcagctaaaggtggttatttaagtattt

SEQ ID NO: 850697 - DNA, 100 bp, Homo sapiens
ggaactactctacggcatctggagcaactgagccagagcccagaggtggagcagttagggagggttgtggaactggacagtgacatggtagatatcaccc

SEQ ID NO: 850698 - DNA, 100 bp, Homo sapiens
aggatgaaaaccgaagaagaggcccggactcatacagagattgaaatgttccttagaaaggagcagcagaaatggatgaaaagaggctgctggatccagg

SEQ ID NO: 850699 - DNA, 99 bp, Homo sapiens
aaggaaactgtttaaccggatcccattgtacccagagtgcagagccgcctttccagcatgcaggggctgctcaggtggtatggtcaggaaaaagactac

SEQ ID NO: 850700 - DNA, 100 bp, Homo sapiens
cataagtggctacacttgccactgtgtgctgccatacacaggaggaatgccagctcctgagcaggcctcattggtggaggaggggcaaccacagacccgc

SEQ ID NO: 850701 - DNA, 100 bp, Homo sapiens
cacataaaaattatttatccaacagctcctcccagaatcaaagaatcttcaggatggcagcaagtgtttacgagcccatatttggattggactatcgaac

SEQ ID NO: 850702 - DNA, 99 bp, Homo sapiens
tcctccttgccaggccttcaaccactatctcagtgcaatgggtatgtgccagtcaaagatctactgggaatttatgagaaactgtatggtcgaaaagtc

SEQ ID NO: 850703 - DNA, 100 bp, Homo sapiens
gcgcatcctccacaccgacaccatctggaggaggcgttgccgtgaggctcaactacagaacacctacactctgaaagcctttactgttggatctaaatgt

SEQ ID NO: 850704 - DNA, 100 bp, Homo sapiens
cttagcccagctccagtgggcgggtggcagcaacttggagtcatcacggatgtatgacgttttggaaccgcagcagggcagaggctgtggcagctcagga

SEQ ID NO: 850705 - DNA, 100 bp, Homo sapiens
ctgggtccagccccttacttaaagcttcctgcctgacacagctcacttcaagaagtgcacaatgtcagaacgtggaattaagtgggcttgtgaatattgt

SEQ ID NO: 850706 - DNA, 98 bp, Homo sapiens
tgacgtgaggccgtggatgcaggcattaagacctgcaggctgggacaatgaaaagaaaatagctattttacatgaaaattttacaaccgtgaagccgg

SEQ ID NO: 850707 - DNA, 100 bp, Homo sapiens
gcattgactggaaacaatggcatttacagaaagagtcaacagcagtggcaacagggaatgaaagctactggttgattttaaagtgcctgggcctcacagg

SEQ ID NO: 850708 - DNA, 100 bp, Homo sapiens
acataatctgtcattgaacaaatgtttccttaaagtgcctcgatctaaggatgaccctggaaagataagctgtcattggaaggaatagtggtacaaagag

SEQ ID NO: 850709 - DNA, 112 bp, Homo sapiens
ttcataccagctgaagagcgacaagccgctggcagccgcggatctcaccgccgctcaggcgcgttccttcacctcgggcagaataactttgcagaagcccacaggttcttca

SEQ ID NO: 850710 - DNA, 100 bp, Homo sapiens
gaccatgtggctgccttgggctctgttgcttctctgggtcccaggtcaaaatgcagatcttcgtgaaaacccttaccggcaagaccatcacccttgaggt

SEQ ID NO: 850711 - DNA, 98 bp, Homo sapiens
ggaactcacagagtggattccgcaccgaacaagatttgtgatgaaatggagcctggaacaaactcttttcgggtagaatttcctgatttttccagcac

SEQ ID NO: 850712 - DNA, 100 bp, Homo sapiens
ttccttcatggtcacgtgctctgtttttatcatggttgggagcctgcagagcaatgttttcctttggaatatggataaatacaccatgatacggaaacta

SEQ ID NO: 850713 - DNA, 124 bp, Homo sapiens
tctgttcaccactcatttgcaacttatatcgccagtccagcagctaaggatattttgtgcagggaagtcccacctggccatcgtgcagaaggtaaacaacgagggtgagggtgaccccttctac

SEQ ID NO: 850714 - DNA, 100 bp, Homo sapiens
gtgcagatggcactttccaaagtggatgcctccggggaggctggttggaaggaaaatcatgcaacattcatgagcgaactaaaaaatcttcaggcttctg

SEQ ID NO: 850715 - DNA, 98 bp, Homo sapiens
acgcgggcgccaggaccggccgaacgcagagggtcatcgagcagctcggtgggaagcagctggtcatgaaccacatgcatcatgaagaccagcaggtc

SEQ ID NO: 850716 - DNA, 99 bp, Homo sapiens
ctagggacgagatctagaatcaactgagagagatgcttaaaaatcaccagttactttaatgagcagctgcagttgcactttcctccctgattcatgctt

SEQ ID NO: 850717 - DNA, 100 bp, Homo sapiens
agatgcttctgtggaagatgatgcttttatcaaggagtctactcttcatcttgtgttgagacttcgtggtggtgctaagaaaaggaagaagaagtcttac

SEQ ID NO: 850718 - DNA, 100 bp, Homo sapiens
ccatatttaagtagtctgcttcagcctttttcaggtggaggatgcgctatcttatcttgaccaggtgaagctgcagtttggtagtcagcctcaggtctac

SEQ ID NO: 850719 - DNA, 100 bp, Homo sapiens
tccagaagtacaagcagtctgaatcacagaactgattggttaccaccctgaggagctgcttggccgctcagcctatgaattctaccatgcgctagactcc

SEQ ID NO: 850720 - DNA, 98 bp, Homo sapiens
aaaggagttggggcttgatgaaggcgtggatagcctgaaggcagccattcagcatctaacattcacaagggaatttgattcagattctcttagacatt

SEQ ID NO: 850721 - DNA, 98 bp, Homo sapiens
gttattgcatttcgttttctcaccacaggtcatcaccgagtggtcttctcacatcatccttcaggcagcaccaagagtcactggcagcagagagagag

SEQ ID NO: 850722 - DNA, 100 bp, Homo sapiens
gcagaaggatttggcaacagactttgtttcttggagtccacttccaattccaagccgcttgatggcattgaaacgaatgggaattgtaagcgactatgag

SEQ ID NO: 850723 - DNA, 125 bp, Homo sapiens
gaagaaggggctggatccgtgggtcagagaacacaggaccagtttgccatcccaaggccgaaggcctcaactccatatagcatagattcagattctttgggaatggagtgtattatttcgggaag

SEQ ID NO: 850724 - DNA, 100 bp, Homo sapiens
aatcgaacagactcagattaagcagatccagtttgctgaccagaagcaagaattcaacaaacgtcccaccaaaattggacgtcgctctttgtctcgttcc

SEQ ID NO: 850725 - DNA, 100 bp, Homo sapiens
ttataccttcacccagcatttcatccctcgtcgaaaggattggattggcatctttagagattggcctaatgaagaagttcaacctggagagatggaaaat

SEQ ID NO: 850726 - DNA, 98 bp, Homo sapiens
agagccaggtgaactggaggagcgatttgccatcgtgctgataaatttgcgcctcattttggtaagcggaaaaacaaaagagttcctgttttctccta

SEQ ID NO: 850727 - DNA, 100 bp, Homo sapiens
aaacgtcacttttaaaaaataagtaatgccatctgttttcctaaaagactgaaatgggggcgaccattcttaggtgtgttgaggctcctggaacacgggg

SEQ ID NO: 850728 - DNA, 100 bp, Homo sapiens
cggcctgaatctccatccgcacccggggatgtcagagacgcccatgctcccatcctccctcatgctgctgaacacagcccacgagtatttgggcagaagg

SEQ ID NO: 850729 - DNA, 100 bp, Homo sapiens
ggtaaggcagatgcccacgtgatcctggcctgcagttgggtggctgcggtcggattgtttgtgctgaacgaactgtcctcttgcttcagaagcccctttt

SEQ ID NO: 850730 - DNA, 100 bp, Homo sapiens
agcagcaccaagttcacggccaacgccttggcactaggaatgctggaagccaagcttgcacattctaggcagccatttggaagattcttctctgcgcatg

SEQ ID NO: 850731 - DNA, 100 bp, Homo sapiens
gcagttgcttagagacaacctaacaattgagaggatccagaatccagatctctggaatagctaccaggcaaagaaaaaaactatggatgccaagaatggc

SEQ ID NO: 850732 - DNA, 100 bp, Homo sapiens
gtccagccttattacctctatggatccaagcaccaatgttgttatgaattattcagagatcgagtctaaggttcgagaggcaacgaacgatgatccttgg

SEQ ID NO: 850733 - DNA, 98 bp, Homo sapiens
aatccaaagttctcgcccactatcctcagaatatagaatggaacccttttgatcaagatgcggtgaacatgggcccagtctatggcatgaataggctt

SEQ ID NO: 850734 - DNA, 99 bp, Homo sapiens
gggtttgagattatccacgtgtgtaaggctggatgaatttcatcctttcatcgaagcacttctgccccacgtccgagcctttgcctacacatggttcaa

SEQ ID NO: 850735 - DNA, 99 bp, Homo sapiens
cgaaacgccgacagatcccagtgctggcaggatgacgcaaaacacggtgattgtgaatggagttgctatggcctctaggccatcccagcccacccacgt

SEQ ID NO: 850736 - DNA, 100 bp, Homo sapiens
catgatttcatgtttgtgaagaggaatgatccagatggacctcattcagacagaatctattaccttgttccagtctcatcagattttccatgtcctggtg

SEQ ID NO: 850737 - DNA, 100 bp, Homo sapiens
aattcaagaagttgaaaaacgcttttcacgtcacctggagagatgcacagctcttcagtgggtcatctgtgtgtcacagcctcagaagaccagcgagatg

SEQ ID NO: 850738 - DNA, 100 bp, Homo sapiens
attcagatggagaatatatggctggacagctagctgcttatggctataaaattacagatggtatgttacttacggtcatgaactgatttggaagaacagg

SEQ ID NO: 850739 - DNA, 99 bp, Homo sapiens
ttctttggtgctaacatctgatggagaggtttatgtagaagtttctaaaatgaaaatcaatgttactgaaattcctgacacattgcgtgaagatcaaat

SEQ ID NO: 850740 - DNA, 100 bp, Homo sapiens
atttctgacaagtgaaacaggatcttacgatggagttttggctgtggatgagatgaacggaaaggagctcaatggaaaacaaatttatgttggtcgagct

SEQ ID NO: 850741 - DNA, 101 bp, Homo sapiens
tgaaaacaacgaccagagacagcaggtgaccaagaatatggcccaggtgaccaaagccctggacaaggccctgagcaccatggacctgcagaaggtctcct

SEQ ID NO: 850742 - DNA, 100 bp, Homo sapiens
aatgagccagagggacacgctggtgcatctgtttgccggagggcatcgttggcttcacagtatgactgatgatcctccaacaacaaaaccacttactgct

SEQ ID NO: 850743 - DNA, 98 bp, Homo sapiens
cccgttgtgtttgtgaaacagagaaagataggcggccatggtccaaccttgaaggcagttatttaggattgaaggagtaaaaagtgtcttctttggac

SEQ ID NO: 850744 - DNA, 100 bp, Homo sapiens
gaacggaaaactcccaacttcctggaaccgtggagcatgcaacacatcccggcactgttttcggccttctgtggcctcttggtcgccctttcttaccatc

SEQ ID NO: 850745 - DNA, 100 bp, Homo sapiens
gctcagagaggttaaggaactcgtcctacgtaacacagccagttaggtggtagaagtgttgccattcaccgtcacttattgatgtgtccaaaggattgtg

SEQ ID NO: 850746 - DNA, 100 bp, Homo sapiens
aaataagtgccgaaattatgtggactctttttgctctggatatgaaatatgcattagaagcttatagtgatttaggatactacattatcaataaactgca

SEQ ID NO: 850747 - DNA, 100 bp, Homo sapiens
caatgctgccatccaggacatgccagagagcgaagagatcgcccagctgctgtctgggtcctgctccatctgcagggctgaacctgaggctggtgaggag

SEQ ID NO: 850748 - DNA, 100 bp, Homo sapiens
taacattctttctttttcttttgacccttttgatccctcacatttaacttcccagcatcagcggggtggaccttgataagttccgcgagattctcctgcg

SEQ ID NO: 850749 - DNA, 100 bp, Homo sapiens
tgctccgcagcgacatcaccaagctggaggtggacgccatcgtcaacgccgaggagttgaagccaaacagccaaattctgccattaggaagtgtgtaagg

SEQ ID NO: 850750 - DNA, 99 bp, Homo sapiens
caagatgatgtgcggggcgccctccgccacgcagccggccaccgccgagacccagcacatcgccgaccagggtgtgaccgagtgttatgagtgtcatcc

SEQ ID NO: 850751 - DNA, 100 bp, Homo sapiens
caggttacaaggctctggtacttgaccatgatgactccatgagaaaacagcagaacgccagctttgcaggtggcactggtgttccccaacaatgatccgg

SEQ ID NO: 850752 - DNA, 99 bp, Homo sapiens
tacaggctcaaggtgctgcagatgaggttgcggtcggccatcactggcctggtgtacagaaagctatcagttgagggatttgcagttgataaaatggct

SEQ ID NO: 850753 - DNA, 98 bp, Homo sapiens
ggagacttactgccgccacaagttagggctgctgatgcctgagaaggtgactcggttctgccccctcgaggacctgatggccaaaagaaaggaagaaa

SEQ ID NO: 850754 - DNA, 99 bp, Homo sapiens
atcaacggaattgtgttcaacctgctggccttcttggccctggcctcccactgccgggccatgctgacggaccccgtggaatgcaagctttaggacttc

SEQ ID NO: 850755 - DNA, 100 bp, Homo sapiens
gaggattgcccagagtgaagccgagctcatcagtgatgaggcccaggccgacctggcgctgcggagatacttggtgcttgaaaaactgaagaaggaagac

SEQ ID NO: 850756 - DNA, 100 bp, Homo sapiens
gggagcagaggaagccttgaggacctactcacagataggaattgaagatgaccgcacctcgagcaggagtggggatgccacgtctgcccccagcgcccgg

SEQ ID NO: 850757 - DNA, 100 bp, Homo sapiens
ttccatctatctctggaaactttcctcctccaccacctcttgatgaagaggctttcaaagtacagtttgaacgccatgaccctgtggatgggagaattac

SEQ ID NO: 850758 - DNA, 100 bp, Homo sapiens
gtaccagaggtggaagtccaagtcaaacgcagaaggactgcctcactgagcaaccaagaggtaatactgaacaacctgtccaaactagcaagattggact

SEQ ID NO: 850759 - DNA, 98 bp, Homo sapiens
gaggaccggtccgaactggcgcaggggccgctgcggcaaggaatagagctgtgcccccctggaaaacggttcatgattacgatggtggcgagcttcgt

SEQ ID NO: 850760 - DNA, 117 bp, Homo sapiens
cctacctgaacccatccttccatccctccaaaaaatttacccaatctttctctggaatcaaaggactccagctgaaagttaacctccaacccaatgataactactttttctatgtga

SEQ ID NO: 850761 - DNA, 121 bp, Homo sapiens
acttcatcaggaaatctccatggacagccagtttcatttctcctcagagaactacaggataagggattgtcaatgaggcagatcagattccgatttgacgggcaaccaatcaatgaaacag

SEQ ID NO: 850762 - DNA, 100 bp, Homo sapiens
gcgccgggaccggctgcagagacaggcgttcgaggagatcatcctgcagtatataaagatgaagcgcagctgtataaagaagagcacctgaggaatcggc

SEQ ID NO: 850763 - DNA, 98 bp, Homo sapiens
gtgaccttcgcttggtgtcctcctggcctcagcaacctgacaattctgtcgtgtcccggttgcagagaacacatcttagaagatgaaaaacctgaatc

SEQ ID NO: 850764 - DNA, 98 bp, Homo sapiens
gggagcctggtggggtggcggagggggagactgtgccgtggagggcctcgccatgtcctgctgcccggacttcctcgttctgcccatcttcctaacaa

SEQ ID NO: 850765 - DNA, 100 bp, Homo sapiens
gcctggtccctctttcgcaaattctccacctttgcgaacagagggtctttaggacacagattcttaaaagtgcagattactcttgtctctgctgctcctg

SEQ ID NO: 850766 - DNA, 99 bp, Homo sapiens
tcgctggaaacaagtgcgacctctcagatattagatggcccactgcgtgaccttggttcagctgtccatttcctgtgaccatctcattgacaaggacat

SEQ ID NO: 850767 - DNA, 98 bp, Homo sapiens
tgaacccattgtcacccctccggttatcaatactctggctgaccatcatcatcgtgggactgactttggtggaagtccttggttacatgtcattattg

SEQ ID NO: 850768 - DNA, 98 bp, Homo sapiens
tggaacatggacgtggagaggcaggagcctgaaagaatagacccaagcgcatcacgacaaggatatgatgtccgctctgatgtctggagtttggggat

SEQ ID NO: 850769 - DNA, 100 bp, Homo sapiens
tcaatgtctgtgggctgttgcaaggaattgcaggagtgacagttcatttagattctttgtattcttcttcgtctatatttgtcagtttgctgtacatgta

SEQ ID NO: 850770 - DNA, 98 bp, Homo sapiens
gactggtatcagaccagagcagaggaaatagagcattatgctcggcaggccctgttaaacctggcagagcgactgggagaggcaaagcctcgtggact

SEQ ID NO: 850771 - DNA, 99 bp, Homo sapiens
gggcctcaggctccttcctactgtccgagggccaccaggccgccgggggcctgctgcgcccggacttcctgggaatgaaaatggttggtgagctgctac

SEQ ID NO: 850772 - DNA, 99 bp, Homo sapiens
atggatcgtggagcagctgggtcagctctacggctgcgagggaatggcatttactttacaagaacgacaaatgcttggtcttcaaggacttctacctcc

SEQ ID NO: 850773 - DNA, 98 bp, Homo sapiens
aatagaatattagaggcattaaaggtcagagttctgagacctgctctggagcttatatttggcaccctttaccctgcgtattattcctacaaggctgt

SEQ ID NO: 850774 - DNA, 98 bp, Homo sapiens
acggagccttccaccagtcccagcaacaacggggaagtcacccagcccccaaggattctgggggaggcctcaggcaggagtagggctgattggagcca

SEQ ID NO: 850775 - DNA, 99 bp, Homo sapiens
gtccttcttagtcccaaggaccctgacaggtctctaattaacagaagatggcaaagcccagccacagcagctatgtccttcagcagctaaacaaccaaa

SEQ ID NO: 850776 - DNA, 99 bp, Homo sapiens
agaaaatgctgcctactttcaggtgtttggagcatctactaaacagattgatgtttaccgaagtgttgtttgtccaattctggatgaagttattatggg

SEQ ID NO: 850777 - DNA, 141 bp, Homo sapiens
ctctctcaacccctgtgagaacgagtggaagatggagaaactcaaaaagcaggcgcccgagctcctcaaggcccagttctggtgatgatttcacttttgacagaagctgtccctcaaaagcaaacatgcaatagaagaaac

SEQ ID NO: 850778 - DNA, 98 bp, Homo sapiens
taacaggtggaaaggagatcacagagaaagtgattacagacattgccgggggaaaacagaaatggtttatgaaacagaacacagaagaatcaactatt

SEQ ID NO: 850779 - DNA, 100 bp, Homo sapiens
gcaggcgatagcaatgcacagccaatttcatgctccactataggtacagaggtgcagttccatggtacaccataaatcttgacttaccaccctacaaaag

SEQ ID NO: 850780 - DNA, 100 bp, Homo sapiens
catcaatgcacgcaagatgaaatttgctctgctaaaaggctccttcagtgagcaaggcatcaacgagtttctcagtattggtaaaggttttcaaggtgtc

SEQ ID NO: 850781 - DNA, 98 bp, Homo sapiens
aaagaagtgagggtaccagctactgccttgtgtgtcttcacctaactaccataatgaatgctgcatattaagagaaaccacaagaaggttatatgttt

SEQ ID NO: 850782 - DNA, 100 bp, Homo sapiens
gacgcctacctgcagagcctggccaagaagatctgctcccattcggccccggaacagcaggcgcgcacgcggggagatcatgcacgccctgaagatgacc

SEQ ID NO: 850783 - DNA, 100 bp, Homo sapiens
cggatttttggcctcatactctgttatagataaacaagaaagaacacccaggttaatgcctgataaagaaagcatgtattacccacgggtacaacattac

SEQ ID NO: 850784 - DNA, 99 bp, Homo sapiens
agacggatcggcagggcggggcggaacgattgaagtggatattcctcgctgtcatcagtacgatgaactgttatcatcaccagaaggtcatgcaaaatt

SEQ ID NO: 850785 - DNA, 100 bp, Homo sapiens
cctgacctcggccaggatgtcaaggacccagaggactgcttcactgaaggtaaaattgcggagttgctctctccgggctcagtggatccattgacaaggc

SEQ ID NO: 850786 - DNA, 99 bp, Homo sapiens
ctccaggcatgccccgctacgagctggctttaatcctgaaagccatgcagcgggagtcaactgagagttcaaatacaacaattgaggatgaagatgtga

SEQ ID NO: 850787 - DNA, 100 bp, Homo sapiens
ggaatttgtgagacagtattacacactgctgaaccaggccccagacatgctgcataggaggttgctcaaagaagtacagtctttaaaacaaccatacctg

SEQ ID NO: 850788 - DNA, 100 bp, Homo sapiens
gcggccctcctcttggctattttgctggcgtatttcatagtcgggaacatgccctgtgtgccgccgtcatttcccacctgcggttattgaagcatctgca

SEQ ID NO: 850789 - DNA, 100 bp, Homo sapiens
gatctcaagtgcaaggagcgggtgaccgacagcgagagtggggacagctctggggaggacccagagggcaacaagacttttgacaagcagggatttcatg

SEQ ID NO: 850790 - DNA, 98 bp, Homo sapiens
gaaattttccaaagttttaacaaaaggtagctacagcaagctgggtagcaggcagatccaaaggatatcatgaagtttccagggcctttggaaaacca

SEQ ID NO: 850791 - DNA, 100 bp, Homo sapiens
ttggaaaaagaaaccacacatcgatattgtgccaatgccttcaaacttcacaggttgctacgatttctgcaaacggagacaaagaaattggcaatatcat

SEQ ID NO: 850792 - DNA, 100 bp, Homo sapiens
ctccgagcgcgcgggatttgcaggacacagcattgttggttttgccatgtactattttacctatgacccgtggattggcaagttattgtatcttgaggac

SEQ ID NO: 850793 - DNA, 100 bp, Homo sapiens
cgccaccaagaccgtcatctacctgctcaacccctgtcacctggtcaccatgatgcatggatcagagaaggctgaagaaggtggagaaactgaggcacaa

SEQ ID NO: 850794 - DNA, 100 bp, Homo sapiens
tgaaaattcctactggacaagaatatgctgccaaaattatcaacaccaaaaagctttctgctagggatccacaggatgagcaggaacggatcgaggaaag

SEQ ID NO: 850795 - DNA, 50 bp, Homo sapiens
tgctttagctggactaacagatttggggcttcaagaagcgtgcacctcgg

SEQ ID NO: 850796 - DNA, 100 bp, Homo sapiens
agagcttagttgaactccttgtggatgaaaatactaggaaaagtttatttaagttacgttctacatgggatgaaatattccctttgaagaaactttatgc

SEQ ID NO: 850797 - DNA, 99 bp, Homo sapiens
tgatggataaatcgaaaggagagcccgtcattagcgtgaaaaccacaagcaggtccaaagagagaagtttgctctccaaagctcggggaattgattcca

SEQ ID NO: 850798 - DNA, 99 bp, Homo sapiens
gagcggccgccgccgctgccgcttccaccacaggagcttactccacgggaacagcctctagataatctgagttgttgaaaatacgaagcctgttactcg

SEQ ID NO: 850799 - DNA, 98 bp, Homo sapiens
tagtagttgttgagcagagggaaagggataggagaaggatgtggactgcagtgctgcagtgccagggctaccacccgatgccccatgaagtggagatc

SEQ ID NO: 850800 - DNA, 50 bp, Homo sapiens
ttacctaacacgtctttgcaaggtatgatctcgtgaaaccttgagagaaa

SEQ ID NO: 850801 - DNA, 98 bp, Homo sapiens
tgtaattggaagaccagattttgaacatgccgtggaagcttctaaactttctagtcaacgcttcagcatggaagggatctcaaatgtcattcagaatg

SEQ ID NO: 850802 - DNA, 98 bp, Homo sapiens
atgacagtagagggacctcctcccaaagatataggtgatcttcagctttgcaaactggatgaactagattgcttgatcaaaggaattttatacattga

SEQ ID NO: 850803 - DNA, 145 bp, Homo sapiens
tgcatctttgcttctaaaggggcacaccttttatagaagtacgtccaggaatagaagtgacctgctttttcgcaaacttaattcagtgcacaaatgagatgaatgtgaacatcccacagttggcagacagtttatttgaaagaac

SEQ ID NO: 850804 - DNA, 100 bp, Homo sapiens
tggattgtcttaggaccataccatgacaaggagtcacatgatgcattattggaatttgggaataataacctacaaatattggttcatgttaccaaggaag

SEQ ID NO: 850805 - DNA, 98 bp, Homo sapiens
tggtctggccagagacctgctggaaggaatcccgttctgcttccagaagtggaagtgctcacggatcggggaaatctgcaaggcatacccctgcaagg

SEQ ID NO: 850806 - DNA, 100 bp, Homo sapiens
gcagggagagcgctgtgacctatgcaagccgggcttcactggactcacctacgccaacccgcagggctgccaccgttacattggcgaatttgaaatcatt

SEQ ID NO: 850807 - DNA, 100 bp, Homo sapiens
cataccgaataggagtccttccaaaaatgtcttattttaagaagtaacaactttatctggaagtcctagccagcgcaatctggcaagagaaagaaataaa

SEQ ID NO: 850808 - DNA, 98 bp, Homo sapiens
aacaaatgcctcctgaggatttctgtgcctggaaaatatctgttaacagactgcttttacacctacgattctcaaagttggattggtggaaacaatga

SEQ ID NO: 850809 - DNA, 100 bp, Homo sapiens
tggggaactctgactcgcctgtgctctggagcttgatccgaaagcttccacagtgaggactgctccgtgggagaatgtaaagctgtacagttatggcgac

SEQ ID NO: 850810 - DNA, 100 bp, Homo sapiens
cacaaagtgtgtgaacgtgaaaattccacagttccgtggtttgtaaagcaatgcattgaagctgttgagaaaagaggacagagcgggatgccaccagctt

SEQ ID NO: 850811 - DNA, 100 bp, Homo sapiens
ccacctcagccgcttcgtgtggttcttttctggcatcgtaggaggtggcctgctggagacaaatgacctgaagcgtgctggactcatgcttcaagaagca

SEQ ID NO: 850812 - DNA, 100 bp, Homo sapiens
tgccttctactccatcgtgggactcagcagccttggtgctcaggtgccagatgcaaaggtgtttggagaagagggattgaccctgaatcttgaagacgtt

SEQ ID NO: 850813 - DNA, 100 bp, Homo sapiens
ttcaagaatgtttttgaccagaaaaccgacaaccttcccagaaagtccaagctcgtggacggggacaagttctggcggatgcccgagtgctacatccgcg

SEQ ID NO: 850814 - DNA, 99 bp, Homo sapiens
gaagaataaggagaaggataagtcgaaggggaaggcgcctgaagaggacgaagggtgtttgctttgatgtacctaccgcatcagtaacagaaatacagg

SEQ ID NO: 850815 - DNA, 100 bp, Homo sapiens
gtcggtcccaggtcccggcctccgtaatgagagcccggaaccactctttgtgccgcagcttcgcaggaaccttcagaagtttagtctttttggagacata

SEQ ID NO: 850816 - DNA, 100 bp, Homo sapiens
ctgcagaccaggaacaagagagaaagagtggatttcagcctgcacggatggtcttgaaacacaaatggtttttgacatttatgcagtgtgtgattctttc

SEQ ID NO: 850817 - DNA, 98 bp, Homo sapiens
tacacccttggagaatgtgggctcatatccttttcagactacattttcctcacaactgttctttccaattatagtgtatttactcagcagccactgga

SEQ ID NO: 850818 - DNA, 98 bp, Homo sapiens
gccccgcagcccgctcaggaccaggctatggtgaactaaacggtaatgctggagaaagagaaatatctttaaagaacctgagttctgatgaagccacc

SEQ ID NO: 850819 - DNA, 99 bp, Homo sapiens
aacaattggatatagaacttaaagtaaaacaaggtgcagagaatatgatacagatgtattcaaatggatcttcaaaggaaagcagatggtggagctgaa

SEQ ID NO: 850820 - DNA, 100 bp, Homo sapiens
atttgtagacccgtctgcagccctggatctattaaagggagcattccgatcatctgaggaacagcagcccatcaccacgggaggggtcacttaccgggag

SEQ ID NO: 850821 - DNA, 100 bp, Homo sapiens
gtttagccaacccaaattaccttaattaggtaaataccggattgtatacgtaactccagaatactgttcaggtaacatgggcctgctccagcaacttgag

SEQ ID NO: 850822 - DNA, 100 bp, Homo sapiens
tgaagtcctacagagttatcaggttccagaccctgccttctcttctgaaagctgcagacattcaatactgcctcaccttgtcaagatgtcaaacagctga

SEQ ID NO: 850823 - DNA, 149 bp, Homo sapiens
cctcacctatttggtcctcttggtcctcggatgtcacagcttttccatagaacaattggaagtggagctagagatctgaatctcaatgtggtagcaatggctttatcgggttatacggatgagaagaactccctttggagagaaatgtg

SEQ ID NO: 850824 - DNA, 100 bp, Homo sapiens
acgtttcttacaggatgtactgcagcaccacccatatcattgtcaagagagcaggctgaagccgacgtagcttctctgaacagacgcatccagctggttg

SEQ ID NO: 850825 - DNA, 100 bp, Homo sapiens
ggttatcggaagtcacgggaaggactcagcaacaagggcaatggagatcttaaaagaaagtggacctgggcagtggaatggcttggagatgaacttgaaa

SEQ ID NO: 850826 - DNA, 100 bp, Homo sapiens
cctgtacttcgatgtgatgctggagaactttgcacttacgtcctccctggctcaatgtcaattgctgcaagcttagtgagtgaagatacaaagaccaagt

SEQ ID NO: 850827 - DNA, 100 bp, Homo sapiens
ctttgtctcagccaagacaggagactctgttattctggtacaagttaacccaggagaagcatttacaataagaagagaagatggacagtttcagtgcatt

SEQ ID NO: 850828 - DNA, 99 bp, Homo sapiens
tccagattccaagctgaagaagagcaaaaggcggagctgtagccactgtagcagcaaggtggatcctgtgaaactgcgccagtctatccgcacagttct

SEQ ID NO: 850829 - DNA, 100 bp, Homo sapiens
aagaacaaaggaaggggagcccgggacccccgggggcgcaggttcttccaggggacccagccccctaaccatgggagctcaggacactctccctgttgca

SEQ ID NO: 850830 - DNA, 100 bp, Homo sapiens
cgccgaccgcgttcctatggacagacgcacagacacctgcaggaggaaaagctgaccagcaagaagaacgtcggagacaaaagcagatgaaggttctgaa

SEQ ID NO: 850831 - DNA, 99 bp, Homo sapiens
cattcaagcagcagaaggtggaggacttttatgacatcggagaggagctggggagagcctggagaaagttcttgtggaattcagtcacaaggagttgtt

SEQ ID NO: 850832 - DNA, 100 bp, Homo sapiens
cactcgtctgccagcgaggcccaaaggggaagcctagcggagctcagtgtggcagctgctggcctctgggccgataaacaggggtcacatgacgacagaa

SEQ ID NO: 850833 - DNA, 98 bp, Homo sapiens
ttctgtacagcctgcagaactgggccagtgtcattcaaagatgtggctgtggatttcacccaggaggagtggcggcaactggaccctgatgagaagat

SEQ ID NO: 850834 - DNA, 100 bp, Homo sapiens
agctcatcaaaaaaagagggaaaacacgctgtttgatattcatagatctccagcaagaagaagccatattagctgctccaagcttttctgccatttgaag

SEQ ID NO: 850835 - DNA, 100 bp, Homo sapiens
atacaacctagaaccaaacggtcatcacttcagcagggttttttgaagaatcaaatattcagtgggatacaaatggaatactcccccagttgcaagaggc

SEQ ID NO: 850836 - DNA, 100 bp, Homo sapiens
gtttgggtggaagaatcagacaaacggtcatttctgcttgacctcctaaatgcaacagctttacccagaaatacccaccagtaaagtttttatcagaaaa

SEQ ID NO: 850837 - DNA, 100 bp, Homo sapiens
gaacagaaggatctctccttaacgcctttcaccattaagaggaaagcgatggaggagctgagcgctgatgaggtgaaggcagcttccaaatatgtggatg

SEQ ID NO: 850838 - DNA, 100 bp, Homo sapiens
aattcaccagagagcagcagccatgccaatgcgatgggtgccaagtaccggggctccatccatgacttcccaggctttgaccccaaccaggatgccgagg

SEQ ID NO: 850839 - DNA, 100 bp, Homo sapiens
aaaaaccttccagctgtacaaactgttgctccaatgccagaagattcagctgaaaatatgagggggtggcccgattctacaggtcacggaaaaagcactt

SEQ ID NO: 850840 - DNA, 98 bp, Homo sapiens
gatgtggtgtctcggtccatgactctggagatccgagaaggaagagatgcaaagaatatggccaaggatgtacatgatgcccttgtgcaaataataag

SEQ ID NO: 850841 - DNA, 100 bp, Homo sapiens
gtgacagtcatgctgaaacctgcccacagcagaggagcacctgtcagcttagaacagcgaaacttgactttggaaacagaaatgatgagcctccatgatg

SEQ ID NO: 850842 - DNA, 98 bp, Homo sapiens
tgatggcagcagttactcgcacaaccccagttaagctgcgctccgggaggaggaagaaggcacctacgatcaaactctggagttccgtaggggaggtg

SEQ ID NO: 850843 - DNA, 98 bp, Homo sapiens
ccatggtggccggctcccctctcggggcaacccagacgtgcaacaaagtgcgatgacacgatgaggcgagtggtacgacagagcaagtttcggcatgt

SEQ ID NO: 850844 - DNA, 100 bp, Homo sapiens
gaagtttcaacgcttgacacagctataagtgctgtaaagtggcagtgaccctggacccagacacagcacatcccaaactcatcctttctgaggaccaaag

SEQ ID NO: 850845 - DNA, 100 bp, Homo sapiens
tacgctggctgggcctccacaccttcatccggcacaagcggaccatggtcaagttctgcaagtgaaggccccctgaagtggaagacagcattggtactaa

SEQ ID NO: 850846 - DNA, 100 bp, Homo sapiens
agaaagaaaactcctccttgtacctagtcaccattactttaagtactgcaaaatctcagcattggctctgctgaagatggtgatgcatgccagatcggga

SEQ ID NO: 850847 - DNA, 98 bp, Homo sapiens
tcaacaacataaatttccagagaaaatctgttgtgggagttcccattagacttgaagttgggccacgtgatatgaagagctgtcagtttgtagccgtc

SEQ ID NO: 850848 - DNA, 98 bp, Homo sapiens
aagtgctcaaatctgaagatatcggagcacagtgctacttggaatgttcagctctgactcagaaaggtctcaaagcggtttttgatgaagcaatcctc

SEQ ID NO: 850849 - DNA, 98 bp, Homo sapiens
gagcggcaaaaaaataaaaaaaaagccaaaaagataaaagcccggatgaacttcaggtagttcctgaaatgactgagatattgaagaaaaaatgaatc

SEQ ID NO: 850850 - DNA, 98 bp, Homo sapiens
cgaagcaggaagggagatgcagcatcccagtttttggtcttctgtcaaaaacacagggatgagcgccctcacaaagccaatgctgaggagatgaccaa

SEQ ID NO: 850851 - DNA, 100 bp, Homo sapiens
agttcacagaagagtcgaggaggtcatacagcagatggaacaaaaaaaattacaacaaggaattcctccatcagggccagctggagaattgaagtttgag

SEQ ID NO: 850852 - DNA, 100 bp, Homo sapiens
gacacggccaagaggagtgtggctgctgttcctgctgccccgtgggctgtgccaagtgtgcccagggctgcgtctgcaaaggggcatcggagaagtgcag

SEQ ID NO: 850853 - DNA, 100 bp, Homo sapiens
ctattatcaaagagaaaagagacttgatggcttgtgcccaaacaggtgtttcccattaaacactaccaggacaaaatcaggccttacatccagctgccat

SEQ ID NO: 850854 - DNA, 100 bp, Homo sapiens
ccgtcatatgccaaagatgatgaggtcatctgcacttcattttactccaagatacaccccttagaaaatggagaggtggaacttgcagaaatctgtgcca

SEQ ID NO: 850855 - DNA, 100 bp, Homo sapiens
accaagaaaaattaccgagccagccagcaggaaatacagcatagccagatttcacactgagcagctgcagtcggagaaatcagagaaagcgtcacccagc

SEQ ID NO: 850856 - DNA, 100 bp, Homo sapiens
tcaacaccaaaaagctttctgctagggaatggctttactcctttatacatggctgcccaagagaatcacattgatgttgtaaaatatttgctggaaaatg

SEQ ID NO: 850857 - DNA, 99 bp, Homo sapiens
tgggacagggacaagtttgacggtcattccaaagtgatcagcagctggactgtgccttggacctaatgaggcgcctgcctccccagcaaatcgagaaaa

SEQ ID NO: 850858 - DNA, 51 bp, Homo sapiens
ctcggtgggacagggcctcagaggacaatgacgtcctcctgcactgggctc

SEQ ID NO: 850859 - DNA, 98 bp, Homo sapiens
gaaggagacagaagcagccatggaaaaattaatcaacagagtgggacctaatggtgagagcctccacagctttccttgctgatagccagcctccaaac

SEQ ID NO: 850860 - DNA, 98 bp, Homo sapiens
aagatgtttacagtgcagtcttatcgaaggatgtgcatgaaggacagcctcttctcaatgcatctaacattcacaagggaatttgattcagattctct

SEQ ID NO: 850861 - DNA, 121 bp, Homo sapiens
tcctggttttgcagcactttgataactgtgtggacaaaacagtacaagcattcatggaaggtgtcagcatttgcaggtatacaggaacagtcctagtgatgcactatttaatcaaaagacg

SEQ ID NO: 850862 - DNA, 100 bp, Homo sapiens
aggagaactggtcgccatcaagaaagtattgcaggacaagagatttaaggacggagtaaccaagagcccagaaaagcgctcttctctcccaagaccttcc

SEQ ID NO: 850863 - DNA, 98 bp, Homo sapiens
cagaaagaggggcaagaaccccatgaaagctgtgggactggcctggcacctggccaagagaatacaggtgggctccccagggtgctgcatcatcacca

SEQ ID NO: 850864 - DNA, 100 bp, Homo sapiens
ggaccagagtcgagttccctcctcctgcaccaaagggagccgccaccgtctggtgtctaaaccgcctcgggtgcgctacaaggaggagtttgagaagaac

SEQ ID NO: 850865 - DNA, 100 bp, Homo sapiens
atgtgtcgccatccagtaatctcagaaagtgaagttttccagcagttcctaaatttccgagatgagaagaatcttgctgctgagaaaacatacaataacc

SEQ ID NO: 850866 - DNA, 98 bp, Homo sapiens
acgactgtggggacaacagtgacgaagagaactgtctcctggtgaccgagcacccgcctccgggcatcttcaactggctcacacagtcgacaaaagaa

SEQ ID NO: 850867 - DNA, 98 bp, Homo sapiens
actgctgctaccttgtttaagaattctatgattgctctagtagacaaccttgcatcaaagtactatactggcaattgctggagaagattttgcaattg

SEQ ID NO: 850868 - DNA, 100 bp, Homo sapiens
ttatggatttttctaccatatcagagatgacaggttaaaaagatcaagtggcatgagcagccttttggggaaaattggtgccaagaagcagaaaatgagc

SEQ ID NO: 850869 - DNA, 100 bp, Homo sapiens
gcagatgatgcagaggagcgagctgagcgcctccagcgagaagttgagggagaaaggcgggcccgggaacagctgttccaaagacctaatgcgcttgctg

SEQ ID NO: 850870 - DNA, 100 bp, Homo sapiens
caacctacttacagtcacgttactacagaaatgttgctgaagtgctgctgaaagggccagagatgcaaggatttgggatacattttgaacctttaagctg

SEQ ID NO: 850871 - DNA, 100 bp, Homo sapiens
gactgttccagtactccgtgtctgaatggggcaaagtgtatcgatcacccgaatggctatgaatgccagtgtgccacagacagcatcgcacagaattatt

SEQ ID NO: 850872 - DNA, 100 bp, Homo sapiens
actttacatctgcagttcaccaaaagcacaaggatcattttcgactcactgcctcaactccatatagcatagattcagattctttgggaatggagtgtat

SEQ ID NO: 850873 - DNA, 100 bp, Homo sapiens
agtttgtgtgttagcagaggcgcattttccagggctgaggccaccatggagcagtgtgcgtgcgtggagagagagctggacaaggtcctgcagaagttcc

SEQ ID NO: 850874 - DNA, 100 bp, Homo sapiens
gaatgtgtcagatcagtatttaacacgacatttctgccgatatgggcctgtggtaaagtgcataactcctcctcagagccctgatctcgtggagccatcg

SEQ ID NO: 850875 - DNA, 98 bp, Homo sapiens
cttgtcaatggccaacagagggaaggatacaaatggttcacagttcttcatgacacatccggatttcagacctcggtttggccacagagatcccagaa

SEQ ID NO: 850876 - DNA, 100 bp, Homo sapiens
gctgactcagcctgttccattaagcacgtctccttcctgccatcttgtgaagaagtgccttgcttccctttcaccttctgccatgattgtaagtttcctg

SEQ ID NO: 850877 - DNA, 100 bp, Homo sapiens
gactactatgactctgaacagactaattgtcagcctagaaaaggaacttgctccattgtttgaagaactgagacaagttgtggaagtttcttaatctgac

SEQ ID NO: 850878 - DNA, 100 bp, Homo sapiens
caagacggtaccacatacttgggaatgaaatgatgtccccaaggactaggccacgcaggggtcttgctcctcagaacaaaccagaattgcagaaggtgat

SEQ ID NO: 850879 - DNA, 100 bp, Homo sapiens
cttatatgtgatgccattccagcactggactcatggaggctgagcatttattcagggcttcatcaagatgaagagctaccccagcagcaccaatgtggag

SEQ ID NO: 850880 - DNA, 99 bp, Homo sapiens
ccgaggtcatcaaacagtcggcctatgactcgaaggcttctccagggaaagtgaccgaggcagtgaaagaggccattgacgcagggtaccggcacttcg

SEQ ID NO: 850881 - DNA, 101 bp, Homo sapiens
ttttctggggctttcagacccacaaggtaataataattggcaatggattgataagacaccttatgagaaaaatgtcagtggaaggaggcatgcatccccag

SEQ ID NO: 850882 - DNA, 98 bp, Homo sapiens
cgcctcgtcgacatgagtgatgtggaggaaaacaacttcgagggcagagttcaagggcagacggggtttttgaggaggattcgcaaattgacatagcc

SEQ ID NO: 850883 - DNA, 115 bp, Homo sapiens
tagatcgagcagatttcaatgctgttgagtatatcaataccctgttcccaaccgagcaagaagcagacaatgatccaacaggggaagcagcagctaatacccagcagacacttac

SEQ ID NO: 850884 - DNA, 99 bp, Homo sapiens
catttccagatattaggtcacagcagaagcagccaaaatggatccccagtgaaatgggacgtcggtcatcagatactgaagaagaaagcagaagcaaga

SEQ ID NO: 850885 - DNA, 98 bp, Homo sapiens
gctaatcctggcgttccaccagcaaccatgagtggttccatgatgggaagtgacatgagagaggctgctcacccaacagacgtctccatctccaaaac

SEQ ID NO: 850886 - DNA, 100 bp, Homo sapiens
atgctttttattacaagactacggagcataggaggaaaattcatcatctgatcacagacaacctgacgaagaaggagattcagatagagaagatccattt

SEQ ID NO: 850887 - DNA, 100 bp, Homo sapiens
gaaggataagtcgaaggggaaggcgcctgaagaggacgaaggttttacagacatttcaccagaggaattgaggcttgaataccataacttcttaaccagc

SEQ ID NO: 850888 - DNA, 100 bp, Homo sapiens
gccgaaagtcatcctttaatagacgaggtgtcatggagaaactccagctgggcccagagattctgcagcgggaaaatccaaggcttatttatgccaggct

SEQ ID NO: 850889 - DNA, 100 bp, Homo sapiens
agctagcgcgaggctggggagcgctgagccgcgcgtcgtgccctgcgctgcccagactagcgaacaatacagggaatgaaagctactggttgattttaaa

SEQ ID NO: 850890 - DNA, 99 bp, Homo sapiens
cactggaaaatgctggaattttctatgaagcacaatacaaagaagtaaaagtggtggctaatgtacaaacccgtagtgctgatgaaccaatgacaacat

SEQ ID NO: 850891 - DNA, 98 bp, Homo sapiens
tagctccccccagcctcgcgatggccgaggaagaagccctcaggggcaattctgacccatgggccaaattggcagagtgagatgggaagaagatcttc

SEQ ID NO: 850892 - DNA, 100 bp, Homo sapiens
ctgggatgcaattgttgcagaagtgaaggataggcagccaaggaagaaaaaatgctgggcatcttggtgcagcacaaagtccggagtggcgtctcgggca

SEQ ID NO: 850893 - DNA, 100 bp, Homo sapiens
acagtccctggatcaccgacagcacagacagaatccctgctaccaccaagaaggatcaagaaggtggagaagaaaagaaatctgtgcaaaagaaaaaagt

SEQ ID NO: 850894 - DNA, 100 bp, Homo sapiens
tgcaaagaatggaaatgagaaagaagttaaggagtatgcccaagttttccgtgaacatgccaacaaattgattgaggtgaaatgacaatggatgctctgt

SEQ ID NO: 850895 - DNA, 101 bp, Homo sapiens
cttggtcctagcacccactcgagaattggctcagcaggttgtacgtggacactataaaggtcagcaaattggcaaagtagtccaggtttacaggaagaaat

SEQ ID NO: 850896 - DNA, 98 bp, Homo sapiens
cctgggagtccccgtctgcggtgccgccgaactgtgcgtgaactccttaggactacaggaatatgtggaagctgtctcttttcaacacttcatcaaaa

SEQ ID NO: 850897 - DNA, 98 bp, Homo sapiens
atcgcaaccagtcctctggaggcagggagactggggtggagacttcggagactgcagttgcagacttaattcagtgcacaaatgagatgaatgtgaac

SEQ ID NO: 850898 - DNA, 100 bp, Homo sapiens
tcggcttccaccgcttcttagtgcatcttcatgatacagttaagaggaatcttgacagcgccacttcccctcagaatggcgatcaacagaatggctacgg

SEQ ID NO: 850899 - DNA, 100 bp, Homo sapiens
gtttcaactgtgcagaatctacaaattttgctactgtcagatggattgactatggaaaagttgccaaattgattagtgatgatgaaccaggttatgacct

SEQ ID NO: 850900 - DNA, 100 bp, Homo sapiens
cctaacatccagccgtccccagctcacgaagcatcagatggtgaaggagaaggagacacagaagtgatgcagcaggagacagttccagttcctgtacctt

SEQ ID NO: 850901 - DNA, 98 bp, Homo sapiens
gcgggaggagcggccggcgggacggaggttcaacatgcactgaaaaaatcagagaaggctttggataccctaaacaaagccattgtcattgatcccaa

SEQ ID NO: 850902 - DNA, 99 bp, Homo sapiens
gacgcggcacctacggtcacgtctacaaggcgaggcggaaagatgggtagtggctctttatgactacacagcgaatcgatcagatgaactaaccatcca

SEQ ID NO: 850903 - DNA, 98 bp, Homo sapiens
ctttgtgtctatcacagtggaggatatgggccctcacattttccaaacctgtccatctgctaactattttgactgcagagccatgtccattggagccc

SEQ ID NO: 850904 - DNA, 100 bp, Homo sapiens
gaattttcagatgactggactcttagtggaaaggtggtggccaatgcagtggcagcgctctcagaaattgccgagtctcaccccagcagcaacctgctcg

SEQ ID NO: 850905 - DNA, 100 bp, Homo sapiens
agctaaagacatagttcctggtgatattgtagaaattgctgcctgggcactggacttacaccctgaacaatacccatcattctctgcaagccctgaaagt

SEQ ID NO: 850906 - DNA, 100 bp, Homo sapiens
tcatcctgctgggcttcgtccagatcgggaaggtttgtttcgacgccggaccgcgtaagagacgatgatgttgggcacggaaggtggagagggattcgtg

SEQ ID NO: 850907 - DNA, 50 bp, Homo sapiens
cggcgctgcggggccgcgggggtcggtcaaaatgcagatcttcgtgaaaa

SEQ ID NO: 850908 - DNA, 95 bp, Homo sapiens
aaaggtcccggaccccccggatctgacggggcgggacctggcgccaccttgcagccagatctgccagtgagcctcaggctttaggaactgaagag

SEQ ID NO: 850909 - DNA, 99 bp, Homo sapiens
ttctgggaaaacaacattgtctcggtaactggggaagaagctaaacaagaatcattggagacttctaatcttgtgctttcgggtattggaagtacacaa

SEQ ID NO: 850910 - DNA, 100 bp, Homo sapiens
ctggagccagaaacattaccgtcatattccacccattactaagaattttctcccaaactggttggcttgactggcacgagagaagaggtcgatcaagtgg

SEQ ID NO: 850911 - DNA, 99 bp, Homo sapiens
ccttctgttgtagaaacaactcaccaggatagtcctttacctcacccagagtctactaccagtgatgagaagattcccaacttcttctggagcctgggg

SEQ ID NO: 850912 - DNA, 100 bp, Homo sapiens
agcatttagggcaaggtatcatctggtggataaagatcatgacagtttgttggaccagattccagacatgtttgcagactctaatgaaaatgagactgtc

SEQ ID NO: 850913 - DNA, 98 bp, Homo sapiens
tgggacagcgttctgtcatctcagcaaagaatggattatagctggacagacatccgctgcccctttgaaaaacgaagagatgcagcatgcgtgttttg

SEQ ID NO: 850914 - DNA, 98 bp, Homo sapiens
gataaaatcagagtgtggctgcaaagtgaaaagcttgaacgtggtcgttctcgttaccggaccacttcttcagccaacaatcccaatctgatgtatca

SEQ ID NO: 850915 - DNA, 100 bp, Homo sapiens
atcattaatgaagtaaagcccacagagatctacaaccttggagcccagagccacgtcaaagttttcaaatggaacattttgatgcatcacttagtaccta

SEQ ID NO: 850916 - DNA, 100 bp, Homo sapiens
ggtgggattgtcgggcggtcagcggacttcgtggtagaatccattggctctgaagtggggtctctgggtgtttaatgaacgctgccgaattcacttcaag

SEQ ID NO: 850917 - DNA, 100 bp, Homo sapiens
gactgtgatggccagagagatgacgatcttagtctgaccagtgcacaggacttcagggcttcctggtgttccacagctttggtgggggcactggctctgg

SEQ ID NO: 850918 - DNA, 100 bp, Homo sapiens
gtcaaaagtgtggatgggatttccaagatcttcagcttggattccttagcaccaccacagctcagccagaacagaaggcctcgaatctcattggcacata

SEQ ID NO: 850919 - DNA, 100 bp, Homo sapiens
gatgaggagggccacatcaaactcactgtgcatacattcccttgaataattacttggtgtttaatgatgtagatgggctgtatacatacacatttgaagc

SEQ ID NO: 850920 - DNA, 100 bp, Homo sapiens
cctgaccactggcccctgactacatggtctttggtacaaacccgtagtgctgatgaaccaatgacaacatttgttgtctgtaatgaatgtggaaatcgat

SEQ ID NO: 850921 - DNA, 98 bp, Homo sapiens
aaacaaaagacaactctgcttttccagaaactgtgccaggatcacggaaattgacgggaaggctctgctcctactcacgagtgacgtgttgctgaagc

SEQ ID NO: 850922 - DNA, 98 bp, Homo sapiens
aggatgcagtggaggccatcaggggccttgataacacagagtttcaagacgcactactttggcctttggtttctcagcaagagccagcaagcacgatg

SEQ ID NO: 850923 - DNA, 100 bp, Homo sapiens
ataacaataattttgaaaatgctttgtgcagaaaggaatcaaaagaatatttagaatgcaggatggagagtatggtttgaagtggtgaacatggattttt

SEQ ID NO: 850924 - DNA, 100 bp, Homo sapiens
tgcccttcgagtacatctacttccgcagcagaaggaactgacctctccccgcctcatcaagagccacctgccctaccgctttctgccctctgacctccac

SEQ ID NO: 850925 - DNA, 100 bp, Homo sapiens
gccagtgttcagctacagcttccttaatggtccttcaaacctgaatagagtcaccttgtaataactgggaactcttcccctgaagacacctggttaattc

SEQ ID NO: 850926 - DNA, 100 bp, Homo sapiens
cttctgtagaaccaaaattgactgtgataacttggagcagtactttatacaacaaggaggagaaaaatctgtgacccaggccttactgcttttgaacctg

SEQ ID NO: 850927 - DNA, 98 bp, Homo sapiens
taggaaacacctctacctcctgcgaggcctcccgggctccgggaaaactacactggccaggcttcctgtgtccagtaccggttagtggtccgggatgt

SEQ ID NO: 850928 - DNA, 100 bp, Homo sapiens
ttattcatcagtttgttgtgcttgtcaagatcaggagtggaagctggacacactatgtgacttgtatgaaaccctgaccatcacccaggcagtcatcttc

SEQ ID NO: 850929 - DNA, 98 bp, Homo sapiens
cttgactaaaccgacttctgatccatggatgccatcaggtcatcaccgagtggtcttctcacatcatccttcaggcagcaccaagagtcactggcagc

SEQ ID NO: 850930 - DNA, 100 bp, Homo sapiens
acagaacgacctagtatttgaatttgctagtaacgtcatggaggatgaacgacaggagatatctgaagagattataggatcacccatcccagaacctagg

SEQ ID NO: 850931 - DNA, 99 bp, Homo sapiens
agatggtgcagaagatggaggaggttgcttatggaaccacagagaacagtcccgtgacattcgcgcacttccctgaggacactgtggagcagaaggcag

SEQ ID NO: 850932 - DNA, 98 bp, Homo sapiens
ctggatgccgtgatctccagcgccggcctcctcagtgcgaagaagctgcagccgcacctggccaaggattgctaagaagcctcgaacgccaacctctg

SEQ ID NO: 850933 - DNA, 100 bp, Homo sapiens
agtgtcctttacaaatcttcagggaatggccaagtgacaaagctctagaggacaaaatcccagtccttggcacaaactcaggaaatggaagccggagtct

SEQ ID NO: 850934 - DNA, 99 bp, Homo sapiens
accgccaaggccaaagcacagttttaccgagtgaacctgcggaccctgagcggctactacaaccagagtgaggcctgatgctgactcctgcgtccatct

SEQ ID NO: 850935 - DNA, 99 bp, Homo sapiens
ccctacattgtgaagctcctgggagcctactatcacgacgggaagctgtggagttcacagttaccagccaagaaaacttgaaaatgagcagccgacgga

SEQ ID NO: 850936 - DNA, 98 bp, Homo sapiens
atcccaaagccaaacagcacatgtgaccatgtctgcaaaggagaagtcgaagtttgaagatatggcaaaaagtgacaaagctcgctatgacagggaga

SEQ ID NO: 850937 - DNA, 100 bp, Homo sapiens
accccatatggggggccctcccatgatgccaatgatgggccctcctcctcctgggatgatgccagtgggacctggtggatctccttacgtagcagccaaa

SEQ ID NO: 850938 - DNA, 51 bp, Homo sapiens
atgagctatgacttgctaaacaatctgttgatgccatggacaatattacca

SEQ ID NO: 850939 - DNA, 98 bp, Homo sapiens
ggctttcaaggactttgatgttggcgatgacaagttggatggcttgaggactggtactaaaaggaaacgtgactgggaggccattgccagcagaatgg

SEQ ID NO: 850940 - DNA, 100 bp, Homo sapiens
ctcaaccgcttcgtgcaactctccgggcggccgcacctgccagggaaatcctcattgacgattcaatttgttgaaggccaatttgtggactcctacgatc

SEQ ID NO: 850941 - DNA, 100 bp, Homo sapiens
ggggtcttgtgggagagattatcaagcgttttgagcagaaaggattccgccttgttggtctgaaattcatgcaaacttcacagagaatgcagttgtcttg

SEQ ID NO: 850942 - DNA, 100 bp, Homo sapiens
gctaaggatgtattgtggcttttgtttggattgcagcatgcagaattacagtgagatggaagattttcgaggtatagcagaagaatcatttccaagcttt

SEQ ID NO: 850943 - DNA, 98 bp, Homo sapiens
aacaacccagagtccgtgtattactgggcccagaaggccatcgaggagggcacgctggaggagatcgaagaggaggtccggcagaagaaatcatcacg

SEQ ID NO: 850944 - DNA, 100 bp, Homo sapiens
tgacagtaactgaacattggtctaaagtctttccaaaaggtcaaggttcacaaggcgcattctacattctaaaggggagctcagtgaagatagacataaa

SEQ ID NO: 850945 - DNA, 98 bp, Homo sapiens
gatattgggagatccacagctaagacgccgggactccctggaaacctagaaatggagtaccgggcgtcaaagcagaacgctttgaagaaggaatgacg

SEQ ID NO: 850946 - DNA, 98 bp, Homo sapiens
ccagcaacaagacagagctggcctggagtccgcggctggccgcgtgagtagaaggtggtcttctgccctgttaaagaagccctggaggtggactggag

SEQ ID NO: 850947 - DNA, 98 bp, Homo sapiens
tttttcagggacgtagccatccagagggtctccaactgaattccttgaagagaaaatggcctaccaggaatacccaaatagccagaactggccagaag

SEQ ID NO: 850948 - DNA, 99 bp, Homo sapiens
taaccccttccgggagcctagatcctgtgctttactctgaagactcgcagctgcagttgcactttcctccctgattcatgctttggatgacttagacat

SEQ ID NO: 850949 - DNA, 100 bp, Homo sapiens
acgcaaggaccggagggcgtgggctgggacgcccctaccttggtctttcaggacttaattcagtgcacaaatgagatgaatgtgaacatcccacagttgg

SEQ ID NO: 850950 - DNA, 99 bp, Homo sapiens
ggggagcagttgggaatcaggtctggaatactcctaaccaagaagttgcccagctattgacctgaaaagtggttctggaaaagtgtaccaaggccctgc

SEQ ID NO: 850951 - DNA, 98 bp, Homo sapiens
ggcagtcaccagcattgcctcgaccacactcacctctctctgctcatgcaggggaagatggtgaaaggaatgggaggtgctatggatttagtgtccag

SEQ ID NO: 850952 - DNA, 98 bp, Homo sapiens
tttgatcatgcttatggtaactatatgctgcagtgagaagaggagtttgttactttaaacagaggctgaagaaactatagaattagcagagaaagtgg

SEQ ID NO: 850953 - DNA, 119 bp, Homo sapiens
ctggctccgagtcagccccactctacaccaacctgacaattgatgaaaacaccagcgatcttcagcctgacctaggactagcccgagccaagtcagttcccacaaagacctactcaaat

SEQ ID NO: 850954 - DNA, 99 bp, Homo sapiens
ttgtctttctcagcaccttggcgaagccttgggtttctttcttaaaggactgatttttagaactccacatttgagactacacttgctgctttgaaggat

SEQ ID NO: 850955 - DNA, 100 bp, Homo sapiens
ccattcgagggctgagtgctttgcagtcttttggcacgtctagtgatgaaatgtgcaacttatacattatgtattacatggaagccaagcatgcagtttc

SEQ ID NO: 850956 - DNA, 100 bp, Homo sapiens
gctcattgtagcctcaaactcccaggctcaagcagtcctaccatgtcagccttcccagtagctgggaccacaggatgagccggagccagccatccgaaag

SEQ ID NO: 850957 - DNA, 100 bp, Homo sapiens
gtttcgggatctcggtgctgcagacggcgagacctcctgcacagtgcaccgtccaggtgaggttagagctggggcatcgcgcccaactgcgcaagaagcc

SEQ ID NO: 850958 - DNA, 51 bp, Homo sapiens
tgtcactcctggtgaccagcattcaaggtgaacacacaggatttcagagga

SEQ ID NO: 850959 - DNA, 98 bp, Homo sapiens
gaactcccagggctgcgggcgcaacgccaccacgcctttgtggagaacggaagctgcacaagccttaatttatgctgagatggcaggatcaagcctag

SEQ ID NO: 850960 - DNA, 99 bp, Homo sapiens
gcttccgggtaaatgcagagctacaagcacgctctaacatctgggtgagcaaggtccgtggtcctgtcagtggaagcccggatagcatgaatgcctctc

SEQ ID NO: 850961 - DNA, 100 bp, Homo sapiens
atggacccagcctgggaggccccagagggtgtccccattgacgccatcatctttggtggccgcagacccaaagggtgatgcccggtatctgatctccaac

SEQ ID NO: 850962 - DNA, 100 bp, Homo sapiens
tctgacttcacagcagccgtcaccctggggaacccagacgtcctcgtgggttcagggaccattgcaatttagagatgtggccatagaattctctctggag

SEQ ID NO: 850963 - DNA, 99 bp, Homo sapiens
taaaaaccccggaagggcggacacctccacatcgccttttgccacctttccctttatttccggaggtcaccgacgatgagggcgcacctgctgtcctgg

SEQ ID NO: 850964 - DNA, 130 bp, Homo sapiens
gtgaacggggtcctcttctgcaaggtccggctgctggatggaggggattttgtcagcttgtcgtcaaggtatataatgtttacatggcagggaggcagctgtgttctaagcggtaccgggagtttgctat

SEQ ID NO: 850965 - DNA, 100 bp, Homo sapiens
tgttggttcgattaaaaaaaacagatcgtatttatgcaatgaaagttgtgaaaaaagagcttgttaatgatgatgaggatattgactgggtacagacaga

SEQ ID NO: 850966 - DNA, 99 bp, Homo sapiens
tccaattcaaaagaactgctgcccagtgactccgtgctgcacggaagaatatcagctccagaacgcatgctgattctgcaaaatccacctcttctgaaa

SEQ ID NO: 850967 - DNA, 100 bp, Homo sapiens
ctcacattcaagctgataggctgcgctaccggaatgtcatccagcgagtgattagctctttcctctcaggatcctgctctttccctgaaagagaatctcg

SEQ ID NO: 850968 - DNA, 100 bp, Homo sapiens
acgctgggtaatgaggatttgactgtgaaggctttgaagacaagattcccaaaaggagattctctgagatgcaaaatgaaagacgagaacaggcacagcg

SEQ ID NO: 850969 - DNA, 100 bp, Homo sapiens
ccgggagctgtacttctatatctacaagggggtccgcaaggtccatctcccatttgcagtggttggcagcaccgaagaggtgaagattggcaacaagatg

SEQ ID NO: 850970 - DNA, 100 bp, Homo sapiens
ggactctggcacctacgtctgcactactaggtaagaagagttcctgggtcaagtggtcaccttcataaaaccgaagacggggactgggagtggagtgacg

SEQ ID NO: 850971 - DNA, 100 bp, Homo sapiens
aggacaccatatagtgatggagtcctatatgggtccccaacagctgaaaatgtggggaagccaacaatcattgaggcatgttatttgaaagcaattgaga

SEQ ID NO: 850972 - DNA, 100 bp, Homo sapiens
aacctttaatattgtattctcctaaatgagacgtctcgcatttgagcaggtaacactcgggagctaacagaatgagaggtcggcttggaagtgtggacag

SEQ ID NO: 850973 - DNA, 98 bp, Homo sapiens
agtcccgatttcttcaatgattaccaccttcaaaatggagatgttgttgggcagcattcatttcctggcagagcatctgctgcacccaagcctgagcc

SEQ ID NO: 850974 - DNA, 100 bp, Homo sapiens
atttaagagaatacatggttgaaaaaatttacccacaaatacctggtggatccaaagcagttgctggaagatggaataaggaaagagcttgtgaagcgcg

SEQ ID NO: 850975 - DNA, 100 bp, Homo sapiens
ttttccagaggaccagctttcgctttctgaccagcagggtccctgaatgctcgaagcagtgcagaagatcgatctccagaaaatactgggtcctcagtag

SEQ ID NO: 850976 - DNA, 100 bp, Homo sapiens
catatgtggagacgctcctagaggttttaggatgagcaattcttaggttttggctcagatgaagaagtcagagtgcgaagtcccacaaggtctccttcag

SEQ ID NO: 850977 - DNA, 100 bp, Homo sapiens
aacaaactgggtcccaatgatcaatacaaggagctgtatagccagacgtatgatgagattggagtcatgtttgcctccctgcccaactttgctgacttct

SEQ ID NO: 850978 - DNA, 98 bp, Homo sapiens
tgacttcacttttgagtgcaactgccttccaggtgctatacttggtagatcagaaactcaggagtgtcttttctttaatgctaattgggaaaaagaca

SEQ ID NO: 850979 - DNA, 98 bp, Homo sapiens
tggtcacggagaaggcagcctacatagggccgttgccgtctgcacccagaccctgagccgccgccgccggccatggaggtggcgcccgagcagccgcg

SEQ ID NO: 850980 - DNA, 100 bp, Homo sapiens
tgtcacaaaaagaatttcgtcagtctggaaggggagttttacttacgtaaatggatgtagaccagactcaagcatgtttatttgcaagatgggtttgagg

SEQ ID NO: 850981 - DNA, 111 bp, Homo sapiens
ggaggccactagcagccagttccggcccgaggacaccgactaccagcagtattaaaggtggaagaaggtccatatctttttctgtgggtgcttcaagtgttgttggaagtg

SEQ ID NO: 850982 - DNA, 100 bp, Homo sapiens
cctgaaacgcccagtggttgagggaaatcgttggaggttggactgcattcttaaacgaaaagcagagtcttctgacagtgccaataccaccatagaggat

SEQ ID NO: 850983 - DNA, 100 bp, Homo sapiens
ttacacttggagggccttgtccagttccaagatgtctcctttgcctacccaaaccgcccagatgtcttagtgctacagttccagtctcatcagattttcc

SEQ ID NO: 850984 - DNA, 100 bp, Homo sapiens
tagttctggggagcgcctcgtcgacatgagtgatgtggaggaaaacaacttcgagggcagagtaaatgaaattgcctttataaatacccttgaagcccag

SEQ ID NO: 850985 - DNA, 100 bp, Homo sapiens
acccagacgggtaaccagcaagaaccatcgccaaacctttccagagagaaaaccagaggaagacctggcaaacgcattgtgggcacgatgcaaggtggag

SEQ ID NO: 850986 - DNA, 100 bp, Homo sapiens
gctgaacccagccctccctggagtgtttggtggaccatacccttttggcattgatccaaatgatgccaatgggtggaatgatgccacctggaccaggaat

SEQ ID NO: 850987 - DNA, 98 bp, Homo sapiens
gaatcaacatgggcaatgagaacagcacctcggacaaccaggtgtcagttgtacccgaggcgttctcagcagcagcaagtacctgtggtggatttcca

SEQ ID NO: 850988 - DNA, 100 bp, Homo sapiens
agcgcccgcggagacgtgaagaggtaattaataatgcttgtgctactcaagccatagtgagtgtgttactgaactgtacccaccaggatgtccatttagg

SEQ ID NO: 850989 - DNA, 100 bp, Homo sapiens
ctgaacttgccactgagcccccaggggactgtgcgaactgcaggtggagtggctgaaacttctcagcaggcgcatctacactagtgacctgaggagagaa

SEQ ID NO: 850990 - DNA, 100 bp, Homo sapiens
cgaagaagaacaccaggtggagtttttctgaatctcttgaaaaacactcctagtatcagcgaggaacaaattaagtttatacatgaaagcatccatgatg

SEQ ID NO: 850991 - DNA, 100 bp, Homo sapiens
agtcaagaagaaagccagaggaagccattgcccactgctgccgcccagtgttggttttgtctccacaattatccgtttacttgacagcccctcaacatgc

SEQ ID NO: 850992 - DNA, 100 bp, Homo sapiens
ctcctgagtagttgggactacagtctcgaagcagcatgcaacagggcaacgtggacggcgcccggaggctgggccgcctggctcggctgctcagcattac

SEQ ID NO: 850993 - DNA, 100 bp, Homo sapiens
ggatgtgatggatgtcttcatccccaagccattcagggcctttgcctttgttacatttgcagatgatcagacagagatttgggattagaatctaccttaa

SEQ ID NO: 850994 - DNA, 99 bp, Homo sapiens
atcgagaaaatgaccgcaatctctgccagcaccttgggaagagaaagaaaatgccgaaggcactcagacagcagatataatttctacagtagaatttaa

SEQ ID NO: 850995 - DNA, 100 bp, Homo sapiens
ttgacatttgaacaaattaggaagctgaatcctgcagcaaaccacagactcagatctacaactcttgaaaaagaagttcctgtcatcttcatccaccctt

SEQ ID NO: 850996 - DNA, 100 bp, Homo sapiens
aggagttcttccagatcgccaagaacatcaaaaaccataaaaaggaaatcttctagatctccgtcccccaggaggtgtcattccacacatccacaaatct

SEQ ID NO: 850997 - DNA, 98 bp, Homo sapiens
caaagcttattaccagaggagtgatggaagcttagcaccggagaagcaaagtttgtttgctaccaaacctggagtctccctttatggcaagattgtca

SEQ ID NO: 850998 - DNA, 51 bp, Homo sapiens
ggaaacaagtgcgacctctcagatattaggagtccaatgtgctgattgctg

SEQ ID NO: 850999 - DNA, 98 bp, Homo sapiens
tgctatccccaacaagaggaaagacacacctaccaagaagccagtcaagcggccaggttggagcaaaacgtcccactcactggaggcacctgaggacg

SEQ ID NO: 851000 - DNA, 100 bp, Homo sapiens
acaaccagactggacaaatggtcttttcagagacagttatcacatctgtgggagacgaagaaggcagaaggagccacatgacccggtcctaggcagggac

SEQ ID NO: 851001 - DNA, 100 bp, Homo sapiens
ccggctcccctctcaggacaacccagatgtgcaacaaagtgcgatggatgcagcagtctcggccctggctgctctatgcagtgaatattacatgaaggag

SEQ ID NO: 851002 - DNA, 99 bp, Homo sapiens
ttccatagtgaagtgctccactcgaacagatgtgagcgagaaagccgttgcctccagcaccacttctaatgattctgcttcgtgaaggctgcaagaaga

SEQ ID NO: 851003 - DNA, 101 bp, Homo sapiens
gtcgagctgggaaacgtggattacctggaccccaaggcccccgtggtgacaagggtgagacaggcgaacagggcgacagaggcataaagggtcaccgtggc

SEQ ID NO: 851004 - DNA, 74 bp, Homo sapiens
gagccacgcaggatctcacagctgcagtctaatagtaacacagaggggatgtggagacgctggtagcggggcca

SEQ ID NO: 851005 - DNA, 100 bp, Homo sapiens
ggaattttctatgaagcacaatacaaagaagtaaaagtggtggctaatttgagccccatatgggggttggcaggcagcagagaggcccctttcaaggtgt

SEQ ID NO: 851006 - DNA, 98 bp, Homo sapiens
ctgtgcctgaactcaaagatgcccttaaaagggttcaggataagtttgaggtgctgaattacacaagcattcctatctttctcccggaagtcaccatt

SEQ ID NO: 851007 - DNA, 100 bp, Homo sapiens
tactggcccagcatttaccacacaatggcctggcctgctttcttccccgggcgatgtgcagagatctttgccaggggtcaaagcgtcgggaagcttgggg

SEQ ID NO: 851008 - DNA, 98 bp, Homo sapiens
acgtgcagcctggcagtgcagtggctgaagccgacgtagcttctctgaacagacgcatccagctggttgaggaagagttggatcgtgcccaggagcgt

SEQ ID NO: 851009 - DNA, 99 bp, Homo sapiens
tagaagtggccatggaagaagaaggattagcagatgaagagtccagaagcactggaaatccatggatcattcacatggcttggacaaacacagtataaa

SEQ ID NO: 851010 - DNA, 100 bp, Homo sapiens
atcaaccctctgctgttcagctacgtggaggagctggtggagattcgcaatgtcaaaactggaccaatggggccaggctgaagtattgaactttctgcta

SEQ ID NO: 851011 - DNA, 98 bp, Homo sapiens
gaattccagaatgatgaaattgtaaaccaggttgttgcaagaggtcttctttcaggcaatcctgcttgctgtgtgcttaatcatttctgcatgtgcaa

SEQ ID NO: 851012 - DNA, 100 bp, Homo sapiens
tacaagacaacaccctgatctggcatggacatgtgaacctatgggtcgtggaacaaaagttatcctacacctgaaagaagaccaaactgagtacttggag

SEQ ID NO: 851013 - DNA, 98 bp, Homo sapiens
tgacttgcgataccagatagatgataaaccaaacaaccagattcgaatatccaagcaactcgcagaggtctctcatcttgaaaagcacaccgaggaag

SEQ ID NO: 851014 - DNA, 100 bp, Homo sapiens
tgacaccgcccggagttggcgtcccttctccctctccgagtgctgctcctgtcattgtggccatggacgacagcgtggaagatgaactggagatggccac

SEQ ID NO: 851015 - DNA, 100 bp, Homo sapiens
aattttaaaaaattttccaaaagagagatgagtgcctggaagagctgggatgtctggttgagtcctatggcatgaatgtttgccaaccaaccccaggaaa

SEQ ID NO: 851016 - DNA, 100 bp, Homo sapiens
ccgcttcttcaactccttcaatgaggccaccatggttctggtctcctggatcatgtgtgggagtctttttgctcatgttcgtgtgcggcctcttcttcac

SEQ ID NO: 851017 - DNA, 100 bp, Homo sapiens
ttggacttatattttatatactacagttattacttgaagatgaatccggcctcggcgccccctccgctcccgccgcctgggcagcaagtgatccacgtca

SEQ ID NO: 851018 - DNA, 98 bp, Homo sapiens
agaagctgccacaaaccaggccaagatccacgctgacgcagagcggaaggaggaagagctggacatccgcccaaaggtatcgtctcttctgggaaagc

SEQ ID NO: 851019 - DNA, 98 bp, Homo sapiens
cgtttttatccatggatgacttgcttgggggaggacgaggaagaaacgaacgtgatagttctcagctacccccagtactgccggtaccgctcgatgct

SEQ ID NO: 851020 - DNA, 100 bp, Homo sapiens
tggacagggtcctctgcagcttcaagatcaatgactcggtcacactcagtacggctcctacctggtctggaaagagctgggaggcttcacagagaaggct

SEQ ID NO: 851021 - DNA, 100 bp, Homo sapiens
tactgcttgagaacagaatacattgctgattatctcatgcagcccatgcatgatgactatgacttaagacaagaacagttgaacaaagcttctcttctct

SEQ ID NO: 851022 - DNA, 100 bp, Homo sapiens
ctatatcaggatgagataactgaaagggaagcagaaccatactatgtcctcgatgggcttcctggaatattggtgtgtttatttgcatcagatgtgctgg

SEQ ID NO: 851023 - DNA, 98 bp, Homo sapiens
cataggaaagagacatttagccaacatgatgggagaagatccagaaactttcactcaagaagatattgacaccaaagatgtgaccaaggccatggatg

SEQ ID NO: 851024 - DNA, 98 bp, Homo sapiens
aaaagttaaacaagcaagcctgccataagtgagaagaaatgcatcttctgcagacaccgggttaagagggtctctggagcctgcatccagtgttccta

SEQ ID NO: 851025 - DNA, 100 bp, Homo sapiens
atgctaaaagatgacagacttggacaacatgtcccaacattacatcccagattaaactgcaaatatctcatgaagctgctgcctgtatcactggtctccg

SEQ ID NO: 851026 - DNA, 98 bp, Homo sapiens
cgcctgcccgccatggtgtcatggatcatctccaggctggtggtattataccgaaaagaagttctagagaaattaatagaaaaatgtgtttctaaagg

SEQ ID NO: 851027 - DNA, 98 bp, Homo sapiens
actccactgggaagaccaccttcatcagggtcatcaagactcctgagatagcaaacttggccttgcttggctttggagatatctttgccctgctgttt

SEQ ID NO: 851028 - DNA, 100 bp, Homo sapiens
catggtaccatccgtgttgtggcccagggcctgctggactctgctggtctgctgtctgctgaccccaggagaccagtatgatgtctgtgccatttgcctg

SEQ ID NO: 851029 - DNA, 98 bp, Homo sapiens
ctgcacaaaccctgtgaaagtgcctggggagtgttgccctgtgtgcgaaggtgtggtggacacaggcctattcatcaacatggctgagagagtctact

SEQ ID NO: 851030 - DNA, 100 bp, Homo sapiens
tgactcatctcaacccacaacgccttcccagtcatcagctgcctccaccccagcccccaaccttcccaggtggacgtctgatttatgaagctccccatcc

SEQ ID NO: 851031 - DNA, 98 bp, Homo sapiens
aagcaaccaggaggcagtaaattcttcagctgctcggacagatgaagctccccaaggagctgcagttcctgaccaagcacccagggaagcgcctgggc

SEQ ID NO: 851032 - DNA, 100 bp, Homo sapiens
acaatgtactccagttgctggatatccaagcctctcagcttcggagaatggagtcttccatcaatcatatctcacaggagactgacaaactggaagatga

SEQ ID NO: 851033 - DNA, 100 bp, Homo sapiens
gtgtgctgtgttaaattcagcccctcttccagataccatttggctttcggctgtgcagttatgccccgtggtgccctgcttgtcaaaatcttcaaccgga

SEQ ID NO: 851034 - DNA, 133 bp, Homo sapiens
ctgtgttctgcttttttcattgttccactggacgctcatcagagggaagatctttttcctcaattggtggatggaatggatatcctgtgcgtccgagaggcaacaaggtttgctgctgcctattgtagatctg

SEQ ID NO: 851035 - DNA, 100 bp, Homo sapiens
gcgaagctgctgcggttcctgagccggaggagccagaggaagagatagccatggaggacagccccactatggttagagtggacagccccactatggttag

SEQ ID NO: 851036 - DNA, 100 bp, Homo sapiens
gaggacctgtgcaacaacctcttgaggatcgaatcttcactcccgctgtctcagcagtctacagcacgaaggtagaagatagcaccatgccgattcgtcg

SEQ ID NO: 851037 - DNA, 98 bp, Homo sapiens
agcaggcagtagaatttatgtccaccagtgctgtggcttccaggtctcaaaggcagaaggcggcttacagggagaacacagttggcctccaccgtttc

SEQ ID NO: 851038 - DNA, 98 bp, Homo sapiens
aggtgtctgtgtttgaagtcaacattcgatttattggaggcctacttgcagcatattacctatcaggagaggagatatgatgcttcctggtgtgttta

SEQ ID NO: 851039 - DNA, 100 bp, Homo sapiens
catgttgtacctggaaaacaatgcccagactcaatttagtgagggtgcagcccggaatcccgaggatgtggaccgggagcggcgagaacacgaacgcgag

SEQ ID NO: 851040 - DNA, 98 bp, Homo sapiens
tctgccacacgctgatggtgcagcaccgcatgatggtacccaaagtcagatgctgcacaacaaacatgtcatggtccgtgtgggaggaggctgggaaa

SEQ ID NO: 851041 - DNA, 100 bp, Homo sapiens
gggacgacgagtacgactacctattcaaagtgaaggagaacgacctgctcagaatgagaagaggaaggagaaaaacataaaaagaggaggcaatcgcttt

SEQ ID NO: 851042 - DNA, 100 bp, Homo sapiens
cagatgtgttatgtgcagtcctttacagcaatcacaacagaatgggccgccacaaaccccatttggccctcaaacagcttcatgaagaaaattttgagat

SEQ ID NO: 851043 - DNA, 100 bp, Homo sapiens
cactacaagggtagcagtcgtggacgttctaagagccatgaagctcatgactgctctggtgaatgttgccttaaacctcagtattcatcaggataatacc

SEQ ID NO: 851044 - DNA, 99 bp, Homo sapiens
gacttcacggagctctggagaaacatgaagttcgggactatcttctgaggagaccttgcctattttgatggacttagtgagactattcttgctgtgggg

SEQ ID NO: 851045 - DNA, 100 bp, Homo sapiens
ggaggacatgcgggagagagaatgagccagagggacacgctggtgcatctgtttgccggagggtcaaaggtcgtgataaacatatcaataatttgaaaaa

SEQ ID NO: 851046 - DNA, 98 bp, Homo sapiens
atgggcaaacgcctggatcagccacaaatgtacccccagtacacttactactatcctcattatctccaaaccaaggaattgtgagcatatcagcatca

SEQ ID NO: 851047 - DNA, 100 bp, Homo sapiens
tggctgtacagctcctcaagtgcaacaagtcccacttccgaaaccacaagtttgccgatgtcctgctcaaacagagttactgtgttgccttgtgaagatg

SEQ ID NO: 851048 - DNA, 50 bp, Homo sapiens
tggcacttatgtcctccctggcttaagagttggacagtggaggaccttca

SEQ ID NO: 851049 - DNA, 98 bp, Homo sapiens
gcaacgcgcttatcagcgctatgagaagatatccgacatgaagccagtgacttcccatgtagagtggccaagcttcctaagaacaaaaaccgaaatag

SEQ ID NO: 851050 - DNA, 98 bp, Homo sapiens
ggaggacacgctgcagttggccttcatcgacttgagacaagctggaggctctcaggtcatttttaccaacccattggagatagtgaagattcgtctgc

SEQ ID NO: 851051 - DNA, 141 bp, Homo sapiens
agcgctccgggcctggaatccctacgcgtccctttgggtttagcacgatgagctcaatcggcactgggacatttgaagacagtgatttgttccatttgattggtgttatctgtggcttagcaatttataattgtaccattg

SEQ ID NO: 851052 - DNA, 100 bp, Homo sapiens
cagcaagccatactgcccagacccctccctcccatacctgctagtgtgacggcaggtaaggtcccagaggtggtggccttgggcgcagccgagaagaagg

SEQ ID NO: 851053 - DNA, 100 bp, Homo sapiens
gaggggaaaccgctgcttcagagacacagacggtgggcaagagcagcaagatgctgcagcatattgattacaggatgaggtgcatcctgcaggacggccg

SEQ ID NO: 851054 - DNA, 100 bp, Homo sapiens
cggaaaggaagtttacttatctgggtccttcaacaactggagtaaacttcccctcaccagaagaacaagcgagtgagcatcaataaagatgagctgaagt

SEQ ID NO: 851055 - DNA, 99 bp, Homo sapiens
ccgccttgctgctgctcaaagctgctgccgccccttgggctaaaagttctggagaccagaaggccaaaatcaaaagtatgggcaggcttgatttcttta

SEQ ID NO: 851056 - DNA, 98 bp, Homo sapiens
tgagctcgaggcccggctggcgcacctgggcgtgcaggtgctgctacccccgtatgatgatgccactgtgaatggtgctgccaaggagccaccgccac

SEQ ID NO: 851057 - DNA, 100 bp, Homo sapiens
gcagatgtggacttgaaagaagctgcagcggaggaaggcgaggaattgaatgatctggcacgggaccctccagcacagtgttcagcaggtcctgttggag

SEQ ID NO: 851058 - DNA, 99 bp, Homo sapiens
atgaattacaggccattcttaattacctactgactatgcatgagcggaagcgagagagtgagagtgaaagtgacgagactcctccagcagctcctcagt

SEQ ID NO: 851059 - DNA, 102 bp, Homo sapiens
gcccggctacagtctgtcgctggatcccaaagatttcagcagagagaccgggtttcactgtgttagccaggatggtctcgatgtcttgacctcgtgatccac

SEQ ID NO: 851060 - DNA, 98 bp, Homo sapiens
gttcagatgacagtgattttaaagttggagatgcctcagatgctattaactgagtacttggatatgaaaaatactcgtacggcctctgaaccatcagc

SEQ ID NO: 851061 - DNA, 98 bp, Homo sapiens
gagaccccgaaaacggaagcgcagggagaaggaagaggtgtttgaaaagatatgaagagcattttaagaggtgcagcctctggaagtggatcaaacta

SEQ ID NO: 851062 - DNA, 50 bp, Homo sapiens
cggccttcaccaaactccctgacccatggatgaaggaccagatcttgatc

SEQ ID NO: 851063 - DNA, 98 bp, Homo sapiens
ttatttccaactatgaattctttgagaatcagtatattcatgtgttacatctctcttggcaccttggaagttgttttcaaccatatccagcctttgcc

SEQ ID NO: 851064 - DNA, 100 bp, Homo sapiens
gagccttttccttcggagcagcagccctgtccggcatctgtcttgagctcccagcaaggtaatatgcacgtgtcactagctgaggccctggaggttcggg

SEQ ID NO: 851065 - DNA, 99 bp, Homo sapiens
ctcgggcgccggcgagatgcctttgttcaccgccaaccccttcgagcaagacgtggactacatgaggaaataattgacttttataacttcatgtcccct

SEQ ID NO: 851066 - DNA, 100 bp, Homo sapiens
catgaagctaccggccagggttttctttactctggggtcccggctgccctgtggcctcgctcctcggaggtggacagaggactgcagaaaatcaacctat

SEQ ID NO: 851067 - DNA, 98 bp, Homo sapiens
gagaacgccttggatcgagctgagcaggcggaggccgacaagaaggcggcggaagacaggagcaagcagctgccagacccggccatcgaggaccaggg

SEQ ID NO: 851068 - DNA, 100 bp, Homo sapiens
ggaggattcagggaataggagctggggagcccttctgcgccacagaaaaggaacggctgtagtagatctctctgggaatggcgacccctcctcaatttgt

SEQ ID NO: 851069 - DNA, 99 bp, Homo sapiens
gaagtcagtagcaagcagctaagacaacatggtacatgtgccgtggatacagaaatctctgcaggcaagttgctccagagcatattgcaggacaagcct

SEQ ID NO: 851070 - DNA, 51 bp, Homo sapiens
ggaggaggcgaggaggagagactgataacaaagccattgacctttgccgat

SEQ ID NO: 851071 - DNA, 98 bp, Homo sapiens
aaaccagcaagacaacgagggctggacaccccttcatgcagcagcttcctgtggctatctcaacatagcagagatgaaacgaggaggaagagatagtg

SEQ ID NO: 851072 - DNA, 100 bp, Homo sapiens
ggaagtccttccagaaggagcttgtgatggcaatactgaacactgcgcagcttgcagaggtctcctggcagccctcattaggaattctgtctggccccga

SEQ ID NO: 851073 - DNA, 90 bp, Homo sapiens
ggcagtgcgtcaatcagagcgtcctgtgcgacaggccgacggtcgcaaggtcctacggtcaagcatccgggagtttctatgcagcgaagc

SEQ ID NO: 851074 - DNA, 143 bp, Homo sapiens
acgaatgaagattgtggatgtaataggagagaagatctataaggatggagaacgcataatcactcagggtacctcccttgggagatcaatcccctgtcctcctgctctttgctccatgagaaggatccacctacgacctccag

SEQ ID NO: 851075 - DNA, 99 bp, Homo sapiens
agtctttgtggtgcctcattcccataacgacccagtgttttacctcaatcatatatccacacaagtgcttctcttgacatttctcgaaaatgggagaag

SEQ ID NO: 851076 - DNA, 100 bp, Homo sapiens
ttcccagcactcgaaagggaccgaaatggagagcaaaggctgcacatggtccgtctaatgctgttggagagattactgcagaccctgcctcaattacgaa

SEQ ID NO: 851077 - DNA, 100 bp, Homo sapiens
aatgcttttagatgaatttaccactaagcttttggcatcgtgttgcaaaatgacagatcttctagaagaagcttggatcctagcatgactatacattgtg

SEQ ID NO: 851078 - DNA, 98 bp, Homo sapiens
cagtgtggagggtgcccagcgcgccgctgctatcgcgcgccagaaggccgagattgccgcctccagggacgcggagcttgcagtggtgagagagcagc

SEQ ID NO: 851079 - DNA, 98 bp, Homo sapiens
ggggcccaaccacaagacgactcaataggaggaaggtgtccgcaaatatggtaaagattttcaagctattgcagatgtaattggcaacaagactgttg

SEQ ID NO: 851080 - DNA, 100 bp, Homo sapiens
tgaatcaacatgggcaatgagaacagcacctcggacaaccaggtttttcgttggaatatacgttgcacatttatggcgattctgagtgtgagggcagact

SEQ ID NO: 851081 - DNA, 100 bp, Homo sapiens
gccaatgatgtatggaaagcagcagagtttctacaaatgctagaagctatcaaagcccttgaagtcagggtttcgaaaaaacgatgaaatgaaagctatg

SEQ ID NO: 851082 - DNA, 100 bp, Homo sapiens
agcttcagcagctgcgggacagtctggacgagaatgaggctaccatgtgccagatttgggtctcgctgtgctagaatattccgtctagttttgcagaaga

SEQ ID NO: 851083 - DNA, 100 bp, Homo sapiens
tatgatgctgatggtgatggagattttgatgtggatgatgccaaagttttattagggaatggatttgtaaactcaagagcttctccaaatttgattggag

SEQ ID NO: 851084 - DNA, 100 bp, Homo sapiens
acaggaaaataaaatgcataactatactgattggatgctgctcaaaatcagcctacatgccatctttgataaacaacttgatgcagatgtttcccccaag

SEQ ID NO: 851085 - DNA, 100 bp, Homo sapiens
acattctaactaagcgaaacaatgcacagcgtcaacagatcaaagcagcatatctccaggaaacaggaaaggttatatatgatgctctgcaaaacctgga

SEQ ID NO: 851086 - DNA, 100 bp, Homo sapiens
gtaatgttcaggccatggaagaaatgatgatggaaatgaagtataataccaagaaagccccacttgatttgggtattcggattcccgttggacatgtgga

SEQ ID NO: 851087 - DNA, 100 bp, Homo sapiens
agaaaaacaatcgcttcaatgatgggaaggtggatcccgccgggaggtactttgctggggttgtgtttgcacattatggtcccgtctggagacaacaaag

SEQ ID NO: 851088 - DNA, 99 bp, Homo sapiens
gtaaagtcagcatgagcaaaaactccaaactcctctccaccagcgccaagaggtgttgacttcaaaatcaaaactgtagagctaagaggaaagaaaatt

SEQ ID NO: 851089 - DNA, 125 bp, Homo sapiens
aaaaacttccagaacatctgggagaatatttaatggaaaatcgcttggttaaaacctgacacttttaacagagagaactcgatgccaccgcaacggtattggcgaaccggcaggatgaaagtgag

SEQ ID NO: 851090 - DNA, 99 bp, Homo sapiens
aggggtccccaatcccaagcctggtccgagacctgttaggaacagggcatcgcagcaggagatgttaagggaagctaaggagaaggagaagcagagact

SEQ ID NO: 851091 - DNA, 100 bp, Homo sapiens
agcctcaggcacatctcaagccaatcgatatgtgggactaagcccaagagacccatccttcctacatcagcaacaggtttccaatacttatctacaggaa

SEQ ID NO: 851092 - DNA, 99 bp, Homo sapiens
tttccagcccgtggtccttctccatattcgaggtatattgaaaagtctgattcagttacaatcagtgtatggaatcacaagaagatccataagaaacaa

SEQ ID NO: 851093 - DNA, 100 bp, Homo sapiens
ctacaatgttgtagtagacacagaagcttcacaggctgctcaagaagccgagatcaatgccagaaaagccaaaaactctgttactagcctcctcagcatt

SEQ ID NO: 851094 - DNA, 98 bp, Homo sapiens
atttccagagaatgaccacaacctcttcagtagaaggtgattatgggagtgctattgagacactggtaactgcaatttctttaattaaacaatccaaa

SEQ ID NO: 851095 - DNA, 100 bp, Homo sapiens
tctgcagtactgtatccacacgagccaactgctgtatttaacatctgcctgcaaatggacaaagtacttgatatgcaccgacagtaaatggttcacggcc

SEQ ID NO: 851096 - DNA, 98 bp, Homo sapiens
aaatgaagttaagataagaagtaatctggaatcagaaagcactacgctaactccataatgggagaagtaaagaacaaagacttaaggaacagcttggc

SEQ ID NO: 851097 - DNA, 98 bp, Homo sapiens
ggggaaatgaaagagcttccggagcagcttcaggaacatgctatcctgaggaggatgaaggggctggccctggaggccgagagtgagctggagagaca

SEQ ID NO: 851098 - DNA, 99 bp, Homo sapiens
tgaacaacatgctgcagctgtatgccagtatgctgcatgaaaggcgcatcgtgattatctcgagcaaattaagcactaaggccttacgaccggatatgg

SEQ ID NO: 851099 - DNA, 98 bp, Homo sapiens
cctcgactggttgatcagcagattggaaagactggaagcttcttcagcatttaaatcaaacggtattgagatggattgggttatgaaacataatggtc

SEQ ID NO: 851100 - DNA, 100 bp, Homo sapiens
ttgaggcattgacagttgtgattcagcacctgctgtctgaggcagcggaggaggaaatggcaggtcctaatcaactctgcattcgccgctggactaccaa

SEQ ID NO: 851101 - DNA, 101 bp, Homo sapiens
caggacagctgttccttggccatcccaaagctattctgggggcaacagagggcaagtgtccagagaatggctgggatgaaagtacacttgaactcttttta

SEQ ID NO: 851102 - DNA, 98 bp, Homo sapiens
gcggccttcgcgccccaggcttcgcggggctacatgacatcaggtgcagctaaatcaagtccagcagctaaaccaggatccacaccttctcgaccctc

SEQ ID NO: 851103 - DNA, 99 bp, Homo sapiens
tccgtatgctgagaacctggagcaggaatgcggggaagctgtataccaaatactacattcaccgaattccaagaagccgggaggttcagcagtcctggc

SEQ ID NO: 851104 - DNA, 100 bp, Homo sapiens
ttggatcttgtggaaagtcagattactgcaacaaggaggtatacaataaggagaatcttttcaacagcctgaactatgatgttgcagccaagaagagaaa

SEQ ID NO: 851105 - DNA, 100 bp, Homo sapiens
gaggtataggctggctgtaggagtcgggtactaggttttgacaagcttgcatcatgcgtgagtataagctagtcgttcttggctcaggaggcgttggaaa

SEQ ID NO: 851106 - DNA, 100 bp, Homo sapiens
tcctacattagcgtctacgaccaccaagatgacactggatcaaaaatccatctgactcaacaggtagacatggcggcacaggttgcctctggaatggcct

SEQ ID NO: 851107 - DNA, 100 bp, Homo sapiens
tacagaagcagatggaacattttcaagagtttgaaacagctgagacacttctaaattcagaagttcatatgcttctggaacatcgaaagcagcagaatga

SEQ ID NO: 851108 - DNA, 100 bp, Homo sapiens
ggagcatgggtgccaaggagtcacggatcggattcctcagctacgaggaggcgctgaggagaggctgaagccgacgtagcttctctgaacagacgcatcc

SEQ ID NO: 851109 - DNA, 98 bp, Homo sapiens
tttggacagtccaagctatatcgaagggctcgtcggaaaaaaagttctgctagaaaatttggtctacagaaactttgggagtggtgcttaggacttgt

SEQ ID NO: 851110 - DNA, 100 bp, Homo sapiens
ccgagggttgggagagcgcgttggtggcgacggccgagtcagcacactgatttatgtcagtacatggacaagcaccctggggggctgcatccagataatg

SEQ ID NO: 851111 - DNA, 100 bp, Homo sapiens
agctgctgctgctcgtcgctgccccggggtccacgcaggcccaggccgccccgttccccgagctgtgcaggattcaagatgaccaacgaagaacctcttc

SEQ ID NO: 851112 - DNA, 98 bp, Homo sapiens
gcaaacattcagacaaaattggagagactgccatgaagcaatggtgccagtgaagaagaggacacatgaaggcttgctacccccagtggaaaatcatc

SEQ ID NO: 851113 - DNA, 100 bp, Homo sapiens
ggcgcggaagcccgcggccaaatgacacgacttgggggcaaaggaggacaacagttcccaccaggagctgactaaggctttggaacagaaaccagatgat

SEQ ID NO: 851114 - DNA, 100 bp, Homo sapiens
gcagaggtcaatctttatgtacagctccctgcggtttctgagttctccaccagtgagaccatgggccactctgcagaccgactggccgctgcctttgctg

SEQ ID NO: 851115 - DNA, 98 bp, Homo sapiens
aatattatttattccttccttggtttggctcctcctccagactcaaaggtgctgctgctaacatctgcagaagatttggactgcactcctggatttca

SEQ ID NO: 851116 - DNA, 100 bp, Homo sapiens
ttcgaagggagttggtaaacgctggctacgtgtgccgcctggccattcaaactgtcaattttaggtccagaagtgtccaaaccacaagttctcaaaactc

SEQ ID NO: 851117 - DNA, 98 bp, Homo sapiens
ctggtgcatctgtttgccggaggggttttgactctgggaggagggctgccttatttggagcaccttaatctctctggttgtcttactataactggtgc

SEQ ID NO: 851118 - DNA, 100 bp, Homo sapiens
aaagaatggcccttgtggataagcacaaagtcaagagacagcgattggacagaatttgtgaaggtggagattctggacgcaaagacaagggagaagctgt

SEQ ID NO: 851119 - DNA, 98 bp, Homo sapiens
caaatgatctccttgaaaaagtggattcaattaatgaaaaatgggaactgcttggggttgaatgagaaccctacttgcctaaatgaggaatgtctttc

SEQ ID NO: 851120 - DNA, 100 bp, Homo sapiens
atcctgtatatgtttactataaactggcaagaggatggcctgaagtttgggctggaagtgtgtccctggccagtgtccttccacctgtccacaagcatgg

SEQ ID NO: 851121 - DNA, 99 bp, Homo sapiens
gatgacatatttttggacctgaaacagaaattctggaacacctatatgaattttgattctgacattagcagtgtgggaatagatggctgctggcaggca

SEQ ID NO: 851122 - DNA, 100 bp, Homo sapiens
gtcccgggagaggctgctgcagtcccgggacaggatgttctccaagttcacctccatcctgcagcacgccgtggaggcgccctggaacagctgctgacag

SEQ ID NO: 851123 - DNA, 113 bp, Homo sapiens
atcaacatgctgatgggctttgacaaggcggagctgtgcatgaaggttatggataaatatggagagttctacggccgagacagaatcagtgaattacttggcatggacaaggc

SEQ ID NO: 851124 - DNA, 98 bp, Homo sapiens
tgcttccccagaggggtggcctcgctgttcccatggacatggcccagaagcgaatgtctgtgacggagggtggcatcaaatacccagagacgactgag

SEQ ID NO: 851125 - DNA, 100 bp, Homo sapiens
aggccaaggctgcagaagccaaagccacggtgaccctggcaaagatgagagtgcacatttcgtcctgcctgaaggtccaggagcagatggccaactgccc

SEQ ID NO: 851126 - DNA, 100 bp, Homo sapiens
gctgctttcttcggtagctaccgaaacgctctgaaaatcgagccggtcaaaatgcagatcttcgtgaaaacccttaccggcaagaccatcacccttgagg

SEQ ID NO: 851127 - DNA, 100 bp, Homo sapiens
gaactcgggagggagacagcatggccctttacaaccggactcgtcgtatttctcagacaagccagcttttggaatggattcgtcgcacgatcccctggct

SEQ ID NO: 851128 - DNA, 100 bp, Homo sapiens
taagtgtaactgaaaccctgattaaacccttggaaaaattcagaaaagagcaacttggagctgtaaagccaataggagctctgaacccaaaaagagcagc

SEQ ID NO: 851129 - DNA, 100 bp, Homo sapiens
accagatccgggagcacgtcatctccatcgagggtcattcaacatttattcaaccaaaaatactaagtcagctctatacaaactaatggaaggatacagc

SEQ ID NO: 851130 - DNA, 99 bp, Homo sapiens
gcgtctgccctggagcagttcgtgaacagtgtccgacagctctcagctcaaggaaggatttgatgccctggatccctttattcccatcctggtttccaa

SEQ ID NO: 851131 - DNA, 100 bp, Homo sapiens
cctgatgcaagtcctaatgtatttgaagagccagagagcaatatgaagtctatgccaccaagacacatcaccttcactttgggatatggaatttgataag

SEQ ID NO: 851132 - DNA, 100 bp, Homo sapiens
tgaccagaacacagaggattatctcttccaagacagatgcaccatcaggaatggaattacagtcatggtatcctgttataaagcaggaaggtgaccatgt

SEQ ID NO: 851133 - DNA, 100 bp, Homo sapiens
cctggatggcagatggggggaccccggtacggacctgtgcagatgttgatggcatggacctgggcaaaaaggtcagcatccccagagacatcatgttgga

SEQ ID NO: 851134 - DNA, 99 bp, Homo sapiens
ggccctccttcagtttagttgaggataccacattagagccagaagttcacctgtggcagatgatatcatccagcccgctgcccccgcagacctggaaag

SEQ ID NO: 851135 - DNA, 98 bp, Homo sapiens
tcaattctgaggcaatcacattcacagatgacttttcctatgggatgcacagggtggaaacaagctgctctcagagacggaacctcactatgttgccc

SEQ ID NO: 851136 - DNA, 100 bp, Homo sapiens
ctggctctagcagagttttgattaccactgacctgctggactagagctggagacaccatccttggtgcctgtgaagaagaatgccagcacagtggtggtt

SEQ ID NO: 851137 - DNA, 99 bp, Homo sapiens
gatatgatcggggctatgatgatcgggactactatagcagatcatacagcttcagcgcctgctcctggtcatcactaaccagatttacttggagtacat

SEQ ID NO: 851138 - DNA, 100 bp, Homo sapiens
agcggcccgagcatcttctgaaccgggttctggagcggcttgctggaggggctaccagggacagcgccgcctcagatcaagactggcgccccctgccgct

SEQ ID NO: 851139 - DNA, 100 bp, Homo sapiens
tagccgcctcttcagctcgccatggatcccaactgctcctgcgccgccgagcctgagcccttgtgaagccggcaatgacaagtctgtatggtcgccatgc

SEQ ID NO: 851140 - DNA, 100 bp, Homo sapiens
ttcaactcctggcctcaagggatcctcccgcttcagcctcccaaagcattgggcttacagtagcaggacccagtgctccataaaggataatagtttccag

SEQ ID NO: 851141 - DNA, 98 bp, Homo sapiens
tctaattgcctcctgatagcacacagaaaggttgatgataattagaagcatgctttccactgaacttcccgacaacatttgttatgcagaatgtctct

SEQ ID NO: 851142 - DNA, 99 bp, Homo sapiens
gaagctaaagctgtttctgaatgagacccaaacgcagggcagaatattactgaagaatgatcctgttcaacctcctagtgcctctactgaattattcct

SEQ ID NO: 851143 - DNA, 100 bp, Homo sapiens
gcgtgttgaccagtggatgtgacagttcagcattagaagggctacccctaataaagcgactcattgagcaggttacaggaatacttaaagatgctggagt

SEQ ID NO: 851144 - DNA, 75 bp, Homo sapiens
gctgccaaaattatcaacaccaaaaagctttctgctaggggctgctctttatggatgtggctgctgggctgaaaa

SEQ ID NO: 851145 - DNA, 135 bp, Homo sapiens
cccgagctgaccctaggcctccaccctggcaggaatcccaatttgcctccacttagtgagcggaagaatgcaaaactggttgaacagcggatgaagatatggaattcaaagctctaatggacctttttgaagaga

SEQ ID NO: 851146 - DNA, 100 bp, Homo sapiens
ggactgttgatagctgcactgagtgtcactgtcagttaaaagttgcaaaggtcgctgtttcgagagaacatttgggaactgtcgctgtgatgctgcctgt

SEQ ID NO: 851147 - DNA, 101 bp, Homo sapiens
ggccggagccgggccgggccatggccgcctcggagcggctgtacgagttgtggctgctctactacgcgcaggcctcgaaaaagcccaagacagcagaagca

SEQ ID NO: 851148 - DNA, 100 bp, Homo sapiens
aaagaagaaatactacgataaaaatgccatagctattacaaatataacgaaggaggcccaacttcattcaataaggagcctgacggatttatcccagacg

SEQ ID NO: 851149 - DNA, 100 bp, Homo sapiens
cgcgccccaagcccgggcgccaccgctgccacctccgcgaggcagcctgcttctgcaaagtggtacgatcgaagggactatgtcttcattgaattttgtg

SEQ ID NO: 851150 - DNA, 100 bp, Homo sapiens
ttgtctatcccgtctacctggccatcctctttctcttccggatgtcccggagcaagggtgtccgcaatgttgccagtgtctgtctgcagattggctaccc

SEQ ID NO: 851151 - DNA, 100 bp, Homo sapiens
tgggccacatcttctatgtgctgggaaaccacaggtgcaacaggtgatcgagaaccacatcctcaagctcttccagagcaacctggtgcccgctgaccct

SEQ ID NO: 851152 - DNA, 98 bp, Homo sapiens
gactgcggttggggcgggaagagccggggccgtggctgacatggagcagtatcaccttttgccatgatagcatttctttcattggacagttccttaca

SEQ ID NO: 851153 - DNA, 100 bp, Homo sapiens
aaaacgtagggaccacatcaaagacagctttcacagtttgcgggactcagtcccatcactccaaggagagaaggccagaaatgtacacacaggagagctg

SEQ ID NO: 851154 - DNA, 116 bp, Homo sapiens
tgagtctttgaggacacagcctcgctggaggcagtttctggagctggagctggtggaggatgtgtggcgaggggaggcgcaggacctcctctcccagatcgcccagctgcaggagg

SEQ ID NO: 851155 - DNA, 99 bp, Homo sapiens
tgcaatttgctgttggctggagtggttccttaaatgtcgaagaagggtcagaggacatgccttttagccccaaagcatctgttgctgctatggaagcaa

SEQ ID NO: 851156 - DNA, 99 bp, Homo sapiens
aattcctttcctgctagaactttcagaatctcaggcgggtgaggaaactggagcacccatcctaactgatgatgttagcctgcaggtgttcatggacca

SEQ ID NO: 851157 - DNA, 100 bp, Homo sapiens
aggcagtaaattcttcagctgctcggacagatgaagctccccaaggagctgcaggatgaagatttgataaagtggaaggcactgtttgaggaagtccctg

SEQ ID NO: 851158 - DNA, 100 bp, Homo sapiens
ttgaatgttcaaaaggcatctactgaaaggaggtgctgatactcaaagaaggtttaagttgtctgatctctctataaattccactgaatgtctacatgtg

SEQ ID NO: 851159 - DNA, 100 bp, Homo sapiens
actaccgggaagatttacacagatggaaccagaaaagatacgaggctctaggagaggctttcttctagtcaagatgagtgataaaccagacttgtcggaa

SEQ ID NO: 851160 - DNA, 100 bp, Homo sapiens
cggggcggcggcagcccgtcggccgccgccaactacctgctctgtaccaactgccggaaagtgctgcggaagagtgcctggtgaagaatgtgatgggatc

SEQ ID NO: 851161 - DNA, 100 bp, Homo sapiens
taacactacagtggaatcggtgaatgatggaaagcaagcttcttggtacattcacaaatacgtacaggtttcccaggcagctgcagacttgaaacagttc

SEQ ID NO: 851162 - DNA, 100 bp, Homo sapiens
aaactggaaaataaagattacagagaaaaaaccaacaccttcctgtgcagtcctgttggaatttgaaaatgtttataggaggccttagctgggacactac

SEQ ID NO: 851163 - DNA, 106 bp, Homo sapiens
cacaacaagcaagcatgcagcttactgcttgaaagcggagcgtgctttggacaccatgaattttgatgttataaagggcaagccagtacgcatcatgtggtctcag

SEQ ID NO: 851164 - DNA, 98 bp, Homo sapiens
ttgaccagaagtttgaggtctccagtgttgccgactgcttggactctgcagagagcctatctctggcagaagtagccaacgagctggacacggagacc

SEQ ID NO: 851165 - DNA, 135 bp, Homo sapiens
cgatgtggtggacacactgaaacagaagaagcttgaggaaatgactcggactgaacaagaggatatgtttgacgacttctcagaaggcagagagtgtgtcaactgtggggctatgtccaccccgctctggaggcg

SEQ ID NO: 851166 - DNA, 98 bp, Homo sapiens
ttgctacctcttgggtgaactctagcaattacaaggtctgccatgtgaatctggaggggcagccgttctactccaagaaggacagacccctgtgcaag

SEQ ID NO: 851167 - DNA, 100 bp, Homo sapiens
gaaaacctaaccatgaagacttgaacttaatacagcaagaaagaccatcaagtttaccagttgccaacttggcctgttccatctcaaataatgaagaagg

SEQ ID NO: 851168 - DNA, 100 bp, Homo sapiens
ctgtctgaggacttaaataccattccagaggttcacaagaacccagtgacttgattgtaaaaatttacagagcggaatcatatgctggtctccaagagtt

SEQ ID NO: 851169 - DNA, 100 bp, Homo sapiens
ttgcaagcatcttttcttctgcatggtgggtacccccatgctgtggcacggcttcagatgagaactggactgatgaccaactgcttggttttaaaccatg

SEQ ID NO: 851170 - DNA, 98 bp, Homo sapiens
aaattccaggatctgggtgctgcttatgagaattggcagagggggtcgatttgggaggaaaggtgtggctataaactttgttactgaagaagacaaga

SEQ ID NO: 851171 - DNA, 100 bp, Homo sapiens
accccaccagtgagatccactgctccaggacacaatgtttgcacgaggactgaagaggaaatgtgttggccacgaggaagacgtggagggagccctggcc

SEQ ID NO: 851172 - DNA, 98 bp, Homo sapiens
aagacctaaatgagcctcttgccaaagtgtcccttttaaaagataatggattcatacccgattcacttctggaagatgtgatgaaagcattggacctt

SEQ ID NO: 851173 - DNA, 100 bp, Homo sapiens
cggaccgcgagcgctgggcgggtccgcggcgcggtcggtcggcgcctgttctcgggctgtttggcggacattgggtttgcctatcacagatgaacaaatc

SEQ ID NO: 851174 - DNA, 100 bp, Homo sapiens
ctgcggaacaggacgccctctgatgtgtgttccagagaacaagccttcagacatttgctatattgacgctgagctgtcaggggactcaggcttatgagga

SEQ ID NO: 851175 - DNA, 100 bp, Homo sapiens
ctcggaaacgcggcgcggccggctgccggaaagatctgcaggcccaagaccgagctcaccgcatcgggcagcagaacgaggtccgggtactgaggctctg

SEQ ID NO: 851176 - DNA, 100 bp, Homo sapiens
tgtggctgctctggaacaactggtgctgatggctcccttggcgaaggagtctgtttttcaacccaggaagatggttgacattactactgaagaactgaaa

SEQ ID NO: 851177 - DNA, 100 bp, Homo sapiens
ctggaacagccagaattggacccgaaaccatgcctcactgtcctaggcaagaaccaaaaacttttgctagaaaatcagcttttacgagagaaaactcatg

SEQ ID NO: 851178 - DNA, 100 bp, Homo sapiens
cacagacctcctccctgggaacggcgttcacacagcatcaccgacctgtcattacaggacccagagctggaagctctttgacatcctttggaacagaaac

SEQ ID NO: 851179 - DNA, 98 bp, Homo sapiens
tatactatggtggcaaaaaagaagacttcaagcgtttgggacattcactactttcactgcctaagaatcctggaccttctcaaaggcacagaggcctc

SEQ ID NO: 851180 - DNA, 100 bp, Homo sapiens
ctgggacttccaaagctgggaatcctattttttattatgttgcacggagcttagaccatgctcagcctccaagcagccttgtcatcgacaaagaatctga

SEQ ID NO: 851181 - DNA, 98 bp, Homo sapiens
tccccaccgacatcatgctccagttcctgacttacagattccagtctgctgttagatgattattcatccaagttgagccccaaaccaaagagagccaa

SEQ ID NO: 851182 - DNA, 100 bp, Homo sapiens
ggaatgaagatgatgatgtatctgacacacgatagtaaggagcatttagcaatgatggaaaggattcttggacctctaccaaaacatatgatacagaaaa

SEQ ID NO: 851183 - DNA, 50 bp, Homo sapiens
aggatccggctgccgaaggtcctcgccagatggagtcttgctctgtcgcc

SEQ ID NO: 851184 - DNA, 98 bp, Homo sapiens
gagacggagcgttttggtggagacactcactggggcaatctgaggttcatcatgcctagtggcgtataagaagaccccgccaccggtccctccacgca

SEQ ID NO: 851185 - DNA, 100 bp, Homo sapiens
cctcgaccccgatctgcaggagccgagccagatcaccaagagatcaatgtccgagttaccaccatggatgcagagctggagtttgcaatccagccaaata

SEQ ID NO: 851186 - DNA, 60 bp, Homo sapiens
cgccagccctactctcgattcctgctcaggaaccaggctgtgcgcatccaggagggccgg

SEQ ID NO: 851187 - DNA, 100 bp, Homo sapiens
gaaaactcgaggcaactattgtgcacaaatgaagatgtttccagccctgcctcggcggaccaaaggggtgatgcccggtatctgatctccaactctaaag

SEQ ID NO: 851188 - DNA, 98 bp, Homo sapiens
agaaagtcgtcttccacttgcacgaaagctttcctaggccaaaaagaggctgtgctactcatggacgccgaaaagcgtatccggttactgcagtttgt

SEQ ID NO: 851189 - DNA, 98 bp, Homo sapiens
ttgcctccgcaaggacttgtgtactcagcaatgccgactgcctacaacactgctatccagtcagttcgctgctattcccatgggtcacaggagacaga

SEQ ID NO: 851190 - DNA, 99 bp, Homo sapiens
tggcgggctccgtggaagcgtggccggcagcgtcccggacgaggagaaatggtggagtcaatgaagaaagtagcagggatggatgtggagctgacagtt

SEQ ID NO: 851191 - DNA, 100 bp, Homo sapiens
tacatgagggataatgaagatggccctcagcacacgatatcatttgaggatgtggctgtggatttcacgctggaggaatggcagctacttaatcctactc

SEQ ID NO: 851192 - DNA, 100 bp, Homo sapiens
taaaagagatcaccgacaagatcaccacggacgagatgatcaaacgcctgaaggccacccagaggagaaggccaccccgcctggaggcacaggccatgag

SEQ ID NO: 851193 - DNA, 100 bp, Homo sapiens
aactggagaacagggagatccagccaccattcaagcccaaagtgatgttctcaaatagtgatgaagctgtaatcaataaaaaacttcccaaagaactcct

SEQ ID NO: 851194 - DNA, 99 bp, Homo sapiens
gtttgtctcttccagatcagaactgaggaacaaaaacccccatcctgggaaaaatggggaagctgtctgacactggaggagcctttaaaggttttaaag

SEQ ID NO: 851195 - DNA, 100 bp, Homo sapiens
ctttgctgctctgtctgccggttcttgaggtgaatgtcggaatccattatctttcgggaaagctctctggggcaggatggtgagaacaagaccaagattg

SEQ ID NO: 851196 - DNA, 100 bp, Homo sapiens
tggccccaaagagacccctgctgcccagagccccaccagaggcccctctgacaccaagagagcagaccgagtgtgtcagcagccaggactttctctctgg

SEQ ID NO: 851197 - DNA, 141 bp, Homo sapiens
tttcacggtggccttgtggagacaacgccttaacccaaggaagtgactcaaactgtgagaacttcaggatgtctttgcctaccggcaggtgggcctgcctgagtcacgcatcttcacagtcaacccccggggagagctcat

SEQ ID NO: 851198 - DNA, 101 bp, Homo sapiens
agctgggatctatgagtggaaaggtgaccaagcccaaagaggagaaagatgcttctaagggtccctggatggccggttgcaggtgtcccatcggaaggggc

SEQ ID NO: 851199 - DNA, 98 bp, Homo sapiens
attgctgggcgtctggacatctgtagctgtcgtttggtttgatcttgttgactatgaggaagttctagtaccttccactggaagaatctcaaacagcg

SEQ ID NO: 851200 - DNA, 100 bp, Homo sapiens
cagggtggctgaatcacggaatggtcttcctacaattgccgcttctttgtcctcccctgctgcttctttgacttcattggaagatactcccggaggcaga

SEQ ID NO: 851201 - DNA, 100 bp, Homo sapiens
aaagaatctagtagctccagctcagaggaggaggaaggtgaagatgaagcttctgagtcagaaactgagaaggaggcagaacactatgtggctgccgtgt

SEQ ID NO: 851202 - DNA, 98 bp, Homo sapiens
atcaaaaaaccagaagcaccgcctcctaaagccttcaccagcacaggctttgaccgtcacacttctccagtgttcagccctgccaatccagaaagctc

SEQ ID NO: 851203 - DNA, 100 bp, Homo sapiens
gcattctccttatctcatctgcacaggaagcaggtctaagaatgagatgctggaggaaggacatgagtatgcggtcatgctgtacacctggcgcagctgt

SEQ ID NO: 851204 - DNA, 100 bp, Homo sapiens
gctccaccatcgtccccggcgagcagggagcggagtaccagcacttcatccagcagtgcacagtatcttatcaaacatccatgaagtacatcagaacatg

SEQ ID NO: 851205 - DNA, 98 bp, Homo sapiens
acctgtccagcatccgaccaccgaggctggagggggagaacacccagagttttccgtctgatgaaggttggccatttgcaaagtatcttggagcttgt

SEQ ID NO: 851206 - DNA, 98 bp, Homo sapiens
actggtcttggtagcggaggcacccgaatgctgcccgggtgagggctgatcccttatccaacatggttctaaccttcagtactaaagaagatgcagtt

SEQ ID NO: 851207 - DNA, 50 bp, Homo sapiens
gacatcctggaagctgggaaatggtactcattgaccccagagggcctgga

SEQ ID NO: 851208 - DNA, 100 bp, Homo sapiens
cgcttctttaagggctacgggaagatcctggaggtggatctgaagaacgggtgtggccgacgacgatgccctcgctgaggagcgcatgcggagaggccag

SEQ ID NO: 851209 - DNA, 100 bp, Homo sapiens
caggtgctagtaattgagcctcaaaatgaagatggcacatggcccaggcagaccttgcagtcaaacaagacacgctggatgcagatatccacatagagac

SEQ ID NO: 851210 - DNA, 100 bp, Homo sapiens
cctgtactggactgcatcaggccgcgtctcctcaggattttcagctgaactctcatctctcaacactggcaaatattcataagatctaccacacccttaa

SEQ ID NO: 851211 - DNA, 98 bp, Homo sapiens
cagcctgagcctccgggacgagggtcgggtttccatcttgctgctgcaaaaggacacgtggaatgcctcagggtcatgattacacatggtgtggatgt

SEQ ID NO: 851212 - DNA, 98 bp, Homo sapiens
ctggaccagccagaggacgcgggctctgaggatgagctggaggagggggctttttgcggacatcctcaatgacgtagccatgttccttgagattatgg

SEQ ID NO: 851213 - DNA, 98 bp, Homo sapiens
gccgcagccttacgagttcttcagcgaggagaacagtccgaaatggcggggactgttggtctcggccctgcggaagtgacacctcacactcagtgccg

SEQ ID NO: 851214 - DNA, 98 bp, Homo sapiens
ttctcatcaaaagcgatagttgaagtgaaagttctggatgcaaatgacaacagtccagtttgtgaaaagggcctgtatatcattgggatcaagaactc

SEQ ID NO: 851215 - DNA, 98 bp, Homo sapiens
ttgactactcgcatcgcgcactttttggatcggcatctagtctttccgcttcttgaatttctctctgtaaaggaggaagttaaatgaagttcgaaaga

SEQ ID NO: 851216 - DNA, 100 bp, Homo sapiens
tttcttctatttcttgtggatattatggctaataacacaacaagtttagggagtccatggccagaaaacttttggggcagcaatgaatgtggatcacgag

SEQ ID NO: 851217 - DNA, 99 bp, Homo sapiens
tcctgcccatctgcagcaccttcggcatctgcccctgccatgaccactgtggagaacaaatccaagattagcacagatgaatgatttcggaatcaagaa

SEQ ID NO: 851218 - DNA, 98 bp, Homo sapiens
ttgaaggagtccttgactgctaaggagcagagggctgccatcctgcagactgagtcaatgatacacttgatgacatctttgacggttctgatgacgaa

SEQ ID NO: 851219 - DNA, 98 bp, Homo sapiens
ttcccgtgggacaggtaactcagttgaccccaagagcagtggaagtaaagatacacaaccacggaaggctaccttaagttccacctggtgccaagcat

SEQ ID NO: 851220 - DNA, 98 bp, Homo sapiens
acatgcaaagcttccaatgagtatggcagtgtcagctgtacagccacactaactgtgacagacttgccttcaaggtgtgcaagtaaggacttatctcc

SEQ ID NO: 851221 - DNA, 98 bp, Homo sapiens
aaaacatccggaaatcctgccaacagtgcaaggaagcctggttcagcaggtggccctaaggttggagattgcagtgcttttgtccacaaaggctgccg

SEQ ID NO: 851222 - DNA, 100 bp, Homo sapiens
tgtcaacagaggctggttctgtgagaagcctactcatgaaggttacttctcttgtttggatatctggacgctgtttttggactatctgacaagtaaaatt

SEQ ID NO: 851223 - DNA, 100 bp, Homo sapiens
tgaggaaggacctatgatagaacaacttagcaaaatgttctttactactaagcaccgttggtatcctcatggacggccatatcaacatggtgcagatatg

SEQ ID NO: 851224 - DNA, 51 bp, Homo sapiens
gggaggattaagtgaggggacatgagggctgccaggcgcccagctgtgccc

SEQ ID NO: 851225 - DNA, 100 bp, Homo sapiens
tctcatgttcctccatgataaaggaatcatctataggtctctaattaacagaagatggcaaagcccagccacagcagctatgtccttcagcagctaaaca

SEQ ID NO: 851226 - DNA, 98 bp, Homo sapiens
cagcaccccagtctttacttgaagacaaaaaggaaccattttctcaggccacctgatctgggaggaccacctccaagaaaagcagtcctgtcgatgaa

SEQ ID NO: 851227 - DNA, 100 bp, Homo sapiens
aagttccggcagagaattctggctccctgtaagattgccacggcagtgaagtttctacagaattcccgggtccgccagagcccacttgcaaccaggagag

SEQ ID NO: 851228 - DNA, 100 bp, Homo sapiens
tgccgggaagcgcttcgaaatcgcctgctacaaaaacaaggtcgtcggctggcggagcggcgtgtcaaggtcagcatctcctcgacgatcaagatctatc

SEQ ID NO: 851229 - DNA, 100 bp, Homo sapiens
taattactacgaagctgggaatttcaggtcatgtgcacagattaatggctggatccatggcagagatcatgatgcagccgtccttttggatttcttttta

SEQ ID NO: 851230 - DNA, 100 bp, Homo sapiens
aggctgcagatacgagtggacaaggatggagcctatagaggtgcctcttgaggaaaatagtgaacggactcagattcgccaaagcagggtctgtgctgac

SEQ ID NO: 851231 - DNA, 100 bp, Homo sapiens
tgcggcatgatctccatcaccgaatggcagatattgaaatggctgatggcaagtgcaggaagatccttttctacagcagttacagaacaacttcagcttc

SEQ ID NO: 851232 - DNA, 100 bp, Homo sapiens
cattgtgttaatggtgaagcacagcgattcccccttgttgtcctcctggtgcgaagagctcggccgcctgctgctgctccgacatcagaagagccgccag

SEQ ID NO: 851233 - DNA, 100 bp, Homo sapiens
ttataaaaaggaaaaacatcttgatctggagaaaaactggatgttggtagaaaaagcaagagtttgttatatagcaattcctgacattcagacaactgac

SEQ ID NO: 851234 - DNA, 101 bp, Homo sapiens
gaattcttggacacttgtcatctgtgtactgtgtaacttttgatcgaactggcagacggatatttacttgcatgcaagatatgggaaatactaaagcaaga

SEQ ID NO: 851235 - DNA, 99 bp, Homo sapiens
ccgtaatgccttggctgctctcagcccccaagctggttcccgctgtagcaaacgtccgcggcctctcaggacatgatccacatcgcggacaccaaggtc

SEQ ID NO: 851236 - DNA, 98 bp, Homo sapiens
agtaaactctcagagtaactgtcccctctgactaccatttctaagtttgcagatggcgtgtacctggttctgctcatgggccttctggaagactactt

SEQ ID NO: 851237 - DNA, 100 bp, Homo sapiens
ggagaaggagaggctgcggctgaaacagcaagaactgcttcggcaggttaaagatcgaggtccggaagccactaggagattttttaattggttttattgg

SEQ ID NO: 851238 - DNA, 100 bp, Homo sapiens
tggaccacatgttcctgagcttgagatgctaggaagacttgggatcgaagagcagtcataaaaccacaaagtcaacgcaaacacaagactcttcatttca

SEQ ID NO: 851239 - DNA, 103 bp, Homo sapiens
cgagagtgaacgattcaacccgggggagctcagttcctaaggacggtctgaagagccaagagctatttgatgaaattagaatgacctacatcaaagagctagg

SEQ ID NO: 851240 - DNA, 100 bp, Homo sapiens
tgttccttcaggaagtgaaatggatggagcagaatctggaaagagttatggtgaatggttgcatggatttgaaaaaaaggcaaaagaatgtatggctgga

SEQ ID NO: 851241 - DNA, 99 bp, Homo sapiens
tcccacttccgaaaccacaagtttgccgatgttcacaatctatacagttgcataaaagtagcagaagactttgtatctccagaacatgtaaagcactgt

SEQ ID NO: 851242 - DNA, 101 bp, Homo sapiens
ctcctggggcccctcctcactgcctgcgccctgctgccttttgcccagggccagacccccaactacaccaggcgcattctacattctaaaggggagctcag

SEQ ID NO: 851243 - DNA, 152 bp, Homo sapiens
tgagggcttcgatcccttctctgatttgctgtcagccatgaacggatggatgtgatgcctgctagccaaaagggcattgaagttgatatcgatgtggagcacggagggaaaagaagccgcctgacccccgtctctccagagagttccagcac

SEQ ID NO: 851244 - DNA, 100 bp, Homo sapiens
gactggcgaactggaaggccacgcctcctcccgcctgccccctcagccctgtggctgggggcagagctcaggaggaatatcacaaacgggacttcacgga

SEQ ID NO: 851245 - DNA, 98 bp, Homo sapiens
atgggaggagctgcaactatatgctcagccatcgtgtctgctgcaaagcttaatttgcccattaatattatagccacgctccagaacagcatcagtgt

SEQ ID NO: 851246 - DNA, 98 bp, Homo sapiens
gaaggcacaggaatatccatgtcggcttgtagagagattgcactatctcccctggttcgaggtattttataagctgcttaacatcctggcagattaca

SEQ ID NO: 851247 - DNA, 99 bp, Homo sapiens
ggcttgtccctgtttcgccacagttcctaccttatgagctcggttttcttatgcttataagagtggaacagacctcctgccccccgaggtctgcagtct

SEQ ID NO: 851248 - DNA, 100 bp, Homo sapiens
gcttcggcattagagaaagagattggtccagaacagtttccggtcaatgagcactattttggattagtcaatgtgtgactgaagaaatatcaaatgtttc

SEQ ID NO: 851249 - DNA, 100 bp, Homo sapiens
cttattaagaaaggagtagcaaaggttgatcatgtccagatgatagtattggatgaggtacatcgaggaggccattgagaaactaagcaagcggcaccag

SEQ ID NO: 851250 - DNA, 98 bp, Homo sapiens
ttttcaaggcgggctgtaactggtggcatttgtcccgggaccaggtatcagcagatgttgcacacaaacttggtataccttgctacaatagcagattc

SEQ ID NO: 851251 - DNA, 100 bp, Homo sapiens
atctggagcatcggctgcaggggtcagtgatggagctgcttcagagtcgggtttctccattcaaggacatgattttatgcttctctgaagaggattggtc

SEQ ID NO: 851252 - DNA, 98 bp, Homo sapiens
tttgccttcctacaaacaggaaattacaaagaggccaagaagatcattgaggtgtccgcaaatatggtaaagattttcaagctattgcagatgtaatt

SEQ ID NO: 851253 - DNA, 100 bp, Homo sapiens
taacataattttagcaaggcaacaagcacaagttgaggctgccagaaattgtctagtaagtgaggcgggagttgtaaaagtatctgattttggaatggcc

SEQ ID NO: 851254 - DNA, 100 bp, Homo sapiens
ggagtggggaagacctgcgtcctttttcgtttttcggatgatgccttcaatactacctttatttccaccatagcattcctctgaatattgatttgctgaa

SEQ ID NO: 851255 - DNA, 98 bp, Homo sapiens
gccagaatggcatccagagagaggctctttgaactttggatgctttattgtacaaagctgggaagttatcaattccaaaccagatgaaagacccaggc

SEQ ID NO: 851256 - DNA, 99 bp, Homo sapiens
aagaataaaggctgaagaaaaagaggtgactaaaggtcaatatgatgaagaagagatgactatgcaacaagctaaaagaaggcaaaaacgtgaatgggt

SEQ ID NO: 851257 - DNA, 74 bp, Homo sapiens
ccctctgcgctcctgcatctgcctccccatggaagtcgagataacatgagtattgtactagtttgcttttcaaa

SEQ ID NO: 851258 - DNA, 98 bp, Homo sapiens
tccagctctagccactgttctgagtgtcagactcacatttccaatcttatgatgtaatcagcgcgatttcacttcctgaatttcgatgaattctaaga

SEQ ID NO: 851259 - DNA, 100 bp, Homo sapiens
gccgctgcccgaactcccggcccgaactccaggtcactgctgaaactcaagagaaagaagacgttatcacacatttgcaagagaaggttgcatccttgga

SEQ ID NO: 851260 - DNA, 124 bp, Homo sapiens
gagatgtccataagatggtggtgagcataggatggaacccatattacaagaatacgaagaagtctatgcccagaagaatcagtgcggtttctgtggcagagcgagttgcatttgaaagaggaga

SEQ ID NO: 851261 - DNA, 100 bp, Homo sapiens
ttgtcagattatcaggatgaggtttgctgctttgtggtgcacaagcggtgccatgaatttgtcacattctcctgccctggcgctgacaagggtccagcct

SEQ ID NO: 851262 - DNA, 100 bp, Homo sapiens
ccgagggaatgatccttactaaccacgaccatcaaatccgtgtcggagtccttacaggtagcagaaggtcaagaaatttgtgtgattgaagccatgaaaa

SEQ ID NO: 851263 - DNA, 100 bp, Homo sapiens
acaaaatcaatggccggacgaaaaatcctcactatggatgggctcattgaggacattaagcatcggcggtattatgagaagccatgccgccggcgacaga

SEQ ID NO: 851264 - DNA, 100 bp, Homo sapiens
ccttcacagcctcctcccagctcaaggaagccgtgttaggcgcacatggcacagcactcaagcctacggccccaccagtgtagccagtgcagctttgcct

SEQ ID NO: 851265 - DNA, 100 bp, Homo sapiens
cttatcaacaaatattcgcccaatgttaggaatcaagcctcatttacaacaaaaagaaccctcaattgatgaaaggtgtggtggctcacgtctgtaatcc

SEQ ID NO: 851266 - DNA, 98 bp, Homo sapiens
acagctagaattggaaaaccttacagaacgaaataattgtctggccgactcgcgagctctgagtgccagccacactgacctggcccactgagagccag

SEQ ID NO: 851267 - DNA, 99 bp, Homo sapiens
tatgttttgctttcagaaagaggaatgcctcgacgtcgagaatttgtgatgcagagtaaagacaagattgcatcctacagcaaaactccaaaaattgaa

SEQ ID NO: 851268 - DNA, 99 bp, Homo sapiens
ataattgggcagaagagaagcagtgaaggagtgcagaggcatcacctgaaaggatcaaaatggtttcaatcccagaatactatgaaggcaagaacgtcc

SEQ ID NO: 851269 - DNA, 98 bp, Homo sapiens
attcaaggaaagttttctttggatgaagaagccattcttccagatcaaagaaggactaaggctatttgtgggtcctgggggaagtacaacctttggca

SEQ ID NO: 851270 - DNA, 100 bp, Homo sapiens
tgtggaagtcagatgactttggccagacctggatcatgattcaggaacatgtcaagtccttttcttggcaaaagtcaacaactctagcttaattggagta

SEQ ID NO: 851271 - DNA, 98 bp, Homo sapiens
gaaccaaggatttccaagtgatttcttccaaagcacaggaatctcactctgttaaagctggtctgttctaactgagatctgtctcgtaactgtgtaat

SEQ ID NO: 851272 - DNA, 98 bp, Homo sapiens
ggcttttgtttcgtttgtgccagaggttggccttcattccacgatgtgatcaattctgaggcaatcacattcacagatgacttttcctatgggatgca

SEQ ID NO: 851273 - DNA, 100 bp, Homo sapiens
ataagaattccaaatagacaaactcggtgttgtggttcaccttgaaactattctaggagcctcagttcaacatgttaaactgaagaaaatgaagtactct

SEQ ID NO: 851274 - DNA, 100 bp, Homo sapiens
gaaaataaagattacagagaaaaaaccaacaccttcctgtgcagtcctgttggaatttgtcccagctagtccacagggaccagcagtgccatggaaggat

SEQ ID NO: 851275 - DNA, 100 bp, Homo sapiens
caagcaacagtttccttttcattcaggacttacttctctggatccagaaacacacagaagtagaaacagtagaccttgtcttgaagctgaaaaataagct

SEQ ID NO: 851276 - DNA, 98 bp, Homo sapiens
ttcgaggctataactacgatgaaggggaagatgatgacgacgatgaatgtggggaagagaagctgccctcctgtttcgattacgtgatgcactttctg

SEQ ID NO: 851277 - DNA, 100 bp, Homo sapiens
acccagcagtaggttattgaagacagcagccccaggtgtccctgttacctgagaatgacagatggaatgaaactagagcccagctgcttgcacaaatgga

SEQ ID NO: 851278 - DNA, 99 bp, Homo sapiens
ggagttcttacaacatggcagacattgacaagacctattcaaactcagtctgtctcttgactggaggaggagaaggaaaagttgagcacattgccaacc

SEQ ID NO: 851279 - DNA, 100 bp, Homo sapiens
caaagattacaccaagatctgtgctgaccacaggaattggatctactagtgcagatttctataggaagccactgcctcccctggctgtgccacagcgacc

SEQ ID NO: 851280 - DNA, 100 bp, Homo sapiens
gctggaggcctcgctgaggaacgacgccgaggaagaaattcggaactatccgggcagatttgattgaacagatgagattcaaacagagactgaaagtgat

SEQ ID NO: 851281 - DNA, 123 bp, Homo sapiens
caggtggcacattttcctcaacaactgcttgtccaaccttaaactggttatattctgggcactaaatgaaggcgtttctaggcaatttgattcgttcagagatggatttgaatcagtcttccc

SEQ ID NO: 851282 - DNA, 100 bp, Homo sapiens
tgggtacccttcaaaaatttaaacaagaatccactgttgctactgaaaggtatttagcatttacgtgtggcttaatcagaggtggcttatcaaacttggg

SEQ ID NO: 851283 - DNA, 99 bp, Homo sapiens
tccggaggcggcgggacagagcgcctgcgaccccagtcggtgctccggggaggtcacctgacgaggagatcactttgggaagcagtgacatccaacctg

SEQ ID NO: 851284 - DNA, 99 bp, Homo sapiens
aagatggtgagcatgatggagggtgtcatccagattctctcgggcctagccgtccttggaacccgatattcgggctgggcggttccgcggcctgggcct

SEQ ID NO: 851285 - DNA, 100 bp, Homo sapiens
gaacttacaagaaggagaattcttattacagtctttaggcccagtgggatttatgaaaagtgccatctctttagctgaggatgaagaatggaagagaata

SEQ ID NO: 851286 - DNA, 98 bp, Homo sapiens
ggcgcgtacgagatctccgaccagtctgggggcgctggcggcctgcgcagccacctcaagtttcggagcaacatcccctgtcacctggttgatatctc

SEQ ID NO: 851287 - DNA, 100 bp, Homo sapiens
ggaaattaaatgcagtgatccttcatctaaactctgtgctacaaggcgcagtgctggaattcctttctacatacagatttacactgactgggccaaccac

SEQ ID NO: 851288 - DNA, 100 bp, Homo sapiens
cccctccctctgaagcagctgcctcgaagaagaaaccagggcagaagaagtctaaaaatggaagcggagccatgtggctagaaatcctcctcacttcagt

SEQ ID NO: 851289 - DNA, 115 bp, Homo sapiens
cctacaccaagcccgacgtggccttcctcgtggccgcctccttcttcctcatcgtggcagctctgggggcccagctggagtaagagcccaggccctggatagagatggaaatctg

SEQ ID NO: 851290 - DNA, 100 bp, Homo sapiens
tcattcacaaccccctgaaagcatattgatgatgttaagaagttcaaaccgggttacctggaagctactcttaattggtttagattatataaggtaccag

SEQ ID NO: 851291 - DNA, 98 bp, Homo sapiens
agtaggagactcagaatcgaatctcttctccctccccttcttggaatggaaactgaaagtggaaatcaggaaaaggtaatggaagaagaaagcactga

SEQ ID NO: 851292 - DNA, 98 bp, Homo sapiens
aagagaagtcacaaaacagcagatttcccaagagcagcggaaaatgatccagtcacagcaacatctgaatgaattgatgacgaagaagtggctattag

SEQ ID NO: 851293 - DNA, 100 bp, Homo sapiens
acgcggagggctcggtcaacggcttcatcagcaccttgggtacaaaacgtttaattgtggatgtcatccggttccagccaggagagaccttgactgaaat

SEQ ID NO: 851294 - DNA, 100 bp, Homo sapiens
aagtagtcatacattcagctgatgcatttgcacctgtggcttatctacgctttttagaattgcacttggaggacaaggacgccaggaaagcatgtgcaga

SEQ ID NO: 851295 - DNA, 98 bp, Homo sapiens
ggctgccttccacctccagtgctggctcacagcctttgtcctgaagtccttcgcacaggctcgcagctttatcttcgtggacccccgggagctggctg

SEQ ID NO: 851296 - DNA, 98 bp, Homo sapiens
ctcgactggcagcgcgggaaacgtcaaactcgagcatgctggagatcttcaagggcaaactgcagatgatctgaatgacagcactgaccatcagcaac

SEQ ID NO: 851297 - DNA, 98 bp, Homo sapiens
ctgcattgctgagaacaaggctggcgagcaggatgcgaccatccacctcaaagtctttggagcagctgcattggcatggaagaatcctatttcaagct

SEQ ID NO: 851298 - DNA, 100 bp, Homo sapiens
acaggctgcattggggccaaacacagaatcagcaaagaggaggccatgcgctggttccagcagaaggtgccatgcctctgcaactcctcctgttgctgat

SEQ ID NO: 851299 - DNA, 100 bp, Homo sapiens
tctggattccagaagatttaactacgtggtccggactgtcttgctctgtcaccaggctggagtgcagtggggtgatctgagctcactgcaacctcccgct

SEQ ID NO: 851300 - DNA, 100 bp, Homo sapiens
cggtacagacagccattaccatcctggttccaggtctctaattaacagaagatggcaaagcccagccacagcagctatgtccttcagcagctaaacaacc

SEQ ID NO: 851301 - DNA, 100 bp, Homo sapiens
ggagcctggattttaactggaggagtaaacacaggttcagcagactgtacaggatctttttggcagagccccaagtaaagctgtcaatcctgatgaggct

SEQ ID NO: 851302 - DNA, 100 bp, Homo sapiens
caagactcagtataaccaagtaccaagtgaagactttgaacgcactcctcagagtccgactctcccacctgctaaggaactgcaagcacatgttgaccag

SEQ ID NO: 851303 - DNA, 98 bp, Homo sapiens
tgcagcctcatcctacagccccctaggagtcgttcacgcctactgaggagcatgtgttggtggtgcgcctgctgctgaagcacctgcacgcctttgcc

SEQ ID NO: 851304 - DNA, 99 bp, Homo sapiens
gaacccagaggtcgtggaggtggccgtggaggcagaggtggcatgggaatgatatggaacctagcaaagctgttccactgaatgcatctaagcaagatg

SEQ ID NO: 851305 - DNA, 100 bp, Homo sapiens
attgatctcttcttagatttcattactgtcttcagaaaactcatgatgatcctggccatgaatgaaaagtgatttagaatctagaagagaagtaaaaaaa

SEQ ID NO: 851306 - DNA, 98 bp, Homo sapiens
tcctggtgaatgagccctacgagaaggacggtgagaaaggccagtacacacacaagatctaccacctgcagagcctgaagtgattcagaacatgaccg

SEQ ID NO: 851307 - DNA, 100 bp, Homo sapiens
gctcttcgacgagcccattcccaggaaaagaaagggaggaatgatcaattggaatcgtctttttcctcctttacgtcagcgacaaaacgtaaactatcag

SEQ ID NO: 851308 - DNA, 99 bp, Homo sapiens
ggagactggagtcgaaggccgtgaggtatttttctaagatgtgaaaggaccacccacccaccgtctgtcttgtggtcagtcaccctacaccgagacaac

SEQ ID NO: 851309 - DNA, 100 bp, Homo sapiens
aagatgcatgccagagacttcacagtttctgctctggattggccttttgatgatggtgcaccaccatccaaccagattgttgatgactggttaagtcttg

SEQ ID NO: 851310 - DNA, 100 bp, Homo sapiens
ctatcctcgactgtagtataatccgcgtggaatattcactaatggtagcaatgaatcgagcccaagtttgtttgatatccagttccaagtctggagagag

SEQ ID NO: 851311 - DNA, 100 bp, Homo sapiens
ataccagggggtgtgcacaatcagtttatacctctgcagagcaatatactttgctgcttattcaaactgcaaggaaaagttgaatgatgtatttgatcct

SEQ ID NO: 851312 - DNA, 100 bp, Homo sapiens
cagctgatcagactcctggtgccactcccaaaaaactatcaagttgggatcaggcagaggcaatcacttactatgaagctgctctgaaaactggacaaaa

SEQ ID NO: 851313 - DNA, 99 bp, Homo sapiens
gcaaaacatggaatcatcaggaaggcacgtgacacaagctgacctcaagagctccacgttttggcttcgagcaagttttggtgctactgtttttgcagt

SEQ ID NO: 851314 - DNA, 98 bp, Homo sapiens
cagatcaacctggagctctacgcctcctacgtttacctgtccatggttcaactccaatttgtgaagatattggtaggcaaatgttatgctataataga

SEQ ID NO: 851315 - DNA, 98 bp, Homo sapiens
gtagagactgatttgcaacccttccgggaagccatagctctgcatgagactggatctccaattactgcgtcatgtgttggattaggcaattctaaaac

SEQ ID NO: 851316 - DNA, 100 bp, Homo sapiens
cttcctgttctgatagcgtggaagaattaactcctgaggagagagcccaaaagattgccaaagccatgcgcaaacagtcttctgaagtcaaagaaaaatg

SEQ ID NO: 851317 - DNA, 100 bp, Homo sapiens
tcaagtatgtggagtgttctgcacttacacagtttgatggtatccatgtggtgagtggatctcttgatacatcaatccgtgtttgggatgtggagacagg

SEQ ID NO: 851318 - DNA, 100 bp, Homo sapiens
ctggaatcagcttctctcattttctttccctgcaccaactagcagaaacagactgaatttgatctgattaatgtgaaggactggccagtctgggaaaccg

SEQ ID NO: 851319 - DNA, 50 bp, Homo sapiens
ctggcacccggtgcttatgtctttggctctgagatctgtatctgtggacc

SEQ ID NO: 851320 - DNA, 100 bp, Homo sapiens
taagctggctgtcctgaaatattataaggtggatggaagcatgcctaggggaagatctgcctcccaccacagaactggaggaggggcttaggaatggggt

SEQ ID NO: 851321 - DNA, 98 bp, Homo sapiens
cgggacctcttcacctacactgtgaagtgcatccagatccgccggaagctgcgcatcgagaagcgccagcagtttccccctttctagggtgaggatgg

SEQ ID NO: 851322 - DNA, 100 bp, Homo sapiens
ctgccaagaatctgaagactctacagaaacgagattccttcatcggcacgccttactgcctctgaagagccaatccattcaggatgggaaaccacgcagg

SEQ ID NO: 851323 - DNA, 100 bp, Homo sapiens
agaaaaaagaaccagatgtcaaaactgatttcagaaatgcatagttttatccagaatcaggaaacccaggcccaacggcaggtggatgcaagaagaaatg

SEQ ID NO: 851324 - DNA, 100 bp, Homo sapiens
gataacccagcatcaggggaaaagtttgcctatgtgccatttggagctgatgtaaccttctgtaatggaagatgattgaagacaaggggcctcgtgttgc

SEQ ID NO: 851325 - DNA, 98 bp, Homo sapiens
aatggagacgccattggatgttttgtccagggcagcatctctggtgcatgctgatgacgaaaaacctcagcaaagacccaaatatcgtcatagccaag

SEQ ID NO: 851326 - DNA, 100 bp, Homo sapiens
gccaaggcagattctagaggaagaagtcgaacaaaaatggtgtctcaatcacagccacacgacggttctgccctttatattaatcgagatgaggacatcg

SEQ ID NO: 851327 - DNA, 98 bp, Homo sapiens
ttgagcatacttatttcatcggggcaaagtatgtttagtccagcaagtatcggtcagccacgaaagacgacattatctcctgcccagttggatccttt

SEQ ID NO: 851328 - DNA, 98 bp, Homo sapiens
ccaacttgaaaaattggatcttcttgaacaggagtataacaaacttaccacaatgcaggcccttgcagaaggcaaacttgaagataaatcttttgact

SEQ ID NO: 851329 - DNA, 100 bp, Homo sapiens
aagcagcaggagtttggaagcccttttcctccaaatcctgggaaagacctttccaaagtgaaactgatgagatttgatgatccactgttggggcctcgac

SEQ ID NO: 851330 - DNA, 100 bp, Homo sapiens
gaaacccaggaaatcgagactcatgactcccagagaggatggcatctagaagaccatggctccctggcctgaattgggagatgcccagcccaaccccgat

SEQ ID NO: 851331 - DNA, 99 bp, Homo sapiens
tcaagttttctctcacccatccatgggaagccctgctactgctggattagcgccagagcatctgctgcacccaagcctgagccggttcctgttcaaaag

SEQ ID NO: 851332 - DNA, 100 bp, Homo sapiens
ctcccgagcagctgggattacaggcacacaagtctctgaattttgtctcaacactgctccagattactatgtcggaacagctggatttacctgtgagaca

SEQ ID NO: 851333 - DNA, 100 bp, Homo sapiens
ccctcccaggagggacccacagggctgaaggaagctgccttgtacccacatctcccgccagatgcggcattccaaaagaactcactgtcctgattgggat

SEQ ID NO: 851334 - DNA, 98 bp, Homo sapiens
caacaaaagcctcctacaagagtcctaccaaaagcatcgttggcttcacagtatgactgatgatcctccaacaacaaaaccacttactgctcgtaaat

SEQ ID NO: 851335 - DNA, 98 bp, Homo sapiens
ggaattgcacaaggaaaggctgcaagccatagcaagttcaagctgaagaagatgtggaaaagtcccaatggaactatccggaacatcctgggggggac

SEQ ID NO: 851336 - DNA, 100 bp, Homo sapiens
ccagcaccgcagcaaccactccagaaactttccctccttcagtttgaagaaaacaggtctgaaacaaggtcttacccccagctgcttctgaacacagtga

SEQ ID NO: 851337 - DNA, 98 bp, Homo sapiens
aagccatggagacaacagtgtacaagaggacttcgcggaaagcatgctgcttttgtcctgagcctttgcctccaaaaggtctgcagtatctggtgctc

SEQ ID NO: 851338 - DNA, 99 bp, Homo sapiens
cagcagccaggagtcatgagcgacagcggcgagcagaactacggcgagcgggtgtgacgtttctccagatacttcatgctgttcacctgtgtcctcgcc

SEQ ID NO: 851339 - DNA, 100 bp, Homo sapiens
caggatttatcaaatcgagtcactgtcaaactgtggatattcataaggagaaagtggcacgaagagagattggtattttgacaacaaataagaatacatc

SEQ ID NO: 851340 - DNA, 100 bp, Homo sapiens
gaaaaacaaaggatatcgtcaatgggctgaggttgctccttgagggcaggacagttcttatggctttatccgttgcgtaagcacagagaggtctgcgagg

SEQ ID NO: 851341 - DNA, 100 bp, Homo sapiens
ctaatgcttgatcttgaatttttagaggaacagagtcttcacccttctgagcaaagtctgaaatggatgttacatgagtcattttaagggatgcacacaa

SEQ ID NO: 851342 - DNA, 100 bp, Homo sapiens
acaaatatgaactatgataagctgagcagagccctgcgatactattatgacaaggcattgtttccaagtcgtacgagtgccgtctaaagggacaaggagc

SEQ ID NO: 851343 - DNA, 98 bp, Homo sapiens
atcactcgcatctccgccttcttccagcacttccagggtacagtccttgacagaattgactataacgttgaacagtcctgtatcaaaactgaagatgg

SEQ ID NO: 851344 - DNA, 98 bp, Homo sapiens
tgtatcctgaagagaagttggactgtgttatagtagtcttcataggagagacttaattcagtgcacaaatgagatgaatgtgaacatcccacagttgg

SEQ ID NO: 851345 - DNA, 98 bp, Homo sapiens
gcagctgcgattgaggaagagcgagccagcgcccggagcaagcggagctcccccaagagccggaaaggtagattttcgttccgtcacccaggctggag

SEQ ID NO: 851346 - DNA, 98 bp, Homo sapiens
tgttgccacctcctccctttcatggttccatcagccgccttcatcaaatcaaacaggaccgtataatagacgctggccccaaaggaaactactctcga

SEQ ID NO: 851347 - DNA, 100 bp, Homo sapiens
cccaggctttcaatcaacccaaggtgatgcttttgctacgacctcattttctgctggaactgggtaccatgatcctgaccaatttgacggcgctgcacag

SEQ ID NO: 851348 - DNA, 99 bp, Homo sapiens
acaacaagggccggattctcacccagaacccttaggagaaatcttgagagtggacagcaattgtgaagatcgccagagagttctgtgtttcatcaccgc

SEQ ID NO: 851349 - DNA, 99 bp, Homo sapiens
gcttccgggagggcggctcgcagcacttgcacctcctgcgccgccgccccccatccaaggatatgccttcaagcctccacctagacccgactttgggac

SEQ ID NO: 851350 - DNA, 99 bp, Homo sapiens
agatgggcacatacctcagattcattgtctcccgcatgaaggagaggtatgaagtattcagaacagaagaggaagaaaaaataaaatctcagggacaag

SEQ ID NO: 851351 - DNA, 100 bp, Homo sapiens
tccacatccggcacaactacccctggaacaagttgccggccaacgtgagacagagtccagatgcctgtccagcctccaagcaaagacacagaagagatgg

SEQ ID NO: 851352 - DNA, 100 bp, Homo sapiens
ccttacagttgctgtgaaaacattgaaggtaacctggatggagaggaccatgccgcagagcgaacggtggaggatgttttccttcgcaagttcatgtggg

SEQ ID NO: 851353 - DNA, 98 bp, Homo sapiens
ttgtatctgtgcaagaggatgctgggaaatctcctgctcgaaataggtgagaagccttataagtgctcatgggagggatgtgagtggcgttttgcacg

SEQ ID NO: 851354 - DNA, 100 bp, Homo sapiens
tggaaatgcaggccccgaaacttctgtggctgaaagagtttgtgaagaaatatgggaacctttttagcttggagcttggtgacatatctgcagttcttat

SEQ ID NO: 851355 - DNA, 100 bp, Homo sapiens
ctacgacccaattgagaggattatgtggagctaagttttaccaatcaggcaagacatctgtatagattctgcttcatccgtgagagagaataagcaacct

SEQ ID NO: 851356 - DNA, 99 bp, Homo sapiens
gaatccaaagttaatgccaagaagcagccgccagttgggatcaaatgtgagcctatggatcaagttttcggctttgtgagaaaccttaccatcaaacac

SEQ ID NO: 851357 - DNA, 100 bp, Homo sapiens
ctcacctcgatgcagccagtagcttggatccttgtgggcatgatccataatcggtttcaagtgggcaaatcaaactagcagattttggacttgctcggct

SEQ ID NO: 851358 - DNA, 98 bp, Homo sapiens
ccgcgatgctcccagcccggtgagacctgcctgaatggcgggaagtgtgaagcggccaatggcacggaggcctgcgtagacgtctcccacaacctgct

SEQ ID NO: 851359 - DNA, 51 bp, Homo sapiens
cagagttagagagagggatggtgctttccagagtgttgaatcttccaccag

SEQ ID NO: 851360 - DNA, 98 bp, Homo sapiens
ccagagggagacttaggaaaatacaagtcaattcctcatcaccatagaggtgaagtccagtttttaggacgtttattaaccttgcaagaactcttcag

SEQ ID NO: 851361 - DNA, 98 bp, Homo sapiens
ggaacatgcattcaacatcgccagatatcaattaggcatagagaaactactcgatcctgaagcatggaaataaccagcctgcaagaactggcacactg

SEQ ID NO: 851362 - DNA, 100 bp, Homo sapiens
cacgactcctgaagacacacctgcccctggctctgctcccccagactctgttggatcagaaggtcaagataccccagaatcttccatgctccgtcacact

SEQ ID NO: 851363 - DNA, 100 bp, Homo sapiens
tccgatttaaagctgagctgcgaggaaaatggcggcgggagcacctgttcttcccggagcctatcagcaaagccattcccaaggctatggctacatgcac

SEQ ID NO: 851364 - DNA, 100 bp, Homo sapiens
tgggcctctactctctggtgctgagtggggccctggcctatgctggccggggcctccttgaggcttcacaagctatcatggtgaacttacttcagattgt

SEQ ID NO: 851365 - DNA, 98 bp, Homo sapiens
ctggctctggtcttcgatgcacaggagtggccgttatggaacgcagttgttgacctcctgtactggagagacattaagaagactggagtggtgtttgg

SEQ ID NO: 851366 - DNA, 134 bp, Homo sapiens
ttaatgaactgatgaaactaaagccacctgctaatattgctcagccagtagcaacagcagctattttaaaggacaccttggaaaaaaagggggtattagggcatttaaaagcaaggatccgagctgaagttttc

SEQ ID NO: 851367 - DNA, 100 bp, Homo sapiens
gtcagctacagccagtccagcttgatccacctggtggggccttcagactgcaccctgcacggctttgtgcacggaggttcgagaacttgtcttggacaat

SEQ ID NO: 851368 - DNA, 99 bp, Homo sapiens
gctccgggctgagcttcctggagaagaggaagctcctggccactctgaatccacttcctggctctggattggcttgtcctggatattgcatagaaatgg

SEQ ID NO: 851369 - DNA, 98 bp, Homo sapiens
acgttataacttgactggctccaatgcaggtacaatcattggtttgatgggatggcgctgcttcaccagttcagaatggcaaagggcacagtgacata

SEQ ID NO: 851370 - DNA, 99 bp, Homo sapiens
tcggcgccgcggccgctgcggacggacgctcgcctgccggctgaggtacaccaggggttggaaaaaccacactaggcaaagaacttgcgtcaaaatcag

SEQ ID NO: 851371 - DNA, 100 bp, Homo sapiens
ataactatgtttatgaacataccctgggtgttgaaagcagcaggggcctagaagacattaaaccgataccacagaaatacaaaggatcattagagactat

SEQ ID NO: 851372 - DNA, 101 bp, Homo sapiens
cggcacttgcccttagtggccgtcttttgcctctttctctcaggctttcctacaactcatgcccagcagcagcaagcagcctctagttctgttgcaggggc

SEQ ID NO: 851373 - DNA, 98 bp, Homo sapiens
gtggacaccgcagtgtgcttgaggagacttcagaaacgagaactgggttgccacaccatttggaggttttgaaaaagcatcaagaatggttaaattta

SEQ ID NO: 851374 - DNA, 100 bp, Homo sapiens
cagaagaccagcatgtcccggggcccttacccaccctcccaggagatccccatggaggtcttcgaccccagcccgcagcattttgaaagcgaagcagaag

SEQ ID NO: 851375 - DNA, 100 bp, Homo sapiens
agtcaatgtgacatgcgtttcatacagaagtacctgcttcagagacatgagaagattcatactgcttacacttggcaatcttctagggaggactttggct

SEQ ID NO: 851376 - DNA, 100 bp, Homo sapiens
aggaatgccagtgcatcttttgcacagcttttgctatgaagattatggaatcagagagagctcttggagatggtacagctctacctcttcattttctatc

SEQ ID NO: 851377 - DNA, 100 bp, Homo sapiens
attttgagccatacttaagtagccagacaaatcaggaaaactaggaatctatgatgctgatggtgatggagattttgatgtggatgatgccaaagtttta

SEQ ID NO: 851378 - DNA, 100 bp, Homo sapiens
caacactggacggtcaagagggtttgggtttatcctgttcaaagatgcagccagtgtggagaaggttcagggcttctggaaatcttgtaatcacccgtga

SEQ ID NO: 851379 - DNA, 100 bp, Homo sapiens
ggagctgcccggggcggtccctggctgcgtgcacagcgccttgttccagcagggcctgatccaggtggctctcgggggctggtccatgggcggctgtggc

SEQ ID NO: 851380 - DNA, 98 bp, Homo sapiens
ggatttaaccgctctctgcctcccaggtgaggcaggcgactaatcagattgtgatgaattgtgctgatattgatattattacagcttcatatgcacca

SEQ ID NO: 851381 - DNA, 98 bp, Homo sapiens
agacccgtagttcctattgattcatcagattttgcattggatattcgcatgcctggggttacacctaaacagattttgaaaagccatggtaaagatga

SEQ ID NO: 851382 - DNA, 100 bp, Homo sapiens
gaatggcaatggcacaaagttctctcgatcagggcatacatctttcttcgacaaaggctcaaagattagaacgactccgaaaagagagacaaaaccagat

SEQ ID NO: 851383 - DNA, 100 bp, Homo sapiens
gccatttgaccatctcgggaagtgaggagagcccccattggaccagtgtttgcttagatgaccctgatgatctgcaatgtaagcggggagaacatgttgc

SEQ ID NO: 851384 - DNA, 100 bp, Homo sapiens
ctttggaagttattccgtagcataagagctgaaacttcagagcaagttttcattgggcaaaatggggaatgttttaaaggaagttgggctactcacaagt

SEQ ID NO: 851385 - DNA, 100 bp, Homo sapiens
cctgaagattaaaactgaagatttcctctggaagctaccacatgcaaacatacaagcagtctcacctcagcctcctgacaaggtgatccgggcgggcccc

SEQ ID NO: 851386 - DNA, 99 bp, Homo sapiens
tttgatatggattatacccttgctggatggagctgtagttacaccctccagacctttaggggacaccctaacagtcagtgaggcagaaacagatcctgg

SEQ ID NO: 851387 - DNA, 123 bp, Homo sapiens
aacttttcaactgacttttacttttgacgaccaccatgactgagatcactgctgaagcgcttctctgaagtagctttggaaagtagagaagaaaatccagtttgcttcttggagaacactgga

SEQ ID NO: 851388 - DNA, 98 bp, Homo sapiens
aacactattacatgggaagaatatatatctgctgaaaatggaaagaatggaggggccctttggtggtggtatggaaaacatgggtcgatttggatctg

SEQ ID NO: 851389 - DNA, 99 bp, Homo sapiens
gagaattgccttcaaccgggaacagagaatgtttaagaccaccaaatcccattgaatttctagcatcttatcttttaaaaaacaaggcacagtttgaag

SEQ ID NO: 851390 - DNA, 98 bp, Homo sapiens
aacttttcaactgacttttacttttgacgaccaccatgactgagatcactgctgaagccacagcgtcctgtgtttactcatgaaaatattcaaggtgg

SEQ ID NO: 851391 - DNA, 98 bp, Homo sapiens
gcgcatgcaacagaagtatgaggccagccgggaggacatctacaagcgggttgctgaaaagccaggagtcaaaatgactgagcgctttgactgccacc

SEQ ID NO: 851392 - DNA, 100 bp, Homo sapiens
tacatctgtgaggccaccaaccccatcggtacacgctcaggccaggtggaggtcaatatcacagattgacttgatgcaaaacatcacaaaggctccatgt

SEQ ID NO: 851393 - DNA, 98 bp, Homo sapiens
tagggctcttcgagaggataatgcctactgtgaagtcatcaccatatttaagggtaaagtggaagaggtggagctgcctgtggagaaggtggacatca

SEQ ID NO: 851394 - DNA, 100 bp, Homo sapiens
cggacgagttcgatgacttcgtcacctatgaggggagattagtaatttttaggtattaaagatacactcaaccaaagggacagaatgggaaaggctgaaa

SEQ ID NO: 851395 - DNA, 98 bp, Homo sapiens
ttggattctgttgcctgggtaccaccagagggaaagctggggcggcgagcccacaccttaaccgtgctcttcatcctcacctgtacgcttggctatgt

SEQ ID NO: 851396 - DNA, 99 bp, Homo sapiens
tggatcaaccagctgacgccggagcagctcctaacccagtcagagcaccataacatggtgtgggaagtgaagacaaatcagatgcctaatgcagtacag

SEQ ID NO: 851397 - DNA, 98 bp, Homo sapiens
ctaggatttgtcacgaatgggaagccaagtgccatcttcaaaatttcaggtcttaaatctgttgcaggaccagctctgccccctaattataaaagcag

SEQ ID NO: 851398 - DNA, 100 bp, Homo sapiens
cctgcagaagaactggcttcgggaattttaccagtgtactaatggtcacttgatgtgcgctggctgttttatccacctactagcagatgcccggctgaag

SEQ ID NO: 851399 - DNA, 100 bp, Homo sapiens
tggagagaagcagcggatcagcagaggcctgtttaaagaagaaaacccgtatgctagatttgaaaacaactaaagcgctccagcacatcagtcccgacgc

SEQ ID NO: 851400 - DNA, 98 bp, Homo sapiens
cgctgaacgagagggacacggagcagacattcacggcatggtgtaactcccacctccggaaggcggggacacagatcgagaacatcgaagaggacttc

SEQ ID NO: 851401 - DNA, 100 bp, Homo sapiens
gtaccggctggactgcaacctggctgtacagctcctcaagtgcaacaagtcccacttccgaaaccacaagtttgccgataacttgtctgtgtgtccagag

SEQ ID NO: 851402 - DNA, 100 bp, Homo sapiens
cctgattacctgtctggagcaaggaaaagagccctggaatatgaagagacatgagatggtagctaaacatttaggtgaccaagaatatggcccaggtgac

SEQ ID NO: 851403 - DNA, 98 bp, Homo sapiens
aagtagcagaagggagccgagtttatctggagtgtagagtcactggaaaccccactcctcgagtcagacatattactgatgccacacttgccattgtg

SEQ ID NO: 851404 - DNA, 100 bp, Homo sapiens
cagaacggatgatttatctggtgacagaatatgctagtggaggggaaatatttgataacagcaaagccgatggccagctggtctcgagtgaaaagaaggc

SEQ ID NO: 851405 - DNA, 100 bp, Homo sapiens
gcgagagaaacccagccgaagcatttaaaagagatgctgcccccacccccttaggcccgagggatcaggagctatgggaccagaggccctgtcatcttta

SEQ ID NO: 851406 - DNA, 100 bp, Homo sapiens
gttttgaagagttctgcgttttgccagtcacctctcaactgtgtgccaaagagtttgccagatccggcccggtgcctgggttccaggaggacacgctgca

SEQ ID NO: 851407 - DNA, 100 bp, Homo sapiens
acgatactgtgcagattgatttagggactggcaagataatcaactttatcaaatttgatacagtcactgcttcaaccacctgtgagaaattagaaaaagc

SEQ ID NO: 851408 - DNA, 100 bp, Homo sapiens
catgtttggagaagctctcgaagacctggagtcatgtggtcagtcagagctgctgagggaactggaggttgactgcattcagccagtgccaaaagaggag

SEQ ID NO: 851409 - DNA, 98 bp, Homo sapiens
acacgggtgaatgctgctaaaaacaagactggggctgctcccatcattgatgtggtgcgatcggctgaaggtgatgtggccgccctcaaccgacgcat

SEQ ID NO: 851410 - DNA, 100 bp, Homo sapiens
cgctggagcgactctgggattcagacaccgcaagctgctttcggaagggcttcaggaggggaccatggtgaatccgggcagcagctcgcagccgcccccg

SEQ ID NO: 851411 - DNA, 100 bp, Homo sapiens
cctgtgaccgaggctttttcagagctgacaacgatgctgcctctatgccctgcacccttattgccttgtctgtcaagatccgcagttatgaagaacactt

SEQ ID NO: 851412 - DNA, 100 bp, Homo sapiens
gtttggacccaagcttaacttttccaatgtggaatcctgggccttcattggaatttagtggttatgttcaacaagtaaaatatgcaatgacaagaataaa

SEQ ID NO: 851413 - DNA, 152 bp, Homo sapiens
agcgggatcggaataagaaggaccgagatcgagacaaggatgggcacagacgggacaaggaccgtaaacgatccaggatcaagtcttccataccagggaccaggccaaaaccagactgccactgcccctacttgggccccactgtccccaga

SEQ ID NO: 851414 - DNA, 99 bp, Homo sapiens
tcgaggtcccagccatcccctggacctggggacctcctctcctaacacctctcagatacactggaccccgatttcaaatatgcgtgcattagagaatga

SEQ ID NO: 851415 - DNA, 100 bp, Homo sapiens
aaatggtaactggagccgtagcgtcggtgctggaagacgaggccacagacacttctgatagtgaaggtactactaaccaataacctgcttggctcaaagg

SEQ ID NO: 851416 - DNA, 98 bp, Homo sapiens
cgtttttcggatgatgccttcaatactacctttatttccaccatagatgatgtgatgccagccacttactgtgaaattgatttagataaagaaaagag

SEQ ID NO: 851417 - DNA, 98 bp, Homo sapiens
agaaaaaatttatttacagctcttaatgcagaggcgacaggaagaagggtattacagccgcctggaagccgagaggcgcagacagcacgacgaggcgg

SEQ ID NO: 851418 - DNA, 98 bp, Homo sapiens
aggaaataaaaacagaacaggaggtggtagagggcatggatatctctactcgctccaaagttgtcgagatgtccacagaaggaggatttggtggtact

SEQ ID NO: 851419 - DNA, 100 bp, Homo sapiens
tgatgtccgggccagcataggtgctgggttcatttaccctttggtcggaacgctatcggcaggaccctcatcccccgttactttagcactgtgtttgaag

SEQ ID NO: 851420 - DNA, 100 bp, Homo sapiens
aattcgccaggatcttataaaacaaatgctgctgctatgaatatgggtcgaccattccaaaaaaatcgatcaatgtccgagttaccaccatggatgcaga

SEQ ID NO: 851421 - DNA, 98 bp, Homo sapiens
aacaatcagtgccgagcaattgtgatgagatattctgctgagtggaaggtcaagaagatcatgaaccaggtgttccagtccttacggagagagtttga

SEQ ID NO: 851422 - DNA, 100 bp, Homo sapiens
acccatctgaagggaggaaatagtggcaggtgacagtctgcatgtgcagttttcagggctaggggcaaggtaaagcattgtcgcatcaaccgggacggcc

SEQ ID NO: 851423 - DNA, 98 bp, Homo sapiens
tgactgctcaggaaattttccaagacaagactcaagcacagagggttcggaaaccgcgttgctgcacggggccccaggggctgcttccccgatattct

SEQ ID NO: 851424 - DNA, 98 bp, Homo sapiens
gctgctcatgaaccacttggcaaagatccaccttgatgttcagtgaagagtaccagaaaagtctgctagagcagtaccatctgggtctcaatcaaaaa

SEQ ID NO: 851425 - DNA, 100 bp, Homo sapiens
ttatttattgtaaagatttcagaattgtcagatttcgctttgatgaatcaggtcccgaaagtgctaaaaagcgcttctctgaagtagctttggaaagtag

SEQ ID NO: 851426 - DNA, 100 bp, Homo sapiens
catgacactcctggggtctgagcattccttgctgattaggagcaagttcagatcaggttccttgcattgactccatggagagtatatcacctgatttccg

SEQ ID NO: 851427 - DNA, 100 bp, Homo sapiens
gctaccccaggccatccttgaggccagcagcttcacggaccttgagaccatcgccaacctgggtctggctttgaccgccattgaaggcacagcacatggg

SEQ ID NO: 851428 - DNA, 100 bp, Homo sapiens
tactccaaagcggccgggagtcgcgcttcttccccactcccgagacaggtctaggcgttttacactgagattctccactgccaccctttctactcaagca

SEQ ID NO: 851429 - DNA, 100 bp, Homo sapiens
ttcaggctctatggaatgcttgtgaaaagttgcccaaggccaatcacaacaacatccgctatcagttgagggatttgcagttgataaaatggctggagag

SEQ ID NO: 851430 - DNA, 100 bp, Homo sapiens
catggccgatgggggcgagggcgaagacgagatccagttcctgcgaactgacttccttcgctgggcatctggctgggattcttgttggactaatgtacac

SEQ ID NO: 851431 - DNA, 98 bp, Homo sapiens
aaaccggcagctgttagccgagcaagttgccatgtcaaatcttagcgaggctgtgcaggatgcagacctgctggtgtttgtcattccccaccagttca

SEQ ID NO: 851432 - DNA, 98 bp, Homo sapiens
tattgaccccaacatgttgaatgcacaaaagcaacaggtccagtttctatgtgctctgccaagaagggaaggttatgagttttttgtaggacaatgga

SEQ ID NO: 851433 - DNA, 99 bp, Homo sapiens
ctgttaacatctttaaggcaggagctgatgaagagagagcagagacagctcgtctggagcaatttacagcaatgagggatttatacatgaaaaatggac

SEQ ID NO: 851434 - DNA, 100 bp, Homo sapiens
aggaaccaaatccaatttctccacatactgacttgataaaaccagtttggctatgaaaattctggaagacaagctaagcaataaccatcctggacattgg

SEQ ID NO: 851435 - DNA, 100 bp, Homo sapiens
actcctggggatcggtttgatgtggtggttttggcccctttgctgcaaagtgaatgtttctccatcccagagagatgaagtaattcaatggctggccaaa

SEQ ID NO: 851436 - DNA, 98 bp, Homo sapiens
gaacttgtgcacccgttgcagtccttcagggccattcagcttctattacttccatacagctcgttttgacaggagccattcaagtagcagacaaagtt

SEQ ID NO: 851437 - DNA, 100 bp, Homo sapiens
cgagagaggcaccgggatcgtgaccgagaccgtgaccgagagcgtgaccgagagcgcgaatatcgtcatcgttagaaggaaatgtgactggaaacagtaa

SEQ ID NO: 851438 - DNA, 98 bp, Homo sapiens
gttacgtggtggacctgtacctcaacacccccgacaagatgctgcatcttcctcccgtgaggctggccgagctccacgctgatctgaagatacaggag

SEQ ID NO: 851439 - DNA, 98 bp, Homo sapiens
gaggtggccgtggaggcagaggtggcatggggttgtgaactaaaggccgacaaagattatcactttaaggtggataatgatgaaaatgagcaccagtt

SEQ ID NO: 851440 - DNA, 50 bp, Homo sapiens
ttctgacagtatttcatgacactggagatggagctgaagatgctgaagtc

SEQ ID NO: 851441 - DNA, 99 bp, Homo sapiens
acatatttatctaaacggttaggaaggagtatagatgacataggtcacctcattcatgaaggcctacagaaggtgaatttttcctgaaaaatctagtgg

SEQ ID NO: 851442 - DNA, 100 bp, Homo sapiens
ttgtctgtttgatatcaccaaactggaggatgcctatgtattccctggggatggcgcatcacacaccaaaggcttccagctggtctttttaccctttgct

SEQ ID NO: 851443 - DNA, 98 bp, Homo sapiens
ccacccgagctccaggtatgaagcctgctcctctggaattactctagaatgacgtggccgcacttctgaaacccatatcggaaaagattcaggaaatc

SEQ ID NO: 851444 - DNA, 100 bp, Homo sapiens
ctgtttctggaaaattgctcttctctgcagacaataatgaagtggtagtaggagctgaaagattacgagttttaggttgtccttctattcaggccactct

SEQ ID NO: 851445 - DNA, 100 bp, Homo sapiens
taacctggccatggaaatcgctgagaagcacctggatattcctaaaatgttggatgctgaaggcccccacagaacacctgaactcaaatgagatgccgga

SEQ ID NO: 851446 - DNA, 98 bp, Homo sapiens
ggccggagccacgcagccgcggcttccggagccctcggggcggcggactggctcgcggtgcagatcaggatcctcatgaccagccaaagagaagaaga

SEQ ID NO: 851447 - DNA, 100 bp, Homo sapiens
tgcccagagtgccctcttcttgcagcatggcctggccacccagagggcccttgtgtccaagtctctggcatctctatcccctatgaggcaccacgtaaga

SEQ ID NO: 851448 - DNA, 98 bp, Homo sapiens
acctcatctccaggacagtgggaagagtggctggaggaattcagtttcttggggggggtcctggtcttcatgatccttgtgagcgagacccaacagat

SEQ ID NO: 851449 - DNA, 100 bp, Homo sapiens
cgatggagaagaatatgatgtggaagcacatggaggggttggttcccgtcgtcgtacacgaagttgctggaagaaaatgagacagaagcagtgaccgtgc

SEQ ID NO: 851450 - DNA, 98 bp, Homo sapiens
agatgcacatgtctgggaggataattgggatgatgacaatgtagaggatgacttctctaatcagttacgggcatcttctctgcattcagtttcatcca

SEQ ID NO: 851451 - DNA, 100 bp, Homo sapiens
aagaggaatcctcggcagataaactggactgtcctctacagaaggaagcacaaaaagggacagtcggaagctgcagtaaaggaagatgaagaagaagttt

SEQ ID NO: 851452 - DNA, 100 bp, Homo sapiens
tgtggtattacagtgtggtgcagactcattatctggtgatagactgggttgtttcaatctaacagtcaaagaaaaatatgtcgtaactgcaagtgtggcc

SEQ ID NO: 851453 - DNA, 100 bp, Homo sapiens
atcaagtgtgcctgctccatttggagagttttccgtctgatgaaggttggccatttgcaaagtatcttggagcttgtggaagaatggtggctgtaaatta

SEQ ID NO: 851454 - DNA, 100 bp, Homo sapiens
agcaagacatcgacgaagccaaactttctgtcttctcaaccgtagatgctcctgtcgctccttcagacaaaggactttccttatcccagttgattgtgca

SEQ ID NO: 851455 - DNA, 101 bp, Homo sapiens
ggttcgtcgcctccttgcccgtgaccgtcgctagaactcagttgtgcgttgcggccagtcgccactgctgttcaggaagatttgactgaagagaaaaaaag

SEQ ID NO: 851456 - DNA, 100 bp, Homo sapiens
aaccaagtaccaagtgaagactttgaacgcactcctcagagtccgactctcccacctgctaaggcgtccacccaacggcccatgatcatcttgtaaccag

SEQ ID NO: 851457 - DNA, 100 bp, Homo sapiens
gcatactcgctgcccgccggctccctcccccgcgtccctgcgaccgccgcggcgaagatgaacacacatgcaggacttgaaagatgttactaataatgtc

SEQ ID NO: 851458 - DNA, 100 bp, Homo sapiens
agctctgggatattatccaggagaacactaaagagaagattcaaccaaacccaccatcttctggtttcattggagaagctgtgcctgaggatgaacagat

SEQ ID NO: 851459 - DNA, 100 bp, Homo sapiens
gccctggtgtcacctatcagtaaaagatgtggaagatgtcaagtttgtgatcaactatgactatccaaacagctcagaggattatgtgcaccgtattggc

SEQ ID NO: 851460 - DNA, 99 bp, Homo sapiens
ggaggccgagaccagacgcggagccatggccgaggtgttgcggacgctggccggacatggatttgattgacatactttggaggcaagatatagatcttg

SEQ ID NO: 851461 - DNA, 98 bp, Homo sapiens
ggagccgctgctcgagctgctgctggattgaactcagagaagccgggcatggcttctcgctgtttctgggatgctgacactgacaactatactcatga

SEQ ID NO: 851462 - DNA, 100 bp, Homo sapiens
ctggacatgagcagcggctgccggtcctgggactaggccccgccattttggatccgctgacagacatacaacagctgtgccagactctgcttaaaccaag

SEQ ID NO: 851463 - DNA, 100 bp, Homo sapiens
ttgaaaaaaaaaggagagaagctgaagcattgcttcaaagcatggggctaactccagaatcccccattgatggcggcagctatgccatccacgactccca

SEQ ID NO: 851464 - DNA, 100 bp, Homo sapiens
gcagcacctcccgacagccggctcgggacccaactctgcgagccagatggcggcagctatgccatccacgactcccaggcccccagtctcagctctgggg

SEQ ID NO: 851465 - DNA, 98 bp, Homo sapiens
cacagctccagggaaggcactcaaaagtggggggcaggaaagtgttatccaagataaattctgtgggattataaacatttcagtagaaggcctgcatg

SEQ ID NO: 851466 - DNA, 98 bp, Homo sapiens
cggttggaggcttcgcccggctttgcagcggggacttcggcggcggcgcctcaggcacctcggcccgggactggaaggatcaccagcacatatgcggc

SEQ ID NO: 851467 - DNA, 100 bp, Homo sapiens
gaagcactttgttggctatcctactaatagtgactttgagttgaagacagctgagctcccacccttaaaaaatggaggttatgatgtgattgctcaagcc

SEQ ID NO: 851468 - DNA, 98 bp, Homo sapiens
cttcttccccgcgccctgcggggctgtccaacgccttccagctccggctcccgctgcctgcaccatgtccgccagagaattggtagggtgcccccctt

SEQ ID NO: 851469 - DNA, 99 bp, Homo sapiens
gacgaccgacagggtggtgaaaggagtccaaaactacttacctggaagaccttccaccaccccctgagtatgaattggccccgtccaagttagaagagg

SEQ ID NO: 851470 - DNA, 98 bp, Homo sapiens
tgaatacagcgacccagtggatggaagcatttcaagaaatcaggcttagagaagaaaacgcaggttctgcagcctgaggagaagaagactgtggcata

SEQ ID NO: 851471 - DNA, 100 bp, Homo sapiens
gaccgtgaccgagagcgtgaccgagagcgcgaatatcgtcatcgttagaaggtccttgaatgggcaagagggcacatgaagtacggcgtcctccacattc

SEQ ID NO: 851472 - DNA, 100 bp, Homo sapiens
aaattttgttctataatgacgaacaagataaggagcaatccaatccatctatggtattggacatagactctgcttatgataatgtcaacaaagttcgagt

SEQ ID NO: 851473 - DNA, 101 bp, Homo sapiens
cggatgttgtgaaccgggtcgcggcggccgaggctcgggaaaatggagctggcgctggtgcctgtgagcgcccacggcaacttctatgagggggactgcta

SEQ ID NO: 851474 - DNA, 100 bp, Homo sapiens
agggagggacccaccgtagagactaaggacagaatgacttggaagataacggagcttcgaagcttctagcagaatatgaagtctttcgtcttcagctacc

SEQ ID NO: 851475 - DNA, 121 bp, Homo sapiens
aaatcctccccacttatgtttgtaaatgtgagtggaagccatgaggccaaaggcagttgtattgttggtgcttcccgtgctgctgttgatgctggctttgttcccaatgacatgcaagttg

SEQ ID NO: 851476 - DNA, 98 bp, Homo sapiens
gaaagagcgccaaggcctcttctttgacatggaggcctatttgcctaagaagaatgggacctcctctgtcagagagagcagctttgtggaaaagatga

SEQ ID NO: 851477 - DNA, 100 bp, Homo sapiens
gctggagctgagctgaaggacacacagtccccaagtacctgctctgagtgttatagttttgccgctggactcttccctcccttcccccaccccatcagga

SEQ ID NO: 851478 - DNA, 106 bp, Homo sapiens
tcgatgctggcctggagcagaaactgagctggaccactggagcctcggaattcctggtgactggaagggggagtgactcaggccctcaacctctagcaggtaaggg

SEQ ID NO: 851479 - DNA, 51 bp, Homo sapiens
tttccctaaggcagccatcaaaaggattgatgaggacatgactgcccgaat

SEQ ID NO: 851480 - DNA, 100 bp, Homo sapiens
ctgcggctctctacgtccctgcggagcagccggacgatttcctgttcagtgtctccattttaagtgggattctttgcagcatcctggccgtgttgaagtt

SEQ ID NO: 851481 - DNA, 100 bp, Homo sapiens
agagacagctcaacacggcacttccacagtggctgagaaaccctggcccccagcatgagaagcggactctgtttggcgacatggtgtgcttcttgtttat

SEQ ID NO: 851482 - DNA, 100 bp, Homo sapiens
tgtgggttggctatcagtatgttatcactggccggaaccgctccttggaaggtcgctgggaggtggcattcaaagtgcgtcagcatttatcccgtttgcc

SEQ ID NO: 851483 - DNA, 100 bp, Homo sapiens
atgggggtccacactgcaatgtttttgtggaacatggttgtgaactaaaggccgacaaagattatcactttaaggtggataatgatgaaaatgagcacca

SEQ ID NO: 851484 - DNA, 100 bp, Homo sapiens
ctggcaaagacaaaggaaagaccagtagaagagaaagaaaccaaaaacagcaagcgcagagccaaacagccaggcagggttttggccaaattgggcgagg

SEQ ID NO: 851485 - DNA, 99 bp, Homo sapiens
ttcaccttgccgtccgaactgcagatcagacatctctccatttggttgacttccttgtacaaaactggccagtgagcagatttattatgaaaacagaca

SEQ ID NO: 851486 - DNA, 99 bp, Homo sapiens
ggtggcggcggcggcagctgcagtgacatgtccagcatgaatcccgaatagtttacccaaggtccagcctagcccctaggcaccatgtcggacagtgat

SEQ ID NO: 851487 - DNA, 100 bp, Homo sapiens
tgatcttcgctgtaacccaagaacaagttcatttatatgaggatgttgcttcagagtgtgaagtcaaatgcatgccaacattccagttttttaagaaggg

SEQ ID NO: 851488 - DNA, 99 bp, Homo sapiens
gcaggagcagatgtgaataaaactgaccatagccagagaacagccctccatcttgcagcccagaagtgcaggcctgagtgttccttccagcatgtcgga

SEQ ID NO: 851489 - DNA, 98 bp, Homo sapiens
gagaggggacgtggccctatcaacctggatttctgacttctagactccacaactgtgagtcagcagataagcagagagccctagaagaaaccaaagcc

SEQ ID NO: 851490 - DNA, 98 bp, Homo sapiens
ctggggctgcaggagaccatcgcagagtttttgtacattgcccggccgctgctgcactatgacggtccttcgctacccaccaaacagaacgaggaatt

SEQ ID NO: 851491 - DNA, 98 bp, Homo sapiens
ccagcacgtggaacctggcttcgcccttattgtctgtcagcgttgatggcactcagaggactgtccagataaacaagctggaggcacgcctgaggcag

SEQ ID NO: 851492 - DNA, 99 bp, Homo sapiens
gttttgtctctgctgggcctgtgtgcctggaaaggaattgttttggcctaggatcatccagttacatggacacagaacagtatgaagaagcagtacgag

SEQ ID NO: 851493 - DNA, 98 bp, Homo sapiens
ccagctctgcagccacatactatccgtttgttcaggaaccaccagtgacagagttcgagaaatggctgctactaccttaagcggtctgctacagtgta

SEQ ID NO: 851494 - DNA, 100 bp, Homo sapiens
ttttcattgttccactggacgctcatcagagggaagatctttttcctcaattggactgatcctttgaaatactccagccatgactaaaagagaagcagag

SEQ ID NO: 851495 - DNA, 100 bp, Homo sapiens
cgcaaacttcgtactttctatgagaagcgtatggccacagaagttgctgctgacgctctgggtgaagaatggaaggggaaagcctcctgaagctgatggt

SEQ ID NO: 851496 - DNA, 100 bp, Homo sapiens
tggactggccagagcccacacaagtttacagtttctggtgatgaacgaggtttgaatggggatgtgaatgttaatggcttatctactgtatctcacacta

SEQ ID NO: 851497 - DNA, 100 bp, Homo sapiens
ttctttgtcgggaacagcagcatgtcatggaagaattatttcaatccagtttcaggaggattgccagaagcttttcagaagagctggtagatgaagctct

SEQ ID NO: 851498 - DNA, 114 bp, Homo sapiens
tactgtccaagcacagtctcagccccatggggtatatccaccctcaagtgtggtcatgttcacggaggaggatgtcaagttctacctggctgagctggccttggctttagacca

SEQ ID NO: 851499 - DNA, 99 bp, Homo sapiens
tcaacatgaacaactacaaaggctatgaaaagaagccctattgtaatgctgatcaggaacctccctattcaatgataacattacacgaaatggcagaaa

SEQ ID NO: 851500 - DNA, 100 bp, Homo sapiens
ccgcagggaggtggagaggaagcagaagggctctgaagatctccagtctggctcagctgccagtggtgggagtggtgccggaggaggaggaggaggagga

SEQ ID NO: 851501 - DNA, 98 bp, Homo sapiens
ggatgacaatattcgaactgttgtaagaggtcagacgaacgtggggcaggatggacggcaagatgtaaatgaagaccctggagaagatgtggccctcc

SEQ ID NO: 851502 - DNA, 100 bp, Homo sapiens
gcagcggaaaatgatccagtcacagatggattaattgcctctgaaggagccataagtcccgatttcttcaatgattaccaccttcaaaatggagatgttg

SEQ ID NO: 851503 - DNA, 141 bp, Homo sapiens
tttttttttcttgtgagagagttacttcaagttgtgtttggagctgacgtgagcgaggttggtcatgtgctcgggagctggagctggtggaggatgtgtggcgaggggaggcgcaggacctcctctcccagatcgcccagc

SEQ ID NO: 851504 - DNA, 100 bp, Homo sapiens
agtgaccaatcagaaataatatccaatcagtacaacaatgagccttcaaacatatttgagtaaaataaaacagggtctgttacctagcttggaagatttg

SEQ ID NO: 851505 - DNA, 100 bp, Homo sapiens
gacctatgaatatccagtttgagccatcggatctaagatccaaaagggaagatcagttttcctgccatccaggctgctccctccttcagcaactcattcc

SEQ ID NO: 851506 - DNA, 98 bp, Homo sapiens
ccaacgtgtccttcaatgtttcccgggagctcttcttcatcaacatgtggcagaaggccctgttaaacctggcagagcgactgggagaggcaaagcct

SEQ ID NO: 851507 - DNA, 98 bp, Homo sapiens
cgccgcagccccccaatgcggccgcgagaagcagcgggggggcaggcgatcgaaggaggatgcagcattcaaggttctatcttggaagcagagactgt

SEQ ID NO: 851508 - DNA, 100 bp, Homo sapiens
aaaagggtatttcttttctctcttcagcccccaacccagtggaggattggcagccaccatttgcatgtgatgttgataaacttcattttacgccacgtat

SEQ ID NO: 851509 - DNA, 98 bp, Homo sapiens
ccttgccgggattgtacctgcaggcagaaagtcttcctacgaccgtcttttcccttagaggcaccaggctgcttggaattaaaagaggacaccattga

SEQ ID NO: 851510 - DNA, 101 bp, Homo sapiens
attttctaccaagctgggacttccaaagctgggaatcctattttttattatgttgcacggagtgagtccattcttgcacaccgagaaaatatgcgacagat

SEQ ID NO: 851511 - DNA, 100 bp, Homo sapiens
tggaagaagcaagcagccccagggtggaatcttaaaaattaatgaagagcatcggcggggtgccattcaggtgggttgttctcagttactgaaggagtct

SEQ ID NO: 851512 - DNA, 100 bp, Homo sapiens
catgtcactcgccacactcacaaatgcatggatctcaaaggaaacaaacacccaataaactcggagtggcagactgacaactgtgagacatgcacttgct

SEQ ID NO: 851513 - DNA, 100 bp, Homo sapiens
gaaaagaattttaaagatatctcctcttgttctcagccgctgtgattggaaccaggctgcatgctgctgtggcaattgcttgtgttgtaatggcctttta

SEQ ID NO: 851514 - DNA, 98 bp, Homo sapiens
tcatcaataatgaaatgctgactaaggaacaaggtgttcaatatgaatgccccagttcctcctgttaatgaaccagaaactttaaaacagcaaaatca

SEQ ID NO: 851515 - DNA, 98 bp, Homo sapiens
gcccagacgcggcacagagagggcctgggagcttgctgcagcttcagggccgttgccgtctgcacccagaccctgagccgccgccgccggccatggag

SEQ ID NO: 851516 - DNA, 100 bp, Homo sapiens
tagaccagctagagaccatacagacctaccggtctgtcagtgagatggcttctaacaaggtgaggaagatcttctcagtcctccccaggacacaagcaca

SEQ ID NO: 851517 - DNA, 100 bp, Homo sapiens
caaagaaaatgggatccatgaagaacaagaccaagagccacaggatctctttgcaggagctattcatcactaatgaaagttgaaaatatgtcttcaaatc

SEQ ID NO: 851518 - DNA, 98 bp, Homo sapiens
cgggaggcagaggccagccggcggtgcatggagctgatcgtctggtagaatcaacttccttgagaaaagccatagaaacagtgtatgcagcctatttg

SEQ ID NO: 851519 - DNA, 100 bp, Homo sapiens
ggtggccctgagctgccacggaagccgcatgaggcagattgcttccaacagcccgggttcatcacctaaaagaatgggtaccacagaccatgtcatcgtc

SEQ ID NO: 851520 - DNA, 99 bp, Homo sapiens
gtaaatgctgtcttttcccaaaagacaggctcttcacctgaagtttccacgggctcccttgctcagcagtatgcgcaccctaacgctaccctgcaccca

SEQ ID NO: 851521 - DNA, 100 bp, Homo sapiens
ttccgcttctaccgcgtgctcacctgtatcagctggcccctgtcgttttcctttgcagctagaaaacggtcaagctatggaatgtacagtagctcaatat

SEQ ID NO: 851522 - DNA, 99 bp, Homo sapiens
ttggatcttggaggtggtgtaaaggaagctcaagtatatcaagcattcaaattgctcacagctgatcctaagacaatgcaggcagttaacaagaagatg

SEQ ID NO: 851523 - DNA, 100 bp, Homo sapiens
gcccgggcgggtcccggggtgcgagcagcgcacttccgatgaatgatttcggaatcaagaatatggaccaggtagcccctgtggctaacagttacagagg

SEQ ID NO: 851524 - DNA, 99 bp, Homo sapiens
ctggttcaaggttgggcattgggtggaggagcagaatttactacagcatgtgatttcaggcaagagggcacattgggagattcagcttgcaagagtcct

SEQ ID NO: 851525 - DNA, 98 bp, Homo sapiens
ctgggggcatctgaagcagtggccgacatcaagttttcctctgcaggccaccatgaagactttgcttagaacttggtcagaattatatagagcatttg

SEQ ID NO: 851526 - DNA, 98 bp, Homo sapiens
gtaattttttcctacaatcaggtctgccggcccctgttttagctgaaatatgattgggaaaatgaggtacgttagtgttcgcgattttaaaggcaaag

SEQ ID NO: 851527 - DNA, 100 bp, Homo sapiens
gcgagctcgcgatgagtggtctcggcaggctcttcgggaaggttttttgctccactcaagcctgttagaatcaccatggaatacagctccagtgggaagg

SEQ ID NO: 851528 - DNA, 100 bp, Homo sapiens
ctggcccagccaatcctggagctgctgttgcagcacttgttccccaaacaagtgctcctacattctggatatcttaaatacgatcataaggcactgtcca

SEQ ID NO: 851529 - DNA, 99 bp, Homo sapiens
ttccggtaggagctgtaatcaattgtgctgacaacacaggagcttcagtttcagcgactcacccgagaactggaagtggaaaggcagattgttgccagt

SEQ ID NO: 851530 - DNA, 100 bp, Homo sapiens
aggaggctgtgcgggccccgctccgcttcgaatgggtaaatggatttcgcagttatgtagatctttatgtgaaagacaaattggatgaaactggggtggc

SEQ ID NO: 851531 - DNA, 100 bp, Homo sapiens
gacgaggagccccccggagagccacaggcagcccagagccctgccggccaagtggtttttccccatcatcggccacatgggcatctgcacatccacagga

SEQ ID NO: 851532 - DNA, 98 bp, Homo sapiens
aacaatggttgcatctgcagatggtttagtttatgaaccagcactactgcagtcttcagttaagcaacaagtagaagctattgaaaaacagtacattt

SEQ ID NO: 851533 - DNA, 100 bp, Homo sapiens
tagcagctgcgattgaggaagagcgagccagcgcccggagcaagcggagctcccccaagagccggaaaggtcacaaggcacttaaagcattgttgaggtc

SEQ ID NO: 851534 - DNA, 100 bp, Homo sapiens
ggagcacacgcccgacgaggagagcatcgactggaccaagatcgagcccagcgtcaacttcctcaagtcgcccaaagcttccttcaaaatgtctactgtt

SEQ ID NO: 851535 - DNA, 98 bp, Homo sapiens
gaagcaggggctgtccccatttttatagagctgcttaattcagactttgaggatgttcaggaacaggtggctttttctcaagtatattttccagtctg

SEQ ID NO: 851536 - DNA, 100 bp, Homo sapiens
gaaaatgaaaccagcagacagaatttgtcaggatgacgtagctttgccaaagacttagaagctaagcagaaaatgagcttaacatcctggtttttggtga

SEQ ID NO: 851537 - DNA, 98 bp, Homo sapiens
cgggcacctccgagcgcaaggacagcgcgaggtccgcgcagcccagcgcagccatgctgaaggtgatgtggccgccctcaaccgacgcatccagctcg

SEQ ID NO: 851538 - DNA, 100 bp, Homo sapiens
cggaatattgctacatactatggtgcttttatcaaaaagaacccaccaggcatggatgaccaactttggggtgcttcaaggatgaccgcatcgtcttctg

SEQ ID NO: 851539 - DNA, 100 bp, Homo sapiens
tttgtgaaaggccaatttcatgaatttcaagagagtaccattggggaaatggtggagtcaatgaagaaagtagcagggatggatgtggagctgacagttg

SEQ ID NO: 851540 - DNA, 98 bp, Homo sapiens
ggagctgaggccctatgtgcccctcttctgcagcgtcctcaccaactttggtgcaattcccatcgaccagagttggtccgaccagccttggaaaggtc

SEQ ID NO: 851541 - DNA, 100 bp, Homo sapiens
ctttacccgggcatcgaacatcacaatgatcctgaaaggaaccagtacctgtgataaggatgtacctgagcatgcagaattccgagggtggagcggattc

SEQ ID NO: 851542 - DNA, 100 bp, Homo sapiens
tcagactcagaagccgacgttcgagaggaagattcttacctctttgatctcgacaataaggagctggtcaggctcaccatcgagaagcagggacgtccgt

SEQ ID NO: 851543 - DNA, 100 bp, Homo sapiens
tacaccatcgacaccgaaaactccaccgtagcccttgccaaagtgctacagatgaagcatggcgactattatccacttacctggagaggtacaaagtcca

SEQ ID NO: 851544 - DNA, 100 bp, Homo sapiens
cgagatcagcatcttaacaattcatcattaggttcagctgcagcccggaaagaaatcataagaaacaaaattcgagcaattggcaagatggcaagagtct

SEQ ID NO: 851545 - DNA, 98 bp, Homo sapiens
ccaggtttactggagtaggtgttagtaagcatcgagagtaaacatgaggttacgatcctgggaggacttaatgaatttgtagtgaagttttatggacc

SEQ ID NO: 851546 - DNA, 100 bp, Homo sapiens
ctttctcaacaaaaccgacatcctggaggagaaaatccccacctcccacctggctacctatttccccagtttccaggagtctcgctctgtcgcccaggct

SEQ ID NO: 851547 - DNA, 98 bp, Homo sapiens
gacgacacccctgatggggcaggaggggcctttgcagctcagcacacagcaagaaggaggccatcagcaaactgggaagaggaccctcaccaggaacc

SEQ ID NO: 851548 - DNA, 98 bp, Homo sapiens
ttgatggtggtgagcggcgcggtgctggtgtacttcgtggtcaggacggtcagagtgaagtcaccctgctgagaaatgaagtggcacagctgaaacag

SEQ ID NO: 851549 - DNA, 100 bp, Homo sapiens
caaaggcggctcaagcgcccagaaacccctactcatgatccggaccctgagactcccctaaaggccagaaaggttgaaccctcggatacgatagaaaatg

SEQ ID NO: 851550 - DNA, 98 bp, Homo sapiens
tctttgttagatgattcgaagtttcctatagaggataccccattggttccagtgtcatcaatcttacagaagaagtgctgtgggtcaaagtgaatata

SEQ ID NO: 851551 - DNA, 98 bp, Homo sapiens
aggtgttgtgccattctctgggaacatacagatgaaatgacctgaaccctgcccaccatttaaccaagtgctggagaatctggtaaaagcaccattgt

SEQ ID NO: 851552 - DNA, 51 bp, Homo sapiens
cgacaggcggcgcgggcggcggttccccagaacagcaaaagaaactatggg

SEQ ID NO: 851553 - DNA, 99 bp, Homo sapiens
tgccccattctgagagcagcagcctggctcctggtggctccagcagcaggtagaagaagcagatgattggctcagatatggaaacccttgggagaagtc

SEQ ID NO: 851554 - DNA, 100 bp, Homo sapiens
ggaaagtgcgtcatcctaaggaacatcgacggttttgactctgggaggagggctgccttatttggagcaccttaatctctctggttgtcttactataact

SEQ ID NO: 851555 - DNA, 100 bp, Homo sapiens
accagagaacttcccagcatacctgagaatgtatagtggaggattacaagccaccgttctacgatgtggttcccaatgacccaagttttgaagatatgag

SEQ ID NO: 851556 - DNA, 98 bp, Homo sapiens
tcagtgcacaaaatggcgccctacagcctactggtgactcggctgcagatacttggtgcttgaaaaactgaagaaggaagacgctgaccgaattcata

SEQ ID NO: 851557 - DNA, 99 bp, Homo sapiens
tcggaggcggctgcgagagtggcagaggagctggcggagagcggcctgcgggcgatcgggccgaggtgagcgacctgtgagagtttatgccgatggaat

SEQ ID NO: 851558 - DNA, 99 bp, Homo sapiens
caaaagcttctatcatttttgttactcttcagtacaatgtcaccctcccagcaacaggggtgatccattcatgttgcagcagtctacaaatccagcacc

SEQ ID NO: 851559 - DNA, 101 bp, Homo sapiens
cgagtgtctgctgatgaagacctcaaactttctgatcttttaaaatattacttaagagaatctcaagctgctaagggttgaaaggaggagcaggaggtact

SEQ ID NO: 851560 - DNA, 99 bp, Homo sapiens
ttcgtcatccacaaccatgcggacatcggcttctgcctggtgctctgcgtcctcatcgggcttatgttcgaggtcctcagaatggttggaatgaccctc

SEQ ID NO: 851561 - DNA, 115 bp, Homo sapiens
tgagaggccaccgagagacctccatggtccatgaactcaaccgaactgaagctagtttagcctcacgcagagaacaaaagagagagcagtatcgtcaggtaaaagcacatgttca

SEQ ID NO: 851562 - DNA, 98 bp, Homo sapiens
ccaaggacacacaggatcaattacatctttacaggaggcaggtggaagtcatcataaagtttctgtttcacccgtcgtccatgttcgaggactctgtg

SEQ ID NO: 851563 - DNA, 100 bp, Homo sapiens
ctggccctctgtctgcctgtgtccctgaccatggctccctgcagtaccctttaacgtggggactggatatgcacattttgtagagatattggaaagccag

SEQ ID NO: 851564 - DNA, 100 bp, Homo sapiens
gagaaacccactgaagacgtctgcgtgagaatagagaccaccgagtagctgctgctggtggtgacaatgtcaaataacggcctagacattcaagacaaac

SEQ ID NO: 851565 - DNA, 100 bp, Homo sapiens
cacgagctcatcagatgatgatgaagaggtttcagggagcagcaagacaatcactgcagagataccaggatccttcaaaccaaaaatgtggtggaagaaa

SEQ ID NO: 851566 - DNA, 99 bp, Homo sapiens
tgccatgcatccaacaaaaccttcccaacacattggaacaggcccaagtctgttttggtggtctgagaggaaaaaagatgagcttctaaagttttggga

SEQ ID NO: 851567 - DNA, 98 bp, Homo sapiens
agctaccaagaaagaccgtgtgaatcattgtctgacaatatgtgaaaacatagtggcacagtctgtcagtggtagacggaggagaagtccatccccac

SEQ ID NO: 851568 - DNA, 100 bp, Homo sapiens
cccttcttaacaaggaatcagattccccgtactccagaaaacttgagcacccagtcagtcagagtcagagccagagaaggctccattgtgcagtgtgccc

SEQ ID NO: 851569 - DNA, 99 bp, Homo sapiens
tgggatttggcacctatgcgcctgcagagaacaagttgaaatcatcgcagaaggataaagttcgtcagtttatgatcttcacacaatctagtgaaaaaa

SEQ ID NO: 851570 - DNA, 100 bp, Homo sapiens
aacagattggattgaaagaagcccagcttttccatcctggagatctacaggatttatcaaatcgagtcactgtcaaggcaccactgcctatgtcccacag

SEQ ID NO: 851571 - DNA, 100 bp, Homo sapiens
cttactataaggaacatgagggtcagaaatgtgaattccaggatgcctatgttctgttgagtgaaaagaaaatttctagtatccagtccattgtacctgc

SEQ ID NO: 851572 - DNA, 99 bp, Homo sapiens
cccgccctggggacgaagagctgcagctcctcctgtgcgggcaggccagaaagcagacccagggaggatagcacatgtcttcggctacactggtgaagg

SEQ ID NO: 851573 - DNA, 139 bp, Homo sapiens
cggattctgtgggtgtaaagcaaagaacaaaatgaagtgtgattcaaggtgggaaatagccgcttcagttcttccctgtggaacagtagagacctagtctgccttctttcacaagataatccttcaattatttgaaggt

SEQ ID NO: 851574 - DNA, 98 bp, Homo sapiens
gattggagtgaaccggagaccccgaaaacggaagcgcagggagaaggaagaggtgtttgaaaagtgcctacaccaactaatgttacaattgaatccta

SEQ ID NO: 851575 - DNA, 100 bp, Homo sapiens
agagagctatggtcaaggcttgtcctcatgtctggtttgaacgctcagaaatgaaggatcgacacctggttactaagagcaacagtatcaaagtgctcta

SEQ ID NO: 851576 - DNA, 98 bp, Homo sapiens
agcaatgatgtagccacctcctaaccttcccttcttgaacccccagcccctgctcccccggtgacccctagcaaaccaatggccggcaccacagaccg

SEQ ID NO: 851577 - DNA, 100 bp, Homo sapiens
acaaggtggaaaagttgcagtttgaagaggaggactttttacagatttatggtaatggaaagactaggaatagatttacagaagatctcaggccagaatg

SEQ ID NO: 851578 - DNA, 98 bp, Homo sapiens
ctgcactttggggagcctaagtcctgggtctgaatccagggaaagctattgcagagatcaagaaaatgatggcaacctataaggagaagaaagcttca

SEQ ID NO: 851579 - DNA, 99 bp, Homo sapiens
atctggtctcctgccagcctgaatgagaaaacaccgaagggacattctgtcttcatggacatttttgaacttgtgaccctggaagctgtcctgaatttc

SEQ ID NO: 851580 - DNA, 117 bp, Homo sapiens
gaatgcgtcaacctttgaggatgtcacccaggtgtcctctgcctaccagaagacagtacctgtcgaagctgctccccaggtgtgtcctggtagacaactgctcccaggagctggcat

SEQ ID NO: 851581 - DNA, 105 bp, Homo sapiens
tgaggcctccccagccatgtggaactataaaaaatctcaaccgtggttttgccagattgaaggcacttgtgccatttcttccccaaagcaggaagcccagcaaag

SEQ ID NO: 851582 - DNA, 100 bp, Homo sapiens
ctttgggtcctgaatcttctgggagctgaggaaccagatatcttgaaaagctgccagaaagatcccataaaaactgcccaaggatctctctcactaaagg

SEQ ID NO: 851583 - DNA, 100 bp, Homo sapiens
ccgctctgctgtgggcgctgctggcgctctggctgtgctgcgcgacccccgcgcatggaagccatcttcgacaagagcacagggaaggttgttttgaaga

SEQ ID NO: 851584 - DNA, 100 bp, Homo sapiens
tcctcagaagttggttatgatgctatggctggagattttgtgaatatggtggaaaaaggaatcattgacccaacaaagctattcctgcaccaactgacct

SEQ ID NO: 851585 - DNA, 100 bp, Homo sapiens
ccaagtgatgctgctcaccatcagtgaatttaagcccacatatcaggaccgagtggccccgccaggtgcatgtgagggaaccctggcttgttcaacctgt

SEQ ID NO: 851586 - DNA, 98 bp, Homo sapiens
tgtagacatgaaggtccatgtaccctgtgaaaccctcgaatacattgaagccaactatgaaaagggagatttcattgccctggatcttggtgggtctt

SEQ ID NO: 851587 - DNA, 99 bp, Homo sapiens
tagctgggagccatcacgcccagctagccatcttctaattttcattccttcaaagttaattggccttggtcctcacagctccaaaaagaaacaggatct

SEQ ID NO: 851588 - DNA, 100 bp, Homo sapiens
tacggcatgtacttctgcatgaacatctccagccagggctgctgatactttggctgtgaggcaaaaaaggagaatttatgatatcaccaatgtcttagag

SEQ ID NO: 851589 - DNA, 100 bp, Homo sapiens
gaatcaaaaaagaaaaagaagaaaaagagaaaaatggtgaatgatgctgagcctggaagacctagacagacggtataatatggagaaagagaaactttac

SEQ ID NO: 851590 - DNA, 100 bp, Homo sapiens
gtgctgcccgagaaggtggacgtgctggtgtctgagtggatggggacctgcctgctgatttgcttgtaaatgcatcacgaagaggcagcccagaatgaag

SEQ ID NO: 851591 - DNA, 138 bp, Homo sapiens
aaaagaggaagatagtcttgggacccttgcatggtgtttcaaagggtggtgaagaactaagtggttggatttcatcccttactggtctcaaccaaaatattcctgttggaatcatgatgataatcatagcagcacttt

SEQ ID NO: 851592 - DNA, 100 bp, Homo sapiens
catgttctgccactaattggtggaaaagagaagtttcggtgtccgacatccctgtctgttgttaaagacagaaacctaactgagaaccaagaagaggatg

SEQ ID NO: 851593 - DNA, 99 bp, Homo sapiens
tccgccgtccccagccctgcctctccctgggctctgactttgagagttttgacctgcctgaagagcaccagattgcgcacctccccttgagtggagtgc

SEQ ID NO: 851594 - DNA, 98 bp, Homo sapiens
cggcgggaactcgactcttggcgccaccgcctcatgcactgtgtaggtccaagacaactttgacaagattgaattcaataggatgtgttggaccctct

SEQ ID NO: 851595 - DNA, 100 bp, Homo sapiens
gttcttggtgcccctgggcatcaccaacatagccatcgacttcggggagcaggtaatcagatcctgtcccttgggagcctctcaaaagatcagatttatc

SEQ ID NO: 851596 - DNA, 98 bp, Homo sapiens
cggatcccacacctccggaccgagggacgcggatggcccactgcgtgaccttggttcagctgtccatttcctgtgaccatctcattgacaaggacatc

SEQ ID NO: 851597 - DNA, 100 bp, Homo sapiens
cgtgttgacatacaagccagctatgatatggctcgtggacagcagaaaattcagtctcagcagaaaaatgccaaaaagcaagctggacaaaagaagaaac

SEQ ID NO: 851598 - DNA, 99 bp, Homo sapiens
gatcttccgcttcctgcaaggtgtatttggaaaggggacgtggatgacttgctacgtgattgggcttcgtgggacacatatgcaacatgcctatgattt

SEQ ID NO: 851599 - DNA, 98 bp, Homo sapiens
gataaattcaaggatgatccagttggaccttttggacaggaaagtgtaacatcagttacagagtggatgaaaatactaggaaaagtttatttaagtta

SEQ ID NO: 851600 - DNA, 98 bp, Homo sapiens
ccgagatgctctgctcctgatttttgctaacaaacaggtaaactttaatgagcccttgtccatgcttcagcgccttactgaagatctggaataccatg

SEQ ID NO: 851601 - DNA, 100 bp, Homo sapiens
aaaataatagtcttaatgaactgatgaaactaaagccacctgctaatattgctcagccagtagcaacagcagctagagaagctaaaacttacttatgagg

SEQ ID NO: 851602 - DNA, 98 bp, Homo sapiens
tataaaaggaatacttacattgcccaaaccagtgcatttcaaatcttcagccaaggaaggttccaactacacaatgttgtcaggacaggttcccttcc

SEQ ID NO: 851603 - DNA, 99 bp, Homo sapiens
acggatcggattcctcagctacgaggaggcgctgaggagagtactatactggcaattgctggagaagattttgcaattgttgcttctgatactcgattg

SEQ ID NO: 851604 - DNA, 98 bp, Homo sapiens
gttaccagcagcccaagtgtacaggacggactcctctctgtaaagaggaaacctttgcccgagcaaagacatgggtgaaggaactacagcgacaggcc

SEQ ID NO: 851605 - DNA, 100 bp, Homo sapiens
ctcagccgccaaagaccccgtccgaggagaaggcagagcccccccaggctatgaatgccctgatgcggttgaaccagctgaagccagggctgcagtacaa

SEQ ID NO: 851606 - DNA, 98 bp, Homo sapiens
gcggcggcggcggcagcgacagcagcagcagcagccagtattcgggaaaggcagacagacaggatcttgctctcttgcccagactggaatacagtggt

SEQ ID NO: 851607 - DNA, 99 bp, Homo sapiens
ggatggttgtgagggaagggacaagaagatactgccctggatgccaaccctgtggtaattgagccatcatctgttttgaatggaggaaaatactcattt

SEQ ID NO: 851608 - DNA, 98 bp, Homo sapiens
ccaagggcaaattgtggctctttggaaagaagccaaagcttccagaaatgttgcatggtgatggtgacaatgaagaacatggcttttgtcctgtgggg

SEQ ID NO: 851609 - DNA, 100 bp, Homo sapiens
gcttcgtggaggagtacaacaacaagaataagaagatctacttggacattattcacacatacatggaagtgcatgcaactgtttatggctccagcacaaa

SEQ ID NO: 851610 - DNA, 98 bp, Homo sapiens
atccatcaccaacgccaaaaccagagaaaatcacttagtctccactttttcctccagggaggacctcattaagcaggggacctctctcaccacaggaa

SEQ ID NO: 851611 - DNA, 98 bp, Homo sapiens
gcgatcctgggctaccggtctgtggaatgaagtccctgaggtgaagaaagaggagactttgctggatctggactttgatcctttcaagcccgaggtga

SEQ ID NO: 851612 - DNA, 99 bp, Homo sapiens
tcaggactcattattttaacatttgggagaaacacagccagaaggaaatggcaactgctgacaggaagtttggcatccacctcccccagcctcctgagt

SEQ ID NO: 851613 - DNA, 100 bp, Homo sapiens
ggcagagcttcttggatgatgatggacgtcccaccgggcaggatgaaggcagagcgtgtggcatctccacctcaaggttgttgaaatggatgaaaacaac

SEQ ID NO: 851614 - DNA, 99 bp, Homo sapiens
cgacccggagcagctcggaggcggtgaagatgtcctggaacaggtggaggcctatcaagctgaggctcgtgaggctctggccacactgccctctagtcc

SEQ ID NO: 851615 - DNA, 134 bp, Homo sapiens
aagactggtttgccaaaaggaagaagtttaagcggcctccacagaggctgtttgatgctgagaagatcaggttcgtggtttacagctacaagtacgtgcatgacgatggccgagtgtcctaccctttgtgtttc

SEQ ID NO: 851616 - DNA, 98 bp, Homo sapiens
aaaaccgagggcgatgaagaagcagaggaagaacaagaagagaaccttgaagcaagtgaaaaagcttgtggtgaaggggggcaaaaaaaagaagcaag

SEQ ID NO: 851617 - DNA, 98 bp, Homo sapiens
gagccgccggggagccgtccagtcttcgaatcccaattccagggtctgagagagagccaagatgaatatggccttccaagaagacatgctgacaagaa

SEQ ID NO: 851618 - DNA, 100 bp, Homo sapiens
cgggaataacacaccggagacttttggggggaaactaggtcgatggtcggcggcgcccggatgggcagctgaggtactaggttttgacaagcttgcatca

SEQ ID NO: 851619 - DNA, 99 bp, Homo sapiens
tctgggtcctcggtcggtacagtctctgcacctcgcgccccagcagcattaaagggcagtatttaaagtcagttggcaagcagtggaataagatttttg

SEQ ID NO: 851620 - DNA, 100 bp, Homo sapiens
cggccgtcctccaccgtttcctccaggacagcacctagtcgtggccggaggagtctcagagctgtcagaaagctttcccatggtttggcatggacattgg

SEQ ID NO: 851621 - DNA, 119 bp, Homo sapiens
cgacgttcacagaggaacactgccggggcccaaccacaagacgactcaataggaggaagggacacacacccatgacatgaagccagcttcccgtccacgactgttgtccttactgccca

SEQ ID NO: 851622 - DNA, 100 bp, Homo sapiens
cgtgaatactttttctcccgaaggaagattatttcaagtggaatatgccattgaggctatcaaggtatcagtttttggaagaagcttttcaaaatcagaa

SEQ ID NO: 851623 - DNA, 100 bp, Homo sapiens
gggcctctccgggcgggagcccagggtggcggcgcctgcggccgagcgccgggagcagatgtggacgaatgtcagcagaacccaaggctctgtaaaagct

SEQ ID NO: 851624 - DNA, 100 bp, Homo sapiens
ggtattcccccttctgaaagaagaattttcaacagttttcttcatactgcattaaaggttttagaaatactacataggagctgaactagagaaacatggt

SEQ ID NO: 851625 - DNA, 98 bp, Homo sapiens
catgctatcacataatactatgatgaagcagagaaaacagcaagcaacagccatcatgaaggaagtccatggaaatgaaactggcgatggaatatgag

SEQ ID NO: 851626 - DNA, 100 bp, Homo sapiens
tgtgaaaagctaactttcaacaaccccacagaggactttaggagaaagttgctgaaggcaggaggggcttttgtggccacaggaaccaatctgtctctcc

SEQ ID NO: 851627 - DNA, 100 bp, Homo sapiens
caccagcacagcaaacccgccgggatcaaagtgtaccagtcggcagcatgggctaagtcctatcagccatggaaacaccattgctctcttcttccggtca

SEQ ID NO: 851628 - DNA, 132 bp, Homo sapiens
gagtaccagccggccaccccggggcttggcatgtttgtggaggtgaaggacccagaggacaagtgtcaacctaagaaaaagtctacgccactgaagtatgaagttggagatctcatctgggcaaaattcaag

SEQ ID NO: 851629 - DNA, 100 bp, Homo sapiens
agaaagctggtaatagatgtctgacaaactaaagaaagacttgtgttacgaactcttggtgtaataacagaagctacaataaaaatcagaccagtccctg

SEQ ID NO: 851630 - DNA, 100 bp, Homo sapiens
ggaagaaccattgttagtgaacgtggacaaagctgttgtctcagggagcacagaaggaaatcctcattgacgattcaatttgttgaaggccaatttgtgg

SEQ ID NO: 851631 - DNA, 100 bp, Homo sapiens
tctcaaggcaagcctattgagttaacacctctgccgctgctaaaaggtataatgggtctctcccaaatggcgatagaggaaggaggaaaagtaggtttgc

SEQ ID NO: 851632 - DNA, 98 bp, Homo sapiens
aaccatgaagacttgaacttaatacagcaagaaagaccatcaagtttaccaggcaagctgcctgtcctgctgcttggccgctcctcagagctgcggcc

SEQ ID NO: 851633 - DNA, 100 bp, Homo sapiens
actctatacacacacagccggaggtcatactgcatcagaaccatgaagaaggtgctgtgattctcttgggaagaaccaatatgtttcgctttaaccatcc

SEQ ID NO: 851634 - DNA, 98 bp, Homo sapiens
ggcagaacgaattcagtgatatcattaagtccagatctgacaagttggatggcttgaggactggtactaaaaggaaacgtgactgggaggccattgcc

SEQ ID NO: 851635 - DNA, 98 bp, Homo sapiens
ctggaggcgctcatggaggtgtctgtgtctgggtctcttgcaacgtgtgagctgcctcttgccaagagtgagtggcaaaagaaactaaccccggagca

SEQ ID NO: 851636 - DNA, 100 bp, Homo sapiens
acgaaagctttcctaggccaaaaagagatcagggagcagagaaacatgaaggcacaggtcagtcctctgggatcactgatcaagagaaggagttatccac

SEQ ID NO: 851637 - DNA, 99 bp, Homo sapiens
ccgcggctggtgggcgctgctggcgctgcagctgcacttgctccgggcgctggcgcaagtgagaactcaacagaggcaaaagcagtagattctaacaat

SEQ ID NO: 851638 - DNA, 100 bp, Homo sapiens
gggcgcatcactgctcagcctgtgactcgattatctccgagaagaagctgaagaggaggcggaagccggagtttgacattgcccggaatgtcctggagct

SEQ ID NO: 851639 - DNA, 99 bp, Homo sapiens
ttgaagactaccgtcgtgtccgtgctgaccctttctccctgccacacatggctcattggtgggcagtattacttatgggaattgctctgatcatgctaa

SEQ ID NO: 851640 - DNA, 100 bp, Homo sapiens
cgcccccactgctgtttctcaataagcaaaaaggtggtagaaggacagcccccctgccctgagacaacactcggaggcctgtattccagcgagagtgccc

SEQ ID NO: 851641 - DNA, 100 bp, Homo sapiens
tggaagggcaggacgaggtgtcggcgcgggagcagcacttccacagccaagtgcgggagtccacggtcctctcagggtgcgccatcattgtccgaggtca

SEQ ID NO: 851642 - DNA, 100 bp, Homo sapiens
tgatgaatgtagcaactatattagcaacatttgtcaattgtcttcacaatagtcttcaacaagtgtatgcagaagacattgtgagcattattaagagaag

SEQ ID NO: 851643 - DNA, 100 bp, Homo sapiens
acgatactctgaccgttttagtagtcgcagacctcgaaatgatagacgcaatctgaagaggatgtaagtcagtttgattccaagtttacacgtcagacac

SEQ ID NO: 851644 - DNA, 100 bp, Homo sapiens
gtaatatctggactttgaaattgggtggcctatgtatgcacagctactgattgatttattcaaatatttagcgcctttccttagaaatgtggaactcacc

SEQ ID NO: 851645 - DNA, 100 bp, Homo sapiens
accctcgctcctcgatcgaggacgacttcaactatggcagcagcgtggcctccgccaccgtgcacatccgaatggcatggaggagcaggacttggagcga

SEQ ID NO: 851646 - DNA, 98 bp, Homo sapiens
aaggtctctcgcgggcgggagaacggaaaactcccaacttcctgggccacccgttcatcgtgcagttcaatgatggaaatgccgccgtggtgtccatg

SEQ ID NO: 851647 - DNA, 100 bp, Homo sapiens
acctccttatgctgatatacatccaatgaggaacattaaccaggtggtatttgttggaaatttcttgagaattaatacgatcgccatgcggcttttggca

SEQ ID NO: 851648 - DNA, 98 bp, Homo sapiens
acagctccagggaaggcactcaaaagtggggggcaggaaagctctggttgaagaagtgtattttgcgcagaaggaacgtgatgaagctgttatgtcta

SEQ ID NO: 851649 - DNA, 100 bp, Homo sapiens
ggcggtggggactgcacgtagcccggcgctcggcatggctctcctggtgctcgttccagattaccaggaacaggacatcttcctctggagaaaagagact

SEQ ID NO: 851650 - DNA, 100 bp, Homo sapiens
gtaagaagaaaacactttgtgggccaggaattgctgacgcaggtgtgtggggatgtactctccacctgcgagcaccgcctctccaacatcgttctcaagg

SEQ ID NO: 851651 - DNA, 98 bp, Homo sapiens
cctgtgtgctcaatggagagcttccactgcgctccaggaacatggagctgatccaggacacctcccgcccgccactggagtacgtgaagggggtcccg

SEQ ID NO: 851652 - DNA, 98 bp, Homo sapiens
cccagccgatgggttgtccgactgggagcagaggaagccttgaggacctactcacagataggaattgaagacaggagacaatttatccagcatgttgc

SEQ ID NO: 851653 - DNA, 98 bp, Homo sapiens
caacggggcagtcgccagctacgccagagccccagtcggtggtggggagcggcagctggcagagagtcaacgcccagacggctgtgagatccccgaga

SEQ ID NO: 851654 - DNA, 98 bp, Homo sapiens
cttcgcgggaagacgcggcggcggcggcggaggatgagcctgcagagcgcgcagtacctccgaggaagtccacaaatgaaggggacaccccattttaa

SEQ ID NO: 851655 - DNA, 100 bp, Homo sapiens
gccggcccggtcccgggaggaagatggcgctgcgaattcgaaacaagtgttgaaaatgttaaaggctgtgctgaagaagagccgagagggaggaaaggga

SEQ ID NO: 851656 - DNA, 98 bp, Homo sapiens
caagtgaagcaaaagccttccatgattactctactgcttatgaaaagcaatttcctgcaaccagtaaggacaactttgatatgtgcagttcaagtttc

SEQ ID NO: 851657 - DNA, 98 bp, Homo sapiens
ccaagcctctcagcttcggagaatggagtcttccatcaatcatatctcacaggcagcttcggtcacctctctgtccaacctggcatgcatgcacatgg

SEQ ID NO: 851658 - DNA, 100 bp, Homo sapiens
gaagatggcattgaaggtgatggaggagatggaagattgagagcagagtgcaagaatgggaagagggcttcgtgccctgtgcacgtttgccacctagtga

SEQ ID NO: 851659 - DNA, 100 bp, Homo sapiens
gacaagaaacgtgacagtcacattaaagcacatcaacccgagccaggctaacagagaccctgatgctggaattgatgaagctcaagttgaacaagatgct

SEQ ID NO: 851660 - DNA, 100 bp, Homo sapiens
gccagacccaggactctgcgactttacgatcagttcgacagcttagacaagcatacacaatggggaattgacttcttggaaagatatgccaaatttgtta

SEQ ID NO: 851661 - DNA, 99 bp, Homo sapiens
aaaatcagaagttcagaagctacagactcttgtttctgaacaggcaatccagcatccagcagatgagaagttgcaagagaaggcatggggtgcagttgt

SEQ ID NO: 851662 - DNA, 100 bp, Homo sapiens
gcagcccctgggcgtctcctacatcgacgaccacgtgcggaggaaggactcctcgctctatatagatgcgctggctccctccctccgaggctacttctca

SEQ ID NO: 851663 - DNA, 100 bp, Homo sapiens
ggctcggcgcgggggccaaattcgacacgagacgcttctcggcagacgcagctcgattccaggaattatccagactgccttgccactagatgaatggaag

SEQ ID NO: 851664 - DNA, 98 bp, Homo sapiens
cagcttctccaaggcacgggaggaagatacgcacaaacgggacacatatgcagccactcctagagctcatgaagtttcagaaatttctgttagaactg

SEQ ID NO: 851665 - DNA, 136 bp, Homo sapiens
aaagacagaccatcccagttgaatgctgtcttccaagaacagaagaaaatgatccaggcccaggtagctacagcaagctgggtagcaggcagatccaaaggatatcatgaagtttccagggcctttggaaaaccag

SEQ ID NO: 851666 - DNA, 100 bp, Homo sapiens
ggcagaactgcctgattacaggagctttaacagatacaaatacttggaacagttggcagctgaggagcacgagaaggagctgagaagccggagtgtgagc

SEQ ID NO: 851667 - DNA, 100 bp, Homo sapiens
ctcggatctgccttgctctgggaggggtgtcttctctttagggatggtgaggttggaaaaaggctcctgtaaccctcctccaggatgaaccacctgccag

SEQ ID NO: 851668 - DNA, 99 bp, Homo sapiens
caatccctgccttttgagtccaggtggagctgaagttgccctcctataaaggccagtcccctcagttaagtctcagacggtattttgctgacttgattg

SEQ ID NO: 851669 - DNA, 120 bp, Homo sapiens
aggcaatgatttataccatgaaatgattgaatctggtgttatcaacttaaaagatgccacctctaaggagattcagcgattgcaggaggacactgataaagccaacaagcaatcatctgt

SEQ ID NO: 851670 - DNA, 100 bp, Homo sapiens
tggcaaaagtccactgcacatgacagctgtccatggaaggttcacacggtcacagaccctcattcagaatgtgttcagactgcatcacagtgcttccgat

SEQ ID NO: 851671 - DNA, 99 bp, Homo sapiens
tcctccacaccccccgccgcagcagcaccggcgacagcaatggcaccagcatgatatcattgatcattcctcccaaagaccagatttcacgagtggcaa

SEQ ID NO: 851672 - DNA, 100 bp, Homo sapiens
aagtacttgtttagattcatcatccaatcccgagtgctctacttgaggaatcccagtcagaagttccagcctgccactgttctctgatgccatgccagca

SEQ ID NO: 851673 - DNA, 99 bp, Homo sapiens
tgcgtggccggtgctggctgggagttctggtctcaggcaaggtggggactgggcacatcatcaatacgaggcggggtttcaccatgttgcccagactgg

SEQ ID NO: 851674 - DNA, 100 bp, Homo sapiens
gaacaaaggaaggggagcccgggacccccgggggcgcaggttttcctaggacattaggacaagccgaagccctggacaaaatctgtgaagtggatctagt

SEQ ID NO: 851675 - DNA, 99 bp, Homo sapiens
aaaacacgatgaaaacagaaccgacttctccccttgtggaattacaagagatttcgactgtggaagggtgaaggcaaatgtttgtcccaggagaaaccc

SEQ ID NO: 851676 - DNA, 100 bp, Homo sapiens
tagcactgacacgtttacccacttgaaacaggtacttacaatttcatcagaaattcctaaaagaattcgaagtgccttaaaaaatgcagaagaatcaaag

SEQ ID NO: 851677 - DNA, 100 bp, Homo sapiens
gtggaattttgcactacctgtggagaaaagggagcaagtaaaagatgttcagtttgcaaaatggtggtgctttatgtcaaagaagaaatgaagaggaatg

SEQ ID NO: 851678 - DNA, 100 bp, Homo sapiens
aaaattgaaggctccaaatccttagctcagagctggaggatgaaggatcggtgcacagccagaggacaacacatcacacacaagaaacagttgtgctcat

SEQ ID NO: 851679 - DNA, 100 bp, Homo sapiens
atacgtgttctgtgtgggtggagaaagacggagtaaatagctctgtggagattgtcactagtgccacaggaaaaccagcattggaatcagctgattcagg

SEQ ID NO: 851680 - DNA, 100 bp, Homo sapiens
ggcgtgtcttggtctctaagagagtgggcactgcggctgtctccttgaaggttctccctgttggttctgattaggtgaagagcgattatatgttagagat

SEQ ID NO: 851681 - DNA, 50 bp, Homo sapiens
tcccaagaagctgggattacagatgaagttggtatgtggcttcattctgg

SEQ ID NO: 851682 - DNA, 98 bp, Homo sapiens
ggcgctgatgagtctgtttgggatcccgctgtggtacttctcgcagtccccgcgcgtggtcatccagaaaactttagaaactgttcctttggagagga

SEQ ID NO: 851683 - DNA, 100 bp, Homo sapiens
tcaacaaagaagggctggagtgcctacgcctgctcaatgagatcattgccgacttcgacgaggctatgactttgcagccgtcctggagtggttcgcggag

SEQ ID NO: 851684 - DNA, 98 bp, Homo sapiens
tatcagcatagaaagaaagccttgtaaccatcaggtagatacagcaccaacgattgctcttaaacttggtgtgactgctaatgatgtaaagaatgtca

SEQ ID NO: 851685 - DNA, 98 bp, Homo sapiens
ctccgcgcagcgggttgcctccgctccccatacggcggccccaggccagaagctgggcttacagagattctctaaaggcagaagaaaacagaaaattg

SEQ ID NO: 851686 - DNA, 100 bp, Homo sapiens
agaagtggagaagaaatcagtcagccgcagacctttccaaagtgaaactgatgagatttgatgatccactgttggggcctcgacgagttcctgtcctggg

SEQ ID NO: 851687 - DNA, 100 bp, Homo sapiens
agcggccatgaagaagctgatggtggtgctgagtctgattgctgcaggtggctctcgggggctggtccatgggcggctgtggcgtcaggatggagtccta

SEQ ID NO: 851688 - DNA, 51 bp, Homo sapiens
aaggccttcaagaaggagctgcgacaatgagcttggtttgatccgcaaacc

SEQ ID NO: 851689 - DNA, 100 bp, Homo sapiens
atctggaatcctatcctactctggcagcccatcccggtgcacacagttcctctttctgaagatcagtagacccaaatgatttgtacattgtagaacccct

SEQ ID NO: 851690 - DNA, 98 bp, Homo sapiens
tccaactgaagaaatatgtaggagctgtccagatgctgaaaagagaaggtcaaacagctgaagagatcgagatggtgatcatggagcgtagcaagctc

SEQ ID NO: 851691 - DNA, 100 bp, Homo sapiens
ttcacagccaggcagtttatgatattaacagactagactccacagtccctcctcctatgtctccatcctccaaatctgtgagcactccaagtgaagctgg

SEQ ID NO: 851692 - DNA, 99 bp, Homo sapiens
ggagcggccagctaggagcgctctgtggtgcctggggctgaacgcggctttctggattccttttaagattgggcagcccaagaaacagattgtgcccaa

SEQ ID NO: 851693 - DNA, 100 bp, Homo sapiens
tgaagagagatacaagatgaagagcaagcccctaggaatctgcctgataatcgattgcattggcaatgagacagagatggggtttcgacatgttgcccag

SEQ ID NO: 851694 - DNA, 100 bp, Homo sapiens
ctaaacctgccactgggttcactctaggaggaacaaatacagatacactgcctctaggactgggacagatagccactgagtacctgcttcaaatcaccct

SEQ ID NO: 851695 - DNA, 100 bp, Homo sapiens
acccaagagcatgaaagaagtatggcttatggactgaatcaccgaagattcagctgtgaccacgtttgaggctctgaaggctcgggtcagagaacttgaa

SEQ ID NO: 851696 - DNA, 100 bp, Homo sapiens
aggagagttacctacaagagccttcatccaggagcatccacactgcaatgatataggaatgaggatttttcgggattgtcaccctacgaaaggaagagac

SEQ ID NO: 851697 - DNA, 100 bp, Homo sapiens
agaaatttcttcaagaagcctatacctttgtctggatatggaggaacaagcaatcttattttggaaggcgttaaaaaattatctgacagttacatggtaa

SEQ ID NO: 851698 - DNA, 120 bp, Homo sapiens
gcatcttgctgttcgtgattatatttcttggagttgtgttggtaatgaagaaaaggatgtgatggagctgcttgaagaagatctcacatgccctatttgttgtagtctgtttgatgatcc

SEQ ID NO: 851699 - DNA, 100 bp, Homo sapiens
aggccggggggctgtttgcaaactgcgcccattttgtggggctgaatccgcccgggctacgctcctccatcacgtggctgggatatgaagaacaacagcc

SEQ ID NO: 851700 - DNA, 98 bp, Homo sapiens
aatgacgtcattatgcacttcacgctcaactctttcccatttggaggagtggatgtgtctgggaagctgaggatctgggataccacgcagaaggagca

SEQ ID NO: 851701 - DNA, 100 bp, Homo sapiens
ttcgagtgaccgagaccgcggccgggaccgagggtatgatgaaatgagtattctcttcacagttttggttactgaaactactttggagaatggattaata

SEQ ID NO: 851702 - DNA, 98 bp, Homo sapiens
gatgccttgtgggtcctactgaggaaaggatatgatcgtgtgtctgtgatgcgtccacagccaggagacacgaatgatatcccaggacctgggttcta

SEQ ID NO: 851703 - DNA, 99 bp, Homo sapiens
atttgcgaaacctggcacggaacagtatttgttggccaaacaactagcaaaacccaaagagaaaattcccatcatttagagacggggtttcaccgtgtt

SEQ ID NO: 851704 - DNA, 100 bp, Homo sapiens
tgtggtaatcaggctgtagaagaacgactacaaaatattgaggcccacttgcggttacagacagatgtgtagcactttgtagtttaggtatttggatttg

SEQ ID NO: 851705 - DNA, 100 bp, Homo sapiens
aggccacatccccaggaagccacctcctccgccctgtgatgctagagcacccgccagacacgtgggaagtcgccagaagggagagcactcggtgagggca

SEQ ID NO: 851706 - DNA, 100 bp, Homo sapiens
tttgtagctgcttaggcagcaagtatgtcagtgaggagacttgtcacatgcatcaggaccagaggtataagatgatctctgaattcacctggcccaacca

SEQ ID NO: 851707 - DNA, 98 bp, Homo sapiens
tatacaggcttcatatccctccagttacgcagatgtccgggtggaaaggaggcaggagctggctctggaagacccgccatccgaggccctccactcct

SEQ ID NO: 851708 - DNA, 123 bp, Homo sapiens
gatatcagcagaatttcaagcgaggctctgggcagagtggaccacggggagccccacgaggttcacgcaaagaatctgctccacaagttttgcttccagaagaagagaaaattatagtggaag

SEQ ID NO: 851709 - DNA, 99 bp, Homo sapiens
gacagacaattgttcagttgcaaaaagaaactggagccaccatcaagctgtctaagtccaaagatttttacccaggtatgagaaagtgccagtcatctt

SEQ ID NO: 851710 - DNA, 98 bp, Homo sapiens
gttatgttaatgctgggacgctgcctgccacacattgttcccaatgtgctattggcaaagagagagagtaagaaacaggatattcctcgtgaagatca

SEQ ID NO: 851711 - DNA, 100 bp, Homo sapiens
ggacatgaaaaaaatgacagctgtgtttgagaagctgcagacttacatagctcttcttgccttgccaagacagagcgggatgccaccagcttgtccaaag

SEQ ID NO: 851712 - DNA, 104 bp, Homo sapiens
caaccatgatgctgccatctttccaggaggctttggagcggctaaaaacctgaaaaagaagtgtgactactggatcaggacttttgttccaggttgccagcccg

SEQ ID NO: 851713 - DNA, 100 bp, Homo sapiens
gaagatggtgccgggggtcgctggctctgctgctgccgccggcgaaggaggaggcgttgccgggtcctcagaatggttggaatgaccctccagctttgaa

SEQ ID NO: 851714 - DNA, 100 bp, Homo sapiens
cgaaagcgttgcgctcccggaggcgtccgcagctgctggctgctcatttgccggtgaccggaggtgagacacagtaacctggttgaactctgcatctgga

SEQ ID NO: 851715 - DNA, 100 bp, Homo sapiens
gtatatccttctttctggttccgtgttcatcaaggaatccatgtttcttccaagaagcagaatccagcaactatcacaagaatactccttagccacttca

SEQ ID NO: 851716 - DNA, 100 bp, Homo sapiens
tgggaattatggatgatgctgcagagtgctttgggagggatgctgtgcacactgtggaaggctatcattgactttcgaaacaaacagacttgactgttgc

SEQ ID NO: 851717 - DNA, 99 bp, Homo sapiens
aaaaacaagagtccctctaaagcagctcaaaagtttgccaagagtctagcccagttcatcagtgaccaaaatatcaaggatctgaaggtctggacaagc

SEQ ID NO: 851718 - DNA, 100 bp, Homo sapiens
agcttttcctaaaaggattgtacaccttagaagtgcttaaggaagagtgatgaaggccgtggaggagctcctggagaccctggatctggaaaagaaggcg

SEQ ID NO: 851719 - DNA, 100 bp, Homo sapiens
gggatttggagctgcctagcctcgcggtcgggtatgttagagcccaccaaggaaccactgaaaccactttctgctgcagaaaaaatagcttccatcggtc

SEQ ID NO: 851720 - DNA, 100 bp, Homo sapiens
gtgatcctcccacctcagcctcccaagttgctgggactacaggcacgtgccaccacgtccagggcacagtgacttttgaagatgtggctgtgaactttac

SEQ ID NO: 851721 - DNA, 100 bp, Homo sapiens
acaacttcaacgcagacacaaatgtggagctgtcactgagaaagtgttttagagcactttgctgcaagggaccaccacctgcacgaccagaatatgacct

SEQ ID NO: 851722 - DNA, 100 bp, Homo sapiens
cgggctggtcctgctgcgagccggcggcccggagtggggcggcggtgaggccgtctgggagaacatggcgcgcatgtgcgtgaagacccagcggctggac

SEQ ID NO: 851723 - DNA, 100 bp, Homo sapiens
ttataacttgtcagacacacaccttttccccaatgcgagctccaaaggatctagtttgaagcactaagaagaataagacatcagtttgaaaagaggctct

SEQ ID NO: 851724 - DNA, 74 bp, Homo sapiens
aatccagtaccaaaaacgtcaacaacagttttacgattgacttacgcaggattctcagcccttgcctgggagaa

SEQ ID NO: 851725 - DNA, 100 bp, Homo sapiens
ccgtgaccgaggggcccattcccgaggtgctcaagaactacatggacattaagatgttctacgaggagcatttgcacttggacgatgagatccgctacat

SEQ ID NO: 851726 - DNA, 100 bp, Homo sapiens
agaaggtctctggagacatcttcagcagacactctcgaaagcgatgggaacgctttgtccacagtgaaaatcagcaccttgtcagccctgaggccttgga

SEQ ID NO: 851727 - DNA, 98 bp, Homo sapiens
cccagcttttccatcctggagatctacaggatttatcaaatcgagtcactgtcaagccaggggttatcaccatgcaagctttgtcggaagaggaccgg

SEQ ID NO: 851728 - DNA, 100 bp, Homo sapiens
gtcacctctgacaaaattctggggacgctgggaacactgaatcaacatgggcaatgagaacagcacctcggacaaccagcacagtattgctatgcagaat

SEQ ID NO: 851729 - DNA, 100 bp, Homo sapiens
agcagatcattcggtcttcaaccttcccacaaactgatgttctttcaagttcacttgaggcagaacacagggcccatttggaggccagcgctgagaagtg

SEQ ID NO: 851730 - DNA, 100 bp, Homo sapiens
gaaagaaggttgggttcagaagaggggaggagttggatttgtcttctagttctcagatgtctcccctttccttatatggtgaaaactctaatagtctctc

SEQ ID NO: 851731 - DNA, 98 bp, Homo sapiens
gggcgctgagtggtttttcggatcatgtctggtggctccgcggattataacagcaacggcagcctttaacagttgagcacatgtatgaagacatcagt

SEQ ID NO: 851732 - DNA, 100 bp, Homo sapiens
gtcttttttgtcttcattcactttcccccctcagtttctgaaatgattctccagaatttctcctcataaaaaaggttccatcataatgaatggatccaat

SEQ ID NO: 851733 - DNA, 98 bp, Homo sapiens
taacctgcgggagaggtttggaattgatgatcaagatttccagggatagctgggagtatggccaccctgctccacgatgcggtaatgaatccagcaga

SEQ ID NO: 851734 - DNA, 100 bp, Homo sapiens
ttagagtccaccagatcatccatgtgagtgaccatgcagcaaaagaaggagggtcctctcagtgattaaggtgtgactgaagaaatatcaaatgtttcct

SEQ ID NO: 851735 - DNA, 98 bp, Homo sapiens
aactctagaagtctggatgtcggtgggcctctgagatatgccgtttacgggaaggattacggccaggagatacaaccagcactttctgtggtactcct

SEQ ID NO: 851736 - DNA, 100 bp, Homo sapiens
atagagcagaggaaacaggcgaagaatcatgtgctaactgccaaagaaaggaaaactcaaattgatgatagaaacaaattgactgaacattttattatta

SEQ ID NO: 851737 - DNA, 98 bp, Homo sapiens
ttttaagattgggcagcccaagaaacagattgtgcccaaaacaagcagtacacagtgaccgggctgatggaagcgacccagatgatggtggacatcga

SEQ ID NO: 851738 - DNA, 98 bp, Homo sapiens
tcatccaaaatacttgagttgtattgcaatcagctgttttttcctagctgccaagactgttgaggaagatgagggtgcagtacatgttaatgacagga

SEQ ID NO: 851739 - DNA, 100 bp, Homo sapiens
tacttacaagattcggaggtaacagtgaagggattcaggatatacggtgcaccttggtgccggagcaattcttattcctcgtttagacattgtgatttcc

SEQ ID NO: 851740 - DNA, 100 bp, Homo sapiens
gggtcaagtcgtgttctgatcactactgacttgttgcttgtattggttggtgatggtggtactggaaaaacgaccttcgtgaaacgtcatttgactggtg

SEQ ID NO: 851741 - DNA, 98 bp, Homo sapiens
cgcctcggcgcgcacatcccgcggggcccggccgggtgcccattgcagatgcaaaggctcctgagaagcgggcctcaccatccaagccagcttctgcc

SEQ ID NO: 851742 - DNA, 99 bp, Homo sapiens
atggcccagattctgccaattcgttttcaggagcatctccagaaccaagagccactgagagaggaagactctgatttcatcctgaccgaaggcgacctg

SEQ ID NO: 851743 - DNA, 98 bp, Homo sapiens
ggcgccatgtccagcgctcggacccccctacccacgctgaacgagagggacacggagcagtggaatgcagtagccctctgggcctgggatattgtggt

SEQ ID NO: 851744 - DNA, 100 bp, Homo sapiens
tcctgagtagctaggattacagggtttatttttatcccaaaccccttcctcccaggttaccagtggcactgggtgaaacagtgccttaagttatattccc

SEQ ID NO: 851745 - DNA, 98 bp, Homo sapiens
tacctgaacctgcggcacccctctgatgacccatttggattctctgatttcactgccaagattctcagtacattacaggaatatcagaagagaatgaa

SEQ ID NO: 851746 - DNA, 100 bp, Homo sapiens
cctgtggctaccacctccccaggcctgtgttttgacagtgtttcctgccttgctgactcttcttccctctcggacatcacctttgatggcaatcccatag

SEQ ID NO: 851747 - DNA, 100 bp, Homo sapiens
ggggaatgaccgtgtgcagaccatcatcactcagctggaggattcccgtcgagtgaccaagggttgccacaccatttggaggttttgaaaaagcatcaag

SEQ ID NO: 851748 - DNA, 98 bp, Homo sapiens
ttaatcaagaattctctatttctgctccgtcatccatgccactatagctttccaatgattagacgaattgattctttctgtgactcatcagttcattt

SEQ ID NO: 851749 - DNA, 98 bp, Homo sapiens
ccgagtgctgcttggcggcgaggtttttgactaaaggccagaatgcattggtagagctacagacacaaagaccaatagctcttgagctatataaagac

SEQ ID NO: 851750 - DNA, 98 bp, Homo sapiens
tgcatatttcaggagtgtcaactgttgtcgagatgtccacagaaggaggatttggtggtactagcagcagtgatgcccagcaaagcctacagtcgttc

SEQ ID NO: 851751 - DNA, 100 bp, Homo sapiens
gttcttttctggtggatttaatgctgactcactggtacaaacagctgttgaagctcagagctggagaccccccagtgctctgggctctagggagtcgctg

SEQ ID NO: 851752 - DNA, 98 bp, Homo sapiens
ttctgtggcctgacattggcgtccccatcatggaacttgaaatgcaggctcgagctcatggactttcccttattccatccacgggtctctgctctcca

SEQ ID NO: 851753 - DNA, 100 bp, Homo sapiens
tagcgtggtgcttctgttgctcacagggattttttaacctggccctgctaatcgaggaaggtacgataatcccacaccatatcttggatttcttggaaat

SEQ ID NO: 851754 - DNA, 99 bp, Homo sapiens
gaaaccagctagtggagagggagaggttgaaggaacagaaaaatgagaagacaactcactggcaaccccgtgaaaatcctttccagaatctgaaggtac

SEQ ID NO: 851755 - DNA, 151 bp, Homo sapiens
cacaactagtgaatatgaaaaggaaaaactgaatgaacggcttgcaaaactttcagatggagtggctgtgctgaagctgctgctgttcttgaagggtttttcagagtcggagaggaacaagctagctatgttgactggtgttcttctggct

SEQ ID NO: 851756 - DNA, 99 bp, Homo sapiens
acgaaagcaagcagcaggagctggaggccgtgcggaagagttgctttaatgtgaagtattttcctggagtcacttcctttgggacgttgccattctttc

SEQ ID NO: 851757 - DNA, 98 bp, Homo sapiens
agtcagtgtttgaaggagaagagagcaagggattaaagcctgtggtttccacagaagcaccacctatcatatttgccacaccaactaaactgacctcc

SEQ ID NO: 851758 - DNA, 100 bp, Homo sapiens
cacacagggattttgaaaatgctgcacatcccttaatagtcatctacataggaacttgtcgagatggtaaaagcaaagaaagctgctcaagaacaagtgc

SEQ ID NO: 851759 - DNA, 100 bp, Homo sapiens
atggagaagcgcaggagccgtgagagcctcaacgtggacgtggtcaagtacgagagtggccctgacggaggggaggaatacctgcagatgaaatggcccc

SEQ ID NO: 851760 - DNA, 100 bp, Homo sapiens
cacttgagtccatgagattttagagtggtacgagtggctgctttacagaatctggtgaagataatgtccttatattatcagtacatggagacatatatgg

SEQ ID NO: 851761 - DNA, 100 bp, Homo sapiens
gtgcgacagccacatggagacattcttgcgctgcatcgaagcctcaggtcccactctatgaccagtgggaggatgtgatgaaagggatgaaggtggaggt

SEQ ID NO: 851762 - DNA, 100 bp, Homo sapiens
tgaattcaagagaaagtacggcaagtccctgtactattatatccaggaggagatgttaaagtaacccatcttgcaggacgacattgaagattggtcttct

SEQ ID NO: 851763 - DNA, 98 bp, Homo sapiens
aaattggagagactgccatgaagcaaaccttcactgcctggtgtaactcccacctaaggaaagccggcacccagattgagaacatcgaggaagacttc

SEQ ID NO: 851764 - DNA, 99 bp, Homo sapiens
ttggtctaggagggagcgcgccgcacgctgagttctctggtgatgttgatagcctggaactgggggacatggtcgagtatagcttgtccaaaggcaaag

SEQ ID NO: 851765 - DNA, 98 bp, Homo sapiens
gaagcagcgtgagcagccggaggatcgcggagtcccaatgaaacgggcagccatggccctccacagcccgcagattcaacctcatcttccctaattca

SEQ ID NO: 851766 - DNA, 100 bp, Homo sapiens
gaccttttggacaggaaagtgtaacatcagttacagaaacctcaacctactggcttactcgcatccagtcttttctctactgcaatgagaacggcctcct

SEQ ID NO: 851767 - DNA, 100 bp, Homo sapiens
cttcacaatccaagttccacaatatattgactactgccacaattccgtcaggtcaattcagtgaagatatgatacccacagtgggcttcaacatgaggaa

SEQ ID NO: 851768 - DNA, 99 bp, Homo sapiens
agaagtcctgcacaaattcactgtggatctcccaaagaaacacggttggatggcaagcatgtggtgtttggcaaagtgaaagaaggcatgaatattgtg

SEQ ID NO: 851769 - DNA, 99 bp, Homo sapiens
tgaaggatggaactatcttatgcacgcagcggaggaggaaatggcaggtcctaatcaactctgcattcgccgctggactaccaagcatgtagctgtgtg

SEQ ID NO: 851770 - DNA, 100 bp, Homo sapiens
tgcagctactggactctacgtggatcagtatttgtatcactactgtgttgtggatccccaggagtgtgaaatggccaccagtggtgacagacaaagagac

SEQ ID NO: 851771 - DNA, 101 bp, Homo sapiens
cctgcagctgctccccggtgcacccgcaacaggcgttttgcaatgcagatgtagaggtacagccccgtggtggaggccggctcggacatggtcttccggtg

SEQ ID NO: 851772 - DNA, 100 bp, Homo sapiens
aagccatagctaagttcaaggagccagcccacgcattagcatttcagcagaaattccacagaattcaattcgtcataatctgtccctacacagcaagttc

SEQ ID NO: 851773 - DNA, 100 bp, Homo sapiens
aggattatgacagcgtggagcaggatggcgatgaacccggaccacaacgctgggagacaatccagggtctgagggcgaatctcaccagtgccatagaaac

SEQ ID NO: 851774 - DNA, 100 bp, Homo sapiens
ggagagtgtgcggctccaggtgggctcacgcgattgggggcaccaacttcgtggcacctccaacagcagcagtaccagccaatcttggagcacccatcgg

SEQ ID NO: 851775 - DNA, 99 bp, Homo sapiens
tctgaagcctcctcgccgccgtttctgagaagcaaatttccgtcaggaaaaacagccttgttgctgtcccgtctacagtatctgctaaaataaaagtac

SEQ ID NO: 851776 - DNA, 98 bp, Homo sapiens
ctgcaaactccagatcattcccacactgtgccacttgtataaatcaaagccattctgtgaaaaactgctttcctgggtgaaaagcagtggctgtgcca

SEQ ID NO: 851777 - DNA, 98 bp, Homo sapiens
gcggatctcatatcttcacttggcaaactcaacaaggcattacagcagaagttctggtggtgacctctttcgatgaactgcagagaagggcctcagaa

SEQ ID NO: 851778 - DNA, 100 bp, Homo sapiens
acatctgctgcctgtcaggctgttgcaggtgtctgcaaatccatattgtcttatgatgtaatcagcgcgatttcacttcctgaatttcgatgaattctaa

SEQ ID NO: 851779 - DNA, 98 bp, Homo sapiens
gagctgtgtggtccatgatgagtctccggagtagagatgaagagagaatttctaaacctggggctgtctcaactcctgtaaagcatgctgatgatcac

SEQ ID NO: 851780 - DNA, 100 bp, Homo sapiens
aaatttggattaaggaacagcgagctgtttgacccctttgacctcttcgatgtgcgagactttggaaagagtgcctggtgaagaatgtgatgggatcact

SEQ ID NO: 851781 - DNA, 99 bp, Homo sapiens
ttttgacacggctttggaaacgacgtcatgtgttagagttaatagagtggatacaaccttgctgaagatgaagaatatacaatattgaggatatttttt

SEQ ID NO: 851782 - DNA, 100 bp, Homo sapiens
cagcatggcatttcagtcactggtttgcagagtccagaatctgaaagcggctgatactgaccccacagccccgccttatgattctctgctcgtgtttgac

SEQ ID NO: 851783 - DNA, 100 bp, Homo sapiens
acccgcttctcgtagtcctgggagcacagcagaagtgtactggtagttaactctcaaggagaaatttcacggttgagcaccgaaaagaaagtggtcatga

SEQ ID NO: 851784 - DNA, 74 bp, Homo sapiens
gaaagtttcattgtgtatgtagaagaccagaagtggatggagatgtctttctcgagaagcaggtggaaacatga

SEQ ID NO: 851785 - DNA, 98 bp, Homo sapiens
caacacagatggggccgaatataacatagagaagacgatcaccttctccttattatagtcgatatagatcacgatcaagatctcgttcctacagccca

SEQ ID NO: 851786 - DNA, 98 bp, Homo sapiens
cgaagacgagatccagttcctgcgaactgctgggatatgaagaacaacagcctgaggttccaattctttatcatgatgtaacatcccttttgctcatc

SEQ ID NO: 851787 - DNA, 100 bp, Homo sapiens
cattatcagcatggacatattaactcttacctgaagcccatgttgcagcgggactttattaccgctttaccaggtgcttttcagtgggaagaattggaag

SEQ ID NO: 851788 - DNA, 98 bp, Homo sapiens
tcgtgagcgggcacaggcagccacttcgctgcttgcctcatcagcctcacagttccccacaggggcttgcttctgacatgtctgatgagcgcattcct

SEQ ID NO: 851789 - DNA, 98 bp, Homo sapiens
gaaggcgcctgaagaggacgaagctgaaaccaggaaattcagaggcagcagaaatgaaaacaaggaaaacattaatggaaattttgaacctagaaaag

SEQ ID NO: 851790 - DNA, 100 bp, Homo sapiens
gcctccatgccccggcagagggacggacacgcggacgtctagcggaggctaagtcctatcagccatggaaacaccattgctctcttcttccggtcactgt

SEQ ID NO: 851791 - DNA, 100 bp, Homo sapiens
aggcagacgttgtggcggagaagggcagtggctgtagctgccctttccgtttccagggttccgaccagaagggtgatgatctggaggagggtgtcacaag

SEQ ID NO: 851792 - DNA, 99 bp, Homo sapiens
aaattcctactggacaagaatatgctgccaaaattatcaacaccaaaaagctttctgctagggaacctaaaggcagacccagaagagctttttacaaaa

SEQ ID NO: 851793 - DNA, 99 bp, Homo sapiens
aaactgtgaagaagatggaagccaaagttcatcagagtccaaaatggtgatcaggaattactccacaggatccgctgaacataggatgttgccacaaaa

SEQ ID NO: 851794 - DNA, 100 bp, Homo sapiens
ttagaatatggggaccagcaccttttatagaccaccagaatattgaagaaaccctgaagctgttacagcgcctgctgaagtcaccaggctgccggaagat

SEQ ID NO: 851795 - DNA, 98 bp, Homo sapiens
taaagagtgagcctcagttcatccagctgggaaccatgctgccagttttctgtgtggtggaacattatgaaaacgccattgaatatgattgcaaggag

SEQ ID NO: 851796 - DNA, 99 bp, Homo sapiens
ttcccgtctcgtcaccctctgcacttgcacctcctgcgccgccgccccccatccaaggatatgccttcaagcctccacctagacccgactttgggacct

SEQ ID NO: 851797 - DNA, 98 bp, Homo sapiens
gagctcgctttaccccggggaatgcagcgcgagcccagcattgacctgctgcaggccttcgtggagcactggaagggcatcacgcactactacatcga

SEQ ID NO: 851798 - DNA, 98 bp, Homo sapiens
tactggagggagatggtggccctaacacagggggaatgggagcctattgtccagcccctcagatgcgtaagaggggttccgttcgaggcacgtcggct

SEQ ID NO: 851799 - DNA, 100 bp, Homo sapiens
aacttttagttgaagatataaataaggataaaaacctggttcctgaagatgaggcaaatataggggcatcagaaattcgagctcaactggtagaacaaca

SEQ ID NO: 851800 - DNA, 98 bp, Homo sapiens
cctccctgccccagcccatcctctctaaccaaggtaatcgttggttccaggtccagccctgacttcatcctcccttctctgtccacaccacgagtggc

SEQ ID NO: 851801 - DNA, 100 bp, Homo sapiens
ttcgtaatcagcaggccaaagactcagagatttggagcaagaggtggtggtggccttcccccgaagaaatttggtaatcctggggagcgtttgcgtaaaa

SEQ ID NO: 851802 - DNA, 100 bp, Homo sapiens
tgcaaagcccagcgcgctaaccctttactcgcgacctttcgcttcaccttcacagcagccctgcgaggcagttgtgaaaaacttcaggacaaaaatgttt

SEQ ID NO: 851803 - DNA, 113 bp, Homo sapiens
ttcctcggctgccgccaaggtgttcggtccttccgaggaagctaaggccgcgttggggtgagaccctcacttcatccgtgtactaatggtcacttgatgtgcgctggctgttt

SEQ ID NO: 851804 - DNA, 108 bp, Homo sapiens
ctttttgctagctggttttggaacagtttcagctggcatggtactggatatagtacagaatcctaatgtacctggctagctggtggtgagtaggggctttggggccaa

SEQ ID NO: 851805 - DNA, 100 bp, Homo sapiens
ctacactcagtatacagtgatagtgggatttgaacacctgaagctccccatcaagggaatgaacttcacagtgcaaagttccccatcaagtggacggccc

SEQ ID NO: 851806 - DNA, 98 bp, Homo sapiens
aatactggagctcataacccctactccacagctgtgagtacctcagctgtccagaccaaaacgaagaagacgttagccaaacccaatataaggaatgt

SEQ ID NO: 851807 - DNA, 99 bp, Homo sapiens
acaccagcaccgcagatgttgtcaaggtggcctaccaggaggccaggggtgtcgccatgaaactggcagacctttcacttcgtatccaacaaattgaaa

SEQ ID NO: 851808 - DNA, 98 bp, Homo sapiens
agaaccaagagagtcgtaaacatcctgtggactacacaccgtttaacaagatgcaacagtattctggaggaatgtttgctgggggattgaaggagatg

SEQ ID NO: 851809 - DNA, 98 bp, Homo sapiens
ggaggcagggaccttgtatattccctcagcttggagagaatcagtgacggctataaagaggcatttcccggaaacattaactctgacggtgtggtccg

SEQ ID NO: 851810 - DNA, 100 bp, Homo sapiens
aaaaccaagaaggagattttgaagatgcagatacccagcatatttccttcacaaacagaaaatgaatgaaaataaagatactgattcaaagaaaagtgaa

SEQ ID NO: 851811 - DNA, 98 bp, Homo sapiens
tttacagtgcagtcttatcgaaggatgtgcatgaaggacagcctcttctcaatgtgaaactggaacgccaagctgaagaagaacgaatacggaagcac

SEQ ID NO: 851812 - DNA, 100 bp, Homo sapiens
aagaggaaaaggagggcagcgacctgagaccagtggtcatcgatgggagcaacgtggccatgagatgacttgtttaaagtgcataaagcaaaaccaacat

SEQ ID NO: 851813 - DNA, 100 bp, Homo sapiens
ttccacctctccaccaccgaccgcgtcatcaaagcttataccattgctaagtatggtatgtctatgtatgtgcttggaatggcagaagaatttaaaggtg

SEQ ID NO: 851814 - DNA, 100 bp, Homo sapiens
aaagaatctgatgagccttttaggcctgttcagcttgaaggatgccaatgatgtaccaatccaatgtgaaatctctcctcttatctcctatgctggagaa

SEQ ID NO: 851815 - DNA, 100 bp, Homo sapiens
actaccaccagtggagtccaggatgaggacccagatgatgtggtaccagttggccaaagaagagcctggtgttggtgcatgtgctttggactagcattta

SEQ ID NO: 851816 - DNA, 98 bp, Homo sapiens
tgcgtgtgtgtgaagtgacctatgacaaaacgccgctggagaaggatggcatcaccgttgtgagtgagctcagcgatggcatcgcgatgctggtggca

SEQ ID NO: 851817 - DNA, 115 bp, Homo sapiens
gatgagccacttgggaagaatgatggcgctgttgctggaacaagtatacagaagatgaagctaggaaaataggagtggttggctgggtgaagaataccagcaaaggcaccgtgac

SEQ ID NO: 851818 - DNA, 115 bp, Homo sapiens
tcgggcctccacgttactgcgggacgaagagctcgaggagatcaagaaggagaccggctgtatccagctcacatagaagacattgactacgaggaaggaaaagtactcatccatt

SEQ ID NO: 851819 - DNA, 100 bp, Homo sapiens
tcacaggtacacatttacactgaagacacatccatcggtggttccagggagcattgcattcagtttacctcaggagtgtttctcaggagctatcagaaac

SEQ ID NO: 851820 - DNA, 98 bp, Homo sapiens
tggcattgatgaagatcatgacattgtagtacagtatccaagtggcaatagttcagggcgacagctcagtgaagtcttcattcagttaccttcaagga

SEQ ID NO: 851821 - DNA, 100 bp, Homo sapiens
atggaatcttcaatcaatcatatttcacaaaaagatccagattacctgaagctgtggttggacacttttgtttctagctatgaacaatttttagacgttg

SEQ ID NO: 851822 - DNA, 98 bp, Homo sapiens
cactatttgccgtcatcgggaggagcagcctgaacccggggctggtgggcctttctgtgtcctactccttgcaggttattaacacggggatcaaagtc

SEQ ID NO: 851823 - DNA, 98 bp, Homo sapiens
gaaacgccgaggaacccggctgaggcggcagatctgccgccgccttaatggggtccggttcaccagctgcaagagcgctaaggaccgtacagccatgt

SEQ ID NO: 851824 - DNA, 100 bp, Homo sapiens
gactttggccggacttttgctaactgcggcgggcgagacgttctcaggtactccaaagattcaggtttactcacgtcatccagcagagaatggaaagtca

SEQ ID NO: 851825 - DNA, 98 bp, Homo sapiens
tccgggttgcgcctcctggagccgcccccgggacgtcagtcctggaggaggcgaggggcagagcggcttgggtaaatccaccttaatcaacaccctct

SEQ ID NO: 851826 - DNA, 98 bp, Homo sapiens
gggtcccatggagctggaggggcagtggtggcgaggacagctggccgccgatattcaccaagcgcttcgctacaagtaaggaagagcccaacactgct

SEQ ID NO: 851827 - DNA, 98 bp, Homo sapiens
aaaggcagcgaggtggagagcgaggatgaggaagatgaggaaatggtggaatctaaagttggccaggactcagaactggaaaatcaggacaaaaaaca

SEQ ID NO: 851828 - DNA, 100 bp, Homo sapiens
gctacactgaagatgaagcaaggcccaatgacccaggcgcttcagtatcagacacagcacagcagccatctgaagagcaaagcaagtctcttgaaaaacc

SEQ ID NO: 851829 - DNA, 98 bp, Homo sapiens
tgctgctgttgatgctggctttgttcccaatgacatgcaagttggacagacgggaaaaatagtagcaccagcaattgctggctactttgatatatatt

SEQ ID NO: 851830 - DNA, 100 bp, Homo sapiens
cccccagttccccagcgcctcccatctcagacggaatctgtgacctcgaatcgcacagtgccccaggtgctaaagagctgtgcagaatttgtggaggagt

SEQ ID NO: 851831 - DNA, 100 bp, Homo sapiens
gggttgaggctcatgggaaattgtattctccgagtcagattggagcatttgtgttgatgaagatgaaagagactgcaggaaagtggagaatgaggacatg

SEQ ID NO: 851832 - DNA, 100 bp, Homo sapiens
tggaaggctggtgctgccagatggacaaggagaccaaagagaacaacctctctgaagaaggtatcacatcggtatcctcgaattcaaagtatcaaagtac

SEQ ID NO: 851833 - DNA, 100 bp, Homo sapiens
ggtggcctcactgccctccatattgctacaatagctggccacctagaggatacctgcccactatgtctatccgcaggcttttgtgcagccgggagtggtc

SEQ ID NO: 851834 - DNA, 103 bp, Homo sapiens
gcaaagtttgagaacctctgcaagctcatgaaagaaatcttagataagaaggttgagaagtcggatacttctggagactatgaaatcacactcttaaaaatct

SEQ ID NO: 851835 - DNA, 100 bp, Homo sapiens
tttatactcttggactacatctttctcgggctcaggtggtcttcgagggatagcacgaggtggtctgacaggactaacacttaccagcctctatgcacta

SEQ ID NO: 851836 - DNA, 100 bp, Homo sapiens
gataaagcatataggcatgggcttgagatggagtttcactcttgtctcccaggctggagtacaatggcatgatctcagcttactgcaacctccgtctcct

SEQ ID NO: 851837 - DNA, 146 bp, Homo sapiens
tcttggctacatcgcgaaaatcaggcccatcgcagagaaatcgggcatttgcaagatccgcccacccgcgccatttcagtcaagttaagaacaagtactgtggaactcatgcagtcatttggaagtaagcatctgctggactgaag

SEQ ID NO: 851838 - DNA, 143 bp, Homo sapiens
gccggctagaggaagaggcgttgcggcgaaaggaacggctgaaggccctacgggagaaaaccgggcgcaaggaaaaccagcattggaatcagctgattcaggatgctcagaagcgtggtgccattattaagacctgtgacaaa

SEQ ID NO: 851839 - DNA, 98 bp, Homo sapiens
agcgggcacagggcaaggcggcggacggctgcgtcgcccgaggcgaggaggagcgctggcggtgaagagatggcgtttgtgaagagtggctggttgct

SEQ ID NO: 851840 - DNA, 98 bp, Homo sapiens
gggcaccgagggctaccacgttctgcggtgccggtggtggtgtgcacattgagccccggtatagacagttcccccagctgaccagatcccaggtgttc

SEQ ID NO: 851841 - DNA, 99 bp, Homo sapiens
tcagcgccccctgacgccgcgcactcccgcccgacggaagaggaagacaaggtgtccgcaatgttgccagtgtctgtctgcagattggctacccaactg

SEQ ID NO: 851842 - DNA, 99 bp, Homo sapiens
tcctccttggtcgccgcgtccttggctggcgtacctaatctgggagcctgcaagtgacaacagcctttgcggtccttagacagcttggcctggaggaga

SEQ ID NO: 851843 - DNA, 100 bp, Homo sapiens
gaagcgatactgtctataccaatggagcaatgggaagatgatcatgcaagataagttagagaaagaaagaaatgatgctaagaatgccgttgaagaatat

SEQ ID NO: 851844 - DNA, 98 bp, Homo sapiens
ccaaaactacagttctgtcactcacttacacagtattgggaaatctgtgaaagtgctcctcacatgggtcaactgttccagtgtgcggtgggccaccc

SEQ ID NO: 851845 - DNA, 127 bp, Homo sapiens
ttgtgacacggacggcgcgtcctgctgaccccagccggcgccgagggcttggaatctcgagcgggaaaagctaaaagatggcggcaaggcagcccaggcaaatgtaagaataggcgatgtggttctc

SEQ ID NO: 851846 - DNA, 100 bp, Homo sapiens
cgtcatctttctgaaatggtgatgaaattggaattgggtttacatgaggctgacttgacaggaattaagtggaaaaaatatgtatggcaaggcccaactt

SEQ ID NO: 851847 - DNA, 100 bp, Homo sapiens
gggggctgaatgtgcgagtccatagctgaagaggagcgccagatggtggaggaatacacttatttatgaatttgcagttaacatgtttcgaacattacca

SEQ ID NO: 851848 - DNA, 100 bp, Homo sapiens
tcagcttctccggggcatttttttctacacgccagagactgctgctactttgaaacgtacgatagaggccctgatggacagaggagcaatagtgagggac

SEQ ID NO: 851849 - DNA, 100 bp, Homo sapiens
agaccttccacctcagcgacctgccatcctacacaactcatggcaccgtgcacgtggtcgtcaacaaccagagaacggagaccaacctgggctgaagaaa

SEQ ID NO: 851850 - DNA, 100 bp, Homo sapiens
tgtgttctgcttttttcattgttccactggacgctcatcagagggaagatctttttcctcaattgctctgtggctgtgggctgctgggagtgggcatctg

SEQ ID NO: 851851 - DNA, 98 bp, Homo sapiens
cctcgaattggtacttttgatctcaaatacttttgtgaattgcgccccggattgattggatgggcgtctgtagaggcttctggtgaaatcgcattatg

SEQ ID NO: 851852 - DNA, 100 bp, Homo sapiens
ttttgaacattcagtggagacaccccttgtcagagccgacccgtttcaagaccttagagacattttaaatccaaaggatgtgattagtgtccagctggaa

SEQ ID NO: 851853 - DNA, 100 bp, Homo sapiens
tgagctgatggaagatctgtttgaaactctattcctgcaccaactgacctgaagttcactcaggtcacacccacaagcctgagcgcccagtggacaccac

SEQ ID NO: 851854 - DNA, 100 bp, Homo sapiens
catcatctgggcactgctggatactgacactctggcccccagaagcttctccacattgcccaggagctcctgcacaccgaggagacctatgtgaagcggc

SEQ ID NO: 851855 - DNA, 100 bp, Homo sapiens
ggtgggagaacaaagctgaggtccagatgaaagagaagtttctggtcactccccaggattatgcgcggtcgggccaaccactggtctgcgatcatcggag

SEQ ID NO: 851856 - DNA, 100 bp, Homo sapiens
gtatgcaagttttcacttatctcgaaagcctatcagcatagttaaggtgacttaagagattaaaattaatttggttgctgttggttctgaacaaataatg

SEQ ID NO: 851857 - DNA, 100 bp, Homo sapiens
ggacactgtacagggatgtgatgctggagaactgcaggaacctggcctcactaggtggggtggaagacaacccgtgagtattacaccttcatgtgggtta

SEQ ID NO: 851858 - DNA, 100 bp, Homo sapiens
gtcgctatgccaagaagtgccaggtggagcggcaggaaggccactcacagggcttcaacaagctagctgaggataagcacattgaagaagtgcggaagaa

SEQ ID NO: 851859 - DNA, 100 bp, Homo sapiens
aatgaaccttgggtgatttgttctgtatcagaagacaatatcatgcaagtgtggcaaatgcctccatttgatggtgaagatgaagacgagctatttcagt

SEQ ID NO: 851860 - DNA, 100 bp, Homo sapiens
taggaggatgggtatctactcgcgcatcaggcatgaagaagaatatctatggcaatatcgaggacctggtgtgtaggttagggggaatcaagcatctggt

SEQ ID NO: 851861 - DNA, 100 bp, Homo sapiens
cctgagacctcagagcccgtttggatactgggtagaaaatacagcattttcacagcacctgttcttcccggagcctatcagcaaagccattcccaaggct

SEQ ID NO: 851862 - DNA, 126 bp, Homo sapiens
ttactcaatccatggaatgacaacaagaaagtgcagataagcagggatgggcagcactgaaagagaacagctcagaggttgtacagccttttttaatgggttgtggaaccaaggaaccgaagatca

SEQ ID NO: 851863 - DNA, 100 bp, Homo sapiens
atctgttttttgtaacgttccacggtattcggaattggctacagaacataataagggctgcacaaagatgttcagggataactcggccatgagaaaacat

SEQ ID NO: 851864 - DNA, 98 bp, Homo sapiens
tttattgggaccatctcgagttctgtgatggattcagaaaacttttagaccatttacaattggataaaagtcacttatacctactggtcactgaccag

SEQ ID NO: 851865 - DNA, 99 bp, Homo sapiens
gtttttatgctgtgtgctggagttacgcttgtacagtggaaaccagcccaagctacaaaagtggtggttacttcctcagaatgttggcctcctgtatgt

SEQ ID NO: 851866 - DNA, 100 bp, Homo sapiens
gagccagctgacgaagctccacagcttcctgggtgatgatgtcttcctccgggaactcgccaaggtgaagcaggctggagcattggatttgctaaaggag

SEQ ID NO: 851867 - DNA, 98 bp, Homo sapiens
gccattttgatttgaataaaaagaccctgtacaccctggtgaccaagagggattcaaaggacacagcattgttggttttgccatgtactattttacct

SEQ ID NO: 851868 - DNA, 100 bp, Homo sapiens
cgcaccaatggcttccgtgctgtcctacgaaagcctggtccacgccgtggccggagccgtggagattacctggggcaattgatgttatcggtcagactat

SEQ ID NO: 851869 - DNA, 146 bp, Homo sapiens
atctagacacatccagaagaggaggaaaatggctccgagcagggaccgcctgctgcactttgggttcaaggcgacagaacctacaagcagcaattggcgcctattatgactttgagagcccaaacatcagtgtgccctctatgtcc

SEQ ID NO: 851870 - DNA, 100 bp, Homo sapiens
gatttcttggaatctaaaatgggaactttgaatgtggaaggtttcgcatcgccgaagatagattctgttgctgctcagcccaccgcaacaagcccagtag

SEQ ID NO: 851871 - DNA, 50 bp, Homo sapiens
cttgtccaaaagctcagcccagttcgtcccactgattcaaatgtcagtcc

SEQ ID NO: 851872 - DNA, 136 bp, Homo sapiens
caggcgtggaggaagaggcattgaggactttccttacctgtttttccagctcacccactgccagcagagggtacaggcatccttcacctgctattgttgcaagaacagtcagaattttacatacactactaactct

SEQ ID NO: 851873 - DNA, 100 bp, Homo sapiens
gggccccacagtttccctgacgcaagctgccttcacacccatccctgtggataccagccaggaagactatgaccgtctgaggcctttatcttacccaatg

SEQ ID NO: 851874 - DNA, 100 bp, Homo sapiens
cagtcagaatattcctgttcctactacagttcctgttcctaacctatctacaagacctcttgtgctttgactattcatgctattggacgatacagccctg

SEQ ID NO: 851875 - DNA, 100 bp, Homo sapiens
aggacctgagcctgacgcgggccgcgcgggcttcaacggaccacaccaaaatgccatctcaaatggaacacgccatggaaaccatgatgtttacatttca

SEQ ID NO: 851876 - DNA, 100 bp, Homo sapiens
ggaagcaccagatcaagatcatgctttgcctttcctggagcccttaaacaggctgaagtgaaaagcaccatgacctgtcactacaagacgagaagcctca

SEQ ID NO: 851877 - DNA, 98 bp, Homo sapiens
ttggaggaactggcccggaaacaggaggacgtgtgggcccatcgctggatggatctgtcagaacacggctttgggctggccctgctcaacgactgcaa

SEQ ID NO: 851878 - DNA, 99 bp, Homo sapiens
caaactgcaattggggttggagcacctggaaagaaaagggatatgtccagcgacttggagagagaccatcgccctcatcagaagatttagcaccactat

SEQ ID NO: 851879 - DNA, 100 bp, Homo sapiens
caatggaaaagtggattatctgtgatgatgaaggaatccaggagacagcagaatcagatggggacacacagtcagagaaaccggggcaacctggagttga

SEQ ID NO: 851880 - DNA, 100 bp, Homo sapiens
cccctgagccagagctccagcagccttgttagggcgtggcctgaggcttggataagtgggagcctcagcttaagggtatagttaccaagctatacagccg

SEQ ID NO: 851881 - DNA, 100 bp, Homo sapiens
ctttttgatactgattcgcgtacacctgttgtttgaaagctctcagcgggacaatgctgacccaggttatcaatactctggctgaccatcatcatcgtgg

SEQ ID NO: 851882 - DNA, 99 bp, Homo sapiens
tgccctccgaagtcggggacgcgggctcggagcggcctattgccaattcatggacatgctcttccctggctgcattagtttgaagaaagtaaaatttca

SEQ ID NO: 851883 - DNA, 121 bp, Homo sapiens
tatttgctgtgctatttgacctcttggtttcagagagctccctggaccatctaatggctatgggagatggtgactcccgcggccctccaaaccatcacatgggcccgatgtcagagaggcg

SEQ ID NO: 851884 - DNA, 100 bp, Homo sapiens
atccagagttacttccagtgtgttccctgaaggcaaagaatccccaggataagatcctcttcaccaaggctgaggacaaagtgctgatggcagagattgg

SEQ ID NO: 851885 - DNA, 98 bp, Homo sapiens
gggaggagccgatactgagcttcttcctatttgccatgggtatgccattgcattggccttaagggaaaagcagcgtgtaatatttaccagcccaatta

SEQ ID NO: 851886 - DNA, 100 bp, Homo sapiens
actccggagacagcccaaatatcctcggaagagcgctcccaggagaaacaagtcttgggcgtctttggtactggcttttttaggggtctgcctggggatt

SEQ ID NO: 851887 - DNA, 100 bp, Homo sapiens
tgagacaacatgtgcatcaaatatgctgaaaggaacagccccgagtggggctcacacagagccctggaccttcgtggttgtgaaggacccagacgtgaag

SEQ ID NO: 851888 - DNA, 100 bp, Homo sapiens
gggaaagattgcaaggtgaataaagaagtggagcgtgtcctgaaggagttccaccaggccgggaagcccatcggggccaagaccagcttcaagtctccat

SEQ ID NO: 851889 - DNA, 148 bp, Homo sapiens
ctattgtaatgaattcagtggaaccatcacacaaaagcacacaaagacctcctcctccacaggggagacagagggatcttttatttagtcagatgtatgataaattaagtgagaattcagtggccaaaggagtatttttggagtgcct

SEQ ID NO: 851890 - DNA, 100 bp, Homo sapiens
ctcggtcacgaggtggaagaggtagaggacgatactctgaccgttttagtagtcgcagacctcgaaatgatagacggtctagcacataccgctccaaggg

SEQ ID NO: 851891 - DNA, 99 bp, Homo sapiens
gcaggaggacgtggaggaccattatgagatgggggaggagctgggcaggagatcctgctgggccgtggcttcaccttttggcagtggtttgatggtgtc

SEQ ID NO: 851892 - DNA, 98 bp, Homo sapiens
gagcacacgtcctcgtctcgttcctgatcgaacgtggtgacgattacgggcgagaccgcctttctccagacttctatgaagagtcagaaactgaccct

SEQ ID NO: 851893 - DNA, 98 bp, Homo sapiens
caaatcctgtagccataaatgtctggctaatggcatttacaggaggctctctttaaactgtggggctccccagacaagtatcccaaagacatcctgac

SEQ ID NO: 851894 - DNA, 100 bp, Homo sapiens
aagccaaagcagcaggagtttggaagcccttttcctccaaatcctgggaaagcctgactggctcatggagaaagcctacctaagaatgaagccgggaccc

SEQ ID NO: 851895 - DNA, 98 bp, Homo sapiens
cgagtcccccggagtccgactcgctacgcgggtcttgcgagatatctggccgcctctgccgcagctggaggttcgaggcctcaaggagggcgtcagct

SEQ ID NO: 851896 - DNA, 100 bp, Homo sapiens
ggcatcatccgctatgcaattggggaccgggactttgtagccaagcagaaggaggacctggagctggccatgaagaggctcaccaccgacaacaggcggg

SEQ ID NO: 851897 - DNA, 101 bp, Homo sapiens
tgaaggactgttttccttacagctccttatgtccgtggttcagaccctgtattaaagcttttggacgacaatgggaacattgctgaagaactgagcattct

SEQ ID NO: 851898 - DNA, 100 bp, Homo sapiens
ctgaggtcgcctggggaccccagaagccccacacatgcgccctggctactggcccacaagatccagtctccgcaagagaaggaagctctttatgccttaa

SEQ ID NO: 851899 - DNA, 98 bp, Homo sapiens
ttatcttcagcttttcttcctctctatcgtgtctcagccgactttcatcaacagcgttcttccaatctcagcagtttgttgcatattctaaggaccca

SEQ ID NO: 851900 - DNA, 98 bp, Homo sapiens
tttacattagcagatatactattgtactatggacttcatcgctttataagtgtgcagaatgattcacaagcaattgctgaggttctcaaccagcttaa

SEQ ID NO: 851901 - DNA, 100 bp, Homo sapiens
cggggcgccacgggggccatgtaagcagattgacaagtatctctatgccatgcggctctccgatgaaactctcatagatatcatgactcgcttcaggaag

SEQ ID NO: 851902 - DNA, 99 bp, Homo sapiens
gggtggaaaaactcagtgagacacaatttatcattgaataagtgttttaagaaagtggacaaagagaggagtcaggttgcattggagttttcgaaagac

SEQ ID NO: 851903 - DNA, 100 bp, Homo sapiens
tagcagaagggagccgagtttatctggagtgtagagtcactggaaaccccactcctcgagtcagtttaacggatgaagagtcccggaaaaattgggaaga

SEQ ID NO: 851904 - DNA, 98 bp, Homo sapiens
ttccggcctgacaacttcatctttgtctccatgcagtaaacagacccagcagaacctgcccgtggtgagctcagccaagacttggctctccatgttcc

SEQ ID NO: 851905 - DNA, 100 bp, Homo sapiens
agatgatatacccgaagctgctggataattttatcccagggtggctgaatcacggaatggtcgtagttcccccgctccctgggaaagcgtttttgcgtca

SEQ ID NO: 851906 - DNA, 99 bp, Homo sapiens
gcccaggaaggatcctccgagcgctgtggggagcggcaacgccggtggctcggggccccgcggaaaagggactttgaacatgtcggggatcgccctcag

SEQ ID NO: 851907 - DNA, 100 bp, Homo sapiens
cggaggtctcatctttgaactactgccggagcttctgccagcttcttgacctgagcaatggagaacctaccaggaaacttcctcagggtgttgtttatgg

SEQ ID NO: 851908 - DNA, 98 bp, Homo sapiens
ggacacagttttgacagtaattcttttgggccggttccagtacaatggtcagatatggtcactttgaaagccaggatgacaaattatggattacctag

SEQ ID NO: 851909 - DNA, 100 bp, Homo sapiens
ctaggagatctcctcaaagaagtttgtccttctgctattgatcctgaaggcaggattctgctttcccttggactgtatcactcaggactctgaatattcc

SEQ ID NO: 851910 - DNA, 146 bp, Homo sapiens
cggagagacgcaataaaccaagcactctagatgccctcaactatgctctccgctgtgtccacagcgttcaagaaatttaagatccgcattgaagacccaccccgcagaaagcacatggtattcctgggtggtgcagttctagcgga

SEQ ID NO: 851911 - DNA, 99 bp, Homo sapiens
cagactggtgacttcacttttgagtgcaactgccttccagagtgtttcacagccaatggtgcggattataggggaacacagaactggacagcactacaa

SEQ ID NO: 851912 - DNA, 100 bp, Homo sapiens
cacatccccaccccacaggatctgccccagagaaagtcctcgctcgtcaccagcaagcttgcgggcatggcggacaccgacctgttcatggaatgtgagg

SEQ ID NO: 851913 - DNA, 100 bp, Homo sapiens
ggtccgcgacgatcctctagagcactgtgtgtctccccggacgcgagcccgctcccctgataagactttgaccccgacgcaggcttcagtgattgccgcg

SEQ ID NO: 851914 - DNA, 50 bp, Homo sapiens
aagttctcgtggagtcagacaatgagctgaagaaaaggtgactggtctca

SEQ ID NO: 851915 - DNA, 100 bp, Homo sapiens
gccgatcctcgcgtgagacagatcaagatcaagaccggcgtggtgaagcgtgtgaaaaactcaaattactgtcttccatcatataccgcttataagaact

SEQ ID NO: 851916 - DNA, 100 bp, Homo sapiens
ctggtaaccccaacgctgtctggacagtgcgtcgacacattgaagagccatcacattggagaatcagctggtgatcctcgccaccacaaccagtgatgcc

SEQ ID NO: 851917 - DNA, 100 bp, Homo sapiens
cctttaaatgcagcatctgcgatgtgaggaaaggcacctccaccaggacctgctgaagttcccatgatgtcacccaatggatccattcctcccattcatg

SEQ ID NO: 851918 - DNA, 100 bp, Homo sapiens
cagacaaacggaactcaaccattaagcaaaacatgggaactcagtttatatgagttacaacgaacacctcagtggaagatagatgataagcctgtaaaaa

SEQ ID NO: 851919 - DNA, 100 bp, Homo sapiens
ccatttgatgtgactcgtcggcgaatgcaattaggaactgttctgccggaatttgaaaagtgcctattattgaaactatgccaatgactgagaaagttga

SEQ ID NO: 851920 - DNA, 100 bp, Homo sapiens
gcccttcagaaatacgaaaaggagaaatttgaagagatgattcaacaaaaatttctgaataaattggcagaagaacgcagacagaagaaggaaacttaag

SEQ ID NO: 851921 - DNA, 99 bp, Homo sapiens
caacagatgcgactgcagcaactgcagatggagaaggagaggctgcggctgaaacagcaagaactgcttcggcagaatgtgacagtgatgataacatgg

SEQ ID NO: 851922 - DNA, 100 bp, Homo sapiens
tggtcgaatctacaaagatatgtttttggactctaatttcacggacactgaaagcagagaccatggagcttcttgctgctgcagaagaatattttgcctg

SEQ ID NO: 851923 - DNA, 100 bp, Homo sapiens
ccacaatgatcctgccaagaatcctccaggaattgcattttgtgaaaaaagaacaagaattttctgcaaggatcatatctaagtgcactttttgctgata

SEQ ID NO: 851924 - DNA, 100 bp, Homo sapiens
accacactccaggaatgccagtgcatcttttgcacagctagtgttgcggagataggaacatgggagagaaacaatctgggtaacatgaaagtgatgctgg

SEQ ID NO: 851925 - DNA, 100 bp, Homo sapiens
agccctgttaaaggatggctttggctttgcagacagcacagtcttacaggaataggatgagtgataatccacccagaatggaagtgtgtccttactgtaa

SEQ ID NO: 851926 - DNA, 98 bp, Homo sapiens
tgaactctcagtggtcctacctggggatattatcaaatctactactgttcatggcagagctccagagattatattggggttgccattttgtgaagcca

SEQ ID NO: 851927 - DNA, 98 bp, Homo sapiens
agcttgattgtgacctctagcacatcacctacactaccacggccacactcaccactccatggccacacaggcagttcaattaacctccagaagatggc

SEQ ID NO: 851928 - DNA, 100 bp, Homo sapiens
ggcccgcagccgccacctacccagtgaccatgatagagttgctgggagcctgagcacctttcgtttttcggctcagagaaagccaagtgcaacttgcttc

SEQ ID NO: 851929 - DNA, 98 bp, Homo sapiens
tccacagctgagatgctcacgtcaggcctgaagggaaggggcttctctgtgctccacacttaccaggaccacttgtgcaccctccacccctgtgatcc

SEQ ID NO: 851930 - DNA, 100 bp, Homo sapiens
gtaggcgacaggccgctgacggccggaaggaaaatgttggttgaatctggcgatgtggaacccatggatatggagggctgactatatacaccatgttttt

SEQ ID NO: 851931 - DNA, 98 bp, Homo sapiens
cgacctcccggctgacctattcacctcctgcctcaccacccccatcaagatcgccctgcgctggcctccggtgtggctgtctctgatggtgtcatcaa

SEQ ID NO: 851932 - DNA, 100 bp, Homo sapiens
ttttcacttatctcgaaagcctatcagcatagttaagctgaagaaacacttaaattctggaaatagcgactcagtatcatggccagcagccttaatgaag

SEQ ID NO: 851933 - DNA, 105 bp, Homo sapiens
atgaagcagtcggacgcgtctccccaagaaagctcctggccactctgaatccacttcctggctctggattggcttgtcctggatattgcatagaaatgggatcct

SEQ ID NO: 851934 - DNA, 100 bp, Homo sapiens
gatgcgacagagtttgctgactgcaatccgttcgggagaggctgctgccaaattgaaaagggttccagcaacagatagaaatgctttaagttcactctgg

SEQ ID NO: 851935 - DNA, 98 bp, Homo sapiens
ggggacctggaggagggcatgctggccgtggattctgcttctcagaagatgcactattatagatactctaacgccaaggtcagctgctggtacaagta

SEQ ID NO: 851936 - DNA, 98 bp, Homo sapiens
tcacatgtcattataccttcacccagcatttcatccctcgtcgaaaggattggattggcatctttagattacatggacacagaacagtatgaagaagc

SEQ ID NO: 851937 - DNA, 100 bp, Homo sapiens
ctggagcggcgcagccggagtggggccgtgagaaaaggcgacggcggattgacagaagtatgattggagagcccacaaactttgtgcatacagctcatgt

SEQ ID NO: 851938 - DNA, 139 bp, Homo sapiens
gagtttctgaaggccatacaagatggaacaatagttttaatgggaacatacgatgatggagcaaccaagcctctgagcccaagtctgcacgtattcatccagatggcctgaagtaactgaagattcacaaaagaagtga

SEQ ID NO: 851939 - DNA, 99 bp, Homo sapiens
gccggggaagtgtctgtagcgtccctccctctcaaccacaataacaggcggagggtcggcgtagatctcaggatggacccaagctctgccggacatggt

SEQ ID NO: 851940 - DNA, 100 bp, Homo sapiens
ctggtgcagaacattgcgcggcagtgacctgaccaacggtgcagatgggatgctggccacaagctccaatgggtctcagtacagcggctccagggtggag

SEQ ID NO: 851941 - DNA, 100 bp, Homo sapiens
ccaccatctttttcaaagcccaatattgaaggtgccccaggggctcctattggaaataccttccagtgaggactcttgtgaagatatgagttgtggagag

SEQ ID NO: 851942 - DNA, 98 bp, Homo sapiens
ggacgggccgaggcccggcggaggaggcggctccgggggaacccgccgccggcccattgcagatgcaaaggctcctgagaagcgggcctcaccatcca

SEQ ID NO: 851943 - DNA, 98 bp, Homo sapiens
tcaggagagcgccccagggcaagccccgctccggccaacaagtctattacaatggctaccatggagacacctctgaaacatttttggtgggcaatgtg

SEQ ID NO: 851944 - DNA, 100 bp, Homo sapiens
gatcaaacctaatccgcgagacttgctaactatcatggtgaacttacttcagattgtgcgggaccactgggttcatgttcttgtccctatgggatttgtc

SEQ ID NO: 851945 - DNA, 100 bp, Homo sapiens
gggagcagaagggaggctccaagacctcatcaacaattaaggattcaatgctggattttgaaaatcagacacttgatcctgccattgtatctgcacagcc

SEQ ID NO: 851946 - DNA, 101 bp, Homo sapiens
cgggatggtgccacaggaggctgtgcgggccccgctccgcttcgaatggacaagcaaagtggatcagcaaaggctgcagtcaccagcatcttttccaacct

SEQ ID NO: 851947 - DNA, 116 bp, Homo sapiens
ttagaagaagcagaagaaacagttaatcgtgatatcccaccccttacaggtaatgacatgtgtttggtgtaataaaaaaggtcttttggctacaagtggcaatgatggcaccatcc

SEQ ID NO: 851948 - DNA, 100 bp, Homo sapiens
ccaatatccgacctagctttggctggcgcccatgcggctctacacgctctccaagcgccactttgtcctcgtgtttgtcgtcttcttcatctgctttggc

SEQ ID NO: 851949 - DNA, 99 bp, Homo sapiens
agtcatccaaacctggaaaaaataaaagaactgcaatcactactccaactgaaagagaagatagtgctaacgcacaatcgcttaaaatcactaatgaag

SEQ ID NO: 851950 - DNA, 99 bp, Homo sapiens
aacagttcaagaggaaaaaagtagaagctctgcactgttgaatgcctttgagaacttgatgcataaaatttgcatgactcctcactcctttctggatct

SEQ ID NO: 851951 - DNA, 98 bp, Homo sapiens
ctattataggaccccagcagcacttcctggaagagaaccagcacctatgacagaagatctgctagaagagcagtctgaagttttagctaaattaggta

SEQ ID NO: 851952 - DNA, 100 bp, Homo sapiens
tggaaagtacacaattaaggccaaaaatttccgtggccagtgttcagctacagcttccttaatggtccttctgggtgggaggacgctactcgctgtggtc

SEQ ID NO: 851953 - DNA, 99 bp, Homo sapiens
tggaagccatcaagttaattaggaattacatgaatgacagtcttcgaaccaatgtgtttgttcgatttcaaccagagactatagcatgtgcttgcatct

SEQ ID NO: 851954 - DNA, 98 bp, Homo sapiens
tgcgatcagatctgtccagtttgatgcctttgtgaagatgaagaatcttaaagagctgcatatggctacccattctccccagaaatctcaccagtgtg

SEQ ID NO: 851955 - DNA, 99 bp, Homo sapiens
ggcaaagttttgcagatcttcaacaagaggacccaggagaaattcgccctcaaatcctgttccagattatatcaaatcaactgtcgaaactgtggtgaa

SEQ ID NO: 851956 - DNA, 100 bp, Homo sapiens
cttactgcggaaagcttgtcctggtataaagatgatgagggtcccgggattcttgagctgtgcccagctgacgagcttttgaagatggcacaataaccgt

SEQ ID NO: 851957 - DNA, 100 bp, Homo sapiens
tatcctgagcctgagtggtaaggtgctgccatcctgtgaccttgctcgacgctatggccttcgggatgtggacgcacggacgcctgaaggtgaagacgtc

SEQ ID NO: 851958 - DNA, 100 bp, Homo sapiens
actcaccaaatccatgtggagcagtccatcagcctcctccttaacttcctgcttgcagcgtttgatccacaatgcatgcccactctcagttctgcatgag

SEQ ID NO: 851959 - DNA, 100 bp, Homo sapiens
ggcgcattgctcagcagctccacagcacaggcgaggagaatacttatctctggcgcacatcactatatttggctgcctctgccagtgctgaattctttgc

SEQ ID NO: 851960 - DNA, 98 bp, Homo sapiens
tggacctcctggcccggctgagcatctatagcaccagtgactgtgagcacggcatggccagcgtcatctccagatggcccactgcgtgaccttggttc

SEQ ID NO: 851961 - DNA, 100 bp, Homo sapiens
gcctgggccctcgagtgtacacactgcgagctactttctgactgcccgcctggcactgaagccgagctcaaaggtgctaactttgagtacatcatcgcag

SEQ ID NO: 851962 - DNA, 99 bp, Homo sapiens
cacgacccagatcccagcggaaaggagcgcgcctctttttggcttggggagctgcagcgttcgaatggtgaggttctggagaattgatgaggattatcc

SEQ ID NO: 851963 - DNA, 100 bp, Homo sapiens
aaaaattcagcagcagaaattccagtgactagtaatggagaagttgatgactctcgtgaacatagctttaataggaattaactcctgaggagagagccca

SEQ ID NO: 851964 - DNA, 99 bp, Homo sapiens
tttcgggagccggagtctctccaccgcagacatgacgaaggatccatgcttgaagctggatgaaacttcgccgagaggagaggagtatcaagataagtt

SEQ ID NO: 851965 - DNA, 100 bp, Homo sapiens
aagagcaacatctttcctcaccccaaggtggtactgtgaaggcaaggagcttgaaaattccccagatattcacatcgtccaggcaggaaatctgcactca

SEQ ID NO: 851966 - DNA, 100 bp, Homo sapiens
cccgaattcacccaggaggtctttaaggggtctgtcatggaaggtgctcttccaggtctgagaaagaaccccagtttaagtttatctacttcaaccacat

SEQ ID NO: 851967 - DNA, 99 bp, Homo sapiens
tggaaaacaatgcccagactcaatttagtgaggtagttattactagtaaaagcggagagatcttgtatcgtatttcaccgtgggcaaagtatgtggttc

SEQ ID NO: 851968 - DNA, 98 bp, Homo sapiens
gcgctgcccgcgccccccgcccgtgccctcccgctcggccccgccagcagcactgtggaggccgtcctcggaatactcccccagttgcaagaggcgca

SEQ ID NO: 851969 - DNA, 100 bp, Homo sapiens
ctacagattaaagactttctgaatggaccaggaaaaagctcctcaatttctgaagagaaaggtgactctgatgatgagaaaccaaggaaaggagaaagac

SEQ ID NO: 851970 - DNA, 98 bp, Homo sapiens
aagacctcagcttccctcgggagggaaacccgggatggacgtggccgacgcctacgtgactttcgtccgccattctcaggatgtcctgcgtgataagg

SEQ ID NO: 851971 - DNA, 100 bp, Homo sapiens
gatttggatgggattgccatggcttacctgtgaatattcttacaagctccgttttaatggcaccagcatcagaagatgaagacaatgttctcaaagcatt

SEQ ID NO: 851972 - DNA, 98 bp, Homo sapiens
agcaacagctctgccggctggaaggatgacaaggatttggtgcatgaatttgtagtggctgaaggtctgacatgtttgatcaaggtgggagctgaggc

SEQ ID NO: 851973 - DNA, 100 bp, Homo sapiens
tgaacttctgaagataatcgagaaataccagctaagactcaatggcccttaatctcacttgcaacgtgtggggagacccgcctccggaggtgtcgtggtt

SEQ ID NO: 851974 - DNA, 99 bp, Homo sapiens
gggaattctcttcactagaatatggagactgttcaatcaccaggatgtgttcagagcaacattgttttgttgacacaagcatttagaagaaagtttgtg

SEQ ID NO: 851975 - DNA, 100 bp, Homo sapiens
ctgcgctcccctaggagtgctgagcccgcggaaccgcagccatgacaagttggatggcttgaggactggtactaaaaggaaacgtgactgggaggccatt

SEQ ID NO: 851976 - DNA, 100 bp, Homo sapiens
acgcatcatgccagggagccaagcgtcctgcccggccgctaatttgcgccagaaagttactcactcagtacaaactgatcttagtcacttgagaagagaa

SEQ ID NO: 851977 - DNA, 100 bp, Homo sapiens
aactggaagcagattttgaaaccgatgagaagattgtaaaatgtaccgaggtttggtgcaagtgccaaagttgtgcatttcctgggacgagtcaaaccat

SEQ ID NO: 851978 - DNA, 100 bp, Homo sapiens
atatctggagaaactactccttggatgaaattgagaggaacttttgtctacaaaatgtttcatccatttgtggaccaaaagatggagttggtttttattt

SEQ ID NO: 851979 - DNA, 98 bp, Homo sapiens
ttccgcggcgggggctccgcgagcggaattccggcggctgccgtgactccagtgcaagagcagtgaggagaatgaataccttccaagaccagagtggc

SEQ ID NO: 851980 - DNA, 99 bp, Homo sapiens
ccatctgtggaaggacctaccaaccaggccaccaccacctatcatgacagatggtgaagatgcggattacactcattttacaaaccagcagagttccac

SEQ ID NO: 851981 - DNA, 114 bp, Homo sapiens
tttatgtgaagctgctacctctgacatggatattggaaagcgaaagatgagcagtgaagattcagaagattctgattttcaggaatcaggagttagtgaagaagttagtgaatc

SEQ ID NO: 851982 - DNA, 99 bp, Homo sapiens
ttccccgagccccccgccggagtcgaaggtggtggaggtggatacagcagtcggagaacatctggcagagacaaatacggaccacctgttcgtacagaa

SEQ ID NO: 851983 - DNA, 100 bp, Homo sapiens
gatgcaggtgccagatttggagctggggctactgctggcaacattcctgacagagcgggatgccaccagcttgtccaaagggaagttccaggagctcctg

SEQ ID NO: 851984 - DNA, 100 bp, Homo sapiens
atcctattttttattatgttgcacggaggacagaactgtaccgctctctttttggccagctccaccctcccgacgaaggccacggggattgacatcgccc

SEQ ID NO: 851985 - DNA, 100 bp, Homo sapiens
atggaggatttgggagataaagctgtgtactgccgttgttggaggtccaaaaagaaactaattctgaagcaagcccttatagttgtgctgcagtggtgtt

SEQ ID NO: 851986 - DNA, 50 bp, Homo sapiens
ggagggcaagaagtggagagtgctatcattgttaattatgcaagtaaaat

SEQ ID NO: 851987 - DNA, 100 bp, Homo sapiens
tcatgggttgctgtgtttccgacctcatctccaggacagtgggaagagtggctggaggaattcagtttcttggggggttctcatgtatcagccatcttct

SEQ ID NO: 851988 - DNA, 100 bp, Homo sapiens
caaactgtgttgtttcagctgtattaggagcaacttatgactctcatctctgctgcacgagaatatgagatagagttcatctatgcgatctcacctggat

SEQ ID NO: 851989 - DNA, 100 bp, Homo sapiens
tgatcccttgctcccatccctgcagcatgaacaaggcctcgaaaaagcccaagacagcagaagcagacacctccagtgaactagcaaagaaaagcaaaga

SEQ ID NO: 851990 - DNA, 100 bp, Homo sapiens
ccattggcattaatggcccagtaccagcttttgcgagaattgaagcaccctaatgtgattgcattgcagaaggtgttcctttctcacagtgacaggaagg

SEQ ID NO: 851991 - DNA, 100 bp, Homo sapiens
cccactcgagacagggcaaaaatccagcactcccgccgccccccaacaaggggacacctaatggctgtggacagtcattttgtttactcattcagccctg

SEQ ID NO: 851992 - DNA, 99 bp, Homo sapiens
gcgaccgagggaatgatccttactaaccacgaccatcaaatccgtgtcggagtccttacagttgctgattgttggaggttcttttggtcttcgtgagtt

SEQ ID NO: 851993 - DNA, 99 bp, Homo sapiens
cggctgcagcagcaagtcccatcggaggacctccctgccctgtataccgagggaacagcaggcattttggagatcaaagatgggtagaaaagatgctgc

SEQ ID NO: 851994 - DNA, 99 bp, Homo sapiens
taatgattcacccactccaaattcaaaaaggcttcccaactgatgcaactcttgatgacataaaagaatggttagaagataaaggtcaagtactaaata

SEQ ID NO: 851995 - DNA, 99 bp, Homo sapiens
cccttgaacagctatgcatgctgcttttgatgtctgacaacgtggatcgttgttttgaaacaatgatatggaacctagcaaagctgttccactgaatgc

SEQ ID NO: 851996 - DNA, 151 bp, Homo sapiens
ttcgtcgcagaagcctaaggacacgtgctatcaaaatgttggttttggatgaagctgatgaaatgttgaataaagatgcaacgccaggagcagcatcagccacgctgtaaacaagggggaaacgccaagcgcattacagaggacgtcagcc

SEQ ID NO: 851997 - DNA, 100 bp, Homo sapiens
catatcatgaaatcctccccacttatgtttgtaaatgtgagtggaagccatgaggccaaaggcagttgtattgtctcttgcatggcaccaagaatgttac

SEQ ID NO: 851998 - DNA, 100 bp, Homo sapiens
ctttgatcctctctttgttgagcaaaagtcactctgtgagactgctgggtcagaaaaaggataatggaaggcggcttgggggagcacgattggatttgcc

SEQ ID NO: 851999 - DNA, 100 bp, Homo sapiens
aaagtggttatagtgaaatattcctaatgccactctggacatcatatactgtttccaaacaggctgctgagaaactaggtgaaactgagaaacttagtat

SEQ ID NO: 852000 - DNA, 100 bp, Homo sapiens
aggactatgggggaactgatggcgttcctgttacctctcatcattgtgttaatggtgaagcacagcgattcccagctgtaggtaaaacttgcctactgat

SEQ ID NO: 852001 - DNA, 100 bp, Homo sapiens
cagactccttctccagcatgggctcgcctgtcaacgcgcagggttcatagtggcgtcatgcacgcagactcctgcaagttcccctaagttcttagaggac

SEQ ID NO: 852002 - DNA, 100 bp, Homo sapiens
gcctggatgacctcatcagcatctgggaccgcagcacaggcatcaagttctactccattcagcagtggcctcatcctgcatgactcgcctgtcccggtct

SEQ ID NO: 852003 - DNA, 98 bp, Homo sapiens
gggaggcctggctgagctgtcatcccccagcaggggaaatgctgtctgtagctgagcacttcctggagcagcagatgcacccaacagtggtgatcagt

SEQ ID NO: 852004 - DNA, 98 bp, Homo sapiens
gcagctagtacctgtattcttaccattgaaaggctccacgtgttccccacgtttgtggcgtacgagctcacggtgctggtgttcctcaccttgtcagt

SEQ ID NO: 852005 - DNA, 99 bp, Homo sapiens
ccagaagaagaagaaatcccagcaaataggaaaattaagtttagtagtgctcctattaaggtgaatgattccaattgtgaccaagaacttctttccctg

SEQ ID NO: 852006 - DNA, 100 bp, Homo sapiens
attggaaatgtgcaggttcttctagagtatcatattgcctatctaaagaccttttctgagcggctactgggaaatttctcattagcagttccgatctttg

SEQ ID NO: 852007 - DNA, 99 bp, Homo sapiens
cccgaggagtagtcgctggagtccgcgcctccctggttatctgtggccacaaagaaagttatttgtctctgtcttggcaaggctgggaggaaagtttta

SEQ ID NO: 852008 - DNA, 98 bp, Homo sapiens
ggatgactccatcaaccaggccccactggaaatcgtctcgaaactgctctcagagggtggctcctatggacggaaaacagtcttaagaggcaactccg

SEQ ID NO: 852009 - DNA, 100 bp, Homo sapiens
agaggggaccctgattgacctgagcgaagggttttcagagacgagctttaatgacatcaaaggcactggtgaggtggattgatgatgaatcttctggcac

SEQ ID NO: 852010 - DNA, 99 bp, Homo sapiens
tacagcagcccccagagctgagggctacagcaacgtgggcttccaggtcctcagaatggttggaatgaccctccagctttgaacagagtacccaaaaag

SEQ ID NO: 852011 - DNA, 99 bp, Homo sapiens
ttgagctgtctgttgaaaacatctaccaagactggcttgagagttccggaataccaaaggaatctttcaaagaagtaccaacctaaaaagaactcgaag

SEQ ID NO: 852012 - DNA, 100 bp, Homo sapiens
catcaagctctttgggaagtggagcaccgatgatgtgcagatcaatgacatttccctgcaggaacagtaagaggaccttgtgcatgaataatttgtttcc

SEQ ID NO: 852013 - DNA, 99 bp, Homo sapiens
gctgagttagctgaggaggtcaatttaaatggttctggcaaactgctcaaggttgaaccctcggatacgatagaaaatgtaaaggccaagatccaggat

SEQ ID NO: 852014 - DNA, 98 bp, Homo sapiens
cgggggccatgcacgcggatcgagtttgataacgatgttgacatcacttgttagaagagcaactctgaaagaaaacgagcaaattccaaaatatgaaa

SEQ ID NO: 852015 - DNA, 99 bp, Homo sapiens
tctgtctgtcccttgcaggatggagaagaacattcttacatgctggatgataatgaagataattcaaatgatgggacccagccatccaaaaggaggcga

SEQ ID NO: 852016 - DNA, 100 bp, Homo sapiens
catggacggcagggctccctctggatgtggaattctccgtccctttccagggagggaacaaagcccacagcaccgcttgccaacaacatttgcaactttg

SEQ ID NO: 852017 - DNA, 98 bp, Homo sapiens
gtggaggtgggaaggtgtgtccggaggtttgcaggggtgcagtgtgtctggtcttatgaggcatccgcatgctggacggcgatgtcacagatgtggtc

SEQ ID NO: 852018 - DNA, 100 bp, Homo sapiens
ctcccaaggagacttaagaatggcagatggagtggccaatgttgagcacattctgaaaattggatatctaaatgatagattccatgccattgcagtgtca

SEQ ID NO: 852019 - DNA, 98 bp, Homo sapiens
cactgtacaagctttcaaagtcaatattacggtctttggtcaaacaattagagagaggggaagcttcagtggtagatcttaagaagaatttggaatat

SEQ ID NO: 852020 - DNA, 100 bp, Homo sapiens
gagccctggaagcagcagctcaccgaggacggggactcgttggtcaaagaaaaagtgatgtatgaaaaagaggcaaaacaacaagaagaaaagattgaaa

SEQ ID NO: 852021 - DNA, 98 bp, Homo sapiens
gagcatgaatggagcaaaatggcggatcatgtgcaggctccagcccccttttggacatcgttggcggccggaaggcgaggccccgccagttcccgttc

SEQ ID NO: 852022 - DNA, 100 bp, Homo sapiens
ccgtccgtccgccgccaccacccactccggacacagggaagatggaagagttgagtcaggccctggctagtagcttttctgtgtctcaagatctgaacag

SEQ ID NO: 852023 - DNA, 98 bp, Homo sapiens
gcaggaggagctctcggtcctggccgcgattttctgcaggccccacgagtgggaggtgctgagccgctcagggtctccaactgaattccttgaagaga

SEQ ID NO: 852024 - DNA, 98 bp, Homo sapiens
gaagacacgcccttctccgccctggccctggctgaggaaatggaagttccagtattaccgaaaatctctctaccgatcaccagttcttcactgcctac

SEQ ID NO: 852025 - DNA, 100 bp, Homo sapiens
tgtgtgcaatcaccatggcaccatgcaaggggggcactacacagggtctgcggaagagggagctgctgaaggagctgctaccagtcatcgggcagaacct

SEQ ID NO: 852026 - DNA, 100 bp, Homo sapiens
tccaagtttgatggctgatcttgaaggtttacacttgtcaacttcctcttcagtcatcagtcaagaaaagcctaggcttctcgagcctttggattatgag

SEQ ID NO: 852027 - DNA, 98 bp, Homo sapiens
gcgcctactagagcagggtttggagactcagatgggcttaggtcacgagcaaggatttggagccccttgtttaaaatgcaaagaaaaatgtgaaggat

SEQ ID NO: 852028 - DNA, 99 bp, Homo sapiens
agactcctatttgaagtatttgacgaaaatagactggttttcaaattaaagctttcacagcactgcgcttcctctcagaaccttctgatgccgtcacaa

SEQ ID NO: 852029 - DNA, 98 bp, Homo sapiens
gcttcactgtcctcacagaggcagaccctgcagccagaatgctccaaaatgggaagaagtttgattcatccagagacagaaacaaacctttcaagttc

SEQ ID NO: 852030 - DNA, 100 bp, Homo sapiens
cccagccaggcccttggagctggggagatcccggcaccttctgagacacgtggagtattgctcctggaaaatccaaaaggtgacaataggttggaccttt

SEQ ID NO: 852031 - DNA, 99 bp, Homo sapiens
aagcacacagtgcgcggggagcgttcctacagacagagattactgcagtttatgtgacaagcagccaatcgggaggctgcttttccggcagttttgtga

SEQ ID NO: 852032 - DNA, 100 bp, Homo sapiens
tcaaggatttctctttgggaaactaaagctttggaactgcgacataactagcgatggctgctgcgatctcacaaagcttctccaagaaaaatcaagcctg

SEQ ID NO: 852033 - DNA, 100 bp, Homo sapiens
aggaaagaagacaagagagaacgcaaacagtttgaagctgaggattttggtcggtcagagctgacgatgaagttgatgtggatggtacagtagaagagga

SEQ ID NO: 852034 - DNA, 99 bp, Homo sapiens
cgaagccgggagccgccgccatgggggcctgcctgggagcctgctccctgctcagctgcgtttacccaaggtccagcctagcccctaggcaccatgtcg

SEQ ID NO: 852035 - DNA, 100 bp, Homo sapiens
atactctcaaaatatttacttatatcaattcctggacacagagtgtaatgtctgtggctaaggatgaagaaccagagagtatggatttccctgctcagcc

SEQ ID NO: 852036 - DNA, 100 bp, Homo sapiens
ggaatgcagacctcctgaaaaccaagccgaggactgcggggtccggtgtccacgcagagtcctcagaatggttggaatgaccctccagctttgaacagag

SEQ ID NO: 852037 - DNA, 100 bp, Homo sapiens
aaaagtacgtggcatgcctagaagaacttcgtgaagctctggagatctcccccttcttcaagacccacgaggtggagtgcaactcaaaattggacccaac

SEQ ID NO: 852038 - DNA, 100 bp, Homo sapiens
tgccctcaccaagttggaacaaggagaaccactatggacactagaagatgaaatccacagtccagcccacccagggtctattgacattcagggatgtggc

SEQ ID NO: 852039 - DNA, 98 bp, Homo sapiens
tgcaggcgcggtggttccccagcagaaccactctcagcatcgagtaacagattccctggataccctttcagaaatttcttcaaataaacagaaccatt

SEQ ID NO: 852040 - DNA, 100 bp, Homo sapiens
gaagctttacgttcatgtaaacagcatgacgtgaggccgtggatgcaggcattaagagaagagcaagttagtaccttgtaccaaaacatcaaccttgtgg

SEQ ID NO: 852041 - DNA, 98 bp, Homo sapiens
gaaaacatgaccgctgagcccatgagggcggcgactggcggcgcgatggacctgaccgggctcctgctggacgaagaaggcaccttctccctcgccgg

SEQ ID NO: 852042 - DNA, 100 bp, Homo sapiens
gtggccttagctgtgctcgcgctactctctctttctggcctggaggctatccagcaacaaggacggttcttacacaggcttcatcaaggttcagctgaag

SEQ ID NO: 852043 - DNA, 98 bp, Homo sapiens
gttcacaggaacactccactgcatgccaatgcactttgccactttcatattgcagccagcatcaacccagccacagagcatccacaatgggtacccca

SEQ ID NO: 852044 - DNA, 100 bp, Homo sapiens
aggatcctgcgcaaccggcaggaggtggccatcttggaggcatggcgatttgttgttcctgtttccctcgagccttgctgggccctcatctgaaatggag

SEQ ID NO: 852045 - DNA, 99 bp, Homo sapiens
taattacagtgtttggagcaacagatattgatgatgttaagaagttcaaaccgggttacctggaagctactcttaattggtttagattatataaggtac

SEQ ID NO: 852046 - DNA, 100 bp, Homo sapiens
cacagggatacttttctacaacagaaagctcaatcacttaccaactggagctctcaaacactgctgtcctgcaccagatgcggcgggaccaggtgacaga

SEQ ID NO: 852047 - DNA, 100 bp, Homo sapiens
ttttctgaagcagaacattggcttgattatttcccgccactggctattcaggatttaaaaagaatgggtttgaagatcgagcgaagaggagaaagctcag

SEQ ID NO: 852048 - DNA, 100 bp, Homo sapiens
tcaaccttgtgggatgtgaaaactctgttactgaagctccatcaaggaacagtccctgtttcttacacagtaacaacagtggcaccacatgggattccac

SEQ ID NO: 852049 - DNA, 99 bp, Homo sapiens
ttgagttaacacctctgccgctgctaaaagaaaagggagatttcattgccctggatcttggtgggtcttcctttcgaattctgcgggtgcaagtgaatc

SEQ ID NO: 852050 - DNA, 100 bp, Homo sapiens
gcaaattcttcctggccgtcagtccggcagcctcacctcaccatttctagcttgttgaaacccaaaactacaattctgtggtgttcttggtcacacattt

SEQ ID NO: 852051 - DNA, 100 bp, Homo sapiens
gttcctgctgctctgcctgctccacaagcggcgccgcgccctcggcctgcacggggaagtttggttggcttagtggattatccagatgatgaagaggaag

SEQ ID NO: 852052 - DNA, 98 bp, Homo sapiens
ctcttcgttttccatgtactgcatgctgtttgtggcagaaaatcctgccttgcttcgttgggcctatgcaagaacaataaatgtctatcctaatttca

SEQ ID NO: 852053 - DNA, 100 bp, Homo sapiens
tggcccatgggctggcatggtcatattacatcggatatctgcggctgatcctgccaggcttacctatttctactccatgtaccaccataaacaaagtttg

SEQ ID NO: 852054 - DNA, 98 bp, Homo sapiens
tttctgttccgcacaggcctgctgaactgggtgctttatatagggtttactcctggcttgggggcattaggaagcactggaggctcttcgggaactaa

SEQ ID NO: 852055 - DNA, 98 bp, Homo sapiens
cccagactgccctccacttgtgcagaagggtgaatgccatgtcaactttgttcggaagatggctattcatatgaaaaggaagcaatggaaaattggat

SEQ ID NO: 852056 - DNA, 98 bp, Homo sapiens
ctggaccctggagtacaccccgcagcacagccgcgacttcaaggatatacgtggcatttcaagtgatcagttgcatagagtactaaaaagtgtggaat

SEQ ID NO: 852057 - DNA, 98 bp, Homo sapiens
gcggaccgcgtcctgcgccggagcagtgagcatttgtcctgtgctttcacattctttctgcatggagaaagtaatgtatgcacaagtgtggagattgc

SEQ ID NO: 852058 - DNA, 100 bp, Homo sapiens
ccggggcgcccgaggtctggaaggcgcagtcctattttgtaacggattatgatccaaccattgaagattcttacacaaagcagtgtgtgatagatgacag

SEQ ID NO: 852059 - DNA, 98 bp, Homo sapiens
ttatattttgtcttctgtgtggattcttcagaaagtgaacttggcattttagatctaattcaacatgagaagctgatacatgaactggaagaggagag

SEQ ID NO: 852060 - DNA, 98 bp, Homo sapiens
taaacgaggggctggaacacctcgccaaagcagagaaatagtttccgagacactaaagcgttttgcagggaaggtgacaacagccagtgtaaaggaac

SEQ ID NO: 852061 - DNA, 98 bp, Homo sapiens
caacaccatgccgtccgccttctctgtcagctctttccccgtcagcatcccagccgtgctcacgctatgctaagaaggaatctgatcttaatggcgcc

SEQ ID NO: 852062 - DNA, 100 bp, Homo sapiens
tctatctcttgggcaatcttcacggggctggctgctctgtgtctcttccaagtgagagggtccaagcctggtaagaatgtccagcttcaggagaatgaaa

SEQ ID NO: 852063 - DNA, 99 bp, Homo sapiens
cgcctgctgctgcgggagccgcgctacacgctgctggtggccgcctgcctctgcctggcggagcttgtgaaactttgtattgcaatgattgatactgga

SEQ ID NO: 852064 - DNA, 100 bp, Homo sapiens
agcggcactcggcgagtccgggactgcgctggaacaatggataacttcttcaccgagggacttgccatgaggtgttgaagccttgtttcactgagttgga

SEQ ID NO: 852065 - DNA, 98 bp, Homo sapiens
gggcctgcccaacaacgccgagagagtcctccttaccacacaggatctcttacctcagctagaagctccgagttctcttactcccagcagtgaactca

SEQ ID NO: 852066 - DNA, 98 bp, Homo sapiens
ggtggaccccgagctggtggtgaccgtgctgggagacctggagcagctgctcttcagccagatgctggggtcatccgcacagaatggcagcgcattaa

SEQ ID NO: 852067 - DNA, 99 bp, Homo sapiens
ggaaagccatgtgggggccaggactgcagtgggagctgtcagtgttttcctgagaaaggagcgagagtgctatgcttacatttgaaaagatttcattgg

SEQ ID NO: 852068 - DNA, 100 bp, Homo sapiens
tcttttccatcatgtatactggagcaccgtgtggatcacacaataataatgtacttgattggaccagatggtgagtttctagattattttggccagaaca

SEQ ID NO: 852069 - DNA, 100 bp, Homo sapiens
acttgatgtgcctgtggaaatactaaacatcacagaaaaacaacgatttatggatggagataagctgccaatttgtggtgtctgaagaccaagactacac

SEQ ID NO: 852070 - DNA, 98 bp, Homo sapiens
cgagaatgtggagcttgggatcaggatgtgactggagtgatttgcacccggatgcctagactcgccatctgctcaaagactgctcagaaagccctccc

SEQ ID NO: 852071 - DNA, 98 bp, Homo sapiens
agagctattgccttagatccttcaagtgggtatggcatgaattgccttattcagtttgaagattttgccaatgtgaatgcatttcgtctcctgaacaa

SEQ ID NO: 852072 - DNA, 99 bp, Homo sapiens
ccgccgctggcccaacggtttccccagcagtagcctctgcgaccaggtcccagtagggatggcacaatcagcgaggacaccatccgagcctctctcatc

SEQ ID NO: 852073 - DNA, 100 bp, Homo sapiens
tgatggagctcagccctccacctccacagagacatcattaatctggtggctcaggtggttccaatttatgctgtttcccacctctttgaagctcttgctg

SEQ ID NO: 852074 - DNA, 98 bp, Homo sapiens
tgggagcagaagggaggctccaagacctcatcaacaattaagggtgactgtcgttcctacagttacgtgtgtggaatctccagtaaagatgaacctga

SEQ ID NO: 852075 - DNA, 100 bp, Homo sapiens
aggcagatttgacgacctggaaaatcttaattcattagcaaaaactagtctggatttagatgaccaagatgctagacctgctagaggatttcttggaaca

SEQ ID NO: 852076 - DNA, 100 bp, Homo sapiens
agggcttctttgcagcgtacgaaggaatacgtcgcctacagccacacgggccgcatcatccctgcaatctggttccgctacgacctcagccccatcacgg

SEQ ID NO: 852077 - DNA, 98 bp, Homo sapiens
accaataaggacaaaatggaatgtgaagagcaaaaagtctcagatgagctcatgagtgaaaggatggctggctgtggtgaaattgatcattcaataaa

SEQ ID NO: 852078 - DNA, 99 bp, Homo sapiens
aacaactctcattattaccatatggcccatggaaaagattttgcatctagaggaattgaaagaatattcaacgaagcagctgaccaatctggtgaatgt

SEQ ID NO: 852079 - DNA, 98 bp, Homo sapiens
aggtgtctgcaggaccaacctctcctctggatgctctagatgttccccatcattgcccagtatggagatgtattggtgagaaacttgaggcgggaagc

SEQ ID NO: 852080 - DNA, 100 bp, Homo sapiens
tgctgactctgaggaacagttcctattggctggtgaggacagagcttctggaaacccttgcagagattgacttcaggctgaacagtccaaagaagagcag

SEQ ID NO: 852081 - DNA, 100 bp, Homo sapiens
gtccgcaaggccggagaaggccgccgggcccgggcatggtggtctggggcaacgcggaagatttgtgaagctgggaatcatttcatcaatgtaatgttgt

SEQ ID NO: 852082 - DNA, 100 bp, Homo sapiens
cttatagaaaggaaaagtgatttacatccaacattaccagctggccgatactctttgaatgtcacatacatggtcgtttttgatgctcgatgaatgctgg

SEQ ID NO: 852083 - DNA, 100 bp, Homo sapiens
cgctgcgtgttgtccacccaagatggagttcctcctggggaacccgttcagcacaccagtggggcagtgcctcggttatccggtgttggctcctgctgct

SEQ ID NO: 852084 - DNA, 99 bp, Homo sapiens
tgatgtggtgcttttgaaccactggaaagtgaggaattttgaagtacaccgtggtgacattgtatcattggtgggccagtgtcattcaaagatgtggct

SEQ ID NO: 852085 - DNA, 98 bp, Homo sapiens
tgcagcaaaaaagctgaagatggatcgagtaaagcaggttctgcggcatgaggaatttgaagaaggctgcaaagctgcctgtaatgggtatgatacct

SEQ ID NO: 852086 - DNA, 99 bp, Homo sapiens
ttctatttctctagctattgccttattttttctcatggatgttcttcttcgagtatttgtagaagggcaccacagtgatgcggatgacagcctttgatg

SEQ ID NO: 852087 - DNA, 100 bp, Homo sapiens
acagtgaattattttaaggagacagtaaaagcattagcagaaaccaccatcatgggttcgggtcccatagaccccaaagaacttctcaagggcctggaca

SEQ ID NO: 852088 - DNA, 119 bp, Homo sapiens
gaacgtgtactgcttgagaacagaatacattgctgattatctcatgcagagtgcagcagctgccccgagccccgtgcttggcaacattccccccaacgatgggatgccgggaggcccca

SEQ ID NO: 852089 - DNA, 51 bp, Homo sapiens
atgcggtaatgaatccagcagaaggtcctagcttactctgccaccactgcc

SEQ ID NO: 852090 - DNA, 98 bp, Homo sapiens
ttcggtgaagcgattcctgcaggcgttggttcccctctttgacctggtaaggtactcaactgtgtggggtactacataaatcctgaaagactacaata

SEQ ID NO: 852091 - DNA, 139 bp, Homo sapiens
gggcagcagcatcggcatgctctatctgtactgccggcacctcaaccagatgaggaagtacaactttgagatggcaagttcttagcgtgcgtgagccaggacgggtttctgcgggtgttcaactttgactcagtggagc

SEQ ID NO: 852092 - DNA, 100 bp, Homo sapiens
ctcctctctccttggcctctcctgggatcggcccaaggccagttctccgcagtccggatgctgctgatagcacgtctttcgatgtccagctaggagacat

SEQ ID NO: 852093 - DNA, 100 bp, Homo sapiens
gtccagcaagactatgaatctctgttccaaatgctttgctggatggatagaatgacagaagatgctcttcgcttgaatctgttgaagcggagcttggacc

SEQ ID NO: 852094 - DNA, 100 bp, Homo sapiens
ctctaccgacatttctcttctaagagaagtagtaaaaccagctgcagtgttatcaaagaggatgtgaaaccatatcaagttaatggagtcaacccagcct

SEQ ID NO: 852095 - DNA, 100 bp, Homo sapiens
aggctgtgaatatgcaatctcgaatgcggaagcctttgcagaaaaattgtccagagagctgcaggtgctagatgggccccccgtccagctccgacgccgg

SEQ ID NO: 852096 - DNA, 100 bp, Homo sapiens
ctggtcccaagaagacctatatcacagatcctgtttcagccccctgtgcgccaccattgcagccaaaggacctcaatacagtctccatcttcatatggta

SEQ ID NO: 852097 - DNA, 99 bp, Homo sapiens
tcagcaggctccgggctgaagattgcttctcttctctcctccaaggtggatctaggatccggcttccaacatgtggcagctctgggcctccctctgctg

SEQ ID NO: 852098 - DNA, 100 bp, Homo sapiens
ttgggatcaaccagacggaaaacccgttatagctgaggtggtaccagtttaagaagtgagaacttcttcactgactgaaatttgcatatcaatccaaatc

SEQ ID NO: 852099 - DNA, 98 bp, Homo sapiens
gtcatatatcttagtgctgctgctagacctggcctgggccaatacctttgtaatcaggccaggagcacctctccacccactgctgctggtctgaccgc

SEQ ID NO: 852100 - DNA, 100 bp, Homo sapiens
ctgggacacacctccattggatttaaaagacagtcctcgtcagcactgactttcagctatggaatcggaacttagtgatttggcccgtgaccctccagca

SEQ ID NO: 852101 - DNA, 100 bp, Homo sapiens
aatgagtatggcagtgtcagctgtacagccacactaactgtgacagaaggaaactccacttgccaatgctgcattctgggcagccaggagaggaaacctg

SEQ ID NO: 852102 - DNA, 100 bp, Homo sapiens
agaaactgatgcagaagatggaatcaaggggtgtggaattaccttcactctgggaaaaggcactgaagttgatgatggaccatttggattgtgcaacaaa

SEQ ID NO: 852103 - DNA, 99 bp, Homo sapiens
atcgccattgccaaaaagcaaaggtattgttgcagcatctggcagtgagactgaggatgaggacagcatggacattcccttggacctttcttcatccgc

SEQ ID NO: 852104 - DNA, 100 bp, Homo sapiens
tctttgggtgctgctataggctcagccctcagtggatttggttcatcaggtactaaatcagaagtactgaatatagataacccagacttggctaaatatc

SEQ ID NO: 852105 - DNA, 98 bp, Homo sapiens
tccgtcagtacgcgaaggatatcggtttcattaaggtgggtaaagcaggaatctgagatttccaaggaatctcaagaaatggatgctcgtcctaagtt

SEQ ID NO: 852106 - DNA, 100 bp, Homo sapiens
gtgagcggatcagacacctagatgacatggtgcattgccagcagaagaaagtcaagcagatggtcgaggaggaactttatattgctgttggaatatctgg

SEQ ID NO: 852107 - DNA, 98 bp, Homo sapiens
ccgcgggacctctccgggccatggctatgcctccaacaaagcaagtaaagctgcttccgtccttctgtattctctgtgggcacacacggaactgcatc

SEQ ID NO: 852108 - DNA, 100 bp, Homo sapiens
cgcaaaaacaacagacagccctatgctgtcagtgaattagcagatgggaatttcttagccataggctcacatgacaactgcatctatatatatggcgtta

SEQ ID NO: 852109 - DNA, 98 bp, Homo sapiens
gagggcttggaatctcgagcgggaaaagccttaatacagatattggcagctgctgcagctgagcgagatgtggtttatttcacctttggggactcaga

SEQ ID NO: 852110 - DNA, 100 bp, Homo sapiens
tggactgggagagcttcaaggaggaagaggggattggtgaagaactggccatccataatcgagggaaagagggacccgagagggactcacttatgggaat

SEQ ID NO: 852111 - DNA, 100 bp, Homo sapiens
caggaagagtcagacctcgaattagcaaaggaaacttttggtgtccctggccagtgtccttccacctgtccacaagcatggggaacatcttcgccaacct

SEQ ID NO: 852112 - DNA, 98 bp, Homo sapiens
acccgagcggattacttgttgaagctgctcagaaagggtctggagaagaagggggctgtgacaggtggggaagaggacatggatttgattgacatact

SEQ ID NO: 852113 - DNA, 126 bp, Homo sapiens
ccgagttatgcctgcccagcttaaggtcctaaccatgccggagacctgtagataccagcctttcaaaccactcttgcccctgttctttgcttctcgttttgttggtgaagatatcacagtgatgtc

SEQ ID NO: 852114 - DNA, 100 bp, Homo sapiens
aactaatgcatgctatggaggcacagctgctgtcttcaatgctgttaactggattgagtccagctcttgggatgcctcaaaaactggtagaatctgagtg

SEQ ID NO: 852115 - DNA, 99 bp, Homo sapiens
tcagttgttgcatcaaatacttcatatttggcttcaatgtcatattttggggtgaatctgtaaaatatttcctggataacttggataaacttggagaac

SEQ ID NO: 852116 - DNA, 100 bp, Homo sapiens
agttgggccctgcaggaaggacggacttcaggggcagcaagcccttgtgattcgaaatggtgagaaaatgagcataaatgcggaggaagttgtggttggg

SEQ ID NO: 852117 - DNA, 100 bp, Homo sapiens
caacgcctggctcggagcagcagcctctgaggagagtcaagccctacccgtcgagaagctgtgaagagaagaacagccgagtacctcatgcgggcagaaa

SEQ ID NO: 852118 - DNA, 100 bp, Homo sapiens
cccgtcggacccatggtttccagtgcagcgcggagtgggcgatgccagcgtgccaggtcctgaatctgtgcctccttcccttcttaaagtagtgatgaaa

SEQ ID NO: 852119 - DNA, 139 bp, Homo sapiens
ggctgcagctccaggagcaagtactccaggaagcacagagctgtaccagtacacggcccacgttgccagcaaagggttaccttccagttcaacatttaccttggaagaggggaccatctacttgaccgctgagcccaac

SEQ ID NO: 852120 - DNA, 100 bp, Homo sapiens
cagaatcagctcaagcaacccgtacagcactgtcaccatggatgagctccggaccaagtgggacaagggctatgacgggaaggagaaggtctacattgcc

SEQ ID NO: 852121 - DNA, 100 bp, Homo sapiens
tctgcctgtggccattattaatctaaaagaatatgatccagatgatcatctgatagaagaggaccttaaatatatttttggaagatatgttgacttttca

SEQ ID NO: 852122 - DNA, 100 bp, Homo sapiens
tgtcagatggagaaataaaagtggccattagtactgtgagcatgaaccttgagggatgcctctgcactgctggatccgatggagtgcacagacacagcag

SEQ ID NO: 852123 - DNA, 98 bp, Homo sapiens
gtatctcaatccccgacaagtcttcgacctgagccagggagggcccaaggaggcaggcatttcatccttcatgaagccattcaggattttgaattgca

SEQ ID NO: 852124 - DNA, 100 bp, Homo sapiens
agatactttaggaggacctgaagaaactgaagaagaaaatacaacgtatactggaccagaagtttcaccacatgaaatgaagatcacctctgcctatcta

SEQ ID NO: 852125 - DNA, 100 bp, Homo sapiens
cagattattgggagcctatttgttcatcatttctcgtgttcaagaaaagagtctcatcgtggaaggcaagagggaaaagaaaaaagtagagaggttgaca

SEQ ID NO: 852126 - DNA, 98 bp, Homo sapiens
ttacagcaacgcggccgctgtgcactctgcccatagggagtacatatcctggccaatttggagcaaggcttagcagaagacggcggcatgagcagcgt

SEQ ID NO: 852127 - DNA, 100 bp, Homo sapiens
cccgaaccaccatgacccacttcaacaagggcccttcctatgggctctcggccgaagtcaagaacaagaaattccgggtagatatgcctggctcaggcag

SEQ ID NO: 852128 - DNA, 99 bp, Homo sapiens
ttaggagaagtggtggccacagtcgaaaaatcccaagattgttgccaatgccaaaggcgctgtgactggggcaaaagatgctgtgacgactactgtgac

SEQ ID NO: 852129 - DNA, 100 bp, Homo sapiens
tacaatgcagtaaagccagaaaagactgctgctccctcgccgtcactgttgtataaatgttccagtttcattgctgaagtatgcaccaaacaacggtggc

SEQ ID NO: 852130 - DNA, 100 bp, Homo sapiens
tcctaaggagctggtgtcttcatccagaagggacagtttgtgccagctctccagagagaaaagattcccaggactccggctctctctgcttctgtttccg

SEQ ID NO: 852131 - DNA, 98 bp, Homo sapiens
gccgcctcttccgccgccgggctcggggcctccgcagcgacaacatggaggccgtgaagaccttcaatagcgagggccgttgctccagggagaactgc

SEQ ID NO: 852132 - DNA, 100 bp, Homo sapiens
agaagccatgggattcacgggacctttgaaatacagtaaatgggtgcatgcctacatcatcagctacctgaagaaggagatgccaagtgtatttggaaag

SEQ ID NO: 852133 - DNA, 101 bp, Homo sapiens
cctgaacgcggactggcacgcagactgcttcagtctattatcctcccagtccacaacgctgaaccgtggctggacgaatgtttgaggtctgttttgcaaca

SEQ ID NO: 852134 - DNA, 98 bp, Homo sapiens
aaagtgaggaagggaaagcagcaatttcacaactcaggtctcagaccagtatccttcaggggttctcttactctgatttgcggaaatttggcatcgtc

SEQ ID NO: 852135 - DNA, 100 bp, Homo sapiens
ctgagcctgtcctgcagcatggacctgcaactttcctgaagcatctccagggctggatgccatggtgtgttaccgagtggaatgggccaaattccaggaa

SEQ ID NO: 852136 - DNA, 100 bp, Homo sapiens
aatcctacaggagttcaaaacccacacatgactctgcagacagtgggcccatcccatgcccgaacctacactgtggctgtttatttcaagggagaaagaa

SEQ ID NO: 852137 - DNA, 100 bp, Homo sapiens
cggtggcatcgtctcccgagcctgctcctgccgccgaggaggatcccttttcccccagaaattactcaatgctgaaacctctcaaagtggtattagagac

SEQ ID NO: 852138 - DNA, 100 bp, Homo sapiens
gccttctgagccgactgcggtggtcaagagggagtgcatccgccccaacccttttccccctcgtctcctgtgagaattccccgtcggatacgagcagcgt

SEQ ID NO: 852139 - DNA, 100 bp, Homo sapiens
gacacagctccgggcgccggcgtagaatctgagctgcagctgttaggcaattttcttcagtggtatggcattttctcaaataaaactctgcaagagttat

SEQ ID NO: 852140 - DNA, 100 bp, Homo sapiens
ccacctcctgagtcctctcggcacccagcaaggtccagaggtgtccttctaaagctggtagaggtttcacgagtcatcagggacccagaacccttctctt

SEQ ID NO: 852141 - DNA, 99 bp, Homo sapiens
gccgaggcaccaccgggcgccgagttcctggcggctcgcacgaccaaaccaatgcacaactcctacgtactgatggtggtcttacgtttccctaagttt

SEQ ID NO: 852142 - DNA, 98 bp, Homo sapiens
cacttttgggagatggtgtgggagcagaaaagcaggggtgtcgtcatgctcaacagagtgatggagaaaggttcgcacctcaatgacctgaagaagga

SEQ ID NO: 852143 - DNA, 99 bp, Homo sapiens
gggcatgtgtcgtctggctacgtggagcggctgaagggcatgtccctgcttgtcagggctgagagcgacggagtccaagtcttggcaacctttgaaaaa

SEQ ID NO: 852144 - DNA, 100 bp, Homo sapiens
tgaagaggaactttttaaaatgtgcccgtggttgacacgagctgtgtccccagctgttcccgtctacaatggcatcatcttcctctttgtcctggccaac

SEQ ID NO: 852145 - DNA, 100 bp, Homo sapiens
tgctgaaggtgaaccgtcagacagtactagaggctctgcagcaggcagcggcacggtggactttgatgagttcctggtcatgatggttcggtgcatgaag

SEQ ID NO: 852146 - DNA, 100 bp, Homo sapiens
gctgtttgtattccagagactagggagtctgaagatacagtattgctcgtcctcaaagagatctaccaaacccagggtatcttccttgatcagcctttac

SEQ ID NO: 852147 - DNA, 100 bp, Homo sapiens
attttggattatctgactaaaaagaaacaactgacagataatttgaaagaaaaagctctttcatttatgaggcaagatggccctgctgtggcaccagtga

SEQ ID NO: 852148 - DNA, 113 bp, Homo sapiens
gacgccgtggcagcctgaacggagtgtgcgacggattgggaggacagagcgggatgccaccagcttgtccaaagggaagttccaggagctcctggtgggcatcgttgtggaga

SEQ ID NO: 852149 - DNA, 99 bp, Homo sapiens
ctacagaaagttttccaccaaagtcacgctgaatacagtggggcaccaccaccgccccccgccccatcagtcatccgtccttggctcaggatttggaga

SEQ ID NO: 852150 - DNA, 122 bp, Homo sapiens
tggctccccatcaaggaggaggaagagagaagtgcagatgtcgaaggacaaggaagctgttgatgtggcaaatcttgcttgttccatgtcaacaaatgaagatggaattaaaattgtcaaaa

SEQ ID NO: 852151 - DNA, 98 bp, Homo sapiens
tgggtgtggttggaagtccagagatagttgtgcttttacacggttttccaacatccagctacgactggtacaagccctgaatcgtgtgcacttacttg

SEQ ID NO: 852152 - DNA, 100 bp, Homo sapiens
tatgcagggctttctcctgcagggaagcttgtggcctataaacgtaaacccagttcaagtacatctgggcttatccagacaatgcaggaatcacatgaac

SEQ ID NO: 852153 - DNA, 100 bp, Homo sapiens
cccacccgcgcctgggaccatggccactgactcatgggccctggcggtggacgagcaggaagctgcggctgagtcggctcatcagattcaagagatgttt

SEQ ID NO: 852154 - DNA, 100 bp, Homo sapiens
tgcttagtatgtgtattcagacagaggatttgacacgataagcctcatctgatggaagagaggaataaataattcacctatatgtgtttgaggttgtgac

SEQ ID NO: 852155 - DNA, 98 bp, Homo sapiens
accgtttgtgttttgtgatggaatatgttaatgggggcgagtcaagtccatcatctccagaaccagctagtcttcctgcagaagatattagtgcaaac

SEQ ID NO: 852156 - DNA, 100 bp, Homo sapiens
gagctggccagcgagagccagggctccaaagaactcgatcgggggtcatactacacatcgatcgggaccttagtcatgttgtgatatggacagctttctt

SEQ ID NO: 852157 - DNA, 100 bp, Homo sapiens
cctctatcacatatgacatcagtcagttgtttgatttcatcgatgatctggcagacctcagctgcctggtgtgtactattgactggaagaaaggaaagaa

SEQ ID NO: 852158 - DNA, 100 bp, Homo sapiens
accctgtatgagaagtggggagagtacaggtccctaatggtgcaggagcagcggctggtgcatggaagtcctaccccaaccactcatgaaatagtcacag

SEQ ID NO: 852159 - DNA, 100 bp, Homo sapiens
atcccaatggacactgattcagatgcaacaaggagacgcgcctttgccctggtctctcaagcgtatacttcaatcatcgccgatgattttgcagcctttg

SEQ ID NO: 852160 - DNA, 100 bp, Homo sapiens
ggcagcagccgggggtccctaccttctgcgggggggtcccgatcagcatctccagggggagaagcgagcggacatccagctgaacagcttcggtttctac

SEQ ID NO: 852161 - DNA, 99 bp, Homo sapiens
tcacaagtacagtctacaaaaagacctgctagagccattattgccccgaatgtatcctgtcaggtataatgtcagtgaatggcaagaaagttcttcata

SEQ ID NO: 852162 - DNA, 98 bp, Homo sapiens
tctcctgccacccccagacctcctcagctccagtgtcctgtcttgtgcaagccgctaattcaactcccccaggactgtgctttctccagttctgaagt

SEQ ID NO: 852163 - DNA, 98 bp, Homo sapiens
gaagctctagaaatgaatgtttccatctcttcagagatgaaccagacacggcatcagcgaggagatacgcatcctctaaccttagatgaaattttgga

SEQ ID NO: 852164 - DNA, 100 bp, Homo sapiens
tacctgggatccatggagtcctgctataagagctaaagttgcagacaagatccagctcatcaataatatgctggacaaagtcaatgagatgattattggt

SEQ ID NO: 852165 - DNA, 100 bp, Homo sapiens
gctgaagaaggaaatgataaatggctctctcttgatttggagcaggttgtggaaaatgcccttaaagtgaacccaatactaggtccacaaatgtttcaac

SEQ ID NO: 852166 - DNA, 99 bp, Homo sapiens
aagaagaagatatttatgaagtcttgccaggtagcacaggcggagtgcagcggaggcccctgccgctgccgtcatgccgttcccgtttgggaagtctca

SEQ ID NO: 852167 - DNA, 98 bp, Homo sapiens
tctgaaaagccataatcagcgcctggtggagcaggtgggatcccttcaagatgcgctagaaggcctgtcctcctcggtacacatgctgtccctgtcca

SEQ ID NO: 852168 - DNA, 100 bp, Homo sapiens
cgcgtccgccccgcgagcacagagcctcgcctttgccgatccgccgcccgtccacacccgccgccaggttggtcaaagaaaaagtgatgtatgaaaaaga

SEQ ID NO: 852169 - DNA, 100 bp, Homo sapiens
caggctgtcacaattgttgcacaatatcgacctgaagatatttatccccattttacaaggcctggctcttgctgccaaagagtgctccctcgacagtgac

SEQ ID NO: 852170 - DNA, 98 bp, Homo sapiens
tttgattttaatgtggataaagccgtgcaagcctttgtggatgattcaattagcagagcctcacagacaatggccaaatgtgtcaaagctgtcacaga

SEQ ID NO: 852171 - DNA, 51 bp, Homo sapiens
gaagaattctttgatgccgtcacagacttgaaactgcatctgcagagcact

SEQ ID NO: 852172 - DNA, 98 bp, Homo sapiens
ctacaagtcagtgccctgtatgctctccaggtgcactgctataacagcaacttcccaaaaggcccagcagcttccacacaagaaaagaatccccggga

SEQ ID NO: 852173 - DNA, 99 bp, Homo sapiens
gcaattatggcatcctggccgatgccacggagcaagtgggccaggtccataattcagcagccaaatctttccctcgaaggtttgttttgcctttaaatg

SEQ ID NO: 852174 - DNA, 100 bp, Homo sapiens
tttggaggctggggacctctcaaagattatggaactgcagcgaatgacatcggggacaccacgaacagaagtaatgaaatcccttccacagacgtcactg

SEQ ID NO: 852175 - DNA, 99 bp, Homo sapiens
gtgagacatgcacagacagatctggcatctccactggacactggtcagagacagagatcagtgagtctggcatgacagtgagaagtactggctctgcaa

SEQ ID NO: 852176 - DNA, 100 bp, Homo sapiens
tgcgagccagcctgagcgcaacacttctccgagccagcgagccagcgagccgccgacccgccgagcaaaatgttgccaaaacaaaggggatttggtgatg

SEQ ID NO: 852177 - DNA, 98 bp, Homo sapiens
cgggcgccaacggcatgacagactcggcgacagctaacggggacgacagggaccccgagatcgagctctttgtgaagagctctgaggaacatgaatac

SEQ ID NO: 852178 - DNA, 100 bp, Homo sapiens
ggagcagtccctctctgtccgggcgctgcaggagatgctggctaacaccgtggagaaatcagaagggcatgattatgatatgagggtggatgatttcctt

SEQ ID NO: 852179 - DNA, 100 bp, Homo sapiens
gagaggcgccagagagagctgctggaacagcactatgcccagtatgatgccgacgatgacgagatagcaaaattactcagtgggaagacccaagactgca

SEQ ID NO: 852180 - DNA, 99 bp, Homo sapiens
tctgcgacatgtggaaaatgacggttataagaccatttatttctttggagacaaaactatgccatctgcatgaagaaatcagtgatttttatgaataca

SEQ ID NO: 852181 - DNA, 98 bp, Homo sapiens
ttaagctaacccgggatgctattgagttaaatgcagccaattatacagtgtggtggatagatacttctcaagacatcacacagcgtgagtcaatcaag

SEQ ID NO: 852182 - DNA, 100 bp, Homo sapiens
tttccctttgagaccgtgaagagaaagatgcaggtttgctggttggctcccgagcagacagcaggaaagaagaagcccttcgtgtacacccagggccagg

SEQ ID NO: 852183 - DNA, 98 bp, Homo sapiens
gtagagaccccacctgaacagaatggcaccctcacctcccagcccaacaacagcacaaagattgtgtggttccttaccttcttcgacttctcaaaggt

SEQ ID NO: 852184 - DNA, 98 bp, Homo sapiens
gacatcaattacgccaatgtggacggactcactgccctgcaccaggtggaatatgtgatcaagtgtgacatgtcagctctgcagaagattctgtatcg

SEQ ID NO: 852185 - DNA, 99 bp, Homo sapiens
acctacttggtgtctggcagtctcattcagaatggacattccccaaaccagatctccctggaagagaacattttggtctcccgttacattaacaacccc

SEQ ID NO: 852186 - DNA, 100 bp, Homo sapiens
caagctcgtagcctgccactccgttgtgattgccaccaatatcgcagagacatcgctgactattgatggtatctactatgtggtggacccaggattcgtg

SEQ ID NO: 852187 - DNA, 100 bp, Homo sapiens
accatcactgcaaagaccacacagtctctggtgatgaggattactgtcctcgcacctcctctcaagtcctcactgccatctcttccaaacactttctgat

SEQ ID NO: 852188 - DNA, 98 bp, Homo sapiens
agaaggatttggcaacagactttgtttcttggagtccacttccaattccaagttttctgaatttccagatcccatgtggggttcagattatgtgcagt

SEQ ID NO: 852189 - DNA, 100 bp, Homo sapiens
tcagagacattacatcaggaagatactgcagagatattctactccatctcattcattgtacagaaaaggcgacggcggattgacagaagtatgattggag

SEQ ID NO: 852190 - DNA, 100 bp, Homo sapiens
acggctccaccatcgtccccggcgagcagggagcggagtaccagcacttcatccagcagtgcacaggttgacatcatggacatatgtgagtccatcctgg

SEQ ID NO: 852191 - DNA, 100 bp, Homo sapiens
ttccaacaaaagactttttaatgttgatcggcatgttggaatgcttggtgtaaaaattgccaaagcagttgcctgccacaactttgtaaaagccaaaaag

SEQ ID NO: 852192 - DNA, 98 bp, Homo sapiens
tccaggataataacgggaccatcattcctttccggaagcacacagtgcgcggggagcgttcctacaggtttcgacacagccccaactgctggtacctg

SEQ ID NO: 852193 - DNA, 99 bp, Homo sapiens
tttcttctagcacaccggtggtggaggatacacagagctgaaggaaaacgacagattcctttaaatgagcaattcctcagcaagtgccctaatgcagat

SEQ ID NO: 852194 - DNA, 98 bp, Homo sapiens
gaaaatgttgcttcatatgaggggtgcactatagccatctggagctgagccctggggagccagtgcaggagggggaccctcatttccgaagtgccctg

SEQ ID NO: 852195 - DNA, 100 bp, Homo sapiens
cggactacaaggtcgcctacgtgcagctgtactactataattccttgacccagcagtacctttactgggatggggaaaaagagacctacgtgccagctgc

SEQ ID NO: 852196 - DNA, 99 bp, Homo sapiens
tgatcgaggacataaggaactagtcacagtgttgctgcaacatagagctgacattaactgtcagagtgcccttatgcctgcacagttgttttttaagac

SEQ ID NO: 852197 - DNA, 98 bp, Homo sapiens
aggagacagagctactggatctcagccttgtcaaagatgccagatgtgggagacacgccaaagctcccaagtgcaagcagctaatgactcagtctgta

SEQ ID NO: 852198 - DNA, 99 bp, Homo sapiens
caacgtgcctgcagtggccgaggagattcaggatgaagttgtacctttgtgttggatgaatttaagcgcaagtactccaatgaggacacactctctgtg

SEQ ID NO: 852199 - DNA, 98 bp, Homo sapiens
ctgacccaagaggaaacactctaggacggggaacgacaattacagtgcctggtgaagaatgtgatgggatcactagcatgtctgcggagagcggccct

SEQ ID NO: 852200 - DNA, 100 bp, Homo sapiens
gccaacaatagtgatacactcaagctgttgaaaatgagcagctgtcctcatgtctctccagcagtaccttctccaggcaaattccgttcccctgcagcac

SEQ ID NO: 852201 - DNA, 100 bp, Homo sapiens
aaaggaggcatcacatgtttctgctgtggggggcccttccgagcagcagacaggagcaagattcctccttatggacaacaaggccccagcgggtatggtc

SEQ ID NO: 852202 - DNA, 100 bp, Homo sapiens
gaattggaagctaaagctaccaaagacgtagaaagaaatcttagcaggatccagtttatggaaaaggaaaacttggagaaatccagggacttatcttggg

SEQ ID NO: 852203 - DNA, 100 bp, Homo sapiens
cgctggtgcatctgtttgccggagggatcttctaagggtgtgaggatacaggcgtcaaagaccccgtgctgagacagctccataacaacatgcagatatt

SEQ ID NO: 852204 - DNA, 100 bp, Homo sapiens
attactggctactgcatcttatgatactcgagtatatatctgggatccacataatggagacattctgatggaatttggtcagagcaccataacatggtgt

SEQ ID NO: 852205 - DNA, 100 bp, Homo sapiens
gcagtcgtaagaagaggtcccaatcccccactctttccgccctaatggaggtctccagtttcgatattaacctggctgcagagccaaaagtgaaccgagg

SEQ ID NO: 852206 - DNA, 99 bp, Homo sapiens
agaaattaccatttcatacttcacagaatggaggtttcagcagccaaagccccaagtgccgcagacttgtctgagattatgatacagttaactggtatt

SEQ ID NO: 852207 - DNA, 99 bp, Homo sapiens
tacacaatttcaggacctccctgcttccttgtagatcatttggccgtatcattatgtggaggagatgttagagggcctagtggaacaatcttatcacct

SEQ ID NO: 852208 - DNA, 98 bp, Homo sapiens
cgcgggaggtgttcgagaacgaccccgagacggtccggaccctatttgtcagtggccttcctctggatatcaaacctcgggagctctatctgcttttc

SEQ ID NO: 852209 - DNA, 100 bp, Homo sapiens
gtggaaagatgacggatgaaaagaatgaacactgtccttcaaaacgaggccaacattgcctagacaaaactcacaactacctgctcaagttcaaaatggc

SEQ ID NO: 852210 - DNA, 98 bp, Homo sapiens
tatttgatggagttgatgcaagtcacatgacacaggcaatcccttttgacgaccctcggttagagagctgccaaatcatccctccggctcctcggaag

SEQ ID NO: 852211 - DNA, 100 bp, Homo sapiens
gcctcccgggtagctgggactacagagactccaagcaccccaagtactgcatcgagctgagcgcccagcctgtgggacttatccgggtacacaaggtcct

SEQ ID NO: 852212 - DNA, 98 bp, Homo sapiens
aatgagtatggcagtgtcagctgtacagccacactaactgtgacagttgttttggagaatcatgtagtgacagatgaagacgaacctgctttgaaacg

SEQ ID NO: 852213 - DNA, 100 bp, Homo sapiens
tgacttcaagttctacgccaagccatactttctcagattggagaccgtgtcatggcatttgtcaattacaatgcctgggcagaggtggtctgcacaccag

SEQ ID NO: 852214 - DNA, 100 bp, Homo sapiens
ttccctatgattttcgggatgaaagaatgatgagaaacttaaaagatctggctcaccgaatagccagtggcgaagagaaagtgactgagaccgaagatga

SEQ ID NO: 852215 - DNA, 101 bp, Homo sapiens
ctctccccgagttcttcaacggcaagaacaagtccaagactccagagataaagacctgagctgtcttccttggcactgcctatggaggtgacacccatctc

SEQ ID NO: 852216 - DNA, 100 bp, Homo sapiens
gactactttaatccagctactctacctctaacacagtacctgttaacaacgtgccaaaagaacatcttttagtctcgattcctctcttgattaatcatct

SEQ ID NO: 852217 - DNA, 100 bp, Homo sapiens
ttccagaccctgccttctcttctgaaaggagatcatgaatcagacagataaaaatcaacaagaaatcccatcataccttaatgatgaaccaccagaaggt

SEQ ID NO: 852218 - DNA, 100 bp, Homo sapiens
gaacatacccaagaggacaaatcccccagcgtggatgacatccactttctggtgcttcagaacctgatccagagcacgctggccctctcagacagtcaga

SEQ ID NO: 852219 - DNA, 100 bp, Homo sapiens
agaagaagctcatctcacaagtccagagggggcaaacctctttatttaccaccttccacaggaatttggagaccaggacattctgcagatgttcatgcct

SEQ ID NO: 852220 - DNA, 99 bp, Homo sapiens
cacgacctgacggacaccacccgggcggaatattccaacccgggaccggctagagggcatggcagccttcagggagaagcggactcccaaatttgttgg

SEQ ID NO: 852221 - DNA, 100 bp, Homo sapiens
tgtggatgatcatcacctccattttcctaggtgtcattacagtgatcatcataggcttatgtcttgctgcaggaggtgaagatcgagaacttattcagag

SEQ ID NO: 852222 - DNA, 152 bp, Homo sapiens
cactactcccccatctacctgtcgtttgtcatgcttttggctgccctgagctggcagtacctgaccactctctcccagatgccacctgggacagcaagaccaggttctcgtggttgtcccatagggactggtggagttctgtcttctcaaat

SEQ ID NO: 852223 - DNA, 100 bp, Homo sapiens
ccggtgtctggcggatgcggtcgtgaagatagatggggaaagagaggcctttgggctaatttcctttcagatgcatggggaaagactgactctcctatca

SEQ ID NO: 852224 - DNA, 99 bp, Homo sapiens
ttttcttcaatcaccccaaaggtcgcgataatattattgacctcttcctttatcagccacaagagacatctccccatacatttcaattagacttattct

SEQ ID NO: 852225 - DNA, 106 bp, Homo sapiens
aggggccgggccactgactccttgccaggaaagtttgaaggctgatgaattcatccgagcaaatgccaccaacaagctgacagtcatagctgagcaaatccaacat

SEQ ID NO: 852226 - DNA, 100 bp, Homo sapiens
cctcgttacctgcaggtattgggagatccacagctaagacgccaggacccactggaagcctagaaatggcaaaactagatggtggaagacagcaatggag

SEQ ID NO: 852227 - DNA, 98 bp, Homo sapiens
acaaaatgaacataattagggaaaataaggatctggcatgtttctacacaacaaaacattcatggagggggaaacggtcctaaaatctctacacttgc

SEQ ID NO: 852228 - DNA, 100 bp, Homo sapiens
actccctgataacttcatagctgcctgtacagaaaagaaaatccccgttgtttttcgattgcaagagacatatctgaagagatggattaagaatgctttg

SEQ ID NO: 852229 - DNA, 100 bp, Homo sapiens
aggatgaagaggaagaggctaccaaggaagatgctgaggccccaggcatcagagatcatgagaggttcaaatggtgaaagacgatgacccctcctggaag

SEQ ID NO: 852230 - DNA, 98 bp, Homo sapiens
atgtgatggcaccctcctcagatgccccagttcccaagagcctgcacggaggccgagtttgcctgccacagctacaatgagtgtgtggccctggagta

SEQ ID NO: 852231 - DNA, 99 bp, Homo sapiens
ccagacgcccatgtatggctctggctcccgaacacccatgtacggctcacagacacccctccaggatggtctgggaaggcacctgggggttgtgatcgg

SEQ ID NO: 852232 - DNA, 98 bp, Homo sapiens
cccatcctgccgtccttctccactttcgccagcccgtgccgcgagcgcggcctgcaggaggaacttgcctcatctgagcgagcccgccgacacgccga

SEQ ID NO: 852233 - DNA, 98 bp, Homo sapiens
taattgtgagctggttaagaagtttttagatccaaacaactattccgcaaactatactgcttgatgaagaaatctctggaattgtggaagtggttgga

SEQ ID NO: 852234 - DNA, 99 bp, Homo sapiens
atggtcaggtctggagctcgaccgggccaggtgtcttcagtgccctgggtttgcctgtgacccaatgcccactgggactgaatgccaaaggactccctt

SEQ ID NO: 852235 - DNA, 98 bp, Homo sapiens
gcagcggcagtcacaggcacatcagcaaagaggtcacagtgctgtcgatatcaccaaggtggctagaagacatcgcatgtctccttttcctctgacat

SEQ ID NO: 852236 - DNA, 98 bp, Homo sapiens
gccccggggtgatgactggagggtcagcctggaagaccacagcagccaagatcactccaagaactgaggcccctgtcagcagtgtcagtaatagtttg

SEQ ID NO: 852237 - DNA, 100 bp, Homo sapiens
ctgcacagtcttgagtgttcctgtccatgaacatgctcattgctatggacagtgctatcaccctgtggcagttccttcttcagctcctgcagaagcctca

SEQ ID NO: 852238 - DNA, 98 bp, Homo sapiens
caactccctgctctcggtaccaagggtaactaaggaagtggatgctacatctaaagaggccaaatccttcttcaagcagaatgagaaagaaaaaccac

SEQ ID NO: 852239 - DNA, 99 bp, Homo sapiens
ttcatcttcacatttggtttctagaccatctacctcatctagaaggagagcaattagtgagacagatatgagggaaggcaccattggagatatggctat

SEQ ID NO: 852240 - DNA, 100 bp, Homo sapiens
accacaaaaacctatcgttagagtcttcctgcccaacaaacagaggacagtgagtcataaacattctaagtgcatacggccatttcttccttatttcaat

SEQ ID NO: 852241 - DNA, 98 bp, Homo sapiens
ttgaaaagttcatgctgtcccttcattgaattttagagctccttaataagcatttatagtcagtttttggcagcaatagaatcactaaaggcattctg

SEQ ID NO: 852242 - DNA, 100 bp, Homo sapiens
cttgcggaaggggattccacggaccaagtctgtaggtggagctggccctgctacagcgctcctaccaggacctggcctcgcagatcaacctcatccttct

SEQ ID NO: 852243 - DNA, 100 bp, Homo sapiens
aaatttacgccatgaaagtggtgaagaaagagctggtgcatgatgacgagctgcagacattcaatactgcctcaccttgtcaagatgtcaaacagctgac

SEQ ID NO: 852244 - DNA, 98 bp, Homo sapiens
gggccgtcttcctcatccttccttttctcggggctcccgtgggtaccgagttttggcaattggggatgaaaaagatcaaaccaggaaagaggatgaac

SEQ ID NO: 852245 - DNA, 98 bp, Homo sapiens
aggagactggctacacctacatccttcccaagaatgtgcttaagaagttcatctgcatatctgaccttcgggcccaaaagtttgcctgcaatggtact

SEQ ID NO: 852246 - DNA, 100 bp, Homo sapiens
gctatggattcattgggggcagctcagcagagccagggttagtggttacttggatgattgtacctgtgatgttgaaaccattgatagatttaataactac

SEQ ID NO: 852247 - DNA, 100 bp, Homo sapiens
gacttcagattcgtttctgagatttccttcgtccctgacatcatctctgtgcactgataataaccctgcagggtatatgagtgtaacaaacgctgcaaat

SEQ ID NO: 852248 - DNA, 100 bp, Homo sapiens
tttatcaaaggagcagggaagaaggaatcatcgaggcatgggggtccacactgcaatgtttttgtggaacatgctttgaagattatgaaacagatgaacc

SEQ ID NO: 852249 - DNA, 100 bp, Homo sapiens
gtgaactctgtccagttttcaaaccacacagaatcaaaaagaccctctggctgtggacaaaataatgaaggacctggaccagtgtagagatggcaaagtg

SEQ ID NO: 852250 - DNA, 100 bp, Homo sapiens
ggtctatcagtgctgaaaaccagagaccaagagaggatgcagtgaaatatcttgcttctaagaaggagtacttcaagcaatatgaagtagggctccaaaa

SEQ ID NO: 852251 - DNA, 100 bp, Homo sapiens
gatcgctgtctgtggtcactactgtgtggggagttggcaacgcgacacagagccagctgacctgatctccagcttcctgctcatcaccatgctcttcatc

SEQ ID NO: 852252 - DNA, 100 bp, Homo sapiens
gatgttttggcgagagatgtattcagtggaggaagctgctgctgtgacttactcgaagcctcgattggccacattttggtactacgccaaggttgagctg

SEQ ID NO: 852253 - DNA, 98 bp, Homo sapiens
aaactgaagctgactgcatcaacaacatcaatgacttcctgaaaggatgtgcaaccctccaagtggaagaaatgaaaccaatttctacaacataggaa

SEQ ID NO: 852254 - DNA, 98 bp, Homo sapiens
agaaaatcattgcagacattaagaagatggccaagcaaggccagatggtactggaagatgctcacagagatgccaacctgcaccatgtagcttgtaat

SEQ ID NO: 852255 - DNA, 99 bp, Homo sapiens
tcccggagggagacgcgctgccgaggagaacccagcgggcatgctggaagatggactgccctccaatggtgtgccccgatctacagccccaggtggaat

SEQ ID NO: 852256 - DNA, 100 bp, Homo sapiens
taagtgatgttaatgatgatgtcaggagggcagcagtagaatcacttgggttcattctattcagattgtgcttcaagaagaccatagggaagaacgcatt

SEQ ID NO: 852257 - DNA, 100 bp, Homo sapiens
atttatgattccctggattatgcaaagaaaaatgaacccaaacatagacttgcaagagatgtgggctctcttgatgagaagatgaagagcttggatgtga

SEQ ID NO: 852258 - DNA, 131 bp, Homo sapiens
ccaaagaaacctgtaagttcttaccttcgattttctaaagaacaactacccatatttaaagctcagaacccagtgatgtcttggcattgcccattttcaagcaggaagattccagccttccattggatggt

SEQ ID NO: 852259 - DNA, 100 bp, Homo sapiens
cgccatccgggaggcccagggaagattttggggtaagtgcgttcctagcaacagggggtgatgttacccgaaataaagtaagaaaaacattcgttggcac

SEQ ID NO: 852260 - DNA, 99 bp, Homo sapiens
gtctctaacctctgaccctctttccccagagcgaaggtctcacgaggtcaacccagcagcgcatctcacagcgagaaaatgtcattgaatataaacact

SEQ ID NO: 852261 - DNA, 100 bp, Homo sapiens
ctctttggggtgaaatgtgaggcgtgtcaccagtttatcacagggaaagtcctggagactaagcctggagtaattcgcccagtacctgtaaaatccagaa

SEQ ID NO: 852262 - DNA, 100 bp, Homo sapiens
tgctggaacttgtgattgagcagtttgaagacttgctagttaggattttattactggcagcatgtatatcttttctgtttttggaaggaagaaagatgga

SEQ ID NO: 852263 - DNA, 100 bp, Homo sapiens
caagagtcctcaatccaacagcccagtgcttctgtctcgactgcactttgagaaggttcagcctggagaaggaaataaagctgctttcaatgacatgaga

SEQ ID NO: 852264 - DNA, 100 bp, Homo sapiens
gtggaagggctccttcaagcccagcgagcatggagaaaagccttacagatgctcatgggaagggtgtgagtggcgttttgcaagaagtgatgagttaacc

SEQ ID NO: 852265 - DNA, 100 bp, Homo sapiens
agatttatcttttggatcacaaatagaattcagctgttcagaagggtatgttgagtctaaaaaggacagagtcacagtagtcttcagcacagtgtttaag

SEQ ID NO: 852266 - DNA, 98 bp, Homo sapiens
tctggaggagccttctcaagaacagaggtcctcattcccacgacccgatgcaactcccacaaggagaacatccagggccagctcaaggttcgcacacc

SEQ ID NO: 852267 - DNA, 99 bp, Homo sapiens
ttggatccactggccagtgattcacgaaaacgcaaattgccatgtgatactccaggacaaggatgttggggatcagccaggtgaggtaggttattcagg

SEQ ID NO: 852268 - DNA, 100 bp, Homo sapiens
acaggctaccaagtccgtgctgtttgtgtgtctggcccacaccagttatcctattgaaagaggggactgatagctcccaaggcatcccccagcttgtgag

SEQ ID NO: 852269 - DNA, 98 bp, Homo sapiens
acagcccccgaaaacgctacgtgagctgggccctgggccagaggcagaaaacggacggaagaaaaggtctggccgatggcaaggctgggacttggaat

SEQ ID NO: 852270 - DNA, 98 bp, Homo sapiens
cagaagaggcagcatgcggaaggcattgctgggagcctgaaaactgtgaatgttaattggccttggtcctcacagctccaaaaagaaacaggatctcg

SEQ ID NO: 852271 - DNA, 99 bp, Homo sapiens
gctatgtggatttcagactggcctagccagcccccacaatcatatccctaaagaagtggctgacatctttaacgcccccagtgatgatgaagagtttgt

SEQ ID NO: 852272 - DNA, 99 bp, Homo sapiens
ccccacttggtgaatggagatgcagctcagcagtactgccaaatctgtcgaaagggagataatgaagaactgcttcttctttgtgatggctgtgacaaa

SEQ ID NO: 852273 - DNA, 100 bp, Homo sapiens
ggaatgatattgaaaaaatcgtctgtctcctgttttctaggtggaaagaatctgatgagccttttaggcctgttcagggcttcctactatgagatttcag

SEQ ID NO: 852274 - DNA, 100 bp, Homo sapiens
caaggcgcttcccctttccagagagccagaaagaagaatactcccccagttgcaagaggcgcaggaccgtggaagacttcaacaaattctgcacctttgt

SEQ ID NO: 852275 - DNA, 98 bp, Homo sapiens
agaagcggctttcgggaaggaaagtgtgatctagtaggtggaatagtcctctccaaactttgacctgagctgggaagttatcaattccaaaccagatg

SEQ ID NO: 852276 - DNA, 98 bp, Homo sapiens
aaacatgctgaccgctcaagagattctacatcagtttggtttcactcagaccgcgatctattgggcttcctgatgtccattcaggatatgggtttgct

SEQ ID NO: 852277 - DNA, 99 bp, Homo sapiens
tggtgaccaacttgctgcggtttttgttcctggggctgagtgccctcggctctgcgcgcctctctggaaatgaagtgtaagtgccatggggtgtctggc

SEQ ID NO: 852278 - DNA, 98 bp, Homo sapiens
agcgaaggattgctatccagaggagcgttacctgggtggcatcaaaaagcggcgccgaacgagacatctcaatgaccggaaatttgtttttgagtggg

SEQ ID NO: 852279 - DNA, 98 bp, Homo sapiens
cgagcagctcttcttcgtccgtttggaaaattgcctaagaattatgacccaaaagttaccccagatccagaaagatggctgccaatgcgagaacgttc

SEQ ID NO: 852280 - DNA, 98 bp, Homo sapiens
tccagcagaccataagggataacctttaccgccatgctgtgccttctattgacctgaaaagtggttctggaaaagtgtaccaaggccctgcaaaaggt

SEQ ID NO: 852281 - DNA, 100 bp, Homo sapiens
ctttagaaaatctcatcatggaaatcacagcacctgattcccaaggcaagacagacttgaaactgcatctgcagagcactgattatggtaacttcctggc

SEQ ID NO: 852282 - DNA, 98 bp, Homo sapiens
tgcagcagaaacagaaacgggccaaccacagagagagaaataagaccagagggaagatgatcaccgataatctggtgggccctttattgaccaggttt

SEQ ID NO: 852283 - DNA, 98 bp, Homo sapiens
aagacgcggtgggccgcccctccgggtgatacaattctggagactggagaagtaattccaccaatgaaagaatttcctgatcaacatcattaaagatt

SEQ ID NO: 852284 - DNA, 100 bp, Homo sapiens
ttcatcgccctggctctgaatggctttggtgggatgtgtatgaccttcacctcattaacagaatactcccccagttgcaagaggcgcaggaccgtggaag

SEQ ID NO: 852285 - DNA, 100 bp, Homo sapiens
ctcaatgtcaaatgggaccggattgccccggagacccaaaggagtaaaggagcaagatgtgtacatctgtgattatcggcttgacaagtcagcacacctg

SEQ ID NO: 852286 - DNA, 136 bp, Homo sapiens
ttccagacctggatggtgcccgctgtgcgtgtggacttctacaatgcagacgagctcaaggaatggcatcaccagctgccggatgcggactgagagtgagccatcttgtggctccccagtggtcagcggagacccc

SEQ ID NO: 852287 - DNA, 98 bp, Homo sapiens
gcagcctccacctcccaggctcaagcagtccttcccccctcgccctcatgaatagctgggactacaggcttgcagccaatttactggagcagggatga

SEQ ID NO: 852288 - DNA, 99 bp, Homo sapiens
cggagttgctgggtccaccgacccttaccctcagcgagagaagtaaccccagtgcggattttccatataatccaggacaaggccaagctataagaaatg

SEQ ID NO: 852289 - DNA, 98 bp, Homo sapiens
gtactcttattgattcacttaagaaaactcagcctgagaatgttcctctgtgacgagggtgcaggtatctctggggactacatcgatcgcgtggacga

SEQ ID NO: 852290 - DNA, 98 bp, Homo sapiens
aagcaacagccactagtgggtttgccagtggaatgccaggcttcccgtatccagcagccaccgccgcggccgcctaccgaggggcgcacctgcgaggc

SEQ ID NO: 852291 - DNA, 100 bp, Homo sapiens
gcctcctgagtagctgggactgcagctcccctttgccttccgccatgattggaagcttcctgaggcctccccatagtgcagatgccagcactatgcttcc

SEQ ID NO: 852292 - DNA, 98 bp, Homo sapiens
cggatcaggagccgccgccgccatatcagtagatatgtttgacgacttctcagaaggcagagagtgtgtcaactgtggggctatgtccaccccgctct

SEQ ID NO: 852293 - DNA, 51 bp, Homo sapiens
acagaagcgactttggtgagactctggccggaaggtggtggtcgtacgctg

SEQ ID NO: 852294 - DNA, 100 bp, Homo sapiens
ttttatctcatctggcttggcgcctgaggttctcccattaggttaaaaatctgtaagagcctgattttagaattcaccagctcctcagaagtttggcgaa

SEQ ID NO: 852295 - DNA, 100 bp, Homo sapiens
ataaagacacttatcttgcccaagagctgggtgcatgaatacctcagaagtaaactctgttcactgtatgaaaatgactgcatatttgacaaatttgaat

SEQ ID NO: 852296 - DNA, 100 bp, Homo sapiens
agagaatgagccagagggacacgctggtgcatctgtttgccggaggattacgatgaggacctggtgcaggaagcttcatctgaagatgtcctgggcgttc

SEQ ID NO: 852297 - DNA, 98 bp, Homo sapiens
gaggctggccatccaggagatcatgtcgctgaccagcccgtctgccccgcccacatctagaacgggaagtcgagacaacatgagtgtgattttgatct

SEQ ID NO: 852298 - DNA, 98 bp, Homo sapiens
gagaaagatgtgctgtggttccggcccactctcctcaatgacactggcaactatacctgcatgttaaggcacagtaaccttggtgcacgaccgaaagg

SEQ ID NO: 852299 - DNA, 100 bp, Homo sapiens
agaaggtgaactgtctggataagccaatgaagagtattaccagctgctgatgtccagcgagggtcacccctgtggagcagacgtgccctcctacaccgtg

SEQ ID NO: 852300 - DNA, 100 bp, Homo sapiens
tccgaaaaaggaagtaaaaaaattaatttgtcatcagatcaaaataagtctgtttctgaaaggtcgagtctatgctgtcttgtcaaagagagaaggtcgg

SEQ ID NO: 852301 - DNA, 100 bp, Homo sapiens
gtcttctgcctggtggtggactcctgcctactcctaacccacttacccagatggacttattttgagtcacttgccaaatggcccaactgctcattttaaa

SEQ ID NO: 852302 - DNA, 98 bp, Homo sapiens
cagctcattctcctaatgttttccttcagcaaggacaaagacctaatctgggagcctgcaagtgacaacagcctttgcggtccttagacagcttggcc

SEQ ID NO: 852303 - DNA, 98 bp, Homo sapiens
ggttggcaccactgaagtgaccgaatgaggttgaagaaatatggagatcaacacaaaactgctcatcagtgttacctgtatcagctttttcacctttc

SEQ ID NO: 852304 - DNA, 100 bp, Homo sapiens
tgactcactggtacaaacagctgttgaagctcagagctggagaacgtgaagctcttggagcaatttgtctgcgcccacacgggtatcatcttctatgctc

SEQ ID NO: 852305 - DNA, 100 bp, Homo sapiens
ttatactcaaggcaaatgaacttcttcagcaaatgttctgaaaaagactctgcatgggaatggcctgccttacgatgacagaaatggagggaacatccac

SEQ ID NO: 852306 - DNA, 100 bp, Homo sapiens
gaagtttgagagaagtttaagagaagaaatggacatgattgcctaaatcagccaaacacagggctggaagtgatggagagagtattggaaactgtccctt

SEQ ID NO: 852307 - DNA, 100 bp, Homo sapiens
gacctggagctgggccaggccgtggagggcttcataaacttcacttaccaaatacttcaagggattcagaaacagccaagccttctgtaaatgggcatca

SEQ ID NO: 852308 - DNA, 75 bp, Homo sapiens
ctgtgatgtaaatgactgtgtccagcaagttgtggaacttctacaggaacgggcagtaacagagaagaattttga

SEQ ID NO: 852309 - DNA, 100 bp, Homo sapiens
aaacagcagcttaaagatcagtatttcatgcaaagacatcagctacttaagcgccacgagaagtgtctgccaatgattttggacaacaaactgagccacc

SEQ ID NO: 852310 - DNA, 98 bp, Homo sapiens
cagactacattttcctcacaactgttctttccaatggctctgagagattcctctgcgaatctgtttttagctatcaagtggcatccacgcttaaacag

SEQ ID NO: 852311 - DNA, 98 bp, Homo sapiens
gctgtaaagatggcggcttcctagtgagtcggcggctgatttagaaggaggttcaggctacggtgagccgaaggagcctgctgcagtcggtccaggag

SEQ ID NO: 852312 - DNA, 100 bp, Homo sapiens
cgccgagcgctactcgcaggaggtcttcgggagtgcatccgccccaacccttttccccctcgtctcctgtgagaattccccgtcggatacgagcagcgtg

SEQ ID NO: 852313 - DNA, 100 bp, Homo sapiens
gggagcgtccggagctagctggatcctctaggcaggtgcaaacagctgcacagcaagtggcagaggataaatttgtttttgacttacctgattatgaaag

SEQ ID NO: 852314 - DNA, 100 bp, Homo sapiens
gacaagtccgggagctgggcggccatttaccaggaagctgttttaggttatgtgaaagagatgtttcctcatctctaaggcttaccagaagctctgattt

SEQ ID NO: 852315 - DNA, 100 bp, Homo sapiens
ccattcatgtgcctccaggttatatctcacaggtgattgaagtgggaaaaaatgatgacctggaggactctaagtccttaagtgatgataccgatgtaga

SEQ ID NO: 852316 - DNA, 98 bp, Homo sapiens
ggaatgcaattctgccaccatgatggaagtgttatccaagataaattctgtgggattataaacatttcagtagaaggcctgcatgatgtcatgacgga

SEQ ID NO: 852317 - DNA, 100 bp, Homo sapiens
tgtccaggctggtctctactcctgggctcaagcagtcctcctgcctcagtctcccaaagtgctggaattacaggggactcatgcccgttgcacagcagcc

SEQ ID NO: 852318 - DNA, 98 bp, Homo sapiens
aacagcgacgagagatccgtgcaggcacagccttttacattgatcaggtccaaactgctttgcagaaaccgcggtgatccctgctggcagagaagtga

SEQ ID NO: 852319 - DNA, 100 bp, Homo sapiens
tcactacagccagcctcctggactatgacactgtggctggggcagacaagtttggcaacatatgtgtggtcacggtctagatcacattctcgatccagag

SEQ ID NO: 852320 - DNA, 100 bp, Homo sapiens
gatgattcagccttctgcatctggatctcttgttggaagagaaaatgagaatgaactctggaagcccagccagggacaatgcaccttcacagagattctg

SEQ ID NO: 852321 - DNA, 98 bp, Homo sapiens
taccactactacagtcgaatggccaactatcggaacacgagcgagattcctctggttctggtgggaacccagggaggccacttcatctgtaaaacctt

SEQ ID NO: 852322 - DNA, 136 bp, Homo sapiens
gtgaaaaatacttcagcagttatggactcatctgtcattcaaaggaaaaaagtagctgtcattggtggtggcttggttatttggaaatagcggtgcttgcagcgcttgcggacagtcgattcctgcgagtgaactc

SEQ ID NO: 852323 - DNA, 100 bp, Homo sapiens
tctattccggccacccattgatttgatgcataaaggcagctttgaaacagaagccacaagcagcccagccctccttaatcaacttcaaggagcaccttca

SEQ ID NO: 852324 - DNA, 98 bp, Homo sapiens
gaccttgagtgcagctccccctataagcctcggcctccacagccaaacaggcaggactcgtgaaattgtgatgccttctaggaactacaccccataca

SEQ ID NO: 852325 - DNA, 100 bp, Homo sapiens
cgacatgttcatttcctcaacttctcaagcttcaggatgagttagagaaaggtgaacgggacaatgcagaactgcaggagtttgccaacgccattcttca

SEQ ID NO: 852326 - DNA, 98 bp, Homo sapiens
aacctcagccctaacggtggtggagaacccaaagaattaccgaattgatgggatatgagccagaagaacttttaggccgctcaatttatgaatattat

SEQ ID NO: 852327 - DNA, 99 bp, Homo sapiens
gaacttgcagaaatcacattggaccctcctcccaactgtaggtatgtaggaaaccttcccagaatatttgactactcgcctttagatccaacacaagat

SEQ ID NO: 852328 - DNA, 74 bp, Homo sapiens
tgcctgccaccatcttcctcctcttcctgctgtctgctgtctacctggacggagtcttgctttgtcgaccaagc

SEQ ID NO: 852329 - DNA, 50 bp, Homo sapiens
ccaagctgggaatctgtgctggccttcagccagacgaggacagccggctg

SEQ ID NO: 852330 - DNA, 115 bp, Homo sapiens
ctagcaacaggatcaaaagatacaacagttatcatatggcaagttgatccggcgctaatgtgcatgctacaacagcaacaggagacacagccttaacctatgcttgtgaaaatgg

SEQ ID NO: 852331 - DNA, 98 bp, Homo sapiens
ccacgcagaggacgccggaacaccctggaagccgagaaatggaaattcgaaatgagtcccatgactatcctcatagagtggccaagtttccagaaaac

SEQ ID NO: 852332 - DNA, 100 bp, Homo sapiens
agcaggaggcggagggagagcaggagccactgagatgaggaggcgtcgcgcgcgcctgtagctcgcgggcctcgcaggaggagttggatttgtcttctag

SEQ ID NO: 852333 - DNA, 100 bp, Homo sapiens
tgcaggaatatgttagcgttgtatcttgggagaaagacacagtctccatcatcccagagttgcctgagtggaatttcgatggctctagtactttacagtc

SEQ ID NO: 852334 - DNA, 98 bp, Homo sapiens
atggcaacatcaggtgactgtcccagaagtgaatcgcagatcctgaggaggatgaaggggctggccctggaggccgagagtgagctggagagacaaga

SEQ ID NO: 852335 - DNA, 100 bp, Homo sapiens
gttcagattttaatgaagattgaatatatgcagcaaaatttagtaaggactaaaatgtagcagttgtgaaccttttccagatggagccacgaacaacctc

SEQ ID NO: 852336 - DNA, 100 bp, Homo sapiens
tcacacgtgttcttcacactgcacatctaccagtaccggatggagaagagcgggaaagggggaagtgatactgtgcttgtccaccgagttcacagttatt

SEQ ID NO: 852337 - DNA, 100 bp, Homo sapiens
agccgcgcctcggccccatggacgccctgtgcggttccggggagctcggctccaagttctgggtacaaggaaatggtagaactagtgatctcacccagcc

SEQ ID NO: 852338 - DNA, 100 bp, Homo sapiens
aaacagattggtgatttctcagaaagataaacatagaactgtcatctgacccagttattccactcccaggtcatcagaagattgagagaaagaggagaac

SEQ ID NO: 852339 - DNA, 100 bp, Homo sapiens
aaaaagtttgtagaatggctcaaaaatgctgaagaagatgatgttgaatttgaagtatcatcggaccgacggactgggaaacccattgctgttaaactgg

SEQ ID NO: 852340 - DNA, 100 bp, Homo sapiens
tcctgctgtaaggagtgcatgctgtgtcttggggccctttgggacgagtgctgtgactgtgttgaataataataacctggatgcctgctgtgctgttctc

SEQ ID NO: 852341 - DNA, 100 bp, Homo sapiens
cccagagatgcccagctgtgaccagtgctccgcttgcagcaaattgtggctactaatttgccccctgaagatcaagatggctctggggatgactctgaca

SEQ ID NO: 852342 - DNA, 100 bp, Homo sapiens
cttacttactgtcctcaaatacgtatattactcttccatggatgccccttgataacagatttatgtgatcagtttggctgaaccccgtctgcccctgcag

SEQ ID NO: 852343 - DNA, 100 bp, Homo sapiens
caagttggcttatgagtggaacatggctagcaggaatgcttactgttgcgtggttcgttattaacagcaaatgcagccctgaggatttggctactgcata

SEQ ID NO: 852344 - DNA, 98 bp, Homo sapiens
tttcttcgtgagaaagaaatcgacgtgctgttttcataggttggaaaatggatataccttatttgattatgatgttggactgaatgatataattcagc

SEQ ID NO: 852345 - DNA, 100 bp, Homo sapiens
catgaagctaccggccagggttttctttactctggggtcccggctgccctgtggcctcgctcctcggagggaattacatgaacgacagccttcgcaccga

SEQ ID NO: 852346 - DNA, 100 bp, Homo sapiens
tgaaattcagagaattaagacaactcaacaaaacattagtgcgtttgtgaagaaatatgggaacctttttagcttggagcttggtgacatatctgcagtt

SEQ ID NO: 852347 - DNA, 100 bp, Homo sapiens
accagggtttggagataaaacatttgttgttcagagtatcaatgtccaaatggatgaaaatacactccatgaaattctaaatgaagttgatttgaataaa

SEQ ID NO: 852348 - DNA, 99 bp, Homo sapiens
gaagaggcccaccctggagtaaccctcactggagaatccagaggtcatcatcagatttgaaatatttaaagtggatacaaaactatttcagcaatgcag

SEQ ID NO: 852349 - DNA, 135 bp, Homo sapiens
tttaaacttaaggaagattgctttggaaggagcaaatgtaatttataaacgtgatgttggagatctgaacgtctatgacactctttcgagctgacacagtgaagaacatagaaggagaactcacccagtctgcca

SEQ ID NO: 852350 - DNA, 99 bp, Homo sapiens
gagaggccaccgagagacctccatggtccatgaactcaaccggtgtttcaggcctcacctgaagatcatgaaaaatacggtggggatccacagaaccct

SEQ ID NO: 852351 - DNA, 100 bp, Homo sapiens
gctgaaatggactggcccccttgagcctgtcccaagccctggtgccaggtgtccatccccgtgctgagagttgtggaaagtaaaaatgtagccctaccaa

SEQ ID NO: 852352 - DNA, 101 bp, Homo sapiens
ccctcagttaccaatccagaaaaccttccatcgctgccagatattccacccatacagctgtttgagatggagaacgtttttactgtgtcatcagatcctca

SEQ ID NO: 852353 - DNA, 98 bp, Homo sapiens
ctgacttacctaggaatgagagggacaggagtatctgaggatggagaactcagcacggaacggaagccgccccttttcaacatgaatgcaatgagtgc

SEQ ID NO: 852354 - DNA, 99 bp, Homo sapiens
actgttaaaggcgacgtgcacgacataggcaagaacatagttggagtagtccttggctgcaataatttccggttgcccctctacctggcctccctcttc

SEQ ID NO: 852355 - DNA, 98 bp, Homo sapiens
gacaataaagcttctcctttgggttgtactcatagattgtgtaggcgttggtcttctgatagcaactttaatgtggactcaacgatgactctgaataa

SEQ ID NO: 852356 - DNA, 100 bp, Homo sapiens
catagcaacgggtgaaaggccacggtatttaggaatccaaggagataaagaatactgtattactagagttaaacatgaagtttctggagagacagtggta

SEQ ID NO: 852357 - DNA, 98 bp, Homo sapiens
tcagttatgcgccattcacttttgaagggaatttctgcccagatagtgtctgcagctgatctatctggttcaatagatgacctccccatggggacaga

SEQ ID NO: 852358 - DNA, 98 bp, Homo sapiens
ctttattattggaaatcttcaagttcaggaaaggtcaagagcaatctgaatccaaatgcaaaggagtttgttcctggggtgaagtacggaaatatttg

SEQ ID NO: 852359 - DNA, 98 bp, Homo sapiens
gtgggcataggaccctccgagccagacacttctgagaaattcatcaggctgtgaagcgcgccgtgatgaatatcgaacagagtttaccacagctttgc

SEQ ID NO: 852360 - DNA, 100 bp, Homo sapiens
ggaagatcctggaggtggatctgaagaacgggtggctgactgttcttgggatgaaacaataaagatctatgaccctgcttgtcttactattcctgcttga

SEQ ID NO: 852361 - DNA, 100 bp, Homo sapiens
gagagatccccctaactccaccgaacgatacacacgttggatcaaccagctgacgccggagcagctcctaacccaggtggacgacatccttggagaaggc

SEQ ID NO: 852362 - DNA, 98 bp, Homo sapiens
cgggtgcagacagcaatggtgagatgagtcccgcagagctgctgcacttccagcagcaacaggtctcttgccctgtgcagcttcctgcagactggact

SEQ ID NO: 852363 - DNA, 100 bp, Homo sapiens
atcgcccactccagaagtagcatggaaatggagggcatcttcaaccacaaaggagtcttttagtcctgctatacagctgcaccttgtacatcaagctcca

SEQ ID NO: 852364 - DNA, 98 bp, Homo sapiens
ctggacacccagcggtctgacatcgcgacgctgctcaaaacctcgctccggaaaggggacacctgaattctccactttaccaatacttacaggatctg

SEQ ID NO: 852365 - DNA, 100 bp, Homo sapiens
aagaaaaaaaacatttagatataaaggaaaacagcacccatttttctcaacctaacagtacaaaagtccagaggcatttcttgagacttaaagtggcatt

SEQ ID NO: 852366 - DNA, 98 bp, Homo sapiens
ctgcaggaagaagaagggacacctttcacagctatcagggaaggccactcgaccggatatgatcaggatcttgtcagcagcccttcatgtagtgctaa

SEQ ID NO: 852367 - DNA, 133 bp, Homo sapiens
aaatggcttgtgctgagttttcttttcatgtaccaagtcttgaagagcttgctggaggtgtcccagctgcatctctggtgacccctgctgatgtcatcaagacaagactgcaggtggctgcccgcgctggcca

SEQ ID NO: 852368 - DNA, 98 bp, Homo sapiens
gacggggagctgaacgtggacagcctcatcacccggctgctggagggtttgatctgtggatgaaatgaatcatgattttcaagctcttgcattagaat

SEQ ID NO: 852369 - DNA, 98 bp, Homo sapiens
acaagacttccgtcacccgccaggcggattttgttcagactccaatcaccggcatttttggtggacacatcaggtcctctggtgatgttcttgagacg

SEQ ID NO: 852370 - DNA, 101 bp, Homo sapiens
gagatcagaagggaccagctggaggtggaagagcagctgatccacgtacgtgcacgacgggagcaagacactgacagacagttttgtcctgatggctaacc

SEQ ID NO: 852371 - DNA, 100 bp, Homo sapiens
caggcgctgtcccccaaactctacgagcctgatcagctccaggagctcaagactgcccttgaagtatgcagagcatttttacaggaagataaaggcgaag

SEQ ID NO: 852372 - DNA, 99 bp, Homo sapiens
gactgaagaacagaaggcgatcaaggccaagtatccgccagtcaataggaagtacgagtgtgattgcttctgcaggaagcctttttggtggcatggtcc

SEQ ID NO: 852373 - DNA, 101 bp, Homo sapiens
ccggctcgccaactcggctgctctgggggattcgtgcgcggtaagaagctgcgcggtagcgcggtgaggccttctaccttggatgcctatgtttttggttt

SEQ ID NO: 852374 - DNA, 100 bp, Homo sapiens
atgtcctctgcgctggaatcagtcactgtcagcgacagacccctcggggtgtccatcacaaaagccgaggtgacatctgttcccgagctgttcctgactg

SEQ ID NO: 852375 - DNA, 99 bp, Homo sapiens
aaatcaattgtaaagtcatcgttggacttgtgcaccatggacaattttgctgagggagatttcactgtggcggattatgccttgttagaagattgccct

SEQ ID NO: 852376 - DNA, 100 bp, Homo sapiens
actttccgactgcgacgagggagtcgatttacctggagaaaggagtgcctggctgttatggaaagcctgattacatcaaccccagagccgtgcagctggg

SEQ ID NO: 852377 - DNA, 100 bp, Homo sapiens
gaaaaacggcaacgtgtaatcagaaggcacagattagaggaaggaagagacattgaaaagtggcctgacaatggtagggaaagtggtgactcagctgaca

SEQ ID NO: 852378 - DNA, 100 bp, Homo sapiens
aaatgcccgggctgctgtagcaggagaggatggcagaatgattgctggccaggttttagacttgccttcaaggtgtgcaagtaaggacttatctccagaa

SEQ ID NO: 852379 - DNA, 99 bp, Homo sapiens
tgtggatttattaacacctcttgccactcagctgacatatgaaggactcattgatgaaatttatggcattcagaacaggcagaagataagattattgga

SEQ ID NO: 852380 - DNA, 100 bp, Homo sapiens
ctattactgtattatcaccaccccagatgacctggaggggaaaaatgaggactcagtggaactgctggtgttgggaaccaaagaggttgttgtaaatgtg

SEQ ID NO: 852381 - DNA, 121 bp, Homo sapiens
aaactgtattcacctattgcctgatctccatgcattagaacacacatactctgataaagatggtcagtaggacagaaggtaacattgatgactcgctcattggtggaaatgcctccgctga

SEQ ID NO: 852382 - DNA, 98 bp, Homo sapiens
ctaagcgaggggatcctcatgagttaagaaacatatttctacaggtgccctaatgcatgagttatcaaatgatggtgctcgtagacaatttgaatttt

SEQ ID NO: 852383 - DNA, 98 bp, Homo sapiens
tttgatattaacaactggaggaacaggatttgcaccacgagatgtcactccagaggtactaggttttgacaagcttgcatcatgcgtgagtataagct

SEQ ID NO: 852384 - DNA, 100 bp, Homo sapiens
agtcaagttcataaagaatgtatgaaggttctcaacttgaaacacggcaaatggatacatcttgttttttcatattacatctacaagaggggacaagtac

SEQ ID NO: 852385 - DNA, 100 bp, Homo sapiens
gaatgcctggactctgctcagagagatttgtatagagatgtgatgttggagaactatagcaacttggtatcactaggagttggtgaccttcagagatgtg

SEQ ID NO: 852386 - DNA, 100 bp, Homo sapiens
ttctccaccaggatcacgtttgagtgtgctcagatatcgcggagtttaagagagctgtgaaagtagcaacaggacaagaactctcaaacaatattttgga

SEQ ID NO: 852387 - DNA, 50 bp, Homo sapiens
acaattctccaagtaaacaactgataacatttggtcagccaggcttggac

SEQ ID NO: 852388 - DNA, 100 bp, Homo sapiens
ggtgattgaggacaagaccatcgagctcatggactttgtgttttatgccccacgtctgagaatcaacaagcggatcctgcagctctgcatgggcaaccat

SEQ ID NO: 852389 - DNA, 98 bp, Homo sapiens
gtcctcaaccacctcttagtagggcagaagccattaagcagccttcaaacagtggccgagctgcagaactccttgccaaagaacagggaacagtgcct

SEQ ID NO: 852390 - DNA, 100 bp, Homo sapiens
atgctgaaacctgcccacagcagaggagcacctgtcagaggtaccaatcttgggaaaaagaagcaacacatttgtcatataccaggatgtggtaaagtct

SEQ ID NO: 852391 - DNA, 100 bp, Homo sapiens
ggaagagaaggaaaaactgctggccacagaacaggaagatgcggctgtcgccaagagcaaactgagggagctcaacaagaaacctctgcgccatgagagc

SEQ ID NO: 852392 - DNA, 99 bp, Homo sapiens
gtactcatggaaatgaaaagagaatactgtgtggctgacttcaaaagagtagtggattttctgaaagagaagcctgagacctgggaggaagctggagaa

SEQ ID NO: 852393 - DNA, 100 bp, Homo sapiens
cagagaatgtccccatcatgtacatctgccatgggatgacgcctcaggataatctacaggggtacaaaacccaaaacaaatttctaaataaggagatttt

SEQ ID NO: 852394 - DNA, 100 bp, Homo sapiens
agtgagcgagtcaggaacagccacgctgaaagctcggccaagagtccggcccctgctgaccttccttccgctgagtgaagtcaccctgctgagaaatgaa

SEQ ID NO: 852395 - DNA, 98 bp, Homo sapiens
aagacttcctcaaggactacagtatgcacttaatgtccctcagagagagatcatcattgcctgaatttagctttgtgactgcaagagcaagaccagtt

SEQ ID NO: 852396 - DNA, 100 bp, Homo sapiens
gacgggcgtcttctacctgacgctcgtcctcatcctggtcactagcggactcttcttcgccttcgagaatttatcaaagagctgctttctcggataagag

SEQ ID NO: 852397 - DNA, 98 bp, Homo sapiens
gacgcgcggcggcaccgggaggccgggccgagcgagagaagacacggttcaatgtgtagaccttctccctctccagtgtctccagcctccaatcccag

SEQ ID NO: 852398 - DNA, 100 bp, Homo sapiens
ctggggaccctgagatcgtcaagtctcccagcgaccccaagcaataccggctgattcaccccaagagtggccgttcctaccacgaggagttcaaccctcc

SEQ ID NO: 852399 - DNA, 98 bp, Homo sapiens
gaggaggccaagccggaggtcgaggtcgagcccgccaagcaccgagtgtccttccagcccaaggcttgtgcagacataagagccagttcagtgttttg

SEQ ID NO: 852400 - DNA, 100 bp, Homo sapiens
ttcgagcctccggtggaggagagcgccttggaacgccgacctgaaaccatctctgagcccaagacctagactaccgaccagactcccggaaatcatgttg

SEQ ID NO: 852401 - DNA, 100 bp, Homo sapiens
tggagcgcgccggctccctatctgggaaacaaaaataacaagcctttgtattcatttgaagataatgcagactatgtttatgatgttatgtggtcaccta

SEQ ID NO: 852402 - DNA, 100 bp, Homo sapiens
acgaggattatacagaaatttgaaaaccctggggttattagtaaaacgattggagaaaggtggtaaagctgaacatgaaaatctttttcgtgagaatgat

SEQ ID NO: 852403 - DNA, 100 bp, Homo sapiens
cgagagatcatccagcccaccgtagtggatcccgtcagcttcatgttctggaagggcacttcctcacatgccagcgcaactccccaatacctcaatgagt

SEQ ID NO: 852404 - DNA, 100 bp, Homo sapiens
gaatggtgatcgttgccctccagctcatcatgtcactacagtgaacagtacaaattgtaagaagacaccacctgaagattgtgagggtccttttagacct

SEQ ID NO: 852405 - DNA, 98 bp, Homo sapiens
cggagtcccaatgaaacgggcagccatggccctccacagcccgcagaaacctgaatagagtcaccttgtaataactgggaactcttcccctgaagaca

SEQ ID NO: 852406 - DNA, 100 bp, Homo sapiens
taagaagaaatgctaatgtcaacctcaaaaaccagctccgggttgacaaatggtggggtaacagaaaggaactggctaccgttcggactatttgtagtca

SEQ ID NO: 852407 - DNA, 100 bp, Homo sapiens
gtgatgctggaaaatctcaggaatctggtctcattggctgcccatgatggggggagctttcatggactcgcccaacgaggacttcagcaccgagtactcc

SEQ ID NO: 852408 - DNA, 118 bp, Homo sapiens
gaaagtgaaccagtagtttggagaggccttatggtaatgtcggccattgagaaattgttgaggcaggagactttgaatgtgattgatcctggcttgatggacctaaatgggatgagtg

SEQ ID NO: 852409 - DNA, 100 bp, Homo sapiens
ttaaactggaagcaaaatgtccctaaaattgccaaggaactgggatttcaacctgaaagtggaggctgcgaaaataggtgcagaccatgaattacgtggg

SEQ ID NO: 852410 - DNA, 100 bp, Homo sapiens
cccccctctgcaacgggctcatcaactcctacgaggacaaaagcaacgacttcgtatggtgctattcaagtattgggaaagttcaggatgcctttatatc

SEQ ID NO: 852411 - DNA, 100 bp, Homo sapiens
tcagctttttgtgctgccagcaagaaatgatcagtagcaccagtgtttatgtttgtctttgatgataaaacaagacttgtagaccgagtcagacttaatt

SEQ ID NO: 852412 - DNA, 100 bp, Homo sapiens
gacctagacctggaatcgcccaagtccctctactcgcgagaccgagtgtgtcagcagccaggactttctctctgggtccccttccaaaacgcagccaccg

SEQ ID NO: 852413 - DNA, 100 bp, Homo sapiens
cggagaagaatcacgcctctctgcatagcacagctggacactggactggcggttcatggagagcaaggagaaggatcgccaggtgctggaggacttccca

SEQ ID NO: 852414 - DNA, 100 bp, Homo sapiens
aaaagtgtcaaacgcaggttctctctctattcagagttactggaggtgaactgtttgaagacatagtggcaagagaatactacagtgaagctgatgccag

SEQ ID NO: 852415 - DNA, 98 bp, Homo sapiens
atatgatcaactcctgaaagaacactctgaacttcaggtctctaattaacagaagatggcaaagcccagccacagcagctatgtccttcagcagctaa

SEQ ID NO: 852416 - DNA, 50 bp, Homo sapiens
tttccctctccctttccctaagatcaatgtccgagttaccaccatggatg

SEQ ID NO: 852417 - DNA, 99 bp, Homo sapiens
tcgactctatcaactggataaaagcactttcagcttctggtcaggactctattcagagactgaaggcactgaatgtatcctgtcaggtataatgtcagt

SEQ ID NO: 852418 - DNA, 98 bp, Homo sapiens
acaatgactttgagccctaccttactggacagtcaaatcagatttggacacctcccacactgagtccccaaccccccatgactcaaattcacaccgcc

SEQ ID NO: 852419 - DNA, 100 bp, Homo sapiens
gaaaagccagagcagaacgatgatgacaccataaaatctcaggaggatagaactggaggaacctccacttgttttggctgctgcaaatgtggtgagaaat

SEQ ID NO: 852420 - DNA, 98 bp, Homo sapiens
gacttcgatgatcgtgtgtcggatgaggagaagattttaccaaatgttgcaagaactctggagttcttatggtagtaaaatgccggaaagaaaattct

SEQ ID NO: 852421 - DNA, 100 bp, Homo sapiens
ggatcgtgcagaagatcttccaggtcctgggaactccaacaagggagcaaatcagagaaatgaacccaaactacacagaatttaaattccctcaaattaa

SEQ ID NO: 852422 - DNA, 100 bp, Homo sapiens
gaaaatcgtactggctggatgcgttcctcaagcccagcctcgccaggactaccttaagggactgagtatcattgggaacactgatatttgcatttaatgg

SEQ ID NO: 852423 - DNA, 100 bp, Homo sapiens
gtgtgcggctgttgcctggacgtttgtccaatccacgttgacatttgagggatcacagcgtgtggtttggtgcacctcgatttggaggaagtagggcagg

SEQ ID NO: 852424 - DNA, 100 bp, Homo sapiens
tgcctcagcctcctgagtaactgggattacaggtgacacccctgcgctttgggaaggacgtcgatgggaaatgccacagcctcacagcctcctatgtgcg

SEQ ID NO: 852425 - DNA, 100 bp, Homo sapiens
ctgaggccatgtcaggagacggagccacggagcagtctgaacaggaattaagaataactcaaagtgaatttgatcgtcaagcagagattaccagacttct

SEQ ID NO: 852426 - DNA, 100 bp, Homo sapiens
ttagtttgcaccgagagaccatttgcagcggggagaagaaatgggtgaccgttggtgacacatccctacgaatctacaaatgggtccctgtgacggagcc

SEQ ID NO: 852427 - DNA, 98 bp, Homo sapiens
cctacacgcttgaatgtgttcaagaatgatcaggatacttgggactacacaaaccccaatctcagtggacaagacacatcgttcatgtacatgatcgc

SEQ ID NO: 852428 - DNA, 100 bp, Homo sapiens
gcgggggagccccgggagccgcacgatgttgatggcatggacctgggcaaaaaggtcagcatccccagagacatcatgttggaagaattatcccatctca

SEQ ID NO: 852429 - DNA, 100 bp, Homo sapiens
ctgccgtgtgaaccatgtgactttgtcacagcccaagatagttaagtgggacatatctgaagagatggattaagaatgctttggattaaggattgtggag

SEQ ID NO: 852430 - DNA, 99 bp, Homo sapiens
actcttctccttcacagtaaagtggctgggtatgatgtgattgctcaagctcagtcaggtactggcaagacagccacatttgctatttccatcctgcaa

SEQ ID NO: 852431 - DNA, 100 bp, Homo sapiens
aaaagtatagatcctgtattaatggctcctacatgtgtgtttttggcatccaaagtagaggtcattagtaaagaagcccaactactggtatttacaatcc

SEQ ID NO: 852432 - DNA, 100 bp, Homo sapiens
gctttccagctccgtgagccgtgcactgcggacgtcgtcctcctccctgcaggctgatcagatgccatggacaatattaccaggcagaaccaattctacg

SEQ ID NO: 852433 - DNA, 100 bp, Homo sapiens
gagaagtcaccctccttcgcctcggagtgggatgagggaacaatggcaaaagcctttgatgaagcattttcctctgagacaacagcggcaatacctgaag

SEQ ID NO: 852434 - DNA, 100 bp, Homo sapiens
cacaatttctacagcagagaccttgagggatatctttcttcactcctcttcacttcttcagacctcagcagccatgtcgaagccccatagtgaagccggg

SEQ ID NO: 852435 - DNA, 99 bp, Homo sapiens
ggtgtttttccgtaagcatactcagggtattgtgtcactctgtctgctgtttgaaactcttcttcaaacttatcttccccaactcttttatcatctacg

SEQ ID NO: 852436 - DNA, 99 bp, Homo sapiens
agccatctcacatttccaagtacattctcaggtggagacctgatgactcactggttgtgtggaaggaagtcgatttgacccggctgtctgagaaggaac

SEQ ID NO: 852437 - DNA, 99 bp, Homo sapiens
gcggatccaagccatgattcccaagggtgtgcctgtggcattaagtggtagagacatgattggtattgccaaaacaggtagtgggaaaactgcagcctt

SEQ ID NO: 852438 - DNA, 100 bp, Homo sapiens
gtcccgaggaccaggggatgcgaagggaatagcgggttttgcagcaattgttgcatatggattatataaactgaagagcaggggaaatactaaaatgtcc

SEQ ID NO: 852439 - DNA, 100 bp, Homo sapiens
gcaaatgaagctctcgaggctgctaagagactaaggcctacaaagggagacatggaaatcccctttgaagaagtcctggagagggccaaggccggggacc

SEQ ID NO: 852440 - DNA, 99 bp, Homo sapiens
gcccgggtccccgcgttcacagccccagcgcaggatgcctttgtggaactgtacggccccagcatgcggcctctgtttgatttctcctggctgtctctg

SEQ ID NO: 852441 - DNA, 98 bp, Homo sapiens
ttattagccagttctacaaggaatcattgatgaaagttatgccttatgttgatatactttttggaaatgagacagcatttggctttatgtcccgagtt

SEQ ID NO: 852442 - DNA, 100 bp, Homo sapiens
gtggatttcagcctgcacggatggtcttgaaacacaaatggtttttgcacgtttcctgtggcagcctaagagggagtgtcatttcttcaatgggacggag

SEQ ID NO: 852443 - DNA, 98 bp, Homo sapiens
ccaggccaggggagggtggcactggctctcctggtccagctctcaggacaagaacaaagtgtgctgatatgaggccccaggattcctggcgaggtcct

SEQ ID NO: 852444 - DNA, 101 bp, Homo sapiens
ggaaggcatggaaagttccagccggttcgagagctaggtccctgtgcgttttattgcgacctgccggtgggaactttgtctccgagtcggagcagcatgga

SEQ ID NO: 852445 - DNA, 100 bp, Homo sapiens
cacttgcccttagtggccgtcttttgcctctttctctcaggctttcctacaactcatgcccagcagcagcaagcagggtcgacaagtgcccccaatgatt

SEQ ID NO: 852446 - DNA, 100 bp, Homo sapiens
cagccggcccttgttaactacaacagaccatctggcatcacgttgggtggtttccatttagaccgaggccggttcagaacttcccaaatgatggtcctcc

SEQ ID NO: 852447 - DNA, 99 bp, Homo sapiens
ttggagaactacagaaacctggtctccctagctggagttcaagagctggaatcacgcgtcctggtgcctggagatttattaattttgacagggaacaaa

SEQ ID NO: 852448 - DNA, 100 bp, Homo sapiens
tctagaaacactgatgagatggttgaattacgcattctgcttcagagcaagaaactacccgtgtgtaaaaagaagattggcttaaaatggctactgtgat

SEQ ID NO: 852449 - DNA, 98 bp, Homo sapiens
ctggtgcatctgtttgccggagggtatcattgcccagtgcctaagatcttttatgttcagctcactgtaggaaataatgaattttttggggaaggaaa

SEQ ID NO: 852450 - DNA, 100 bp, Homo sapiens
atctacaaccttcgatctcctgacgagtggcaattttggaggtagccccggttatggaggaggaagaggaggatatggtggtggaggacctggatatggc

SEQ ID NO: 852451 - DNA, 100 bp, Homo sapiens
caacaatgactcctccagctgacttgattgaaaaatgtgattgtcccctgggctattctggcctgtcctgtgagacgggtcttacccccttgatggaagc

SEQ ID NO: 852452 - DNA, 100 bp, Homo sapiens
acaagccgtggaataggtgtatcaagtaatggtgcaaagcctgaattgactggtctgagtgtctccaatggaaaggaccaacttgtagtgttccatacga

SEQ ID NO: 852453 - DNA, 99 bp, Homo sapiens
ctgctgctggaagtcacctatgaagccatcgtggacggaggttgggacaaacattcctatggttaccatggtgatgatgggcattcgttctgctcctcg

SEQ ID NO: 852454 - DNA, 100 bp, Homo sapiens
gcaagtgctgggcctggaatgtcagaagcagcagttggttgaatctggcgatgtggaacccatggatatggagggctgactatatacaccatgttttttc

SEQ ID NO: 852455 - DNA, 100 bp, Homo sapiens
aggaacccaacagagatctcttctgttctccactgctagttctttaaggaaaaacagtagtgctctgcatagtttactgaaacgagtggtcagcacattt

SEQ ID NO: 852456 - DNA, 100 bp, Homo sapiens
gttatgcccaccctccaactttgcgacggaaatgtgtcatcgaaagccagatcctcacagccaccgtggacaatgccaacatcctgctacagattgacaa

SEQ ID NO: 852457 - DNA, 100 bp, Homo sapiens
gagagaggtacctctccttttccctctccctttccctaagagccatttcctgcttttaagtcttggcaggaggactctgagtctggagaagctcagctgt

SEQ ID NO: 852458 - DNA, 100 bp, Homo sapiens
ttgccctcggcttggtacgggagtgatcagcagctggactgtgccttggacctaatgaggcgcctgcctccccagcaaatcgagaaaaacctcagcgacc

SEQ ID NO: 852459 - DNA, 99 bp, Homo sapiens
tgcaacatggggcttgagaaaggggaactgctcgcagaaagaagaaggtggttcatagaacagccacagcagatgacaaaaaacttcagttctccttaa

SEQ ID NO: 852460 - DNA, 98 bp, Homo sapiens
gacctgctgctggacccggcctgggagaagcagcagcgcaagcaagtctggaaaagtttgaaattccagtaaaaattcgtttgagtcctgaaccgtgg

SEQ ID NO: 852461 - DNA, 98 bp, Homo sapiens
ggcagaaaccgtctggagaatgatggcgccactgccttggcagaagcttttagggggatccagttcttggtggagaatgaactgctgcagaacacacc

SEQ ID NO: 852462 - DNA, 100 bp, Homo sapiens
agactcatttcctatctagcctgtattcccaggatccaaactactggatacaggtgcatcgcttggaacatggagatggaggaatactagaccttgatga

SEQ ID NO: 852463 - DNA, 98 bp, Homo sapiens
tccgtggtgtatctgtacagcagtttcctcatccctgcagctgtgtttgaacagctctactgagatgaagaaagaaaaagaatacctgctcagctcca

SEQ ID NO: 852464 - DNA, 111 bp, Homo sapiens
aacagaagagtgagagatggaacccgaagaagaaaggattcgttacagccagagattggaatagccaggccagaagaaggaaggcctgtggtgagtgggacaggaaatgac

SEQ ID NO: 852465 - DNA, 98 bp, Homo sapiens
ttacctgcgtttcctggatgctcttaaagtcggtggtggggagcggcagctggcagagagtcaacgcccagacggctgtgagatccccgagatatgcc

SEQ ID NO: 852466 - DNA, 98 bp, Homo sapiens
cccgttaagtcccccaaagatgagatttacctgtgagatgtttcatcccaacaagcctgatccggggatggcctctgcctccaccacaatgcatacta

SEQ ID NO: 852467 - DNA, 98 bp, Homo sapiens
cccgcgggggacactgcagccggagcccgggaggggccgcgccgccaccgtctgaactaggatgtcccgacatgaagccattgagcaggagaagcgga

SEQ ID NO: 852468 - DNA, 100 bp, Homo sapiens
gcattcaacttgtctgcctttggaacactttcccctaatgagctgaaagccagtggtggcgaaatcaaaattcataaaatggagcaaaaggagaatgtgc

SEQ ID NO: 852469 - DNA, 98 bp, Homo sapiens
gacagtcgcgaggttcgagtgttgcagagcctgcggggcaagatctatcctaatgctttggctggccagaatggccctgaccatgctctcataggagg

SEQ ID NO: 852470 - DNA, 99 bp, Homo sapiens
aatgttgaagaagctgcacaggtcaagctgcagtttcagctcaggccacatcaaatgtcaacccaacccagcctactacttcacagcctctaaatttgg

SEQ ID NO: 852471 - DNA, 100 bp, Homo sapiens
tggttgaaaaggacactcgatttattcctggattacagttcgaaaagatataatccgcatcctccccagtctagatgtcgaagtcaaagacatcactgat

SEQ ID NO: 852472 - DNA, 125 bp, Homo sapiens
agtggacatgttgaaaattaggtctgaattcaagagaaagtacggcaagtccctgtactattatatccagaaaattttaagagcttgcattgaacaagtgaaaaagtattcagaattctatactc

SEQ ID NO: 852473 - DNA, 99 bp, Homo sapiens
gccaagagagaccttggagtaattcgtcgacagatttcctttgacctcgctgagtacactgcggacgttgacggagttggcactctacgacttctagat

SEQ ID NO: 852474 - DNA, 100 bp, Homo sapiens
cgggacttgagcattgaagagtacattcgggtttacaagctgcagaagaaagatcagcaactggagcctaaaaaaagtaccagccctaaaaaagctgcgg

SEQ ID NO: 852475 - DNA, 98 bp, Homo sapiens
tagcattgctgctgggggtggaaattcactggggtgtcactttcactggcctccagccccctcctaggaaggcacccagtcagcttgaagagtttcaa

SEQ ID NO: 852476 - DNA, 151 bp, Homo sapiens
ccatggagaacccatcagcgtcaacgtccacgtcaccaacaacaccaacaagacggtgaagaagatcaagatctcagatcgggctggtggtcatcctggcttccacggtggtggccatgtcggccgtggcccagctgtgggaggacgagtg

SEQ ID NO: 852477 - DNA, 98 bp, Homo sapiens
cccatcccagtggcggctgccaaggagacggaaatagctcactcccaggtgaaacaggaggcggtattgctgcatgaaaaactttatgagttggagtc

SEQ ID NO: 852478 - DNA, 100 bp, Homo sapiens
gtgaatgttggaccccaaatgccctgtcatagtggaaatccctcactttgggtccatgagaggaaaagagagagaactcattgttcttcgaagtgaaaat

SEQ ID NO: 852479 - DNA, 98 bp, Homo sapiens
ggagcgccgagcgtcgccgccgccgccgccatgaacaactcgggcgccgacgagatcgggaccggaagctcaccaagctggagcggcagcggttcaag

SEQ ID NO: 852480 - DNA, 98 bp, Homo sapiens
caagtttaagtgaaccttatgcctcaacctcctgagtagctgaaactacaggccgtatctgaggaacagcagcctgcactcaagggcaaaaagggaaa

SEQ ID NO: 852481 - DNA, 100 bp, Homo sapiens
ggatcctctgtacgcccgttcactgaacaccagagactgggtaattaataaaaagaagaaattgatctggcctacagttctggagccttggaagtccgag

SEQ ID NO: 852482 - DNA, 98 bp, Homo sapiens
acccagaggagaagaaaaagaaggaccgattttaccgatccattttacctggagataaaactctttcgacgtgtagcagcagctttgccgggaatgga

SEQ ID NO: 852483 - DNA, 100 bp, Homo sapiens
acactcagtatacagtgatagtgggatttgaacacctgaagctccccatcaagggaatgaacttcacagtgagtgatttcacgtggagccatgatggaac

SEQ ID NO: 852484 - DNA, 51 bp, Homo sapiens
cctcccccgcatgacccccttgataccccagaatcttccatgctccgtcac

SEQ ID NO: 852485 - DNA, 99 bp, Homo sapiens
ttccaacccagcattgccaaaaaatatatagatcagaaatttgtattacaggtgtctgcttttggggcagagttttcatcggaggcatgcagagagtta

SEQ ID NO: 852486 - DNA, 100 bp, Homo sapiens
acctttgatgagaactcagctgtccaggtcttgggcgtctttggtactggcttttttaggggtctgcctggggattacccttgctgtggatagaagcaac

SEQ ID NO: 852487 - DNA, 100 bp, Homo sapiens
aggagacgagagagcgaacgccagggaccctgtgcaggcctgctcctccgtttgcaaggctgaccccgcactacatctacccaccagccatcgtgcagcc

SEQ ID NO: 852488 - DNA, 100 bp, Homo sapiens
aagcaaaaccagttaccactaatcttaagaagtttttcagttatgggacaaaaatattatatcaaaacactgaagctttgcaatctaaattcttttcacc

SEQ ID NO: 852489 - DNA, 98 bp, Homo sapiens
actgaacttctacaccaacccctggatgtggtcaaagtgtagtcgaaaatatatcactgagtttttagagttgcacaccgatgctccagaattgtgag

SEQ ID NO: 852490 - DNA, 98 bp, Homo sapiens
aacgaaagctgctgatcagtgacacccagcactatggcgtgacagtgcccccacctgttcttcccggagcctatcagcaaagccattcccaaggctat

SEQ ID NO: 852491 - DNA, 99 bp, Homo sapiens
tgggtgtcagtggcgcaccatctgaaaacaacatcatgcagtggaatgcagttatatttgggtgttgtagaatatttgagcacaggtggagtagaaaca

SEQ ID NO: 852492 - DNA, 100 bp, Homo sapiens
gtgccgccgctgccaacgtcgagcggcgacggctgatcatggggaatttcagaggtcatgccctccctggaaccttcttttttattattggtctttggtg

SEQ ID NO: 852493 - DNA, 99 bp, Homo sapiens
cgtgattgtgagtttcctgaggccttccctagccatgcttcctgtatagtctgtggaacggcacccaggcatgtggaatatgctcatagtggcgatgtg

SEQ ID NO: 852494 - DNA, 100 bp, Homo sapiens
ctcaagaatgggcggaaagcttgcctcaatcctgcatcccccatagttaagaaaatcatcgaaaagatgctgaacaggcagagctgacctgtccggtaat

SEQ ID NO: 852495 - DNA, 152 bp, Homo sapiens
ccccaaggggattgcctggcaggacgtgaaggggaagaggcccaccctggagtaaccctcactggagaatccagagggattgtggtccatcaggagtctgtgtgtgccacctatggaagtggcttaagcagcacgtgtattgtagacgttgg

SEQ ID NO: 852496 - DNA, 100 bp, Homo sapiens
cacaaatgaatggtaggaaaattactctgaaaagagaacaagagagtgagaaaccaagccaagatctgccaggctggactgtgctgttcctctctgtcct

SEQ ID NO: 852497 - DNA, 100 bp, Homo sapiens
tgtttccatgaaacagaatcttcatgccaggatatcagaaagtgaagtcactgcttttgctgtcttggatcaagaccagaaagaaattattgataccaat

SEQ ID NO: 852498 - DNA, 100 bp, Homo sapiens
aaccacttctacagtcattgatggcagtctttccgttactatggcaatgacggcagggactacaacaacctttcctatgagcaaccatacccgggaaaga

SEQ ID NO: 852499 - DNA, 100 bp, Homo sapiens
agagaaagcagcaagtccgcaagagagaagtttgaaatccttagtgttgagggaattcggcaccggttgagaggtagtgccaatgctgtgaggatccgag

SEQ ID NO: 852500 - DNA, 98 bp, Homo sapiens
atcgctgagaagcacctggatattcctaaaatgttggatgctgaagggcttgcgcctcattttcacagatggttctcgaatcgtcttccgactgagcg

SEQ ID NO: 852501 - DNA, 100 bp, Homo sapiens
tcctttggaaccgcggctgggcaagaagctgatcgagcccctcaccaatctcatccacaggtaactaggatttctacctcaaccgcgagacctatgcaag

SEQ ID NO: 852502 - DNA, 138 bp, Homo sapiens
tgggagtctccgcgtcccgctcgctgggagagaggtacctctccttttccctctccctttccctaaggaagtggttctgaaagatggaagaattgaaagactaaagttagagcttgaaaggaaagatgctgaaatcca

SEQ ID NO: 852503 - DNA, 98 bp, Homo sapiens
cccgccctgcgccccgctctgctgtgggcgctgctggcgctctggctgtgctgcgcggcccccgcgcatgggcaaagcccaacaccttcccccactgg

SEQ ID NO: 852504 - DNA, 100 bp, Homo sapiens
acagaaggaaaagttcctcacataaggattgagaatggagctgctattgagaaaacctttccaacctatgagagaaagagatgtgaagaaagaagacggg

SEQ ID NO: 852505 - DNA, 100 bp, Homo sapiens
tgctacccggggacagtgccttcaggcactggtgaggtggattgatgatgaatcttctggcacacctggagcaactccagaacacagtcgtgaggataat

SEQ ID NO: 852506 - DNA, 99 bp, Homo sapiens
ctacgtcatcttcgacagagcccagaagagggtgggcttcgcagcgagcccctgtgcaggtcccagaacagttttcttctgggctccaattatgaaatg

SEQ ID NO: 852507 - DNA, 100 bp, Homo sapiens
tgcttggcagcagaaggatttggcaacagactttgtttcttggagtccacttccaattccaagaaagctgatgtcctgaccactggagctggtaacccag

SEQ ID NO: 852508 - DNA, 98 bp, Homo sapiens
caggtggtgtggacactgccgcggtcgcagatgtgtacgacatttccaacatagatagaattggtcgatcagagtgtgtatgtacagagaaccatcgc

SEQ ID NO: 852509 - DNA, 100 bp, Homo sapiens
caggagccccccagagatgtctctgctgcacgacgtgggtcctggtaccaccataaaggaaggaaaatcacctcggcagtgtttgaaggaaggatactgc

SEQ ID NO: 852510 - DNA, 100 bp, Homo sapiens
gcaacgtaaaatccttggaaaagggaaaatatatgcagatgatgaacattcttaagccaattgcctttgatgttattcatttcatgtctcaactatttga

SEQ ID NO: 852511 - DNA, 98 bp, Homo sapiens
cttcccgtgctgctgttgatgctggctttgttcccaatgacatgcaagttggacagacgggaaaaatagtagcaccacctgattttccctacaaagat

SEQ ID NO: 852512 - DNA, 100 bp, Homo sapiens
ttcttccttctgtcacatcacacccaatgatggagtctcgccctgtcacccaggctggagtgcaatggcgtgatctcggcgcacttcaacctcgcctccc

SEQ ID NO: 852513 - DNA, 99 bp, Homo sapiens
aggcaatgctggatagataccgaattcttatcacaaaggatccagagctggtgcggaacatctgccgctgggttaggcaagctgttcagattccttttt

SEQ ID NO: 852514 - DNA, 100 bp, Homo sapiens
gttgtacaggctctttgaatatgactctgcaaagatttcaacactacacttgcacaatgtctttgaaaccaagagtagtagattttgatgaaacatggaa

SEQ ID NO: 852515 - DNA, 100 bp, Homo sapiens
aaaggtggaatcctactcagaatgtgagataatgaacccagccaattctcagagcccaggaagactttgtccccaactggtacagcacaaccaagctggg

SEQ ID NO: 852516 - DNA, 100 bp, Homo sapiens
ctagaagactgtggccagcaggtattagcgtcaggaggtgatttgatgaaggctgctgcaggagagttcgcagatgatccctgctcttctgtgaagcgag

SEQ ID NO: 852517 - DNA, 99 bp, Homo sapiens
ctgaagttacatttagagactgaaatcactgcaccttaaaaacaaaagattgagctgcactgtattcctgacttgtcagtcacatctgtaacctgctca

SEQ ID NO: 852518 - DNA, 100 bp, Homo sapiens
catggctagacaatgctttggtgctagatgccctgatgcgagtggccaatgaggagtcagagcacaatcaaggattccttttaagattgggcagcccaag

SEQ ID NO: 852519 - DNA, 98 bp, Homo sapiens
agaggcccaaattgaggcgcaatgatgagaggatgtggtggtctactctgatgtcaatcttgagggctagataaatgcagagggaacaccagaggacg

SEQ ID NO: 852520 - DNA, 98 bp, Homo sapiens
gtacttggaaaatactcagtttcctgcttactgcttcattatggattatacagaaaaatatgtcgtaactgcaagtgtggccaagaagagcatgatgt

SEQ ID NO: 852521 - DNA, 100 bp, Homo sapiens
agtacccactggaccgtggttttgcaggaaatgtgaatctcaggagagagcagccagagtgccaaaagaatgcaatggtgtaaagattccagttgatgcc

SEQ ID NO: 852522 - DNA, 100 bp, Homo sapiens
agaagcaagaaggccctggacacagcaatatctctgggctttcacagagttcaaagaggccttttcattgtttgaccggaccccgactggagagatgaag

SEQ ID NO: 852523 - DNA, 100 bp, Homo sapiens
cgggacggctctgtaggaaggaacttggttccccctccctcagcttccgccccaaaagttgccgaacaagcaaccggaaaagcttaataggcaatgggca

SEQ ID NO: 852524 - DNA, 100 bp, Homo sapiens
agccaagaagtagcagaagggagccgagtttatctggagtgtagagtcactggaaaccccactcctcgagtcaggaaaatgttggggcttttcaggaagc

SEQ ID NO: 852525 - DNA, 100 bp, Homo sapiens
cggctgcctcgcactccgcctcccccggctcagcccccggccgcggcgggacccgagaaatacggggttgtagaaggcaaagcgctaagtgagctgaggg

SEQ ID NO: 852526 - DNA, 98 bp, Homo sapiens
cgaatttaggagacataagaccgttggttctgacgaggcacagcgtttcttgcaagaatgggaggtggttgctgtatatggaactttatctgatttgc

SEQ ID NO: 852527 - DNA, 100 bp, Homo sapiens
cagaagtatgaggccagccgggaggacatctacaagcggaaaacccatatagacagctgccttgtaactgtcatggaagcatgcctggaaagacagcaat

SEQ ID NO: 852528 - DNA, 100 bp, Homo sapiens
tacctgggatatagtaatcactcaatgaatataaactgcacttactggcatgctcaaggaatgggctattaagtacaagccagctgccatgttgtgagca

SEQ ID NO: 852529 - DNA, 100 bp, Homo sapiens
tatcttttgttctctggcatggaaggggtcctcagagttactgggagcgacaccacaggcaagctgggctttgaggaattcaagtacttgtggaacaaca

SEQ ID NO: 852530 - DNA, 98 bp, Homo sapiens
agaaactgcgggaactgacagagcaaccacccatgggtgaaaatcctatttataagagtgccgtaacaactgtggtcaatccgaagtatgagggaaaa

SEQ ID NO: 852531 - DNA, 100 bp, Homo sapiens
aatggatttacagccttgcatttagcagtttacaaggtaccaaccaagaagctgaagaaatatgagaaagaatatcagacaatgcgagagagtcagctgc

SEQ ID NO: 852532 - DNA, 125 bp, Homo sapiens
ggggagctgagccacatcatcagacaactacaggcctgctctctggttccaggaatagccaggccagaagaaggaaggcctgtggtgagtgggacaggaaatgacatcaccaccccaccgaacaa

SEQ ID NO: 852533 - DNA, 75 bp, Homo sapiens
gctgctccgtggagatcgtcccgcgcctgccggcctcctcgctggggaggcagagtcctcgcgtggtctcctgcc

SEQ ID NO: 852534 - DNA, 98 bp, Homo sapiens
aacctgaaaaattcaagaagttgaaaaacgcttttcacgtcacctggagagatgcacaggtggacacgctttgcctggaggatttgcatgcgtttatt

SEQ ID NO: 852535 - DNA, 100 bp, Homo sapiens
ggaggccgagaaggagccggcatttgatgagcgaaccgggaaaggtggtttgagtccagccaatgacactggagccaaaaagaagaaaaagaaacaaaaa

SEQ ID NO: 852536 - DNA, 100 bp, Homo sapiens
ccaagagaaggtccttttctacaaatatcagagccatggctcagggagtacagaagtaggtttacgagtgaagagaccctgatgttctgcatgagggtga

SEQ ID NO: 852537 - DNA, 98 bp, Homo sapiens
gagcgtcccagtacactgacagaggtggactgtgcattgtcacttattcgacttgggatggagcggaatattcctggtttgctggttctctgtgacaa

SEQ ID NO: 852538 - DNA, 98 bp, Homo sapiens
cttgtcgcccgtttgcgctctcgccgaggcacaggctgctcgcggaccaccctgctccgaaaactaaggtactccaaagattcaggtttactcacgtc

SEQ ID NO: 852539 - DNA, 111 bp, Homo sapiens
cgcatccccggcagcagctccaggcaaagtgacaggaatccagccatcatctgaggaagcagttcatgtcgcagcaaaggaagttctgttctcaccacagcccctatcttc

SEQ ID NO: 852540 - DNA, 99 bp, Homo sapiens
caacgcggaggaaacgggagtgaacggagagcgtagtgaccatcatagctcttccccgcagctctgggagacgtggaggcctctgaagctgaagaccac

SEQ ID NO: 852541 - DNA, 51 bp, Homo sapiens
tgaggggacagtggagaagcaggagggttactggacctggaggacgatggg

SEQ ID NO: 852542 - DNA, 50 bp, Homo sapiens
agctggcccccagggccctgcagattgcggaagcatgagaagattctgta

SEQ ID NO: 852543 - DNA, 99 bp, Homo sapiens
aaccacactaacgagattcaagattatttgcaacagctcacgggagcaagaacggtgccaggtcgacctgtcagccctcagtagggaacagacgcacaa

SEQ ID NO: 852544 - DNA, 100 bp, Homo sapiens
tccacacagtctcaagaagaatttaaactggaggacctgaagaagctagaaccaaggacagtggccttagagctattgagaatttgatgcaaaagaaggg

SEQ ID NO: 852545 - DNA, 100 bp, Homo sapiens
atgacgcaggccttaaggagaaagtttcagatttctctatgaatcatcatcaagaactctgggagaacttttgaattcataaccaagccaacatctccag

SEQ ID NO: 852546 - DNA, 95 bp, Homo sapiens
tccttctgcagtccctcgtccagccacccccagtcgaggggagctgcagcgggagtcagacttcatggccagtgtagacagcagctggatctcct

SEQ ID NO: 852547 - DNA, 98 bp, Homo sapiens
tccaagtcaccaagaaattactgtctcaagtgatacgtctgaacaacccagtcctgccagctccagctccagctccagctccagcttcacaccatccc

SEQ ID NO: 852548 - DNA, 100 bp, Homo sapiens
tcctccggcagctggagatgtccgagcccaaggcaattgatcccaagttgtcgacgaccgacagggtggtgaaagataaactcaccattgtgcaccatcc

SEQ ID NO: 852549 - DNA, 100 bp, Homo sapiens
ctcgattccccgaatctgtagtgtggctggtatcggtgttcccctggtttaactagcctgtttgaactctactacgatcgcgggaaccaccatgagtttg

SEQ ID NO: 852550 - DNA, 100 bp, Homo sapiens
gtgctgcagacggcgagacctcctgcacagatgcctgctctgtgcctgtatctgagatcatcgccgttgaggaaacagacgttcacgggaaacatcaagg

SEQ ID NO: 852551 - DNA, 100 bp, Homo sapiens
ttacatcaagaggaaagattagactctgacacaactcagatgggaagttcatcgcccgggcacagcggatagagtacgactgtgaactagttccccggcg

SEQ ID NO: 852552 - DNA, 100 bp, Homo sapiens
ctgatgagacttcaggacacatacaggctggacccaggcacaatttccagaggggaacttccagatcacctctgcagcctgcacagccgggcctttggac

SEQ ID NO: 852553 - DNA, 98 bp, Homo sapiens
gaagctaccggccagggttttctttactctggggtcccggctgccctgtggcctcgctcctcggagggtttccctaggacttctgcatgcccatgcca

SEQ ID NO: 852554 - DNA, 110 bp, Homo sapiens
gataaaagaagcagaggaaatgtgctccaagttcacaagggtggactacatcatgcagccgcccgaatttccggtgacggtgtctataagcatttgaagtatgagggtgg

SEQ ID NO: 852555 - DNA, 100 bp, Homo sapiens
ctgagccggcgcggggtcggcgctgggctggaggcggcggagcgcgagagcttcgagcggactcagttgcatccttaatgtccagtcaaggagtggtgac

SEQ ID NO: 852556 - DNA, 100 bp, Homo sapiens
ccagaataagattaagggttgtacaggctctttgaatatgactctgcaaagaacatccatgatagcagtcttctgtaaatcgaacttttcaagaattctc

SEQ ID NO: 852557 - DNA, 100 bp, Homo sapiens
agaagcgggcggcgcgggggagatggtcacacagcggcagtgataaagagcacagggatgtggagagatctcaagaacaagaatctgaagcacaaagata

SEQ ID NO: 852558 - DNA, 105 bp, Homo sapiens
gtagatgataaagatgatgatatccttctcaaccttgtgggatgtgaaaactctgttactgaagtctgaagtttcctggatccccaataaacattactctgggat

SEQ ID NO: 852559 - DNA, 99 bp, Homo sapiens
gggcactccccaaaacctaccagcagcccaagtgcagtgggaggacagccatctgcaaggagcggtgaccacccgtcaggtgcgtaccattgtggaaga

SEQ ID NO: 852560 - DNA, 98 bp, Homo sapiens
tgcacagaagccatatgctgggattctctctgaaagtatgaagcagatccagaggaagcaatttacgatgacgttccaagggaaaactcagactctga

SEQ ID NO: 852561 - DNA, 98 bp, Homo sapiens
tgcatgggttcctgaccaatgtcatccttgcagacctcaacctctcagacttaattcagtgcacaaatgagatgaatgtgaacatcccacagttggca

SEQ ID NO: 852562 - DNA, 98 bp, Homo sapiens
aagagcagcttattccaagctttgctaggaatgaggggagaatcatacttcatcggaatgaggagcccagggcagcagggacacgtccctgaagatgg

SEQ ID NO: 852563 - DNA, 100 bp, Homo sapiens
tttgaatcgctgagcgatatcacagaacacaagattaatcaatgtcaactgacagttgtcgccgtgatcctgaaggcgctgacctacgacgagaagcggg

SEQ ID NO: 852564 - DNA, 99 bp, Homo sapiens
gaacgcattatttacccctatgaaatgtttcagtctggagccaaccatgtggttgctccttgagggcaggacagttcttatggctttatccgttgcgta

SEQ ID NO: 852565 - DNA, 100 bp, Homo sapiens
actgtttgagcccggaagcgcagaagctggccctactgaagatggactgccagggcctggtggtcagactcatccaggactttgtgctcctgaccacggc

SEQ ID NO: 852566 - DNA, 100 bp, Homo sapiens
gacctctcagatcccaaacaactggcagaatttgctagctgacagcagatcccaggtacagagggcacgctatgaggcagctaactggaaatacaagtat

SEQ ID NO: 852567 - DNA, 98 bp, Homo sapiens
gcagctgccccgctacctcatgggggagacgcagctgtgcaccacaagaaatctccgagaagcaagggataatgctgtggctgaaaaggaacgagcag

SEQ ID NO: 852568 - DNA, 100 bp, Homo sapiens
acgcgtcctactacaaagatgctctgcggtttttgggctgtgttgacatcaaggatctaccaggtgtggcagaaaaaacacagcttctgaaattgaatgt

SEQ ID NO: 852569 - DNA, 98 bp, Homo sapiens
agaaaaagttgcaacagaaacagctcttaatactgcagcttttagaaaagatatctttcttagaaggagagattcaaccctatgaaaagataaaggcc

SEQ ID NO: 852570 - DNA, 98 bp, Homo sapiens
gaaggacccccagcggtgcacgctgctggtcagccagttccgctcctgtcaggttggctcgaggccgggaagagtgggagagtgccgccctgcagaat

SEQ ID NO: 852571 - DNA, 98 bp, Homo sapiens
aaaaaccttctactcatggacaaagagaaagctgatgtaaaatcaacagcatttaccttccggtcttccaaggtccatgcctcaaagaccaaccggct

SEQ ID NO: 852572 - DNA, 98 bp, Homo sapiens
ctttcggggtgtacgcggcgatttcaactctcgaatgggaggaggcagtatagagccttcgttcagaaaaacctggtctatggcacaactaaaaaggt

SEQ ID NO: 852573 - DNA, 100 bp, Homo sapiens
aaatgctccacctgtaagaacagaaaatcgtcttatagttgagaatttatcctcaagagtcagctggcagaatctttagaacacgatgttcttgatgata

SEQ ID NO: 852574 - DNA, 100 bp, Homo sapiens
ccggcggcccaggcacggagaggcggcgagaccgcagatctacgaactgcgtgtgatggagaccaaacccgacaaggcagtgtccatcattgagtgtgac

SEQ ID NO: 852575 - DNA, 99 bp, Homo sapiens
gacagtgctccaggacttggtgacttcctccagcttcacatagtttcagatcgggtggagcggcggcttcaggaactggagagagagatgcgcacagaa

SEQ ID NO: 852576 - DNA, 100 bp, Homo sapiens
tctgtcttggaggacatcagaagggatgaggagaatttctgtgccactgtgcccaaggatggacgttcctattccccaactctctttgcacagacagttc

SEQ ID NO: 852577 - DNA, 99 bp, Homo sapiens
tgaagatagctccagagagcatccccagtcttgaggctctcactagaaaagtccacaacttccaggcagatgttagcagggatgaaatacaggtgcctg

SEQ ID NO: 852578 - DNA, 98 bp, Homo sapiens
tggatctctggcagctgctgttgaccttggcactggcaggatcaagtgatgctttttctggaagtgagggagaagatggtataaactggtccatcagt

SEQ ID NO: 852579 - DNA, 100 bp, Homo sapiens
agccaaggaaggcttcgagaagattagcaaaggtgctaatccagtggaaatcaggagagcccctcacaatctcctcaactgtttcatgatgacacccatt

SEQ ID NO: 852580 - DNA, 100 bp, Homo sapiens
acaaagccttcagccagttcatgaggccctttggacaggcacttcggcccctcctggactccattcagatccagcctccaggagggagctccgtgggcag

SEQ ID NO: 852581 - DNA, 99 bp, Homo sapiens
ctcatggatgttcttcttcgagtatttgtagaaggccctttgaggtggacctttctcacgtgtatcttgcctatactgaggagagtctgcgtcagtctt

SEQ ID NO: 852582 - DNA, 98 bp, Homo sapiens
aaaaaagaaaagttgtttcctccaacattgatgttcctccagcaaggctgaagaaaaagtcccagtcggtggatattaatgctccagggttcaaccct

SEQ ID NO: 852583 - DNA, 100 bp, Homo sapiens
ggatttaactatcagaatgaagatgaaaaagtcaccttgtctttccctagtactctgcaaacagataaccttctgttcggtgatgaaattatcactaatg

SEQ ID NO: 852584 - DNA, 100 bp, Homo sapiens
aggtgctgggcctgggtgtgaacggcaaagtgctggagtgcttccatcggcgcactggacagaagtgtgccctgaaggcttcctgcagaggtggatcctg

SEQ ID NO: 852585 - DNA, 100 bp, Homo sapiens
cttcaggctgcaacaaggagaagagccatggaaacaggaggaagaattcccaagccaaagctttccaggcacagcagctacacagaagagatgggagaag

SEQ ID NO: 852586 - DNA, 100 bp, Homo sapiens
tcagacaatggtttattaagacaaccgcttatgcaaagccactgccaaaaaatatggtgtctcgtctttgtgaatctaaaaaggtttgtgctgcagctga

SEQ ID NO: 852587 - DNA, 100 bp, Homo sapiens
aaggggcaagacgggttcagttcgtcatggggctgtttggaaagacccaggagaagccgcccaaagaactgggctgacaaagaagagaaccaaagtccag

SEQ ID NO: 852588 - DNA, 100 bp, Homo sapiens
ggagcctcgtggctgcgtcaccgccgcccccccagacaagatggacaccgcggaggaagagaatttggatggagagacccggaactgccggaagtgattc

SEQ ID NO: 852589 - DNA, 100 bp, Homo sapiens
aattcctgtccttactccctctttaagattgcgtacccactgcagagtgctgaagacggggtagccacgaggggagaagccatgtgagcaagtccagttc

SEQ ID NO: 852590 - DNA, 98 bp, Homo sapiens
tcatcttagttagcgtgtcctctgaaaggtacttggcaatgaatcgctccctggctaatgtgattcttggaggctatggcaccacttcaacagctggt

SEQ ID NO: 852591 - DNA, 124 bp, Homo sapiens
aggactctaccgtgtcagcgggaataaaactgaccaagacaatattcaaaagcagtttgatcaaggttctgagtggtgttgctcagccagtagcttttggtcaaggacaacagtttttaccagt

SEQ ID NO: 852592 - DNA, 99 bp, Homo sapiens
gacagggtctacaagaacgagtgcgccttctcctacgactctcccgatccatcagttacacaagtgacaagaaatgttccaccaggacttgatgaatat

SEQ ID NO: 852593 - DNA, 100 bp, Homo sapiens
cctgaaggctgtcaagtatgtggagtgttctgcacttacacaggatatccgacatgaagccagtgacttcccatgtagagtggccaagcttcctaagaac

SEQ ID NO: 852594 - DNA, 100 bp, Homo sapiens
cttaaagtgctttccgaagctgctatttcaggaactttccttgagactggcagagaaagaaaatgcccgggtagtgctagccacagatcctgatgcagac

SEQ ID NO: 852595 - DNA, 100 bp, Homo sapiens
tagctttgtaggagcatggcttggagcacttcctattccactggattgggaaagaccatggcaggttatttccagaaagaagagaatggcaaagtatgag

SEQ ID NO: 852596 - DNA, 99 bp, Homo sapiens
tttggcttgggaaataggagtgaagctgttatcgcccagttctaccacagccctgcggacaacaagcggattgatatcagtaaatgccattatttagtg

SEQ ID NO: 852597 - DNA, 98 bp, Homo sapiens
atctgttctacaggaagatgctgagaaactgcggaaagaattgcatgaaggcatgtcagagcgggagcgacaggtgatgaagaagctgaaggaggtgg

SEQ ID NO: 852598 - DNA, 100 bp, Homo sapiens
gcgctctggctgtgctgcgcgacccccgcgcatgggagagcctggggatgtacaggagatgcctgctccagaatctcctcctggaagggatccagctgca

SEQ ID NO: 852599 - DNA, 100 bp, Homo sapiens
cccttttagaatcagctgcaaacaagggccctggcctccagtctgagtgctgacctcgaagagcccctgagtgaggaggagacagaacaccctctcctgc

SEQ ID NO: 852600 - DNA, 100 bp, Homo sapiens
cagtggaagctgtgcagctcaaccaggccctcctcctcctcccatggacaatgcatgccctcgttatcttgaaaaggaaacgtaaatattttcaccacga

SEQ ID NO: 852601 - DNA, 101 bp, Homo sapiens
tgatgaccagtctttcccatatcagagcatcacttttcctgagttaagcaataaaatcgcagtggtcatgggctcctgcaccgcaggaggagcctatgtgc

SEQ ID NO: 852602 - DNA, 98 bp, Homo sapiens
tggcagagccacgcgtttgatggcttcgaggtgaactggaccgagcagcagcagatggaactgatgatgttgtaggccctgaaggcatggagaaattt

SEQ ID NO: 852603 - DNA, 100 bp, Homo sapiens
gaaagcctcgaggccgtggcccagaggctggagctgcgggagatatagccagtaccaacgtatgctgagcacgctgtctcaatgtgaattttcaatgggc

SEQ ID NO: 852604 - DNA, 98 bp, Homo sapiens
gtcaaagctgtttggagaaaatcagaagtacagttttatctagccacatcttggagaaacaagtgttgaaaatgttaaaggctgtgctgaagaagagc

SEQ ID NO: 852605 - DNA, 100 bp, Homo sapiens
gacaaccaaaactgctctgctcttccgaaaattgcagtcagggaacctgggacccggcaagccagcagaaggtttgacaagtatgcgcccaagctggaca

SEQ ID NO: 852606 - DNA, 100 bp, Homo sapiens
ggatatcttccgacgtagctttaggcagcttacaactcacaagtgcatgggagattcctgcatcttttgcgctctcaagagtctcgctctgtcgtccagg

SEQ ID NO: 852607 - DNA, 100 bp, Homo sapiens
tcctccacaccacccacacaccagtcggcagcctccctggaacctcggagagctgatagatcggtttgtggctgatttcaaagcccaggggccacctaag

SEQ ID NO: 852608 - DNA, 100 bp, Homo sapiens
acgtgatggcctcccaccattccaagcggagaggccgggcgtcttctgagagtcagagcagcccgacggccatggaggctgaagagacgatggaatgcct

SEQ ID NO: 852609 - DNA, 159 bp, Homo sapiens
gacgtgagcccctggtgctatgtggcagagcacgaggatggtgtctactggaagtactgtgagatacctgcttgccagactaccaccatctgtgacctggacacccagtttcgttgccaggagtctgggacttgtatcccactgtcctataaatgtgac

SEQ ID NO: 852610 - DNA, 100 bp, Homo sapiens
aaaccatatatccaacactgcaaagcatttttatggacaacgaccacaggaatctggaattttattaaacatgtctcatataatggcagcaaaggctgta

SEQ ID NO: 852611 - DNA, 99 bp, Homo sapiens
caagttttcacttatctcgaaagcctatcagcatagttaagaaattgcaggtgctgcagtgtctgaaatttccgggcctttctcaacagaggatgtagc

SEQ ID NO: 852612 - DNA, 100 bp, Homo sapiens
acagccattctcccatgtctactcgcaggcgtcatgttgggaatcggcctacaacacagcagtcccctcaggatgagcaggaaaagctcttggatgaagc

SEQ ID NO: 852613 - DNA, 98 bp, Homo sapiens
cttcctcatccttccttttctcggggctcccgtgggccccatggtctacgccatctgttattgtcccctgcctcgcctggcagatctggaggcgctga

SEQ ID NO: 852614 - DNA, 99 bp, Homo sapiens
acatcagtgatgaatgcaagaggcgtttctataagaattgcttcttggacacttaatgattgttggcaagaaatgtgctgctgatctgggcctgaataa

SEQ ID NO: 852615 - DNA, 99 bp, Homo sapiens
ccgccgccgttttcgcctgcagctgctcaccgatttgagttctgtgaacctgcatttgttgttggtaattgcctccagatagcttctgacagtcatcag

SEQ ID NO: 852616 - DNA, 98 bp, Homo sapiens
cgagagtgattgccatttggctgaagtgtggtgtggctctgtggagaacatgcagctgaccctgaacctgcagacggagaacaaaggcagcgttgtct

SEQ ID NO: 852617 - DNA, 99 bp, Homo sapiens
acatgctcagcaggagcttcatcaacgatatatgtcagatctaaagttactggctgaccaacaaagttcctatcaaaagacccagcacaggtcttctca

SEQ ID NO: 852618 - DNA, 144 bp, Homo sapiens
gcttccagaacgctctgccactctaatggtatatgaagatgtcgtccaaatagtatcaggattccaagatctgaaactcagcaccgaggctctgctccccactctgagagtgatctaccagagcaggaagaggagattctggga

SEQ ID NO: 852619 - DNA, 100 bp, Homo sapiens
ttcccaggctgtcatataactcctgagaatagtggttcttaactctttgcctgtctcgggaaacttgattgatctttatggaaaccaaggtctgccccca

SEQ ID NO: 852620 - DNA, 100 bp, Homo sapiens
cgttggtggtatggattgtaatcggttttatcgattttggtgttgttcagagatactttcctggcgaactttctgaccaagtatacaactacccagaggg

SEQ ID NO: 852621 - DNA, 98 bp, Homo sapiens
tgtgcgcgcctccatctgggccatggatgggcgggcgctaatattgacacctgctcagaagaccagaggaccccgttgatggaagcagccgaaaacaa

SEQ ID NO: 852622 - DNA, 100 bp, Homo sapiens
gtcttccctgaccccgcggccggacgacccaagcccgctgagcaggatgaggcagcatgatgcagaagttgaacacttaaccgaagttcttaaggaaaag

SEQ ID NO: 852623 - DNA, 100 bp, Homo sapiens
acctcatggccccaggtctcactatacaggctttggaagtgataaagcagttaaaagagaaaatgaagatagaacgtgctcacatgaggcttcggttcat

SEQ ID NO: 852624 - DNA, 98 bp, Homo sapiens
gaaaacgtttgagttgttccacacacaccccctctaaatgtcgagaagccccaggtgttggtaaatcatgcttattgctacagtttacagacaagagg

SEQ ID NO: 852625 - DNA, 100 bp, Homo sapiens
gatcaagctgtgtgcattagtacaaatggggctctgtaactcccagctggtgttggaggagccatcttccattgtgcagctggattatagccagaaagtg

SEQ ID NO: 852626 - DNA, 100 bp, Homo sapiens
tatctgcaaagaacagaccgttcagtatatactaactatggtggatgatatgctgcaggaccatagctgtctgcagtgcaggaagccaactattaagggg

SEQ ID NO: 852627 - DNA, 98 bp, Homo sapiens
tgagcatgaagataaaagtcctgaaacagttttgcagtcggatcttcaagatgaagttcaaagggagaatactaatctgcaaaaactacaggcccaga

SEQ ID NO: 852628 - DNA, 100 bp, Homo sapiens
tggaagactatgtagtattgatgaaaagagggactgccataacattcccaaaggttaatagtcctaggatggatctgactcttgctgaacttcaggaaat

SEQ ID NO: 852629 - DNA, 98 bp, Homo sapiens
cccacctcgtctgggctcgcggcgtctccggggaaagccgtggccccgagggcggatccgagggcttcataaacttcacttaccaaatacttcaaggg

SEQ ID NO: 852630 - DNA, 100 bp, Homo sapiens
agctggaccggcaaattaaagcaattatgaaagaagtcattccttttttgaaggtaacagttaacctcttccacatgcagcatctgcaggctgcttccct

SEQ ID NO: 852631 - DNA, 98 bp, Homo sapiens
ctgacttcaatgacctccccaactcgttgtttgcgtgcaatgttcaccagtcagtgtttgaaggagaagagagcaagattgtgttcacctattgaaaa

SEQ ID NO: 852632 - DNA, 99 bp, Homo sapiens
gaacctgtccaggagctggcatgacgtgcaggtctctagcgcgaaacttccattttagaagaatacagtatcaattggactcagaagctgggagctgga

SEQ ID NO: 852633 - DNA, 100 bp, Homo sapiens
accacaaaagcgaaatgggcacaccacaggagcgggagatggagctgcggcggcaggccctggaggaggagcggcggaggcgtgagcaggtagaacggag

SEQ ID NO: 852634 - DNA, 100 bp, Homo sapiens
tgttttggatgatcttgaccccgaggcatttccggagagttcttttgaagtcacttcagaaggatctacatgaggaaatgaactacatcactgcaataat

SEQ ID NO: 852635 - DNA, 98 bp, Homo sapiens
ggaacggctcgctggagctgcccggggcggtccctggctgcgtgcacagcgccttgttccagcagggcctgatccagataaatttgcgcctcattttg

SEQ ID NO: 852636 - DNA, 100 bp, Homo sapiens
gatatcgttcagggagcagaggaccagggaatccaaggagaggaaggaggtgcactgatcaggaggaggaagaggcgtgtatggcgaggctttgtgtccg

SEQ ID NO: 852637 - DNA, 100 bp, Homo sapiens
agagaatttatctagaggaaaacccagagaaaagtgaaacaattcaggacactgaatccatgggaaagagctatgatgggagagcttatgtcatcactgg

SEQ ID NO: 852638 - DNA, 98 bp, Homo sapiens
cttcacgcttttttcgtggtactgcggtttcaaattccctaaacattttagatgatgattataatggacaagccaagctctgcctgcagttgaacaca

SEQ ID NO: 852639 - DNA, 98 bp, Homo sapiens
tgcatttcacaaagtattgtctgaaaaagctcaaaatgaggaaattctgtatgttcttcgccattatattcaggcagcagaagatgtcgttttcattg

SEQ ID NO: 852640 - DNA, 100 bp, Homo sapiens
ttcagtatattggagaatcgcaaggatatgatatcatggaaccagcagcaaagaagtgctatctggaaagagagaaagatgttgtgtccctcctggtgag

SEQ ID NO: 852641 - DNA, 99 bp, Homo sapiens
aatagatgatctgatcgacaacagtgtaaaagaaatcatttcactgttagtttcaaaggtttgcctgcaatgagatttcattctctacatttaaaggac

SEQ ID NO: 852642 - DNA, 98 bp, Homo sapiens
aagggtactttggtgcatgaagctcaactcaactatttctacatctctcctggaggtaagaaccttgatgctgtccatgatatcactgtggcgtatcc

SEQ ID NO: 852643 - DNA, 125 bp, Homo sapiens
gaatctgaggtggctcacgttgaccaactctttgatgatgcatccaggacggagaacgtgaccttgaagaagccagaaacttttccaaaaaatcaaaggagagtgtttcgagctcctgatctgaa

SEQ ID NO: 852644 - DNA, 109 bp, Homo sapiens
ggctgctcgggctattcataacatcttccgcatgacagaatcccatctgatggtcaccagtcaatctttgaggtcatcaagagagagggcacaggtacagagatgccca

SEQ ID NO: 852645 - DNA, 98 bp, Homo sapiens
ttagatgtggatctcaacagctcctgtgcctttgaagtaaattttatggatgatgtaggtcagactctattaaactgggcctctgcttttggaactca

SEQ ID NO: 852646 - DNA, 100 bp, Homo sapiens
aaaacagtgatcgctaagaactttgccgataccttaggatacaacatagaacctattatgctctatcagcttcctccattctcaaaagggagaaacgact

SEQ ID NO: 852647 - DNA, 100 bp, Homo sapiens
aaggactgatttttagaactccacatttgagagacaaagcatggaggacacaagaatgggaggaaaggcggactctcaggaacttcattcttcacgtggt

SEQ ID NO: 852648 - DNA, 98 bp, Homo sapiens
aggcactagacctgtcacgagtgaacttagttccctcctatactccttcactctaccctaaggttcttggaacaccaaatgaggacacatggcctgga

SEQ ID NO: 852649 - DNA, 98 bp, Homo sapiens
tccagaaggaactcgagtacagttggattgcatagtggtaggaattccaccacctcaagtaagagtttgccagatccggcccggtgcctgggttccag

SEQ ID NO: 852650 - DNA, 100 bp, Homo sapiens
gcagatttacaaactggccaagaagggccttactccttcacagatcgaagaaagccagcttccctctacaagtgctctgggaaaaggagagcaggttgaa

SEQ ID NO: 852651 - DNA, 98 bp, Homo sapiens
acttcaaggataagggcgacagcaacagctctgccggctggaaggcaagttaggaaatcaacattgaatcccaatgcaaaggagttcaacccacgttc

SEQ ID NO: 852652 - DNA, 100 bp, Homo sapiens
aagagatagatttaaagaatgaaccttggtataaattcttttcggaattggagtttgggaaaccgcacttaaatatagatccggtggtatggatgagaaa

SEQ ID NO: 852653 - DNA, 100 bp, Homo sapiens
tcagaaggtgcattttaccttttgcatttatgtttgaatcatctttaagtctggcggtcacaaagtggggactcaaggcctccaggtgtttggatgagaa

SEQ ID NO: 852654 - DNA, 98 bp, Homo sapiens
tgcccttgctgctaacatagatgaaattgtatttacatcaacaggagacatctccatttactatgatgagaaaggcagtggagctactgctgtggttc

SEQ ID NO: 852655 - DNA, 100 bp, Homo sapiens
aacgccctctgcggtgaaggagaggctctgcagatggcatggggaggaggttgcactcagcccatgatcctggtctctcaaagacttcaacagcagaaat

SEQ ID NO: 852656 - DNA, 98 bp, Homo sapiens
atgctcaagggcaagatcctcgtgaagaccgagtgtgtcagcagccaggactttctctctgggtccccttccaaaacgcagccaccgccgtcaccaat

SEQ ID NO: 852657 - DNA, 105 bp, Homo sapiens
aagaggcgttcgctgcgcgtgcacattccgggatacccacccaccatcccagggtctacaacatccacagccggaccgtcacccgctatcctgccaactctatcg

SEQ ID NO: 852658 - DNA, 100 bp, Homo sapiens
atttgcctgtgggacgctccgtggatgaggctctgcggctggtccaggccttccagtacacagacgagcatggggaagctgaaccttcacctagccccag

SEQ ID NO: 852659 - DNA, 100 bp, Homo sapiens
gatttccaaggtcagcagatggagcaagagagaatttcccaagagatttgtgtagttatggatacagaagaagataacaaacatgtaggtcatcttcttg

SEQ ID NO: 852660 - DNA, 99 bp, Homo sapiens
gaaaacctcataaaagttatagaaattttaatctcaactgaatggaatgaacgacagcctgcaccagagatggtgaattgtctttgagtcggtcacttg

SEQ ID NO: 852661 - DNA, 100 bp, Homo sapiens
aattggatgaaagataaagcccttaaggacaaggatttagagggaaagatcattgtagatgaactgaagcaagaagttatcagtaccagcagcaaggcag

SEQ ID NO: 852662 - DNA, 100 bp, Homo sapiens
tgatggctctgggtccaattcgcctggaacaggaccagaccacagctcagcttcaggtacagaaggtaacccagaatctcccaatgaaagaaggctgcac

SEQ ID NO: 852663 - DNA, 100 bp, Homo sapiens
gtctctgatgagctgagaaacaaagccacccagccaatgaagctatttgatggcattgaatgtgaatttcccatatttttcctttatatgatgattgatg

SEQ ID NO: 852664 - DNA, 100 bp, Homo sapiens
cggccaaggggcttgctgccacccatcaccacccccctctgcatcggtcggctcaggacttacggaaacagacatcaatgaatgccagtcttcaccttgt

SEQ ID NO: 852665 - DNA, 100 bp, Homo sapiens
caagaagcagtagagggtgccatgcacattcaggtgaaaggtgtagcagtcactcggcctacacccacagcatcgaccttgtgaacccagcgacctgact

SEQ ID NO: 852666 - DNA, 100 bp, Homo sapiens
gagaaactctataatgtcatcagcctcgagtttagccacaccaggctggagaatatggtgcagaggccctccacggcagaacgtgttcatgagttaaatg

SEQ ID NO: 852667 - DNA, 99 bp, Homo sapiens
agcttttgtcagaagtgtattgataaatggttatcttatgatgaggcttttgctatggctaatgatcccttggaaggcttccatgaagtaaaccttgct

SEQ ID NO: 852668 - DNA, 100 bp, Homo sapiens
ccagcagccgcttccgacagaactgaatgtaacttcaccgagtaaagaggagtgttaatgactccagagagtaagatcagattcgtccacaaagagatgg

SEQ ID NO: 852669 - DNA, 98 bp, Homo sapiens
ccgtcacccttcctgcgattctacttaggttggagctgaaggagtgcccaggctgcggatggaggaaggacgtgctcgggagaaggtgaagatgggag

SEQ ID NO: 852670 - DNA, 100 bp, Homo sapiens
taataatgctgatcaacagctaacagcaacacagaaatttagaaagctgctttctaaagtattatcagaaaatccacccagcttcaccattactgtgacg

SEQ ID NO: 852671 - DNA, 98 bp, Homo sapiens
gcgagtaagatggaagatgaggaggtcgctgagagctgggaagaggcggcagacagcgggctattcaaggatgcttggttgttgcacatgcattctgg

SEQ ID NO: 852672 - DNA, 99 bp, Homo sapiens
gcaaagaccgtatcatatttaaaggaaaggctatggttcacacgtccgactcatgacctgggggagctcagttctcgtctggacgtcattcagtttttt

SEQ ID NO: 852673 - DNA, 99 bp, Homo sapiens
ctggagagggggcttacgacagtcgctcatgcagtgccagagggggacctacctgccgcagacgtacatcatccaggaggagatggtggtcacggagca

SEQ ID NO: 852674 - DNA, 98 bp, Homo sapiens
tccttcttcagtcctgctcgtcggaggacccggttgccatggtgaaggaaaaagtttgcgtgtgaacttggacatgggcaaagcggtgtatggatgga

SEQ ID NO: 852675 - DNA, 100 bp, Homo sapiens
attggccgtgtacccgaaaaactgattgactgggctggcgttaactgtgcggaggcagggtaaccaggagccgacaacaactcctgacgcaatggttcag

SEQ ID NO: 852676 - DNA, 100 bp, Homo sapiens
ctttcacggacaacctcagaggacaacgaagtgttcgattatctttctcaaggaatagatctttctggaatagaagtgatagaaaatgatctacttttta

SEQ ID NO: 852677 - DNA, 100 bp, Homo sapiens
tcaatgcacgcaagatgaaatttgctctgctaaaaggctccttcagtgagcaaggcatcaacgagtttctcaggatgtacagttacccagcacgtgtacc

SEQ ID NO: 852678 - DNA, 100 bp, Homo sapiens
gcacaggtgtgcgcacttcgcatctcgaaggccggccagcaagcttcagaagttccacctggtgccaagcatcaacaccatgagtggcagtcaggagctg

SEQ ID NO: 852679 - DNA, 99 bp, Homo sapiens
gcccaccctggagtaaccctcactggagaatccagaggaataaacattacaacggtggctattccattggtgctccttgttgtcctggtgtttgctgga

SEQ ID NO: 852680 - DNA, 100 bp, Homo sapiens
ctggtgtttatcattttggttattacctgttctgaagcaactatacttctttgctatttccacctatgtgcagaggtccagtggcattgcagagcacgga

SEQ ID NO: 852681 - DNA, 50 bp, Homo sapiens
agatctgggaccgaaatttgactgttggtcaaagaaaaagtgatgtatga

SEQ ID NO: 852682 - DNA, 98 bp, Homo sapiens
tggtcagaggagtcttcatgaaggtggtgaagcccaagcccgagcagttcagtgatgaagtggaaccagcaacacctgaagaaggggaaccagcaact

SEQ ID NO: 852683 - DNA, 100 bp, Homo sapiens
ctggctcggagactcctgcctgctgaggaagccagcagacctgcagaacttggctcccgggacccacccaccatttataactttcaacagtgaagtcaaa

SEQ ID NO: 852684 - DNA, 99 bp, Homo sapiens
tcaatctgaaagtcccagccagccaagtgacgctgacattaaggaccagccagaaaatgtgagttacctgagagagaagaaggcgaaggagaagaaact

SEQ ID NO: 852685 - DNA, 100 bp, Homo sapiens
atgactccggatattctaggatcttccggagctgccgtgcatacctgtgtgaaagcaaccttccacatgccttcaattaagttgcagagttctgatggag

SEQ ID NO: 852686 - DNA, 100 bp, Homo sapiens
gcgagcgggagaagcggggtcaaataaccagcccgagtcatgcagtcttttcgagaaaggtgtggtttccatggcaaacaacagaactaccagcagacct

SEQ ID NO: 852687 - DNA, 99 bp, Homo sapiens
atctgtgggttcaccttccagacccagcagctccaggcttcctgaacatgaaattaatagggcagatgaagacattgtggatatcaagcctgccaatat

SEQ ID NO: 852688 - DNA, 100 bp, Homo sapiens
tttggaaatgagaaattaacctttgggactggaacaagactcaccatcatacccagtgaatctggattgggaaagtcgacattaatcaactcattattcc

SEQ ID NO: 852689 - DNA, 100 bp, Homo sapiens
acaattgaatgtgggcggcattctttgccacagtttgtgatgtctggctggggtataggttattcatttcgatgtgacattgttgactattcacggtcac

SEQ ID NO: 852690 - DNA, 98 bp, Homo sapiens
gtaatggcctttcttatactctagaatatacaaagacaaaaggagattctgatgaagaagttattcaagatggctttcatgagaaggacaagaagcca

SEQ ID NO: 852691 - DNA, 100 bp, Homo sapiens
gatcggctctacgccctggaccagatgattgctagctgtggccgactggtgaatgaacagaaagagcttgctcagtttgaaggaagaaagtactgtgaac

SEQ ID NO: 852692 - DNA, 100 bp, Homo sapiens
cacgaggcggcgggctggagacatggaccgcggcgagcaagttagagatgtttatgattacttccgagctgtcctgcagcgtgatgaaagaagtgaacga

SEQ ID NO: 852693 - DNA, 98 bp, Homo sapiens
tacctggcttcttacctcacgaacaaggattaaagcaaggagagccaatcatgactggcaaaacacagaccagcaacgtcaccaataagaatgacccc

SEQ ID NO: 852694 - DNA, 99 bp, Homo sapiens
ttgagggagaagcagcaagaggtcttgcatttcagggaggaacgtctttccctccaggaaaacgactccagatgggcttttttaaacgggtccggccac

SEQ ID NO: 852695 - DNA, 100 bp, Homo sapiens
aagcatggcaaagactggcaaaagcacaaggattctcgctgtgacagagacaacaccgagtatgagaagagaagctcggcacagtgacagaggcacccag

SEQ ID NO: 852696 - DNA, 98 bp, Homo sapiens
aaaatgcgctcgggctggaccagcagatttcaacactacacttgcacaatgtctttgaaaccaagagtagtagattttgatgaaacatggaacaaact

SEQ ID NO: 852697 - DNA, 99 bp, Homo sapiens
ctgcggtttgtggtgacggcaacggagaaagcagtgtggcgcaagcggaaggggccctggaccttctgaagaagctgcacagctgccagatgtccatcc

SEQ ID NO: 852698 - DNA, 100 bp, Homo sapiens
ggatcctctgctgcatagtttcggtcatctaaaggaggttttaaacagtataacaggactccagaagacctttccagattcgtggttgagctgcagcaga

SEQ ID NO: 852699 - DNA, 100 bp, Homo sapiens
atgggagacggggcagtgaaacaaggcttcttgtatcttcagcagcagcagacgtttggaaagggcgtctctggccgagcctctttttgtggaaaacgac

SEQ ID NO: 852700 - DNA, 100 bp, Homo sapiens
cccggtgcaagaggcgcaaacaagccaatcccaggaggaaaaacgtatggactttctgtcagattttgagatgatgttgcagcgaaaaaagagcatgagt

SEQ ID NO: 852701 - DNA, 98 bp, Homo sapiens
ggctctttgaatatgactctgcaaagatatattcgactttatgggagaaaatttagcaaagaagatcatgttctttttattaagttattgtatgagct

SEQ ID NO: 852702 - DNA, 100 bp, Homo sapiens
aatattgccgatacttgacctacgcaagagacaatgtcatgtgattcagcctaatatctcaaatcaacctaccgacaccaagcaaccatcgatgatgaag

SEQ ID NO: 852703 - DNA, 98 bp, Homo sapiens
cacgctctcgggctctgcctcgagttctaaagttcctgttgcttcagacaatggatgagcaatcacaaggaatgcaagggccacctgttcctcagttc

SEQ ID NO: 852704 - DNA, 98 bp, Homo sapiens
ccatacctatgtcagaagaatgggggcgggtggttctcttcccaaagtggaagccaaattcatcaattatgtgaagaattgcttccggatgactgacc

SEQ ID NO: 852705 - DNA, 98 bp, Homo sapiens
cgaattcgcactgatgaaaatgggctttgtcctgcatgtagaaaggctcctgagtcctataagaatgtgacagatgtggtaaatacctgccatgatgc

SEQ ID NO: 852706 - DNA, 99 bp, Homo sapiens
gtcgttcaagacttgcaacactaaacgagaaattgacagcccttgaacggagaatagagtacattgaagctcgggacgtggtgggtcctctggtgcgaa

SEQ ID NO: 852707 - DNA, 98 bp, Homo sapiens
cgcatcccagctctgccaggaagcaaagattgaaatcatggcaggtccagaaagtgatgcgcaataccagttcactggtattaaaaaatatttcaact

SEQ ID NO: 852708 - DNA, 98 bp, Homo sapiens
cgcatcgaggatttggcgctgcagaaccagatccgggagcacgtcatctccatcgaggatgcctgggacagatgaaccccaagatgtgtgcggtgctg

SEQ ID NO: 852709 - DNA, 113 bp, Homo sapiens
aggaaatcatgtcaagcgaagccttgaaaaagctgccctgagacggtgtcccgccgaaagagaaaatattctctttggaatgggaaatcctctgcttgacatctctgctgtag

SEQ ID NO: 852710 - DNA, 101 bp, Homo sapiens
cctggtcctgtcggtccagctggaaagagtggtgacagaggagaaagtggcccacaaggcattcgtggcgataagggagagcccggtgaaaaggggcccag

SEQ ID NO: 852711 - DNA, 100 bp, Homo sapiens
gggttccttgaaaagggaggaacggcgacatcctgacctagagcccatcctaaggaaggatctgagtctctccctgcggagacagccctgaagaactcct

SEQ ID NO: 852712 - DNA, 100 bp, Homo sapiens
catgtcgggttattcgagtgaccgagaccgcggccgggaccgaggtaatttgccatcttccatgtatgaatggtggccagtgcagttcaagggacaaatg

SEQ ID NO: 852713 - DNA, 99 bp, Homo sapiens
gccattggatgttttgtccagggcagcatctctggtgcatgctgatgacgaaaaacctggtcatcaatgctgctttgggatttgacacatttgttgtca

SEQ ID NO: 852714 - DNA, 100 bp, Homo sapiens
tgattggcgactcaggggttggaaagtcttgccttcttcttaggtttgcacagggagagcaacaagccccggccctcagagctcagccggatgagcgcag

SEQ ID NO: 852715 - DNA, 98 bp, Homo sapiens
atttgtcatgaagaaactcaatgatcgtgtcatgagagagcctcctcaacaagcccaagagtgagatgaccccagaggagctgcagaagcgagaggag

SEQ ID NO: 852716 - DNA, 100 bp, Homo sapiens
atgaatctgctcccactggtattactgatcatattgtccaagaaactatgttccaacttcctgtcaacaatcttggcagtttaagaaaagcccggaaaac

SEQ ID NO: 852717 - DNA, 98 bp, Homo sapiens
cgccgccgctacgggaccgcctgagctttctacaccgggattatgtgctggccgtggaggcgtatcattcggttatcaagtattacccagagcaagag

SEQ ID NO: 852718 - DNA, 137 bp, Homo sapiens
gacgggcgcccggccggctgcggtccgtgcggaggctgagccggccgcgggcgcgaccggaggcagttttcggctttgtgagaaaccttaccatcaaacacgatggccagcaacgttaccaacaagacagatcctcg

SEQ ID NO: 852719 - DNA, 100 bp, Homo sapiens
atacgatccattcagtagaaaccctctgttctgtggagctgaaaatacaagtctttgggaactcaaaaaggactcagaattcatgattgaagaaatgcag

SEQ ID NO: 852720 - DNA, 98 bp, Homo sapiens
gtgctgctataggctcagccctcagtggatttggttcatcagttgatgcggatgaaattaaaaggctaggaaagagatttaagaagcttgatttggac

SEQ ID NO: 852721 - DNA, 99 bp, Homo sapiens
taatggtccggacttccgtgtgtgaaatgacaatggatgctctgttggctcgattgaaacttctgaatccagatgaccttagagaagaaatcgtcaaag

SEQ ID NO: 852722 - DNA, 100 bp, Homo sapiens
gctcagtcacctgagcaccgagtcagtgtatcgcattaagttcaaggagagctttgctgagatgaacaggggctcgaacgagtggaagacggttgtgggc

SEQ ID NO: 852723 - DNA, 100 bp, Homo sapiens
tgattacttatctggagcaaggaaaagagccctggaatatgaagcaacatgagatggtggatgaacccacaggcaaccggtgaccaaaaacactttcagg

SEQ ID NO: 852724 - DNA, 100 bp, Homo sapiens
gcacttaaaggaattctacctcactcccaactctcctgcagaaatgtgctacagttgaaactccagcagcgccggacccgggaagaactggtgagccaag

SEQ ID NO: 852725 - DNA, 98 bp, Homo sapiens
tggcaaacgacaatggaggcaaagaaacctctctgcatccccaagtgtctcaaaggctgttgagcacatcaataaaactattgcgcctgccctggtta

SEQ ID NO: 852726 - DNA, 99 bp, Homo sapiens
tgggtcccacattgagaactggcattcgatcctgcgcaatgggctggtcaatgcatcctacaccaaactgcagcattttctgcattagcaaatatcgac

SEQ ID NO: 852727 - DNA, 100 bp, Homo sapiens
gccagtctggcggcaagtataaaactaggttaaaacaacttctgcattggtgcggtgatgacttcgatggagtggctattcaagatctctggcagtggag

SEQ ID NO: 852728 - DNA, 100 bp, Homo sapiens
gggggaagcacaaaaacaaacctgatatgaattatgagaccatgggaagagcactcaggtatggaaaatcgaggaccagggagagtaccttgccagcaat

SEQ ID NO: 852729 - DNA, 100 bp, Homo sapiens
ggtgcttaccaactacatgttccctcaacagccaaggactgaggatgattatggcttgttaacaacaccccagctgcactacatggtgtattgtcgaaac

SEQ ID NO: 852730 - DNA, 100 bp, Homo sapiens
ctaccgagactttgtgaacatgatgctggggaaacggtcggctgtcctcaagtttgttctggacttggtgcctctttctgttatatgctttcctatttag

SEQ ID NO: 852731 - DNA, 99 bp, Homo sapiens
ccatcccagacgaagacagtccctggatcaccgacagcacagacagaatccctgctaccaactatctgttatagtccctgggtcaagacaacaattttt

SEQ ID NO: 852732 - DNA, 99 bp, Homo sapiens
ccgcgtctcgcgggaagacttcgagtgggtctacaccgaccagccgcacgccgaccggcgccgggagatcctggattgcttccaagtatgatcatcagg

SEQ ID NO: 852733 - DNA, 100 bp, Homo sapiens
catgaggacgtggaggtgggaaggtgtgtccggaggtttgcaggggtgcagtgtgtctggtcttatgagcaacaattacgtatcaatgtggttccttggg

SEQ ID NO: 852734 - DNA, 140 bp, Homo sapiens
gccaggcgggacgcgcacagtccctccacgcggaaagaagtaccttcgccggtcaccggctcctgcagggagattgcccggagctccatccagatcacaggagccctggaagaccagatgaaccagctgaagcagtatga

SEQ ID NO: 852735 - DNA, 98 bp, Homo sapiens
gcaggatttccaggcgcgacttggggacgaagccaagttcattcccagacaccaaatggattgcttctgactccgagtccactgctctccagcataca

SEQ ID NO: 852736 - DNA, 99 bp, Homo sapiens
cctgatcgcgatggggacaaaggcgcaagtcgagaggaaactgttgtgcctcttcatattggcgatcctgttgtctccaatactgttggcactagtggc

SEQ ID NO: 852737 - DNA, 99 bp, Homo sapiens
gacggctcacctgtgcgggatggaacaaaaggcaagtatatcgcgtcaacacagcgacctgacgggacctggcgcaagcagcggagggtgaaagaagga

SEQ ID NO: 852738 - DNA, 100 bp, Homo sapiens
attgcctgggctcagcttctgaccttctagaagccaatggagatcttcgtggatgatgagacgaagttgacgctgcatgggttgcagcagtactacgtga

SEQ ID NO: 852739 - DNA, 100 bp, Homo sapiens
gtactgtcgggacacctttgaccacccgactctcatagaaaacgagagtatatgcgatgagtttgcctttttcacatagctcttggctgtaggattgccc

SEQ ID NO: 852740 - DNA, 100 bp, Homo sapiens
tgccaagaatacttgaaccagtgttgccatttcactctggaagatatgctctatgctgcttcatccataaaggtttctagaccaactggggagattcccg

SEQ ID NO: 852741 - DNA, 100 bp, Homo sapiens
gaaagtgaggaattttgaagtacaccgtggtgacattgtatcattggtattgtgcttcaagaagaccatagggaagaacgcattttcatcttgctgcaaa

SEQ ID NO: 852742 - DNA, 100 bp, Homo sapiens
tacaactcagatcttaagtagtgatatttctcttttgtctgcccctattgtaagtgcagatggaacacaacaggctggagtgcagtggcgcaatctcggc

SEQ ID NO: 852743 - DNA, 100 bp, Homo sapiens
ctacaaagcctagacctttcagccgctgccgaaatgctccttgctcggattgaacgtatggaaaggcggatgcagctggtaaagaaggataacgagaaag

SEQ ID NO: 852744 - DNA, 121 bp, Homo sapiens
gttgtatgctgtggtttcagaggagcccatttacatcgtcacggagtacatgagcaaggcgagctggattactacgactcccacaatgtcaacacccggtgccagaagatctgtgaccagt

SEQ ID NO: 852745 - DNA, 100 bp, Homo sapiens
atagaccaagggctgatcacgcggcaccacctcaagaagcgggcgtcaatgagctgaaggagaaaggcaacaaggccctgagcgtgggtaacatcgatga

SEQ ID NO: 852746 - DNA, 100 bp, Homo sapiens
aatttgagacactttgcaaaaaaacttgatcctcgaagagaaggtggtgatcaaaggaaactggcagacctttcacttcgtatccaacaaattgaaacaa

SEQ ID NO: 852747 - DNA, 98 bp, Homo sapiens
ttagctcagcaattcttacctttaaagatgacggcgccttgaggtaagctacaggcaacaccacttccgcgtttctcttgcgccctggtccaagatgg

SEQ ID NO: 852748 - DNA, 100 bp, Homo sapiens
acaatggacatccggacaaagagtcaaggtggggagccaacatacaatgtggctgtcggcagagctggtagaggaactgatgactcggttgtttctgaag

SEQ ID NO: 852749 - DNA, 100 bp, Homo sapiens
aaacatatgtgtagtgtgctgcagcataagatggaagaacttaaagaaggcctgcggcaaagagatgagcttattgagtcaggtgacacacagtcttttg

SEQ ID NO: 852750 - DNA, 100 bp, Homo sapiens
aagcaagtaaacagtgcacttaaacagaaaatggaaggtggaattgaagaattcaaacctcctgaggtgcaactgccaaaagaactggcgtaagaggcaa

SEQ ID NO: 852751 - DNA, 100 bp, Homo sapiens
atgatactgatgcggttgagattgctatcgacaacacggcttttatggacgagttcttttctgaggttggcttcaatgctgaggaagcccacaatattgt

SEQ ID NO: 852752 - DNA, 99 bp, Homo sapiens
gttacccggggcaacagctgagccgtctgggaagggatgcatctggccggtgcataaacttctcccgagttccatctcagtaaaagggaagcaggaaga

SEQ ID NO: 852753 - DNA, 100 bp, Homo sapiens
aatccaccaaagaaaaaacgcttcactgtcaaggtgatgcaggttctgaatgctgatgccattgttgtgaagctgaactcaggcgattacaagacgattc

SEQ ID NO: 852754 - DNA, 100 bp, Homo sapiens
tgggaagtctccatggtgaagtataggctgaggctacctgtgaacagtacgcagtgaatgttaaagaactggttgtcttcttgggcggtgttgcagggtt

SEQ ID NO: 852755 - DNA, 100 bp, Homo sapiens
gatacaagatgaagagcaagcccctaggaatctgcctgataatcgattgcattggcaatgagacaggccattgcaatcatggaagtagctcacggcaaag

SEQ ID NO: 852756 - DNA, 99 bp, Homo sapiens
cggctcgacaagttcaagcagctgcttgccggccccaacacggaccttgacttcctcgcccccatgacctggtgttgtgtctgatcaccccaacattcc

SEQ ID NO: 852757 - DNA, 100 bp, Homo sapiens
tgtgcacactggctatcattgatccaggtgatttgaagatattaaagctagaaattggaactagaaaatcaaaagaattcaaggcatcttaacgtgacag

SEQ ID NO: 852758 - DNA, 100 bp, Homo sapiens
acaattactgatgggagcaagttgactaccaccagtggagtccaggatgaggaacaagatcactcaaggtgaaggataatctactaataccagcactttg

SEQ ID NO: 852759 - DNA, 98 bp, Homo sapiens
tgaaccgagtcggggtggattacgagggcagctgcaatgactctccgcacggtattattgtcattgcaagcactattggcagctgcagagccagatga

SEQ ID NO: 852760 - DNA, 100 bp, Homo sapiens
actctgacaaatcagatattgaaaatgctgatgaatccagcagcagcatcctaaaacctctcagtgctatggtctttagaattgggtcactggatttctg

SEQ ID NO: 852761 - DNA, 100 bp, Homo sapiens
gtgagccaccgtgcctggctgaagttcgaacaactgccacagcagcaagcaacttgattgaagtatttgttgatggtcagtctgtcatggtggaaccggg

SEQ ID NO: 852762 - DNA, 100 bp, Homo sapiens
ggaagatctgtgcctccaaccagcagagagggattgagcttcattgaactcaacagagccaacatttcatagcaccatgctgtgaagtaaggtcaggccc

SEQ ID NO: 852763 - DNA, 98 bp, Homo sapiens
taaaactgttcgggtttataatctggtggtaaaatatacccaggaccataaacagatgaaaggtagaccaagtctgattttagatacacctgctatga

SEQ ID NO: 852764 - DNA, 100 bp, Homo sapiens
cagttgcgaagagtattacatgatattagaaactcactgcagaatctttcacaggaagatccacgtttgaaatttccagtacatatgcggtcaaagacat

SEQ ID NO: 852765 - DNA, 99 bp, Homo sapiens
atccttcttctggataacactgtacaagctttcaaagtcaatgtcaagtctggcaccatctttgacaacttcctcatcaccaacgatgaggcatacgct

SEQ ID NO: 852766 - DNA, 100 bp, Homo sapiens
cagatgcgcggggcgtgcgcgtcctcctccccaggcccgccgcctccctgccaagatgacgtccggttgtttgccttcgtgcgcttcaccaccggggatg

SEQ ID NO: 852767 - DNA, 98 bp, Homo sapiens
aagacccaatgcaaacgctgtccgttccatggagaaagtcatggagatccacagctgtcaccgtgcctactgtggagatggtcaccggcatgagggtg

SEQ ID NO: 852768 - DNA, 100 bp, Homo sapiens
aggaagaaattgttcagttcttctcagacttcacagagaatgcagttgtcttgacttcaggtctgtctgttctgttggcaagtaaatgcagtactgttct

SEQ ID NO: 852769 - DNA, 100 bp, Homo sapiens
aaatgaagagtttgttgaagtgggaagattggggccttctgattattttgctcttgaaagaggcctaaccaaggctctaaagaaattggatgactacctg

SEQ ID NO: 852770 - DNA, 99 bp, Homo sapiens
gagaccaagctcaaactaatggcacgctatgggcggctggcggaccctgctgtcactgactttccaggacaatcatatcctgattcagcccttcctcca

SEQ ID NO: 852771 - DNA, 100 bp, Homo sapiens
gaacaaaactatgaggcagagatccactgtttacagaagaggcttcaagctgttagtgagtccacggttccgccaagattcacaatgacatcctttcaag

SEQ ID NO: 852772 - DNA, 100 bp, Homo sapiens
caagaaggcaaagtcgcgtttaataacgtgtggatgaggtcaccattgtcaacattttgaccaaccgcagcaatgcacagagacaggatattgccttcgc

SEQ ID NO: 852773 - DNA, 100 bp, Homo sapiens
cagacgacagtcaggagctcagtatggctcttttccaggtggcttcgtcctgttcatcgccaactaggggaagcgaatgaggagtttgcactccgtgtac

SEQ ID NO: 852774 - DNA, 100 bp, Homo sapiens
gcggaggcggcgggcgagggcgactacgaccagtgaggcggccgccgcagcccaggcgcgggggcgacgacaggcaattaagttggaatatgcaaggttg

SEQ ID NO: 852775 - DNA, 98 bp, Homo sapiens
ggagcagcggccgggagcccttagggaggcaggttaagaaatatcctctcagttgtcggtactgatgccttgaaaaagaccaaaaaggatgatgagaa

SEQ ID NO: 852776 - DNA, 98 bp, Homo sapiens
gctcggcgcggagcgtcctgtcaggcggcggccgagggcgtcgcggactctccccgcgatgatgccggaccggagtaggccctatgatacttttaact

SEQ ID NO: 852777 - DNA, 98 bp, Homo sapiens
acgtggagcggaagaacagcctgaagaagggctccctcgtgaagaacctgaaggacacactagatattaacctggctgcagagccaaaagtgaaccga

SEQ ID NO: 852778 - DNA, 100 bp, Homo sapiens
tttctcattctcatatttcaccaataaaggaattgcattttgtgaaaaaagaacaagaattttctgcaaggatcatatctaagtgcactttttgctgata

SEQ ID NO: 852779 - DNA, 100 bp, Homo sapiens
gcgacacaattgtctgtgacagtaacagtacttgggatcccccagttccaaagtgtcttaaagcaggatgtcctgaaattaggggactttggctcctgcc

SEQ ID NO: 852780 - DNA, 100 bp, Homo sapiens
aggccggggctccccgctgctctcgaaaagccgcaggaagtgcacggctgtctataacgtgctgccgggtctcaggatggaggagtgaagtctcctgtcg

SEQ ID NO: 852781 - DNA, 100 bp, Homo sapiens
ggatatggctttgtctcctttttcaacaaatgggctggaggagattgatggattctttgcgagaaataacgaagagtacctggctctgatctttgaaaag

SEQ ID NO: 852782 - DNA, 100 bp, Homo sapiens
acaaagtcagtcgccagtcagtgttgtgtggaagccagaacatcgttctcaatggcaagaaaaaactgcctctgacagctcttgctcaaaatatgcaaga

SEQ ID NO: 852783 - DNA, 100 bp, Homo sapiens
ttggaattcctcgaactccaacactattcctgatcagagaactccagttgcttcaacacacagtatcagtagtgcagccaccccagatcgaatccgcttc

SEQ ID NO: 852784 - DNA, 98 bp, Homo sapiens
tgacaaggaggaaccagtcactcctactagtggagggggtccaatgtcaccccaggatgatgaagcagaagagggaaaggtctgggttcctaagcaga

SEQ ID NO: 852785 - DNA, 100 bp, Homo sapiens
tgaagaagctgcgtgaggcctttgaaaatgatatgctggctgttaacgtttctaagcatgaattgaggaacagaagaagcagagcagatgatcggagcag

SEQ ID NO: 852786 - DNA, 100 bp, Homo sapiens
aggagcagcagcagctccagcaggcgctggctcctgctcagactgtttttgaaaggaattgccgttcagaggactgtgccgcagacctgcagcttcaggg

SEQ ID NO: 852787 - DNA, 100 bp, Homo sapiens
ctggtccggaagcacatcaacagagcgattgctcgctgtaagcagctcatctgtgaccccagctacgtaaaagatcgggtagaaaaagtgggccaggtga

SEQ ID NO: 852788 - DNA, 100 bp, Homo sapiens
ttcgattattagctttagtgaaatgggctaataatgctggcaaagtggaaaaatgtgcggtgtgatccctcacatccacaaatctctgattggaaagaag

SEQ ID NO: 852789 - DNA, 100 bp, Homo sapiens
ctaaaatgtcaaataacctacggagggtcttcctgaaacccgcagaggaaaattcaggcaacgcctcgcgttgatgcaactccagtagtaccttctcggg

SEQ ID NO: 852790 - DNA, 99 bp, Homo sapiens
gaagaactcccacaatgccacaggaggaggcagcaggtaagcggaagggtacagccaatgcccgaatgccagagaaggtcacatggatgaggagaatga

SEQ ID NO: 852791 - DNA, 98 bp, Homo sapiens
cgacctcacaggccgacaagatacctctcgcatgtccacctcacaggtgacacttaactccgccatctgcgttttgagcactgttctcataatggagt

SEQ ID NO: 852792 - DNA, 98 bp, Homo sapiens
agaattgcatgtggaagtgttggagaatgttccacttacaacacacaactttgcactgtaagaagattcctagagattcatggggaaaccattgaaaa

SEQ ID NO: 852793 - DNA, 100 bp, Homo sapiens
aggagccagaaacagatctcagccccgggctcccagctgcccacctcatagcaaacggggattcagcgtccgatcctttggaacagggactcacgtgaag

SEQ ID NO: 852794 - DNA, 100 bp, Homo sapiens
gatttctaccacaatgtggccgaaaggatgcaaactcgtgggaaagatattgatgatgttaagaagttcaaaccgggttacctggaagctactcttaatt

SEQ ID NO: 852795 - DNA, 98 bp, Homo sapiens
aaaaacaaacgtcttgaagactgaaagcctgttattcaaagaggttagcagtagactgttggaagtaaggttacttcctcagaatgttggcctcctgt

SEQ ID NO: 852796 - DNA, 125 bp, Homo sapiens
gacaagctgatggacagtatggtggccgagtttttaaagaacagtaggatccttgctggggacgtggagacccatgaagagctaaggagcaaatccaagatctgtgccaatgtgttttgtggagc

SEQ ID NO: 852797 - DNA, 100 bp, Homo sapiens
ccgatgcaagttttttgttccaagttaagagcaggcttatgtgatcgctgtgcagtaactgaagaacatatgcggaaaaaacagcaagagtttgaaaata

SEQ ID NO: 852798 - DNA, 51 bp, Homo sapiens
cctgggccaaggtctctaagcagccatgacagtgcagatcctgctgaagct

SEQ ID NO: 852799 - DNA, 100 bp, Homo sapiens
ccagcccttctggtgtcacctcccagggtgactcaactccaggcttctccagggaaagtgaccgaggcagtgaaagaggccattgacgcagggtaccggc

SEQ ID NO: 852800 - DNA, 99 bp, Homo sapiens
tcgtggtgtggtgtatggccgtgggcatctcctacattagcgtctacgaccaccaagcggaagaagtccctatagaaccatacaacatcccactgtccc

SEQ ID NO: 852801 - DNA, 100 bp, Homo sapiens
cacagctgctcgaggacggggaaaatctgcagccctgggattggcgattgctggggcggtggcatttgggtgctggagaatctggtaaaagcaccattgt

SEQ ID NO: 852802 - DNA, 100 bp, Homo sapiens
tgaacctaaacatttaaaatgtgaaatgaaaggaggaaaaacagtacagatgggccaagagcttcaaggagaagtagatgttgatgttagtgaagattca

SEQ ID NO: 852803 - DNA, 100 bp, Homo sapiens
tcaagcagcccgtatttggtgcaaactacatcaagggaacagtgaaggcggaagcgggaggaatgggtaccacagaccatgtcatcgtcctggcgtccac

SEQ ID NO: 852804 - DNA, 100 bp, Homo sapiens
tattctttacctgcttcccaatcccactgatgaggatcagcccatggcctatgagagctacaagaagaaggactacacccaggtggactacttaatcaac

SEQ ID NO: 852805 - DNA, 100 bp, Homo sapiens
atacagttataacaatcgtagcaataaacccattcatagagcttattgccagatcaaggtcttctgtgacaaagattccagtggaatgacactggtgatg

SEQ ID NO: 852806 - DNA, 100 bp, Homo sapiens
tgttcacaatgtgtggcatcaagaagctggcaaaacgattcgagaatggatgagagaggtcatactccctgtcacaaactccagctgaactaacttggag

SEQ ID NO: 852807 - DNA, 99 bp, Homo sapiens
gtgctaccaagcttcttcataatcaccttcgaaacactggcaatggaacccaggcaggtaaagtgaggaaacatgcaactgaacaggaaaaaactgaag

SEQ ID NO: 852808 - DNA, 100 bp, Homo sapiens
tgaaggccctacgggagaaaaccgggcgcaaggtcattacacctactctgagaatcgtgtggaaaaagacggcctgattcttacaagccgggggcctggg

SEQ ID NO: 852809 - DNA, 114 bp, Homo sapiens
acaaatagaaatattatacacaaacctgcggaatggactttaattgctatggtgttgctgtcattggtagtatccacatgccattctttggtggttggtatttttggcctgtac

SEQ ID NO: 852810 - DNA, 98 bp, Homo sapiens
tcttgtgggtgctgctgttctgggtgcctgtgcctcaggggatttcgcttctgtacagaccctcaaactgacacaagacctacagagaaaaccctttg

SEQ ID NO: 852811 - DNA, 99 bp, Homo sapiens
actgtcaaaactttacaagttaattgaagagtcttgtccacagctggcaaattcagtgcagatcagaatagttctgtcccaagaagaactctgaagatg

SEQ ID NO: 852812 - DNA, 100 bp, Homo sapiens
ctcgggatccgggatgaaggcggagcttccccctgggcctgggttatggactctgtgggattcattatattgacgctggttaccttggtttcaaggccta

SEQ ID NO: 852813 - DNA, 100 bp, Homo sapiens
gattacagctggtcgtatcagacgccaccctcttcccccagcaccaccatgtccagaaagtccagtgtctgcagaaaatgtggtgacctggaagaagaac

SEQ ID NO: 852814 - DNA, 98 bp, Homo sapiens
ctcgccctcctcctgcctcactgccagaagctctttgtgtatgaccttcacgcagtcaagaacgacttccagctcagagtcaagatctccactgaagt

SEQ ID NO: 852815 - DNA, 100 bp, Homo sapiens
ccctgctcataaaacatccactccaacccatagaagtgcctcctcttcaacatcctcccaaagggacagtaggcagaattcctagaggacctgtgcaaca

SEQ ID NO: 852816 - DNA, 100 bp, Homo sapiens
atgatgatgaggaagcagatgatacccgctacacccagggaacaggtggtgatgaggcccgcaccaactatgagaaagccatctcccagggccaccaggc

SEQ ID NO: 852817 - DNA, 98 bp, Homo sapiens
tgccaactgctcaaaaattagcagatgaaattctttcccaaaattcagaaatcaaccaagttcatggatcaggggggtttgggtattgctatcagcga

SEQ ID NO: 852818 - DNA, 100 bp, Homo sapiens
tcctgaagaagtgtgttggcctggtgctactcgtgagcagtagtcgccatccagacagatggattgtccctggaggaggcatggagcccgaggaggagcc

SEQ ID NO: 852819 - DNA, 101 bp, Homo sapiens
cttctcctccttctttgttcaagactgggcttccaccgagcagcaggaaatccaaatctcctcccaaagtgcccattgtgattcaggacgatagccttccc

SEQ ID NO: 852820 - DNA, 100 bp, Homo sapiens
cacccatgtgtgtcaaccctaccccaggagggaccatctctcgagcccattgcagatgcaaaggctcctgagaagcgggcctcaccatccaagccagctt

SEQ ID NO: 852821 - DNA, 98 bp, Homo sapiens
cattgaataacagctacaggatgttcgagagctggtttggacttctcccactgagcatgacaagcactcgaaaggctaaatcaaccagaaacatcgaa

SEQ ID NO: 852822 - DNA, 100 bp, Homo sapiens
tgtgcctaaagataaatgttaaactcggagggatcaataatattcttgtacctcatcaaaggcaagaggaggaacgacgtagaagagaggaagagatgat

SEQ ID NO: 852823 - DNA, 100 bp, Homo sapiens
gaagacgatctgcacttcgcattttggcattgacatttaattttagggtcctttatatagaagggagagtaggtgcaggaactgcagggccagcggcagg

SEQ ID NO: 852824 - DNA, 99 bp, Homo sapiens
cagtgtgacctacggcatctggatctgcctggagtgctcggggagacaccgcgggcttggggttcacctcagatgctgatgtacatgttttatgtcctg

SEQ ID NO: 852825 - DNA, 100 bp, Homo sapiens
aagttcaagaccagcttgggcaacatgatccgtttttcagtcatggtaacagttttcatggtacaggtggccgaggcaacaagtttgcccagatgcgtta

SEQ ID NO: 852826 - DNA, 98 bp, Homo sapiens
attgttttcagctaacagtaaccccagtggcccaccctcaggaccctcaccacccatcagagaagcctgtcattcactgccataaatgtggggagcct

SEQ ID NO: 852827 - DNA, 98 bp, Homo sapiens
ctcgtcatggcctacccgggatacggaggaggggcagtaccaagaagcaagagagacctatcttgatctggatagtaaagtgaggactttaaaaaagt

SEQ ID NO: 852828 - DNA, 100 bp, Homo sapiens
ctgggaaggattttcaagccttggaaatggaggaagaagaaaagcgaaaagttcaaacacacgtcagcaggtccttatgaacatggaagacataaaagtt

SEQ ID NO: 852829 - DNA, 100 bp, Homo sapiens
gggatcccccagttccaaagtgtcttaaagcccccaaatacatcaagatgtttgtactggatgaagctgacgaaatgttaagccgtggattcaaggacca

SEQ ID NO: 852830 - DNA, 100 bp, Homo sapiens
ggatgggggaccacaagatcctcatcgacaggtattgcattcctgctgaggaggagaacaagctggaagatgtggtccacaccctgctgcaagccaatgg

SEQ ID NO: 852831 - DNA, 141 bp, Homo sapiens
gagaatgccagctattcctgtcaatatccattccatgaattttacctggcaagctgcagggcaggtcctgaattctataacagaagaagtcctcgatcatatgggtactttccgcagtatactggatcagctagactggat

SEQ ID NO: 852832 - DNA, 98 bp, Homo sapiens
ggacttcagcagcatcatccagacgtgcagcggcaacatccagcggatcagccaagccaaacctgacagagttcaacactgcccacaacaagcggatt

SEQ ID NO: 852833 - DNA, 100 bp, Homo sapiens
cgacaccagcagccctctgatggtcacaccgccctctgcagaggcccactgggctgtgaggtcatctgaggccactgctatttcccaagagaagagccag

SEQ ID NO: 852834 - DNA, 100 bp, Homo sapiens
tggccctgcgaccccagtcatgggccagacctcggtgtccacgctgtccccgcagcccggcagcgatttgtaagactccagggcctcccagccgtgaata

SEQ ID NO: 852835 - DNA, 112 bp, Homo sapiens
cggaagctgagaggaaaagccttttattttgtcaacggcaaagtgttttgtgaagaagacttcctggcaatccacctcgaagatccaagtctgcacctcctcgtgatttagg

SEQ ID NO: 852836 - DNA, 99 bp, Homo sapiens
aaattcagtgagatctccaagaaaatcacctcgtttaatggcacaaggttgaaaggattgttgacaaaaggaaaaataaaaaagggaagacagagtatt

SEQ ID NO: 852837 - DNA, 99 bp, Homo sapiens
tccgacacgtcccccgggcgccactgcagagcctgtccgtcagtccctaggtatccgcactgctcaggggtcaatgtgacggtggactacattagacca

SEQ ID NO: 852838 - DNA, 99 bp, Homo sapiens
cgcatttggccgcctccctaccggtcagccctgacaaaggtcagctagccccttgaggacatcagctttggcctcagggtcctaatggcagcagaacca

SEQ ID NO: 852839 - DNA, 100 bp, Homo sapiens
aaatctgctccgacatcaagtaaaggatttgcttgacttgattaagcaacccaaagtccaagcatctcattttgaaggcctaatcacaaccatagttggg

SEQ ID NO: 852840 - DNA, 99 bp, Homo sapiens
tcagcctctggttcagactgcagtaaccagacacattcagctaacgtattttagcaggtggagtgaggttgaagattcctgtgacagcgatgccataga

SEQ ID NO: 852841 - DNA, 98 bp, Homo sapiens
gatccctgtatcaactgatggaaagcattggtgggaatatgtggatcctacagttactctagaattattagatggaaccagcacctatgacagaagat

SEQ ID NO: 852842 - DNA, 74 bp, Homo sapiens
attcccaggacagtcagtctggtactaacaatgcagcttcctgcctgacacagctcacttcaagaagtgcacaa

SEQ ID NO: 852843 - DNA, 101 bp, Homo sapiens
tcatagcttcagctctcatcatgatccagcagactgaaatcacttgtccaaagctcccctttgaattggagatttactacattcagcatgttatgctctac

SEQ ID NO: 852844 - DNA, 100 bp, Homo sapiens
aaacttaccaaaaatatgctgtgtgccggatacaagaatgagagctatgatgcctgcaaggtcatttcatgggcaacaacacagtgctggatgttttgcg

SEQ ID NO: 852845 - DNA, 99 bp, Homo sapiens
gagcttctcttccttccagattatctggttttgtccaactgcgagactggaagactgcaccataccagattatcttagaagacctaggactccaaaaat

SEQ ID NO: 852846 - DNA, 100 bp, Homo sapiens
ccagctccggcacgggggcctctcgtccgatgctcaggagagcttggaaggaaccaacatgcctgcaaccttcggccatctggcaggtggctacgacgcc

SEQ ID NO: 852847 - DNA, 100 bp, Homo sapiens
cttctccattgccgcgctcatgtcgagcggcggctctaaggagaaggaggcgacggagaacacaatcaaacccctgggtttcaggctctgtataactata

SEQ ID NO: 852848 - DNA, 100 bp, Homo sapiens
tggctggaggaattcagtttcttggggataagctgtcattggaaggaatagtggtacaaagagctgaatgccgaccagctgccagtgaaaactacatgcg

SEQ ID NO: 852849 - DNA, 98 bp, Homo sapiens
aggatcgggaagtggctccggcctccaggctccggggccggcgctgaccccatccctgcttcctacgcatacattggcccaccgtttccatggtcgaa

SEQ ID NO: 852850 - DNA, 99 bp, Homo sapiens
tgtgcttgcaggcgagggcatgtgagaatcgtttccttccttttaagaagaaatgctaatgtcaacctcaaaaaccagattcttgtagacactgtttgg

SEQ ID NO: 852851 - DNA, 100 bp, Homo sapiens
taaatctacatctgcaaagaatgcaggtacacagccctcacttgaaaggatcccagatacaattgatctgtaatgtcaccggccagttgagtgacattgc

SEQ ID NO: 852852 - DNA, 98 bp, Homo sapiens
tcttctgtcaaagatcggtgccgactgatgaaggatacttgcaacacagttggtggattcaaagtgggattggaccttcttgtagaatttgaattccg

SEQ ID NO: 852853 - DNA, 100 bp, Homo sapiens
tcgtgactccagagaagccgatccccatttttattgaaagatgtattgagtacattgaagccacagggaagttgaaagaatggagcctcatactgtatgg

SEQ ID NO: 852854 - DNA, 136 bp, Homo sapiens
ccccggtccattctcctcgcgctgcaaggatgctcctgggatttcggagaggccgcaggagtcatttctatgttcatgcggatgctcctaccaataaaacactggctgggctggtggtgcagcttcttcagttcca

SEQ ID NO: 852855 - DNA, 100 bp, Homo sapiens
agccacatcatatcacagtatcagttaaggagcttgatttgtttttggcatactacgtgcaggagcaaggcataaacttggaggaggcagtggagagagc

SEQ ID NO: 852856 - DNA, 99 bp, Homo sapiens
tcctcggagcgcggtccctgtattggtctcctgctcctagagggtgtgctgtccgacctcaccaaagtgacccggatgcatggaatcgaccctgtggtg

SEQ ID NO: 852857 - DNA, 99 bp, Homo sapiens
ttgcagccagggactgggcatccacccggccaggttcccaggaagttttcggctttgtgagaaaccttaccatcaaacacgatggccagcaacgttacc

SEQ ID NO: 852858 - DNA, 100 bp, Homo sapiens
gttcagccgcatgagcgagcggcagctggctctctggaatccggacatggatttgattgacatactttggaggcaagatatagatcttggagtaagtcga

SEQ ID NO: 852859 - DNA, 100 bp, Homo sapiens
cctacgaggaggtgcgcgagaagtacaaagtctattgcgtctgcagacatggatttcaaccagctggaggcattcttgactgctcaaaccaaaaagcaag

SEQ ID NO: 852860 - DNA, 100 bp, Homo sapiens
gacaagcccgaggcctgacttctagcactcctgagtttgagccctatgagcagtggaacctaggtttcattgtactgacaacctcagctggcatcatgga

SEQ ID NO: 852861 - DNA, 100 bp, Homo sapiens
ctgctgtttactgcactgagatgtttgtgtaaagtcaaacataaatctaccctacatgcacatcgaggtacttccggaacctgtgctcagatgacacccc

SEQ ID NO: 852862 - DNA, 99 bp, Homo sapiens
actggctacacatttccagcaggctgcagatacgagtggacaagcactcttaaaagacccattttacatgggcttgtaccagaaacgagatcgcacaca

SEQ ID NO: 852863 - DNA, 99 bp, Homo sapiens
agccacagctgatgacaaaaagcttcagagttctctaaaaaaactggctgtgaataatatagctggtattgaagagagttgtggaaagtaaaaatgtag

SEQ ID NO: 852864 - DNA, 100 bp, Homo sapiens
agagaagcagaattatacctagaagtctactaatggacagttagtcacccacctacatgttgaggggccatgctgatggccatccgacttcggggcatgg

SEQ ID NO: 852865 - DNA, 144 bp, Homo sapiens
gaacacagacaaacgtgccaacacttaagtctactggctggacttcatctccatggcaacaagcatggaaggctgaccggttccctgatgtgttacctgcttctgctactgatccaaactgcagaacttctcattcatccccaa

SEQ ID NO: 852866 - DNA, 100 bp, Homo sapiens
ggacaacttcaggtttaccccccgaatccagaggctgaatgagctagagtctatccttcactggagtctgatgatgatgaccctgctttgaaatctcgac

SEQ ID NO: 852867 - DNA, 99 bp, Homo sapiens
gcgagtacaaagcgggcgacctggtcttcgccaagatgaagggctacccgcactggccggcccggagagatgccaaaggccagtacctgtttgaccttc

SEQ ID NO: 852868 - DNA, 98 bp, Homo sapiens
tttggcattgatgaccaagattacttgattcctgacattcagacaactgacttgtaactgacttataactgacttgtaatacactgctactatatcaa

SEQ ID NO: 852869 - DNA, 105 bp, Homo sapiens
gtgggactgaagatgccccgttactgtctctttggggatacagtcaacacagcctcaagaatggagtctaatggggaagtctgcagatctccaggggagcccacc

SEQ ID NO: 852870 - DNA, 98 bp, Homo sapiens
agggacatggacaggtgcccgatcagatccttcaggctctgctcagcgcagcttggcagattatgtttgagaccttcaacaccccggccatgtacgtg

SEQ ID NO: 852871 - DNA, 98 bp, Homo sapiens
gtactctttcctcgtggaatttgaagattctacagataaatcagttacatggtgatgaattttgtcctgttttggatgcaacatttgtaatggtggct

SEQ ID NO: 852872 - DNA, 98 bp, Homo sapiens
ccccatgctccaggcagctctcatgctcaggaagaaaggagtcgggaatgagttctctgtatgtcttcaatcccatttttgggaagtggagtcaggta

SEQ ID NO: 852873 - DNA, 100 bp, Homo sapiens
ggggcactgggcttcctgccatcaccgatgtgcctaggcgcatttcaggtggatcatccatgccatggagtatgaacttcagatccgtggcggagacaag

SEQ ID NO: 852874 - DNA, 99 bp, Homo sapiens
ctgaatcatgattttcaagcacttgctctggagggaagagcgatgggagagtgtaagaagaagcttgggaagctgccacctcagtatgccctggagctc

SEQ ID NO: 852875 - DNA, 100 bp, Homo sapiens
tttgtgttaaccaaagccagcctggcatactttgaagatcgtcatgggaatgagatgctggaggaaggacatgagtatgcggtcatgctgtacacctggc

SEQ ID NO: 852876 - DNA, 50 bp, Homo sapiens
cggcgctggacctgcaggctgaaatctgagggaaaaggccataccaatgc

SEQ ID NO: 852877 - DNA, 100 bp, Homo sapiens
ccagttatctatgatagcaatggtgtcgtcctttcaatgcctcccatcatcaatgatcgtaaaaaggaccttgtaaaactacaggcaggggaatatgttt

SEQ ID NO: 852878 - DNA, 100 bp, Homo sapiens
tgggctctggcactgtcattggcagcaattgctttatcaccaacagtgtcattggccccggctgccacattggtgtggaaacaggaagagaactagaact

SEQ ID NO: 852879 - DNA, 99 bp, Homo sapiens
gagagcgcgaatatcgtcatcgttagaagagaagctcatagccaaactgaaaagcggaggagagataaaatgaataacctgattgaagaactgtctgca

SEQ ID NO: 852880 - DNA, 100 bp, Homo sapiens
ggacgatgaccaggcggcttgggagaatgagctgcagaagatgacccgggggcagagctatcagcttcccagtttgcacaattcatcaagaaattatgcg

SEQ ID NO: 852881 - DNA, 100 bp, Homo sapiens
gtcagaacgtggcttatgagtacctttgtcatttggaagaagcgaagagatggagtcttgctctcttgcccaggctggaagtgcaatggtgtgatttcca

SEQ ID NO: 852882 - DNA, 100 bp, Homo sapiens
gcagaaacagaggagttggagttgctactaaaaagagaggtgcctttatctgatgatgatgaaagttacacagtgacttttttgaacgaaccattctgtg

SEQ ID NO: 852883 - DNA, 98 bp, Homo sapiens
aacgaaatagacaatggactccatcccactgaggaccaacaagttgaaatcatcgcagaaggataaagttcgtcagtttatgatcttcacacaatcta

SEQ ID NO: 852884 - DNA, 100 bp, Homo sapiens
cccgtatgtgaagtgtccaactacctctttccagattgcagggtgatttcaggacaccaagagcacttttcaggattagaagaggctgtgtatagaaaca

SEQ ID NO: 852885 - DNA, 99 bp, Homo sapiens
tcagttgcacatccccacatcaatgcactgccaatggtttggtgcaagtgccaaagttgtgcatttcctgggacgagtcaaaccatggaattatactta

SEQ ID NO: 852886 - DNA, 100 bp, Homo sapiens
ccagaaagcggcttatcgaacagagccgggagttcaagaagaacactccagagagtgaagacatttccacctggacacctgaccatgtgcctgccctgag

SEQ ID NO: 852887 - DNA, 100 bp, Homo sapiens
agtgtcccgattgtctatgagaagtacaaggttatcaatagtctggctgtctatcgtcatcgtgagactgactttggtgtaggagttcgagaccaccctg

SEQ ID NO: 852888 - DNA, 100 bp, Homo sapiens
acaaggagaagaacgccaacaacattgtcgtgattcttctcttggtggcgttacttgctgcagccctgggttaatatgtgagacttggcaagtgagagcc

SEQ ID NO: 852889 - DNA, 99 bp, Homo sapiens
ttacagctaacatgttgtacctggaaaacaatgcccagactcaatttagtgagacctgtcatttactccatcctttatagtgatgctacaggacgaaga

SEQ ID NO: 852890 - DNA, 100 bp, Homo sapiens
ccagttctgtggcccctgccttcgaaaccgttatggtgaagaggtcagggatgctctgctggatccgggagtatatgttgctgcagtacgggaattttac

SEQ ID NO: 852891 - DNA, 100 bp, Homo sapiens
gccaggggttatcaccatgcaagctttgtcggaagaggaccggaggctctggatggaagccatggatggccgggaacctaccccagagggtataagtgaa

SEQ ID NO: 852892 - DNA, 98 bp, Homo sapiens
gagaagcctgaaaagtcgcagcgagctggagccgccggaggctggaggctctcaggtcatttttaccaacccattggagatagtgaagattcgtctgc

SEQ ID NO: 852893 - DNA, 98 bp, Homo sapiens
agaaagagtgtgcagcggattaaagctaaagacatagttcctggtgatattgtagaaattgctggtctagaattacggagtcaacaaagcaaacctca

SEQ ID NO: 852894 - DNA, 98 bp, Homo sapiens
tagcagttcattttgtgaaaaataatggtattctcccgctttcaaatgaatgtctacttttgatagaaggtggaatgaggtaccatctactgtctcca

SEQ ID NO: 852895 - DNA, 100 bp, Homo sapiens
ctagtctcagaactgttccttcagccaaagaaacaagccgtggaataggtgtatcaagtaatggtgcaaagcctgaagacccacccgaggacgggtcacc

SEQ ID NO: 852896 - DNA, 100 bp, Homo sapiens
gccaaacccgccactccagaaatccaggagattgttgataaggtggcattggtagggtggtcaacggagccttcatggtgctgaaagggcatcgatctat

SEQ ID NO: 852897 - DNA, 100 bp, Homo sapiens
aaagtgagcctgaagaaccatcggatactagagtaaaaggatggtttcttctggacaattatatacccacatttatctgctctgtcatatatttactaat

SEQ ID NO: 852898 - DNA, 100 bp, Homo sapiens
taaatttgcacatccttcgaaaagctgccaagttgaaaatggacgagtaatcgcctgctttgattcattgaaagtctgcaattaaggccttacgtcctgg

SEQ ID NO: 852899 - DNA, 98 bp, Homo sapiens
catgatcatgaacttcttttggccaagctcaaggtatggctctgtgggggcagcatggaggtccttccttgctcacgggtggcccacattgagcggaa

SEQ ID NO: 852900 - DNA, 100 bp, Homo sapiens
gaagggtagtctcgggatgccgtccgaagtcggcgacagcggccggggcgcaggcgcccgtgcggaatggcaggttggaaaagagactgttcaaaccact

SEQ ID NO: 852901 - DNA, 100 bp, Homo sapiens
ggctccgaggccgagtggcggtccgacagagtcctccgtgtcctcccccgcatgacccccttggtgtcagttgtacccgaggcgttctcagcagcagcaa

SEQ ID NO: 852902 - DNA, 98 bp, Homo sapiens
gcaaagtcgccgggggtgtggggtgttccacgctatgttgggagtgttcgctttcgagatctcagagaagctgtctcagctgcaggcacggcgccagg

SEQ ID NO: 852903 - DNA, 100 bp, Homo sapiens
ctggaagttttagcctagctgttctcaaggcggattaattagcccaagaaacattatattcattacaaggcgagtggataattccaacacaagactggca

SEQ ID NO: 852904 - DNA, 100 bp, Homo sapiens
agactcaaagttagacgtgaccatatcatagatgatgcacttgtccggtgcttagatgagtacgaagatgatgaagcagggcagaaagagcggaaacgag

SEQ ID NO: 852905 - DNA, 100 bp, Homo sapiens
gaaggaagaacttgttgcagagcaggctctgaagcacctgaaggaagaatcctgtaagtacaatcccaagtattctgttgctaatgacaccggctttgtg

SEQ ID NO: 852906 - DNA, 100 bp, Homo sapiens
tgtaatggaaagcatatggacaggtctacgccacatcacttaggagcgtgaggatcatccccggagaggacgggaggatcggcagcacagggaaccatca

SEQ ID NO: 852907 - DNA, 99 bp, Homo sapiens
acgagtctttccttagtaacctgggcgatagctggcatgtcagagcgggagcgacaggtgatgaagaagctgaaggaggtggtggacaaacaacgcgac

SEQ ID NO: 852908 - DNA, 100 bp, Homo sapiens
gaaactggcaggtgtcactgcactcagttgctggcttccacttcgggcttcctttccacaggtacaaacccgtagtgctgatgaaccaatgacaacattt

SEQ ID NO: 852909 - DNA, 100 bp, Homo sapiens
ttaacaatcgcaaagggaaacttatcttcttttatgaatggagcgtcaaactaaactggacagttacacctggaagaggcagcatcgagcctgaagcatc

SEQ ID NO: 852910 - DNA, 100 bp, Homo sapiens
gcagctgcggagcatgtcgaccccggcccggaggaggctcatgcgggatttcaagcgcataccctgtaaaaagtgtgtggtggttggtaatggaggagtt

SEQ ID NO: 852911 - DNA, 99 bp, Homo sapiens
taaactgctgatccacatgagagtccactctggggagaagcccaacaagtgtacggataaaagaatcagagtgtctcaacccttgacaagaggaccaag

SEQ ID NO: 852912 - DNA, 100 bp, Homo sapiens
ggctctgccacgctgagcggcatccagcttgccaccaggatggcagtggttctgaagagaagcggaaaagtgtattggcctcaactaccaagtgtggggt

SEQ ID NO: 852913 - DNA, 98 bp, Homo sapiens
taattttagggtcctttatatagaagggagagggctgataggatgtcttcatttggtgattttgttgcattgtccgatgtttgtgatgtaccaactgc

SEQ ID NO: 852914 - DNA, 98 bp, Homo sapiens
cttagaggaacgaggattatacagaaatttgaagcacagttggtggatctgaaatctgaactgacagaaacccaagcagagaaagttgttttggagaa

SEQ ID NO: 852915 - DNA, 100 bp, Homo sapiens
gcaagatgattttatctctccatgtggggcctgcaggcaagtcatgagagaggccatctgctctatgtggctctgagccctgggcagcaccggctcgggg

SEQ ID NO: 852916 - DNA, 100 bp, Homo sapiens
ccaagctgactatggccttgaacacttgatgcaccagcaaggaatactgaagaccgatgatctcataacaaggttctttcgtctgtgtactgaaatgtgt

SEQ ID NO: 852917 - DNA, 100 bp, Homo sapiens
aacggcatgtcatctttgccaggactgatgcagatgcccctcctccaccagaggactgggaggagcatgtcaacagggagaccaaattttgaggaaggtg

SEQ ID NO: 852918 - DNA, 99 bp, Homo sapiens
tcttgccttctccacacttgtttggagaatggggtactaagagaaaagcacgaagctgtggatcatagttcccagcatgaggaaaatgaagaaagggtg

SEQ ID NO: 852919 - DNA, 99 bp, Homo sapiens
gtggcctgaggcttggataagtgggttagagatgtttatgattacttccgagctgtcctgcagcgtgatgaaagaagtgaacgagcttttaagctaacc

SEQ ID NO: 852920 - DNA, 100 bp, Homo sapiens
ctgtgcagaatctacaaattttgctactgtcagatggattgactatggaaaagttgccaaattggtagtatagatcaatcagtgttaaaagaattacccc

SEQ ID NO: 852921 - DNA, 100 bp, Homo sapiens
ccctttcaaatctccatctataggaatagccaggccagaagaaggaaggcctgtggtgagtgggacaggaaatgacatcaccaccccaccgaacaaggag

SEQ ID NO: 852922 - DNA, 99 bp, Homo sapiens
gttaatccagatcgcatcaaacaagatctccccaataatatgatttaccaagtcgccattaagtctcttcctcaagactggctgtggtgtgaaacctgg

SEQ ID NO: 852923 - DNA, 98 bp, Homo sapiens
tgaacaaatgcctcctgaggatttctgtgcctggaaaatatctgttaacagactgcttttacacctacggcagcttttggcaaggagtctgaagttct

SEQ ID NO: 852924 - DNA, 100 bp, Homo sapiens
tcttcaatgacttccttatgctctctaatacccagttcatagagaatgtggaatgaatcttacttgttgaatatcttctggttactagttggattcattt

SEQ ID NO: 852925 - DNA, 98 bp, Homo sapiens
tgcaccgacatgggcatcacttgccccatcgtccccgggatctttcccatccagattatgtttgagaccttcaacaccccggccatgtacgtggccat

SEQ ID NO: 852926 - DNA, 100 bp, Homo sapiens
cctggctagaagcagagacaccaggacagaaaagacagtgttctgctttcatggagttcacagaagagtcgaggagggtcacggagactcaccagttggc

SEQ ID NO: 852927 - DNA, 146 bp, Homo sapiens
tcagctctcggagtaggaagctcgggcgctccggctgtaaggagccgcggcggggggaaaatggagcccttcaccaatgaagggcacagtgccagatgatgctgtagaagccttggctgatagcctggggaaaaaggaagcagatc

SEQ ID NO: 852928 - DNA, 98 bp, Homo sapiens
tgggtctggagacgccgtggcagcctgaacggagtgtgcgacggattgggaggccagattacctgtccctaatactgagcagaagctggtgaatgaaa

SEQ ID NO: 852929 - DNA, 101 bp, Homo sapiens
gccagcgcttcctgtattccttgtatcgacatacacactgggtacgctgtgccaagtctggacaaagtgccaaaggatcttccccctgacacaactctgct

SEQ ID NO: 852930 - DNA, 100 bp, Homo sapiens
gctgatagactccttccagaataactcaaagttaagtgggcagaccaacatccacctcagcaaaaacttcttcctgacgaatcgcgccagggagcgctca

SEQ ID NO: 852931 - DNA, 98 bp, Homo sapiens
ccaattaaagaaagagaagctggagtatactccaggagagcatgaatatggattatttccagcgcccattcatgttgctgtccaatgtgaaagaaaac

SEQ ID NO: 852932 - DNA, 100 bp, Homo sapiens
aaaatgaaacaagcctttgctgaattggagagctgatggagaaactgaggcccagaaattgatgtccagaatgctttgctcttagccactgtactattat

SEQ ID NO: 852933 - DNA, 100 bp, Homo sapiens
ggtttaatatctgattgggacaacattcagacccatttccagtcatgaatcttagcaaagcaatgtctcaagatggtgcttctcagttccaagaagtcat

SEQ ID NO: 852934 - DNA, 98 bp, Homo sapiens
gaggtctccgcgccccgaggtctccgcggcccgaggtctccgcccgcaccatgcggctgggcagaataccctctaccatctgctttggtcagggtgcc

SEQ ID NO: 852935 - DNA, 98 bp, Homo sapiens
cggacggcccctgtccccgctggcgggcttccctgtcgccgttcgctgcgctgccggagctgaagaagcaggtggagagtgccgagctgaagaaccag

SEQ ID NO: 852936 - DNA, 98 bp, Homo sapiens
ttggggatggctataatgggtatggaggaggacctggagtattttaataagcggaaaacctactttgctcacgatgcccttcagcagtgcacagttgg

SEQ ID NO: 852937 - DNA, 100 bp, Homo sapiens
agaccattgaagagctccgggacaagctctacgaactcgacggggaccccaagaggaaggaattcctggatgacttgttcagcttcatgcagaagcgagg

SEQ ID NO: 852938 - DNA, 100 bp, Homo sapiens
ctgcaagagcaacatctttcctcaccccaaggaaggaaaatcacctcggcagtgtttgaaggaaggatactgcaactctttgaagtacgcattttttgag

SEQ ID NO: 852939 - DNA, 98 bp, Homo sapiens
ctatccaaggacatgagcagtttacacatctcacccaattcaggtgctggagaatctggtaaaagcaccattgtgaagcagatgaggatcctgcatgt

SEQ ID NO: 852940 - DNA, 100 bp, Homo sapiens
ccaccggataattctttttatgtgcgaacatgtaacaagaatccaaagaaaacaaaatggtggtatcatggaggagatgttaaagtaacccatcttgcag

SEQ ID NO: 852941 - DNA, 100 bp, Homo sapiens
ggaaataccagccaaaatcatttttgaggatgaccgggttcctgacggagacttcgcccttcatgtggtccaacctgggcattggcctagctatctccct

SEQ ID NO: 852942 - DNA, 100 bp, Homo sapiens
cacagtttgcgggactcagtcccatcactccaaggagagaagtactatactggcaattgctggagaagattttgcaattgttgcttctgatactcgattg

SEQ ID NO: 852943 - DNA, 100 bp, Homo sapiens
cgcgctgccgaggagaacccagcggggtgttggaagcacctgccctccctgagttcagtgtgtccagtgttcccggccagatgctcatgccatgccttcg

SEQ ID NO: 852944 - DNA, 98 bp, Homo sapiens
aggatgacagctggagaatggagtcaggcaattatttgggatatacctgtaagtgtgggggccttcagtcaggaagtcccttaagctcccagacatcc

SEQ ID NO: 852945 - DNA, 100 bp, Homo sapiens
aaactcaatgctgctgtgtgggaagaagatttgtaaagaaaactcttaggatgaaaactttcggaagagaaagttgcctgtggtaagttcagttgttaaa

SEQ ID NO: 852946 - DNA, 99 bp, Homo sapiens
ctactcctcctcatctgtccccaccacaatcaatacgattggaaccagcacaagtacaagcaaaagactggtttaaaagaattagagttcttgaaaaaa

SEQ ID NO: 852947 - DNA, 99 bp, Homo sapiens
ttgcctccgccgccaagagtgagcgagcggacccgcgatgggagaagctgtctttgctcggtgcttatcatctctgaaggatgagagaattcaagctag

SEQ ID NO: 852948 - DNA, 100 bp, Homo sapiens
cagaggtggtctatcgggagctggaacaggacacccctgatgccccaccccggccaacttcctattaccggtttgagagtaccgtacaggtgagcaagtt

SEQ ID NO: 852949 - DNA, 100 bp, Homo sapiens
tagcactcagcgccccgccaacagatagccatccgagcttgtttcctggggtttgtgttcggctgcggcacgctgctaagttttagccagtcttcttgga

SEQ ID NO: 852950 - DNA, 128 bp, Homo sapiens
aactgggtcgagcggtttcttttggctcacaattatcctagagtgaggacttgccttctccacagtaggcactcctgactacattgctcctgaggtgttcatgcagaccgggtacaacaagctctgtg

SEQ ID NO: 852951 - DNA, 101 bp, Homo sapiens
ctcaggacggacaagcacagtcttcggaagtgtcaaatcaacagtgccttgacatctttccacactgctttggaacttgcagtagaccagagagaaattca

SEQ ID NO: 852952 - DNA, 100 bp, Homo sapiens
gctggagaagctgggattggagattccacccaaacttgctggtcactgggagtgtaaacaggaacatcgataagtagtgtaaaaacttgcacaatgaaat

SEQ ID NO: 852953 - DNA, 149 bp, Homo sapiens
atcgcgatgttggtgagcgtggggaatctggaagaggctggggagtctgtgtccttccagctgcagatacggagtttccaggagactgacaaggcgtggcatgggggatgtctggcgctggcagagctgggcaggagaggcctgttgct

SEQ ID NO: 852954 - DNA, 99 bp, Homo sapiens
ctcgccctcctctggggatcgctgtgcgccggtttaactatagatcaacacatcatcttgcatctcatgggttctatgaatttttaaattggtttgatg

SEQ ID NO: 852955 - DNA, 98 bp, Homo sapiens
actcggccatgagtccttctactggcagctgccggagacataccagggagacaagaatttgaaagacatattggctgacctgatacctaaggagcagg

SEQ ID NO: 852956 - DNA, 98 bp, Homo sapiens
cacattggaccctcctcccaactgtagagatcctggcaaatgggtgtttcttcccagaaagggatttttctccatgactgcagttgaattgcagagtt

SEQ ID NO: 852957 - DNA, 100 bp, Homo sapiens
cagataccctgggccatccagcaagataccctgaggcagtaacatatcacgtcttgtgttgaaaagcaaaatgagttattcctgatgaagctaaagcttt

SEQ ID NO: 852958 - DNA, 100 bp, Homo sapiens
gataagcaaccaacgttcagagcactctatgaagcaatacgggataatgaccagtcaacaggggacataaaagtaattggtggagatgatctctcaactt

SEQ ID NO: 852959 - DNA, 101 bp, Homo sapiens
actcttaaagcaatccccgtgaaactggcgatggaatatgagaggagccctctggaaagaaaaggacagaccctgtgctttcatgaaagtgaagatctggc

SEQ ID NO: 852960 - DNA, 99 bp, Homo sapiens
attgcaggacaagagatttaagattatgcttgtgctcttcagagggacattttgcttcagggacgactatacctttcagaaaactggctatgtttctat

SEQ ID NO: 852961 - DNA, 98 bp, Homo sapiens
cgactggcggagcaccgccttccggcagaagctggtcagtcaaatggaatagaacgtgtccgggctgtggccaagcggattggtgaggtccaggtggc

SEQ ID NO: 852962 - DNA, 120 bp, Homo sapiens
catcaagggtcctgagctgctcaccatgtggtttggggagtctgaggccaatgtcagagaaatctttgacaaggcagactgccagattcacttacagccccagctaattccaccaaacat

SEQ ID NO: 852963 - DNA, 98 bp, Homo sapiens
tttgaaatattaaaggtgattggtcgaggagcttttggggagattgctcttaaacttggtgtgactgctaatgatgtaaagaatgtcattatctgggg

SEQ ID NO: 852964 - DNA, 149 bp, Homo sapiens
tgcggccacaaagggccctgggcctctaggtcctggcgccccgcccccactgctgtttctcaataagcaaaaagggagaagcaggaagagctagcaaggaagcatgcaaggtttgtcctgtcactcaaccaaactatggagaaaaaagc

SEQ ID NO: 852965 - DNA, 99 bp, Homo sapiens
ccggttgccaggccaaggagtggactagggtcgccggggaagcgggtttatcatttaaaagtgcctgtgtgaagtcacttttgctggaaaactgcagct

SEQ ID NO: 852966 - DNA, 99 bp, Homo sapiens
tgctgcctgtcattcagttcctccagaagagcatccagcggcacctggacgacctgtcgaaactgggtggggctcgagttgccctgaagatcattaaga

SEQ ID NO: 852967 - DNA, 100 bp, Homo sapiens
cgcagctccacgcagcaagacccgcgccgccgggacccccaggacgacgtgtacctggacatcaccgttgcgacaaccaccagttaagcgtttgagactt

SEQ ID NO: 852968 - DNA, 100 bp, Homo sapiens
gtgaggaagagctgccgagacgcggctatgtgactacgtttgtgacctcctcttagaagagtcaaatgttcagccagtatcaacaccagtaacagtgtgt

SEQ ID NO: 852969 - DNA, 100 bp, Homo sapiens
tgctcgccctcctcctgcctcactgccagaagctctttgtgtatgaccttcacgcagtcaagaacgacttccaggcaaaagtcaacaactctagcttaat

SEQ ID NO: 852970 - DNA, 100 bp, Homo sapiens
gactctgcctgacctggatgtagtggcaggaagcttgctggactttctgaaaagtgatgagggcagcaagcagccattgccaaaactcattgacttctca

SEQ ID NO: 852971 - DNA, 115 bp, Homo sapiens
gcgtgactgctacgccatccgtgtcgccaccgccctcacgctgatgaccgggctttaccagacagcacccaagaaaacctcatttggctcgctgaaggatgaagaccggattttc

SEQ ID NO: 852972 - DNA, 100 bp, Homo sapiens
ctgcattgaaaaatgctggccaggctgtcacaattgttgcacaatatcgacctgaagtgaaattggagcgatttgaaattccaatcaaggttcgattaag

SEQ ID NO: 852973 - DNA, 100 bp, Homo sapiens
atgtatggagaatggctggtctcctactcccagatgcatccgtgtcatgtgaggatgatttggctgagaagaggagaagtaatgaggtgctacgtggagc

SEQ ID NO: 852974 - DNA, 100 bp, Homo sapiens
ctggcgccaggcgcggaggactcccggtatcttttgacaggctggcgcctcggctctggggacccgcagattacatgaagcagatgacatttgaagccca

SEQ ID NO: 852975 - DNA, 100 bp, Homo sapiens
agctttgtagttttgcgtgtgttgaaagtacaattctattgcacatcaatgatatcatcccaggaagctgtagagaaatatgaagaagtgctacataatt

SEQ ID NO: 852976 - DNA, 50 bp, Homo sapiens
aagaaacttcctcagtaaagcgcattcccatcaagagcaccatggacaac

SEQ ID NO: 852977 - DNA, 100 bp, Homo sapiens
ttgccctcagcatctcccttcatgtctgggtcatggtgtttcagggtaactctaactttcgggacccagtgcaaaacaatttcatccctcccatcgtggc

SEQ ID NO: 852978 - DNA, 100 bp, Homo sapiens
gcagttttcctgaagcccggggccaggagaagattgtaaaccatggctgtgtggatacaagctcagcagctccaaggagaagcccttcatcagatgcaag

SEQ ID NO: 852979 - DNA, 100 bp, Homo sapiens
gacagtgaaactggtcgatccaagggatatggatttattacagtagctacagcaagctgggtagcaggcagatccaaaggatatcatgaagtttccaggg

SEQ ID NO: 852980 - DNA, 99 bp, Homo sapiens
tccactgccgtctactcggccactccggtcccgacacctagcctgcactcaaaagcctcgaaagtttgactgtgaacttccagatatttcattaaaaga

SEQ ID NO: 852981 - DNA, 99 bp, Homo sapiens
tttctgcttaagttggcaagacactccaagtttggcatgaaaggggttttgcgaccacaagcttcatgatgtcttaattgccccaggaacagcagatct

SEQ ID NO: 852982 - DNA, 98 bp, Homo sapiens
aaacaggcacacaagtgtgaggagttgctaaatgctcagctaaaagatggcggcaaggcagcccaggcaaatgtaagaataggcgatgtggttctcag

SEQ ID NO: 852983 - DNA, 100 bp, Homo sapiens
ccaaagcaaatgtgtccaaattagtagcacacctggaaatgattggagacacttctaaaggaggcatagctaaagttactcaatccaacttgaagtcagg

SEQ ID NO: 852984 - DNA, 99 bp, Homo sapiens
aagatagctgtggatcgagtgaacgctgctgatgggagataccatgtcctgtttctcggaacagtgtcttcattggctgctctggcatggagctgatat

SEQ ID NO: 852985 - DNA, 99 bp, Homo sapiens
tgagtcccaccgatgcttcaaatttaacaggttgggacagcgtcttcgctgctgctggatagtcgtgttttcggggatcgaggatactcaccagaaacc

SEQ ID NO: 852986 - DNA, 98 bp, Homo sapiens
aaggaatccaaatgcatcattcagatgcaaggcaactcgaccagaatagccaggccagaagaaggaaggcctgtggtgagtgggacaggaaatgacat

SEQ ID NO: 852987 - DNA, 100 bp, Homo sapiens
acctaatcaaggaagcgggaaacacagttaccctccgcatcattcctggggatgcttttaatctagacaacgagcaaccagattatgatatggattcaga

SEQ ID NO: 852988 - DNA, 100 bp, Homo sapiens
aagatgatgcccagtggtcatgtcaaaagaaagatacatgtagaccccaaagagtgaccctggaaacagacgggggattcttataagtcacaaaagaaaa

SEQ ID NO: 852989 - DNA, 100 bp, Homo sapiens
gcccaatgcctttgatggaccaattaccataaaaagcataacccctactgtagaactaaatgcactgtgcatgaaacttggaaaaaaaccaatgtataag

SEQ ID NO: 852990 - DNA, 50 bp, Homo sapiens
acatcagacacagatggcaattaataacgacatgatagtcactgacaaca

SEQ ID NO: 852991 - DNA, 99 bp, Homo sapiens
atggcttggagcacttcctattccactggattgggaaagaccatggcagcaaaagatacagatattgtggatgaagccatctattacttcaaggccaat

SEQ ID NO: 852992 - DNA, 100 bp, Homo sapiens
tggtggtgtgcaaggagtccccaaaggagtatctccagcctttcaaggacaaactagaggagttcttccaaaaagaatctcacaaactatgatctctgca

SEQ ID NO: 852993 - DNA, 100 bp, Homo sapiens
tccagtgctactgctacaaataagttctgaatgcagtgatggggaatggtctgcttctttgcctcatcgattttctggtacagaaaaagatcaatcctca

SEQ ID NO: 852994 - DNA, 107 bp, Homo sapiens
ttgcctatagtttcctccaacaactcattcgctatgtggatgaagcccatcagtatatcctggagtttggaataggaggccttcaagattttgtgctgaaatctgca

SEQ ID NO: 852995 - DNA, 100 bp, Homo sapiens
gtttaagggtactttggtgcatgaagctcaactcaactatttctacatctctcctggaggtgctggaggtggtgagagccaactatgacacgctcacgct

SEQ ID NO: 852996 - DNA, 98 bp, Homo sapiens
gtacgtgctcccgcctccgactcaaggccagatattcgaagcttacaacatggcagctttgtggaaattaccttgtattttcatctgtgagaataatc

SEQ ID NO: 852997 - DNA, 98 bp, Homo sapiens
cggctccaccccttccacgtcatccgcatcaacaagatgttgtcctgtgctggggctgacagcaaagagacgttgattattgaaccagagaaaaatgc

SEQ ID NO: 852998 - DNA, 98 bp, Homo sapiens
gcccaagctcatcgagaagtgctggaccgaggacgaagtgcttcagaggatgattccgaagaagacggagaccataacaggacatttgatattgccta

SEQ ID NO: 852999 - DNA, 100 bp, Homo sapiens
tcttattccactgcatgtatttgtgttgttactgatgcagagatacagcaaaagagtctacataggttctgggatcctggctgctacaaatagtactgaa

SEQ ID NO: 853000 - DNA, 98 bp, Homo sapiens
ttcctcatggatacggggtcccgggaggcagccttcaccagggacctgcccaggaaaccagcagatgcccagggaccagtccaacgtcaggcggatgc

SEQ ID NO: 853001 - DNA, 99 bp, Homo sapiens
gggaagcggcgggcggggtggagcagccagctgggtccggggagcgccgccgccgcctcgatggggctatggagttactagtagagaaagcaatcagca

SEQ ID NO: 853002 - DNA, 140 bp, Homo sapiens
ctccgattccacacttgattctcttatacgctacttttactcagagtttgaaggttgtgaccaaaagaggctccgtggatgcctggactttggccttttctcctgattcccagtatctggccacaggaactcatgtcggg

SEQ ID NO: 853003 - DNA, 100 bp, Homo sapiens
aacttcttcagaattagaaaggagctgcttcccaataaggaaacagctgcccaaagacacgagactttaacaagcttgaacttagaaaagaaagctcgtc

SEQ ID NO: 853004 - DNA, 99 bp, Homo sapiens
tttgcacatgtaacatccctgggtttggaaggtttgcagttgctgctcttcagtccaaagtagaacagtatgagcgtgaaaccaatcgcctcaagaaag

SEQ ID NO: 853005 - DNA, 100 bp, Homo sapiens
ttcatccctcagagcagttggctctcactggaggagacatcacagctttcccagatcgggaggaaaaatatggaatgtgttttaccgctgactgaacaca

SEQ ID NO: 853006 - DNA, 99 bp, Homo sapiens
gccaacatgtggttcaagaaccttgacaagctcatccggctggtaaatgcgcagtacctgcaagatgagaatggcgtgggctacgtgctgagtggggct

SEQ ID NO: 853007 - DNA, 100 bp, Homo sapiens
gggataaaacagctcgcagggaagatgaaagttacggaaatgggacgtcggtcatcagatactgaagaagaaagcagaagcaagagaaaaaagaaacacc

SEQ ID NO: 853008 - DNA, 99 bp, Homo sapiens
cagaagccgctatgcttcctggacagcttgcagaaccgtggccagagcaggccggtttggcaccaagggcttggctatcacatttgtgtccgatgagaa

SEQ ID NO: 853009 - DNA, 100 bp, Homo sapiens
gagctgctacgagaagtcttcatttctgtgtaaaagaacctctctacatatgacatcgtgatcactacctatagcctcgtggccaaggagattcccacaa

SEQ ID NO: 853010 - DNA, 98 bp, Homo sapiens
gtatcaaatatgacccaagcattggtatctacggcctggacttctatgtgggtgacgcagacttacgatgcaggtgcttgtatctacttctattttgc

SEQ ID NO: 853011 - DNA, 116 bp, Homo sapiens
ggtggtcttgcatgatgatggctataagaaacacctcaaacagcactgcaacaaggtgagaaggactggcagaaatacgagactgctcggcggctgaaaaaatgtgtggacaagat

SEQ ID NO: 853012 - DNA, 100 bp, Homo sapiens
ggagatgaggtggagttctcagtgattcttaatcagcgcactggcaagtgcagcgcctgtaatgtttggcgagtctgctagaagaaccacacctcttttg

SEQ ID NO: 853013 - DNA, 99 bp, Homo sapiens
aaacctggagagaggagttaggagaccagattggagcctccctgcccttcgctatcctgacgctggtgaacgccccgtacaagcgaggattttactgcg

SEQ ID NO: 853014 - DNA, 100 bp, Homo sapiens
agagctgagtccattcacactggtttggaagttgcaatcaaaatggttgataacactgatgctgaggggaggctcatactggctgatgcgctctgttacg

SEQ ID NO: 853015 - DNA, 100 bp, Homo sapiens
cctgacgcatctgtctgaggagcggtcagtgacgcgatggagcgggcaagatgacctctcccgacaggatgacaatgatcccccaaaagaatatgatcct

SEQ ID NO: 853016 - DNA, 98 bp, Homo sapiens
ctcaccagccctcgcctcccgagtcactgcagccaacccttcagcaaggaggatcccttttcccccagaaattactcaatgctgaaacctctcaaagt

SEQ ID NO: 853017 - DNA, 98 bp, Homo sapiens
tggatttgccggggcctgttttctgaaaaatggaccacttaaaaagtacttcttacaggtcaagtgaaaagtgccaaatctgtaacaagccatgacca

SEQ ID NO: 853018 - DNA, 98 bp, Homo sapiens
ttttctggcggcggtagatttgaagcgcttcaaaggaccggacccagagaagaggaaaactctaccggtgcaggtcctcctgctagaagcagcagaac

SEQ ID NO: 853019 - DNA, 100 bp, Homo sapiens
gaatacatcaagattctgaatctggtgatgaacttagcagcagctccactgaacagataaggacttgggaagatccccatgaaaaagataagagcacgaa

SEQ ID NO: 853020 - DNA, 100 bp, Homo sapiens
tatcctcggtgctgtggtgcagagctagttcctctccagctcagccgcgtagtgtggcttcctgttgtggtgcatggccccgagcccttctaatggggct

SEQ ID NO: 853021 - DNA, 98 bp, Homo sapiens
tgacatatttgtccatggggatttaaaaccaggtgaggggaagtggcttcgaaacattgactattaccgtttagatggttccactactgcacagtcaa

SEQ ID NO: 853022 - DNA, 100 bp, Homo sapiens
gtgtgtctgatctgctgggatcctagagctggaacaggtgctggagcgctggagcacgtgccctcggaccatcgaggtcctgatgaacacctacagtgtt

SEQ ID NO: 853023 - DNA, 98 bp, Homo sapiens
attatgggatattcgagatggaatgtgtagacagtctttcacgggacatgtctcagatatcaatgctgtcagtatcggtcgcttggttatcggacaga

SEQ ID NO: 853024 - DNA, 98 bp, Homo sapiens
gtgggcgtcttcacccccaccattgaggcccgcacagcccagtccatgctgttacagcatggagctgagccaaccatccgaaatacagatggaaggac

SEQ ID NO: 853025 - DNA, 98 bp, Homo sapiens
aaaacgccaggcggatctcagaaggccagttcaaagactccagcgggaggaagaagaggcctttgccagcagtcagagcagccaaggggcccaatccc

SEQ ID NO: 853026 - DNA, 99 bp, Homo sapiens
ttcaagagtgaatatagcaacttatgtgaacctgagcagtttgtggttgtgtccaaacaggagctttacagaaatgcactgtatgagtggccattccaa

SEQ ID NO: 853027 - DNA, 51 bp, Homo sapiens
ttcaccagcaccggctccagtgggctctgtactaggttttgacaagcttgc

SEQ ID NO: 853028 - DNA, 100 bp, Homo sapiens
atggcctagacagaaatctccactattttaacagtgataggagagaaggcaagcttggctgctgtggaggctggggcccatcctcagaccatctgctccc

SEQ ID NO: 853029 - DNA, 100 bp, Homo sapiens
ggcagaagtgtttggagagggaaatatgtttgctgtttcacctgtatcgactttccaaaaggggcataatcaacccatttcctgcttcaaaaggaatcag

SEQ ID NO: 853030 - DNA, 98 bp, Homo sapiens
gcccgcccctgtccgcaccgctggcagcctgaagagagtcgctggccgtggtcgccgctaggagtggccaaatcaatgaaggtccctgtatatgagac

SEQ ID NO: 853031 - DNA, 100 bp, Homo sapiens
aatatgaagcaacatgagatggtggatgaacccacaggtttattacccagaactctttgtctgggtcagtcaagaaccatttccaaacaaggacatggag

SEQ ID NO: 853032 - DNA, 100 bp, Homo sapiens
ttgttgtcagcagacttgtttacagaaaaggagttttgggatggtggttgataactaagacaaagtgctgaagaaatgatagaagttgcaaagagacgtt

SEQ ID NO: 853033 - DNA, 100 bp, Homo sapiens
ttttcaagcctgaaggaaaggcagaactgcctgattacaggagctttaacagattaatttcattagaggaagaaaaccagcgcaaggaatcctctagttt

SEQ ID NO: 853034 - DNA, 100 bp, Homo sapiens
taggattacaagcgtttcttcaaaatttagtagctcacaaggacattgctaactgaaagagctgggaacctttgctcaaagctccatcgcccttcaccat

SEQ ID NO: 853035 - DNA, 100 bp, Homo sapiens
gctgccctgtggcctcgctcctcggaggatttttaaagagcgagaagaagatttgaggcgtttgtctcgcccattggaatgttcttgtttccgaacatct

SEQ ID NO: 853036 - DNA, 100 bp, Homo sapiens
gctattgctttcacacagtatccacagtacagctgctccaccacagagctggaagtcgagtgtgctactcaactcaggagatttggagacaaactgaact

SEQ ID NO: 853037 - DNA, 100 bp, Homo sapiens
aaaacgactcactttgagattgaaatatttgatgctcaaacaaggaaacagatatgtattctggataaggtgactgaacttgaatgtgttagtagccaag

SEQ ID NO: 853038 - DNA, 98 bp, Homo sapiens
gtcagagaaaccggggcaacctggagttgagacagacgactgggatggaccagacttaattcagtgcacaaatgagatgaatgtgaacatcccacagt

SEQ ID NO: 853039 - DNA, 100 bp, Homo sapiens
ctctgctaccatgggtggatgtttgagatgcatggcaagaccagcaacttgaccaggatctgggctggtcctgcagttctgagcttgggttccctttgcc

SEQ ID NO: 853040 - DNA, 117 bp, Homo sapiens
aagactcatgttacatgagaaagccaccaagaagaccaaagaaaaggagacaaggatggctcttcctcaggtttccacttgagcggcacagtgacagaacctgcaatacaatcggag

SEQ ID NO: 853041 - DNA, 99 bp, Homo sapiens
gccctacagcagaaacacgaagagattgagagccagcacagtaatttcacggtccctcatggtgtctcactccagcagacagaggattgtgtcgtgcca

SEQ ID NO: 853042 - DNA, 98 bp, Homo sapiens
ggcctgggtacaagcattcctcgtcagcaacatgctcctagcagaagcctatggatctggagacaggggcaagtgtccgagtggtgaatcagctactt

SEQ ID NO: 853043 - DNA, 100 bp, Homo sapiens
cgcgcaggagcctcccggagctgttgaccacgttgttcctgagcctgggacaagcctgctcgctgcctttgaccagtggagggaatgggccgacagcaag

SEQ ID NO: 853044 - DNA, 100 bp, Homo sapiens
ctccagagaagaggattcttcatatgtgatcaaccttatgaacctgttagatgcctgtgaggagccaccaacatttgaagctatggagctcattggtaaa

SEQ ID NO: 853045 - DNA, 99 bp, Homo sapiens
acagagcattgaggaggctgtggctctggtagaacacttgcagagggaatctggtcaaacatggaatggggtaaaaaagagtgtcaagtggacatgcaa

SEQ ID NO: 853046 - DNA, 98 bp, Homo sapiens
agaattcatgattgaagaaatgcaggtttcccaacctctttcccccactgaagccggagacggtggcccggaggacagtggaagctgtgcagctcaac

SEQ ID NO: 853047 - DNA, 98 bp, Homo sapiens
acatttggcagaataaatgaaccagtgctggtcccaaaggcgataacatctatgaatggagatcaaccattctagggcctccaggatccgtgtatgag

SEQ ID NO: 853048 - DNA, 99 bp, Homo sapiens
aaggaagctgcggaaggattgaagtcaaagaattgaaaccctccaaaccacgtcatctgattggacattccagctacatcacacaccttgactggtccc

SEQ ID NO: 853049 - DNA, 100 bp, Homo sapiens
cccgtgcgactgggtggcgagactctcaaccccgtgtatgtgccctgcgtgaaggtggccaagcaagaggagttcttcaacctgtcccactgccaactgg

SEQ ID NO: 853050 - DNA, 100 bp, Homo sapiens
catgcagtaattacattcaagacaagagcagaagctgaagcatttcttaaacaattaggtctacatcctaactggcaattcgttgatgtatatggaatgg

SEQ ID NO: 853051 - DNA, 100 bp, Homo sapiens
tagcggactacggagacgggcccgactcctccgacgccgatccggacagcggcacagaggagggagacaaatcttcctattttcaagctgaaagaatcta

SEQ ID NO: 853052 - DNA, 99 bp, Homo sapiens
tgtatttgcagtttcctgggactgctaggagaaagacgagaatccaggacttgaatcgtatcttcccactttctgaggactactctggatcaggcttcg

SEQ ID NO: 853053 - DNA, 98 bp, Homo sapiens
ggccatcccgaaactgtgattgttttctgaatagcctaacatggcagaccagagacagcgctcactgtctacctctggggagtcattgtaccacgtcc

SEQ ID NO: 853054 - DNA, 100 bp, Homo sapiens
gcagaccttcaagatccgcatggagcctgacgagacggcatctgcaggaaccacaccacactttggaggccatgctgcggcccagagtcaccacgctgcc

SEQ ID NO: 853055 - DNA, 100 bp, Homo sapiens
agaagaaaaaaactaaaaagatatttgatattgatgaagctgaagaaggtgtaaagatcatggaagggaagtggttgctgtgtatgttactggtgcttgg

SEQ ID NO: 853056 - DNA, 100 bp, Homo sapiens
ccttattcttggcactacatgtgactaaaggaagatgcagatcgttttcagaaacatggtatggatgagtttatttctgcaaacccctgcaagcttgatc

SEQ ID NO: 853057 - DNA, 100 bp, Homo sapiens
tagactccagtttagaccacagacataaacagaaagtcttacatgacacaatggatctgaatcatctcttgaaagctatactgacttctgttgaaaccat

SEQ ID NO: 853058 - DNA, 100 bp, Homo sapiens
cgtgtggagtatgcttcgtggtgtctcagtgcagcgccagggataaagttccagttatactccgtgtacttcctgatcctgtccatcatctacttcttgg

SEQ ID NO: 853059 - DNA, 100 bp, Homo sapiens
ggacttcttggcttctcccagcatagccccagaggtgtgttgcagtcactcattgaaaaacattttcctgctccagacaggaaaaaactttatagtttac

SEQ ID NO: 853060 - DNA, 100 bp, Homo sapiens
gaagctgctgcccagaacgtgtactgcttgagaacagaatacattgctgattatctcatgcaggtggatattccatctattataaccaagaaactattaa

SEQ ID NO: 853061 - DNA, 100 bp, Homo sapiens
aactgaaaatagataccaaagaaaagaaagagaaaaagcagaaagtagatgaagatgagattcagaagatgcagccagcgatctgtacatgagacccagg

SEQ ID NO: 853062 - DNA, 100 bp, Homo sapiens
atagagaaatctggtctaatgaactttctcctgtcctcaatctctggaagaaactaaaccaggaattatccagactgccttgccactagatgaatggaag

SEQ ID NO: 853063 - DNA, 100 bp, Homo sapiens
ttcaggttctgagggaagccatgaatgtagaaggatttgacgggatctgaactatacacccaggcggccagcctcctgcatcctgtggtttatactaccg

SEQ ID NO: 853064 - DNA, 100 bp, Homo sapiens
ctgcgccaccacgtcacgcacacgctcggcgctgcgatccgcgcatataacgcttgtggcccaggtccttgaacataaagctataggctttgtgatggtg

SEQ ID NO: 853065 - DNA, 98 bp, Homo sapiens
cataaggaactctatcccaggaatacagctttgcattaggtgcacattaaagatccaaagtcatgactgactccaagtatttcacaaccaataaaaaa

SEQ ID NO: 853066 - DNA, 100 bp, Homo sapiens
cagaacttcatgtgtctgtggcagtcttgtaaaaaatgcatagctctcttaggtcccttcgtaatagtgcagctaagaaaagagcaaaactgagtggcag

SEQ ID NO: 853067 - DNA, 100 bp, Homo sapiens
tggataactccccaggggcttacaggagccatccagcggagcgggcactggacacaatgaactttgagatgctcaaaggccagcctattcgcatcatgtg

SEQ ID NO: 853068 - DNA, 100 bp, Homo sapiens
tttagtgcatttcacaaagtattgtctgaaaaagctcaaaatgaggaaattctgtatgttcttcgccattatattcaggcagctatcaatggtgtaatac

SEQ ID NO: 853069 - DNA, 100 bp, Homo sapiens
cccgtggagtcggctgagggaaaagcgaggcaaggcaggcggctgtcggaaaaggtaacagaagatggaactcgaaatcccaatgaaaaacctacccagc

SEQ ID NO: 853070 - DNA, 100 bp, Homo sapiens
ctagtgcacaacttggccgggctcactgggctcctgcaccactgcctgtcagctcctgcttcacatttgccatgacttgaccctggcagtgctgagccaa

SEQ ID NO: 853071 - DNA, 100 bp, Homo sapiens
ctcatactattttgacctgcagctcctcgtcttcatgtttccaggttgatggaaagttattatgctggctctgtactttatcgtacaaaagagttttaca

SEQ ID NO: 853072 - DNA, 100 bp, Homo sapiens
tgcagccgaggtcttcgggaattccagcgaggtgtggtgctcaccttgggcacatttttgatgatgggcctcgtccaactgggaaaagatactgcataaa

SEQ ID NO: 853073 - DNA, 100 bp, Homo sapiens
ttattgaatatcaagaggaggagttgttgatttcagaagaaagtggtagcttcctttccaagaacagttctgagcacaggaatggataaccggtacctgg

SEQ ID NO: 853074 - DNA, 98 bp, Homo sapiens
gtgccgagactgtgaagtcaccaatgatggacataccattcaggttatcctgaagtcaaaatcaggccttgcaattgccagtgccctaatagatattt

SEQ ID NO: 853075 - DNA, 98 bp, Homo sapiens
gcaagagaaaaatccactgccttccaaagaaactactcccgagcccggagaggacccacgcgtgacccgggccaagtacttcattcgagatgagtttc

SEQ ID NO: 853076 - DNA, 98 bp, Homo sapiens
aaaattaaagaattaaagggggaaaaagtaattcgaccagaatggattgtggaaagcatgctgatcccattttcaatgaagaattgcttccagttact

SEQ ID NO: 853077 - DNA, 51 bp, Homo sapiens
tggaatcctgggccttcattggtgccactgattaatgaacttgaatcagca

SEQ ID NO: 853078 - DNA, 98 bp, Homo sapiens
tgaggactcagatgagcaactggattatactgtactgcccatgaaaaaggatgttgaccggacaggacttgagaccaggagacgtatccagcaagcgg

SEQ ID NO: 853079 - DNA, 100 bp, Homo sapiens
caaaggactcgccctctgggaggcttaccgagagtttgaaagtgcgattgtggaagctgctcgggcttgggtggcaaattttgaaagacctcgaatgaat

SEQ ID NO: 853080 - DNA, 98 bp, Homo sapiens
ctttttgggaacgtggcgagcaaaaaatgcttgagccaggaaaaggggaagatagtgatgtactcagtataaatgcagatgcttatgacagcgacata

SEQ ID NO: 853081 - DNA, 100 bp, Homo sapiens
tgactggtgatcacatccccaccccacaggatctgccccagagaaagtcctcgctcgtcaccagcaagcttgcgggcttgaagaagtcatggaaaaagaa

SEQ ID NO: 853082 - DNA, 98 bp, Homo sapiens
ggttggcccagctccttggggtttccggctgcagggcggtaaggatttcaacatgcctctgacaatctctagtagtccctgtgaagcaggaagagtga

SEQ ID NO: 853083 - DNA, 98 bp, Homo sapiens
atggcacagaggctgaagttaaagagacagcaatgattgcgcttgagaaagagatccaagatcttgaaaaagctgaactgcaaatctcaacgaaggaa

SEQ ID NO: 853084 - DNA, 100 bp, Homo sapiens
agcttggaattacatagctggaaaggatcttacagcaaaatgatgcttcaacacccaggccaggtctctgcctcggaagtgagtgcttctgccatcgtcc

SEQ ID NO: 853085 - DNA, 100 bp, Homo sapiens
ggacattccaggcagaggcaagggagtgcagcctgccacaggcgaggttgtgtttgatagtttccaggactctgcttctcgttcagagctagaaacccgg

SEQ ID NO: 853086 - DNA, 98 bp, Homo sapiens
agtaatgctggggaccctgagatcgtcaagtctcccagcgaccccaagcaataccgagttcggaatccagcattaagaagaaatttctcaagaggaaa

SEQ ID NO: 853087 - DNA, 98 bp, Homo sapiens
tccctacttcatccaagacctggccataaaatgcagtaaaaacaaatccagttcccaagaagctgtacaaatgctttcttctgttcgactcaatttac

SEQ ID NO: 853088 - DNA, 100 bp, Homo sapiens
aacatttagttgtaataaaataaaagataatgacaaagaagatggctgcttctatttcaggtgggaacatccagttgcaggaaaacaagcttaacacgcc

SEQ ID NO: 853089 - DNA, 100 bp, Homo sapiens
cggatggtgggactctccggccctgtgcagtgctctgaccacctccgagagaaggatggcctgtgggctgtcttggtctggctctccattattgctgccc

SEQ ID NO: 853090 - DNA, 100 bp, Homo sapiens
gctggcacgtcacttccgactagtggagtttttagccttttaacattcaaggattaggtttccacttgagcggcacagtgacagaacctgcaatacaatc

SEQ ID NO: 853091 - DNA, 100 bp, Homo sapiens
tggacaacagaaccaaagagttcagacgtgagaaagggtccagattatagactctacaagagtgaaccagagttaacaacagtggcagaagttgatgaat

SEQ ID NO: 853092 - DNA, 100 bp, Homo sapiens
gaccaggaagtaactttagaggaggatctgcaaattcaacacccaacagcttccttaatagcaaaggtagcaacagcccaggatgatataactggtgatg

SEQ ID NO: 853093 - DNA, 100 bp, Homo sapiens
ggccggatggagcgtccgcaacccgacagagctgaactagagaaacatggttataagatggagacttcatagcatccagaagaagtgttgaagtaaccta

SEQ ID NO: 853094 - DNA, 100 bp, Homo sapiens
gccagagtcagcattctggaagaaaatcatagcatatcaacagaaacttctacctgctataactgcggtagaggtggccacattgccaaggactgcaagg

SEQ ID NO: 853095 - DNA, 99 bp, Homo sapiens
aatcccagaggaaactgacggagacgcagatgtggacttgaaagaagctgcagcggaggaaggcgagaaacttactcaagtttatagaactcttcatgg

SEQ ID NO: 853096 - DNA, 100 bp, Homo sapiens
ctgcccaacaacgccgagagagtcctccttaccacacaggaagccatttggaaatagcatcagcagatataatggggagcctgagcatattgagagaaat

SEQ ID NO: 853097 - DNA, 51 bp, Homo sapiens
cctctcaggatcggggacgcaggttaatgctctggataatcttggtcagac

SEQ ID NO: 853098 - DNA, 100 bp, Homo sapiens
tgggcacagcatgagatccaaaggcagggcaaggaaactggccacaagaatatgtttatccagaagccagagacagacaatacttactatttttccataa

SEQ ID NO: 853099 - DNA, 112 bp, Homo sapiens
cctagcctgagtgttgagcagtgtcatgccttggcgtttcagctcctcgttgtctaggtatgcccccgtgggtattctcttcctgattgctgggaagattgtggagatggaa

SEQ ID NO: 853100 - DNA, 100 bp, Homo sapiens
ctcattacacttcaacataactgaagatatgcttcgtgggatctttgagccttttggaagagcagcaatgaatgtggatcacgaggttaacctcttagtg

SEQ ID NO: 853101 - DNA, 100 bp, Homo sapiens
taggtgtgagccaccacacccagccactaagctgtcacgggaagtctttttaggataaacgtaggcctgcgtggcctggtggctggtggcataattggag

SEQ ID NO: 853102 - DNA, 100 bp, Homo sapiens
atgccaagagttcaaactcaacaatattatccccatgcgccaagcccatctttgtgtgcttgcatccaactgtgatgagcctatgtatgtcaagttggtg

SEQ ID NO: 853103 - DNA, 100 bp, Homo sapiens
gccaagagttcagaccgtggcgaagtggagagtgacatgcagttggatggcggtgactgcgtgatttttaaagagcgagaagaagatttgaggcgtttgt

SEQ ID NO: 853104 - DNA, 98 bp, Homo sapiens
aggagtgcttctgagagcgctagcagctcagatggctctgagagattcctctgcgaatctgtttttagctatcaagtggcatccacgcttaaacaggt

SEQ ID NO: 853105 - DNA, 98 bp, Homo sapiens
gcggccgcccgggcctgcgggaagcgatggagcccgggaaggggtgagtcaggtgctgggaagacagaaaatacaaagaaagttattcagtaccttgc

SEQ ID NO: 853106 - DNA, 100 bp, Homo sapiens
cgaaagagtttgtaaagaaaatcgctgctgagaatagacttcatcatgtgcttcagaagaaagaggcttcaacggaccacaccaaaatgccatctcaaat

SEQ ID NO: 853107 - DNA, 98 bp, Homo sapiens
ttgcagctcagccctgaagaaaagggaaaacttgctgcggttgctcaagatgctgaccttcatcatggttgcccggctggccaccctgtgtcctgcac

SEQ ID NO: 853108 - DNA, 100 bp, Homo sapiens
ctcctgtttttaacttggtgtctttagtgcttggattggtgggatgtttcggaatgggcattgtcgccaattttcagctgagatctgtatctgtggacct

SEQ ID NO: 853109 - DNA, 99 bp, Homo sapiens
tccgccatgaacctgaggggcctcttccaggacttcaacccgagagcctcagcttaagggtatagttaccaagctatacagccgacaaggctaccactt

SEQ ID NO: 853110 - DNA, 100 bp, Homo sapiens
cgagttcatggccaacctcaggctcaggcgcattctacattctaaaggggagctcagtgaagatagacataaacagtatgaggaatttgctatgtcttac

SEQ ID NO: 853111 - DNA, 100 bp, Homo sapiens
ttacaacctggcagaacttcagagacaggatgggcttctttctcaaggttattctgattttataaataggatgcacaatcagattcctcaggttacctct

SEQ ID NO: 853112 - DNA, 100 bp, Homo sapiens
acaaaatccatctcattaatgacaatcagccatcctggattggacaatttagctatcaagcattatatagctatataccacagaatgatgatgagttgga

SEQ ID NO: 853113 - DNA, 129 bp, Homo sapiens
cccaggctcagaccactgcaacctatgggcagaccgcctatgcaacttcttatggacagcctcccactgtggcttcagtattgaactggcatctgccctcactgtggtgattgcatcaaatattggcct

SEQ ID NO: 853114 - DNA, 106 bp, Homo sapiens
gacaacccgtacatcaccgacggctaccgggcctacctgccgtccaggctgtgtatcaaaaggggaaactgactctactctgtgatgccaagacagatgggagttt

SEQ ID NO: 853115 - DNA, 98 bp, Homo sapiens
gagcccgctcacttttacctgtttggattaatatgtctctgttcaggtgctggagaatctggtaaaagcaccattgtgaagcagatgaggatcctgca

SEQ ID NO: 853116 - DNA, 99 bp, Homo sapiens
ggaaccttaagtaaatcagaatgggaagctacaactctttcaccatgcctggatcacttcctttgaatgcagaagcttgctggccaaaagatgtgggaa

SEQ ID NO: 853117 - DNA, 100 bp, Homo sapiens
ccaagagagtcgtaaacatcctgtggactacacaccgtttaacaagatgcaacagtattctggcctgaaagaatagacccaagcgcatcacgacaaggat

SEQ ID NO: 853118 - DNA, 99 bp, Homo sapiens
tttgaagtagtggatctggtggatgtcaatacccctgatttaatgttctcccaggagaaagccatgttcagttcgagcgccaagatcgtgaagcccaat

SEQ ID NO: 853119 - DNA, 100 bp, Homo sapiens
aacgtcaccgaggagaagtaccaggaggcgttggccaaggattataaagactttggaacacttgcccattcctactaaaaatatgttggaggaaagcaaa

SEQ ID NO: 853120 - DNA, 99 bp, Homo sapiens
aagcggctgcgcacggactgctggagatggtggagtccgtcatgtactgctgctgctgcttggccaacgtttcactgcctggcatcgggggcaccattc

SEQ ID NO: 853121 - DNA, 98 bp, Homo sapiens
tggctgcaccgcatcccctcctgcaccccctggatggcccttcagccaacgggggcctgggcgatgaaacatctgccaaagaaggtctgctgctttgg

SEQ ID NO: 853122 - DNA, 100 bp, Homo sapiens
atgatcccttgcctgctattggacactgcaaagctatctacccttttgatgttgccgagcaaacagtggcagcttgcctctgaaggccaccaaaaaggac

SEQ ID NO: 853123 - DNA, 98 bp, Homo sapiens
cctcggcagccagctgcagaagaagctcaaggagcttcagattgtggacctgacagtgggcaacaacaaaactctcctggacattgacaacactcgca

SEQ ID NO: 853124 - DNA, 100 bp, Homo sapiens
tcctaaaaaagtggaggcaccaccagctaaaggttggttcctgtataccttgggccagagagcaaacataggtggcctgagagagccctggtacgtggtg

SEQ ID NO: 853125 - DNA, 98 bp, Homo sapiens
tttaaccccaaaattgagtcctacgctgctgtgaatcacatatcccaactgtcagaggagcaggtagcaaattatggagttggaggacagtatgaacc

SEQ ID NO: 853126 - DNA, 98 bp, Homo sapiens
cgagctagccgggagttacaccgccaccgccaggtttcccaacctctttcccccactgaagccggagacggtggcccggaggacagtggaagctgtgc

SEQ ID NO: 853127 - DNA, 100 bp, Homo sapiens
atgatgttttctcacccagtcatggccctgattacgtcaaacagagatttcaggaaggtgtagatgctaaagaaaatccagaagaaaaggtaccagaaaa

SEQ ID NO: 853128 - DNA, 100 bp, Homo sapiens
gctccagcagctcccagctttaatcgcagacttagaatccatgacagcaaatctgagctcatcatatgcccgaagctcagtggttacggctgtgaaattt

SEQ ID NO: 853129 - DNA, 98 bp, Homo sapiens
gggaggagcgtctgagcaggagtttcttcatgatctctccaaccgaccagcaggtccactgttgggcctggcttaagaaacacatgccgaaagacagc

SEQ ID NO: 853130 - DNA, 100 bp, Homo sapiens
gcgagaatgggctgtcatctggcgaaagctctacgtgggttctgtagctatagctggtgctgttattcgctggctaagagacaatcttggaattataaag

SEQ ID NO: 853131 - DNA, 98 bp, Homo sapiens
ggatgtatatgaataaagtatcagactgacattgagattacacgagaggaggacttcacccgaattctccagatggaggaagagtacatccagcagct

SEQ ID NO: 853132 - DNA, 106 bp, Homo sapiens
gttcaacaacttcatccagcccttatacaaagacctttcgggttggtcaaagaaaaagtgatgtatgaaaaagaggcaaaacaacaagaagaaaagattgaaaaaa

SEQ ID NO: 853133 - DNA, 98 bp, Homo sapiens
agagctacttttcaacagccttctcaattttctttctcagaaagcagaggctcagagcttggagacagacgggatagtaaagctctgaaggatgaaaa

SEQ ID NO: 853134 - DNA, 99 bp, Homo sapiens
aaaattacaaaaatgtcatcagctaatgtctacctcgaatcaaagactgaagttgctgaagatcctcaacaagtttcaactgtccatctccaactgggc

SEQ ID NO: 853135 - DNA, 100 bp, Homo sapiens
ttcttctgcaggtggatcagaactgtgttcgcaattcttacgatgtcttctctttgctacgatttgaatataacctgccgctttgcaggtgtattccacg

SEQ ID NO: 853136 - DNA, 98 bp, Homo sapiens
gctgctgccgaaaatatcaggctgccaaatgcaggcactcaggtcagaagagatcaattctacagaaatttccagtggttctgttgaggctttatgga

SEQ ID NO: 853137 - DNA, 98 bp, Homo sapiens
acacacagagtattggtcctaaagtccagagacagagcactaattaggaacaagtgtcattcaaggatgtatgtgtggacttcactcaggaagagtgg

SEQ ID NO: 853138 - DNA, 100 bp, Homo sapiens
ccttcatcgacttgagacaagattgttcagataaatttgaggatttacatgacatgacctcatttacacaccttaaaaaagtaaaatcaagatcaaggct

SEQ ID NO: 853139 - DNA, 147 bp, Homo sapiens
agatattgttctctatgccttggacagagacccaacagcttatgcattagctgaacatctttcagagttgtatccgaccccgtggtttaatggatggggctttaacctacccagaggtcagtctctgctggacaagtggaacctcat

SEQ ID NO: 853140 - DNA, 100 bp, Homo sapiens
cttcaacaccaccttcatctccaccatcggagcttgaaatcgtcattggagatgaacacatttcttttacaacatcaaaaattggttcccttattgatgt

SEQ ID NO: 853141 - DNA, 100 bp, Homo sapiens
gggcttatgggatacagctggacaagaagattatgacagattacgccccctatcctatccgcaaacagatgaagatgagctggattcccacaccatggtg

SEQ ID NO: 853142 - DNA, 100 bp, Homo sapiens
acatccaggaaaagataactttcgacacacctgtagacgttcgccaggtaaagtgtgtgaacttaaatctccctccatgagtgatttcctgtggggtctg

SEQ ID NO: 853143 - DNA, 100 bp, Homo sapiens
ctttccaccccaaatttatcaaagaactgagagtgattgagagtggaccacactgcgccaacacagaaattatactttgtgtggacagtaatgacctcac

SEQ ID NO: 853144 - DNA, 100 bp, Homo sapiens
tagatgacaatatgcagatccgactttcagatttcgggttctcctgccacttggaacctggcgagaagcttcgagtgttaaaagatcactgaagttggat

SEQ ID NO: 853145 - DNA, 113 bp, Homo sapiens
gccaccctccttcctgcgggcacccagctggtttgacactggactctcagagaacatacatatgatagttgagaaagacacatattctgatcatgaagaaataaacacaagtt

SEQ ID NO: 853146 - DNA, 99 bp, Homo sapiens
gcgaagagcgatggaagaacaactgaaaagtgatgaggaactggcaagaaagctaagcattgatatttctcttcaagaaaatgaggaggaggagattgg

SEQ ID NO: 853147 - DNA, 100 bp, Homo sapiens
tccaggatttctgaagactattgtggaagaagcatccattaagggctgcgtccaaagaggactctgcggctggtgctctggactgcagaagaacaaggtg

SEQ ID NO: 853148 - DNA, 100 bp, Homo sapiens
ggagacacacattcataatcagggtcttgcagccattgaaaagtgtggagaagctgctttaaatgaagctttctttggaaaagatcttctagatacaagt

SEQ ID NO: 853149 - DNA, 99 bp, Homo sapiens
gaatttcctacaagcagtgtggcaagtgggaatgtaagacggacttagatattgcatacaaatttggaaaaactgtggtgagctgtgaaggctatgagt

SEQ ID NO: 853150 - DNA, 100 bp, Homo sapiens
acgagctacatcatttgaggaatcagaacgcaagcaaaatgcgttaggaaaatgtgatgcatgtctcagtggtgacttcatggtcatgacgattttcttc

SEQ ID NO: 853151 - DNA, 98 bp, Homo sapiens
ccaaaagagcagtctcacatgaagaccaatttttacgtctagatttccatgcccatggaagtgagaaagatcagtctaaagaaaaggagaagaaagtg

SEQ ID NO: 853152 - DNA, 100 bp, Homo sapiens
gccggcgacggaccagcgacccaagcgccgcggttaaccacgtctcgtccacgacctccctagggaatgggtactgttcaaaaaggaatgccccacaagt

SEQ ID NO: 853153 - DNA, 51 bp, Homo sapiens
gagttggccccgatatccgctcagggtttgtccagaggggttgcgtttatc

SEQ ID NO: 853154 - DNA, 100 bp, Homo sapiens
ctgccgctatggatgatcgagaggatctggtgtaccaggcgaagctggccgagcaggctgagcgatacgacggtgatgcaactgtgacaatagctcacag

SEQ ID NO: 853155 - DNA, 100 bp, Homo sapiens
aaggagcaggattaccaaagggcagtttctcttagtgttcagcaggaaacatccaatttaggtcctggatctgcaccatccaaattacatgtttcacaga

SEQ ID NO: 853156 - DNA, 99 bp, Homo sapiens
cctcccaagtagctgggattatagctgattgggcagaaagtggcccatgctctggcagagggactcggagtaatcgcctgcattggggagaagctagat

SEQ ID NO: 853157 - DNA, 98 bp, Homo sapiens
aagactcaactgaactcctccagcctccagaaagtattatacctgaagaaccttagccctcgggtgactgaaagagatcttgtgtcattgttcgctcg

SEQ ID NO: 853158 - DNA, 100 bp, Homo sapiens
ggcaacgaggaagctcttaagagcgcggccggaaagcagaacaagtttgccttctcctatgttttccagaaatgacttcagtatctggagcatcctcaga

SEQ ID NO: 853159 - DNA, 100 bp, Homo sapiens
tccactggacgctcatcagagggaagatctttttcctcaattggtaaagatgagccttccagctacatttgcacaacatgcaagcagcccttcaacagcg

SEQ ID NO: 853160 - DNA, 104 bp, Homo sapiens
agatgacctctcccgtctacggcaccgacatggtagtagctgggtgtgacgcaagagtgaaacagaaagcctggcagccacggtttcctgggattaaagtcaaa

SEQ ID NO: 853161 - DNA, 99 bp, Homo sapiens
ctggccggagagagagggaaggacggggcctggcccccgggactccctgtgccttgcttggagctgacgccgacggttgatctcccttttgtgaggtgg

SEQ ID NO: 853162 - DNA, 100 bp, Homo sapiens
ggggcttcctgagcgtcccagtacactgacagaggctgaagccgacgtagcttctctgaacagacgcatccagctggttgaggaagagttggatcgtgcc

SEQ ID NO: 853163 - DNA, 99 bp, Homo sapiens
tctgaagaaagaagtcattattgcaaagagccataagtgtgatccttggtgacaggtggaagaaaatgaagaatgaagagagaagaatgtacacattag

SEQ ID NO: 853164 - DNA, 98 bp, Homo sapiens
ggcgagagatggtcaggtctggagctcgaccgggccagacagagtctagctctttcacccaggctggagtgaagtggtgcaatctcagctcagtgcaa

SEQ ID NO: 853165 - DNA, 100 bp, Homo sapiens
tgatacagttgataaaattgttggtcgtctacagctgcaagcagatcgccatcaagaacatatccgagctagagattcattaattcagtctttggcaaca

SEQ ID NO: 853166 - DNA, 100 bp, Homo sapiens
aagttgaccctgggtctgatctggaccattattttgcatttccagtgacatgaagtccgagaggagacccccctcacctgacgtgattgtgctctccgac

SEQ ID NO: 853167 - DNA, 98 bp, Homo sapiens
agaaaaagacctgtggctattaagataggtcaaaatgcagatcttcgtgaaaacccttaccggcaagaccatcacccttgaggtggagcccagtgaca

SEQ ID NO: 853168 - DNA, 98 bp, Homo sapiens
tgatgtatcagaaaaactctctcagcggctttctgaactagattgggtgccttggaacactatgttaattgcctggatctggtaaacaagaggctacc

SEQ ID NO: 853169 - DNA, 100 bp, Homo sapiens
ttagcggcatttgttgaagaactggatgttacgttatatataggattcgtgttcgccgtggtggccgaaaacgcccagttcctaagggtgcaacttacgg

SEQ ID NO: 853170 - DNA, 98 bp, Homo sapiens
ctggaataaagaccctgaggccactgagaagctcttacgttatgcccaggtagtgaaaatggacacatccattcaacctctttgcaacacataaaaac

SEQ ID NO: 853171 - DNA, 98 bp, Homo sapiens
ttactaccagggtggaaaatttcagtttgaaactgaagttcccgatgcgtacaacatggtgggttggggtctgctaggtccccggaatgagttgtttg

SEQ ID NO: 853172 - DNA, 124 bp, Homo sapiens
aagtcttagaatgtgaacgtaatcaaaccctggttcaaactgcctgcagtgtggggatgtgccaactgccgagtggttttgtccaacccttctgggacctttacttctccatgctaccctaacg

SEQ ID NO: 853173 - DNA, 100 bp, Homo sapiens
cggacagcatcctggaggaccagtcagaccagcgcgtcatcatcaagctccaggacacgcgcgccccgagcctgggaggcatgctgaagccaggcggccg

SEQ ID NO: 853174 - DNA, 100 bp, Homo sapiens
caagatctgcgcctggatgcagctcttggcaggacaacaagtgattgaagagcagcggcggcgactggctgagctgaagcagaaagcggcagctgaggca

SEQ ID NO: 853175 - DNA, 100 bp, Homo sapiens
tttgataagaatgattcagattttgaagctaaagttaagcagacattccagctgcagctcttgtctcctagcagcagcattgtcccagcatttaacacgg

SEQ ID NO: 853176 - DNA, 99 bp, Homo sapiens
caacttctcccgttgctgctgctgctctgcggagatcatgaatcagacagataaaaatcaacaagaaatcccatcataccttaatgatgaaccaccaga

SEQ ID NO: 853177 - DNA, 100 bp, Homo sapiens
attctggtggggagatgaacccaacctagtgggtgtaatacatcatgaactgcagggttgactatagtcaatggggccaatggagccaagtgtatggaaa

SEQ ID NO: 853178 - DNA, 100 bp, Homo sapiens
aagaagaagaaacgggccgcgaaccgcagtatcatgctggccaagaagatcatcattaaggacggaggcacgggagtaccctgacttctaccggaagctc

SEQ ID NO: 853179 - DNA, 100 bp, Homo sapiens
gacaagagccgccctgcccagaaacgtccacatgtgggtactgcattcctaccggtgtgacaggctctgtggagatggctgtcgcagtgttcctggtcat

SEQ ID NO: 853180 - DNA, 100 bp, Homo sapiens
tgaacactcgcccaatgaaacggattaacctccatttcagctaatcatgggagagattaaagtctctcctgattataactggtttagaggtacagttccc

SEQ ID NO: 853181 - DNA, 99 bp, Homo sapiens
ctggagatccagggcaagcgggtcaagacagctctggctctggctattgctcaggagctgggtagtaaggtccccttctgcccaatggtggggagtgaa

SEQ ID NO: 853182 - DNA, 135 bp, Homo sapiens
ctctgaagaggacctggaccctatggaggacttcgattctttggaatgcatggagggcaggagactgacaaactggaagatgagaaatctgggctgcagcgagagattgaggagctgcagaagcagaaggagcgc

SEQ ID NO: 853183 - DNA, 100 bp, Homo sapiens
tgacaccaagaaagcagtgaaatatcagagcaaggcccggaggtttaacccagaactggtgctggtctcagctggctttgatgctgcacggggggatccg

SEQ ID NO: 853184 - DNA, 100 bp, Homo sapiens
agttttccaactcgccttgtggggatggatccagaacaagcttctgttacaaaccagaatgagtatgccagaagtgctttatatgtagtggatctcaaga

SEQ ID NO: 853185 - DNA, 99 bp, Homo sapiens
tcaggcgatccagataagaggaaatgagagccgggttttctgacttccaactcattagggaccaggtctctaattaacagaagatggcaaagcccagcc

SEQ ID NO: 853186 - DNA, 99 bp, Homo sapiens
aaaagatctgctgcaaggaactgatagcttatggttctccattgtgatgaaagcacatggtacagatactcatttcaaagaacttccaactcttctcca

SEQ ID NO: 853187 - DNA, 120 bp, Homo sapiens
agtagttcagactgtcaaacatattcatgtcaaagctttttccaaagatcagtaacaaatgtggcaattattttggatctatcacctgtcatcataactggcttctgcttgtcatccaca

SEQ ID NO: 853188 - DNA, 120 bp, Homo sapiens
agcccctcctcagatgcccctgccggagatccctcagccctggctggtacactgaggaggggacggctccgtcttcacattgtgcacagatctgaggatgggattagcgaagctgtggag

SEQ ID NO: 853189 - DNA, 99 bp, Homo sapiens
gagagccttgggccagagttccaggggctctgggagtggctgccagtttcgtgtggctgatcaaagaaagaaggcatacgcagatttctacagaaacta

SEQ ID NO: 853190 - DNA, 127 bp, Homo sapiens
cgtccttgacacggatatcacctttgccactgacattgcagagctgtgggctgtgttccacaagttcaaagtttaccgtggtttctgggcagtcctgatgctcctgggggtagttgctgtagtcatc

SEQ ID NO: 853191 - DNA, 102 bp, Homo sapiens
aaggctctaccagcagcatggggcaggactctttgatggctccaagcgccgccagctcttggccacattacgggccctagaggcagcatctctttcccagca

SEQ ID NO: 853192 - DNA, 98 bp, Homo sapiens
tggagaccaatcacccacccagtgtgcgggccgagaactactggtggcgtggccagaacacacggacgctgtgtgtggggcccttccctcgcaacgtg

SEQ ID NO: 853193 - DNA, 100 bp, Homo sapiens
caggtgtacgaggggatcaccttcgaggacttcctgaaggtcagtcttcactgtttccaatggaagatggattcttggatgatggccgtggggatcagcc

SEQ ID NO: 853194 - DNA, 99 bp, Homo sapiens
acaaatgtttccttaaagtgcctcgatctaaggatgaccctggaaaggtactttggaagttcgtcttatgggctgccaagatatcctagagaatgtccc

SEQ ID NO: 853195 - DNA, 98 bp, Homo sapiens
gtgagcagaggggagagcggccgccgccgctgccgcttccaccacagatcatcaatgctgtggtactgttgattttattgagtgccctggctgatccg

SEQ ID NO: 853196 - DNA, 98 bp, Homo sapiens
tcaggacggacaagcacagtcttcggaagctgctggagccagttctgcttctcggcaaggagcgatttgctggtgtagacatccgtgtccgtgtaaag

SEQ ID NO: 853197 - DNA, 100 bp, Homo sapiens
ctgtgagggtccatgcctgcatcggccagacggttttgctgtctcagcctactgtggtacaacttcaagcacctggagttctgccctctgctcagccagt

SEQ ID NO: 853198 - DNA, 98 bp, Homo sapiens
cgagcccgccttctccgaggcgcagaagtggattgaggtctcagtggcccttagcagcagctccattcgtgtggccatgctggaggaaaatggggagc

SEQ ID NO: 853199 - DNA, 98 bp, Homo sapiens
ctcactgggacccccaggaggtgaccctgcagcagaaaaagtcctacctggagcgaagcgttaaggaagctgaggacaacatccgggagatgctgatg

SEQ ID NO: 853200 - DNA, 100 bp, Homo sapiens
tgctggaggtttggttctcccggcagcagcccgacgcaaaccaaggatctggggatcttcgcactatcccaagctcagcaaaacccagcagctcagattc

SEQ ID NO: 853201 - DNA, 122 bp, Homo sapiens
actaccaggggaagctccgggggaacccgcactccttcgccgccctctccacctgccaggggctgcaaggcatttcatccttcatgaagccattcaggattttgaattgcatatgagtgctt

SEQ ID NO: 853202 - DNA, 100 bp, Homo sapiens
agaactgtgagcggtgtcagctgcactatttccggaaccggcgcccgggagcttccattcaggagacctgcatctatctctgccatcccgagatcatcac

SEQ ID NO: 853203 - DNA, 132 bp, Homo sapiens
aataggaacagctccggtctacagctcccagcgtgagcgacgcagaagacgggtgatttctgcatttccatctgaggcatggaccaaagcagtgaaggatgtatgaaaaagattagcagtgtgaatcttgac

SEQ ID NO: 853204 - DNA, 100 bp, Homo sapiens
aggatatggattggcatctacaggagtaacttctgggtgctatcagtggaaggttcaaaccttgtactactcagctgatcacaagctgcttgatgggaac

SEQ ID NO: 853205 - DNA, 100 bp, Homo sapiens
cgtatcagatggcagacatacatcatttaaaggattacatgaagcagatgacatttgaagcccaagcctttttagaagctgtgcaattcttccgacagga

SEQ ID NO: 853206 - DNA, 100 bp, Homo sapiens
aaccacgatcgttatgctgattgactatattgtggagtatgactatgatgctgtacatgatgatgaattaactattcgagttggagaaatcatcaggaat

SEQ ID NO: 853207 - DNA, 98 bp, Homo sapiens
gaattgttctgtatgaattgatgactggacagttaccttattcaaacatcaacaacagggaccaggcaaaagatgtgattgaagagcatggtccttca

SEQ ID NO: 853208 - DNA, 100 bp, Homo sapiens
acccctacaacttattcctgtccggagacagcctaagggctggttggaaggaaaatcatgcaacattcatgagcgaactaaaaaatcttcaggcttctgg

SEQ ID NO: 853209 - DNA, 100 bp, Homo sapiens
tcccccttcttcaagacccacgaggccaaccccttcaaggagcgaatctgcagggtcttctccacatccccagccaaagacagccttagctttgaggact

SEQ ID NO: 853210 - DNA, 101 bp, Homo sapiens
gctaaagtcgcaggggcagggcgggaaggaagatccggcgcggggcacaggatccggagctggagcccccagagtatggtgtttgcgaaaacttgcggaag

SEQ ID NO: 853211 - DNA, 100 bp, Homo sapiens
ttggtaaatggctgcggtgaagtcaatgtgcaaatgctgatcagttttacctctttcaatgatgaatcagtgtgttccatgggaaccggtacaagcagac

SEQ ID NO: 853212 - DNA, 100 bp, Homo sapiens
cactgccccctgacgacctagagagatcccggctcccagcccactgagtggcttcagcctcgctggggccggacatggtacattctttcactgaccctct

SEQ ID NO: 853213 - DNA, 98 bp, Homo sapiens
cagaagaattacagtatcttagatctctagatacagctggtgatggtatctcattcagttgctaaacttatattagttaatttccactggcaagtttc

SEQ ID NO: 853214 - DNA, 100 bp, Homo sapiens
ttttctttctcagaaagcagaggctcagagcttggagacagacgcttggattccttagcaccaccacagctcagccagaacagaaggcctcgaatctcat

SEQ ID NO: 853215 - DNA, 100 bp, Homo sapiens
cctggcctatattgactatctttctcacctcaatggcaagataacccctgtgacagaaggctactgttgctgtaacaaagggcatacatacattttcaag

SEQ ID NO: 853216 - DNA, 98 bp, Homo sapiens
ttggcttctcgactcggtcctgtttcgacagcgaacatgtcgcggcctgtcagcctctgtgtccagatgtttgactggtttgactaccatggccacat

SEQ ID NO: 853217 - DNA, 100 bp, Homo sapiens
gagcacttggagaagaagggaccccaggtcagagactggagccattacttcaagatcatcgaggacctgagggctcagttgatgatggagaggttccgct

SEQ ID NO: 853218 - DNA, 100 bp, Homo sapiens
gctgcctttgctttaaaacagtattacttgcgggtggagagattcaaccagttagcgtgaaagttggagataaagttcttctcccagaatatggaggcac

SEQ ID NO: 853219 - DNA, 50 bp, Homo sapiens
cctctgtttggggagacgtccgccaagggaggagagagcgatggcttttt

SEQ ID NO: 853220 - DNA, 98 bp, Homo sapiens
gaaacttggtaatgggatcaacatcattgtggccacaccaggccgtctgctggaccatatgcagcctgggttactaggtgtctttcagaagctgattg

SEQ ID NO: 853221 - DNA, 98 bp, Homo sapiens
ctcctcttgatgccaacactctggggaaggtggccagtggcatctgtgacaacttgcttgcccaggctgcaagcacaaaggaagtttgctcagtctca

SEQ ID NO: 853222 - DNA, 98 bp, Homo sapiens
agcgaggcgggcctcctggaggcagcacgggcgaccccccggcgcagcagcatcatcaaggcttctccacgctgtccctggcggaccagatgagcctt

SEQ ID NO: 853223 - DNA, 100 bp, Homo sapiens
catggtttggaggatagcaacatcagaaatcttacaggctggtgttaaaggaacttcggaatcccttaaaggtgtgaaacgcaaaaagatcgtagctgag

SEQ ID NO: 853224 - DNA, 98 bp, Homo sapiens
ccgattacccacttcgagtcctttattgtggaggtgctacagctcgagagggcagagccacagtccctggacggcgtggactgaggccggttccttcc

SEQ ID NO: 853225 - DNA, 98 bp, Homo sapiens
caggaacaagagttgctttggatatgactacactaactatcatgagttgtccagtgtacagaagcttactggaaggagtggccaactagttaaaggtt

SEQ ID NO: 853226 - DNA, 100 bp, Homo sapiens
gagaagctcaccatgtctctctcagaacttggtgctgctagaatgcaggaacagcaggaaaatcaagaagatctgggcctgtgggaagagaaatttggaa

SEQ ID NO: 853227 - DNA, 121 bp, Homo sapiens
gaatctatgatgctgatggtgatggagattttgatgtggatgatgccaaagttttattaggatataagtatccagtatatggtgtccagtggcatccagagaaagcaccttatgagtggaa

SEQ ID NO: 853228 - DNA, 98 bp, Homo sapiens
ttttttttatcgctgccttgatatacacttttcaaaatgctttggtgggaagaagtagaggactgttcaagctctattgccaagattggctcagatcc

SEQ ID NO: 853229 - DNA, 100 bp, Homo sapiens
ttgtctccagcagctataacagtggggagaggagaagatttgacttctgaacatcctttgttagctcttccaccaaagccacctaagccaatgacttcag

SEQ ID NO: 853230 - DNA, 98 bp, Homo sapiens
agaagaacaagaagttgagaccgagaatgtggaaacagctttgggacccccgcccctggcttctcctccatgctgtatggaatgaagattgcaaatct

SEQ ID NO: 853231 - DNA, 100 bp, Homo sapiens
tgttccttttccacgcattttccaggataactgtgactccagaccaagatcactccatggatgaaatgacagctgtggtgaaaattgaaaaaggagttgg

SEQ ID NO: 853232 - DNA, 99 bp, Homo sapiens
aaaaatggcgactgtggcagagttgaaggctggtgccagcgagatttcagattcctgtaaacctctaaagaaaaggagtcgcgcctcaactgatgtaga

SEQ ID NO: 853233 - DNA, 100 bp, Homo sapiens
ggcctcaagaagcagttccataaagccactcaggaacatcaggagagcattctgggtaataccatgcaaagtgtgattgcattactcagcaatctagttg

SEQ ID NO: 853234 - DNA, 141 bp, Homo sapiens
ggaataattatgggcagaccagcaacggggtggccgatgaatcacccaacatgctggtgtacagaaagcatgctacaagtgaaaactgatgagaaactgaatgtgtctgatgagaatacagcaagttgccctttgagcccc

SEQ ID NO: 853235 - DNA, 100 bp, Homo sapiens
ccgtgattcttgaagatggaatcaccaagctaaacaccattggccactatgagataggaaccaaggctttagccttctcaactcattgactggaacaaac

SEQ ID NO: 853236 - DNA, 120 bp, Homo sapiens
ctcgcgctgcaaggatgctcctgggatttcggagaggccgcaggagtcatttccttttcctccgcaaccatgtctgacaaacccgatatggctgagatcgagaaattcgataagtcgaaa

SEQ ID NO: 853237 - DNA, 130 bp, Homo sapiens
cagagagacaatgctcgctcgtctctgagtgccagtcacccaatggtgggcaagtggctggagaaacaagaacagaccctatcagatttggatatgtccttcatatttgattggatttacagtggtttca

SEQ ID NO: 853238 - DNA, 98 bp, Homo sapiens
aggcttgaagagtggagagaactttaagttgttatatgacttggcagatcaactacatgctgcaggaactatcatgtattctattacctcctggcagg

SEQ ID NO: 853239 - DNA, 98 bp, Homo sapiens
cctggcctgcccggacgagttcgatgacttcgtcacctatgagcctcgccgctcctgctatttgccaaccgccgggacgtacggctggtggacgccgg

SEQ ID NO: 853240 - DNA, 98 bp, Homo sapiens
gggtgaagtggcaggaggaggaggaggggctccggctggtctgtggtgaggcaatggcagtgctgacagatcacccatatgcctccctgaccctccca

SEQ ID NO: 853241 - DNA, 99 bp, Homo sapiens
taacactcaagcaaagaagagttgagcacaatcagaagaaatggagctgtcacccacatcaagattcagaacactggtgattactatgacctgtatgga

SEQ ID NO: 853242 - DNA, 100 bp, Homo sapiens
ggccgaatgcgatcaaacctaatccgcgagacttgctaagatgatgccaataatgacccacagtggtctgaggaacagctgattgctgcaaaattttgct

SEQ ID NO: 853243 - DNA, 98 bp, Homo sapiens
gctcgctaaccacgaaagaggaatcgatgctcagcttttagttgcacttcctaaaggtgattaaagtatacagtgaagatgaaaccagcagggcttta

SEQ ID NO: 853244 - DNA, 100 bp, Homo sapiens
ataacctaccctgctggattcatggcaggcttcccaggaagaatgaagcagtcaacttgcataaggcctgtcttgacttctctcctttgggggaagagga

SEQ ID NO: 853245 - DNA, 126 bp, Homo sapiens
ttacactgggcaacgtggttggaatgtatctggctcagaactatgatgtggaagctataaaggccatgtggatattttggcacctactgttcaagagttggctgcccttgaaaaggaggcgcagac

SEQ ID NO: 853246 - DNA, 98 bp, Homo sapiens
cggtattggatgattcgtatctaagactctgggacactcctgaagtcgggaaatggtgtctggaaatgaagtatggaaatgaaatcatgaataaagac

SEQ ID NO: 853247 - DNA, 100 bp, Homo sapiens
gtagccaccacgcctacctgcatgaccagttctggagctactggaatagtgagaaagatcagtctaaagaaaaggagaagaaagtgaaaaaaacaattcc

SEQ ID NO: 853248 - DNA, 100 bp, Homo sapiens
ctatgttgccctgagttacataaatagagagaaaaggaacagttccgtaagctctttattggtggcttaagctttgaaaccacagaagaaagtttgagga

SEQ ID NO: 853249 - DNA, 100 bp, Homo sapiens
ccccaggataagatcctcttcaccaaggctgaggacaatgtcgatacaccctgcaatacacctacccatatgcatattacatggagtccggacccaggaa

SEQ ID NO: 853250 - DNA, 98 bp, Homo sapiens
tcgcctccaggccaagagggatccttcacccgtgtctgtctcctgaatatttacgcgttgctgaatctcctgtggacaaaccaccaataggccaggac

SEQ ID NO: 853251 - DNA, 100 bp, Homo sapiens
atgaagaaggtggtgtgtgtggatcagcagacccccaccatccctaaccggctggctgcagacccgggtatatgagtgtaacaaacgctgcaaatgtgac

SEQ ID NO: 853252 - DNA, 99 bp, Homo sapiens
gtcatttctgttccgcacaggcctgctgaactgggtgctttatataggtgacatattcgatgccatgttccctgtcactcacatcgctggggagactgt

SEQ ID NO: 853253 - DNA, 98 bp, Homo sapiens
caagattctctcctgaagtcccagtttctctgcaggtggatattgttcccagccagggggagatcagcgttggagagtccaaattcttcttatgccaa

SEQ ID NO: 853254 - DNA, 100 bp, Homo sapiens
aaacacaaaccaccctttaaattttcaagggaaggacagcagtatcctggtgtgaaccagctatcctccagtataggaggattgagtcttcagagttctc

SEQ ID NO: 853255 - DNA, 98 bp, Homo sapiens
tcatcgtccttgacacggatatcacctttgccactgacattgcagagctgtgggctgtgttccacaagttcaaaggttttgtcaggttcttagaaggc

SEQ ID NO: 853256 - DNA, 100 bp, Homo sapiens
tgaggccgtgtacctcaacgactccacctatgacggacataccgtgggcggctggttgtcttcttgcctgccctgtgtcgtaaaatgggggtcccttact

SEQ ID NO: 853257 - DNA, 98 bp, Homo sapiens
aagactccttcagccaacatgatggtactgaaagtagaggaactggtagattttcgttccgtcacccaggctggagtgcagtggtgtgaccttggctt

SEQ ID NO: 853258 - DNA, 100 bp, Homo sapiens
ttggcatccagattatccactgcagcaagagtacagcactgcatctgctctgtagccagtgaccactcagtaggacttctaagtttgcgagagaaaaaat

SEQ ID NO: 853259 - DNA, 99 bp, Homo sapiens
cggcaatccgcttacttgcaatcaagggttcaggtgcaagcagatgctgactcagcctgttccattaaggaatagccaggccagaagaaggaaggcctg

SEQ ID NO: 853260 - DNA, 98 bp, Homo sapiens
gcgactcgggctgagggagctcgggccaatcagagggacggccccagaatggcatggaaaggacttagaagccttacaaatacatctgtgcattcttg

SEQ ID NO: 853261 - DNA, 100 bp, Homo sapiens
agctgcagtctgacgagaggggtggacccaagagccatatcagtgctagcaaaatggcagaattcatatagcatcaaagttgtcctgcaagagcttcggc

SEQ ID NO: 853262 - DNA, 101 bp, Homo sapiens
ctccttttgatgttgtcattgatggtctcaatgttgccaaaatgtttcctaaagttcgtgaatctcaacttcaaaaaagaaattcctgtgtttaactttac

SEQ ID NO: 853263 - DNA, 98 bp, Homo sapiens
tcaagcggtcctcccacctcagcttcccaaggagctgacactacagatacctttttcgagcctatatcgtggcacctggctaccaaagtactgggaat

SEQ ID NO: 853264 - DNA, 99 bp, Homo sapiens
tggtcattgttgcttccttcttcatattgaagaacttcaaccccacagtacactatgataccctggcaactggaataatttattttcatcgcttctata

SEQ ID NO: 853265 - DNA, 100 bp, Homo sapiens
gaaggcgaggagacggagttctacgtgtcccccgaggatctggaggcacagctgcagtctgacgagagggagttgcatgctgagaatttgaaaaatgaag

SEQ ID NO: 853266 - DNA, 99 bp, Homo sapiens
atctacaaccttcgatctcctgacgagtccccaggtgcatccaatttttcaactttaccaaagatctctccttcatctctatcaaataattataacaac

SEQ ID NO: 853267 - DNA, 99 bp, Homo sapiens
ccccctcacatctatgccatcacagacaccgcctacaggagtatgatgcaaggatgtggagaaagtttgggacctcaagagaaagagtggatgtctaca

SEQ ID NO: 853268 - DNA, 100 bp, Homo sapiens
aattcccaagccaaagctttccagttgactggattgttgctgacatcttggccatcaggcagaatgcgctaggacatgtgcgctacgtgctgaaagaagg

SEQ ID NO: 853269 - DNA, 100 bp, Homo sapiens
gcagccttgctcaggctgtgcattggtgtggccccgaattgcacggaggatctcatagatcagaacatactggagcctgtaacccgtgcacagagggtgt

SEQ ID NO: 853270 - DNA, 149 bp, Homo sapiens
tccccgccaggcgctctgaccactctccagcaccagcttccagttagtggatatagcacaccatccccagccagtggaatgaatcttacttgttgaatatcttctggttactagttggattcatttgtgaaagaatcattttcccctgt

SEQ ID NO: 853271 - DNA, 98 bp, Homo sapiens
gcgaagctggccgagcaggctgagcgatacgacgccagcgtcccatgctcggtggccccagaaaagtcagtgtgtaggcctcagccacttcaggtccg

SEQ ID NO: 853272 - DNA, 100 bp, Homo sapiens
gccttcatttataatacgcttacagatttcatacgaatcagacctattgtgaccgcctggtgcaggacacgcctttcctgacaggccatgggcgcttgag

SEQ ID NO: 853273 - DNA, 99 bp, Homo sapiens
actcctgccgcgtataccaggcatccagccccgatgagatgccctccaaatccttggttatggaatatttggctcatcccagtacactcggcttggctg

SEQ ID NO: 853274 - DNA, 99 bp, Homo sapiens
caccgaggaagagcgggagaaagggtactggctcctgtatcacccagctctggagttgaaagagctcttcattcctgagtctcctgtaccactgagaat

SEQ ID NO: 853275 - DNA, 99 bp, Homo sapiens
tattttctagtgctgagatcctgagacaatggatgctgatatgctaactggtgatgagcaagtatggaaggaagttcaagaatccctgaaaaaaattga

SEQ ID NO: 853276 - DNA, 99 bp, Homo sapiens
cccccattggaccagtgtttgcttagctcctagttccagcctcagtgaactgccttcgccttggctccatgaagtgcactctgctgcttatcctcctcc

SEQ ID NO: 853277 - DNA, 98 bp, Homo sapiens
cttcaatctgctcatgcattacccacccccctcgggagcagggcagcacccccagccgcagcccccgctgacaatgcagatcttcgtgaagactctga

SEQ ID NO: 853278 - DNA, 100 bp, Homo sapiens
ccgcgggaccgcggccactggacggatacctcggagtggcggaccacaagatggaacttgctaaggaagaaaagtgtgaatttctgccattcctgtcccc

SEQ ID NO: 853279 - DNA, 98 bp, Homo sapiens
gtttatggttttctaatagaagatatcaggaaggaagtgaatagagcttctaaactgcatgcacatctctgaaagccaacaagaattcttcagaatgc

SEQ ID NO: 853280 - DNA, 98 bp, Homo sapiens
agaaaacggacggaagaaaaggtctggccgataatcagcaactgctgtgatgagatgctgcctttaatgctgctgcatgtggtcaaacctccactccc

SEQ ID NO: 853281 - DNA, 100 bp, Homo sapiens
aatgcgttaggaaaatgtgatgcatgtctcagtgagatgacctgatcagagccatcaagaaactaaaggcacttggcactggcttcggcatcatccctgt

SEQ ID NO: 853282 - DNA, 98 bp, Homo sapiens
catcacacagctcaaagatggtttaaaaaatacatctcatgagactgcagcaaaccacaaagttgctaaggggatggtggatccaggagagaagatta

SEQ ID NO: 853283 - DNA, 98 bp, Homo sapiens
gcccaccagttcgcccgtccccctgccccgttcacaatgcatcagaacacaccatgatggctgtgacctaagaccctcaggaagccccggggtcatgg

SEQ ID NO: 853284 - DNA, 98 bp, Homo sapiens
tttttgctccaccaaacacttcagatatggaagctgtggcagtagaaactgatgaaggaattgaagaggagataccggattcaccaggaatagaaaag

SEQ ID NO: 853285 - DNA, 100 bp, Homo sapiens
gatgttgttgatgaagtaatacagaactgccccatcgatgtgcggcgcccgctgtataaggtatatgtctcgagtccacggtatgcaccctaaagagacc

SEQ ID NO: 853286 - DNA, 100 bp, Homo sapiens
ggaggcagcagacggacatccagatgctgagctcaggagtagcagccaaggttcccaaaaaatagtcgaggagttgcaggaacctgtctctccagatacc

SEQ ID NO: 853287 - DNA, 98 bp, Homo sapiens
gctcccagccatggtggcctggcgctcggcgttccttgtctgcctcgctttctccttggccaccctggtccagcgagttggtgagtttgtaagtgatg

SEQ ID NO: 853288 - DNA, 98 bp, Homo sapiens
gccatctgtcaggccgagttccgagagcctctgattctcctgtgccagaacatggtccaagacaattcctgggaaagttcagttcttctcaagtgagg

SEQ ID NO: 853289 - DNA, 98 bp, Homo sapiens
aagtgctgaccctgggtcagaccctttgggttggcttcgtggctccacgacttactctctacccttggcaggtgattggcatgcactacttctctccc

SEQ ID NO: 853290 - DNA, 100 bp, Homo sapiens
catgcaacagaagtatgaggccagccgggaggacatctacaagcggtttggtcgcccaactcacattgaagcctaagacccagctgatttctcttcattt

SEQ ID NO: 853291 - DNA, 100 bp, Homo sapiens
acaacctcttagttcatctcagcctaatctccgtgctcaagtgcctcctccattactctcccctcagaatatactgatgataatgctctgattcctaaga

SEQ ID NO: 853292 - DNA, 100 bp, Homo sapiens
caactcccttgatgatgcagtgtgtgtttggaggtgccaactatggctgtggagaaggtcctggtgtacaataatacatccattgttcaggatgagattc

SEQ ID NO: 853293 - DNA, 100 bp, Homo sapiens
ctgggagagaggtacctctccttttccctctccctttccctaaggtctcctttacagaaaggggcttggataaggaggaaagaccatcagaagaaaagat

SEQ ID NO: 853294 - DNA, 100 bp, Homo sapiens
gcagcctggagagtcgaagcagcagctctcgctccagaagcttcactttggtaaaccgtcctattggcagggtacagatcttcactgcagacttatctga

SEQ ID NO: 853295 - DNA, 100 bp, Homo sapiens
agcagcagctgccggagcccgagtggatcggggacggagagaacacgagcccatcagatcatggaagggaagtggttgctgtgtatgttactggtgcttg

SEQ ID NO: 853296 - DNA, 100 bp, Homo sapiens
agctgcagcagctcaagcgcctggagtccttgcctccctattccctgagacacaacagtattgaaattgggccaattaataaccccacagtggcctctca

SEQ ID NO: 853297 - DNA, 98 bp, Homo sapiens
caagccagcatggctcacaccacaaaggttaacggcagtgcctcaggctggaatcgatggagaaagcatcggcaactgtcctttctctcagcgcctct

SEQ ID NO: 853298 - DNA, 100 bp, Homo sapiens
ctgcgtgtgcagcccgggatatgagcctgtttctggggcaaaaacattcaagaatgagagcgagaacacctgtcaaggctggaatgcaatagcgtggtct

SEQ ID NO: 853299 - DNA, 100 bp, Homo sapiens
gtatcccacggagaaggtgaactgtctggataaggatctcatctggccaccgcgttctggaagaggcgagagggagagcgtgcgcgagaggagagagacg

SEQ ID NO: 853300 - DNA, 100 bp, Homo sapiens
gttcatcctcacctatgcaaagaaagggaagctattgctgggattttgaggaggtcaggatggctaactggttggctccccacatggtgccctacgtcta

SEQ ID NO: 853301 - DNA, 100 bp, Homo sapiens
ctcaaggagcgctgcctcaagcacgattttttatcaagcagaaatgcatcgaacaacgagaatcaagatcactgagctaaatccccacctgatgtgtgtg

SEQ ID NO: 853302 - DNA, 98 bp, Homo sapiens
tgacttctctaatcagttacggtttgtcaacttcagagacaacccactgaaattgaaagtatcacttcctcccagtgaaggcacagatgaagaagagg

SEQ ID NO: 853303 - DNA, 115 bp, Homo sapiens
aacagctctgcgcggctttttgagcggtcccgcatcaaggctctggcagccactgttccatccctgacccatctttgtcgtttggaaattcggtccagtctaaaatcagaacgtc

SEQ ID NO: 853304 - DNA, 100 bp, Homo sapiens
aagggctctgaaagctagaagaaaaggtgtacttgcaagaaacctcaggacttgagtaacagcaacatggaacggaaaacagttcttccttcaaagcatg

SEQ ID NO: 853305 - DNA, 98 bp, Homo sapiens
cccagcaaggaccccggcttcgggcatccaacgcaatgatgaacaacaatgaccttggtcatgattgttgtgaaacagtgaaggtgcagctctgtgct

SEQ ID NO: 853306 - DNA, 99 bp, Homo sapiens
cttgaggttcacagatgatacgtttgatccagaacttgcagcaacaatagttctttattggtgaaaacatgaatccagatggcatggttgctctattgg

SEQ ID NO: 853307 - DNA, 99 bp, Homo sapiens
caaattcacagggaagaaagtgactgaagagcttctgaccgataataggtgcagtcagcctcagtttccaaagccggaaaaggatcctctagtagccac

SEQ ID NO: 853308 - DNA, 98 bp, Homo sapiens
agggtcctaaaacaggatcagtaaagaaggaaaaagcagtaaagccagaggaaggccgattctttgatgaaaatgaatcccctgttgatccgcagcat

SEQ ID NO: 853309 - DNA, 98 bp, Homo sapiens
cggaccccccatgcggaagatatggcagaactcgtgattgtcggggggaaagacatccagggctccttgcagagtacatgtgatgcagaaaagtctta

SEQ ID NO: 853310 - DNA, 100 bp, Homo sapiens
ggcagtcacaccttcctgtgagtgagaaccatagcagaaccttcaaagcacctctcaagtcggtggtgaagcagcgcttgcagatgtacaactcgcagca

SEQ ID NO: 853311 - DNA, 99 bp, Homo sapiens
cccatttcgcccctcgcgtccggagtccccgtggccagaaagtgaagtcactgcttttgctgtcttggatcaagaccagaaagaaattattgataccaa

SEQ ID NO: 853312 - DNA, 99 bp, Homo sapiens
tcctgcctcagcctcctaagtagctgggactacagatatgtcaagggttcaagatgatgaagttggtgatggcactacctctgttaccgttttagcagc

SEQ ID NO: 853313 - DNA, 98 bp, Homo sapiens
ttttttcttccggtggctctttgacaaaacttcctcggaggcctccatcaggttggaatacaaaatcttaccctaatcagtgtggagttgcatgctcg

SEQ ID NO: 853314 - DNA, 117 bp, Homo sapiens
cgatggaacaaaggttgtctctcatccaattacaggagaaattcaggctacagctcagatggaagaacgtctaaaggaaattatcaccagctactctcctgacaacgttctaccctt

SEQ ID NO: 853315 - DNA, 100 bp, Homo sapiens
atttgactgaagaacagaaggcgatcaaggccaagtatccgccagtcaataggaagtacgagtgtaccaaccaagaagctgaagaaatatgagaaagaat

SEQ ID NO: 853316 - DNA, 99 bp, Homo sapiens
ttttggctgctgcaggagccattttaggtctcccaccatccgggacatggcgatccgctgcattgcccagatggtgaactcccaggcggccaacatccg

SEQ ID NO: 853317 - DNA, 98 bp, Homo sapiens
ttttaagccaatagctccgtcaggtcagaacgccacttgcacaagatacaggtctcggccttgaaaaataaactgaagaagcagtctacagctacggg

SEQ ID NO: 853318 - DNA, 100 bp, Homo sapiens
ggtccagcacgtaatgacagtgtcattgtggctgagcgaaagattgcctaaaagccataatgaaaagggtaaatcataaggttccacatgttgctctgca

SEQ ID NO: 853319 - DNA, 100 bp, Homo sapiens
ggaacagacaagcaggttgtcttgttatggagaaaacttgtatagatgcacttcctcttactatgaattcttcagaaaagcaagagactgtatgtatttt

SEQ ID NO: 853320 - DNA, 100 bp, Homo sapiens
acagtccttctgcagtccctcgtccagccacccccaggattgacttctaaggactcttggtacatgaggaagaaacccggaaggggaagaggaaagcaaa

SEQ ID NO: 853321 - DNA, 99 bp, Homo sapiens
ccaaagctccctgctgcataagaccttgtcagagttccaaaagctgagacaagatcttgaaatggtactgtccactaaggagtcaaagaatgaaaagtt

SEQ ID NO: 853322 - DNA, 100 bp, Homo sapiens
gttccataaagaatggcccttgtggataagcacaaagtcaagagacagcgattggacagaatttgtgaagaaatcatgccaccctcaaagcctcatccac

SEQ ID NO: 853323 - DNA, 99 bp, Homo sapiens
ggatattctggtggggagatgaacccaacctagtgggtgtaatacatcatgaactgcaggtgggctgagggccatgtcagttttctgccacctacagga

SEQ ID NO: 853324 - DNA, 100 bp, Homo sapiens
cgttgctgccttcttcgtcaaggtaaactgtcttgagccccaccctcacctgcctgtgctggcaaccagtggcctagaccatgatgtgaagatctgggca

SEQ ID NO: 853325 - DNA, 100 bp, Homo sapiens
atccagtgttagaacttgaactggcagaggaaaaattacctatgacgctttctaggcaagaggactctcgttggggagatagagattcagaaggcacctg

SEQ ID NO: 853326 - DNA, 100 bp, Homo sapiens
tttttctgagatcatcaccaccccgacggagacttgtgacgactcagatgccactgcatcatcagataacagcgagacggaggggacacccaagttgtct

SEQ ID NO: 853327 - DNA, 99 bp, Homo sapiens
attccggggtacctcactgcagaggtgctggagctggcagacccagacacttttgaaccccaaaaattcttccagacatcaggcctctccaagatgtca

SEQ ID NO: 853328 - DNA, 100 bp, Homo sapiens
agctttggggcttctgactgcagttcttctgagtgtgctgctataccagtggatcctgtgccagggtttgttggcatccaaagctgttggggttgatggt

SEQ ID NO: 853329 - DNA, 118 bp, Homo sapiens
aaagaaaagaatacattcctgattacctgccacccattgtgtcttctcaagaagctcgatcaagtcatccgccaaagaagcctgtccagtttggaactgttcctctcctgtgcacaga

SEQ ID NO: 853330 - DNA, 100 bp, Homo sapiens
cgatcgcggttttaatcgacgagctccgcaatgaagacgtgcagaaggatgccctgcagtggtctcgccatccagctacagtggagggagaggagccaga

SEQ ID NO: 853331 - DNA, 100 bp, Homo sapiens
tcccagtgtcattggtgaaggccttgggattcgaggcagctgagtcctcactgaccaagctctggattaatcgaattacagctgctagccaggaacatgg

SEQ ID NO: 853332 - DNA, 99 bp, Homo sapiens
ctactcctacttccacttcgtgttcttcctagcttccctgtatgtgatgatgaccgtcaccaactggttcaagttccaagggggcaaaaaagaagaact

SEQ ID NO: 853333 - DNA, 98 bp, Homo sapiens
taccatgaaatgattgaatctggtgttatcaacttaaaagatgccacctctaagggcatccgtttccgaggctttagtatccctgaatgccagaaact

SEQ ID NO: 853334 - DNA, 99 bp, Homo sapiens
accggccagggttttctttactctggggtcccggctgccctgtggcctcgctcctcggaggttagtaacaggagtatgggaaggcaaatacaacttctt

SEQ ID NO: 853335 - DNA, 99 bp, Homo sapiens
tgagactttcagaaacttattcacagttaccaaagctgggaccagtccaacgtcaggcggatgcacacggctgtgaagctcaatggcgtcgtcctcaac

SEQ ID NO: 853336 - DNA, 100 bp, Homo sapiens
ttagcaagtaatgatgctggatctagcaaatcatcttcagcaatgaccctgaaaactgtctatgactttgaaagaagccatcaagtcttcactcatcatc

SEQ ID NO: 853337 - DNA, 100 bp, Homo sapiens
gatgcagagctggagtttgcaatccagccaaatacaactggaaaacagctttttgatcagccacccccctttgaatgtattggaacaggctactattaaa

SEQ ID NO: 853338 - DNA, 100 bp, Homo sapiens
tttgttcctcatcgcagcagttgttttggatgtgaagttaccccagatgtaaacatttcaggccaaaaatttaacattaaactcctgattccagttgcag

SEQ ID NO: 853339 - DNA, 100 bp, Homo sapiens
tttggtgcatgaagctcaactcaactatttctacatctctcctggaggacacattcagctaacgtattttagcaggtggagtgaggttgaagattcctgt

SEQ ID NO: 853340 - DNA, 100 bp, Homo sapiens
gtgagaggcatgcttccttagaccaggtcaggatggctaactggttggctccccacatggtgccctacgtctatatcacaccttaaagaagctgaagaga

SEQ ID NO: 853341 - DNA, 100 bp, Homo sapiens
cagcagatggtgatgagaggccaccgagagacctccatggtccatgaactcaaccgagtgatggtgatgattttaattacatcattgcatttttccttgg

SEQ ID NO: 853342 - DNA, 108 bp, Homo sapiens
aatctagagagttgagaattgccgaaatcacccatctacagcaacaattacaggttctacatgaaacattttctcaacacacattcctcatgaatggtctcattcaag

SEQ ID NO: 853343 - DNA, 98 bp, Homo sapiens
catagtacctacagcagcactccagttttatccaagtatgaagatcagattactattttcactgactacctagaagaatatccagatacagatgagct

SEQ ID NO: 853344 - DNA, 100 bp, Homo sapiens
aggagtgggaccgcgacctgctcctggacccagcctgggagaagcagcagaggaaggaagaaggtagataatgactataatgcccttcgagaaagactca

SEQ ID NO: 853345 - DNA, 99 bp, Homo sapiens
tggggcctgggccccctgcccagacaggtcatcctgtacagttctacagcatgaataggcctgcctctcgccatactcccccaacaatagggggctcgt

SEQ ID NO: 853346 - DNA, 100 bp, Homo sapiens
atttgggaaccattgccaagtctggtactaaagcattcatggaggctcttcagctacatcaaatgggtctttggagggcctggataaccaggagggaggg

SEQ ID NO: 853347 - DNA, 100 bp, Homo sapiens
tacaaggtgcacctggacctctgggttaagactccccatccccaggatgtcaacctcagtccctcaaggccatacctggacccaacgggtgaagaaagac

SEQ ID NO: 853348 - DNA, 100 bp, Homo sapiens
acaggctgtgtgcatgcaccaaaggttgcctgtgatttgcttcggaggattattcgtatcttgaatctcagtaagagactccaaggacaactgcaagggg

SEQ ID NO: 853349 - DNA, 100 bp, Homo sapiens
tgatgcccgtcattggttacaactgagtcccaccgatgcttcaaatttaacaggaagtggagagactgattttggacctcagctcaagaacctcaataag

SEQ ID NO: 853350 - DNA, 75 bp, Homo sapiens
ctgacgctgctgctgtgtgcggtgctgctgagcttggcctcggcgtcctcggccctaccattgaccatgccctgc

SEQ ID NO: 853351 - DNA, 51 bp, Homo sapiens
ctccttcaaagaacatggccagattgaggggaagcaagcacttatttggct

SEQ ID NO: 853352 - DNA, 98 bp, Homo sapiens
ttcaacctttacccagaaacatttgctctggctagcagtcttttggataggtttttagctaccgtaaagatccagaagcttggaagctgtattacaga

SEQ ID NO: 853353 - DNA, 98 bp, Homo sapiens
gaggttcaatgcagacaagacggatgtgatgctgaggaccattcttagtggcactggggaaatcttggcacccagaagaattcaactgcgctcactgc

SEQ ID NO: 853354 - DNA, 98 bp, Homo sapiens
actgtgccttgcttatgtttgttaggaccaaacctcaaagcatggctaagagtgttcagtagaaatggacatccagctctgtcacccaagctgcagtg

SEQ ID NO: 853355 - DNA, 98 bp, Homo sapiens
tcgaaactattccatgattgttatgttcactgctcttcagcctcagcggcagtgttctgtgtgcagtaacaatgatgatgttatgttgatttctgtgg

SEQ ID NO: 853356 - DNA, 100 bp, Homo sapiens
gctcggcccgcgggggagccccgggagccgcacgctaaaagatggcggcaaggcagcccaggcaaatgtaagaataggcgatgtggttctcagcattgat

SEQ ID NO: 853357 - DNA, 99 bp, Homo sapiens
ggagatcccaggcggtgacagagtggagccatggctagaggtatcattggtggactgaccagtgttataacttcgacagtggaaggtgtgaaaacagaa

SEQ ID NO: 853358 - DNA, 100 bp, Homo sapiens
agtcacagatgctatagtctggtatcaaaagaagcaacttgtagagacagtttcatgtggaggaaatcttttgatgaatattgggcccacactagatggc

SEQ ID NO: 853359 - DNA, 100 bp, Homo sapiens
ccacctcgcagccggggaggcaactggagcgaaaccagcgacagtaaggaagagcccaacactgctggaagtgagcatgccccatttcatgagaaccaac

SEQ ID NO: 853360 - DNA, 98 bp, Homo sapiens
gaggcggaggcggccggcccggtctatgcatggaacattgaaaagtattgaagggcctccaaacttgggtataaacttgcctttgagcattaagcctg

SEQ ID NO: 853361 - DNA, 100 bp, Homo sapiens
aagtttgtgaatttgggaagaaataattcacaggagatgctcatcacggggttttgcacacaagcagttgaagacatctcttcatcgaggactaacccct

SEQ ID NO: 853362 - DNA, 100 bp, Homo sapiens
atcaagattaaaagagcgaataaagtttatcacgccggggatgataatgaagataattcaaatgatgggacccagccatccaaaaggaggcgaatgggct

SEQ ID NO: 853363 - DNA, 100 bp, Homo sapiens
cacagtgattgatgctgcctcaggagtctcgctctcagtcaaaatctccaacgggaactcctgctcgtgtaaaatcggagagcaggtcaggatctcgtag

SEQ ID NO: 853364 - DNA, 100 bp, Homo sapiens
tgctccagtactcaagggaacgggtggaatgaatcttacttgttgaatatcttctggttactagttggattcatttgtgaaagaatcattttcccctgtg

SEQ ID NO: 853365 - DNA, 98 bp, Homo sapiens
tctacctgatgctggaccggggtcacttagactaccccaggaacccgcgccgcgagggctccttccctcagctgggctcaaaatgcagagaactcaaa

SEQ ID NO: 853366 - DNA, 132 bp, Homo sapiens
atcaattgaatatggacccaagagtcagcggtatattagttcagttaccactaccaggaactagaggctgctatccagccagatactagcctggtgtcagtcatgactgtgaacaatgagattggagtgaag

SEQ ID NO: 853367 - DNA, 100 bp, Homo sapiens
aaaaccaagggaacaacttgactggctccttttaactggatatcttcacggtgatgatatggcatctgccagctctagccgggcaggagtggccctgcct

SEQ ID NO: 853368 - DNA, 100 bp, Homo sapiens
tccaagcacagtctcagccccatggggtatatccaccctcaagtgtgatgaacaagtgcttcctcacaacttgaagcttctagcagaagaacttaacaag

SEQ ID NO: 853369 - DNA, 100 bp, Homo sapiens
agcaacaacctggcggtgctcgagtgcctgcaggatgtgagggaggacgtagacaagtttggcaacgagatcacccagctggcccggcccctgcctgtgg

SEQ ID NO: 853370 - DNA, 100 bp, Homo sapiens
ccaccagatctgcagaattctgaatgcccatatggactccctgcagtggattgatcggaattcaggttccaagtttaagaaaattacttatcctctggga

SEQ ID NO: 853371 - DNA, 100 bp, Homo sapiens
agtcaaaactctcccatctgggatcaggattttctctcagcctcttccagaaccagccagctaggcatccaaacagtaactctcgaagtgataaaagctg

SEQ ID NO: 853372 - DNA, 100 bp, Homo sapiens
aaacttggtggaagccactggtcaaccctcagctccccatgagaaattatgtcacgcatctgatgaagcgaattcagagaggcccagtaagaggtatctc

SEQ ID NO: 853373 - DNA, 100 bp, Homo sapiens
aagggaaggagccctgcaactggcgccgccctgaccccaagattccagatgttcctgtggaccccagtccagccagttattataataccattggtagaaa

SEQ ID NO: 853374 - DNA, 100 bp, Homo sapiens
gtgggcaaactaagccgattttccggaaaaagatgcttgctttaaatcgagtaacagcatcgcacccatttatgactgccgtagatctaatggaagcaag

SEQ ID NO: 853375 - DNA, 100 bp, Homo sapiens
tggatataatggatttggaggtgatggacatggatttgattgacatactttggaggcaagatatagatcttggagtaagtcgagaagtatttgacttcag

SEQ ID NO: 853376 - DNA, 99 bp, Homo sapiens
tttccatatgctcctcctcctgtcccggacctatgaatcctctgatcgcatcacccttgagttactcatcgatggagtgcctgaaactgatcgcctcct

SEQ ID NO: 853377 - DNA, 101 bp, Homo sapiens
gcgactttcagaaacaatcacatgaagactaaagcatctgtcagaaaagaagaaggtagataatgactataatgcccttcgagaaagactcagcaccttgc

SEQ ID NO: 853378 - DNA, 98 bp, Homo sapiens
ggagaagcacctggtaggccatatcctattaccttatagcactgctcagcacgcaggcatgtgaggaagctgggcttaaaggagactccagcaaatgg

SEQ ID NO: 853379 - DNA, 99 bp, Homo sapiens
tccaggccgtggtcagccgcttcgacgagcaggcgcatattaaatttcctattgactacccctattcaccacctaccttcagattcttgaccaaaatgt

SEQ ID NO: 853380 - DNA, 98 bp, Homo sapiens
tgtcgccctgtcgtctgtgttgtgactgctttggacgtgggagtcacctgaaagccaggaaatggttcttgggtgtctctggggagtccctgggccag

SEQ ID NO: 853381 - DNA, 100 bp, Homo sapiens
tggcaagacagataaatcatcctgagctacacatggtactcagtaatctagctgcagttttgatgcacagaggttctcttattcaagtaccttccgttga

SEQ ID NO: 853382 - DNA, 100 bp, Homo sapiens
aaaatccgatcacctcgaagatttattggcagcccacgaacacctgtcagggctgtaatccccttgcacaaaccggccggagtaaattgcagaatcaaag

SEQ ID NO: 853383 - DNA, 99 bp, Homo sapiens
gcccggggggaaaacttggaacatctccgcaacaagacagaggatctggaagccacaaggctgacccgcggctgattgagtccctctcccagatgctgt

SEQ ID NO: 853384 - DNA, 99 bp, Homo sapiens
tgaagaagatggtggataagcccacccagaagttcaccatgtctattctcaagatccatgccagggagatctttgactctcgcgggaatcccactgttg

SEQ ID NO: 853385 - DNA, 98 bp, Homo sapiens
cctcgcgtcgcgcccgggaggaaggaacgaggcaaggagctaaagcagcgtgcgttcagccctggggaggcaagtgaggcctatctggttggcctttt

SEQ ID NO: 853386 - DNA, 98 bp, Homo sapiens
cacgtgttggaatggacttcggaccctggcctcttgggatgcaaagctgtcggcagcatccagcccctccagtcacagtcctcacagagcttcaggaa

SEQ ID NO: 853387 - DNA, 100 bp, Homo sapiens
cctgatgtgcagttaaaaaatctgcccttttatgatgtccttgatgttctcatcaagcccacgagtttagaaactgggcgaatctacagaacaaagaacg

SEQ ID NO: 853388 - DNA, 98 bp, Homo sapiens
catttcagcaagctggctaaagacatgtgggaaagcctgaccctggattcaggtcaaatctcagcactcacaagaaaacagagctgtcagtcagtgct

SEQ ID NO: 853389 - DNA, 100 bp, Homo sapiens
aggtggaccccaagaagaccattcagatgggatctttccggatcaatccagatggcagccagtcagtggtggagtattggatgaacgaatatacctcatc

SEQ ID NO: 853390 - DNA, 101 bp, Homo sapiens
cccaagagtggcccaaaagagagaatttatctagaggaaaacccagagaaaagtgaaacaattcaggacactgctccttcctcagagaagcttcctgttat

SEQ ID NO: 853391 - DNA, 100 bp, Homo sapiens
gtaaaagaaagagacttttttctaaagaataacgacctgcagcaataccattgacctgccgatgtccccccgcactttagattcattgatgcagtttgga

SEQ ID NO: 853392 - DNA, 100 bp, Homo sapiens
ccctggacacagcaatatctctgggctttcacaggcacagttggtggatctgaaatctgaactgacagaaacccaagcagagaaagttgttttggagaaa

SEQ ID NO: 853393 - DNA, 107 bp, Homo sapiens
gaattccatcaaagtggctcatccccaaagcgcttaatagagatggatgcaaccttgaaagaactgacaagcttagtaaaagaagtctacccagaagctagaaagaa

SEQ ID NO: 853394 - DNA, 99 bp, Homo sapiens
ggtcatctaaaggaggttttaaacagtataacagatatgaatgccacaatacgaaggattgaccagttaaccaacatcttagcccccatggctgttggc

SEQ ID NO: 853395 - DNA, 98 bp, Homo sapiens
aagaatacatcaagattctgaatctggtgatgaacttagcagcagctccactgaacagataaggttcacaagattcctttgcagttcacccttggagg

SEQ ID NO: 853396 - DNA, 100 bp, Homo sapiens
tatcctaaacttttcaagcctgaaggaaaggcagaactgcctgattacaggagctttaacagatttagctatcaagcattatatagctatataccacaga

SEQ ID NO: 853397 - DNA, 100 bp, Homo sapiens
aagcccttgcgcctgcctctccaggatgtctacaaaattggtggatgataatgaagataattcaaatgatgggacccagccatccaaaaggaggcgaatg

SEQ ID NO: 853398 - DNA, 100 bp, Homo sapiens
gcaagcccctaggaatctgcctgataatcgattgcattggcaatgagacagcctctccccaccggtcactgttagcctcgagtttgaccctcaacatccc

SEQ ID NO: 853399 - DNA, 100 bp, Homo sapiens
ctggggcccacactgtgagaaatgtccccttccaggcacaggaagccatcggtatcagattctacccctgcattctcagattcctcgagaggaacagcgc

SEQ ID NO: 853400 - DNA, 98 bp, Homo sapiens
ttcaccgcaacttttgagctaagtgatgatggccgctttgaggtgtggaatgcgatgactcgagtatctgcggggactgtgtccaggggcagagggcc

SEQ ID NO: 853401 - DNA, 98 bp, Homo sapiens
ggggttctgagactccctgtcccggaccgcagggcttttttgaagaagaagaaggtaaagagtatatttataaagagcctaagctgacaggtctgtcc

SEQ ID NO: 853402 - DNA, 98 bp, Homo sapiens
ggagaggaccatgtgagtgggctccggagcctcagcgccgcgcaggagcacatggatgaagtatgctcctcgcagcttctaacttcagtaaggcgcat

SEQ ID NO: 853403 - DNA, 99 bp, Homo sapiens
tagaagcaggactagaagcagaagcagaacacgaagcagggtcattgaagtcaacaagagagacatagtcttcctggtggatggctcatctgcactggg

SEQ ID NO: 853404 - DNA, 100 bp, Homo sapiens
catgaagacttgaacttaatacagcaagaaagaccatcaagtttaccaagcctggagaaagttcttgtggaattcagtcacaaggagttgtttgatttct

SEQ ID NO: 853405 - DNA, 100 bp, Homo sapiens
ccgggcggcgcttctgtcctcctactcggacccgcagccttgcctccccgattgaaagagatgaaaagccaggaatcggctgcaggttccaaactagtcc

SEQ ID NO: 853406 - DNA, 103 bp, Homo sapiens
gccatcgttgctgccttcttcgtcaagttccgagagaaatatggggacgtcttcacggtacacctgggaccgaggcccgtggtcatgctgtgtggagtagagg

SEQ ID NO: 853407 - DNA, 50 bp, Homo sapiens
gatccgatagctctctgcttattaatgcctggagcaagcttggagcagac

SEQ ID NO: 853408 - DNA, 99 bp, Homo sapiens
tggcgctaggcaggcgttgaggaagaagccacccgagcggactcccgaggtagtggaggacatgctagaggacgaggaagaagaagatgacaaagatga

SEQ ID NO: 853409 - DNA, 100 bp, Homo sapiens
gttgcgaaatggtctgaggcagagtgtggttcagtggtatcacggaaaacttgacagaacgatagcagaagaacgcctcaggcaggcagggaagtctggc

SEQ ID NO: 853410 - DNA, 100 bp, Homo sapiens
cagcatgccgatagttcaaacttctatatcacagaaaaggaatgcttctagtcacaacagacacccttggccatgactttcatgtcttccaaattctgac

SEQ ID NO: 853411 - DNA, 100 bp, Homo sapiens
cgctaattcagaagcactttccgtccaccaagagaaagcgggacagaggagcgggcagcaagcggaaacctatcatggtgaacttacttcagattgtgcg

SEQ ID NO: 853412 - DNA, 100 bp, Homo sapiens
gaagcttgcagccctgtgccttgacaagagcctcatccacaccgtgttgctgcaaaaggactatcaggtgttaagtgtgatgcttccataatacatttgg

SEQ ID NO: 853413 - DNA, 101 bp, Homo sapiens
cagggtccaacagggcctggtccgtgtccggtcccccaaatctgtcgtccctgcccccagggttttggggccttgtcacagatgccagatgatttgcatcg

SEQ ID NO: 853414 - DNA, 100 bp, Homo sapiens
ctcgctcgtcaccagcaagcttgcgggcctcctctattggcccaggaagcccacccagccccgccacgcagagcccagaaggaaagaaagcctcatgcct

SEQ ID NO: 853415 - DNA, 98 bp, Homo sapiens
agactcgcttggtgccctgacagaccccaccaacaactgaacgctttggtcaggctgctacaatggaaggaattggggcaattggtggaactcctcct

SEQ ID NO: 853416 - DNA, 104 bp, Homo sapiens
gaagaataagagatgtgattaatgtattccaccacctccgccagttaagaggaaaaagtctatacgagatactccagccaaaaatgcacaaaagtcaaatcaga

SEQ ID NO: 853417 - DNA, 100 bp, Homo sapiens
gccactgactcctacttcctctgtatagagcaactgttgaactcagctgcctgtaggatttgaagcattcattaccatctggacttggtctctcagaaac

SEQ ID NO: 853418 - DNA, 100 bp, Homo sapiens
tcaccagcactgccttgttaagggctctggaaggggaggctcaccgtgtgctatttgggtttgtgcctgagacaaaagaagagctccaggtcatgccagg

SEQ ID NO: 853419 - DNA, 100 bp, Homo sapiens
aatgcgacggccactgttctctgggacaatgcttttgcagagccttgagaaagatcagtctaaagaaaaggagaagaaagtgaaaaaaacaattccttcc

SEQ ID NO: 853420 - DNA, 99 bp, Homo sapiens
aggcacccacgctcctacaataatgtctacacaaggaagtacaggatttggcttttctagatgtcgtatccaaacttcgcagtcatgagaacaaaagtg

SEQ ID NO: 853421 - DNA, 100 bp, Homo sapiens
gtcagaggggcaggagcttctgggagccaccgtctgaagccttgaaaagatcttttgaggtcgaggaggtcgagacacccaactccaccccaccccggag

SEQ ID NO: 853422 - DNA, 100 bp, Homo sapiens
tgacaccacctgtaagcctttggcatcaacaactcagtacagccgtgctgtatttgatgtgagtcaacccgacaactgtgttcccatggaggctgtgggg

SEQ ID NO: 853423 - DNA, 100 bp, Homo sapiens
agctgggatctatgagtggaaaggtgaccaagcccaaagaggagaaagatgcttctaaggctctcgtggcattatccttcagtggggctattggactgac

SEQ ID NO: 853424 - DNA, 100 bp, Homo sapiens
ctatggagagtacccactaacagccatgaccctcactccgggagcccagagcatgttccagatcccagagtttgagccgagtgagcaggaagactccagc

SEQ ID NO: 853425 - DNA, 98 bp, Homo sapiens
agatccccgaacaaagagcagccttggaaagtttgacaaagtgagagaactggagcagaccttgcaggcctctgaggagcagctccaacagagcaagg

SEQ ID NO: 853426 - DNA, 98 bp, Homo sapiens
agaactcacccagacaaacatgcagcttcagatcatccagcccctcttagaacttgaccaaaatagaagtaaattaaagttgtacattggacacctga

SEQ ID NO: 853427 - DNA, 100 bp, Homo sapiens
ggaagccatgctcaatgaccgccgccgcctggccctggagaactacatcaccgctctgcaggctgttcctcctcggcaacttgtagagacagtttcatgt

SEQ ID NO: 853428 - DNA, 98 bp, Homo sapiens
tgggaggccggccggtgccagcacctttcggcttctgagacggcggcagcagcggcattcagtccacctggaaggccgctgtggtggaaggatgtttg

SEQ ID NO: 853429 - DNA, 133 bp, Homo sapiens
aaaaagtttgccccggtagttgctccaaaacctaagtacaacccatacaaacaacctggaggtgagggaaactactttgcttcgcactttttcatgggaggagagaaattcgacaccccccaccctgaaggtt

SEQ ID NO: 853430 - DNA, 100 bp, Homo sapiens
cctgaggtttcagagcgcagccatcggtgcgctgcagctgtaaaatttggccgaatgtcaaaaaagcagagagacagcttgtatgcagaagtacagaaac

SEQ ID NO: 853431 - DNA, 98 bp, Homo sapiens
tccaaaccagtcacctccccacccccaccgccaagcagccacgagaaagctgtcccagttaaatcagagttggcagttgaaattttggagaaaggcca

SEQ ID NO: 853432 - DNA, 136 bp, Homo sapiens
gaagatgaacacagtcatcgctgcactgagccgggacacgattaacaggtggtccgcaggcctgaccagcagctgcccatgatggggggagctttcatggactcgcccaacgaggacttcagcaccgagtactccc

SEQ ID NO: 853433 - DNA, 98 bp, Homo sapiens
catgggcgcgtcacacaggcctccgtgaagaacttccagatcatccatggcaatgaccagcaggaggaggcagcggaagaggatgctgaagcagaggc

SEQ ID NO: 853434 - DNA, 98 bp, Homo sapiens
tttaacgacaagcacatcaccactctgcaggcactgaaaatgaagtatttcagtaatcggccagggccaacacctggatgtcagctgccaagaccaaa

SEQ ID NO: 853435 - DNA, 99 bp, Homo sapiens
cgcctgcgtcccagaagtgcctgcagttcagacccttctctcccctccactttctcccggcatgaagactttttgcttgccctacagatgaatgaagaa

SEQ ID NO: 853436 - DNA, 98 bp, Homo sapiens
gaatctggaaagatgttagaattgaagcctataatatttgtcacctgaactacttcacattttccccaatatatgatggatagctcccagttgatcca

SEQ ID NO: 853437 - DNA, 100 bp, Homo sapiens
gcacttaaaataattgggcagaagagaagcagtgaaggagtgcagaggcatcacctgaaagcaatacgtttggtttaatattggcagtgtggacaccttt

SEQ ID NO: 853438 - DNA, 100 bp, Homo sapiens
ggcctgttccttcagcaagccttccaacagactcgtggcaatatgtgacatttcagctgacacaggagggtctatagagtttatgactgagtgtacaaca

SEQ ID NO: 853439 - DNA, 99 bp, Homo sapiens
ggcttggagcacttcctattccactggattgggaaagaccatggcagagcaatgttgatcccagggatgatgtatttggatatcctcaacaatttgaag

SEQ ID NO: 853440 - DNA, 100 bp, Homo sapiens
ttgctttacctatggctgcaggattggatattcttctccgcttacactctctgaccagggtggtgacttcacacgccataatggcactggtggcaagtcc

SEQ ID NO: 853441 - DNA, 98 bp, Homo sapiens
cggttcctgggcccacgctaccgggagctggtcaagaactgcttctagaattcctctccagagctactctcaagttatatccaggggacaggcccctt

SEQ ID NO: 853442 - DNA, 100 bp, Homo sapiens
ggaatgactcatcttgaagcccagaataagattaagggttgtacaggctctttgaatatgactctgcaaaggtatacactgaatatcctcgaagaaattg

SEQ ID NO: 853443 - DNA, 124 bp, Homo sapiens
agcaaaagaccttctttgcacttctttcaagcagaattattgctgtatattcactctgaactgagaggtaccttaacatggggaatcttcttaaagttttgacatgcacagaccttgagcaggg

SEQ ID NO: 853444 - DNA, 100 bp, Homo sapiens
atggctcgagaatacagagagaaaattgagacggagctaagagatatctgcaatgatgtactgaattctgcttggtcagaatcgtgatggcattgtgttc

SEQ ID NO: 853445 - DNA, 100 bp, Homo sapiens
ctcggccatggtctacccgccgcgggaggtgtgtggtgccggcactgcggccatcttgcagttcctctgcaaagcggttgatcgacaagaccaaggtgac

SEQ ID NO: 853446 - DNA, 100 bp, Homo sapiens
gagaaaaccagacctccacttccaaggatatagagcagttgcatccaagaattgatgcccggagagctgatgaaaaccttggaatgcttcttgtagaatt

SEQ ID NO: 853447 - DNA, 50 bp, Homo sapiens
cggagccctgggctggggcaggagccgatgcctgtgaggagccaccaaca

SEQ ID NO: 853448 - DNA, 100 bp, Homo sapiens
aggagtggacattgctagcaatgagctcccaaagccatccagtaatctatgccagcaattatgacaatgttagcagaccatgcagctcgtcagctgcttg

SEQ ID NO: 853449 - DNA, 100 bp, Homo sapiens
gactgtcttcttactggcagtggaacgacctgtggaaacctgtgatccattctcattaaataaatctctgggaaatactcttaattctaaggaaaacctg

SEQ ID NO: 853450 - DNA, 100 bp, Homo sapiens
gtgaagatggattactgaaagttttgaaattagagacgcagacagcactattcctgatcagagaactccagttgcttcaacacacagtatcagtagtgca

SEQ ID NO: 853451 - DNA, 98 bp, Homo sapiens
tcacctatgcaaagaaagggaagctattgctgggattttgaggaggttgtccttctattcaggccactcttcgttttccatgtactgcatgctgtttg

SEQ ID NO: 853452 - DNA, 98 bp, Homo sapiens
aagggcgcccttcccctggatacggtcactttctacaagctcactaaatagcctgcctgatttttttctacctgaggctatgcaccgttttacttctc

SEQ ID NO: 853453 - DNA, 102 bp, Homo sapiens
ccagttctcctctggatcgcagtcatccagagatgattgtggacctgacagtgggcaacaacaaaactctcctggacattgacaacactcgcatgacactgg

SEQ ID NO: 853454 - DNA, 100 bp, Homo sapiens
ggccgtcccgggccgggggacccgcccgccatggccaccaaggacagaactgtaccgctctctttttggccagctccaccctcccgacgaaggccacggg

SEQ ID NO: 853455 - DNA, 100 bp, Homo sapiens
caggacagaaatgaccaacagataactgaggacaatggacctgcctgggcatagacttccttaaggaggagatgttaaagtaacccatcttgcaggacga

SEQ ID NO: 853456 - DNA, 100 bp, Homo sapiens
gccagagcgactttgatcaccatcaccaacaacattggctcaatagcaagaatgtgtgcccttaatgaattcatccatgagctcggatttcccacattac

SEQ ID NO: 853457 - DNA, 98 bp, Homo sapiens
atgaagtgcagaggtttttttctggcagcacgctggctcttctcctgaacttcctcgcctgcctggccagcttctgtgtggaaaccaacaatggcgca

SEQ ID NO: 853458 - DNA, 98 bp, Homo sapiens
caaaggtcaagctggttttcatcagttaccagatgtatgctactcatggtgggtcctggcttccctaaagataattggaagacttcattggattgata

SEQ ID NO: 853459 - DNA, 100 bp, Homo sapiens
taaggaattgccagcaaggattcgtttcctgctgcaggtaacagttaacctcttccacatgcagcatctgcaggctgcttcccttgcagacagtttacag

SEQ ID NO: 853460 - DNA, 100 bp, Homo sapiens
ggagacgcacgcagctgactttgtcttctccgcacgactgttacagaggtctccagagccttctctctcctgtgccggtggtggtgtgcacattgagccc

SEQ ID NO: 853461 - DNA, 98 bp, Homo sapiens
aaacgttcaccaagtgggtcaacaagcacttaatgaaggaaacaagtttcagccactaaggccgaagcagaaaaggatggagtgaaggtccccacaac

SEQ ID NO: 853462 - DNA, 121 bp, Homo sapiens
tgatgatgaagaaacttctacagatattactaatttcaatctggaaaaaggtcaccaaaaaggaggcgatctagatctggttctagatctcgaaggtctcggcatcgacgttctcgatctc

SEQ ID NO: 853463 - DNA, 100 bp, Homo sapiens
tgagaaggactatgagatttaccgggattacagtgcggacggccagcttcttcactacagagggagacgtggtgggcggtccttcctgtgacacgaccct

SEQ ID NO: 853464 - DNA, 98 bp, Homo sapiens
tttcaaggactttgatgttggcgatgggaaaactgaggctgccatcaaaaacttcagtccctactacagtcgtcagtactctgtggctttctgcaatc

SEQ ID NO: 853465 - DNA, 100 bp, Homo sapiens
gatctgatatttttctactagtagataggactcttggtttggacatactacatggatcagaccattaaaaatctcaagtgacgactttgggaaactctgg

SEQ ID NO: 853466 - DNA, 99 bp, Homo sapiens
gatggccgacttcgatgatcgtgtgtcggatgaggagaagggaagaaggagaaagggccaacccctgaagaagcaatacagaaactgaaggagacagag

SEQ ID NO: 853467 - DNA, 99 bp, Homo sapiens
tcactgcctgcgcagctccggccgcctggctccccatactagtcgccggactattggaaatgcacttcatgcaatgaaatgaatcccccccttccatca

SEQ ID NO: 853468 - DNA, 98 bp, Homo sapiens
agactctcttcgctctttgcatcttaactgcagatgcttgtttgctactgatgggtgtgagcaagttagatattctataccggagacttctcctaaca

SEQ ID NO: 853469 - DNA, 100 bp, Homo sapiens
ctcatggtatatttgcagccagtactctatatgaacaatccgtctggatcacggatgtaggaagtgttctaaatggagcccctggatttataaacttgtg

SEQ ID NO: 853470 - DNA, 100 bp, Homo sapiens
accgggatcgtgaccgagaccgtgaccgagagcgtgaccgagagcgcgaatatcgtcatcgttagaaggtcctcatgctgataccgccagtggatgccag

SEQ ID NO: 853471 - DNA, 100 bp, Homo sapiens
aatgtcccaaggaacacctgggcaacagaatattggtcaagttgctgaccttgaagccggagcctcaacagaaagctcctttagttcctcctcctccacc

SEQ ID NO: 853472 - DNA, 98 bp, Homo sapiens
gtccagcgctcggacccccctacccacgctgaacgagagggacacggagcaggatcctcagtcttccacaatgaaccctgtttacagccccgtgcagc

SEQ ID NO: 853473 - DNA, 99 bp, Homo sapiens
gatgatgttgaagaagtcaaagaccagtttgcaacccatgaagttttcctttggaatatggataaatacaccatgatacggaaactagaaggacatcac

SEQ ID NO: 853474 - DNA, 98 bp, Homo sapiens
tattcctcatgacattgctgtctgatcacaaaatttgtccaggatagacatagagctagaagaaacagacttcgtaaagatcaacttaagaaacttcc

SEQ ID NO: 853475 - DNA, 100 bp, Homo sapiens
caccctactgcagcagtgaagatgctgcccacctttgtgaggtccactccagatgggacagattagctctgctctggtatcatactgtagtccgcccgtt

SEQ ID NO: 853476 - DNA, 98 bp, Homo sapiens
cttcatgcggccccactcggagcccctggccttcccaggtcggagctcttaggcctgctgaaaacctacaactgctaccatgagggcaagagcttcca

SEQ ID NO: 853477 - DNA, 100 bp, Homo sapiens
agagggcgtccgaggagtgtgcggaaggacctcgtggagggatttactgatgcagagatccgaaggaattacatgaatgacagtcttcgaaccaatgtgt

SEQ ID NO: 853478 - DNA, 98 bp, Homo sapiens
ccctccttgcgcctccgattcccaggctccctacctgatttatgtggaagtccttgaatgtgaaaactttgacaccaccagtgtccctgcccggatcc

SEQ ID NO: 853479 - DNA, 100 bp, Homo sapiens
ggcgctatgtacgccctcttcctcctggccagcctcctgggcgcggcaacattcaagggattgaaaaccccggctttgaagcctcaccacctgcccaggg

SEQ ID NO: 853480 - DNA, 98 bp, Homo sapiens
ttggacccagctattgctgcagcatttgccaaggagacatccctcttagggatccagattagatgatcaaagatgtgctccaccacctgctaccacaa

SEQ ID NO: 853481 - DNA, 100 bp, Homo sapiens
tgtacctttaattccaccacctttcataaagccaccagcaggcataatcaccagcaacacccgggacaataatacgggggccacctacccccacctgaac

SEQ ID NO: 853482 - DNA, 100 bp, Homo sapiens
gaagcctttaaatgcagcatctgcgatgtgaggaaaggcacctccaccagtaacatccaggagatgagggctcggcacaaagaggcttttttgaagaaac

SEQ ID NO: 853483 - DNA, 100 bp, Homo sapiens
aaatgtggtcagtgaacctatcgaaggacatgaagactaccacatgatgcctcttccatgagtggggagcccgctgcttgtctccagctcctagcagtga

SEQ ID NO: 853484 - DNA, 98 bp, Homo sapiens
gttcctagagttgttcagaatcctccaaaaccagtcatgaccactagacccacagctgttaaagcaacaggattatattcaactgctacatccctggt

SEQ ID NO: 853485 - DNA, 100 bp, Homo sapiens
gccagtccgggcaggggcagcgggagccggccggggccagtatggaaattaccagcagtaagggacacacattctggctggagcccttgtggtagcgtgt

SEQ ID NO: 853486 - DNA, 100 bp, Homo sapiens
tgcaggacatctgcaatgatgttctggttgcttatggaaccacagagaacagtcccgtgacattcgcgcacttccctgaggacactgtggagcagaaggc

SEQ ID NO: 853487 - DNA, 50 bp, Homo sapiens
ccgcttggttctgacccagctgagcaaatgccagatgttaatgtaagctg

SEQ ID NO: 853488 - DNA, 100 bp, Homo sapiens
gcagaagaagcaacacgcaaacgagagctgaggctaatgaaaaacagaactgccgggtgaaaatctttggaagagaagtttgagaacctgttaaacaagc

SEQ ID NO: 853489 - DNA, 100 bp, Homo sapiens
ctgcccgtggacgccgccgaagaagcatcgttaaagtctctcttcaccctgccgtcatgtctaagtcagagtctgaagatgatgagaaactgaaaaagag

SEQ ID NO: 853490 - DNA, 100 bp, Homo sapiens
ccatccccatttgaggtctgtcggagctgcccttcagtgtggttcacaataaaggtgctaagaaagagaatgtaagacaggaaaataattaaatattctt

SEQ ID NO: 853491 - DNA, 100 bp, Homo sapiens
atggttatgcttttcagaatcttatcaagtacagtctgaaaatacagcctgttgagaaaatgcatctagctgtagttgcctgtggtgaaagactggaaga

SEQ ID NO: 853492 - DNA, 100 bp, Homo sapiens
tccgggccgggcggtttggccccttagcgcccgggcgtcggggcggtaaaaggccggcagaagggaggcacttgagagtgatcagcagctggactgtgcc

SEQ ID NO: 853493 - DNA, 100 bp, Homo sapiens
ctgcctgtcagcactgagcatgatcacaggggagttgctggaagccatcaaacgtgactttggttcctttgacaagtttaaggagaagctgacggctgca

SEQ ID NO: 853494 - DNA, 100 bp, Homo sapiens
gctggccgagttcttcagcgatctactcctgtcctggttccctttctactacgtgggcaaggcaaaattccactgaaggagcctctgtgccctgcagccg

SEQ ID NO: 853495 - DNA, 98 bp, Homo sapiens
actgagctctaggagtgccgttctgctggtcgtagagaggagtaaagtcacacccaaagggcgaactttctgaccaagtatacaactacccagagggc

SEQ ID NO: 853496 - DNA, 136 bp, Homo sapiens
gtggagaagtttgctgggaagaggataaagaggaaggtggttgagacttcccaaagcagaaagccaggagattgttgccagcaaaggaggttttgaaatggtcaccaaagagaagaaatggtctaaagtgggtagt

SEQ ID NO: 853497 - DNA, 99 bp, Homo sapiens
caaggagtggactagggtcgccggggaagcgggacacatgctaaccaagagtgagaagaaccagttattggcaatagcatcatcattgtttgtggcatt

SEQ ID NO: 853498 - DNA, 99 bp, Homo sapiens
tcaaaccagaagaaaacctgaatctctgagtgggaatttcagattggaccttgtgaaggaatcagcatgggagatcatctctgggtggcccgtttcatc

SEQ ID NO: 853499 - DNA, 100 bp, Homo sapiens
aagctgcctcattcttccatcctcagaacggctttttccgcagaagtattcagaagaatatgatttacacttgtcaccgagataagaactgtgttattaa

SEQ ID NO: 853500 - DNA, 98 bp, Homo sapiens
aattttctacagataccaaaggaaaaccaacttctcggacacaggtgacggggtctggctctgtcacccaggctggagtgcagtggcacgattatggc

SEQ ID NO: 853501 - DNA, 98 bp, Homo sapiens
agaggaagaaaacattcctgctctgaaagctcttcttgaaaaatgcaaagatgtagatgagagaaatgagactccagggattagagctcgatctgcaa

SEQ ID NO: 853502 - DNA, 99 bp, Homo sapiens
tcgggttctgacaagatggccgggctgccccgcaggatcatcaaggtgttaagtgtgatgcttccataatacatttggatgctgtcagctaagttcact

SEQ ID NO: 853503 - DNA, 98 bp, Homo sapiens
taaattggagaaaagcattgatgacttagaagaccacatagcccacatcatagagctgctaggcagtattccaaggcactttgctctatctggaaaat

SEQ ID NO: 853504 - DNA, 100 bp, Homo sapiens
gaatttctagattatcagctggatgagctttcccggcagcgagctctatgccgaggtggacgggaaatacaggggatttgtattttgagaaagctgtgaa

SEQ ID NO: 853505 - DNA, 98 bp, Homo sapiens
tttctctaacaaaacgaaagggtaattgtcatgagaaaaccctggacaacagccatgacaaacagaaatattttgacaactcacagtcactggatgct

SEQ ID NO: 853506 - DNA, 100 bp, Homo sapiens
gaaccttctctctttcgctctttggactaatgggagttgcttttggaatgaatttggaatcttcccttgaagaggctgattccaacaaaaccagaattga

SEQ ID NO: 853507 - DNA, 99 bp, Homo sapiens
tcaaactgcagaaacagatgccattcggtttttggttgggacgcagtctcttaaatatgataatcagtcggatatgttgcggtcactatctaacacaaa

SEQ ID NO: 853508 - DNA, 50 bp, Homo sapiens
tggcgatctacttcctctggcaggagcatcagatccatgctgctgctgac

SEQ ID NO: 853509 - DNA, 100 bp, Homo sapiens
acctgttcttcaggccatttttcttaacagcaattgctttgaacatctcatacgactgctacagaactgcaaggccggaaggtggtggtcgtacgctgtg

SEQ ID NO: 853510 - DNA, 98 bp, Homo sapiens
tccgaaaggacacactgaggctcgtcaatggtacaggcatggatgggaagaaatgcagcgtatggatgttcctacctcttgtatttactttgtttact

SEQ ID NO: 853511 - DNA, 100 bp, Homo sapiens
acaggatttcaatatgtacagaattcatggatgttaaagagaagttgactgcggatccagacagtgaaatagctacaaccagcctaagggtttctctact

SEQ ID NO: 853512 - DNA, 99 bp, Homo sapiens
tggcatcaagtttataagacagttcgtaccaattaaagtgagaagaaatttgtttgtccagaatgttcaaaacgctttatgagaagtgaccaccttgcc

SEQ ID NO: 853513 - DNA, 100 bp, Homo sapiens
cagagatggaggaacgcttctatcgctatgggataaaacccgagtggatgatgatccaccgaatcctcaaccacagactcaagtaggacgttttgctcct

SEQ ID NO: 853514 - DNA, 98 bp, Homo sapiens
gcgagggcaaagagctggtggcctcaggtgaaaaatttacattggtgcagaagcatacagtggaatttaaccaagtggcgatggctaattcagatgga

SEQ ID NO: 853515 - DNA, 115 bp, Homo sapiens
ttggttgtttgcaattgaagctgagaaactgaggaagagactggtggaaactgtccagagagaaatgttctttactaccatggaaagccaccttctgcgctgcaaagtgttagaa

SEQ ID NO: 853516 - DNA, 100 bp, Homo sapiens
tgagccacccccgcttggcaccccggtggatctggtaacaaaggacagagcagaatgggctgatatagatccggtgccgcagaatgatggccccaatccc

SEQ ID NO: 853517 - DNA, 98 bp, Homo sapiens
catggacgctaggaaatgccaaccatgacggcatagaatgtcaagctaaccaggcgtccgctacttcagaagagtgtactgtcgcatggggagtctgt

SEQ ID NO: 853518 - DNA, 100 bp, Homo sapiens
agaaggacttgacgactaccgctgcacggcttgtccacggggatatgaaggccagtactgtgaaaggttcatggtgaagctggctgaagagacagatggg

SEQ ID NO: 853519 - DNA, 100 bp, Homo sapiens
tccaggtgacagcaatcagctggcctggtttgatactgacctgtaaatcatcctttagtttcacaagactgtaatcaggatatggaagagatgatgtctg

SEQ ID NO: 853520 - DNA, 98 bp, Homo sapiens
tttgcgaaaaagtggatcaatattcggaagtcatatggaaatttttacaagggaaatctgcttcgccactgaaggtactctgcaccccagaaggaata

SEQ ID NO: 853521 - DNA, 99 bp, Homo sapiens
tttaactgatgagcaatcactttggattgaagatactacaaaatcagtttatcaaaatcaccttaaagatatactgacgtcagttgtgtcaagaaggaa

SEQ ID NO: 853522 - DNA, 99 bp, Homo sapiens
caggtggaacggcaggtgggttcaggtaccagcctggccgggacccggctgtgggaccaacgcttccgttgccgaggtactgtctgaatgccgcctgct

SEQ ID NO: 853523 - DNA, 51 bp, Homo sapiens
tctgggtccaccaccttcaccaaggccatcatgcagaagggggatacaaac

SEQ ID NO: 853524 - DNA, 100 bp, Homo sapiens
atccaataccagcagcctgtgggatttattattttgaagtaaaaattgtcagtaagggaagagatggaataactgaagtgaagtgatggactccgatttg

SEQ ID NO: 853525 - DNA, 99 bp, Homo sapiens
caagcggatccaagccatgattcccaaggccacaccatggacccagactcaggcggtcagaggccgcggcagcagagccacggatggtgccctccgccc

SEQ ID NO: 853526 - DNA, 99 bp, Homo sapiens
ataacttctggctggaattaagggcttttttgaagaagaagaaggtaaagagtatatttataaagagcctaagctgacaggtctgtccgagatttccca

SEQ ID NO: 853527 - DNA, 98 bp, Homo sapiens
ctgcctccccgtccagaagcctgtaggaaagcggaagcggcctggcaggggaaggatcgagatgtgaatgaatgtgaactgctcagtggggtgtgtgg

SEQ ID NO: 853528 - DNA, 100 bp, Homo sapiens
gaagacccgggccaacgtggacaagataaatttgcgcctcattttggtaagcggaaaaacaaaagagttcctgttttctcctaacgattctgcttctgac

SEQ ID NO: 853529 - DNA, 100 bp, Homo sapiens
agcagctagcccaagatgcggacctggccttgctgcaggctgcgtccagttcctgcaatattattaccagaggggctgcctctaccggctgcgggccctg

SEQ ID NO: 853530 - DNA, 98 bp, Homo sapiens
ggttacagctactcctgtgctctccattactggaacagattcctctgtggaagccagggagaagaggaggcaacagtgcatcccgacagcagcaacct

SEQ ID NO: 853531 - DNA, 98 bp, Homo sapiens
aacggcaaaaatctcaagaaagaggtgggcaagatcctgtgcactgactgcggaattgaatgatctggcacgggaccctccagcacagtgttcagcag

SEQ ID NO: 853532 - DNA, 99 bp, Homo sapiens
ttgacttggcttcaactactattacaaatattccaatgaaggactccctggaggaaaagcggaagcggcagcggtctgaacgcctggaacggattttcc

SEQ ID NO: 853533 - DNA, 98 bp, Homo sapiens
ctcgagatccagaagggaagatttattactaccatgtgatcacaaggaaagtggagaatgaggacatgaataaagaccagatcttgctggaaaaagaa

SEQ ID NO: 853534 - DNA, 146 bp, Homo sapiens
cttcccgtagcctcggggaaggagcaggatttagaggaccactagttggaccccatcctcgtgctggaggaacaggttagtggatgacagatgtgtggtgcacccagaggccggggaccttgccaaccctcccaagaagttcagag

SEQ ID NO: 853535 - DNA, 99 bp, Homo sapiens
gccattatcgcatctccccgacaaacaccacgagaattccgcagcccacacgacttgaaactgcatctgcagagcactgattatggtaacttcctggcc

SEQ ID NO: 853536 - DNA, 100 bp, Homo sapiens
cctactggcctatgccgaaagcacaggaactgtgagggtgtttgatctcatgggaagtgaactctttgtcatttccccgatatattcgactttatgggag

SEQ ID NO: 853537 - DNA, 100 bp, Homo sapiens
atgatatagcaacagagttgccctgtcaccatttctttcacaaaccttgtgtctcaatttggctacaaaagcgtgcgggcgccgcagaatgaggagtggc

SEQ ID NO: 853538 - DNA, 100 bp, Homo sapiens
ctttgactccttgctttctcgggacatggccgggtacatgccagctcgagcagatttcattgaggagcttcctggacgatttaacaggtcctcaagcgag

SEQ ID NO: 853539 - DNA, 100 bp, Homo sapiens
gggacctgggaacctactgtggggccgcggccggaccgagcgcctcgacctcggtctgagacccttcttatgactcagtcagaagaggagcttggggcaa

SEQ ID NO: 853540 - DNA, 100 bp, Homo sapiens
ccgtgattgaggacgatgcatttgcgggcctgtcccacctgcagtacctgtggacctgggtcccattaacctggacagacacctccaagatgagcatgag

SEQ ID NO: 853541 - DNA, 100 bp, Homo sapiens
taggtggaggaaacctgcatctttacccagcaatccagaacaaagaactttgagtctggcaaggcttataagacaacatggggagatggtggagaaaact

SEQ ID NO: 853542 - DNA, 100 bp, Homo sapiens
aatgtatttcttaccaaaagacactttcaggcgcaacgtgctgagcttgtcccctggaatcgaccacccaggctctctgaaatgggacctcgctctctgc

SEQ ID NO: 853543 - DNA, 98 bp, Homo sapiens
gttccccacctccccagacctcatcatcagctccacccaacacttcctcaactgaggtatgcaaccactcatgtattcggttcaggaagcattaaatg

SEQ ID NO: 853544 - DNA, 100 bp, Homo sapiens
agtgggagcccgataaatatttattgaagaaatgaaaggtgacaaaaggcagaaggagggagaccccaaaaagaggaactgtggctgcaccatctgtctt

SEQ ID NO: 853545 - DNA, 99 bp, Homo sapiens
ttcaggaagcgcggatctcccggccgccggcgcccagccgtcccggagaaggggcttgttccctgcaactaccttgaaccagttgagctgcggatccac

SEQ ID NO: 853546 - DNA, 128 bp, Homo sapiens
ttgccaaaggcatggagtaccttcacaacctgacacagccaattatacatcgtgacttgaacaggaattaaacatgggccagcgatgttcagatactagaggaattgtcttcgaagatgtgaaagtgc

SEQ ID NO: 853547 - DNA, 100 bp, Homo sapiens
gaaggacagaccgacgtcgccgagctgggagcatttcctccctctgctatttatacacggaaagacttactacagcgatctacccatattgccaccaaga

SEQ ID NO: 853548 - DNA, 100 bp, Homo sapiens
gagctgtgggtctggttccaagacactgtcactgaggacatgaattttataatccccagaaaaaaaattacattttcctgcgtaatgcagccgaagagct

SEQ ID NO: 853549 - DNA, 98 bp, Homo sapiens
gccatggagcccgactcggtgattgaggacaagaccatcgagctcatgaaacccgggatggacgtggccgacgcctacgtgactttcgtccgccattc

SEQ ID NO: 853550 - DNA, 100 bp, Homo sapiens
agaacagaacaggccctatggggcatacctatggctttattgacctcgactcccatgcgatgctcacatagtagaatggtccccaagaggagagcagtat

SEQ ID NO: 853551 - DNA, 100 bp, Homo sapiens
ggcctgatcagaatgtgacaagaagtcgaagcaagacttaccctaagcgaatagcacaaacacagccagctggatacattaattgtttggtcagaagcag

SEQ ID NO: 853552 - DNA, 98 bp, Homo sapiens
tcatctttgctgagcgggcttattccgcagtggtttttgacaggtgcatcatgggcttcatcagcaaggagcgagagcgtgccctgttgaaggaccag

SEQ ID NO: 853553 - DNA, 99 bp, Homo sapiens
tagagaggaactggagcaattgaagctgactactaaggagaataagggtgaagtaccatgcaagcatttcttaaaggtacatccatcagtactaaaccc

SEQ ID NO: 853554 - DNA, 99 bp, Homo sapiens
gagaccacagccaccactattctagcatccgtgaaggagcagtgtaaacaggaacatcgataagtagtgtaaaaacttgcacaatgaaatccgaagcca

SEQ ID NO: 853555 - DNA, 100 bp, Homo sapiens
aagcagaaagcaagtgaatacgagtcagaagacgccctcctgcaaaacggcccaactacgttaagcttggcactctggcacctttctgctgtccctggga

SEQ ID NO: 853556 - DNA, 98 bp, Homo sapiens
gacgcgggccttcgagcagctcatgaccgacctcaccctgtcgcgggaaactggccaagaagcggaaagagaccatgagcagcacccgacaggagatg

SEQ ID NO: 853557 - DNA, 100 bp, Homo sapiens
cgaaggacgggagccgaagctcaagtgcatttggtgccagaaaacagtacatgatgagtgcatgaaaaatagtttaaagaatgaaaaatgtgattttgga

SEQ ID NO: 853558 - DNA, 98 bp, Homo sapiens
ttccggctggattccaagtccgtcgtggaggtattgttgcagcatctggcagtgagactgaggatgaggacagcatggacattcccttggacctttct

SEQ ID NO: 853559 - DNA, 100 bp, Homo sapiens
aagagaggatcatgtctacacctggaggagaggaagctattgaacgtttaaaggtgagtggtttaccgcccccggagctgacatggctactcaatggcca

SEQ ID NO: 853560 - DNA, 103 bp, Homo sapiens
cagatgccagtagtgcccgccccacccgcatgctctttgtcactccccggcggcagcacgaaagtaccatgtaaaaatgcatttgcaaagggagaaaatgaag

SEQ ID NO: 853561 - DNA, 100 bp, Homo sapiens
agcagggacattgtgagagactgcctagagaaggacccaattgaccggacagatgatgacattggcatggtctacatggctggacttgtttttgctgttg

SEQ ID NO: 853562 - DNA, 100 bp, Homo sapiens
ctcctgccagcctgaatgagaaaacaccgaagggacattctgtcttcatggacatttttgaacttgtgagaatggatcttggagaatgtctgaaagtcca

SEQ ID NO: 853563 - DNA, 100 bp, Homo sapiens
atatattactccagcccaaattagtaaagaaatgagagatgagctacatgtccgaggtgaattagtgcactgaaaggctccaaaggaaaagactgtgaaa

SEQ ID NO: 853564 - DNA, 98 bp, Homo sapiens
ccctctcagcacagtccagggatcttttgaaagggaaatcctcattgacgattcaatttgttgaaggccaatttgtggactcctacgatccaaccata

SEQ ID NO: 853565 - DNA, 100 bp, Homo sapiens
cagaagccttcaaagggaccaagaaaggcactgtctaccttaccccttaccgggttgggttcaatatacggagagtgccctgtgccaaagccacgagttg

SEQ ID NO: 853566 - DNA, 100 bp, Homo sapiens
caagatacggtcatgagcttttgattaacaccttaataaccagcggagctgacacagccaatttttggagccgtgagggatacagcagtttggtcaatat

SEQ ID NO: 853567 - DNA, 100 bp, Homo sapiens
tgtcatcgagaagaacgagagcggtgcctttcctgaagactatcttctggtctcgaaatggacatgatagatccagggatgtacagcagagagctaggag

SEQ ID NO: 853568 - DNA, 98 bp, Homo sapiens
gaaccatggccgatgggggcgagggcgaagacgagatccagttcctgcgaactaaccccagctcaaagggattgtgacaaggttattcagccagcagg

SEQ ID NO: 853569 - DNA, 100 bp, Homo sapiens
gaggacttctggaggatgatctgggaatggaaatcccacactatcgtgatgctgacggaggtgcaggagagagagcagctgtcaataccagcaaatatgc

SEQ ID NO: 853570 - DNA, 99 bp, Homo sapiens
gtgatcaatatcaggaaaggccccatcttcccttcacacctggttcaaaccttgtactactcagctgatcacaagctgcttgatgggaacctactagat

SEQ ID NO: 853571 - DNA, 106 bp, Homo sapiens
tggcgtcaccaatgggctgaatgatgccagcgactccatctacacgaaaggcaccccggagattgctttctggggaagatgagctcacagtgcctgcactttaccc

SEQ ID NO: 853572 - DNA, 98 bp, Homo sapiens
agcaagcggaggtgctgggagcgagttggctggcttcctgtgtccagtaccggttagtggtccgggatgtgaacacccttcagatccttcagctgtac

SEQ ID NO: 853573 - DNA, 98 bp, Homo sapiens
aaccgggatggcgacgtctacactgagtcggaggcgaaggtgctgttggcagcagcggtctgcacaaaagcaggaaaggctattgtttctcgacagtt

SEQ ID NO: 853574 - DNA, 98 bp, Homo sapiens
tggatccagtcagcctggagatccaatgagaaaacctggacagaacttcatgtgtctgtggcagtcttgtaaaaaaggagaggggccactgaaaactt

SEQ ID NO: 853575 - DNA, 100 bp, Homo sapiens
cccaagttctggatcagtcggcccgggccaggtgtgtgaagcttacactctctgctctggtagatgggaagagcattaatgctggaggccacaaggttgg

SEQ ID NO: 853576 - DNA, 100 bp, Homo sapiens
ctggagtagttcctacctcaaatgtgctcacgatgttgaatgatgctttaacacattctgcagttttaattcaggtgaaagaagaacgtccagaaaaaat

SEQ ID NO: 853577 - DNA, 99 bp, Homo sapiens
gaggatggccggaggctcgccgacgaccttgattttgtgttggagacaaatttttcctaaagaataacatgatcctttgccagacggactacgaggaag

SEQ ID NO: 853578 - DNA, 99 bp, Homo sapiens
caaagagcagctggccggaaaagtgttgcctcatcttattcccctgagtattgaaaacaatcttaatcttaatcaggtgtttggagaagagggattgac

SEQ ID NO: 853579 - DNA, 50 bp, Homo sapiens
gaagatgacccattatttccacctattgatcccatgagcgtgtaagcaag

SEQ ID NO: 853580 - DNA, 131 bp, Homo sapiens
gggggtgctgggcgacctgcaggcagcaccggaggcccaggtctccgtgcagcccaacttccagcaggacaagctggaagatgagctggtgtcactgcaaaagaaactcaagggcaccgaagatgaactgg

SEQ ID NO: 853581 - DNA, 51 bp, Homo sapiens
atatttactaagaggtaaatgacgcaaggaatatgaagacaaggctggaag

SEQ ID NO: 853582 - DNA, 100 bp, Homo sapiens
cttccacgatcgctacttcatcctcaacagcagctgcttgcggctctacaaggaggtccgggcccgaatggaagtggatgcagatggaaatggtgctaag

SEQ ID NO: 853583 - DNA, 100 bp, Homo sapiens
gctggctgtgggggctacaaaaggcaagtatatcgcgtcaacacagcgacctgacgggacctggcgcaagcagcggagggtgaaagaaggatatgtgccc

SEQ ID NO: 853584 - DNA, 100 bp, Homo sapiens
aggacattgaggaccagctgtacaaactcgagtcagacaagcgcctggtggagtggaactctctagcctcctggttcggaatgtcaactatgagatcccc

SEQ ID NO: 853585 - DNA, 98 bp, Homo sapiens
agacgatctgcacttcgcattttggcattgacatttaattttagggtcctttatatagaagggagagtagggaagcgtgacagcaatgacagtgtttt

SEQ ID NO: 853586 - DNA, 98 bp, Homo sapiens
gcagtcttcttcgtggctgaacaggactcaggaggtgaacctgaagaaaatgaggaaaaaatagtgaacctggaactggtttttggttttcacttgaa

SEQ ID NO: 853587 - DNA, 100 bp, Homo sapiens
cgctgctgctgccgctgccgccctgagtcactgcctgcgcagctccggccgcctggctccccatactagtcgccggagtatgcatcaacaattgtgtcag

SEQ ID NO: 853588 - DNA, 100 bp, Homo sapiens
gaaactctagtcaaccataggaaaggacccctatggtgtagccgtgggtggaactgtggggcactgcctgtgcacgggattggcagtaattggaggaaga

SEQ ID NO: 853589 - DNA, 100 bp, Homo sapiens
aaaaactggctgtgaataatatagctggtattgaagaggaaggggaacagtttgtgaagaaaatcggtggtatttttgccttcaaggtgaaagatggccc

SEQ ID NO: 853590 - DNA, 99 bp, Homo sapiens
gcagatttacaaactggccaagaagggccttactccttcacagatcggttgttatcgtcaggagctgtgcaaactgatgtgtgaacggctaaaactcag

SEQ ID NO: 853591 - DNA, 98 bp, Homo sapiens
ggcattggtcaaagagataagaggacaccccagggctctaattgaaaagagaatccaattacaccttccaaagggaatcctgcaaaacctggcagcta

SEQ ID NO: 853592 - DNA, 100 bp, Homo sapiens
ctattgatgtacaagtcattacacaccacatgcagcgatatgcagtttggtttggaggatcaatgctggcttccacgtttggaaattttagcattcaggt

SEQ ID NO: 853593 - DNA, 123 bp, Homo sapiens
gcaagctgtgaaagatgctgtgtctaagaaacccattccattggagaacccaaaggaaaagcgaccaggttcgagaacttgtcttggacaattgcaaatcaaatgatggaaaaattgagggct

SEQ ID NO: 853594 - DNA, 98 bp, Homo sapiens
ttcgtggtactgcggtttcaaattccctaaacattttagatgatgattataatggacaagccaagagtaaatatcggcagcatccccactcattcaag

SEQ ID NO: 853595 - DNA, 99 bp, Homo sapiens
tttggcaatagaattggctagatcaggaagcctatgtcaactatggaacaacaacttgcagctcatctctattgatgaattcggttccctcaaaattat

SEQ ID NO: 853596 - DNA, 100 bp, Homo sapiens
acatatttttggacctgaaacagaaattctggaacacctatatggagcagtgaggagaatgaataccttccaagaccagagtggcagctccagtaataga

SEQ ID NO: 853597 - DNA, 100 bp, Homo sapiens
tgcgactgtcgctgctttctgaggccacaggaaaggggccgtcggtcgccgccatgacagcgagcgaggcggagatcactggggtgatcctgctggctgt

SEQ ID NO: 853598 - DNA, 99 bp, Homo sapiens
tgcaacaaccactggttctccaggaaccgaaaaggcgaggagtatagtacggcaaaaaactgtcgctgcttcattgagagaatcagaccagcagagaga

SEQ ID NO: 853599 - DNA, 138 bp, Homo sapiens
gtgcggccctgggctccggcccctggaggagctgagcattccaggggcctccttccagggggctgccctctcgaagtgtctaccatcagagggagatctctgccccctggggctgagagaccccaacctttccccaag

SEQ ID NO: 853600 - DNA, 100 bp, Homo sapiens
ggttaggaaggagtatagatgacataggtcacctcattcatgaaggcctacagaagggctaccagggcatggtggacggaggctcaaacatcgcagaggc

SEQ ID NO: 853601 - DNA, 101 bp, Homo sapiens
cttaatcctactcagaagaacttgtacagagatgtgatgttggagaactatagcaatctggttttcttgggatgttcacggaagaccagggtgtagatgac

SEQ ID NO: 853602 - DNA, 100 bp, Homo sapiens
ctgtgagaatgggcctgactgtgcaggctgcaatgtggtttctgcatatgaagtgtgtaaaatagattgcttgatccaaaacagaaaaacagtgataact

SEQ ID NO: 853603 - DNA, 100 bp, Homo sapiens
caagatgtctgacatggaggatgatttcatgtgcgatgatgaggaggactacgacctgccaggctatgatgaccttaatcctgattggaggctctctact

SEQ ID NO: 853604 - DNA, 99 bp, Homo sapiens
gtagagattggcttcgggctgagctagcagtgagcaccttttggcccaatgaatatcaggcatgtggagaccccaaggcaaaaccatcctatcttatcg

SEQ ID NO: 853605 - DNA, 100 bp, Homo sapiens
ggcagccttcctgatttctgcagctctgtgtgaagcccaccaagaaaacacattgtggagcgctatacagagttttatcatgtacccactcacagtgatg

SEQ ID NO: 853606 - DNA, 99 bp, Homo sapiens
aacgtggtgggacccaaaatctgcctggaagataatgtggcaacgggcatgaggaggtagttgcatgcgcctgggatggacagacatatatcattgatc

SEQ ID NO: 853607 - DNA, 99 bp, Homo sapiens
tgcgattgtggaagctgctcggatcgccacatcacagaatcgtatctatctcacagctgacaaccttgtgctgaacctacaggatgaaagtttcaccag

SEQ ID NO: 853608 - DNA, 100 bp, Homo sapiens
taatgctgatgtccatggtctctagcagcctgaatccagtttctacagcagtataatcactacaaatccaatgtggagattttcaaattgcaaccaaata

SEQ ID NO: 853609 - DNA, 100 bp, Homo sapiens
cacagcattaccactggttgtaagatccaaaaggaaagtcctcggccgtagagattcagatgatgaccactcccgaaaccattctccctccccgcccgtg

SEQ ID NO: 853610 - DNA, 100 bp, Homo sapiens
cgttaaaggggcagtatggacagtggatgaagtagaattccaaaaacgaaggccacaaaagatcagtgggtaaagcagctgagcagccattttcagattt

SEQ ID NO: 853611 - DNA, 100 bp, Homo sapiens
ctgggagactggggcctgtggttgctggctgaggggctgcaacatcccgcctgcagactccagaaactgtgggtatcagttagcagagcaatcaagccct

SEQ ID NO: 853612 - DNA, 100 bp, Homo sapiens
aatcagaaactattcagacagcggcttctctgttggcctctcagtgtaaggcaaacattggtgggcaccgatcttcctgttcattctgcaagaacccaag

SEQ ID NO: 853613 - DNA, 98 bp, Homo sapiens
ctgccctggttgtctgctttccagaagcgcagcagctgcttgaaggcatagaatgtcaagctaaccaggcgtccgctacttcagaagagtgtactgtc

SEQ ID NO: 853614 - DNA, 112 bp, Homo sapiens
gaccgcgcccgccgggcacacaagaatggtcactgcatgttttccacaaatcctgcgtggatccctggcttagtgaacattgtacctgtcctatgtgcaaacttaatatatt

SEQ ID NO: 853615 - DNA, 100 bp, Homo sapiens
gatccatctgtcttagcaaggctgtcatcacaaagcacgaggtcccagcaaagtctgatgtttactgtgaggtgtgtgaattcctggtgaaggaggtgac

SEQ ID NO: 853616 - DNA, 100 bp, Homo sapiens
gccagtcacagcaccagccagctctcccagaaactgaagaccacttacaaggcttccaccagcaagtaccttctccaggcaaattccgttcccctgcagc

SEQ ID NO: 853617 - DNA, 100 bp, Homo sapiens
agcaaccagcaccagatgaaggagcattcctcttgggatggccaggccatgttatgggatctcaacgaaggcaaacacctttacacgctagatggtgggg

SEQ ID NO: 853618 - DNA, 100 bp, Homo sapiens
aggtccctgtcagcaccacggttgtgtccacgtcccaggctattgaaaaggctgtggtgtctcagcgcctgacagaatctccgtgtgctttggtggccag

SEQ ID NO: 853619 - DNA, 99 bp, Homo sapiens
cgacatggaacagggactcactgggggacagaactgtaccgctctctttttggccagctccaccctcccgacgaaggccacggggattgacatcgccca

SEQ ID NO: 853620 - DNA, 100 bp, Homo sapiens
ctctctgaggtctttgaacaagaaattgacccagtgatgcaaagccttggatactgttgtggcagaaagaaaagacagctttgatttctggctgcaaaaa

SEQ ID NO: 853621 - DNA, 100 bp, Homo sapiens
cttaaacaagagcaagcaaaaatcattcgattcgagagacaagcagaagaattcctcaatgcagtcttttatagaaaagcagcccatgacccatcgagaa

SEQ ID NO: 853622 - DNA, 98 bp, Homo sapiens
tgggcctggccaaggaccccctggaggatctgaattccagagaacaggagacctgccagcctgtgcacgtggtcaatgtggacatccaggacaaccac

SEQ ID NO: 853623 - DNA, 100 bp, Homo sapiens
agacacagcaacttcccgggacatcatccagagaggggttcacgatgtgacagtggatgcagacagcgagcccacagcctcggtgccccccgagtcggac

SEQ ID NO: 853624 - DNA, 98 bp, Homo sapiens
caagatgtatcacctatagaaagaaatgagcagctttggataatgacgacagcaacccgaagacagggaaatttagaacacaccacagccatcagcac

SEQ ID NO: 853625 - DNA, 100 bp, Homo sapiens
gtgaagtttggctggatcaagggtgtattagttgtttacattcagagctctatcaataagaggaatacatattacagtgaattcgacaaccgcacaagtt

SEQ ID NO: 853626 - DNA, 98 bp, Homo sapiens
cgaagatccggactctgggtgttttgctaccgtgaccgtttagcttcaggtgcatctagaagaccctgggtacttggaaaagtaatggaaaaagaata

SEQ ID NO: 853627 - DNA, 100 bp, Homo sapiens
cctgtgaacagtacgcagtgaatgttgcaccaggatcatctacgaccgaaagttcctgctggagtgcaagaactcacccattgcccggacacccccctgc

SEQ ID NO: 853628 - DNA, 98 bp, Homo sapiens
ttacagaaggaactacagagataccttactcggaagattggctttgaggcagtcatgaggattcggtgcaccaaagattggaccagaccctgaattct

SEQ ID NO: 853629 - DNA, 99 bp, Homo sapiens
gcggccgcggccatggcgtacgcctatctcttcaagtacatcataatcggcgacacagttggtctcttcccatggcgatgtccatctgccaccgtggca

SEQ ID NO: 853630 - DNA, 98 bp, Homo sapiens
aggtacagcaagttctttgacctgcagggctcgtgcaatccgcttcagacaggatggtaacgaagccgtcggaggattcttctctcagattgggcagc

SEQ ID NO: 853631 - DNA, 115 bp, Homo sapiens
gtgaatacacatttagcctcagtacaacatgtgaaaaatctgttacttgatgaacttcagaagatcctgataacttaagtgactctctcttttccggtgatgaagaaaatgctgg

SEQ ID NO: 853632 - DNA, 100 bp, Homo sapiens
ctcagaggagtacttcgccacttactttaatgagaagatctccattcctgaggaggagttaagtgggcagaccaacatccacctcagcaaaaacttcttc

SEQ ID NO: 853633 - DNA, 100 bp, Homo sapiens
gtggcagttaggagactgaatcaaggtccagagaaggtggaggaatcctgatactgagcggtcggaatgaactgatcgcccgctacatcaagctgagaac

SEQ ID NO: 853634 - DNA, 100 bp, Homo sapiens
cttgccatcaacttgggactaaaggaatcacaggtacctggaactggaaagtagtggccatcggaatgaagtcagactgcattaccgctcaggcagtcac

SEQ ID NO: 853635 - DNA, 100 bp, Homo sapiens
gtgcgcgcgaaggagcggaagaatggcagtgctcaaactcaccgaccagtgtgctcatgggagcttagaagatcccaaaagtataacccatcataaatta

SEQ ID NO: 853636 - DNA, 100 bp, Homo sapiens
tgtgtttgctctcatgaacatgcaatgagaagactgatcaatctgcacccagtcagcttgaagagtttcaaatggaccctaccactgagaaatcaagatg

SEQ ID NO: 853637 - DNA, 99 bp, Homo sapiens
ggcgattggcatcgatctctccatcccttccgaggcccgacttcgagcgcttcgaccatcactgcccctgggtggggaattgtgttggaaagaggaact

SEQ ID NO: 853638 - DNA, 100 bp, Homo sapiens
gaggccagggactcagccgatgcctcaatggccaactgcaggatttgaatttgttgaaatgagcagtcgtaaatcaaagagtaacagcttaattcacaca

SEQ ID NO: 853639 - DNA, 100 bp, Homo sapiens
gaattgatgaattgcaagtttgtgccccatagctgcacaggtattctttaggtgatgctagaaggcctcttcatgaaacagcagttttggtagaagatgt

SEQ ID NO: 853640 - DNA, 100 bp, Homo sapiens
ttacgggccttctggagatgcttccgaactgtgggcaaaaatggcgtcatccctttcaagccctgatatcttcgactccccaagtcccgaagaggataag

SEQ ID NO: 853641 - DNA, 100 bp, Homo sapiens
ctctcacactcagagcttttgaggttgatgacaacaagaaactaggagaatgggtaggcctttgtaaaattgacagagaggggaaaccccgtaaagtggt

SEQ ID NO: 853642 - DNA, 98 bp, Homo sapiens
ggggttgaactgtggagtgtgtggaaacctccacagctgttgagaaaaaggagaaacctcttccaagacttaatatccattctggattctggattttg

SEQ ID NO: 853643 - DNA, 100 bp, Homo sapiens
aagacgtgaccattggagtctgctgtgaaagttgtgtagatttactgtttgtgagaggagctggaaactgccctgagtgtggtactccactcagaaagag

SEQ ID NO: 853644 - DNA, 100 bp, Homo sapiens
tgtttcaaagggtggtgaagaactaaggttcagggcttctggaaatcttgtaatcacccgtgagattgatgtggcaaaaaatcagtccttttggttcatc

SEQ ID NO: 853645 - DNA, 100 bp, Homo sapiens
aaaaacttaaaatggatatgaaaagtgaagaaagtgatcataggagaaaaccatttcaggcatccaggctggagaagcagaacagcacacctgagagtga

SEQ ID NO: 853646 - DNA, 100 bp, Homo sapiens
ggggtcccttcgcggccacccggggagacgtcttagacagtcgtggttcctgtgatctgtgtcctctttgcagaagctccttcgagaactcatagaacgg

SEQ ID NO: 853647 - DNA, 107 bp, Homo sapiens
cagagctgtgcctcccagcaccacagtccttctgcagtccctcgtccagccacccccaggtgaggtccagagatatatccagagaggagtggaagggctcggagacc

SEQ ID NO: 853648 - DNA, 98 bp, Homo sapiens
gcaagactctggagccagtcttgaggtcctacatctccgaaagcaagctcttctagaagttggttatcaatactctggctgaccatcatcatcgtggg

SEQ ID NO: 853649 - DNA, 100 bp, Homo sapiens
cgtcaccaccttggtggagaacaagaaagctcagctggtggtgattgcacacgacgtggatcccatcgaggatgttgagaacgatgggcctgagccctca

SEQ ID NO: 853650 - DNA, 98 bp, Homo sapiens
ttgcgacagcaagggggttgtccacgaggaacaaattgtacatttgcccattctcaggaagagcttgaaaagctctcaaaattagagagatgtgtaat

SEQ ID NO: 853651 - DNA, 100 bp, Homo sapiens
gaaaacttacagcaagatggttcatcttttgccctagagcaattgaagtggctggcacatgtgtatcaatcccaaggaatgatgagagctgcagagatgt

SEQ ID NO: 853652 - DNA, 124 bp, Homo sapiens
ggagtcgccgatcccgccggaagcgccaggacaatggggacccgggacgacgagtacgactacctattcaaaggatgttgagaaagaactggagatgcagatcagcatgaggcaggagatggaa

SEQ ID NO: 853653 - DNA, 98 bp, Homo sapiens
gatctcctatttttggcttcaagattttgtgccaaccaggtttcagcaacatttgctgcaagtttagtcaccagtcctgcaattggagcttatcttgg

SEQ ID NO: 853654 - DNA, 100 bp, Homo sapiens
ggaaatttggcttgcaattcatcactttgaaaaggtgaggcaatggaacaaggtttacgagactgctgtcgatccatacgaattggaaagatcctgattc

SEQ ID NO: 853655 - DNA, 100 bp, Homo sapiens
atgcagagcgacttgcgcgccttgtcactggagtgcaagaagaaattcccacctgtcaaagagttgatcataccagggttgtcctacacgatggtgatcc

SEQ ID NO: 853656 - DNA, 100 bp, Homo sapiens
ggctgcgagggactaagagcagagtcatgaatgaaaaacttcagcactgcatggaactaacagatctaatgcggaatcacctgaatgagaagagggcact

SEQ ID NO: 853657 - DNA, 98 bp, Homo sapiens
aggaatttcacacgtggtggcctccgttcagagtggcaattctacatgaaaccggttcctatacccacaaaaaggttgatgctcgaagtgaccgaact

SEQ ID NO: 853658 - DNA, 100 bp, Homo sapiens
ctcctggtgaccgagcacccgcctccgggcatcttcaactcgcttctctgaagtagctttggaaagtagagaagaaaatccagtttgcttcttggagaac

SEQ ID NO: 853659 - DNA, 100 bp, Homo sapiens
ccttcaatactacctttatttccaccataggtttcagattatcttgaagtaatcaaggaaccaatggacttatcaacagtaataactaaaattgataaac

SEQ ID NO: 853660 - DNA, 100 bp, Homo sapiens
agaagcttgattctgtgattgaattcagcatcccagactctctgctgatccgaagaatcacaggaagagccatggaactgctaagagtaaaaggtcaaag

SEQ ID NO: 853661 - DNA, 100 bp, Homo sapiens
ttacatctgcaaagaccttatttccagctaggggtggccgtgtcacagtctggccaaggaaatgaaattgggagttgctgtgtggaaactcaactctctg

SEQ ID NO: 853662 - DNA, 100 bp, Homo sapiens
gtatggacagggaagaaaggaagaccatcaatcagggtcaagaagatgaaatggagggcgtgtgaagacctggaagcgccggtggttcatcctgaccgat

SEQ ID NO: 853663 - DNA, 99 bp, Homo sapiens
ttggcgcttcctggaaaaccgggttaatgatgcaatgaacatgggccacactgccaagcagaatttgttcctagagacagagaacccaatacaaaagtg

SEQ ID NO: 853664 - DNA, 100 bp, Homo sapiens
gcccctgaggaaagagcccgaacttctcccgctctacctcagcctgcgggactgctcggctcggcttctaggcggaatgtaccaggtcatccagggtatc

SEQ ID NO: 853665 - DNA, 100 bp, Homo sapiens
atgggcacaggcagtgtctggaattggtatgttgagtcgatgggatgatagccagagatttttgtctgaccatccataccttgtatgtgaagaaactgct

SEQ ID NO: 853666 - DNA, 100 bp, Homo sapiens
tggctttaccgcactggtgaagcccatcaggaacatcattacagtggatgaggatcgcagtacggaacctgaccgattgcaggtgtttcacaagagagcc

SEQ ID NO: 853667 - DNA, 100 bp, Homo sapiens
tctggctgctgcagtgacccagaccctctcctttccctttgagaccgtgaagagaaagatgcaggatgctcacaactgtattcctgagctggacagtgag

SEQ ID NO: 853668 - DNA, 98 bp, Homo sapiens
gcatcaggggaaaagtttgcctatgtgccatttggagctgtacactcagaagaagccttgtttttactggcaacctgttattaccgctcaggaaaggc

SEQ ID NO: 853669 - DNA, 100 bp, Homo sapiens
cccaccagtccaccagtgcagcagaatatgatgaactcggcttcagcatatattttgtgaagagtgcatgaccttatggtttaacagagagaaaacatgt

SEQ ID NO: 853670 - DNA, 99 bp, Homo sapiens
ggagcagcaaacgcagagacaaaagaaacgggccccgactgccttctacactgccaagtatggctacaagttgtgcctgcggctgtacctgaatggaga

SEQ ID NO: 853671 - DNA, 100 bp, Homo sapiens
agagcctgattgaaccagtcaaccagtctattgttgtcagtggagagagtggtgctggaaagaaatctcccacgagtctccgggcagcagccagtgcctg

SEQ ID NO: 853672 - DNA, 100 bp, Homo sapiens
ggaagctaaggccgcgttggggtgagaccctcacttcatccggaccaccgcacagtctcaagtgtagtgaagtcaggaaagactcactggttctccagtg

SEQ ID NO: 853673 - DNA, 98 bp, Homo sapiens
gccggaggacatgcgggagagagaatgagccagagggacacgctggtgcatctgtttgccggagggtaaatgagctggatggtatcccgttgatcctg

SEQ ID NO: 853674 - DNA, 98 bp, Homo sapiens
aagatcaatagattgcctacccccattgcaggactgaaactggcagacctttcacttcgtatccaacaaattgaaacaactctcaatattttagatgc

SEQ ID NO: 853675 - DNA, 100 bp, Homo sapiens
caggaggaacctgcatttcccactgtacccccatgagtcgttcacgcctactgaggagcatgtgttggtggtgcgcctgctgctgaagcacctgcacgcc

SEQ ID NO: 853676 - DNA, 99 bp, Homo sapiens
gctctgttagtgcgcctctaagatggcgacgcctttggcggtaaattcggattgccaacactcctgatagctgaatgtgtgctggtttacatgactcca

SEQ ID NO: 853677 - DNA, 100 bp, Homo sapiens
ggaggcagtaaattcttcagctgctcggacagatgaagctccccaaggagctgcaggatttttacctcctataactccaccagaaaagttttttctttcc

SEQ ID NO: 853678 - DNA, 98 bp, Homo sapiens
aggagcctggacactaatagaaaatagatggcttgtgctgatggaaggattcctccctggtgacatgctgtgtctgcctcttgattgggagcacgcag

SEQ ID NO: 853679 - DNA, 111 bp, Homo sapiens
ctggagttgagacagacgactgggatggaccaggtgtcatctttaagaaatgaaaagcgaggctcatcatatctcatctctgccccagaaggtggttcagtggaatgtgtt

SEQ ID NO: 853680 - DNA, 100 bp, Homo sapiens
aatgagccagagggacacgctggtgcatctgtttgccggaggtcttactgttctgatccaaaccttgtgttagatttgaagaacctcattgtgctttttg

SEQ ID NO: 853681 - DNA, 98 bp, Homo sapiens
ttgcaaggagaaaattttggtggagaattatccaacaagaaaaagacctgtggctattaagataggaaccttttgaggatggctttgcaaatggggaa

SEQ ID NO: 853682 - DNA, 99 bp, Homo sapiens
gcagggagtgatggtcagctaggactcatgactactgaggattctgtggcagtgcccaggatggttcctacctggctgagttcctgctggagaaaggct

SEQ ID NO: 853683 - DNA, 98 bp, Homo sapiens
caggaagttctccagcagctgattgtaatgaatttgcccaatgttttgatgattggcagagacccactgtctggctgatcagctgaccgaagaacaga

SEQ ID NO: 853684 - DNA, 99 bp, Homo sapiens
ggccaaatgctcctttaatttttgaacgaggtacaggtttgcagattccgccagcagcacagcaagctctacagatgagtggctctttggcatttggtg

SEQ ID NO: 853685 - DNA, 98 bp, Homo sapiens
ggacgccgctgaccgccgcgcgcccgaaccgggtgtccacatgagtgcctctcccagcagatccagcaacagcttgcacaactacagaaagaaaaatc

SEQ ID NO: 853686 - DNA, 101 bp, Homo sapiens
caggcctcttatatgccgctttggataccagatggatgaaagcaaccaatgtgtggatgttcctcctgctgatcaagagaagctttttatccagaagttac

SEQ ID NO: 853687 - DNA, 100 bp, Homo sapiens
ccggcttcgaccaccactgcaaatggatcaacaactgcgtgggaagccggaattattggatcagtgaagtggagcccaaatactatgcagatggggagga

SEQ ID NO: 853688 - DNA, 98 bp, Homo sapiens
atcatttcatcaatgtaatgttgtctcatcccaatcacacagcctctgctttaggcccagaaggaaaagaagcttacaggagacaatcagtcttacac

SEQ ID NO: 853689 - DNA, 100 bp, Homo sapiens
aatgaaatgtcttctgaagctgacatggagtgtctgaatcagagaccaccagaaaacccagacactgatctagccgatggcggagtctcttctcttcaac

SEQ ID NO: 853690 - DNA, 51 bp, Homo sapiens
cgcccgtggtccggccatggacgacctcgatgacgtccggttgtttgcctt

SEQ ID NO: 853691 - DNA, 100 bp, Homo sapiens
cctgtatcgttttgagaaccagacaggcttccctccccctgatagcagatttgatgcctactgctttaaacgttgaaaggattgttgacaaaaggaaaaa

SEQ ID NO: 853692 - DNA, 100 bp, Homo sapiens
agcctcctgagttgctgggattacagctgctgtggcaccgcgcccagtatgagccgctcttccacatgctcagtggccccgaggcctatgtgttcacctg

SEQ ID NO: 853693 - DNA, 98 bp, Homo sapiens
ggatcatgaagcgctcggtagccgtctggctcttggtcgggctcagcctcggtgtcccccagttcggcaaaggcattgaatgccccagaggagcccga

SEQ ID NO: 853694 - DNA, 100 bp, Homo sapiens
aggtcccaatcccccactctttccgccctaatggaggtctccagtttcggcagttccggcgaggggggagcctcagcaggattgctgtgtgaaaaccgag

SEQ ID NO: 853695 - DNA, 98 bp, Homo sapiens
tactacaacctcgggcgtctgtttggtaactctcattcgacatccatctgaactaatgaatgttcctcttcagcaacaaaacaaatgtacagcattag

SEQ ID NO: 853696 - DNA, 99 bp, Homo sapiens
gacatttttgttccagaggatgatgatgatgatgactaacagggtcttactggacagagctcattcagactatgacagtgtgtttcaccatctggattt

SEQ ID NO: 853697 - DNA, 98 bp, Homo sapiens
cgggcccccaccagaaggtggacttaggcttttgcctaccaaaaagttttgggaacctgatgattcaacaaaagatggacaaaaaggcatatttcttg

SEQ ID NO: 853698 - DNA, 99 bp, Homo sapiens
aggtttaagcgactggaatcattcctacatgattcctggcggcagaaacgtgacaagaatgaagactattctcagcaatcagactgtcgacattccaga

SEQ ID NO: 853699 - DNA, 99 bp, Homo sapiens
ggacgtgggcgaacttctgagctaccagcccagtggttcccagacacaggtaatcttgggcacctccaagagcaaagtttaggagaagagggaagtcat

SEQ ID NO: 853700 - DNA, 100 bp, Homo sapiens
aaatccagacagaacctttgacttggtgttgaaagtgaaatgtcatgcctctgaaaatgaaggtaagaatgattgatgttggctgatattggagtgctca

SEQ ID NO: 853701 - DNA, 100 bp, Homo sapiens
atgaaagtggtgaagaaagagctggtgcatgatgacgagggagcagattaagcgagtaaaagactcggatgatgtacctatggtgctagtgggaaacaag

SEQ ID NO: 853702 - DNA, 99 bp, Homo sapiens
ttatctaccacccgagatgccccaagcgtggggtagagcagcggctgccatgctcttctgtggcttcatcatcctggtgatctgtttcatcctctcctt

SEQ ID NO: 853703 - DNA, 98 bp, Homo sapiens
ccagcccagatccgcttcagcaacatttccgccgccaaagtatctctcagaagatagaagtgtgcaagaagtactacagaagcatttcaatatcagca

SEQ ID NO: 853704 - DNA, 100 bp, Homo sapiens
atacaaccatcaacgctcaccagtggtctgagacggtccagccaattatggaagcacttagagcttgcaggagggttcctacttgttatctcatgcagca

SEQ ID NO: 853705 - DNA, 98 bp, Homo sapiens
aggttaggcctgtcaattcctgatctcacaccaaagcaagttgacatgtggcaaacacgtcttagtacacatttggaatatgtttatccagaagccag

SEQ ID NO: 853706 - DNA, 100 bp, Homo sapiens
actatgagatgtcctatggcttgaacattgaaatgcacaagcagggtacagctctgccggggggggaaaaagtggtaccattttgggcgttcttgagctt

SEQ ID NO: 853707 - DNA, 99 bp, Homo sapiens
ggaatgggcagaaggaggtgccacaaagggcaaagagaagacaatagatgtgcatcttcaaatgcagcatcctgtgccaggtgccttgcgctgggtcca

SEQ ID NO: 853708 - DNA, 98 bp, Homo sapiens
tcatttgtgactatggacctatggagttggggtctgggcttcagcatcgttgggggaaaagacagcatttatggccccattgggatttacgtcaaaac

SEQ ID NO: 853709 - DNA, 100 bp, Homo sapiens
acttgacctcggtcccagtgccccacaccaccgcactgtcgctgcccgcctgccctgaggagtccccgctgcttgttgtattccctgaatgactataaac

SEQ ID NO: 853710 - DNA, 99 bp, Homo sapiens
ttgcacaaaagtttataccaagtcttctcatttaaaagctcacctgaggactcacactggaattggcagcaatgaaacagattctcgttaagatgcata

SEQ ID NO: 853711 - DNA, 100 bp, Homo sapiens
gtttggattgtgagctatttcagaactgttctcaggactcattattttaacatttgggagaaacacagccagaagtagcaggacccagtgctccataaag

SEQ ID NO: 853712 - DNA, 100 bp, Homo sapiens
gtattgccgcggtggaaatggagacactggccaaaagaagaccctagacaagaaagatggaagacgaatgtcttttcagaaacctaaagggactattgag

SEQ ID NO: 853713 - DNA, 101 bp, Homo sapiens
ctaactatgtggaaaggaaaaacagtgctcggaaagcatctattgtgaaaaacctaaaggataccttaggaggatttgttggtattgaggaaaacggtgaa

SEQ ID NO: 853714 - DNA, 100 bp, Homo sapiens
ggaagcggaaaccagtggccacagcatctttgtctagccccagtgcaggtagctacagcaagctgggtagcaggcagatccaaaggatatcatgaagttt

SEQ ID NO: 853715 - DNA, 98 bp, Homo sapiens
catcctggttgggaataagaaggatcttcggaatgatgagcacacaaggcgggagctagccaagatgaagcaggacccgcccatggagaaggccctga

SEQ ID NO: 853716 - DNA, 100 bp, Homo sapiens
atttgctggccatcggattggggaaaatagttctgcttgcaggatgggcattgttcttattccttgcatataaagtttccaaaacagaccgagaatacca

SEQ ID NO: 853717 - DNA, 100 bp, Homo sapiens
gtgcgctgggggccggggcgcgtcgcagccctgaccagtgtagagattccattacctcatatctcaaaggagaagctggcaaatttgaagcaaatggaag

SEQ ID NO: 853718 - DNA, 98 bp, Homo sapiens
agctcttcagaagaaaatacctcctgcctgttctgttcagtcctggtgcagaccaagccaccctggtagaacaagtaaaaagagtaaaagaaattgaa

SEQ ID NO: 853719 - DNA, 98 bp, Homo sapiens
gacgacctgtctcgccgagcgcacgccttgccgccgccccgcagagaacacgtagcgactccgaagatcagccccaatgaacatgtcagtgttgactt

SEQ ID NO: 853720 - DNA, 98 bp, Homo sapiens
tctcgaaatgtgaccagcatcttggagttacgtgacagatatgctccaagcttgcatgaactcgggcattttaatattccaacactctgtgatccagc

SEQ ID NO: 853721 - DNA, 100 bp, Homo sapiens
gtcctcaatgcagttggatattttatggtagctacagcaagctgggtagcaggcagatccaaaggatatcatgaagtttccagggcctttggaaaaccag

SEQ ID NO: 853722 - DNA, 100 bp, Homo sapiens
tcaggaccggcccccacctttcctcaggagtcatttctgttccgcacaggcctgctgaactgggtgctttatataggtcgaggctttgggcaatccaact

SEQ ID NO: 853723 - DNA, 99 bp, Homo sapiens
cccgagggggaagcacgatttacggaaggtggtttcagacaccctcacaggttttctaccatgcagcaactgaacatggaggaaaagatgtatatccag

SEQ ID NO: 853724 - DNA, 100 bp, Homo sapiens
ggaaggagctggaacttcctgagaacattgctgattgagagacgcctggacacggtgcggtcaatatgccaccattcccataagcgcttggtggcatgtt

SEQ ID NO: 853725 - DNA, 99 bp, Homo sapiens
ttactgccgcgccaccgagtccggaccggagactttggggcctaactaggcatgtggagaccccaaggcaaaaccatcctatcttatcgacaaaaacct

SEQ ID NO: 853726 - DNA, 100 bp, Homo sapiens
ttgtctttgaggactttgtctctgatgagctgagaaacaaagccacccagccaatgaagttctccttcaccttcctccatgagtagaggcagcctgaggc

SEQ ID NO: 853727 - DNA, 98 bp, Homo sapiens
actgactccgagggttgggagagcgcgttggtggcgacggccgagtcaggtgctggaggtggtgagagccaactatgacacgctcacgctgaagctgc

SEQ ID NO: 853728 - DNA, 101 bp, Homo sapiens
ctctcttcggctcatgtataccttcgattacataagggtgtgaatctccagaagcttctggaagctggaaactttatctgtcaagccctgaacagaaaaac

SEQ ID NO: 853729 - DNA, 100 bp, Homo sapiens
agacagctgcgaccaggacgtcagccagcactgcacagacagctgcgaccagagactggagaggctgaggggatctggcggtggagcgctaggatcagac

SEQ ID NO: 853730 - DNA, 100 bp, Homo sapiens
cctgacggccacgaacttccgagtgggaagaaggtagataatgactataatgcccttcgagaaagactcagcaccttgcctgataaattgtcttataata

SEQ ID NO: 853731 - DNA, 100 bp, Homo sapiens
gagaagcctgaaaagtcgcagcgagctggagccgccggagatgtggacgagtgcctggaaccaaacgtctgcgcaaatggtgattgttccaaccttgaag

SEQ ID NO: 853732 - DNA, 98 bp, Homo sapiens
gaggggcaggagcatgatgagctgagcttcaaggctggtgaaagaactcttttcttctttgggagtcgaatgtaatgtcttggaacttgatcaagttg

SEQ ID NO: 853733 - DNA, 140 bp, Homo sapiens
tacaaacctccctactcctcgaaaattccttgatacctctcactattctactgctggaagctcaagtgagtccctggagaagtgggagcgtctgaccgtggcggatgcgctggagcccgtccagtttgaagatggagaga

SEQ ID NO: 853734 - DNA, 98 bp, Homo sapiens
gagcctggagcgcgagtacagctgcaccgtgcggctgctggacgacagcgagtacacctgcaccatccagggaaaacaaagtgcatgatgaagtcttc

SEQ ID NO: 853735 - DNA, 99 bp, Homo sapiens
ctggaaaggatctggagtcatggactacaagtgaaacaggtcactggtcttctggtctggacttgatccttcccccagatcaccatggccatggccaag

SEQ ID NO: 853736 - DNA, 100 bp, Homo sapiens
gaacggggaggtgaagccgctgccccgagcgtgttgtgctcctacagactgcaaccctgctaggggtccttctcctgggttatggctacttttggctcct

SEQ ID NO: 853737 - DNA, 100 bp, Homo sapiens
gagcaccagagtcggcgtaactatcgcctgacaggcgtgttgtgctcctacagactgcaaccctgctaggggtccttctcctgggttatggctacttttg

SEQ ID NO: 853738 - DNA, 100 bp, Homo sapiens
ggggtccagccgtccccagaacgcagatcagaggtagtcggacctttcccgctggcgcgcagcctcagctaggttatgaagacagtatggagtttccaga

SEQ ID NO: 853739 - DNA, 100 bp, Homo sapiens
cgagtccggaccggagactttggggcctaactagaaattccgggtagatatgcctggctcaggcagtgcattcatccccaccatcaacgccatcacgacc

SEQ ID NO: 853740 - DNA, 100 bp, Homo sapiens
gtggcagcgatgctcaagagtgagctgcggaagcaaaaggcagactttttgatattcagagccttggaagtcaacacttctgttctctggggaggcagta

SEQ ID NO: 853741 - DNA, 122 bp, Homo sapiens
gtgtcctgagatcaaatggcacttcattggccacctacagaaacaaaatgtcaacaaattgatgggtaagagcttctgttcgtgtgcagggaaagcagctcacagacgccgttaaaaccagc

SEQ ID NO: 853742 - DNA, 98 bp, Homo sapiens
agtcccgaggtgtgctcgccagaatggagtacaaaaagctgctggaacgtagagactccatggagttggtcatggaatgggctgggctcctgggctga

SEQ ID NO: 853743 - DNA, 100 bp, Homo sapiens
tgagcccaaagagatcctgggcagccgggcccctcagatgagagctgcacccaggccagcaccagtcgctcagccaccagcagcggcacccccatctgca

SEQ ID NO: 853744 - DNA, 98 bp, Homo sapiens
gttcaggctacggtgagccgaaggtgccatcgcctgcaggattctttattcagctctgacagtggcttcagcaactaccgtggcatcctgaactggtg

SEQ ID NO: 853745 - DNA, 100 bp, Homo sapiens
gctgtaccgccgactctcagaagttctgggcttgaatgatgagaccatggtcctaagcgtcttcataggaaaaatgtagttggcaaaaaaggagaaagcc

SEQ ID NO: 853746 - DNA, 98 bp, Homo sapiens
caactattacaatcgcttgtacaaaggagagtttaaacagccaaaacagttcattcatattcagcggagaccaaattttgaggaaggtggaccaacat

SEQ ID NO: 853747 - DNA, 100 bp, Homo sapiens
agcatttccagtgagcacctggagcctatcacccccaccaagaacaacaagggcaccttctctttcatcatcgaaacctggagagaggagttaggagacc

SEQ ID NO: 853748 - DNA, 98 bp, Homo sapiens
gtgactggtgaatgtaatgtactattgaaatgcaagggatttagtgcaagaagaagaacagttgatggaagaaaagaaaaagaaaaaagacgacaaga

SEQ ID NO: 853749 - DNA, 100 bp, Homo sapiens
cgactgcgtctccatcaaccgggccgtgccccagatgcccaccgggatggagaaggaggaggaatcgatctgcaggagcatgtacagctgcagcattcct

SEQ ID NO: 853750 - DNA, 98 bp, Homo sapiens
gaattcgaagatttttgggaatactataagagcgatccctttgcaggtttgagaaatttctgtggttcattagctcagagaactatctaattataggt

SEQ ID NO: 853751 - DNA, 100 bp, Homo sapiens
cttgtactgggatgtgatgatggagaactacagcaacttactctcactggctccgacagttagttaatatgtgcatcaacccagatccagagaagcgacc

SEQ ID NO: 853752 - DNA, 98 bp, Homo sapiens
ggcaataagactctttaaagaaggcaaggagagaatgtatgaagaacagtcacaggacagattttaggtgatgggcaagtcagaaagtcagatggata

SEQ ID NO: 853753 - DNA, 99 bp, Homo sapiens
gcagcaaggagtatttaagaagagccatgccatccaacaggccctcattgctgcagccagcatgggttatactgaggaaaaatctctcatcgaagtgta

SEQ ID NO: 853754 - DNA, 99 bp, Homo sapiens
gggaaagggggtgcgcagcctcgagtttgagagctacccggagctccaagacagggatccaaaaggtaattctggcacttggagactatatgggagcca

SEQ ID NO: 853755 - DNA, 98 bp, Homo sapiens
aaccttcgatctcctgacgagtctgcggatcaatggagagctaatcactgcctacccacaagtggtggtagtcagagtaccaaccccttgggtgcaaa

SEQ ID NO: 853756 - DNA, 98 bp, Homo sapiens
tcgccgaggccccctctaggcagcagcctcagcccctggtggagatccagtctcacttacttccagcagcagatgtgcacccccgccaatacccctgc

SEQ ID NO: 853757 - DNA, 100 bp, Homo sapiens
ccttttggatcaattaccagtgctaaggaagctcttcgtgtggtgaagatcttacagaaccttgatccgccatttagcattgatgggaagatggtagctg

SEQ ID NO: 853758 - DNA, 100 bp, Homo sapiens
tgttaccagggaggagcagtgaaagagaagggaatgctaagaactgctgggaggatgacagttccagcaacagatagaaatgctttaagttcactctggg

SEQ ID NO: 853759 - DNA, 98 bp, Homo sapiens
tcacctgtctggagcaaggaaaagagccctggaatataaagagacatgagatggtagccaaacccccagtttggtaactctcattcgacatccatctg

SEQ ID NO: 853760 - DNA, 100 bp, Homo sapiens
agcaactggcagaaggattgctttctcattatttgccagatctgcagagatcaaaacaagccctccaggaactcacgttctcagaggcactgtgactgac

SEQ ID NO: 853761 - DNA, 99 bp, Homo sapiens
acgccgagtcctactccagcggcggcggcggccagcagatggaaatcctgtatgaatgtggaagccattagcagagtaattgctgtctgttaccatgac

SEQ ID NO: 853762 - DNA, 128 bp, Homo sapiens
tggatgattttgagcgtcgcagagaacttagaaggcaaaagagggaggagatgcgactcgaagcagaaaggccctgttaaacctggcagagcgactgggagaggcaaagcctcgtggactgactaaag

SEQ ID NO: 853763 - DNA, 100 bp, Homo sapiens
gatgtggtgtggaccgaagcttacattgacagcactgccattgcaatcatggaagtagctcacggcaaagatcatccatatatttctgagatcaaacagg

SEQ ID NO: 853764 - DNA, 100 bp, Homo sapiens
agggatcaagatcagctccaggcctgggaaagtgaagatggcaggattttcataatatatgtagtatgagttccacatcttggcctcttacccagcttca

SEQ ID NO: 853765 - DNA, 98 bp, Homo sapiens
atgagcctcttgccaaagtgtcccttttaaaagtgaaactggaacgccaagctgaagaagaacgaatacggaagcacaaagcagctgctgagaaagct

SEQ ID NO: 853766 - DNA, 101 bp, Homo sapiens
cacgcagcagccgctgccgccgccgcgggagccgctgcccgaactcccggcccgaactccaggtttttcgttggaatatacgttgcacatttatggcgatt

SEQ ID NO: 853767 - DNA, 100 bp, Homo sapiens
aggacatcttcatttacagagcaacttgatgaaggtacacccaatagagaggaagccattaatttgctagaaccaatgacaaacgaccccgtgaactacg

SEQ ID NO: 853768 - DNA, 100 bp, Homo sapiens
aaaggcatagactacgataagctcattgtgtgcccaagcacgtgtgggaagcgggcgtgcaccgagaacaatgagtgctgccaccccgagtgcctgggca

SEQ ID NO: 853769 - DNA, 100 bp, Homo sapiens
cagcaacattttgacttggcttcaactactattacaaatattccaatgaagttgcctgtgtccctggagtgttacacagtgcctcctgaagacaacctgg

SEQ ID NO: 853770 - DNA, 100 bp, Homo sapiens
ggggagcccagcaaaggagccagccctgagctagccaagagcccacgcctgagaaacacttgtaagccactagaaagatcattactaatggcgggagccg

SEQ ID NO: 853771 - DNA, 99 bp, Homo sapiens
agcttcgcggagacggcggaagcggagagcaacagcgcgccgagcaggttgttgccctggatgcccaaaatattgtagctgtttcatgtggagaagctc

SEQ ID NO: 853772 - DNA, 99 bp, Homo sapiens
tctatgatatccctccttctcataccactcaaggggacttggatgttgtgggtgatggtatgcagtgtcctccttcacctttgctttttgatccttcac

SEQ ID NO: 853773 - DNA, 100 bp, Homo sapiens
atgtaacactccactttccaacttcgagtcacaccagaattataaggtgatagaggcgcctggtgcctcaaaatgtattggccccgggtgctgtcacgtg

SEQ ID NO: 853774 - DNA, 98 bp, Homo sapiens
cctgcgcggccccgctgagcctcggtgcggcggcgagcgcggtcgagatcgccatgcctacccagccagcccctgggcaacaaagtggaaatggagat

SEQ ID NO: 853775 - DNA, 100 bp, Homo sapiens
tacacagacgagcatggggaagggagaaaactggttgtcctggatgtttgaaaagttggtcgttgtcatggtgtgttacttcatcctatctatcattaac

SEQ ID NO: 853776 - DNA, 99 bp, Homo sapiens
gacggctcacctgtgcgggatggaacaaaaggttgttggaagaggagcctttggagttgtttgcaaagctaagtggagagcaaaagatgttgctattaa

SEQ ID NO: 853777 - DNA, 98 bp, Homo sapiens
tcttgaccctggctacgcttacttggggtggccccagcagatggcttctctgatcttgccatgcaagtaatgacgtctccatctaagaactacattct

SEQ ID NO: 853778 - DNA, 100 bp, Homo sapiens
tcccgcgctcccagcacctgggaagagtctgggcttcgctacgataaagcttatcccggggacaggaggctgagaaatacatgctacaggatttaactat

SEQ ID NO: 853779 - DNA, 100 bp, Homo sapiens
gaggagacgcactgtgaaagcagcatggaaaatcactcctgtaggaggcctgctgatggcatttcagaagtactctggtgagactgttcaggaaagaaaa

SEQ ID NO: 853780 - DNA, 100 bp, Homo sapiens
atgtggcgaatatcttcccttacaagggttatatatggaattatggtaccctccctcagaatgcatctactcatgcctcgaaatctcctgacagtgttaa

SEQ ID NO: 853781 - DNA, 100 bp, Homo sapiens
ggaacattccagaaactttggtgtctgccaatgattttggacaacaaactgagccacccattgttagagcagctccttccagctctcagatacagtctcc

SEQ ID NO: 853782 - DNA, 100 bp, Homo sapiens
ctggagaacccgaagcacctcccggcgccgggacgcttcttctagaagagcaagttagtaccttgtaccaaaacatcaaccttgtggagccaagattaat

SEQ ID NO: 853783 - DNA, 100 bp, Homo sapiens
cccatcagacgccagcccacctggagccgatcctctctggacttctactccaagctgggactacaataccgggacagtagctctgaggacgaatcttccc

SEQ ID NO: 853784 - DNA, 100 bp, Homo sapiens
aggagccccacggagcgctgcggagcgaacctcacctttccagggcgcaaggtaccaaccaagaagctgaagaaatatgagaaagaatatcagacaatgc

SEQ ID NO: 853785 - DNA, 99 bp, Homo sapiens
tttaattggctgtgggttttccactggatatggcgctgctgttaaaactggcaagtcaccattactttaagtactgcaaaatctcagcattggctctgc

SEQ ID NO: 853786 - DNA, 99 bp, Homo sapiens
tgccactctccactgccaccagaacccaagagcagtggattcccagtgtccccacgagctgtgtggtccatgatgagaactaaagatgactcagagcca

SEQ ID NO: 853787 - DNA, 100 bp, Homo sapiens
agtctcagatcttttctacagcttctgataatcaaccaactgttacaatcaaggtctatgaaggaagagagaagggcacagttacctaagtatcaacgta

SEQ ID NO: 853788 - DNA, 100 bp, Homo sapiens
tctccgcggtgtcgaggctctccctgcacagcatcgcgcagaacaaagggatcaggaccttcgcctctgcatttgtccagtaactctggctgtgccggat

SEQ ID NO: 853789 - DNA, 100 bp, Homo sapiens
gcatttggccgcctccctaccgcctaaattatacagatctgtgattgaagatgtcattaatgatgtgagagacatctttctggatgatggagtggatgaa

SEQ ID NO: 853790 - DNA, 100 bp, Homo sapiens
ctcataatggagccatgggtggtctgggctcagggtatggaaccggccttctttcagccaacagacattcactcatgggagttaaatacctgtgcatccc

SEQ ID NO: 853791 - DNA, 106 bp, Homo sapiens
cagaacccaagagcagtggattcccagtgtccccacgagctgtgtggtccatgatgaggaaactgttaaggcagcaataatagaagagcagaaacgaagtgaaaag

SEQ ID NO: 853792 - DNA, 99 bp, Homo sapiens
ggactgtggcggcctcccgcagatctcccagacttctttagctggagaaaaaccgactcttggtgcagtgctccagcagaatccctcagtgttggagcc

SEQ ID NO: 853793 - DNA, 100 bp, Homo sapiens
gttttactgaagttgctagaagtttacagaaaaggaagtgcaggaacatttcacaaatctacaatcttgttaaaagatcactgaagttggatggtctgtt

SEQ ID NO: 853794 - DNA, 100 bp, Homo sapiens
ctccatgtgccggatagcgggagcgctgcggaccctgctgccgctgctggcggccctgcttcaggcggggaacacagctctgcacctggcctgccagaac

SEQ ID NO: 853795 - DNA, 100 bp, Homo sapiens
aggtcatctttggtcatttagctgcttcccaactacaatactatgtacccagaggattttggaaacagttcaggaagtaaaaatgttgagtagttcaaaa

SEQ ID NO: 853796 - DNA, 100 bp, Homo sapiens
ggcggaaagactttggatgaaaatgtctgtttctctgtcgggagggagacggctgttgtaaaatgagcaaagactcaggtggactgaaggccgctatgat

SEQ ID NO: 853797 - DNA, 100 bp, Homo sapiens
cagcaaatcaatctctgaggttggggcacacgtgtttcacgttgacaggtttgcttgggacgctagtaaccatgggcttgctgacttagccaaagaagag

SEQ ID NO: 853798 - DNA, 100 bp, Homo sapiens
agtttttctcccaagccattcacagctattacagtgaccacggatcaagatgatatgtcttctccgactactatgaagaagcctgaaaagccattgttca

SEQ ID NO: 853799 - DNA, 99 bp, Homo sapiens
gtgtgtttgacaaggaggggaacggcaaagtcatgggagcagagctcagacatgttctcaccacccttgaggctgacccgcggctgattgagtccctct

SEQ ID NO: 853800 - DNA, 100 bp, Homo sapiens
aatgtgaagagtccttcaaaaatgccagaaatcaacgccaaggggaaaagattaccttgaggttgtgttcaacagaggaggaaacagcagagcttcttag

SEQ ID NO: 853801 - DNA, 98 bp, Homo sapiens
gaatctgaatccagaagagtcactaagggaagtcgagataacatgagtattgtactagtttgcttttcaaatgctcccaaggtctcagatgaagcggt

SEQ ID NO: 853802 - DNA, 100 bp, Homo sapiens
cctcttgacccacggctcaccaaaaaccatgtacatcttcatgtgatcagccaggattttgattctccttgccttaaaaacaaaaaacattggaattctt

SEQ ID NO: 853803 - DNA, 98 bp, Homo sapiens
tcaactattacaatcgcttgtacaaaggagagtttaaacagccaaaacagttcattcatattcagcgtggagccgccaccaaaatgcagattttcgtg

SEQ ID NO: 853804 - DNA, 98 bp, Homo sapiens
tgggacttgcctggcgactttggccggacttttgctaactgcggcgggcgagacgttctcaggaaagatactattcaagtccagtacatcataatgca

SEQ ID NO: 853805 - DNA, 100 bp, Homo sapiens
acatgaagttactactgcctgatgatgagaagttccatgggggctgggccctcattgactgtgaccctaggcgagtgttgtgtataaaggaagttgaaat

SEQ ID NO: 853806 - DNA, 98 bp, Homo sapiens
cagattcagtggcctgcattgacactggcttcatgtcctattgaccgtaaaccttttcaggcagtgtttaaattcagtgcattggaaggttatgttaa

SEQ ID NO: 853807 - DNA, 98 bp, Homo sapiens
agaaggacaaggacagaatcaccagcactggctgaagggagttctgggaaatcgttcattcatttacagatgaacagaaaagactcttcttgcagttt

SEQ ID NO: 853808 - DNA, 98 bp, Homo sapiens
tgagatatgagagacacgaagcaaatgaagttttatactagtgacagagctgaatgaacctctctccaatgaagatcgaaatctcctctctgtggcct

SEQ ID NO: 853809 - DNA, 98 bp, Homo sapiens
tctgtggcctagatcctacatctacacttggcatctattttgaagttgtcaatcagtggatcaatcttcctgtcctacaactgacaaaggatccccta

SEQ ID NO: 853810 - DNA, 100 bp, Homo sapiens
cgctagccctgcagacagaggtgtgctgacgacctgctacaacagaacctgactttgaaaccaaaagttggctaaggagaagaatgtcatgtcctccacc

SEQ ID NO: 853811 - DNA, 132 bp, Homo sapiens
caagatggacgaataggaacaactctggtctgcagttcccagtgagaccaatgcagaagatgatgtcagaagtgggatccaaagtagagcttataatgacacctaggagtgctgagtgaccaagcaaggtac

SEQ ID NO: 853812 - DNA, 99 bp, Homo sapiens
accttttgagccaaagcaatcctactgcctcagcctcccaagcaggtgacagcagggacatgtctcgggagatgcaggatgtagacctcgctgaggtga

SEQ ID NO: 853813 - DNA, 100 bp, Homo sapiens
aatgccaggatggctcaggcatatgtgttgctgatatccccaataggtttgaaatgaaacttcacagaaataacatatttgaagagtcctatcggagaat

SEQ ID NO: 853814 - DNA, 101 bp, Homo sapiens
caactcccaccccatccagtggaatgcaccacagccatctcacatttccaagtacattctcaggtggagacctcgagaaattaggcaacagctagcagaaa

SEQ ID NO: 853815 - DNA, 100 bp, Homo sapiens
tgtccacgtcagcttcaccaccggctccacggacagcctggcctcagactctaggacctgcagcgatggagaacccagtgacttgattgtaaaaatttac

SEQ ID NO: 853816 - DNA, 100 bp, Homo sapiens
atggcagatttgaaaattcacccttgtagagtcattcctgcctttgagcggactcccttttaaggctatgtggttgatgttgcagaatgatgagccggag

SEQ ID NO: 853817 - DNA, 112 bp, Homo sapiens
gacacacaaagaatagagttgagcctgtgggacacttcggaagcaaagcccaggaggacatctatcatggatatccctcttctggcaccctaatggcacctactgaacttaa

SEQ ID NO: 853818 - DNA, 100 bp, Homo sapiens
ctcagtgaaggattgtcaaactggaaagatgcacattttgcctctggttggtggaaagccccatggctgggggttatggagtgatgggtgacgatggttc

SEQ ID NO: 853819 - DNA, 98 bp, Homo sapiens
tccttgacatactccaagaataagcattgtttacaataaccaagatatgaaatcaacctatgtcttcattgatggaagaatacacacagaaaatgtga

SEQ ID NO: 853820 - DNA, 100 bp, Homo sapiens
ctgcgggaagcggttcctggatagtttgcggctgagaatgcacttactggctcattcaggtcccagtagggatggcacaatcagcgaggacaccatccga

SEQ ID NO: 853821 - DNA, 100 bp, Homo sapiens
cagtggcctccaaggtgcagacagctgtgactatgaaggggcatcaaagctaagccagaagatttatcacattttcatcatcagctacaggattagaaag

SEQ ID NO: 853822 - DNA, 100 bp, Homo sapiens
ggcaaccgctgctggcagttttgccaggtgtttgttaccttggcgacagaaggctagagagaggcagcagaaattgcttgcggagtttgcttcacgacag

SEQ ID NO: 853823 - DNA, 98 bp, Homo sapiens
gcaggtcgcagggcggcctgcagctgggccgcggccgaggaggcagcgcgacctccgcacgctcttccaccaaagccacctaagccaatgacttcagc

SEQ ID NO: 853824 - DNA, 99 bp, Homo sapiens
gaagacatgcttacttccccttcaccttccttcatgatgctgaggagtacctgtcatttgcctttgagcattgtcaccgttctagtcagaagaacaaaa

SEQ ID NO: 853825 - DNA, 98 bp, Homo sapiens
aatatacaagaggggagttactggtacttgatttgcaaggtacgagtggctgctttacagaatctggtgaagataatgtccttatattatcagtacat

SEQ ID NO: 853826 - DNA, 100 bp, Homo sapiens
tttccccttgacaagtcccttctacttcgttgcagcaactgggatgctgagactctcacagaggaccaggagagcgacttgcagttgtggaggtacagtg

SEQ ID NO: 853827 - DNA, 98 bp, Homo sapiens
attgaatatcagaatcttgttgactacataaagctcaaagcattcagcaaaccagggttccaaggtgaatgtatagattttacagaagaaacttctga

SEQ ID NO: 853828 - DNA, 98 bp, Homo sapiens
gaactgatgtggctggcgcgagagggcatcgtggccccactgcctggagagtggaaaccatggttcctcaacttaaaagggatgaggagaccttggag

SEQ ID NO: 853829 - DNA, 99 bp, Homo sapiens
cacagctctctgactctggctctgctgatgaggttgatgaatttgaaatccaaggtgtccttgaatggccattttggacaaaactggttgtggtagcca

SEQ ID NO: 853830 - DNA, 98 bp, Homo sapiens
tctcagtagccatgctcatgatcggcgtgtttggatgtactttacaggccatccggctgtccttagagcaagccctgcctcctgagccaaaggaagaa

SEQ ID NO: 853831 - DNA, 100 bp, Homo sapiens
ctctctcaggagatctggacagctgtccctccactacagaaacctcacagaacacagcaaagggaggagctttatctttatatactgcccttaccacaca

SEQ ID NO: 853832 - DNA, 118 bp, Homo sapiens
cgggacctgctgctggacccggcctgggagaagcagcagcgcaaggctgaagccgacgtagcttctctgaacagacgcatccagctggttgaggaagagttggatcgtgcccaggagc

SEQ ID NO: 853833 - DNA, 100 bp, Homo sapiens
tctgttccgcacaggcctgctgaactgggtgctttatataggatatcaatgatgtcaaacggctgaaacctggctacttagaagctactgtggactggtt

SEQ ID NO: 853834 - DNA, 98 bp, Homo sapiens
gaagacacaacaggggagcagttcctcacttatcgctatgatgaccaggactatcctattaagtgtaatctcactgcttaatgagcccaacaccttct

SEQ ID NO: 853835 - DNA, 98 bp, Homo sapiens
ggatggactgggccgcctccaagctggagaagcgactggaggagtggttggggaggacattgcctggcagtgactggacacccaatgcccagtttatc

SEQ ID NO: 853836 - DNA, 109 bp, Homo sapiens
agagtgacataggagaagtgattcttgtgggtggcatgactaggatgcccaagtcttactactttgaccgcgatgatgtggctttgaagaactttgccaaatactttct

SEQ ID NO: 853837 - DNA, 98 bp, Homo sapiens
ccacccgctccgcgccgagggctggaggatgcgttccctggggtccgggacatctggaggacctgttgatgctagttcagagtatcagcaagagctgg

SEQ ID NO: 853838 - DNA, 100 bp, Homo sapiens
cccaggactgtgcaggggactctgtcacaattgatctggatactattgatgtaagcaacctcaacagacagtttttgtttcaaaagaaacatgttggaag

SEQ ID NO: 853839 - DNA, 100 bp, Homo sapiens
aaggatgaaaagcttatgcaacatgctcagcaggagcttcatcaacgatatatgtcagatctaaagccagcagccagcttcgggtgtagcctattctcat

SEQ ID NO: 853840 - DNA, 98 bp, Homo sapiens
ggcgctgtcgccggctgcagtggccgccgctggagaccgcgggacctggcgctgcagcgaggtttgacatctacaggaaggtgcccaaggaccttacg

SEQ ID NO: 853841 - DNA, 100 bp, Homo sapiens
gcaaccgcaaacggaaaggcagctccactgactaccagagaactaatgacagttgccagatggatgagggagtttatcgcaaaccatcctgactacaagc

SEQ ID NO: 853842 - DNA, 98 bp, Homo sapiens
tatttctactaaggaatgggctaaatcaactggatatgatccagttaaactttttaccaaggaagaggagcaggacttggatggtgagaaggggccat

SEQ ID NO: 853843 - DNA, 100 bp, Homo sapiens
caggtgtatgatcttttggaggaggaggatgaatttgatagagaggtcagtttaggggctggtgcaaaggatgagttgcacattgttgaagcagaggcaa

SEQ ID NO: 853844 - DNA, 100 bp, Homo sapiens
gtgaggtgccgccatttcatctgtcctcattctctgcgcctttcgcagagcttccagcagcgcatgatgccttcttctgtagagtgggcgctttgcagaa

SEQ ID NO: 853845 - DNA, 98 bp, Homo sapiens
gaaggccagaactggctggaaaagaaggacgtggtgggaagagcaagagggacgaatgccttagtttccactttccagcctggatcccctcacactga

SEQ ID NO: 853846 - DNA, 100 bp, Homo sapiens
agcacccggtgctgcggctgttgccatgtccgcaccgggacgatcatcctggggacctggtacatggtaacctttatcaaaaggatggagttgggaaaag

SEQ ID NO: 853847 - DNA, 128 bp, Homo sapiens
ggcagtgaaggttttcctggagtgtaccctccaaatagcaaatgtacttggaaaatcacactcaaagttatgaagtttcaggatgaattggaatctgggaaaagacctaaaaaaccaggccagagttt

SEQ ID NO: 853848 - DNA, 100 bp, Homo sapiens
acatgttagaaatggtgcctggttcttgtgtctcttggtggccaatgttcctgatagttttaatgaagggtcagagtactgatcggctactatcaacaga

SEQ ID NO: 853849 - DNA, 100 bp, Homo sapiens
agccacatccggtgtaaaaaaagctatatttgatcgactgtgtaaacaactagagaagattggacagcaggtcgacagaggagatgttaaagtaacccat

SEQ ID NO: 853850 - DNA, 100 bp, Homo sapiens
agggaaggaaaaacctgtatgtggaaccacctggagtgatgatgaatacagtgatgatgatgacatgagttggaaagtgagacgtgcagctgcgaagtgc

SEQ ID NO: 853851 - DNA, 100 bp, Homo sapiens
acagagctattccagcaccagcagagccccagcatgagaccagatgtaagctctcctccatccagctcctcaacagcaacaacaggaccacctcccaaac

SEQ ID NO: 853852 - DNA, 99 bp, Homo sapiens
accaggatctcgggctcggaacgagactgcacggtcactcagctctatgtgccagcatccagacatgtgtggaggttccggcggatggggaggataggc

SEQ ID NO: 853853 - DNA, 100 bp, Homo sapiens
cttccccatcttcacagaatacacctctggctcaagtgtttgtccctttggagtctgttaagcccatcaccaggagactaaagtccatcaaaaacatcca

SEQ ID NO: 853854 - DNA, 100 bp, Homo sapiens
attccagggatgaatgggcaaaaggaaagtatgcctcagactcctcccttttcagcaatgtttgacagcagtggttacaatcgaaacctctatcagtctg

SEQ ID NO: 853855 - DNA, 99 bp, Homo sapiens
tcatgaccaagatgaagatgaggaggaagaggaaggccagagctccaatactgttggcactagtggcaggagaagctgctggtatcatggaaaacataa

SEQ ID NO: 853856 - DNA, 100 bp, Homo sapiens
atgtgattaatgtattccaccacctccgccagttaagaggaaaaagtctgcccagcaatccctgtgccacgaccaacgcgtgcagcaagcccatcggacc

SEQ ID NO: 853857 - DNA, 100 bp, Homo sapiens
tttgatttattaaatttaaatagattagtaactggcatagacaactatgggcaggtacaaatcgaatgaagattatgtatatgtcagaggacgtggccgg

SEQ ID NO: 853858 - DNA, 100 bp, Homo sapiens
attaaatctgcctgcagggagacgtaaagctgccaacgttaccctgctcacatcactagtagaggcttagcagtgtctgcaaaaacgaatcttttcctac

SEQ ID NO: 853859 - DNA, 100 bp, Homo sapiens
tacactttcttgtacaaagtggaatttcctactgtatcatgatcatcataggagtggagaacatgcacaatttgtgaatagcacaatggaagaagctgga

SEQ ID NO: 853860 - DNA, 98 bp, Homo sapiens
cggagaggggaaaaccacgctcctcggaccaagcctcgggagctaaggtaagcggaagggtacagccaatgcccgaatgccagagaaggtcacatgga

SEQ ID NO: 853861 - DNA, 98 bp, Homo sapiens
aaggtggcctttccactggagttgcttcacttagctctacaatcaacccatgtgtgtttcacttcaagcccactacggtggtgacaagctgccagccg

SEQ ID NO: 853862 - DNA, 98 bp, Homo sapiens
ctgcaacatggctagagactgccgggactggtcagatgaacccatcaaagagtgcgtttcctgttttccagcacccaacataacttgtaaggattcca

SEQ ID NO: 853863 - DNA, 100 bp, Homo sapiens
attattttcagaactccacagaaaacttcattcacaggagtacaagcgcaagctagccagagtttccctggtgcgcaaagaactcaggtcccggatccag

SEQ ID NO: 853864 - DNA, 99 bp, Homo sapiens
tgcccttgtggcgaatggggctcacgtcgaagaaactccagaaaatcttgccaaacttctgaccaggatgtatttaaaatcagaagtcataggtgatgg

SEQ ID NO: 853865 - DNA, 100 bp, Homo sapiens
ctcttccgctcctgttttatactgcttccatatttacacctcttctggaaaacaaacttaaagcattcagtattggaaaaatgagtacagctaagcgaac

SEQ ID NO: 853866 - DNA, 100 bp, Homo sapiens
cactaccatcttccaagatccatctgccttctgcataggccaaacaggtgatggcatcagctgagaagggaaggaagcccatgtgaggacactgaagaag

SEQ ID NO: 853867 - DNA, 99 bp, Homo sapiens
gcatgccctgaaaaagtatcgtcgagaagcctatcatcgggaagtgcggctccttcgaagacaaacaaaaacatctttggaagtttctttgctagaaaa

SEQ ID NO: 853868 - DNA, 99 bp, Homo sapiens
tggcgtccaacatggaccgggagatgatcctggcggattttcaggacatggatttgattgacatactttggaggcaagatatagatcttggagtaagtc

SEQ ID NO: 853869 - DNA, 98 bp, Homo sapiens
gctgatagcaccatcttcaaatttgtggaagcttatgtcgagctgtgtttagagtgcatcgaatgggccaagtcagagaaaagaactttcttacgcca

SEQ ID NO: 853870 - DNA, 100 bp, Homo sapiens
actactccttcagaatcgcctcgtgctcaggctacatctcgcctctctacagcttcctgcccaacaccaaaaatattatcgtggagctgtaggtgcctta

SEQ ID NO: 853871 - DNA, 99 bp, Homo sapiens
aagatttgaaacccaatggagttctcagcaggagtgccaaagaaagaagtaaactgaagttgcaaagcaacagtaataattgagaggatccagaatcca

SEQ ID NO: 853872 - DNA, 98 bp, Homo sapiens
tctttggttataaattatgatctacctaccaatcgtgaaaactatattcacagccgtctttaaatcctgagtatgagagagaaccaaatcacaataag

SEQ ID NO: 853873 - DNA, 98 bp, Homo sapiens
agccccgcgaccactggcacattcttgctgacagatatttcacattttcaggaacaaaatgatttaaaagcattgctagaaaatctccttcaaaatat

SEQ ID NO: 853874 - DNA, 100 bp, Homo sapiens
atcagactgaccgtgtcttacatcagttcagagagaaaattggcaacttctccatcgtgcggcggcttggcgtgcaggagtgcattctcctggttacaca

SEQ ID NO: 853875 - DNA, 98 bp, Homo sapiens
gaaattcatcacctctctggagtcttcaaactgaccaagcattgaaaaggtggatattccatctattataaccaagaaactattaaaagcagcaatga

SEQ ID NO: 853876 - DNA, 100 bp, Homo sapiens
cattgttaagcacaagttcacgaaagcctacaaaagtgtggagaggttccttcaggaggatcagtgcctgagattgtgagggagacccaggacctaattg

SEQ ID NO: 853877 - DNA, 100 bp, Homo sapiens
ctcaccacggctaatttgatggagaaggttcgaggcctacagaacctagcctatcagctggggctggatgagtattatggtgacaagctgaacatggagc

SEQ ID NO: 853878 - DNA, 98 bp, Homo sapiens
ttggcaactttgcccaactcggccatgagtccttctactggcagctgccggagacataccagggagacaagtacgaattggagcaatgttggcttata

SEQ ID NO: 853879 - DNA, 100 bp, Homo sapiens
atctaaagtcacccggcggccaaaggccagtgactaccaacgtttggaccagaaggataatctacaggggtacaaaacccaaaacaaatttctaaataag

SEQ ID NO: 853880 - DNA, 100 bp, Homo sapiens
cagccgccatggctctgctccgagagatgctaagatctcatccagtgagcatatgagaatcggggggagtgaagagatggcttggctgcagatatgtgag

SEQ ID NO: 853881 - DNA, 100 bp, Homo sapiens
gcccggcaggccactcatgatcatgagacagttgatattcataaagagaaagttgcaagaagagaaattggtattttgactaccaataaaaacacttcaa

SEQ ID NO: 853882 - DNA, 100 bp, Homo sapiens
attgaatgtggggctcccagaccttcaaaccaaagggccaatacctggatatggttctgtgaaggtggtgtttttaaggctcatcttactttcccaaaag

SEQ ID NO: 853883 - DNA, 100 bp, Homo sapiens
cccagaacttttcctctgttataagagagggagagataaaccaccgcttacagatattgggtatgctatacctccggagcatggaaaacgacttgaaaga

SEQ ID NO: 853884 - DNA, 98 bp, Homo sapiens
gagaggccattcgacgctacagccacaggattggcccactttccccattcacagcattacagcagaagttctggtggtgacctctttcgatgaactgc

SEQ ID NO: 853885 - DNA, 100 bp, Homo sapiens
tgagggagcagtgaagtttgcattttcctgatgaaaatgttggaagaggctacggctaaacctgaagatcgaaatgatccaatgcttctgtataacaaga

SEQ ID NO: 853886 - DNA, 98 bp, Homo sapiens
ttccctcaagtgtccagaatttccaattacagacgacaaagtagcactgcggttcagcgaggaagaatgcctccaacccagcccaatccaggccagta

SEQ ID NO: 853887 - DNA, 100 bp, Homo sapiens
agaaggtgatgtggcagaattggaactaaaacttgataaggtggttccttaaaaacagttattgctcaagatgaaaacctcccagaagatgttgtgagag

SEQ ID NO: 853888 - DNA, 99 bp, Homo sapiens
tttgcagactttggttggtggaggctgtggcaatggaacaggcttgagaaacaggtttgatgaacttgtgaaaaaattcaaagtcgaatatcatgctgg

SEQ ID NO: 853889 - DNA, 99 bp, Homo sapiens
gccaaaatcgcctgcaatctggcctggctggtggccaaagcctttgggacaggtgaaaaattagacgatttcaagaattggagctgaatctgatgttaa

SEQ ID NO: 853890 - DNA, 98 bp, Homo sapiens
tctggagccagtcttgaggtcctacatctccgaaagcaagctcttctagaagttggaaactctgatgaggaagaaagtgcttcagaatctgaactttg

SEQ ID NO: 853891 - DNA, 100 bp, Homo sapiens
caggaagcagctgaaagagctattgaaaaaatgaatggaatgctcctaaatgatcgcaaagtgaaaatttctaccttgaaccgtatctgaaagaggttat

SEQ ID NO: 853892 - DNA, 100 bp, Homo sapiens
ggttccagttatattgtgtctaattctgctaacctgaaagtaatgcccaagcttccacagcgcggcacctgtacctccggggtggcgctggggttggctc

SEQ ID NO: 853893 - DNA, 100 bp, Homo sapiens
agaagaacaagaagttgagaccgagaatgtggaaacagaccattcctcaagaattttgtatccaaggcccaaaagtttgttacccaagatgatgaatgct

SEQ ID NO: 853894 - DNA, 100 bp, Homo sapiens
acctgagggctgctattgtatatcacactaaagcacttttctgtagaaggtcagttggaattcagggcattgctatttattcctcgtcgggctccctttg

SEQ ID NO: 853895 - DNA, 133 bp, Homo sapiens
gactggaccacagcactgactttttttctgaggcttttgaacataatgggcgtccctattctcttttggtacaaacacaagtgcgccttgcaaaaaaaaactttgacaaattgaagatggatgtttgtcaaaa

SEQ ID NO: 853896 - DNA, 98 bp, Homo sapiens
tgggacttcccgtccgcggcgtggaggtactgtaagattgatgttaaaggcatggtgttcaccccacttcatcagcgtacataagttatctcttcttt

SEQ ID NO: 853897 - DNA, 98 bp, Homo sapiens
cggcccccagccagagccagcatgcagaacattcctccaactcctctgccaaccaatgatgttgatgtgtatttcgagacctctgcagatgataatga

SEQ ID NO: 853898 - DNA, 100 bp, Homo sapiens
ccccactacattcgctgcatcaagccaaacgaaaccaagaagcccagagactgggaggaaagcaggtatctctgcattagccagattggacatatgtaaa

SEQ ID NO: 853899 - DNA, 99 bp, Homo sapiens
aggcatatctagggagagtttctgtgtgatttacctcaactggatagagtactgctcttcccgaagagcaaagatttgagagggaagatctgatctcct

SEQ ID NO: 853900 - DNA, 100 bp, Homo sapiens
attgcacccaaaattgcaagacctttcatagaggttatcaccaatctagtgaaaatgttgaagtccagagacacgaggagaaatttttgtcctccaaacc

SEQ ID NO: 853901 - DNA, 100 bp, Homo sapiens
cggcgagaagaaggggcgcacgtgtgaggaatgcaacttcaaggtcaagatggtggacgagcttaagagagcagaaaaggttgttgaaagtccagatttt

SEQ ID NO: 853902 - DNA, 98 bp, Homo sapiens
gacgatccgttggtgcatgaaagtcttctaaccattccaaaatctctttcaggtacccattcctggcccagtgggtaacaagagaatggttcattttt

SEQ ID NO: 853903 - DNA, 99 bp, Homo sapiens
cccactcgtcgctctgggtgccattggagatgaccaggatagtgaaaagtcaaaaccagcaggctcagatggtgagcggcggggggtaaagagacagcg

SEQ ID NO: 853904 - DNA, 100 bp, Homo sapiens
ctcagccactgcgggcgaggagggcacaaggccaggttcccaagagctcaggagctgaccccgacccccacggaagctgctcccatgcctgaaaccagtg

SEQ ID NO: 853905 - DNA, 100 bp, Homo sapiens
gactttaactacaactggaactgtttgtggcattgatgaagatcatgacattgtagtacagtatccaagtggcaatagcatgcttgagagttcaaaccgg

SEQ ID NO: 853906 - DNA, 100 bp, Homo sapiens
ccgaatgggctacatggatccaacaatgcagatcttcgtgaagactctgactggtaagaccatcaccctcgaggttgagcccagtgacaccatcgagaat

SEQ ID NO: 853907 - DNA, 100 bp, Homo sapiens
aggtgttattatggactttcaaacatctgaagatgacaatttattagatggtgacactgcagttggtgaagccatcagtgtctacagcttcagctattgc

SEQ ID NO: 853908 - DNA, 100 bp, Homo sapiens
gtcctactacgcgtacgtggtggagctctgcgtgtggcctgaaggggctctttttgaacattcagtggagacaccccttgtcagagccgacccgtttcaa

SEQ ID NO: 853909 - DNA, 98 bp, Homo sapiens
tgtggtggaatatgccaaggaaaaactggagagcttcatcaaaaatagtgatagctttgataaagttacatccatatgggagaatagtctccagatca

SEQ ID NO: 853910 - DNA, 100 bp, Homo sapiens
tttgctgcgccaacgcagtgaccgaaggctccgctcacgcccggcagccagactgccttccgggtcactgccatggaggagccgcagtcagatcctagcg

SEQ ID NO: 853911 - DNA, 98 bp, Homo sapiens
aaaggagctcggggactcccccaaagacaagtccagaagtggagaccactcccccggcccttgcatctgggcttccttgtgccctgccttggacagtt

SEQ ID NO: 853912 - DNA, 100 bp, Homo sapiens
tccggttcttctgcctgcggagcagctaccgctcagatgatcccagccctagactcagtgcacaagctcaggtggctgaggatattctggacaaatacag

SEQ ID NO: 853913 - DNA, 98 bp, Homo sapiens
aactttgggtcctgaatcttctgggagctgaggaaccagatatcttgaaaagctgccagaaaggcctggagctgctgaagactgctattgggaaagct

SEQ ID NO: 853914 - DNA, 100 bp, Homo sapiens
tgcaggtggtctgtgaagccacacagtgtccagatacgaggctggaggaaagcaggaatgttcagaggcaaatgaagattctgcagaataagcaagctca

SEQ ID NO: 853915 - DNA, 99 bp, Homo sapiens
ttcctccaggtttgccatcttcagaactgcaagcacatgttgaccagataactgaaatggcagcagtaatgaggaaagccattgaaattgacgagcaac

SEQ ID NO: 853916 - DNA, 100 bp, Homo sapiens
tcggatccgctgcccaaaccagggctatgaagcaggcaaatatcaatattccaatgggagcctttcggccaggagcaggtcaaccccccagaagaaaaga

SEQ ID NO: 853917 - DNA, 129 bp, Homo sapiens
gcgcagaggcggcggtggcgagaggtgcggcgaaggaggcagaggcacttatgcttgtcaggtgcaatgaagggcgtgttggtagacattgtgaatgcagcacagatgaagttaacagtgaagacatgg

SEQ ID NO: 853918 - DNA, 100 bp, Homo sapiens
caaagattacctattaccagaacacactgacagttgatgacaacaagaaactaggagaatgggtaggcctttgtaaaattgacagagaggggaaaccccg

SEQ ID NO: 853919 - DNA, 147 bp, Homo sapiens
ttcaatcgaatatctcatggcctacagggactttctgcagtgcctctgagaacttacgcagatcagccgaatcggggtactgtgcaaaaagtggttgttcttcctactaacaactctgtcagtggcgagctcattctggaggagctg

SEQ ID NO: 853920 - DNA, 100 bp, Homo sapiens
ttggagtttatatacacaggaactttaaatcttgacaggaaaggcagactacaagttactgagcacctccctgagaaaattgaaagtagtttacaggaag

SEQ ID NO: 853921 - DNA, 100 bp, Homo sapiens
tgacagatgaccacgacagagagttttcagtcgcagacctctcggttcagatattcacggttccttcacttcaaagcttcgaggcgcaccaggacgaggc

SEQ ID NO: 853922 - DNA, 100 bp, Homo sapiens
gctcatacggagcgtccttggccagaactacgacattacaatggaacatctctgcgccggatgtcatctaacagattccctggatcatctggatcaaata

SEQ ID NO: 853923 - DNA, 99 bp, Homo sapiens
gattactcagtctctaaaaagctaaggagcactcactgtgggcctcgtgcgacagtgtcaaacaatccatggacgagaccggacgtgcatccctccccg

SEQ ID NO: 853924 - DNA, 100 bp, Homo sapiens
caacactcatgtatggaccaaaagcaagttcatgggcatgtccgtgggggtctctatgataggggaagaattggaacatcgatcagttaaaaaggctggc

SEQ ID NO: 853925 - DNA, 100 bp, Homo sapiens
gactgaacctggaaaagagccggtctccagaaatgctttgggttcatctttcattgctgcaaggaacttccatgcctctaacactcatcttcaaaagact

SEQ ID NO: 853926 - DNA, 99 bp, Homo sapiens
actcgtaacctggatcccagaaggtcgcgaaggcagtaccgtttcctcagcggcggcaagggggccaggccaaccaccccacagcagccgtggtgacgg

SEQ ID NO: 853927 - DNA, 100 bp, Homo sapiens
gaagatcctggaggtggatctgaagaacgggctccatgacaattcaaaaggtgaagggattgctgtcacgtcttctcaaagttcctgtgtcagaccttct

SEQ ID NO: 853928 - DNA, 100 bp, Homo sapiens
tatgttctcccgaactttggatgacacttttcaagtggcttcgattaagaactgtacacccaatattgttgcacaagctccgggtggataaggcagctgc

SEQ ID NO: 853929 - DNA, 100 bp, Homo sapiens
caagctgctggatgaccttttccgaaagaccaaggcagctccctgcatctattggctcccactgactgacagccagcagcccataacggtacgtgaaggc

SEQ ID NO: 853930 - DNA, 100 bp, Homo sapiens
gggcacaaaaactaccattcgcctgatgaactctcaggaataagacgagttggaagaagacctgatcaacaacttcagggtgaagggaaaataattgata

SEQ ID NO: 853931 - DNA, 100 bp, Homo sapiens
atctgaaggaaaaggagtactttggaatagcattcacagatgaaacgtgttcagtgaatgcgactcctcagcagatgcctcagacagaaaaagcggtcga

SEQ ID NO: 853932 - DNA, 100 bp, Homo sapiens
aggatggcttgaggacttcttgatgggcatggacagcaccctggagccaagtgcaggagacacacactgtctttgctatgacttcatcatcactcctaag

SEQ ID NO: 853933 - DNA, 100 bp, Homo sapiens
tcatcaagatccggttgcagatgcagacacaaccgtttcgggacgtaaacagctgttgtgtgacgtgatgattgtggcagaagatgtcgagatagaagcc

SEQ ID NO: 853934 - DNA, 100 bp, Homo sapiens
tcattgcctgagcgcgtcgagccagacagactgctgagcgactatattgagaaggaggtaaaggtcatgtccatcctgttgcatggggatgctgcatttg

SEQ ID NO: 853935 - DNA, 99 bp, Homo sapiens
actgagggctgcagctctgaaacagggacccaggccagtttccatcttgctgctgcaaaaggacacgtggaatgcctcagggtcatgattacacatggt

SEQ ID NO: 853936 - DNA, 120 bp, Homo sapiens
aacacaggagctgtcctgaggctctggatgactttattcttcaaatggctttaccctcccagtagctccaggtctcggcgcggaagatggccggcggcgtggacggccccatcgggatcc

SEQ ID NO: 853937 - DNA, 100 bp, Homo sapiens
agcacaagcaccacagttaccacgaaaaaaggacaaacgagacttccctaacagttcactattacgcagagcttggccaatgctcagttttcccagcaac

SEQ ID NO: 853938 - DNA, 98 bp, Homo sapiens
acgcagtagaaaaggtggcgtggctggcgattcgtgttcgtgagggccttttctggtctcagcatcagaggagcccaggaggaggaccctcccgatcc

SEQ ID NO: 853939 - DNA, 100 bp, Homo sapiens
agcataaacctatcttctttcattatggagggaggtttggcagatggagaacctgatcgaacttcgattggatttgaggctcctcccctccagggacagg

SEQ ID NO: 853940 - DNA, 51 bp, Homo sapiens
ggtcctcctggctgtgctcatatacacctgatgcagacaatctctttgaac

SEQ ID NO: 853941 - DNA, 100 bp, Homo sapiens
actactttgctatcaaacaagaagtcgtcaccccagacaacatgtgcatggggaggaccagtcgtgttgttgacctcctgtactggagagacattaagaa

SEQ ID NO: 853942 - DNA, 100 bp, Homo sapiens
aaagttggcgttcccacaattcagcagttgttagaatggtcttttatcaacagtaacctgaaatttgcagagcatcgacaccccaggagtgattagtcgt

SEQ ID NO: 853943 - DNA, 98 bp, Homo sapiens
gcctggtcaaacctggaaatcagacaaactagatgccgactacatcaagagatacctgggcgatttgactccgctgcaggagagctgcctcattagac

SEQ ID NO: 853944 - DNA, 100 bp, Homo sapiens
cgcagactgtcaaaacctttgataaccttaagtactatactggcaattgctggagaagattttgcaattgttgcttctgatactcgattgagtgaagggt

SEQ ID NO: 853945 - DNA, 99 bp, Homo sapiens
gtggaggcatgcatgtctaccaaacatgtgggacattaggaaggtccccagtcccaagcggaagttggaagaaccagttctggagttcaggcctccccg

SEQ ID NO: 853946 - DNA, 98 bp, Homo sapiens
gcccgccgccagcatgttgggcgccccggacgagagctccgtgcgggtggctgtcaggcctcaggagtgcaagtagctgatgaagtatgtcgcatttt

SEQ ID NO: 853947 - DNA, 51 bp, Homo sapiens
cagatcactattcagaagaaccatggtctgaaaaagttcttttcttgtcgt

SEQ ID NO: 853948 - DNA, 98 bp, Homo sapiens
gaggaccggctgccgccgccgccgccgccaggctcttgcagccaatgccggaacaggatttgctgttgctgagcctcaaatcgcaatgttttgtggga

SEQ ID NO: 853949 - DNA, 98 bp, Homo sapiens
cagccatggtcggggcgctgtgcggctgctggttccgcctgggcggggcccgcccgctcatcccgttgggcccggctactgcagcactggggtgtcag

SEQ ID NO: 853950 - DNA, 98 bp, Homo sapiens
gaaaaaccgaccgagctcaggaagcctaatccaggcatcctctggtatcacgattccaaaacccccaaagccaccagataagccgctgatgccctaca

SEQ ID NO: 853951 - DNA, 100 bp, Homo sapiens
tcgccaagggccccaatgagtggcacacagtctactatcaccgacagaatccagcaactatcacaagaatactccttagccacttcaattgggataaaga

SEQ ID NO: 853952 - DNA, 100 bp, Homo sapiens
acgacgacgaggaagaggaggtttctgagagctcagagttctacagagtcaccactgaacaatatcagaaagctgctgaagaggtggaagcaaagttcaa

SEQ ID NO: 853953 - DNA, 98 bp, Homo sapiens
tgctctcccgggcagagctgcgtctgctgaggctcaagttaaaagtggagcagcacgtggagctgtaccaggcactgcaacatggtgctggagaacgt

SEQ ID NO: 853954 - DNA, 100 bp, Homo sapiens
gcttccagacggcgcgtttctatcgggacgtcctggggatgaagggcaattgaaggaacagactaaaaatcgtgtcctggaaggaaactacaggtactac

SEQ ID NO: 853955 - DNA, 98 bp, Homo sapiens
tgctttgatcctgcagcttgctcgaaatcctgataacttggaagaactactattgaatggttaatacaatctgttggaatgacactggagaatatatt

SEQ ID NO: 853956 - DNA, 100 bp, Homo sapiens
ggctgtggagggaatgacaataactttgttagcagggaggattgcaaacgtgcatgtgcaaaaggtcatcatcagatttgaaatatttaaagtggataca

SEQ ID NO: 853957 - DNA, 100 bp, Homo sapiens
atgcttgtgggcaataagagtgatctacgtcatctcagggcagttcctacagatgaagcaagagcttttgcagctataatggatttccagttcttaggaa

SEQ ID NO: 853958 - DNA, 50 bp, Homo sapiens
gaatggcagatggcttatgaaccacagggaaatgtttcaacgtgcgcaag

SEQ ID NO: 853959 - DNA, 50 bp, Homo sapiens
gaaaagcatgggtacaacatggaacaggcagcaacatcacagatgctttc

SEQ ID NO: 853960 - DNA, 98 bp, Homo sapiens
gtacagaatccaagagatgagagaggacccaacatggggcagaagcttgaaatcctcattaaagatactctcgttgcaggaccagctctgccccctaa

SEQ ID NO: 853961 - DNA, 100 bp, Homo sapiens
tcagacattaactggcttgttcaaaggagacaagtgtcacagcctggttggaaaacccaagatatttatcattcagtgtattcatcgagatttagcagcc

SEQ ID NO: 853962 - DNA, 100 bp, Homo sapiens
tttatggctttgagattttcgagggtggagagattcaaccagttagcgtgaaagttggagataaagttcttctcccagaatatggaggcaccaaagtagt

SEQ ID NO: 853963 - DNA, 100 bp, Homo sapiens
tgggagttagggtcttatcctgatctttcctcgtcccccgctcccccgtcctccgaggtggcagctgcgtaggcatgggcaagaaggacgaccccaagct

SEQ ID NO: 853964 - DNA, 99 bp, Homo sapiens
aaccacatatgtcacctttccaaggaatcttacatcctttctgcagaacttggagaaaagtgtgaagacataggcaagaagctattgtacttggaagat

SEQ ID NO: 853965 - DNA, 100 bp, Homo sapiens
tcaggagtcctcagctagtgacatggtcgttttcatggagtgataatgaaaggagcagcagccgcattaatatcccagagagagcaagtggaccagaagg

SEQ ID NO: 853966 - DNA, 98 bp, Homo sapiens
gcagacatacatcatttaaagggaatagccaggccagaagaaggaaggcctgtggtgagtgggacaggaaatgacatcaccaccccaccgaacaagga

SEQ ID NO: 853967 - DNA, 98 bp, Homo sapiens
gaggcattgtgatgaccaatgatggcaatgccattcttcgagagcccgatatcagaatgaattagctggcgtagataccgagctgctagccgagagat

SEQ ID NO: 853968 - DNA, 98 bp, Homo sapiens
agccagtcagcaagcagcatcacaagctcagcctggacagcaacagccatatccagaagacccagcagtttataaaccactctcccaggaagagctgc

SEQ ID NO: 853969 - DNA, 100 bp, Homo sapiens
tacgggagaccctgcaacgaaatacctccctgggcctcggagacgctgacaggacggaaacacaccctttccttaggcgtcctgcgtcccccgattcctg

SEQ ID NO: 853970 - DNA, 99 bp, Homo sapiens
gattttctgtcatggaaaaagcttgggtaggataagttctgaacgtcgaaaagaaaagtctcgagatgcagccagatctcggcgaagtaaagaatctga

SEQ ID NO: 853971 - DNA, 100 bp, Homo sapiens
gacctggccatctacctgacctcgccctctggaactaggtctcagcttttggccaacaggtcctaggcctacttacaagcctccagtctcaaattatcca

SEQ ID NO: 853972 - DNA, 100 bp, Homo sapiens
ggcttgagagctgggttctattttccctcctcaaactgactttgcagccacggagagggatccatctgtctctaagtctgtagaacgaatctttaaaatc

SEQ ID NO: 853973 - DNA, 100 bp, Homo sapiens
ccaaaaccacaaacttgcctacgtcagtaacagccaccaaggttgtggcatcagctgacacttcaggtgcttgattttgtgcaggatccgtgctttgccc

SEQ ID NO: 853974 - DNA, 98 bp, Homo sapiens
catcacccaccaacaacaccacaataatccacagccaagcattgatctggtagccttgctccagaagcctgttcctcacagtcaagcctcagaagcca

SEQ ID NO: 853975 - DNA, 100 bp, Homo sapiens
tgatcccatgactaaagtgcaggccgaactagatgagaccaaaatcattctgctcagagtcaagatctccactgaagttggcatcacaaatgttgatctt

SEQ ID NO: 853976 - DNA, 99 bp, Homo sapiens
ctcagcagcacatagcacctatcgggttcttcagacccagaagaagaaagtgttctctactccaaccgagcagcatgtcacttgaaggatggaaactgc

SEQ ID NO: 853977 - DNA, 98 bp, Homo sapiens
agcagtagcctctgcgaccaggtgcggcttcagtccttcctgtacctgggctggtatatggtgatgtccctcttgggacactacaacaacttcttctt

SEQ ID NO: 853978 - DNA, 117 bp, Homo sapiens
aacttcgtactttctatgagaagcgtatggccacagaagttgctgctgacgctctgggtgaagaatggaagggactttgcctacgtagctcgtgataagctgacccagatgctcaag

SEQ ID NO: 853979 - DNA, 100 bp, Homo sapiens
caaagagcaaacagattcagtggcctgcattggtggtactgtgaaggcaaggagcttgaaaattccccagatattcacatcgtccaggcaggaaatctgc

SEQ ID NO: 853980 - DNA, 100 bp, Homo sapiens
tgttatgttttcatcacttctctccagaagaaggccttacgaccggatatgggctataatacattagccaactttcgaatagaaaagaaaattggtcgcg

SEQ ID NO: 853981 - DNA, 100 bp, Homo sapiens
atgtaatacaagttccaaggaacttagtaggtgggatagtaacatctttttgagggaagaattggcttcctttcttgaaagtggtgaaggtacagcatat

SEQ ID NO: 853982 - DNA, 100 bp, Homo sapiens
ccggcgtgccccaccatgtcagacgcagccgtagacaccagctccgaaatcaccaccaagcacatacccccggcctcatgagtacctgtccccagcggat

SEQ ID NO: 853983 - DNA, 100 bp, Homo sapiens
cccgaggcccctatggcagatttgaaaattcacccttgtagagtcattcctgcctttgagcggactcccttttaagcttcctctgtcatctctgtcccag

SEQ ID NO: 853984 - DNA, 98 bp, Homo sapiens
ggcagctgcgggcgctgcgtgccgtgttccggagccagcagcaggaattgcattttgtgaaaaaagaacaagaattttctgcaaggatcatatctaag

SEQ ID NO: 853985 - DNA, 100 bp, Homo sapiens
tcaaacgtggagatcaactcctctctgttaatggagtgaccttttctgagcggctactgggaaatttctcattagcagttccgatctttgttgccctctc

SEQ ID NO: 853986 - DNA, 112 bp, Homo sapiens
gtccgtgttcggtgaccgcagcactggggaaacgatccgctcccaaaacgcaccagcaggcagctggctccggttttggggtatctgggctccaggcagaagcacagcctcc

SEQ ID NO: 853987 - DNA, 98 bp, Homo sapiens
ctatgctgtggccaaactaggaccagattatcttacactgaactgatcaagtactttgaaaatgacttcgaaatttctcttggtgtccttcatacttg

SEQ ID NO: 853988 - DNA, 98 bp, Homo sapiens
gctggctgttatgtacgcaggagatgtgtatatctcatgattgatatggagaaactagtcatgggccaaaggtcaagatacttctctgggaaatgttg

SEQ ID NO: 853989 - DNA, 100 bp, Homo sapiens
agattttgataagccttctgggagaaaacttctttttaatgcattaaagcacatgctcctgtcacatatagagaaacttcgaacctcaatgatagatgat

SEQ ID NO: 853990 - DNA, 100 bp, Homo sapiens
gccaggtccatcatttggaaatcaggaaggcttgtgtctcatatatgagggaaaatcaacaaacttttgagtctgctggagtgcagtggcgcgatctcgg

SEQ ID NO: 853991 - DNA, 100 bp, Homo sapiens
agaaggtggaggagaagaagaccaggcctggaagaaacgctggtttatcctgcggagtggccggatgagcggtgacccagatgttctggaatactacaag

SEQ ID NO: 853992 - DNA, 100 bp, Homo sapiens
caagtgcattgcctttggaaacgaggaaatggtgttcacactggccctgaatcaagggaacaccagttttcacatgctggcagaagcaatggccggggac

SEQ ID NO: 853993 - DNA, 100 bp, Homo sapiens
ccttccggagcttctcagaagacagagggttttcttttgaggaaggtgggagtcaatcattttgacaagtctcctgaaaggaacagctagcaggaactga

SEQ ID NO: 853994 - DNA, 100 bp, Homo sapiens
ggaactcaaacagcagatgcaggatttgtttggtgtcagcatggttgtgcctttattgagccttcatgtcaagtcccttggagcaagtccaacagttgct

SEQ ID NO: 853995 - DNA, 100 bp, Homo sapiens
cgcagggcctgcagcgggagctggacggcgagcgcgagcggcgcgagaaaaacttcagcgagagggaagcatcgagactctgagtaacagctcaggctcc

SEQ ID NO: 853996 - DNA, 99 bp, Homo sapiens
tgcagaaggtctctggagacatcttcagcagttgtcgccgtgatcctgaaggcgctgacctacgacgagaagcggggtgcctgcagcgtgggcaccaac

SEQ ID NO: 853997 - DNA, 121 bp, Homo sapiens
ggatgtttctgtcctaaatagctgacattgcatcttcaagactgtgtactccaaagattcaggtttactcacgtcatccagcagagaatggaaagtcaaatttcctgaattgctatgtgtc

SEQ ID NO: 853998 - DNA, 98 bp, Homo sapiens
cccatcattgggagaaatccccactcctccaagaaccaacccccaaattggctgggacaggaagaaggtagataatgactataatgcccttcgagaaa

SEQ ID NO: 853999 - DNA, 100 bp, Homo sapiens
gtaaattgaaaatattggggccatttagtaacttctttgcaagagtttgtttctaatggaagaggttcacatgataaagaacaaaccagccagtcctcac

SEQ ID NO: 854000 - DNA, 100 bp, Homo sapiens
ctagagatcttctttggcaagactaggaacggaggtggagctgaagaagggagccactctcaaaatcacgctggataacgcctacatggaaaagtgtgac

SEQ ID NO: 854001 - DNA, 99 bp, Homo sapiens
gagcttgtttgggagtgggggcagacggcgttttgcgcccaactggtttctcttcctcagaagaaatcagatgctgttcagagcacgaaggctagaatt

SEQ ID NO: 854002 - DNA, 98 bp, Homo sapiens
tcttctgggagctgaggaaccagatatcttgaaaagctgccagaaagcaaatcgcagtcttctccaggctgacaaggcgaagggcatggcttcgaagt

SEQ ID NO: 854003 - DNA, 100 bp, Homo sapiens
aaatagtgatctgaatcttttagagtggacccatcacagcatgaaaccacactggcaaagagcaatgacaatgcgaaaagtcttacaagaaatcctggag

SEQ ID NO: 854004 - DNA, 100 bp, Homo sapiens
ttatattccatctactgtctttttcttcaatgggcagcatatgaaagtggattatgggcttaaatctcttcaagctcaggaggatgcccgccacagaaac

SEQ ID NO: 854005 - DNA, 143 bp, Homo sapiens
caacttcaagaagacgcaggcactggagcaggtgacaaaagtgctggaggacttcgtggatggagaccacgtcatcctgagctaaaaaagtccctgtacgccatcttctcccagtttggccagatcctggatatcctggtatc

SEQ ID NO: 854006 - DNA, 98 bp, Homo sapiens
tactcctcatggacctgatctttatgaaacatctgccaaagaaggtctgctgctttggtgtcagaggaaaactgctccttatagaaatgtgaacattc

SEQ ID NO: 854007 - DNA, 101 bp, Homo sapiens
tgccctgaaactggttggtgaagaaggatttgtaggagtttcagcagcttttgctgtgaagctctttaaatcatggataaatgaaaaagatatcaatgcag

SEQ ID NO: 854008 - DNA, 99 bp, Homo sapiens
tgcaagatggagccaggaggagagcccacaggtgctaaagagagcagtaccctgatggagtcccttgcaggtggagccccctgagctgcccgctgatct

SEQ ID NO: 854009 - DNA, 100 bp, Homo sapiens
gtgccttaacagaaggtcttgagattctaagtgggaatcatttcagagtttgccagatccggcccggtgcctgggttccaggaggacacgctgcagttgg

SEQ ID NO: 854010 - DNA, 98 bp, Homo sapiens
atgaagaacactttcaagaaccaggttagtggttacttggatgattgtacctgtgatgttgaaaccattgatagatttaataactacaggcttttccc

SEQ ID NO: 854011 - DNA, 100 bp, Homo sapiens
ctcgagaaagtcctctcgggagaagcagcgcctgttcccggggcagatccaggttcaggagacccagcagtgggcaagaccgccctggcacagatcttcc

SEQ ID NO: 854012 - DNA, 99 bp, Homo sapiens
aggaagggaacgtggaaagcgcatacaggaccctaaacaggtgacagagttagtccttgataattgcctgtgtgtcaatggggaaattgaaggcctgaa

SEQ ID NO: 854013 - DNA, 100 bp, Homo sapiens
caccagagaccttctacattgggagtttgagcctttgctgaagccacacgtggctgtgaagaaggtcccgtatgtggatgaggaggggaatctggtaaag

SEQ ID NO: 854014 - DNA, 100 bp, Homo sapiens
aacagtaggaaagcaatgaaagaagctggtaagggaggcgtcgctgattccagagagctaaagccgatgcccagcgacttctccgtgtcccttaaagcgt

SEQ ID NO: 854015 - DNA, 100 bp, Homo sapiens
tctgggaagcagaacctggccggagccactagacagagccgggcctagcccagagacatggagagttgctacaacccaagcagcccgacggccatggagg

SEQ ID NO: 854016 - DNA, 98 bp, Homo sapiens
acaatttaaccaagaaaaattaccgagccagccagcaggaaatacagcatgctgcacatggtccgtctaatgctgttggagagattactgcagaccct

SEQ ID NO: 854017 - DNA, 99 bp, Homo sapiens
caacattcccctcctccagcaaattctactgaccctgcagcatctaccgctcactgtagaccatctcaagcagatggagtatgagcgccaagtggcttc

SEQ ID NO: 854018 - DNA, 98 bp, Homo sapiens
agtgatctgattaaaaagataactaatcacttagagagagtctcaaaggagctgcagttctgaaacacagacaacatcaagggggaaagaaagtgaag

SEQ ID NO: 854019 - DNA, 98 bp, Homo sapiens
ctctggaggtggagactgccgtgattcacaaagacaagaggtaattttcctgtaatcacaggatgactcagcaatacgagaattggagacccaaccag

SEQ ID NO: 854020 - DNA, 100 bp, Homo sapiens
gcgttccagccccagttccccggcagcgggacccggcgaagacgcgaccgcggcgcgagtcaccatgctctttagtcaagagacggtgatgaagtttgtg

SEQ ID NO: 854021 - DNA, 98 bp, Homo sapiens
gagaccccgcgcagtgctgccaacgccccggtggagaagctgaggaggccccgtgtgggccgcggcccggccctcaccatggagtccatgttcgagga

SEQ ID NO: 854022 - DNA, 100 bp, Homo sapiens
gcaaccttgctacaaaaattcctcctgacaaggtgatccgggcgggccccgcaggaattttatcccctcaccggcctcacactagtatcgcatgtccact

SEQ ID NO: 854023 - DNA, 100 bp, Homo sapiens
tgggatcggctacagcgacacagcctggatctcctccatcctgctggccatgctctacgggacaggtctagagagcctggtgctgacctacgtcaatgcc

SEQ ID NO: 854024 - DNA, 100 bp, Homo sapiens
gaagtaccaggaggcgttggccaaggttgtggaagaaggactctgggaaaatggcctttcctatgaatgtaggacgctgctcttcaaagcgatccacaat

SEQ ID NO: 854025 - DNA, 98 bp, Homo sapiens
agtgttaatggaagtgaaccaagcattcctcagggccatgctatgatagtggaagcttatccaaaataatagatccagaagaagtgacctgaagtttc

SEQ ID NO: 854026 - DNA, 100 bp, Homo sapiens
gttattatggactttcaaacatctgaagatgacaatttattagatggtgacactgcagttgtttaccgtggtttctgggcagtcctgatgctcctggggg

SEQ ID NO: 854027 - DNA, 100 bp, Homo sapiens
ttacctggcactcctggacaggatggattgccagggcttcctggcccgaaaggagagcctgtccattcaaaagcttggtgaattaaatattggaatggat

SEQ ID NO: 854028 - DNA, 100 bp, Homo sapiens
cgatggacggccgaaccccgcgcccgcaggacgccccagccagatatatcctgattgtttggcacaagccatatatgcaacgttccatgaagcatttcca

SEQ ID NO: 854029 - DNA, 100 bp, Homo sapiens
cctcggcctcactaaactgttggaccccgaagaatccaagcaaaaatccctggattgaagcgcaaagctgaatgaaaacgcccaaaataattagtaggag

SEQ ID NO: 854030 - DNA, 100 bp, Homo sapiens
tggagagaaaacttgcaaggaaaggaacatgtttgaatttcagatgtgttcctcaatgaatcacgacatgtctcaggaaggctatggaactagatctcaa

SEQ ID NO: 854031 - DNA, 100 bp, Homo sapiens
tgggattcggatgataaacaacagaggagaaaagcacggaacaattactgccaggccaatggagatcttcgtggatgatgagacgaagttgacgctgcat

SEQ ID NO: 854032 - DNA, 98 bp, Homo sapiens
cccagggaaagcgcaagactggagtccaaaggaacaccgtggacccgacctttcaggagaccttgaaggagaggagaggcagcagcatggcgagtgtc

SEQ ID NO: 854033 - DNA, 100 bp, Homo sapiens
acaggacaaagctcccgttgggctaaagaatgttggcaatacttgttggtttagtgctgttattcaggggcactatgaacgaagaggagcagtttgtaaa

SEQ ID NO: 854034 - DNA, 100 bp, Homo sapiens
ctgggcatgaaccacctgggagacatggtatccacaagtgaaaatccacaactctgaagagaaactaccaagactcctcctgccccaaacctcgccagag

SEQ ID NO: 854035 - DNA, 126 bp, Homo sapiens
agcagtaattgattcactggccttggactacttgcaggtcagcttgtctcacataacagctgaaaaaactgagcctcggaacagttaagtaaatccaccaaagtgacccactactgaatagcagag

SEQ ID NO: 854036 - DNA, 100 bp, Homo sapiens
ttgcctcaacccgccgctgcccgagatcccaaacggtgaatggctctgcccgcgctgtactcagcggaagatgtcggacagcgaggacagcaacttttcc

SEQ ID NO: 854037 - DNA, 100 bp, Homo sapiens
tgaaactggaggagcaatggtgtatgaactgtcaagtaatccacctctggctaccatccttattcctcctcatgctcggattcaagcagctgcttcaacc

SEQ ID NO: 854038 - DNA, 51 bp, Homo sapiens
agctctccaggcttgcaagcgattaccagtcaaataaagtgcccgtggtgc

SEQ ID NO: 854039 - DNA, 100 bp, Homo sapiens
aataacgtgcacctttctcatcctgtttatgtccgacgtgcagcttgagaaagatcagtctaaagaaaaggagaagaaagtgaaaaaaacaattccttcc

SEQ ID NO: 854040 - DNA, 99 bp, Homo sapiens
tgcaagtaatcagtctttgacaagtgatgagaagctgtcggagcttcccaagactgtgccataacacacatttgatgctgaaatccgggataggggaac

SEQ ID NO: 854041 - DNA, 98 bp, Homo sapiens
acagttcattttttgcttggtttggaaaaatttcattagagtgttggctgcaccaattctagaagtaagctctccaagttcagactccattcttgtgc

SEQ ID NO: 854042 - DNA, 98 bp, Homo sapiens
aggaggaagtctatgaacccaaccctttcagtaaatacttggaagataacagcgacctcttttctgaacagggaatcccaggatttcctggaaaccga

SEQ ID NO: 854043 - DNA, 98 bp, Homo sapiens
aaaccattgtctactccacatagaccatccactgcctcagggtcttcagtggtaacagccagtgtgcagaatattcacaggatctacaaggctagatg

SEQ ID NO: 854044 - DNA, 100 bp, Homo sapiens
ggttaatacaatccctggctttgatggagtagtcaagactacgcgtttgttcacatggagaaggaagcagatgccaaagccgcaatcgcgcagctcaacg

SEQ ID NO: 854045 - DNA, 111 bp, Homo sapiens
aataatggcgaaccccctaggaagataataccagagaagaattcacttagacaggaattgaaagatgttggccatcgtgatcagatggctgcagctagaggaatcctgcag

SEQ ID NO: 854046 - DNA, 100 bp, Homo sapiens
atttagcaagagctcccaaggctactgccccaacagaggtttgctggcatgggtaatctcattaaggtgctaaccagggacatagaccacaatgcagcac

SEQ ID NO: 854047 - DNA, 98 bp, Homo sapiens
caggtgcagttacacaacctccagtttgaactagccgtggatgctgtgcaccggaaagcatctgagccagcaggtggccctcgtcgggaggacattgt

SEQ ID NO: 854048 - DNA, 100 bp, Homo sapiens
ggtgtcatttcatgatcgtaaagaagttgccaaatttgaagcagaacgatcaaaagccaagtggcaaacggacagtctcatcgaactcaaggaatcttca

SEQ ID NO: 854049 - DNA, 100 bp, Homo sapiens
ccaggtccctctctctgtccccggccgccatggagcagccgccggcgcctaagagaatgccagcagttactctgcagagatgacggagcccaagtcggtg

SEQ ID NO: 854050 - DNA, 100 bp, Homo sapiens
tcaacacggatggtcatggttgaggagtttaaacaagatattttggtaaaagacctcagtgggattgtagaggggcatcaaatcttaatgaacttcacca

SEQ ID NO: 854051 - DNA, 98 bp, Homo sapiens
tgaggacgaaattacttcttcccgtaatacctttgctcaataccaatatcaacatcagaacagatctgagcagatggggaaattgaggcagagaagcc

SEQ ID NO: 854052 - DNA, 99 bp, Homo sapiens
caagatggacaccgcggaggaagagttcgcagtatgtgcagtgcgtggccgggtgtttgcagctgatgctccgggtcaatgagtaccgctttgcttggg

SEQ ID NO: 854053 - DNA, 100 bp, Homo sapiens
atccattggaatttaagtcccatcagtggtttggagcatctgtgaggtcgaaacaggataaaattttgcaagagcctcctgatctagcagccaagactcc

SEQ ID NO: 854054 - DNA, 134 bp, Homo sapiens
attttggaagagggagtcaccactggacctccaaggaagccacgtgcagacatctacaaccttcgatctcctgacgaaatccacattcatctcaatggaaggatcctgccttaagtcaacttatttgtttttgc

SEQ ID NO: 854055 - DNA, 100 bp, Homo sapiens
tcttctctacagaagagcttctcctcatcaactggggatgattacagttcttcctaaaaaaggaatagccaggccagaagaaggaaggcctgtggtgagt

SEQ ID NO: 854056 - DNA, 98 bp, Homo sapiens
cctccctgcagaagcgtcccgacggccacatcgtgagtgtgaggccccatggcgggtgccagaaaatggacacgaccttcaccgagggtgctgtaccg

SEQ ID NO: 854057 - DNA, 108 bp, Homo sapiens
gtaatacaaaagctgcgcgtcccttaatttcctcggcggtggttctcaccattcaggaagcccttcagctcactgttcaaaaagtagtgggtctctggattcatccaa

SEQ ID NO: 854058 - DNA, 98 bp, Homo sapiens
ctcgggcgccggcgagatgcctttgttcaccgccaaccccttcgagcaagacgtggagtaaccagagagcacagagaaatgctggtgaaactggccaa

SEQ ID NO: 854059 - DNA, 100 bp, Homo sapiens
ctgtccgcccccttggccactgatcccccgaagagcttctgtcgccgctctaggtaggataagttctgaacgtcgaaaagaaaagtctcgagatgcagcc

SEQ ID NO: 854060 - DNA, 98 bp, Homo sapiens
agataaaccacagttacaaggaattccaccagccatctgggcaacaagaaaggcttactacagttagataaatttaaccccttctctgacctggcaag

SEQ ID NO: 854061 - DNA, 98 bp, Homo sapiens
ccactgcccgcctcgacttcctctggaaactgcagcttttgaagagggagaacagcagattgctcagttacatgggtctggattttaattctttgccg

SEQ ID NO: 854062 - DNA, 100 bp, Homo sapiens
attctaattggcctttaagtgaaggaaaggctttgaagcaaaagtttgatgagattttttcagcaacaaggaggaagaacgtgcaaaacgtgaggagcta

SEQ ID NO: 854063 - DNA, 137 bp, Homo sapiens
caagccgcggccatggacctggcggatccggcctgccctggcccagctcaacacctgatttcgaaaaactaattgagggactcaaatctcctgacacttctcttctgctccctgacctcttgcctatgacagatcct

SEQ ID NO: 854064 - DNA, 100 bp, Homo sapiens
tgaagcaactgaagaaaatgtttgaagcaacaagattgcttgcaacaattgttatgcttattcgtattttacatggagaagtgaacaaagtgaaactgga

SEQ ID NO: 854065 - DNA, 111 bp, Homo sapiens
ccatccgcagaaggggagacacattttatgttgtgtcatttcgaagggaatcatgggtaaagaaggaagacaggctgcaagaaacagtgactatgcaatagccagatttaa

SEQ ID NO: 854066 - DNA, 100 bp, Homo sapiens
agctacttaatcctactcagaagaacttgtacagagatgtgatgttggagaactatagcaatctggttttcttgggcaggatgacgcaaaacacggtgat

SEQ ID NO: 854067 - DNA, 99 bp, Homo sapiens
tcagactgtggaacttccgtgccccccaccctcaccaagatgaagttgcggagaataatgaacatgatgtcacttctactgaattagatccctttctga

SEQ ID NO: 854068 - DNA, 98 bp, Homo sapiens
ggactgcaacctggctgtacagctcctcaagtgcaacaagtcccacttccgaaaccacaagtttgccgatgtactgggcctaatcgctacgtgcctct

SEQ ID NO: 854069 - DNA, 100 bp, Homo sapiens
aggcaggagaattatgggagcgcatttccccaggactataatgtaactgcaaactccaagctggtcattatcacggctggggcacgtcagcaagagggag

SEQ ID NO: 854070 - DNA, 100 bp, Homo sapiens
agagcattccagagcagtacatctgctatatctgccgggacccaccaggtgatgatgaacagtctacacagatggctgcaagttgggaagatgataaagt

SEQ ID NO: 854071 - DNA, 100 bp, Homo sapiens
gctagtgatctctataatggttccagtatagtctctaggataagttctgaacgtcgaaaagaaaagtctcgagatgcagccagatctcggcgaagtaaag

SEQ ID NO: 854072 - DNA, 100 bp, Homo sapiens
gccacatggagcaaaaggccacggcacctgaagccccgagccctcccagcgcagcttcctgcctgacacagctcacttcaagaagtgcacaatgtcagaa

SEQ ID NO: 854073 - DNA, 99 bp, Homo sapiens
ttacgtgtactttaccaacgagctgaagcaggaactcgtgtccctgaagccttgtaaagctgcggagctggttgccacccacttttctggacatattga

SEQ ID NO: 854074 - DNA, 100 bp, Homo sapiens
atctggtcaaatttcagccatcagcaaatgccatggacaatattaccaggcagaaccaattctacgatacccaagtcatcaaacaagaaaacgagtcagg

SEQ ID NO: 854075 - DNA, 100 bp, Homo sapiens
aggatgggaaaccacgcaggcaaacgagaattaaatgccgagaaggccagtacgaaatcatagcccactaatgagttttggagccagctttgtcagtttt

SEQ ID NO: 854076 - DNA, 99 bp, Homo sapiens
ccgaacctagtcccaaagctttcatggcagaccagcaactcccctactgggtattctctactgccgctgatggtcaaacgcaagtggaaattaaagtgt

SEQ ID NO: 854077 - DNA, 98 bp, Homo sapiens
gcatccaaagcacacatgaactcagtgctcatggggatgaagaaccagctcggtgtatgcaacagcgttattgcaacaggctaacgaaaacagacaaa

SEQ ID NO: 854078 - DNA, 100 bp, Homo sapiens
ggcgctcagctcaggaccgcgcgccgtggtctgaggtccgcggcagggtcccgcatggcggcgcacaggaagcacggattccttttaagattgggcagcc

SEQ ID NO: 854079 - DNA, 100 bp, Homo sapiens
gagaacgtgcgggaagagaagatcatcgagcatttcaaacggtccctggtgctgaaccgcctgcgtccagttgccagcgggggtgggaaagcccaaccgg

SEQ ID NO: 854080 - DNA, 100 bp, Homo sapiens
gtcttccggacagactatggtcaggtattgttgcagcatctggcagtgagactgaggatgaggacagcatggacattcccttggacctttcttcatccgc

SEQ ID NO: 854081 - DNA, 99 bp, Homo sapiens
caccgggcagcagcggcgccgtgctcgctccagcgccatcatgaccgggtcctataacaacttcttcaggatgtttgatagagacacgcggagggatgt

SEQ ID NO: 854082 - DNA, 100 bp, Homo sapiens
cccacttgctcgtgcactttacacacatgagactatagaatctaactggcggtgtggacgacacaacttgcagaggattcagtgccgctctgaaaatagt

SEQ ID NO: 854083 - DNA, 100 bp, Homo sapiens
gcaggaggtgccgcgcggctcggagccctggaagcagcagctcaccgaggacggggactcgattggcagccaccatttgcatgtgatgttgataaacttc

SEQ ID NO: 854084 - DNA, 98 bp, Homo sapiens
ttatctgcgccccctgctggttgtgcgaaccccgggcagcccgggaaatctccaagtcagaaagacccctttgctgatgcaactaagggtgacgactt

SEQ ID NO: 854085 - DNA, 132 bp, Homo sapiens
accccttggtgggaagcaagtgatcagggtctcctgcggtgatgagtttaccattgctgccactgatggtctgaacacgaaagacattccccaaactgcccatttgtgaaaggtgagcacacacagaatgtg

SEQ ID NO: 854086 - DNA, 100 bp, Homo sapiens
ttaccaggttttttttatcgctgccttgatatacacttttcaaaatgctttggtgggaagaagtagaggactgttgtcaacggcagagacttatccagag

SEQ ID NO: 854087 - DNA, 100 bp, Homo sapiens
atccgccagctgccatgagcgagcgcctccgtcccagggtttttcaggaaatgcaaatgcagacagtgttgtgtactatagactccagccttctatcaaa

SEQ ID NO: 854088 - DNA, 100 bp, Homo sapiens
tacaagatggaacaatagttttaatgggaacatacgatgatggagcaaccaaatcctgaggaggatgaaggggctggccctggaggccgagagtgagctg

SEQ ID NO: 854089 - DNA, 98 bp, Homo sapiens
ctgtttcctgagttgctgtttcttgggactgcgaagctatacaggctggagttggtctctcagtccatgggcaatttcgagtggctacagaaaagtgt

SEQ ID NO: 854090 - DNA, 100 bp, Homo sapiens
ccggctgccctgtggcctcgctcctcggagggatccactagttcctggactatgggaactgatgactcgcccaatgtcacagatgatgcagctgatgaga

SEQ ID NO: 854091 - DNA, 100 bp, Homo sapiens
ctgatcccgctgagcgcccaggaccctgttccatccaaactcttgccctttgagggaccagatccagacatttaatgtggatgcaccatgccagaccgtg

SEQ ID NO: 854092 - DNA, 100 bp, Homo sapiens
gactgcacgttgaaggaaggtgtccagtgcaggaatttaaactttgggataatgagctgcagtatgtggaccaacttctgaaagaggatgtgagaaataa

SEQ ID NO: 854093 - DNA, 99 bp, Homo sapiens
tatcttctgagcgtgtgccagaagatccagctttgttgaaaagcgaagccgttagtcccttaatacaaaggacatatctgaagagatggattaagaatg

SEQ ID NO: 854094 - DNA, 99 bp, Homo sapiens
gaagacctgcgtcctttttcgtttttcggatgatgccttcaatactacctttatttccaccatagggaaaaggctctagggcggcagataaggctgttg

SEQ ID NO: 854095 - DNA, 99 bp, Homo sapiens
tgccatatgacattgtgttggaaatggatgagatcaaccatgattttccaggtgagtggtgtcattgagcaaacacgaagtcgggctcatccaaggatg

SEQ ID NO: 854096 - DNA, 100 bp, Homo sapiens
aatgactccaacgaattaggtggtctgactaccagtggctctgcagaggagtatagtcatggccaacagcaaaaaactcaagagggggaactgaaaatta

SEQ ID NO: 854097 - DNA, 100 bp, Homo sapiens
agcatctacaaccctgaagtgcttgatatcacagaggaaactctgcattctcgcttcctggaggtagcaatgaagtgatgaggatactgatctctagaag

SEQ ID NO: 854098 - DNA, 100 bp, Homo sapiens
gctccatatgctgttgaagaagggagccaacaaaaattgttttttctacctgttgacgtgtcaagcactaactgactccagttcagttgtagaatggact

SEQ ID NO: 854099 - DNA, 98 bp, Homo sapiens
ggtcaccagtgagctggagaagttccagaatgccacccagaggatgtttgaaattgactatagccgggactccttcctcaaggatggccagccatttc

SEQ ID NO: 854100 - DNA, 100 bp, Homo sapiens
agatgactgaagaagaaaaggctgcccagaaggcaaagccagttgctactgctcctattcctggtactccatgggattaatgaaaatcaagttccatcct

SEQ ID NO: 854101 - DNA, 100 bp, Homo sapiens
atgtccccaggaccaccaattttcaacagtgtgatggccaggaccaagatgaaacgcatgagggaagtagcacagaagagggaggatgctgtttccaaag

SEQ ID NO: 854102 - DNA, 100 bp, Homo sapiens
taagctgaataaagctgttttggaactgtcaggtacctcaaagcttatggagaaaacttgtatagatgcacttcctcttactatgaattcttcagaaaag

SEQ ID NO: 854103 - DNA, 100 bp, Homo sapiens
gacttgaaagtagggcatccttcacccatctgaagggaggaaatagtggcaggtgacagtctgcatgtgcagttttcagctggatagaacttatactggc

SEQ ID NO: 854104 - DNA, 100 bp, Homo sapiens
aagcagaggacaacatgaactgccagtgattcgcctttgccagtctcatctcgtgtctgctttgttaagttccatgatccagactcagcagttgtggcac

SEQ ID NO: 854105 - DNA, 98 bp, Homo sapiens
caagtcagactaactgcagatggttgctgtactttgccaacaagatctttctctggaatcaaaggactccagctgaaagttaacctccaacccaatga

SEQ ID NO: 854106 - DNA, 100 bp, Homo sapiens
cttggctctcaacttattcccttcaattcaagtaacaggtgctggagaatctggtaaaagcaccattgtgaagcagatgaggatcctgcatgttaatggg

SEQ ID NO: 854107 - DNA, 100 bp, Homo sapiens
gagagacaggaccaaagccgtcctgtgtatggtggtggcaggggccatcgctgccgtctttcacacactgataggaatgattggtaacagtgcttctcgg

SEQ ID NO: 854108 - DNA, 99 bp, Homo sapiens
aaagaggacagcacttccggtcacgccatcgttgctgccttcttcgtcaaggtgatgcttttccttggacgatcagcttgcataatttcagcatatata

SEQ ID NO: 854109 - DNA, 99 bp, Homo sapiens
ttggagttgctactaaaaagagaggtgcctttatctgatgatgatgaaagttacacagaagcatcagatggtgaaggagaaggagacacagaagtgatg

SEQ ID NO: 854110 - DNA, 100 bp, Homo sapiens
atggcggatggccccaggtgtaagcgcagaaagcaggcgaacccgcggcgcaataacgcagaggctgaccatgtggaggccgccatcctcgaagaagacg

SEQ ID NO: 854111 - DNA, 100 bp, Homo sapiens
tgcctcccagcaccacagtccttctgcagtccctcgtccagccacccccaggcaggtatgtttattcctaaaacgaggtgccaatcaacatgccactgat

SEQ ID NO: 854112 - DNA, 99 bp, Homo sapiens
aataaccctcttttccagtataagtatttggctcttaatatgcattatgtagacttaattcagtgcacaaatgagatgaatgtgaacatcccacagttg

SEQ ID NO: 854113 - DNA, 98 bp, Homo sapiens
ttaggattgtcaaaaggaggattgaggaggatcagatcaataatggaggcaatgggcttcgtgctgtgtcactccatcgctgggggtacgggttctgg

SEQ ID NO: 854114 - DNA, 98 bp, Homo sapiens
cagactgagcgcgtccaggcctgacagctctgcggctcgggccctgagtgcgattgtgccctgatcggatcagtctcatcaaggagtgtatttcccag

SEQ ID NO: 854115 - DNA, 100 bp, Homo sapiens
agggctgaaggaagctgccttgtacccacatctcccgccagagattcctgaaattccagaaagcatttcattctgtaaagcactgcaggtagctgacttc

SEQ ID NO: 854116 - DNA, 100 bp, Homo sapiens
ctgaaggtcatggatgccaagcacaagaactgcatggaggaatcagagatcattgatttcttcctgggggcctctctcaaggatgaggttttgaagatta

SEQ ID NO: 854117 - DNA, 100 bp, Homo sapiens
caaaagttgtcaggttgaaaatggaagagtaattgcctgctttgattccctaaagttatgactcaaaacttgagataaaggaaatctgcttgtgaaaaat

SEQ ID NO: 854118 - DNA, 100 bp, Homo sapiens
ctgctgtttaccttggcgaggcctttcaccaagtccatgaaatatggctacacacacctttctgcaggagagctgcttcgtgatgaaaggaagaacccag

SEQ ID NO: 854119 - DNA, 98 bp, Homo sapiens
gccatgcctggtggcctgcctgtacccacgagccctaacatccagccgtccccagctcacgagtaaacatcagtctccaaagataactacatcccttc

SEQ ID NO: 854120 - DNA, 98 bp, Homo sapiens
ccacacatgaagttaccataaagcagcagactgctcgacaaacactgcgccaagagctcctcagcagaagctcctcgcatcagatcctctgtgctggg

SEQ ID NO: 854121 - DNA, 100 bp, Homo sapiens
ggtccgctacagttcaaaagaagaggtagtgaaggcacaaaagtctctgcacatgttttaaaatcaaagatgggaaaatcggagaaaattgcccttcccc

SEQ ID NO: 854122 - DNA, 100 bp, Homo sapiens
gcctgagtgcctggatggagcccagcacttcctaaaagttccgccatggagtcatagttgcagctgactccagggctacagcgggtgcttacattgcctc

SEQ ID NO: 854123 - DNA, 98 bp, Homo sapiens
cagagcttcataatcagcccaagaccacatagagcaaacatgaatgatatttcccaaaaggctgaggtggttctttgaagctctgaagtatcccaagt

SEQ ID NO: 854124 - DNA, 134 bp, Homo sapiens
ggttatggcgagatggtggggtacaagcttgcttcagcagatccagggaatatcagctcaatgattctgcttcatagctggagccagacatcctgcttcgggccaagcaagatttcctgaagacggacagtgac

SEQ ID NO: 854125 - DNA, 100 bp, Homo sapiens
ttcacaatcaagaaatgcagaaacgtaaagaaatgcaattgaggagaccatctagctggctgcccccgacagtgagtgtgttggctcttgtgaagcgggg

SEQ ID NO: 854126 - DNA, 100 bp, Homo sapiens
ccaacatcacccacccatttgagtttgacttctatctgtgcagccacgcaggcatccagcttcacagttgactgcaggcattcagctttctctggcatca

SEQ ID NO: 854127 - DNA, 100 bp, Homo sapiens
gtgggctttgtgttcaccaaggaggacctcactgagatcagggacatgttgctggccaataaggtatttgaagaattattgcttgatgcagattggagca

SEQ ID NO: 854128 - DNA, 100 bp, Homo sapiens
agcaaatgaagttttatactaggttgccacaccatttggaggttttgaaaaagcatcaagaatggttaaatttaaagttccagattttgagctactattg

SEQ ID NO: 854129 - DNA, 100 bp, Homo sapiens
caggtgaagaaaacctcatgaatagcaatcacagagactcggagagcatcactgaaccttcaacaactagtactgcttcaaattatccagatgtgttaac

SEQ ID NO: 854130 - DNA, 100 bp, Homo sapiens
aatgagattatctttcattgtgttttcttctcaagcaactattattttgccattaactggagacaggataccatacttgcagagctccttcagatacata

SEQ ID NO: 854131 - DNA, 98 bp, Homo sapiens
gcaaagttttgcagatcttcaacaagaggacccaggagaaattcgccctcaaactccatctgatccactggaactccactctgtttggcagcattgat

SEQ ID NO: 854132 - DNA, 107 bp, Homo sapiens
agagatgacgtggagtttatcagtgacctgattgcctgcctgcttcagggctgctatcaacgaagagatatcactttgaagaaaacaggtctgaaacaaggtcttac

SEQ ID NO: 854133 - DNA, 100 bp, Homo sapiens
aaagaacgcagggagattctgggaacttgcaaaatgctagggcagatgactgatcaagtggctgacctccgtgccaggatctacagtctttgcagaaatt

SEQ ID NO: 854134 - DNA, 100 bp, Homo sapiens
agaacaaagctgaggtccagatgaaagagaagtttctggtcactccccaggattatgcgcgttttcggctttgtgagaaaccttaccatcaaacacgatg

SEQ ID NO: 854135 - DNA, 98 bp, Homo sapiens
catggctagcaggaatgcttactgttgcgtggttcgttattaacagaaatgtgcctgtggctgccttgcctgtaactcagcaaatgacagaaatgagc

SEQ ID NO: 854136 - DNA, 100 bp, Homo sapiens
gtcaaaaatcaactgcagcgatggttacattgaatactacatatgtcgagggaatgcagaaagagttaaggaaggcaggcagcataattcgttgtatgag

SEQ ID NO: 854137 - DNA, 100 bp, Homo sapiens
tatgactaacctacctccagttaatgaggagactgtaatttttaaaagtgatcgacaagcagcaggaaaggattcaagatgaccaacgaagaacctcttc

SEQ ID NO: 854138 - DNA, 98 bp, Homo sapiens
ggccgctctgctacatgcccacctgagctcgggccagcccgacacccaggacccggctgcccagtccctcatgatcatgaacaagatgaagaacttta

SEQ ID NO: 854139 - DNA, 105 bp, Homo sapiens
cagaaagtgaagctgtttcgggccagcgacccgctgctcagcgtcctcatgtggggggtaaaccactcgccggcacagtcttcactaccgtagaagaccttggct

SEQ ID NO: 854140 - DNA, 100 bp, Homo sapiens
ctttgcagtcactgcaggcatgttcctctatgtagccttggtggatatgttctttctacaacttcaacaggctgcactggaggtgtttgcagagaataat

SEQ ID NO: 854141 - DNA, 98 bp, Homo sapiens
agaatccaaactacggacgtaaagctggtctctaaattgccacctcagttggatgaacccattccactgtatgaggcaaaagtttccatggaagctgt

SEQ ID NO: 854142 - DNA, 98 bp, Homo sapiens
gcgcaaccaagtgttgcctggtgaggtatgtcgagagtaccaacgtggcaattgcaaccgaggagaaaatgattgtcggtttgctcatcctgctgaca

SEQ ID NO: 854143 - DNA, 100 bp, Homo sapiens
ttccattgaacttcccagcactcgaaagggaccgaaatggagagcaaagaaagtaactcatgacatggacatgtgctatgggatgatgggaagcctgttt

SEQ ID NO: 854144 - DNA, 100 bp, Homo sapiens
ggagaaccagctcaagtgggcatcctgggagctccattccctaaggcactgtgttcagtgatcggattttgtggttggttgatattcctagagaaaacat

SEQ ID NO: 854145 - DNA, 100 bp, Homo sapiens
atctggatgaagggtgtgatcgtattcccagagaaacatcaccttatttggctaatctccttttgggtttgcttcagagaaaccaaaaagatagaatgga

SEQ ID NO: 854146 - DNA, 100 bp, Homo sapiens
gcctacgtgaacaacctgaacgtcaccgaggagaagtaccaggaggcgttggccaaggattttaccaaatgttgcaagaactctggagttcttatggtag

SEQ ID NO: 854147 - DNA, 100 bp, Homo sapiens
caagggcagcagctggcgactttctccagtgactgggaaatccaggaagacagtaggtataaccccgttttcacacgaatggccccttcacatatttgaa

SEQ ID NO: 854148 - DNA, 98 bp, Homo sapiens
aaaattaaaagaggagcagcatggcatttcagtcactggtttgcagagtccagttccgccatggagtcatagttgcagctgactccagggctacagcg

SEQ ID NO: 854149 - DNA, 100 bp, Homo sapiens
aggcttctgaattcccttctgagttaatgtcaaatgacagcaaagcactgtgtggctgaataagcgggttcctaaaaaagctctaaaatgaatgcatagt

SEQ ID NO: 854150 - DNA, 98 bp, Homo sapiens
caaagcctcatttggtgatgaatgtagccaccacgcctacctgcatgaccagttctggagctactggaatagctactgaggaaaaggcacataggaaa

SEQ ID NO: 854151 - DNA, 98 bp, Homo sapiens
gtcagtcagtgctgaattagtgcctacctcatcatggaacatctcaagtgaactcaacaaaggtgcagctgcaggggatgacaccgaagatacaagca

SEQ ID NO: 854152 - DNA, 100 bp, Homo sapiens
taacagttagagctgacatagctggaagatactctaacagattgtacacatatgagcctcgggatttacccctatgttggggtgaccaactcatctggac

SEQ ID NO: 854153 - DNA, 100 bp, Homo sapiens
gagaaggacgcgcagtccatctctctcaggatggagaacctgttcatcaaccgcttcatgcacatgttccagtcttcttggaatgacttcgccgactttg

SEQ ID NO: 854154 - DNA, 100 bp, Homo sapiens
tggggacctcactgagaagtattttgctctgcgaaacatcatccagaagcgccatggctacttattctgccacatgtgccaacaatagccctgcacaggg

SEQ ID NO: 854155 - DNA, 100 bp, Homo sapiens
aatcaacaacctggaaacattctttgaattggattatcccaaagtactccaaagattcaggtttactcacgtcatccagcagagaatggaaagtcaaatt

SEQ ID NO: 854156 - DNA, 100 bp, Homo sapiens
ctggtgcccaagcctggattaaaaagaaactaattctgaagcaagcccttatagttgtgctgcagtggtgtttcaatcacaattttagtgttcgactgta

SEQ ID NO: 854157 - DNA, 100 bp, Homo sapiens
tgctgcgggaggcggcggcggtaggaagccggagacagcagggtgacaggtatcagacttggtgataattctgaattatgaccgtgctgtagaagctttt

SEQ ID NO: 854158 - DNA, 135 bp, Homo sapiens
gaaattcctttggaagttattccgtagcataagagctgaaacttcagagcaagttttcattgggcaaaatgggggaacttaggctgcggaactatgtcccggaggatgaggacctgaagaagaggagggtgcccc

SEQ ID NO: 854159 - DNA, 98 bp, Homo sapiens
gctgacgcttgatgagaaggacccacggcgtctgttcgaagatctgtaagagcaaagctaaagaatctcagcagtattatcacagcttggctgtccgg

SEQ ID NO: 854160 - DNA, 111 bp, Homo sapiens
gcgcgcgaccggccccaccgagcccggcgcgcgacccgaggttgaaattatccaatgacgaaatcaaacgggcaattctaacaatggacgaacaggaagatctgcccaagg

SEQ ID NO: 854161 - DNA, 100 bp, Homo sapiens
aggaagaattctttgatgccgtcacagtggtctggggagaatgtaatcattccttccacaactgctgcatgtccctgtgggtgaaacagaacaatcgctg

SEQ ID NO: 854162 - DNA, 98 bp, Homo sapiens
tgtctcttatttagttctggggagcgcctcgtcgacatgagtgatgtggaggaaaacaacttcgagggcagaggaccagttactctccacaagaaaat

SEQ ID NO: 854163 - DNA, 100 bp, Homo sapiens
cagcggcggcgcggaggcggctgaggtgcgagccggccaccagcccctcgggttccaagatgcagctactggagacagagttctcacacaccgtgggcga

SEQ ID NO: 854164 - DNA, 100 bp, Homo sapiens
gcagagcttttttcttgctgaaacattaaacaaaagtggtggatcttgatccctgtctttccaagaagcctctagaggaaaagccttcccagccatacag

SEQ ID NO: 854165 - DNA, 98 bp, Homo sapiens
aaaggagcagccctggtgtcacctatcagtaaaagagaacgccagatcaagtgtcccaagtgtgataagctgttcttgagaacaaatcacttaaagaa

SEQ ID NO: 854166 - DNA, 100 bp, Homo sapiens
acctcagttgcgtgggtggtcttctgggagcacagaataacgaaggaggcccaacttcattcaataaggagcctgacggatttatcccagacggtagaac

SEQ ID NO: 854167 - DNA, 100 bp, Homo sapiens
agaaagtatcttcatgcttgcagggcctgatttgaaggaagatctccagaaacttaaaggcaaggcagtttccccggcatgaaccagagtggacttatgg

SEQ ID NO: 854168 - DNA, 100 bp, Homo sapiens
aagctgcaggatggtgcacgtagccaggctgctgctgctgctcctcactttcttcctccgcacggatgctgagagctcagtagatgaaggcgtttctgag

SEQ ID NO: 854169 - DNA, 100 bp, Homo sapiens
agctagcaagaagaaacgaattagtaaacagtgcaagttgatgcgtcttccatttgcaaggtcatcgtattgaggaagttcctgaacttcctttggtagt

SEQ ID NO: 854170 - DNA, 100 bp, Homo sapiens
actgaaacctgggaaacagtgcagccccatggctgggggttatggagtgatgggtgacgatggttctattgattatactgttcacgaagcctggaatgaa

SEQ ID NO: 854171 - DNA, 98 bp, Homo sapiens
ctccctggtagctgggattacagacgaagttatacggaagcgtctcctcattgatggagatggtgctggagatgatcggagaattaatctgctagtga

SEQ ID NO: 854172 - DNA, 100 bp, Homo sapiens
cattgagatgatccttacggaaaaggaacagattgttcctaaaccagaagaggaggttgcccagaagaaaaaggaaccagccgccaataagtcattggag

SEQ ID NO: 854173 - DNA, 99 bp, Homo sapiens
agcagagatcagcaatccttggctcactgaggaggtttgactaatagggatgccaaaggaaaaatatgatcctccagatcctcgcagaatttataccat

SEQ ID NO: 854174 - DNA, 98 bp, Homo sapiens
gcctggacccccagcatcatggtttcccatttcatggggtctctcaggaggatgaagaaggttataacgatggagaggtagatgacgaggaagatgaa

SEQ ID NO: 854175 - DNA, 140 bp, Homo sapiens
aaggccggccatgtaagatcgtcgagatgtctacttcgaagactggcaagcacggccacgccaagcactgtaatggcgttgactggcgtcagaagctggactctcagcgaggggctgtcattgccacggagctgaagaac

SEQ ID NO: 854176 - DNA, 100 bp, Homo sapiens
caacctgaatctcaaacctggagagtgccttcgagtgcgaggcgaggtggctcctgacgctaagagatggacttcagcagaaatctttatgatattgggg

SEQ ID NO: 854177 - DNA, 98 bp, Homo sapiens
cagtcctcgccggcgagttcagcctgtcaataccagcaaatatgcagaaagctatcggatccaaacctatgctgaatatatggggagaaaacaggaag

SEQ ID NO: 854178 - DNA, 100 bp, Homo sapiens
gctcgttcggtggtttcttgtgaggacgcggcagcccgtggagtcggctgagggaaaagcgaggcaaggcaggcggatccgggtggatggacccaggggc

SEQ ID NO: 854179 - DNA, 98 bp, Homo sapiens
agaagggagctgacgggcgcccggccggctgcggtccgtgcggaggctgagccggccgcgggcgcgaccggaggcagcccttctgcagaggccgggct

SEQ ID NO: 854180 - DNA, 100 bp, Homo sapiens
agcagtttgaacctcagaagactctgttcatccagtgcgatgtggctgaccagcaacaactgagaggcatggaagaggagatggttcgtgttacgcagtg

SEQ ID NO: 854181 - DNA, 100 bp, Homo sapiens
tggatgcctgtccaccactgtactgagttccgattctgaagaggcatttgagaccccggagtcaacgacccctgtcaaagctccgccagctccaccccca

SEQ ID NO: 854182 - DNA, 99 bp, Homo sapiens
tgtactccagctagcaaaggcagacgtgttctcattatgacttgctatgtcgccttgaatgttttgaaaaatggttacttatcactgtcagacattaac

SEQ ID NO: 854183 - DNA, 98 bp, Homo sapiens
ccaaatacatcagcttgtaggagacagagagcactgcagcctgtggtgttgaggctcacagcgatgccatccagccctgccacatcagagaggccatt

SEQ ID NO: 854184 - DNA, 99 bp, Homo sapiens
agagacaagctgagcttgccgcacaaaaagctagagaggtgtcttatctgacttggggtgtgctgcaggaaagagtgatgacccgcagctatggggcca

SEQ ID NO: 854185 - DNA, 98 bp, Homo sapiens
aagcactctgtgctagtgatgtgagcaaatgcctcattcagaatggagatgtatgcatttcgattcttcatccgcctgtagatgacccacagagtgga

SEQ ID NO: 854186 - DNA, 99 bp, Homo sapiens
cgccgctctgtctacaacccgaggtacagcccacgcttgatggaaaaaattctccaaatggctgaaggtattgatattggggagatgccttcatatgat

SEQ ID NO: 854187 - DNA, 100 bp, Homo sapiens
tatgatgccggatggaactttgggattgtcggatatgttgcggtcactatctaacacaaaacctacagtcaatgaacatgacttgttgaaattaaagaag

SEQ ID NO: 854188 - DNA, 98 bp, Homo sapiens
aggaggaggacctgcacctggggacatcgttttctgcagaaaccaaccgaagggatgaggatgcagacatgcagatcgggagcggtgccgagaaaaat

SEQ ID NO: 854189 - DNA, 98 bp, Homo sapiens
aatgttcatataaatggtggcagaaataccagaaggcaagaaaactgatcagtgattttgccattatcttgtccattctcatcttttgtgtaatagat

SEQ ID NO: 854190 - DNA, 100 bp, Homo sapiens
cagtgagcacaaaaatcttagccggacaccttcacagatcataagggtcatccgcacagaatggcagcgcattaaagagggaattctctggaggaagcta

SEQ ID NO: 854191 - DNA, 98 bp, Homo sapiens
cagattgcagggagtatcaaatatgagaaagctaggccatctgaataactttactaagccctttctaaggcacaaaatgatgtgatggaaatgaagat

SEQ ID NO: 854192 - DNA, 100 bp, Homo sapiens
agttaatgtggtctcccatgtctcataaattggctggtggaaaaaaatcaaacatgaagattgcagttttgttttgtttttttctgcttatcatttttca

SEQ ID NO: 854193 - DNA, 100 bp, Homo sapiens
gcacggcgcgcggggactgccgcggccaccaggttgctgaaaagccaggagtcaaaatgactgagcgctttgactgccaccattgcaacgaatctctctt

SEQ ID NO: 854194 - DNA, 100 bp, Homo sapiens
gggcagcctgcccttccccttcaacctcttgctcaagagaaccatggagtctggcagtaccgccgccagtgaggaggcacgcagccttcgagaatgtgag

SEQ ID NO: 854195 - DNA, 100 bp, Homo sapiens
gttgttactcctgccgactgcagtgctgttccgtgagcttcttgaatgacatcgtacagtatctccgacgcacagttttacacacgctggaaagattggg

SEQ ID NO: 854196 - DNA, 98 bp, Homo sapiens
agacaaagagtggacatttgtcatagaaaataattgccattgccttcagaaagtgttgatattattatttctgacattccatttgggaaaaagtttaa

SEQ ID NO: 854197 - DNA, 100 bp, Homo sapiens
accactcaagagtcataggattagatgatccaagtcaccaagaaattactgtctcaagtgatacgaggcggggtttcaccatgttgcccagactggtctt

SEQ ID NO: 854198 - DNA, 99 bp, Homo sapiens
gcttacggttttgagaagccttccgctattcagcagagagctattattccctgtattaaagatgagttctcaggcttggagactgacactgcagtacct

SEQ ID NO: 854199 - DNA, 99 bp, Homo sapiens
gacttgaataaaaatgaatatctttctctggacaaaagcagcacttcagattctgttgatgaaggtctaagagtgtaaccagttccagtagcagtagca

SEQ ID NO: 854200 - DNA, 98 bp, Homo sapiens
gcattatccttcagtggggctattggactgacttttcttatgctgggatgtgccttagaggattatggttcatcaatggtgctaaggaaatttgctat

SEQ ID NO: 854201 - DNA, 100 bp, Homo sapiens
gctgctgtcggaccgtttccttggcttcttcatggtccctgcccagtcctcgtggaactacaacttcatgggcttcaggtgagaccacaggagttgacat

SEQ ID NO: 854202 - DNA, 99 bp, Homo sapiens
cgggacaagaaaattcatgcggaccccaccctacatggatccttgaagagtgagcaggactgcagaaggagctcaggtggatttgacagcttataaacc

SEQ ID NO: 854203 - DNA, 100 bp, Homo sapiens
tgctattaacttagcaaagctgaaacttttcagacattattacgtcttggatcaaccacaggtttgtctgctaccccccctgcctcattacctggctcac

SEQ ID NO: 854204 - DNA, 100 bp, Homo sapiens
agtggacaaaccaaatgaccaatcttcaagatggtcttcagagagcaactatcctccccaggtttaccaaagatgcaggtcattaggaactattctggaa

SEQ ID NO: 854205 - DNA, 100 bp, Homo sapiens
tcaagaagaagaagttgcgaaggatccccaacggggaggccaacgtgaagaagcccagtgcttttacaacagaggaatgctaagggagaattgcccttgg

SEQ ID NO: 854206 - DNA, 100 bp, Homo sapiens
tgtgaccgatttaaactgcacataccatatgctggagagacattaaagtgtaaaacatggctaaaagcttacggagtaagtggaaaagaaagatgcgtgc

SEQ ID NO: 854207 - DNA, 98 bp, Homo sapiens
aaaccagggctccacagttaggagtcatggcacagattgaaaaacaagagagatttgaacagtatactacctgtaagagctgctgtcctgaaaagata

SEQ ID NO: 854208 - DNA, 98 bp, Homo sapiens
tgtggattccaatctctgttgcttcatcccaggaaagcaagccagggctgagcaggaagaagaattcattagtaacactttattcaagaaaattcagg

SEQ ID NO: 854209 - DNA, 98 bp, Homo sapiens
tcggtggcgctcgagttcctggaccgcgagagcatcaaactggtgtccatcggtctcggcgcggaagatggccggcggcgtggacggccccatcggga

SEQ ID NO: 854210 - DNA, 98 bp, Homo sapiens
gaaatggactggcccccttgagcctgtcccaagccctggtgccaggtgtccatccccgtgctgagatcttaccaatatatttgagtccttcctgcctc

SEQ ID NO: 854211 - DNA, 99 bp, Homo sapiens
ccgtgtggacagtctgaaatcaagatccacctcagaaaaagatggaatgcaccatactgtcaccaagcacagaggtataattacactctacaggcacca

SEQ ID NO: 854212 - DNA, 98 bp, Homo sapiens
gaattttgaaccagcaactcagagaacaacagaaaactcaaaaaccatctggtgctgtggattgcaaccttgaatggtgctagcttcccttaatcttc

SEQ ID NO: 854213 - DNA, 50 bp, Homo sapiens
ggtcttgtagcagcgcctcctcggtaaaatctgtaaaaactgggtcagtt

SEQ ID NO: 854214 - DNA, 100 bp, Homo sapiens
gcattggccaaagtgaaaatttttttttttcttttgaaatctagttttgaataagtctgggtgaccgcacctaaaatgtaagctgtgctagaacaaaaat

SEQ ID NO: 854215 - DNA, 99 bp, Homo sapiens
cgagagccagagagatgtcggatttcgacagtaacccgtttgccgacccggatctcaacaatcccttcaagttccaatgacaggatttacacagagagc

SEQ ID NO: 854216 - DNA, 98 bp, Homo sapiens
cacgcttgaggcctcttggcctcacatacaggttaactgtaatggcttcacaattgaagatgaagaactttctcatttgggatcagcgatatttcctg

SEQ ID NO: 854217 - DNA, 100 bp, Homo sapiens
agcttgcaagaaattggggatcggaagctggaagacttccgattagagaaaggtgaagaggaaagaaatctttatataataggaagaaaaagaaagactc

SEQ ID NO: 854218 - DNA, 98 bp, Homo sapiens
agagacgtcatacttggaaatggctgcaggttcagagtccaaactgctttgcagaaaccgcggtgatccctgctggcagagaagtgaagactgacgag

SEQ ID NO: 854219 - DNA, 100 bp, Homo sapiens
ttcccttactacctgaagatcaactactcctgcgaggaaaagaaagagacatcgggaagattctgatgtggaaatggtggaagatgattcccgaaaggaa

SEQ ID NO: 854220 - DNA, 100 bp, Homo sapiens
ggtttgcctgaatccatcattgcagctgcatgttcaagaagtggccggagagttctgcatgttgattcgggaagacaggaagacccccagcgaatcaaat

SEQ ID NO: 854221 - DNA, 98 bp, Homo sapiens
tactcctatggaaccaatgatagaaatgaagaaaagagaagaaccagaatttcctgagccttccaaacagtatccagtagaaaaagcactctccagtg

SEQ ID NO: 854222 - DNA, 100 bp, Homo sapiens
tccgtccgccgccaccacccactccggacacagagcggttccgccaccccagccgcagatgtttggtgaagagctgcctgacgctcaggacggagagcag

SEQ ID NO: 854223 - DNA, 99 bp, Homo sapiens
agccctttctcctcggcactgtattctttacctgcttcccaatcccactgatgaggatcagcccatggccattgaacacccagttcgaaccaatcagat

SEQ ID NO: 854224 - DNA, 100 bp, Homo sapiens
cttgatattctacgatcacagtggtctccagcactaactatttcaaaagttgatggagtttgcactgtagcaaattgcgttggaaaagaactagctccac

SEQ ID NO: 854225 - DNA, 98 bp, Homo sapiens
attccaagtaactcttatttggttaatgttgaagaaggaaaatgcggaagtcgtcatttgacaagttttataaatgagtatttgaagctcaggaataa

SEQ ID NO: 854226 - DNA, 146 bp, Homo sapiens
ttagtgcaaactccaatggcccaaaacccacagaagttgtattagatgatgacagagaagatctttttgcagtacctgccatcctggctggacttgaccccagggacattgtggctgtgctgaatgaagagggaggctaccatcag

SEQ ID NO: 854227 - DNA, 100 bp, Homo sapiens
cccagttccctgcatcctaagactcgaaggcagcacaggacctggaaaaattacatgtttcccaaaccactccttatgatccagtgaatattcaagagag

SEQ ID NO: 854228 - DNA, 60 bp, Homo sapiens
agtacctggaatgcagagtagaaggtgtgtgtgtgcaggccacagcagcatgcccttggt

SEQ ID NO: 854229 - DNA, 98 bp, Homo sapiens
agggcttcgccagcgggccagcaacaaagtgcaaggttgctccttgagggcaggacagttcttatggctttatccgttgcgtaagcacagagaggtct

SEQ ID NO: 854230 - DNA, 99 bp, Homo sapiens
atagcagaagtagctaatgaaattgaaaacctgggatccacagaggaaaggaaatgatccgactagatgaagtccccaatctgagttccttagtatcca

SEQ ID NO: 854231 - DNA, 100 bp, Homo sapiens
aagacagtaggcactttaaaagcaaacatttctatggagtcatcagaacccactgtgaggaagtgacttctccttgaggtcacccagacactccaaacag

SEQ ID NO: 854232 - DNA, 99 bp, Homo sapiens
ttgactactgccacaattccgttatagatgaagaatggcaaagaactcagtgcagccctagagaaacgtgcgtggaggtggccagtgagctggggaaga

SEQ ID NO: 854233 - DNA, 100 bp, Homo sapiens
gaatccgcgtcgggctgtaactcgagtgccagcactgatgcaggtgacagccctgttggcactaccactgcaacgaacctggaacagcctcaggttatcc

SEQ ID NO: 854234 - DNA, 100 bp, Homo sapiens
tagcccacttagaaatcacaaaataaagctgttcaacttgaaaatgagctggagaattttactaagcagtttctaccttcaagcaatgaagaatcctaac

SEQ ID NO: 854235 - DNA, 98 bp, Homo sapiens
agaaggcggaagtggaggtggctgacgagctgctggactagacgcttgaagcaaagctgccatcccagaagacgacatgctctcagcaacccccctgt

SEQ ID NO: 854236 - DNA, 98 bp, Homo sapiens
acaacaacaactgcgaggaaaatgagcagtctctgcccccgccggccggcctcaacaaggctgggaggcggcagaatgcagccagaggagggcacagg

SEQ ID NO: 854237 - DNA, 98 bp, Homo sapiens
ccgtatctgcctaggcattttgctgtctcctcctaatacgagttaacgaattacatgatccaatgtaccagtatcgagttgataccggaaattttcag

SEQ ID NO: 854238 - DNA, 100 bp, Homo sapiens
ccgcggcggcagcagcagtgagaggcgagaagcccttctcctgtccccactgcagccgtgccttcgctgaccgctccaacctgcgggcccacctccagac

SEQ ID NO: 854239 - DNA, 100 bp, Homo sapiens
aagataacctcaatcatggccataccgagcaggcatgcattcctcagcagcaactgagctgtttgctactggacctttgccaagcactggaacacttcca

SEQ ID NO: 854240 - DNA, 99 bp, Homo sapiens
tccggaacatgcgcgggaactcccactgtgtggactgcgagacccagagcaaataatctccccaaagccatcgccgctgctcacacctttctactgaag

SEQ ID NO: 854241 - DNA, 100 bp, Homo sapiens
cttaaaagcaagctggttctctgggatataaataaggccaagctataacatcagaaatggtgaatgaatacaagaaaattcttttgctgaaaggatttga

SEQ ID NO: 854242 - DNA, 100 bp, Homo sapiens
aatgcaagagggtctgggaaaccaagtcgtccttccaaacccatcgttgccatggatccaattgcaaagcttcgaggcgcaccaggacgaggcagtgagc

SEQ ID NO: 854243 - DNA, 98 bp, Homo sapiens
aggctggccggagcctgctggagtcgccgggactcaccagcggcagcgacaccccgcagcaggacaataactacgtgtctcgaggatgatctgctcag

SEQ ID NO: 854244 - DNA, 98 bp, Homo sapiens
actcacaagtggtttgccacgacagattggattgctatttaccagaggaagtatgtccgtggttcagaccctgtattaaagcttttggacgacaatgg

SEQ ID NO: 854245 - DNA, 107 bp, Homo sapiens
gaaaaagcaagagtttgttatatagcaggactcttgacgtttaggtatgtggccatagaattctctctggaggagtagcagtgcctggacactgcacagcagaattt

SEQ ID NO: 854246 - DNA, 100 bp, Homo sapiens
ttgtttttcactcactgctcaccgggtcttatgcacagaagtatggcaagatttgtgaagctgggaatcatttcatcaatgtaatgttgtctcatcccaa

SEQ ID NO: 854247 - DNA, 100 bp, Homo sapiens
gtttgcaaatgcagaggaagaatttttctatgagagtccagcctctgatgaagcaggagagaaagaagccaagtctgattaataaccatataccatgtct

SEQ ID NO: 854248 - DNA, 100 bp, Homo sapiens
aaaaagaaagcggctggtcttcaggctgagattatgtttgagaccttcaacaccccggccatgtacgtggccatccaggccgtgctgtccctctacgcct

SEQ ID NO: 854249 - DNA, 98 bp, Homo sapiens
cagggataccctggaggggtccccaccttcttccggggaaggtgtcttgctgcaggtaactaatgaagaagtggtcaaccacagagtcttcaagaaat

SEQ ID NO: 854250 - DNA, 98 bp, Homo sapiens
tcggaagcggctggtgctggaggaatggatcgtggagcagctgggtcagctctacggctgcgagggctcaggaggagtgaaagcctgtcagaaaaaca

SEQ ID NO: 854251 - DNA, 100 bp, Homo sapiens
ggacttctttatccgagcgctggattgcatgagaagttgtttttcagaggcaccaaataatgtcatctgaaatgttgccagcatttattgaaacttctaa

SEQ ID NO: 854252 - DNA, 100 bp, Homo sapiens
ccgagggctccgtcaatggcttcatcagcactttgggagagaagaagaaggaggttcctgctgtgccagaaacccttaagaaaaagcgaaggaatttcgc

SEQ ID NO: 854253 - DNA, 98 bp, Homo sapiens
ccgcgctgctggcccccggcggctcttcggggcgcgatgcccaggccgcgccgccacgaggtgaccattgtgaggtagatattttgttctaattttcc

SEQ ID NO: 854254 - DNA, 100 bp, Homo sapiens
taaaggaagctgtttcctatattgaaagtatacgctcaacggcaagaaagtggaagttgccgtcaaacagatcatcgctggaaaagccgtggagcaagga

SEQ ID NO: 854255 - DNA, 98 bp, Homo sapiens
tgtttatctagactgctgatcttggacttgatattggtgcccagggagaaccccttggatatcgccaggatgagggtggttttcctgaagcagctggc

SEQ ID NO: 854256 - DNA, 138 bp, Homo sapiens
aaactggaaaataaagattacagagaaaaaaccaacaccttcctgtgcagtcctgttggaatttgtggttgtggaggcagagaatcaggttataccttgaagggactggcataaaccctgtacctgtggaccttcacg

SEQ ID NO: 854257 - DNA, 100 bp, Homo sapiens
agcgagctgtttgacccctttgacctcttcgatgtgcgagactttggaaagggtggtgacttcacacgccataatggcactggtggcaagtccatctatg

SEQ ID NO: 854258 - DNA, 99 bp, Homo sapiens
accaggttccagttgagagtccgagagctatttcccgcaccaatgagaatgacccgtttggtgaacagtcacgagtgccttctgcatttgcagctattt

SEQ ID NO: 854259 - DNA, 98 bp, Homo sapiens
acaaatacccctttgaattaattatggctgtggacatcttcaataaggagctactgctaatccccatccacctggaggtgcattggtccctcatctct

SEQ ID NO: 854260 - DNA, 99 bp, Homo sapiens
tgattatcatcaataccgagataaattttccaaacacctgactctgtgtgtttttaccaaccatacaggtgaatctggattgggaaagtcgacattaat

SEQ ID NO: 854261 - DNA, 100 bp, Homo sapiens
ttttagagctggcagcagcatctcagcccaagagaagctcgacacttcatgcaccagatcatcacagggatgttgtatcttcattctcatggtatactac

SEQ ID NO: 854262 - DNA, 100 bp, Homo sapiens
tgcccagatccggaagaacggtgaatttcccccgcaggtactatcgtggtgcagtgggggccctcctggtgtttgacctaaccaagcaccagacctatgc

SEQ ID NO: 854263 - DNA, 107 bp, Homo sapiens
tccaaagcggccgggagtcgcgcttcttccccactcccgagacagttttacagctcccagcacagtaggaaagagaaatttgagtcctagtcaagaggaagctggcc

SEQ ID NO: 854264 - DNA, 100 bp, Homo sapiens
ttcactccctccccgcggggcgcgcagctcgcgggtctttggacaccaccggtcctgagtccgcggtcctaggcctacttacaagcctccagtctcaaat

SEQ ID NO: 854265 - DNA, 98 bp, Homo sapiens
tgaaggagtgcagaggcatcacctgaaagaaggtgcctaccagtaacacagagggaggctggtcctgctctctcgctgagtacatccgccacaacgac

SEQ ID NO: 854266 - DNA, 135 bp, Homo sapiens
gagcacaaaagagtctccgcggtggaggtctgcgttgctcttgcttttcctcgctggggtgtacgataatgagtgtgtatatggcaactaccctgaaatacctttggaagaaatgccagatgcagatggagtagc

SEQ ID NO: 854267 - DNA, 100 bp, Homo sapiens
tacctggaagctgagcagcagcttgccgctctagaaggtaatatctcagtaagctcaagcacttcagatggaagcacatttacaagtgagtctaccacag

SEQ ID NO: 854268 - DNA, 100 bp, Homo sapiens
tcaaccagctgacgccggagcagctcctaacccagcctaccgtatgtgaacgggagctgtgtgtgtttgcttttcaaaccctgggagtaatgaatgaagc

SEQ ID NO: 854269 - DNA, 100 bp, Homo sapiens
ctacaagctcctcagtgaggacttcctgcctgagatctgcaacatgatcgcccagaaggatgttttagaagaatgtatgtctcttcccaagctatcttct

SEQ ID NO: 854270 - DNA, 98 bp, Homo sapiens
cagacgacaataagctcttcagggaggaattcaacgactcagtggcctctgaggatgtggctgtgaacttcacacttgaggagtgggctttgctggat

SEQ ID NO: 854271 - DNA, 98 bp, Homo sapiens
ggccggactggaaccgtctgagcggcctaacccgcgcccgggtagagggtccagtgtccatcaaagtccaggtgcccaacatgcaggataagacggaa

SEQ ID NO: 854272 - DNA, 98 bp, Homo sapiens
tgtgcagttcctgccccaggtcatgcccacgttccttaacgtcattcgagtctgtgatggggccatccgggaagaagaagaaattgtcgagacgaata

SEQ ID NO: 854273 - DNA, 100 bp, Homo sapiens
acatcccacagagatacccagacaacaggatcgtctcgtccaagatacagtacctggactccatgaacggggaggatctgcttctgacaggggaggtgag

SEQ ID NO: 854274 - DNA, 100 bp, Homo sapiens
gccaaaaatgtgcatactcacagagttagagagagggatggtggagtctactcttcatcttgtgttgagacttcgtggtggtgctaagaaaaggaagaag

SEQ ID NO: 854275 - DNA, 124 bp, Homo sapiens
tgcccttttcagaggttgtgaagttagctccaaatcccagactagctgctaccccaagcccgggagcttctcagaaactgccattcaccatccctgagctggttcatgcctctccctgccgcag

SEQ ID NO: 854276 - DNA, 100 bp, Homo sapiens
tacaggcatccctgtgctcctaggatcttaaatgtatttcggcattgggttgaacatcatttttatgactttgaaagagacttggaattgcttgaaagac

SEQ ID NO: 854277 - DNA, 99 bp, Homo sapiens
atagttcatgcatcaaatgcaataggaagtacttctggagggcataaacttggaggaggcagtggagagagcatcctggtatcacagcttcagcatgga

SEQ ID NO: 854278 - DNA, 100 bp, Homo sapiens
gaaacctgagcccctggttaagattcttgatgacagtggtcgggaaaactcgcctttcacggcccggccaaggggcatttgggtgcttttgctgcccgtg

SEQ ID NO: 854279 - DNA, 100 bp, Homo sapiens
tatcttcacttggcaaactcaacaagttggacagagagactctgaagatgtgagcaaaagagactccgataaagagatggctactaagtcagcggttgtt

SEQ ID NO: 854280 - DNA, 100 bp, Homo sapiens
aagcaagcagttcagaagagccaaggaataaacatgcaatgaacccaaaaggggttcagaatctcccatgatgattggtgagttgagaagtgaccttgat

SEQ ID NO: 854281 - DNA, 100 bp, Homo sapiens
aagctatgcttggcagcagaaggatttggcaacagactttgtttcttggagtccacttccaattccaagacagccgctcaggaagcaatcttgcatgcgt

SEQ ID NO: 854282 - DNA, 108 bp, Homo sapiens
attgccacggctgaaccctccttctcaatcttggaacagcacccccttctttaaggcactgcccagactccagacgtacctttaccaaacgtttgatgctggagaagc

SEQ ID NO: 854283 - DNA, 99 bp, Homo sapiens
tcagacagatcgccggggaggcagcgcgggatcccagcctcaggcgtgcgcggacggtgtgcggttcaaaaggtgatgacctatcaacagccattctca

SEQ ID NO: 854284 - DNA, 100 bp, Homo sapiens
gcacctgggatgacaaaaagtcatagtggtgtgacaaacatcttcatttgattgtacaccatctcccagcaagacaccagttgaaaaccccttgaatatt

SEQ ID NO: 854285 - DNA, 98 bp, Homo sapiens
gcgggccccgctccgcttcgaatggggacaagcagatcttttgaaatatgctaagaatgagacattggagaacctgaaacaaatccattttgctgctg

SEQ ID NO: 854286 - DNA, 100 bp, Homo sapiens
gcggtgctggtgtacttcgtggtcaggacggtcaggggggctttctctgtggtccgacgctgtgtcaagctctgcaccggccatgagtatgcagccaaga

SEQ ID NO: 854287 - DNA, 51 bp, Homo sapiens
ctgtgaacacgcaccgggacaggcctcagaattagagcccattgggaacga

SEQ ID NO: 854288 - DNA, 112 bp, Homo sapiens
gcagtttggcgacatttctcggccgaagggccatttgcttttgcggagcattgttttaaaggacactgcatctggctgacacctgacatcctcaaacgggacggcagctggg

SEQ ID NO: 854289 - DNA, 100 bp, Homo sapiens
ggcggctggaggaaaggggcgtggctgtggagaaggcgctccggggcgaagcaggtccttgaatgggcaagagggcacatgaagtacggcgtcctccaca

SEQ ID NO: 854290 - DNA, 99 bp, Homo sapiens
tacaacagaaagctcaatcacttaccaaattgctgactttgggctttccaacctgtaccagaaggataagttcttacaaacgttttgtgggagtccact

SEQ ID NO: 854291 - DNA, 98 bp, Homo sapiens
cctccaagctgtggtgtgcaggtgaacaagctgtggtacaagcccgtggaacaattcatcttaccagagcttaactcaggcctgggacagttgatctt

SEQ ID NO: 854292 - DNA, 98 bp, Homo sapiens
cggctaacaggatatgtaaggttcttgctgtgaatcaagagaatgagagaggcatgaaagtcattgagagtcgagcccaaaaagatgaagaaaaaatg

SEQ ID NO: 854293 - DNA, 100 bp, Homo sapiens
tctgttgaggcatctggacaccacacacatcatcagtctggagctggaggagggaatgatattcagtggtgtttttctcaggtgaaaggagcagtagatg

SEQ ID NO: 854294 - DNA, 99 bp, Homo sapiens
gataatcagcaaagactgctacacattgtctggcctcacaggtgcaccagtatgcatgagcgggtgaaccgaacagaaagacagtttcgatcacttcca

SEQ ID NO: 854295 - DNA, 100 bp, Homo sapiens
cggccgaggggctgcgtaggccccgcccggccaggcccagccgggccctggacagaatctatctaccgccggggagccagaagatggaggaagctgtacc

SEQ ID NO: 854296 - DNA, 98 bp, Homo sapiens
aggcccagcctctcgaatgggcacacctgtgtagatttccttgatagctgccgtgccagtactctattggctgagctcgatgatgatgaggacttacc

SEQ ID NO: 854297 - DNA, 98 bp, Homo sapiens
aagatttgcatcagccatctcttagtccagcaagtcctcatagccaggattgacctagaagctgagaaggtgagcactgtagctggtattggaattca

SEQ ID NO: 854298 - DNA, 100 bp, Homo sapiens
ctcagcgggcaggatgtggagaggggcacattcagatgccaaaagcagaaactccccgagatcgaacctgaaattccgctttgacaagctcagccatgcc

SEQ ID NO: 854299 - DNA, 100 bp, Homo sapiens
ggtttacaaaatagacatgccgcccttcttcccctccgaaaagaccatcatgcagacatcagagactgggtcggacacaggctcgacagtgaccttacaa

SEQ ID NO: 854300 - DNA, 100 bp, Homo sapiens
tgaaatcactgcaccttaaaaacaaaagattgagctgcactgtattcctacttaattcagtgcacaaatgagatgaatgtgaacatcccacagttggcag

SEQ ID NO: 854301 - DNA, 100 bp, Homo sapiens
aattattgctgctgttggtaccagacaaaatgttgacttgctggtgaaggtgggggaggttgtggacaagctctttgatttggatgagaaactaatgtta

SEQ ID NO: 854302 - DNA, 100 bp, Homo sapiens
aagagagctttggatttcacagattctcaagaaaatgaagaaaaagcttctgaatatagagcatctgaaataaaccaccatcatgggttcgggtcccata

SEQ ID NO: 854303 - DNA, 99 bp, Homo sapiens
ttgtattacaggctcttctcgttttactgaaaaaggcacctcctcagcttattctaccagattccatgaaagtattgccagtgtacatgaattgcttgt

SEQ ID NO: 854304 - DNA, 123 bp, Homo sapiens
tggtgcgggccctctggaccctggagtacaccccgcagcacagccgcgacttcaaggttggcagtggcaatgacccctggtcagcctggagtgcctccaaatctgggaactgggaaagctcag

SEQ ID NO: 854305 - DNA, 100 bp, Homo sapiens
ccatccccatttctatggtcctcctcacctatggccgctggcaggcccggattgcatttctacaaggcgaaagaaaaggtcaagagaacctgaagaagga

SEQ ID NO: 854306 - DNA, 98 bp, Homo sapiens
ggggcccatggccaggaccaccagccagctggttcctgcgtgaagaccagctgggagcccactgcctgctgccacctccaactccggccccctcacca

SEQ ID NO: 854307 - DNA, 100 bp, Homo sapiens
cctgaatcgcaggttttctactgtaccgaagcccgatgttgtggttcaagcacacggaccctgactactcggctgcctatgtcgtcatagaaactgatgc

SEQ ID NO: 854308 - DNA, 100 bp, Homo sapiens
cggccagtgtcctgctctggacgagatgcactgttagaccagatacgacagggtatccaactaaaatctgtcctcgaggccacacgggttaatcgaagaa

SEQ ID NO: 854309 - DNA, 99 bp, Homo sapiens
gggagagcgtctgtagcttccttggtcagaaagcaacattgaatgcagaagaaatggcggacttctacaaggaatttttaagtaaaaattttcagaagc

SEQ ID NO: 854310 - DNA, 99 bp, Homo sapiens
ccagtcttgaggctctcactagaaaagtccacaacttccagctcttcctcggaggcagcattgttaagggaggccctgtgcaagtgctggaggacgagg

SEQ ID NO: 854311 - DNA, 98 bp, Homo sapiens
tggagccgtctgcaaagtgtccccggcaagaagaggacgggaggggcaagctgcggccaaccaaggccaagagcgagcggaagaagaagagcttcggc

SEQ ID NO: 854312 - DNA, 98 bp, Homo sapiens
ttgatgggttgggcatcaacatctgagtgggacatacttttgaaggatgtgcaatgttcaatcataagtgtgacaaaaactgacaagcaggaagctta

SEQ ID NO: 854313 - DNA, 148 bp, Homo sapiens
actctacggaagtacgcaagcccacggggagcagagcagcaactcacccagcacacaaaatggatctcttacggaagctttctttggaaaagatcttctagatacaagtagacaaagcaagataagtttagataatctgtcagaagat

SEQ ID NO: 854314 - DNA, 99 bp, Homo sapiens
cagagcgctcccgcctgaactaccctgagaatgggtggactcccggagaggattcctaccgagagtggatacaggtatttaccttgctgtggattgctg

SEQ ID NO: 854315 - DNA, 100 bp, Homo sapiens
tcccaatcccagcagcaaatgtaattgtggtgaatgctgcttctaaattacttgggcaaaattgggtccaaaacgcctttgatggcagctgcaacttttt

SEQ ID NO: 854316 - DNA, 115 bp, Homo sapiens
aggctaccatggtctacaagactctcttcgctctttgcatcttaactgcagagctccaaacgagaatggaagccgctggaggaccgtagctgcacagacataccatggctgctgc

SEQ ID NO: 854317 - DNA, 99 bp, Homo sapiens
agagatgtgagcctgtgaggtccaaggccataaaattttgagtagaaaaatccagaaatttgaaaatcagtatcgtggtagagagctgccaggctttgt

SEQ ID NO: 854318 - DNA, 100 bp, Homo sapiens
agaagatgattccaacgccaccaattccaacctggtcctggaggtacacgagaatctggaccggcagctccaggacagctgtgaggaggacctgagtgag

SEQ ID NO: 854319 - DNA, 100 bp, Homo sapiens
cgcgaatatcgtcatcgttagaaggtctggggagtaaaatacaatggaaatggttcaaaaattgtgtctgttggagatgaccaggaaattcacatctatg

SEQ ID NO: 854320 - DNA, 100 bp, Homo sapiens
cggagaataatttctttctcgctgatcgcctaacttctactgacgaagcttggaagttgcagaagcaaatcctgaaggaacccaaagtggctgcttctgt

SEQ ID NO: 854321 - DNA, 100 bp, Homo sapiens
ccaaaaagaaaaatggaaactattgtgtccttcaggctgaatcatgtcagggagatttaagtacattggccaatgtggttacatcattagcgaatcttgg

SEQ ID NO: 854322 - DNA, 99 bp, Homo sapiens
ttcataataaattacgaagtcaggtgtatccaacagcctctaatatggagtatatgagaccttcagagaagacatggcttccagaaaagagaatgcgaa

SEQ ID NO: 854323 - DNA, 100 bp, Homo sapiens
gcagccagaggatcatccgcaatgccttacctatcggcagtgagtccattcttgcacaccgagaaaatatgcgacagatgataagaagtttttctgaacc

SEQ ID NO: 854324 - DNA, 100 bp, Homo sapiens
gtcgtctttcgtgtggccgcgagacaagttggatggcttgaggactggtactaaaaggaaacgtgactgggaggccattgccagcagaatggaggattat

SEQ ID NO: 854325 - DNA, 100 bp, Homo sapiens
gtgaaaagaaaaagaggaaggaagaaacccctctcaggcaatcatgtacaggtggatgccaacataaaatgccagaccagttcacgtgagaatatcttgc

SEQ ID NO: 854326 - DNA, 60 bp, Homo sapiens
cggtttctcccacatcgacctggaggatgattttcccaggcggctcagcgagagtatgga

SEQ ID NO: 854327 - DNA, 98 bp, Homo sapiens
atcggcgcacagaaattatagaagatttggccttctactctagtacagtagtatctctattggccaactacacagacccccagagcaaactgcggttc

SEQ ID NO: 854328 - DNA, 100 bp, Homo sapiens
cagcggagctgacacagccaaagagacaagagagacacctccaacttcgacaaagagttcaccagacagcctgtggaactgacccccactgataaactct

SEQ ID NO: 854329 - DNA, 101 bp, Homo sapiens
ccaagacctcatcaacaattaagcttcgagagctgtgcccaggagtgaacaaccagccctacctctgtgagagtggtcactgctgcggggagactggctgc

SEQ ID NO: 854330 - DNA, 98 bp, Homo sapiens
tgatgaaaactcatcctctgtaacatcttgtcaggctagtctttggatgggaagaggagaatttgcgctttggcttgatggagatctctaccatggaa

SEQ ID NO: 854331 - DNA, 100 bp, Homo sapiens
ccctgaagtacctgaagttgttgtatccaggtgcatgttacagccaactgtatggtgatcaagcaagcttttttgaggcagaaaaagtcccaagaattaa

SEQ ID NO: 854332 - DNA, 100 bp, Homo sapiens
gggtggggggagaagggagttggatcccgacgcccggagctggcaagatttgggccgtggaggacatgatccacatcgcggacaccaaggtcgccaggcg

SEQ ID NO: 854333 - DNA, 100 bp, Homo sapiens
ttcgagataccagtgggaccagcagaggtgttggctttgcaagcagcctcgtcttacagcgtgactgcaaagaaaaagacttttgttttgcaaaagaaaa

SEQ ID NO: 854334 - DNA, 100 bp, Homo sapiens
acgttttaatgccgagaggtctctgtgacgattttgaaattccatcttctaaaccaaaactcattgctcagctggagcgaggggaagcgccctggagaga

SEQ ID NO: 854335 - DNA, 100 bp, Homo sapiens
caaaattgagaagaactcataaacttggcttcctcgcttctgctcctcagaggtggtttgtgctccccctactgcctatatcgacttcgcccggcagaag

SEQ ID NO: 854336 - DNA, 111 bp, Homo sapiens
tagaggcctgattaaatactggtttcacactccaccaagcatcccattacagatagaagagtggctctgtttctcagtactttgaagttataactaatctgcctgaagact

SEQ ID NO: 854337 - DNA, 100 bp, Homo sapiens
cccccacaccccgacccacaagtatacctccaaaagaggaaactacaccttacatagctcaagctgttccatttcctccaagtcaccggcttacagcaaa

SEQ ID NO: 854338 - DNA, 99 bp, Homo sapiens
gaggagtctccaggagacccggggacagcatcgcccaggcccctggcagacctacaggtggacaaggagaggcacaattttttcgagtcctctcttgat

SEQ ID NO: 854339 - DNA, 100 bp, Homo sapiens
cgccgctgccggtcgggggaagagacctgacagatgttgatggcatggacctgggcaaaaaggtcagcatccccagagacatcatgttggaagaattatc

SEQ ID NO: 854340 - DNA, 100 bp, Homo sapiens
ctggaacaacaagatccatggataataggtcaagaaatcctaaatcagaacttttcaggtgctcgagtttggcttttcattggtttcatgttgatgtttg

SEQ ID NO: 854341 - DNA, 100 bp, Homo sapiens
gactctgcaatgtgtgttctgggttgaagaccccacatgtcaggaaaagcccaccgaagggccaagaaacacctgcctggggagcaacaacatgtacgac

SEQ ID NO: 854342 - DNA, 110 bp, Homo sapiens
gaaatcttgtgctgagtgggtgtctctctcaaaggccaggattgtagaatatgagaaagagttggagaagcatttcttgtaacaaactgattcttctgtatcaaacctgg

SEQ ID NO: 854343 - DNA, 100 bp, Homo sapiens
gagatgaaaaccaacatgagcctcggcttgatcctcaccaggaacatgggaactggaggttttctcgtgctgccatgcttactgagtcccttctctctcc

SEQ ID NO: 854344 - DNA, 100 bp, Homo sapiens
acgtggacatctccttggggctggtcagttgcatccagagatgcctccctcaggggagcatcagatccatgctgctgctgactcggagccccacagcttg

SEQ ID NO: 854345 - DNA, 100 bp, Homo sapiens
ccccctggccctagtcaggacccggatgcaggcgcaaggtttctgaaggattgtcattcttgcatagcagtgtgaaaatggtgcatggaaatatcactcc

SEQ ID NO: 854346 - DNA, 99 bp, Homo sapiens
cgaattggagaaaaagttcagtgggaagcatgtcgtctttatcgctcaggcagctttccacggagcaggctgttctgcaagagtcgctggagaaggagt

SEQ ID NO: 854347 - DNA, 98 bp, Homo sapiens
gtgccgctagcgcctcgagcgatgcacctcctttccaactgggcaaaccccgcttccagcagtgtaaacaggaacatcgataagtagtgtaaaaactt

SEQ ID NO: 854348 - DNA, 98 bp, Homo sapiens
ggagagaaagctatctcaaggctactcagccatcccttacagaactcaccacactcaaaccctgtattcagtggatcagctggcaccacccaaataga

SEQ ID NO: 854349 - DNA, 99 bp, Homo sapiens
ttttctccagtggaacaaagattgagaaccacaatagcatgtagtcttggagaactacctaatttaaagggtcaaggtcagcatctcctcgacgatcaa

SEQ ID NO: 854350 - DNA, 100 bp, Homo sapiens
ctggacacccaggctaactgcctcctctggtatatggacaacccccaggtgggaaagtctgtgtctcatgagaacaaagaacaagattcttattcagtag

SEQ ID NO: 854351 - DNA, 99 bp, Homo sapiens
ctgtctcagtttggggcaagtttatacgggcaacaaagtggccattaagcagatgaatcttcagcagcagcccaagaaagagctgattattaatgagat

SEQ ID NO: 854352 - DNA, 99 bp, Homo sapiens
ctggaaaaaccaccatcttgtataaattgaagctgggggagactgtgcctgccgtccctacagtagatattcttgtgactactccaaatcgactaatct

SEQ ID NO: 854353 - DNA, 98 bp, Homo sapiens
gaagtccccgaggcagcctccgcggaggagcagaaggcatgcttccagaagagtggtgcatcagtggttgctattcgaaaatacatcatccataagta

SEQ ID NO: 854354 - DNA, 98 bp, Homo sapiens
aaaaagagatgtggggggattctcgacctgctaacagaactggaccttttcggtttggacatatttgactcttttccccccaggttgaattgaccaaa

SEQ ID NO: 854355 - DNA, 98 bp, Homo sapiens
ctggacggggaatcaagagacccggtttctaatccctgctctgtcactaacaagctgcgtgatcttcgccttgtcagacccaagcagtagactttcaa

SEQ ID NO: 854356 - DNA, 100 bp, Homo sapiens
tgggggttgatacagcagagacgtcatacttggaaatggctgcaggttcagaaatccaactcaagtcggaacagctcttcaggttttctataatcttgga

SEQ ID NO: 854357 - DNA, 98 bp, Homo sapiens
agaacctgagtcaggacgtaaatggaaccctggatccaatgagttccacctacatagaggaattgggtaaaagagaagtcacaattcctccaaaatat

SEQ ID NO: 854358 - DNA, 100 bp, Homo sapiens
gttccatgggagtgtccagaccagagcctcatcccccaggcaggcggagccggtgaccagaagtcagcagcttcccagaagccccgaagccggggcatcc

SEQ ID NO: 854359 - DNA, 100 bp, Homo sapiens
ccgtcctcagcctggtcatcagccagggggctgacgtgaccaaagacttgaccactcaaagtccagctccccagaacactgctcgacatggacaccggtg

SEQ ID NO: 854360 - DNA, 100 bp, Homo sapiens
aaaaggtgatctggacaaaggaacaggtatctcaggcttatcgtcagccagaaggcgcggaggctgctcaagggctccggtttccacctggacctgctcc

SEQ ID NO: 854361 - DNA, 100 bp, Homo sapiens
gaagagacatgatgtatttgcatccttccctgcttcagccagtcaccaggagactaaagtccatcaaaaacatccagaaaattaccaagtctatgaaaat

SEQ ID NO: 854362 - DNA, 100 bp, Homo sapiens
gaaaaagagcaaagataagaagagaaaaagagaagatgaagaaacccagcttgatatgttgtttccaaggcaggaaaggtaaagagacaaagaaagtgcc

SEQ ID NO: 854363 - DNA, 99 bp, Homo sapiens
cggcgatggaggcggcggcggcggactggcggaaagaagagattttatcgacatcgaaagtaaatttgccctaaggacccctgaagacacagctgagga

SEQ ID NO: 854364 - DNA, 100 bp, Homo sapiens
caattctgacgccctcaaggtcgccaaggaggtggacccccagggtatggaacccttcagatcaaagcttaccaataaattcagtatgtagaacagatta

SEQ ID NO: 854365 - DNA, 99 bp, Homo sapiens
atctctcgggagccgcaaggcgagagctgcaaaggtgaacgtgctggccctcagcatctgcacacgggaagcctaccagtccatgaaggagcggaatgt

SEQ ID NO: 854366 - DNA, 100 bp, Homo sapiens
aaaaaacatctaccagtttgactttaaagtgattagagacttccaagaatatgtagagccaggagaagacttcccggcttctccccagagaagaaatact

SEQ ID NO: 854367 - DNA, 100 bp, Homo sapiens
aatgatgttccctgcaattaccatctcacctatacgtgcaagaaaggaacagatatgaagagcattttaagaggtgcagcctctggaagtggatcaaact

SEQ ID NO: 854368 - DNA, 100 bp, Homo sapiens
agagaatctgcctcctttaacttatgaccaggacatggacatcttccagcaacagatctcgagaagacagctggctaaaatccttatttgtccggaaagt

SEQ ID NO: 854369 - DNA, 100 bp, Homo sapiens
tcttcctcctcctcctccccaccaccaccatctccatcacccaccaacaacaccacaataatccacagccaagctcaaatctaatccaagtgaaaatgaa

SEQ ID NO: 854370 - DNA, 100 bp, Homo sapiens
ttttagggtcctttatatagaagggagagtaggttgcaaaattaaatgatgctgaaagggaactttctgaaatttctgagagattgaaagcctcaagcca

SEQ ID NO: 854371 - DNA, 50 bp, Homo sapiens
gagatggaaacttacttgaagaaggttcagcagactgtacaggatctttt

SEQ ID NO: 854372 - DNA, 98 bp, Homo sapiens
ttttgacagtcgctcagaagcagaggctgcaaagaatgctttgaatgtttgctgtggaatttgtcatctaatgacaaactcaagaatctcatgataac

SEQ ID NO: 854373 - DNA, 50 bp, Homo sapiens
ttggccctgtatcaggagcacaggatataattgacactggcaaaacaatg

SEQ ID NO: 854374 - DNA, 98 bp, Homo sapiens
caaggatagatcatcaagactttcatcattagtttattacagaggtcagctgggaagagctaccactttaagtgtaactcctgaaatggaaagagtga

SEQ ID NO: 854375 - DNA, 100 bp, Homo sapiens
ctggatgaggccagagatggcgtgtccagtgtgaaggtgtcagaccacgagatcctggcaggaggtcggaaaggtctgcttggaagccagacgaaacggc

SEQ ID NO: 854376 - DNA, 100 bp, Homo sapiens
gagtattttgaaaaagcattacaaatatgaagaggcattatttatgaccttttctatggaaaggtgaccttggagaaggtgctgggaattacagtgtctg

SEQ ID NO: 854377 - DNA, 99 bp, Homo sapiens
gtttctgacttaagccgatcccagaggctctttgctgctgtcagtatcaccactggtcaagcagttaaagccttccatctgaagtatgatgaagttcgt

SEQ ID NO: 854378 - DNA, 100 bp, Homo sapiens
tgttttataaactgcctggccgaatcagccttttcacgctcaaggtctcaccaacggctttgggggtgcgaggagcgagcaggagccgggcggcggcctg

SEQ ID NO: 854379 - DNA, 100 bp, Homo sapiens
gggggcgcagggaaggagggcgtccgagtcaacaaccgcttcgagctggcaccgggagcctggccgctgcagtggagacagcctcgggacgccaggccct

SEQ ID NO: 854380 - DNA, 100 bp, Homo sapiens
ctgttaaatatggccctgatcgacgtttagatcccataatcacagaagaaatgccactgttggagataacatttggtcagccaggcttggacattcagag

SEQ ID NO: 854381 - DNA, 51 bp, Homo sapiens
atgaacttgcctttaagctgcagatttgggatgtgagaactaaagccagtg

SEQ ID NO: 854382 - DNA, 98 bp, Homo sapiens
gaagtttgagaggaacttcattgctcagggattcgataccagcatcttgccaatttgcaaggactcacttggctggatgtttaacagacttgatacaa

SEQ ID NO: 854383 - DNA, 100 bp, Homo sapiens
ctcagcctcccaagtagctaggaccacaggtgggcagtctcttctgttatgacgaggcaaaaccaaattcccacagaggatggttcccgcgtgaccctgg

SEQ ID NO: 854384 - DNA, 98 bp, Homo sapiens
gattctcctgcctcagccgcccagatacttggtgttagatgaagctgatcggatgttggatatggggtttgagcctcagattcgtagaatagtcgaac

SEQ ID NO: 854385 - DNA, 99 bp, Homo sapiens
atgggttttagctgccgccggagtcgagaccttagctggatctccaaaatacaagtgaatcacccggcagttctgaggcgtgcggaacaaatccaggct

SEQ ID NO: 854386 - DNA, 100 bp, Homo sapiens
gtgtgaagacagaggcagaggagctgtttggggagaccatggagatgatggacaggatgaaaggggacagagcacaggaaagggacccccacagtcacct

SEQ ID NO: 854387 - DNA, 100 bp, Homo sapiens
tctcccggtgtggccacgagtcgggttccagcaacagatagaaatgctttaagttcactctggggaaagctggcctctgaaatcttaatgcagaattggg

SEQ ID NO: 854388 - DNA, 100 bp, Homo sapiens
ccgggggcgccaactccaacgtgttctccatgttcgaacagacccaaatccaggaatttaaggaggcacaggattcccaaagaacagtggtggctcaagc

SEQ ID NO: 854389 - DNA, 100 bp, Homo sapiens
agtctttctaggatccgggacacagattttaattatgacctttgtgactctatgcagaagctcctcctggggtagagacagatcttattgatgttggatt

SEQ ID NO: 854390 - DNA, 100 bp, Homo sapiens
ggaagttgttcaaagagccttaggacttgcacatggatctggactcagaagagatttaagtttcaaatctggctttgtcagttaatgcttgtgggatctc

SEQ ID NO: 854391 - DNA, 98 bp, Homo sapiens
cagtgctcaccacccaccaccactgtaaaattcagaagtactctccatctgaatctgcaaaagtatatgataaagcgataaaccgaaaaacaggagtt

SEQ ID NO: 854392 - DNA, 131 bp, Homo sapiens
aaaagaagagaagcagaattatacctagaagtctactaatggacagttagtcacccacctacatgttgaggtcctgaatgttcccagaactacacaacacctagtggagtgataaagtcccccggattccc

SEQ ID NO: 854393 - DNA, 98 bp, Homo sapiens
gctatgcaaatatagaacactaaagtgttacatgacagatgtatgagggtgcacattttcaactgctaagtcttgtgactgggtaaacaagccagggg

SEQ ID NO: 854394 - DNA, 100 bp, Homo sapiens
agaagaggaaagacttgtctcagagtattcactgactgctgaaactagagcatcactgagaagcaagagatagactgacctaactagagggagagctgcc

SEQ ID NO: 854395 - DNA, 102 bp, Homo sapiens
gaactttgctgctctacttgaggaacatgacatttttgttccagaggatgatgatgatgatgactaacaggatgaaagcgtgactcagcttggtcaggagct

SEQ ID NO: 854396 - DNA, 98 bp, Homo sapiens
aacaccgttcccccagccgggctggcccagctgagagccagcctggaggttacccagcagcaggccacccaggccgaaggccagctactagagctgcg

SEQ ID NO: 854397 - DNA, 100 bp, Homo sapiens
gtacgtcactaccactgtctctgctcacagtgccaagggctgaagaagatgcagagcagcctgaagctggtggactgtatcatcgaggtccacgatgccc

SEQ ID NO: 854398 - DNA, 100 bp, Homo sapiens
gctcatcatgatggacttggagctgccgccgccgggactcccgtcccagcagacaccattcgcttttcacccaagatgatttgatgtcttataaaactct

SEQ ID NO: 854399 - DNA, 100 bp, Homo sapiens
gaaaggtgcccccgaagtgaaagagatggcctggtggaaagcctgggagtcgtaagaaagcagtgggagttgaagtcattgtcaagtgcttgcgatcttt

SEQ ID NO: 854400 - DNA, 98 bp, Homo sapiens
ttgagagcatttgagaaaccccctcaggtacagacccaggctcttcgagactttgagaagaacctcctaattctctggatcttaatgacactcatcct

SEQ ID NO: 854401 - DNA, 100 bp, Homo sapiens
agcctcacacctgccctgcagtggaggagtagatagtttacaggtatagtggaggattacaagccaccgttctacgatgtggttcccaatgacccaagtt

SEQ ID NO: 854402 - DNA, 100 bp, Homo sapiens
ttggtggtgaccccgcccagttggcccagaggatctcttctaacatccagaagatcacacagtgttccttgtagcagtacctgggaacctgcatcctgtg

SEQ ID NO: 854403 - DNA, 98 bp, Homo sapiens
aatggagagaattatgcacctgacagcatctattacctttgccttggaatacaggaggtactataggatacaaccagcgaaacagaattgatactctc

SEQ ID NO: 854404 - DNA, 100 bp, Homo sapiens
cctggggcggcagcgcggacccgcccggagatgaggtggctttttctcaagtatattttccagtctgtttggaactcgggaaatgagaattttaattttg

SEQ ID NO: 854405 - DNA, 98 bp, Homo sapiens
gatcgctctcgcccaccgcccgaacccgcaatgtccctgctcttctctcgatgcaactctatcgtcacagtcaagaaaaataagagacacatggctga

SEQ ID NO: 854406 - DNA, 100 bp, Homo sapiens
ggaaatatctgcgcagtgtaggagatggagaaactgtagagtttgatgtggttgaaggagagaagacttcacagagaatgcagttgtcttgacttcaggt

SEQ ID NO: 854407 - DNA, 118 bp, Homo sapiens
ggataaactacctacatagaggacatacctttggttaaaggagctgccgtcagatctttaaatggatgagatggctaccactcagatttccaaagatgagcttgatgaactcaaagag

SEQ ID NO: 854408 - DNA, 100 bp, Homo sapiens
cagtgaccaaggagctcttacagatggacctgtacgcgctgctaggcattgaggagaaggcagcggacaaagaggaaatgcttgatataatgaaagcaat

SEQ ID NO: 854409 - DNA, 100 bp, Homo sapiens
tgtctcggcatagttctggaccccggcggaatcgggataccatgatgagtcttctgaagactgtggtcattgtgcttgagacagggtttcaccgtgttag

SEQ ID NO: 854410 - DNA, 100 bp, Homo sapiens
gattccagaggactcctaccaagcaagcatgcattggtgaggcaatggaacaaggtttacgagactgctgtcgatccatacgaattggaaagatcctgat

SEQ ID NO: 854411 - DNA, 104 bp, Homo sapiens
tggagatgatgatgaaattcagtttgatgacattggagatgatgatgaagatattgatgacatctaaattgaaccaagtgtttttacatgacaagttctctgag

SEQ ID NO: 854412 - DNA, 100 bp, Homo sapiens
aactgctggcagcaccgacgaacccccaatgctgaccaaggaggagcctgttccagaactgctggaagctgagggacggccgttgtcctacaagacattc

SEQ ID NO: 854413 - DNA, 100 bp, Homo sapiens
agaaaatagcaaacgatccagacggcagggagtgcatcaaaggtgtgaacacagttctagagccagtacaaaagcctcatgaaggtcctggagaaatggg

SEQ ID NO: 854414 - DNA, 100 bp, Homo sapiens
tgcaggatatacagcagcgaggaggggaagagagcactggatttcctggaacaaattttgacatttagccccatggatcggttaacagcagaagaagcac

SEQ ID NO: 854415 - DNA, 103 bp, Homo sapiens
acaaaggcaaaatgggcaagaagaaaacactcgtagtgaagaaaaccttgaatcctgtgtataacgaaatactgcggattgttgaacagataaatacgaaact

SEQ ID NO: 854416 - DNA, 100 bp, Homo sapiens
aaaaaagatcacaagcaactctggatgggattgcaaaatgaagaagctcattcacacagaagacccatttaatgatgaacatcaggagaggcaagaggtg

SEQ ID NO: 854417 - DNA, 100 bp, Homo sapiens
ttccggtcagggtcaagtcgtgttctgatcactactgacttgttgctttactaatatgctgaagaacaaacagccgacgccagtgaatattcgggcttcg

SEQ ID NO: 854418 - DNA, 98 bp, Homo sapiens
gtctgattctaaccagtatattggggaactgaaagatcagatagcagagctgaatcatgagacagagctttttgtacatgccttcaaggatcaacttg

SEQ ID NO: 854419 - DNA, 99 bp, Homo sapiens
aggaatggaagtttggggaggagaaaacctcgaattttcctttaggaacagtccacaggaagaggttgaactaaagaagttgaaacatttggagaagtc

SEQ ID NO: 854420 - DNA, 101 bp, Homo sapiens
tgcagttgcagattctgtatttcagagccacatcataggagcttcagtttcagcgactcacccgagaactggaagtggaaaggcagattgttgccagtcag

SEQ ID NO: 854421 - DNA, 98 bp, Homo sapiens
ccacctgccaccgaggccccctcttcgcctcctccagcaagctctattgccaagattggctcagatcctttaaaactggtacgtgatgctatggagga

SEQ ID NO: 854422 - DNA, 100 bp, Homo sapiens
tagctttgcacctgatcgcaacaaatagtcggaacatcacttgcattacgtgcacagacgtcagggtgataaaagaaaatgtggctgaagttacccgaag

SEQ ID NO: 854423 - DNA, 98 bp, Homo sapiens
agagcctttccttaggacaaacaagactgggacagggagaaattacttgaagcttggatgtccaacccggagaactgctgccaacgatcaggtgttca

SEQ ID NO: 854424 - DNA, 99 bp, Homo sapiens
gcaaagtttagtttagtctgtgaggaaactggcggctgctggtagttccatgctgtctgttcagacttcagcttggtgaaaccacccctactcctaatc

SEQ ID NO: 854425 - DNA, 100 bp, Homo sapiens
ctggaaagtgaggaattttgaagtacaccgtggtgacattgtatcattggttctccggagtagagatgaagagagaatttctaaacctggggctgtctca

SEQ ID NO: 854426 - DNA, 98 bp, Homo sapiens
gctttgattgctaccctggtatatgcacttttcagggattaggagcagacagcaagaacctgtaccctttcctgctcccagttattcaactgagtaca

SEQ ID NO: 854427 - DNA, 100 bp, Homo sapiens
ggagagcggccgccgccgctgccgcttccaccacagatttctgtccatgctagaagaagaagtatatagtcaaaactctcccatctgggatcaggatttt

SEQ ID NO: 854428 - DNA, 98 bp, Homo sapiens
acattaccattgactggaaagcaatgtgtcaaccgcattattactgaaaagaaatgtgagagcttcttgccgccagagttccgctcttttgctgtaga

SEQ ID NO: 854429 - DNA, 98 bp, Homo sapiens
gatgccctgcagtacctgcagaaggtctctggagacatcttcagcaggatagctagcggccaggagaaatacagtggaaaatgcaaaacaacgaaatt

SEQ ID NO: 854430 - DNA, 116 bp, Homo sapiens
ggaacttcgttgcttgcttgcctgtgcgcgcgtgcgcggacatggcctcaaacggtatcgagaaccttccctgcgaacttcagaggaacttccagctgatgcgagagctggaccag

SEQ ID NO: 854431 - DNA, 120 bp, Homo sapiens
gtcgatatagatcacgatcaagatctcgttcctacagcccaagctgccccccggtgtggaccccacccaagtttcctcctccctgtcccctgagggcacactgaccgtggaggcccccat

SEQ ID NO: 854432 - DNA, 99 bp, Homo sapiens
agagccaggaggagctgggccccaacctcatccaaaagcacaggtgtctgacttccagcaactgctggcctgtgccagggtgcaagctgagcactggag

SEQ ID NO: 854433 - DNA, 100 bp, Homo sapiens
atatgccaacccacctaactacggaaaacctgatcccaaaattattgaaaacactcgaaggatccaaaatacggagctggcatatacttcaccaagaacc

SEQ ID NO: 854434 - DNA, 100 bp, Homo sapiens
tactcatctactaggcaagcatggagttggcaccccaaaagaaagaatccacattcatctcaatggaaggatcctgccttaagtcaacttatttgttttt

SEQ ID NO: 854435 - DNA, 100 bp, Homo sapiens
ctttttcgcaacgggtttgccgccagaacacagaaagttgaagttgatggtagtttaagtgatagccacgtatctcctccagccaaacgcactttgaaac

SEQ ID NO: 854436 - DNA, 100 bp, Homo sapiens
tctaatctccaacacttatcagtactggaattaacagactctggtgctttaatggcaaataggtttggtgaacctatgggtcgtggaacaaaagttatcc

SEQ ID NO: 854437 - DNA, 110 bp, Homo sapiens
tggaagcggcaagcagagaaaacctgccaatcaagatgagtatgggaggcgatcgagatcggatgacagcaaatcatgaaagctacctcctcatggcaagcacccagaat

SEQ ID NO: 854438 - DNA, 100 bp, Homo sapiens
cgcgaggacacgggctgcaacctgcagcacatcagcgaccgggagaacatagacgaccgaagccaggacagcacagccgtagcactctcagactctagct

SEQ ID NO: 854439 - DNA, 100 bp, Homo sapiens
gaggttcgaagctgagtatgtgacaggtattaatctctggagaagacacatccacagttagcactttcttcagatgctgacgctcggtgaacagttgcct

SEQ ID NO: 854440 - DNA, 98 bp, Homo sapiens
cgatagagaaggaggatcaaaatcagacagtgaagatataacaagatcagcaaatctaactgaccagtttgtgaagaaatatgggaacctttttagct

SEQ ID NO: 854441 - DNA, 98 bp, Homo sapiens
tcattggaaattgtgtgtccatcttggttttgagctctgctctgcctgtgatgtcgagaacactgggatgaaaactttcggaagagaaagttgcctgt

SEQ ID NO: 854442 - DNA, 99 bp, Homo sapiens
tctcaaatacttgggactacagtactttgccagacgtttatcaaaatggggctgctgtcttctttcacttgtagtgacgagtttagctcattgagacta

SEQ ID NO: 854443 - DNA, 98 bp, Homo sapiens
atactttcgagtccttctcgggccgggaagcgcggagatgacggcgcccgccctcccgccgccgccctaagggttgagaatgcttgcaccaagcttgt

SEQ ID NO: 854444 - DNA, 100 bp, Homo sapiens
tacagtatgcaacacattttcctatacctctggtcctcgggcgggaagtgtacacctccaataaccagctggggggcatccagattatgcacaacaatgg

SEQ ID NO: 854445 - DNA, 99 bp, Homo sapiens
cccggcccacagtgggggtgtgcaaacccgagagaactggggtgttggtgccagaagaaaagaatgattgatgggaaacagacaccgggctatagacac

SEQ ID NO: 854446 - DNA, 112 bp, Homo sapiens
cttttgatgatcatgatacagttgataaaattgttggtggaatgaatcttacttgttgaatatcttctggttactagttggattcatttgtgaaagaatcattttcccctgt

SEQ ID NO: 854447 - DNA, 100 bp, Homo sapiens
catggaggagacgtgtcgtcactatgtggcccatgtgaaggaagaggagttgtacgcatgtcagagaggttgcaggctgttttcaatttgtcagtttgtg

SEQ ID NO: 854448 - DNA, 100 bp, Homo sapiens
ccagaatggttatctacacacccttctcatggcaatcgagttgagtacttggatagacttatacctcagggtcaaatacaacctgaactccctgtcacat

SEQ ID NO: 854449 - DNA, 100 bp, Homo sapiens
aaaaagaaacaaaaaaagaagaaagaaaaaggcagtgagacagattcagcccaggatcagcctgtgaagtgtgtttcctgtaacaaatcgttcaagaaac

SEQ ID NO: 854450 - DNA, 100 bp, Homo sapiens
ccgccaatcccactctcgctcctgctgacagaagaggaagcagccctctacattcaatccttctggagagcctgtgtgcggtcttgcgagtggctggttc

SEQ ID NO: 854451 - DNA, 100 bp, Homo sapiens
ggattgctgtggcttccgggcggcataaagctttttgcagtgttttataccctcggcaatcttgctgcgttagccagatctattaatgagatgaagcggt

SEQ ID NO: 854452 - DNA, 100 bp, Homo sapiens
ccgcgcaaccaagtgttgcctggtgaggacctgggaggaaggcaaggtgctcatctttgatgactcctttgagcacgaggtatggcaggatgcctcatct

SEQ ID NO: 854453 - DNA, 98 bp, Homo sapiens
ccttcccaatggcaactatgtttggatgttggatctacactttctcaagcactgtgatcttcaaatgtccctccagctacaaggtgggcaccatggcg

SEQ ID NO: 854454 - DNA, 108 bp, Homo sapiens
actataaagctttggaagatgcagatgagaaggttcagttggcaaaccagatatatgacttgttttctggatatgccgcagaaggatccgtgccagaagcaagcctgt

SEQ ID NO: 854455 - DNA, 98 bp, Homo sapiens
agaataaagactgaagaagaagccttttcaagtaaaaggtgcttggaatggttctatgaatatgcaggttttatggcaattggatatattccgacgaa

SEQ ID NO: 854456 - DNA, 99 bp, Homo sapiens
tcaggagtatgagcctcccggaggacggcatgagttctggacacttcaggagtcctcagctagtgacatggtcggaaggggccctggaccttctgaaga

SEQ ID NO: 854457 - DNA, 100 bp, Homo sapiens
ggaaatccgttgacatgaggcccaaggaagacagtttttggaaggggcaaggctgttttggagtcagcggaagatcaccaaggccagggagtggttccac

SEQ ID NO: 854458 - DNA, 98 bp, Homo sapiens
gaaatggaaggggcctccagggtctgcagacaaggcagggtggtatcacggaaaacttgacagaacgatagcagaagaacgcctcaggcaggcaggga

SEQ ID NO: 854459 - DNA, 98 bp, Homo sapiens
atattacccttgtgcttgccggacaatcatatcctgattcagcccttcctccacaaaggcaagacagattttgttctaattctggtagactgtctgga

SEQ ID NO: 854460 - DNA, 143 bp, Homo sapiens
gtgcttgtggatgcctctcatcgggagaatgctcttcaggatagtatcttggccagggaactcaaacagcagatgcaggccttctccacagtaggcactcctgactacattgctcctgaggtgttcatgcagaccgggtacaa

SEQ ID NO: 854461 - DNA, 133 bp, Homo sapiens
ttcccacgagtgccaggtgccgcgagcgccgagttccgcgcattggaaagaagcgaccgcggcggctggaatgaggggagaatcatacttcatcggaatgaggagcccagggcagcagggacacgtccctgaa

SEQ ID NO: 854462 - DNA, 100 bp, Homo sapiens
gattcctttactacagcagccaaaacgagaagaagaagaagtgttagaccaggaaacatatgaaccttctgagcacccagaccaggttccctgtagcctc

SEQ ID NO: 854463 - DNA, 98 bp, Homo sapiens
aaggatctctgggtcctgcatttggccaccaagacctgggaacaagtcaaaattttcctgcatggagtgctacatcctcttgttccagtctcagctgg

SEQ ID NO: 854464 - DNA, 124 bp, Homo sapiens
gcgaaccgcagtatcatgctggccaagaagatcatcattaaggacggaggcacgcttccccgggcgctgcctggacaggcctgcctgcgtgctgggacatgtctggcctccaaggaccgtcggt

SEQ ID NO: 854465 - DNA, 99 bp, Homo sapiens
ttttcacgttttaatgccgagaggacctattcaaactcagtctgtctcttgactggaggaggagaaggaaaagttgagcacattgccaaccggagttcc

SEQ ID NO: 854466 - DNA, 100 bp, Homo sapiens
ctgttgcctggacgtttgtccaatccacgttgacatttgagggatcacagcgtgtgttctggacacagctgggcaggaggaattcagcgccatgcgggag

SEQ ID NO: 854467 - DNA, 100 bp, Homo sapiens
gcaatgatgttggaacttgctcgtgccttagacaagaaactcctttccttaaagagtgctgcagcagctcccagtccagtgctaggaaacattcccccag

SEQ ID NO: 854468 - DNA, 100 bp, Homo sapiens
attactcatcacagatcggaacggaggcctgtgaacaaaatccagtctcatagcagaggagaatataatgtttacagcaccttccagagccatgaaccag

SEQ ID NO: 854469 - DNA, 99 bp, Homo sapiens
tctgctggacagcggctccgtggagaacgtgctgcaagtcgctcttccaccaaagccacctaagccaatgacttcagcagttccaaatggaatgaagga

SEQ ID NO: 854470 - DNA, 100 bp, Homo sapiens
cgcagccaacttcattcagctggatgacctggagtgtcactttcagcccatcaatatcacccttcagaccatggcaaaagttataaccaccgtactgaag

SEQ ID NO: 854471 - DNA, 100 bp, Homo sapiens
gcttacaatgacgccataactcctagaatgttatgtgctggctccttagaaggaaaaacagatgcatgccagtcccttccagctggctttattcagcccc

SEQ ID NO: 854472 - DNA, 98 bp, Homo sapiens
ccccaaagtcctggaggttgaagactccactgatttcttcaagtcaggggccgcgtctgtggacgttgtgaggttgatgtccgtggaggaagaactga

SEQ ID NO: 854473 - DNA, 100 bp, Homo sapiens
gctccgctgagtcctgccaggctgcaagggccaagcacgctgttccaggttcgcactgccccttggaacaccacaagggccttcattgctgccatgaagg

SEQ ID NO: 854474 - DNA, 100 bp, Homo sapiens
acaaatctaaaaggcgcgagagaatggatgatagtagtttaaatcctgctgcaggaatgacacctggtacccagacccacccattgaccctgggagggtt

SEQ ID NO: 854475 - DNA, 100 bp, Homo sapiens
gcagttaccaccaaacccaggaggagactctccctggaaaacttcccttccctttcgatggcgtttaatgattgcttcagtttgaactaccctggcaacc

SEQ ID NO: 854476 - DNA, 101 bp, Homo sapiens
ctgattggccggtgtacttcagtttccgtccaaggtccgcctcctacctccttctgcttcgggtttttcgttggaatatacgttgcacatttatggcgatt

SEQ ID NO: 854477 - DNA, 142 bp, Homo sapiens
tagaaccccaggaaggggtggtcggcagcatggagggccccgacgatagcgaggtcacctttgcattgcactcagaggcacagttgaatgctgttgatgctttgattgactccatgagcttggcaaagaaagatgagaagac

SEQ ID NO: 854478 - DNA, 98 bp, Homo sapiens
gactggcaggagcagattccaaaggcacaggaagaagcttgcagaacctgatgaccacctcacagtggctgagtcactgaagagggaatttgacaacc

SEQ ID NO: 854479 - DNA, 98 bp, Homo sapiens
cagaagctcctatgcacgggacagcatgatgattgaagaactccttgtgccatccaaagagcaggtcagttgaacataccgatggtcagagtgtccta

SEQ ID NO: 854480 - DNA, 100 bp, Homo sapiens
ctcagcaaaacgaacctctatatccgaggactgcctccccacaccaccgaccaggacctggtgaagctctgtcaaccgtgacttcccaagtatgcctggc

SEQ ID NO: 854481 - DNA, 112 bp, Homo sapiens
ccagcagggtttctcaatctctgcagatggccgtacgtgtgaagatacgtttgaaatggtttctgaagatgaagatgggaaattgggatttaaagtaaattaccactacatg

SEQ ID NO: 854482 - DNA, 100 bp, Homo sapiens
tcaaaagaaaacattcacaaaatgggtaaatgcacaattttctaagggtcagtatagaccttctgatttgctgtgccctgagacatatgtttgggtaccc

SEQ ID NO: 854483 - DNA, 100 bp, Homo sapiens
atttctttttaataatgtgtgacccttcacctttgatcccctgacctgcattaccttgcttattttgtaatagcagtctccggaaactactggcaggaca

SEQ ID NO: 854484 - DNA, 100 bp, Homo sapiens
gaacagatgagagattctgttgctcgaatttaccccttctggacacctgacatccccctaagcagaatgtggccccgtcccagagcaccacccgagacat

SEQ ID NO: 854485 - DNA, 100 bp, Homo sapiens
cgttaatctgcagatgctgacttacctgaacttgaggtatctagaagagcagaagacagagaatggaaaagataaggaacagaaacaaacaaataccgat

SEQ ID NO: 854486 - DNA, 100 bp, Homo sapiens
aaacctttgggcttcatggagtcgtcttagatgttgattcagcgcagatcaggcctctataaccgccaggaatcacattcagctggtgaaactgcaggtg

SEQ ID NO: 854487 - DNA, 100 bp, Homo sapiens
atccctgtcttccatacttttgtgttcaagctatttgtcgtagatgtccagacaagccagatcaccaagatccccattctgaaagaccgggagcctggag

SEQ ID NO: 854488 - DNA, 100 bp, Homo sapiens
ttccaggacaagtcctgcgcttggggatcctctgtacgcccgttcactggttatcaatactctggctgaccatcatcatcgtgggactgactttggtgga

SEQ ID NO: 854489 - DNA, 100 bp, Homo sapiens
tcagcgcattgctacctaccggctagccggtggagctcacgtttattcaacacttgaattcggagtgatttaccactgcacagaggagcggctgtacacg

SEQ ID NO: 854490 - DNA, 100 bp, Homo sapiens
ttgaggtgaatgtcggaatccattatctttcgggaaagctctctggggcaggtttggcttcattaactatgaagtaggagatagcaagaagctctttttc

SEQ ID NO: 854491 - DNA, 98 bp, Homo sapiens
caccaagcagaatgtccagcgggtcctggaggctgctaacctcttccagaattatatccagatcgagagacagaagattctgaaagggttcaatgaaa

SEQ ID NO: 854492 - DNA, 100 bp, Homo sapiens
ccctgggcttccggatcgagggcatcaagattgtgttaacagaaatgtactatgatgggttccatcgttccttttgtgatacagacgacctggaaacagt

SEQ ID NO: 854493 - DNA, 100 bp, Homo sapiens
gtctgaactgaagaagcttgggctcacttccacaaatgaacacccctcactaggccaactttcagagaaattaatagacaacaacattaatgtcatcttt

SEQ ID NO: 854494 - DNA, 101 bp, Homo sapiens
taaaaatgacttcccattatgtgattgccatctttgccctgatgagctcctgtttagccactgcagctgtgaacttcacagaagttaatgaagaaaacaaa

SEQ ID NO: 854495 - DNA, 98 bp, Homo sapiens
aaatgtcaaactaccaaatgggcgagacacacctgcactcttcaacttcaccactcaagacaagttggatggcttgaggactggtactaaaaggaaac

SEQ ID NO: 854496 - DNA, 100 bp, Homo sapiens
ttcgcagtggtcgcttcttctccttgacggcggagactggctgagtggaaagcaactaaactgaagaataaattcggagaagttttggagatctcaggga

SEQ ID NO: 854497 - DNA, 101 bp, Homo sapiens
tcctatgttaccgccacctaaaaacaaagaggattttgagaaggaagatgttaccgagtacttcagtgaattccttagtgcaggggaacggagtcttgaat

SEQ ID NO: 854498 - DNA, 50 bp, Homo sapiens
ccgggccggaccgaccccaggcggcgatggagtctcactctgttgcccag

SEQ ID NO: 854499 - DNA, 100 bp, Homo sapiens
accattcagatgggatctttccggatcaatccagatggcagccagtcagtggtggagatttccattttgacagtgccagcagaggaaccaggaacttttg

SEQ ID NO: 854500 - DNA, 100 bp, Homo sapiens
gtgccagtgctgagatagagattatgaagaagctgcgtgaggcctttgaaaatgatatgctggctgttaacatcaatgagctgagcaatgttcctgttcc

SEQ ID NO: 854501 - DNA, 99 bp, Homo sapiens
gattttatccaaagccaagaaagacgataccgatgatgaaattgccaaatatgatggcacttgaaaataactatgaagttatattccgagaacctgaca

SEQ ID NO: 854502 - DNA, 99 bp, Homo sapiens
gccttctcctggcggaatccagatatcggctactgtcaaggcctaaacaggcagccggtgaaggttgtgtactcctccaaggatcctgcccagccgaaa

SEQ ID NO: 854503 - DNA, 99 bp, Homo sapiens
acgattggagtcaactcaatgtgctcaaaacaggtgcagttcaggagcagatgagatccaagggaaaccgagataggccatggagcaattctaggggct

SEQ ID NO: 854504 - DNA, 100 bp, Homo sapiens
gggagctagagcttcgagacagactggatgagcagcaaagggtcctggaaggaaagaatgaagaggccctgcaaggtcctggtgcttgatggtcgaggcc

SEQ ID NO: 854505 - DNA, 100 bp, Homo sapiens
cgtcgatctgacaatgctaggagcgatgcaggtttccaaatatggtgacctggctaactggatgatacctgtcctgagaagaggattagaaaaaggcaac

SEQ ID NO: 854506 - DNA, 100 bp, Homo sapiens
gctcctcgcctaatggttcttcgtcagccaaggggaccagataactcaatggtgtggttcctcagagtgcaccaccagtgccaacagcctcttcccggtt

SEQ ID NO: 854507 - DNA, 50 bp, Homo sapiens
agcgaatcctaccttccaaacagtatacctgaggtgcaccggaggtgaag

SEQ ID NO: 854508 - DNA, 98 bp, Homo sapiens
ctgtttccattcctcctggcaggctttgggaccgtggctgctggcatggtgttggacatcgtgcaggcgcattctacattctaaaggggagctcagtg

SEQ ID NO: 854509 - DNA, 99 bp, Homo sapiens
aactctgtcaaatgaagaacactttcaagaaccagggttatgtaccgaaggactctaccgtgtcagcgggaataaaactgaccaagacaatattcaaaa

SEQ ID NO: 854510 - DNA, 98 bp, Homo sapiens
aagctaccggccagggttttctttactctggggtcccggctgccctgtggcctcgctcctcggagggaaatgactataccctggtgcttaaggagagc

SEQ ID NO: 854511 - DNA, 100 bp, Homo sapiens
taccattgattacatgtgaatctgtacagagctggctttatgtgctggggcagaagagatccgatagctatgttctgctggagcattctgtgaagaaggc

SEQ ID NO: 854512 - DNA, 99 bp, Homo sapiens
tcccgggtgctgctggttagtgtgctctgagggagggtccgagccagccgctgttttgccggaggagcccctcaggcccttccttcaaaatgtctactg

SEQ ID NO: 854513 - DNA, 101 bp, Homo sapiens
gccgtctgcaaagtgtccccggcaagaaggagcctcacagtctactcagagaaaaataaaagaaggcaaaatgagtcctccccatttccatgcaagccaga

SEQ ID NO: 854514 - DNA, 100 bp, Homo sapiens
gtatctcctcgaggaagtacaactggatcttagaaatgaagttgaaaaattacgcaatgaagtgaatgaaagagagaaagcaatggaaaatcgttacaag

SEQ ID NO: 854515 - DNA, 99 bp, Homo sapiens
ttcctcgggcagcggaagcggcgcggcggtcggagaagtggcctaaaacttcggcgttggggcttccgttacaagatgaggtctgtgtatgctcacttc

SEQ ID NO: 854516 - DNA, 100 bp, Homo sapiens
gacaagatggcggacggggagctgaacgtggacagcctcatcacccggctgctggaggtaagactttgaccccgacgcaggcttcagtgattgccgcgga

SEQ ID NO: 854517 - DNA, 99 bp, Homo sapiens
gggaaaaggacttcagtatcaaaaaagaaatggtgatgcagtacattaatactgcttctaagacaggtggagagattcaaccagttagcgtgaaagttg

SEQ ID NO: 854518 - DNA, 100 bp, Homo sapiens
aagaattcggaatgtctgaaagagcagcagaaacgctactttccagggcccaatgtaaaggctgttgctactgctgtggaacagatttacccatttgtgt

SEQ ID NO: 854519 - DNA, 123 bp, Homo sapiens
gcgaccccagtcatgggccagacctcggtgtccacgctgtccccgcagcccggcagcgataattctgaaataatcagcagaaacggaatggaatgccaagaatctgcattgagaataactaaa

SEQ ID NO: 854520 - DNA, 99 bp, Homo sapiens
tgcgttatggatacataacctgaggagccgggggaagctggccttgggaacactctgctccagccaaggtggtgagggcagctgttcctaaacagcgca

SEQ ID NO: 854521 - DNA, 118 bp, Homo sapiens
gccactccagtcggtgttgagcacggcgagcagtctcaggcctttagtgatgatgattgataggcagcagtttgaagaaacagttcgaactctaaataacctttatgcagaagcagag

SEQ ID NO: 854522 - DNA, 100 bp, Homo sapiens
tcagatgccagctctgaaaaactcttcaacactgttattgtaaacaaaggtgttaagtgtgatgcttccataatacatttggatgctgtcagctaagttc

SEQ ID NO: 854523 - DNA, 100 bp, Homo sapiens
ccactggctaccagggatccagctttgtgctgggccacttcattttgctcttcaacgcctggtgcccagacaaagaggcagctgaacgtctttcaaaaac

SEQ ID NO: 854524 - DNA, 100 bp, Homo sapiens
ccagcggagcgaacccgagagcgtggagcgggctgggccaggggttggccggagacctacgacatgaatacctcggagcccaagacggagcaggaaagca

SEQ ID NO: 854525 - DNA, 100 bp, Homo sapiens
tttgtgttgtctgcatttggaggagcaacaatgtgggactatacgaagcaatatccaaggcagtgtcatctgcaacaatgctgtgatcgagaagggtgca

SEQ ID NO: 854526 - DNA, 100 bp, Homo sapiens
ggctcggccttcagtgctgtggtgttataagaaagagctggggtttagcagtgatgctgcttcaaaagtcatggtggaattgctcggaagttacacagag

SEQ ID NO: 854527 - DNA, 119 bp, Homo sapiens
aaaccacaaatgtttttctgttttgcctgaatacatgatttaaacaagagatttccacagaaggttcagctgtttcagtccacaccttgttcacagtaagatattcaattcaattcagc

SEQ ID NO: 854528 - DNA, 50 bp, Homo sapiens
gtgatttctgcatttccatctgagagaagtgaaaggggcatcaagagcag

SEQ ID NO: 854529 - DNA, 100 bp, Homo sapiens
cccagccatggaatgaatatccacaatttagcatcaggcaaaggaagcaccgcacatttttcagacatcacttagtgctcttacccagctgatgaaaaag

SEQ ID NO: 854530 - DNA, 100 bp, Homo sapiens
gtgggcttccccatgatgatcctgccatgcaggcaggccctgagcacgctgctgtgtgagcagcagctacctgtgcaccctgcctccggctctcctgagc

SEQ ID NO: 854531 - DNA, 100 bp, Homo sapiens
gacgtttgtccaatccacgttgacatttgagggatcacagcgtgtgatccatatcatagattttgacgatgaaaacaacattataaataaaaatgtcctc

SEQ ID NO: 854532 - DNA, 98 bp, Homo sapiens
gtattttccattccagaaggacaaaaactctttgagtttcggagaggagtaaagagacacgatgaggcgagtggtacgacagagcaagtttcggcatg

SEQ ID NO: 854533 - DNA, 128 bp, Homo sapiens
agcgtctgcaccttcagaaacagtgctgaagcctttaaatgcagcatctgcgatgtgaggaaaggcacctccaccagggatctgaagggagccgagctccttctgcagaagggcgctgagaagggagc

SEQ ID NO: 854534 - DNA, 99 bp, Homo sapiens
ggcgacctcaagaagcagctccacgaaaggcagccgcggatcgccgcgctcagcgacaaacaatgtaaacaggaacatcgataagtagtgtaaaaactt

SEQ ID NO: 854535 - DNA, 100 bp, Homo sapiens
tatagtcctgattcaagtgttggcggatggaagggaggagactcctgaccctcagaatgcctccagctgcaccaacaagtagaaattatgcagaaatgag

SEQ ID NO: 854536 - DNA, 100 bp, Homo sapiens
acaatatggaaaatactcaagccaggtggaatttggataaatctagaatatcctccgaatcctaaatctagagctccaaggatgctggtcattaagaaag

SEQ ID NO: 854537 - DNA, 98 bp, Homo sapiens
ctttccttcccggcgctttcctgggttgcttctggcggccctggtgttgctgctgtcctccttctccgagacatatgagcggctcgaggctgataaaa

SEQ ID NO: 854538 - DNA, 98 bp, Homo sapiens
atgcccctcggggaacgtatcactgggggtttcctcctgccagaggtcgttcatgcccaacttggtgcctcccaagatccccgatggagagagagtgg

SEQ ID NO: 854539 - DNA, 99 bp, Homo sapiens
ccacctgccacaccgtgaagctgcggggagccccgttcaatgtcacagagctttcaccaacaatcaccagtggtttacacaacattgcaaggagcattg

SEQ ID NO: 854540 - DNA, 124 bp, Homo sapiens
tctttacagcataagcctacagggtacgaagaatgaactctgagaatgtttggaggaagagcgtgttgtgaatcacatggcagcaaaaattattgaaaatgtctgtaccaccttttctgctcag

SEQ ID NO: 854541 - DNA, 98 bp, Homo sapiens
attacttctatagaaatggctgaaggaaaacctccttatgctgatatacatccaatgaggatgagagatgttcagttcaaccatctcactcgcttcat

SEQ ID NO: 854542 - DNA, 99 bp, Homo sapiens
atgaatctccaactttaaatcctcttgataatggaactatacagcgaagagacaatctctggcaagtttttgtagaaaaaatgtttcagtgcctagtct

SEQ ID NO: 854543 - DNA, 100 bp, Homo sapiens
gtatcaagccaagaacagcccaatctcctttctgggcaaacgttccaagcctcttagcaaatatccggctgtgatcaatgatatttcattctggttgccc

SEQ ID NO: 854544 - DNA, 98 bp, Homo sapiens
gaagagaagatcatcgagcatttcaaacgcacggggtcactctggtgcccattgaggagttcagcccggagttcgtggagccccgggtcagctgcatc

SEQ ID NO: 854545 - DNA, 98 bp, Homo sapiens
tcatcaggcggctagagcaaggggaagtgccctggggagaagagagaagacgccggccaggcccctgtgcagattacctaggaacagtacgatttggg

SEQ ID NO: 854546 - DNA, 98 bp, Homo sapiens
tcaatctttgcaacagtcagctgctgtttatgcagctttagccacagtagaagacttccagattcgtccacatactctctatgtacattcttacaaag

SEQ ID NO: 854547 - DNA, 100 bp, Homo sapiens
ttgattactcagtctctaaaaagctaaggtttggcatagaaatggtaccccttgttcaaaatgaacaagaagccttagatttggatggggaacctgatct

SEQ ID NO: 854548 - DNA, 100 bp, Homo sapiens
catccttcgaaaagctgccaagttgaaaatggacgagtaatcgcctgctttgattcattgaaacggcttactgaactaaagcgccagtgtgtagagaaag

SEQ ID NO: 854549 - DNA, 99 bp, Homo sapiens
ccattgttaagctggatgaaactggaaacctgatgatctcagaagggcattttgcatctgaaaccatacgggctaaagaacgtgccaatggaatggagc

SEQ ID NO: 854550 - DNA, 100 bp, Homo sapiens
atccagatgatgatgcacatggaaagaccacagcaagattctttcattcgtctcctcctagcctgggggaccaggctcgaactgaccctggacatcaaag

SEQ ID NO: 854551 - DNA, 98 bp, Homo sapiens
ttggatgctttattgtacaaagaatgatatggaacctagcaaagctgttccactgaatgcatctaagcaagatggacctatgccaaaaccacacagtg

SEQ ID NO: 854552 - DNA, 100 bp, Homo sapiens
gaactcataaatggttatccactgcatcgttggcttcacagtatgactgatgatcctccaacaacaaaaccacttactgctcgtaaattcatttggacga

SEQ ID NO: 854553 - DNA, 98 bp, Homo sapiens
gcgaagtctactcaacgtttccaagattcaaccctatgaaaagataaaggccaggggcttgcctgataatatatcttccgtgttgaacaaactagtgg

SEQ ID NO: 854554 - DNA, 100 bp, Homo sapiens
cgagctcgatccgctgctcgcacgggagccagctgggtgtgatccgggccaaggtggtggggaagaagctggtaaaggaggggcccttcggcacgctggt

SEQ ID NO: 854555 - DNA, 100 bp, Homo sapiens
tgatgacacatcagcatttgtttcccttagccagcccgagcaagtaaagattgagttgctggagaatgtaaccctaatccataaaccagtgtcgttgcaa

SEQ ID NO: 854556 - DNA, 100 bp, Homo sapiens
cgcgctgcttccacccaacttcctgttaggccgccatggcatcagatgaaggcaaactttttgttggagggctgagttttgacaccaatgagcagtcgct

SEQ ID NO: 854557 - DNA, 100 bp, Homo sapiens
acttcctgtctgaggacaagtaccctctgatcatggttcctgatgagctccttccgcttccagccgttcgagtcctatgactccaggccctgcctgccgg

SEQ ID NO: 854558 - DNA, 100 bp, Homo sapiens
caggggccagaagacaaagtcaattccatctgcgttcctttgcctgcaacaggggtcaagatgagttttgcctgacttctttgatgtcctgaactttccg

SEQ ID NO: 854559 - DNA, 50 bp, Homo sapiens
gcggtatgaaaccaaatactgctattaagctcttgaatgtcgtctctcaa

SEQ ID NO: 854560 - DNA, 100 bp, Homo sapiens
aaggattagtgtgggaagatattgactggatagacaatggagaatgcctggacttgattgagaaggagagaagatgactgaggaggaggtggagaccgtt

SEQ ID NO: 854561 - DNA, 140 bp, Homo sapiens
ggtggatgtgcaccaggtgtacaagtaccccttcgagcaggtggtcgccagctttctccgaaagcctcccctggtgaagacacaaactgtcaccatctcagataatgccaatgctgtgaaaagtgaaatcccaaccaaag

SEQ ID NO: 854562 - DNA, 100 bp, Homo sapiens
tttccaagagcttgtccaaagtgcaacattcatttcaatcttttggatcctttgaaaaatcacatgaagattggccatcgggactttgatgtggagaagc

SEQ ID NO: 854563 - DNA, 99 bp, Homo sapiens
tgaggaaatgcataaaaatgtggagcaagatgagttgcagcaagtcatacgggagcttccatgaggcaggctgaacctgcagatatgcgcccagagata

SEQ ID NO: 854564 - DNA, 98 bp, Homo sapiens
aattcagaaaagaagaagaagagggatactcccatgctgccaaagtgactcatcaagtgaatattctgattggacagcagatgctggaataaatttac

SEQ ID NO: 854565 - DNA, 117 bp, Homo sapiens
cttatccactcactcacccttccgaactcttaacatcaatgggcaaatccccacaggagaaggaatccggccccacatcgcaactcttcgtaagtacacctatggcaagcacattct

SEQ ID NO: 854566 - DNA, 99 bp, Homo sapiens
gaaggtgacaaccggtatattgcaaataccgtagaggaaatttctcctcttctctccatggaggctatggcatttgttactgaagagaggaaacttacc

SEQ ID NO: 854567 - DNA, 99 bp, Homo sapiens
aagaacatcatccagtggcagacactgaaaataagttggagatgcttgatgctgcaaagaacaagatgcgagtgaagatcagctatctaatgattgccc

SEQ ID NO: 854568 - DNA, 100 bp, Homo sapiens
aaaattagagtgaatgtagttgcaccagctgccccagtgctcagctgtgaagctgcaacacagactgaaaggagactggatctggctgcagtgactctga

SEQ ID NO: 854569 - DNA, 100 bp, Homo sapiens
tggaaagcaagggattgctggctacagcttcagaagaccgaagcgttcgtatctggaagggcgtctctggccgagcctctttttgtggaaaacgacagca

SEQ ID NO: 854570 - DNA, 98 bp, Homo sapiens
aaccctgggaagtgcccttgatgagctggaggtggtactgtgaaggcaaggagcttgaaaattccccagatattcacatcgtccaggcaggaaatctg

SEQ ID NO: 854571 - DNA, 98 bp, Homo sapiens
cagctccaacatcctgtgaattttacctcaaacatccagcctatctgcatccctcaggagaatttccaggtggaagttgcgctacaagtcagacctga

SEQ ID NO: 854572 - DNA, 99 bp, Homo sapiens
aattacctcttttttgctctccctcgagaagctccagatggcgtcttccgtgggcaacgtggccgacagcacagaccccagcgtggctggaacagatga

SEQ ID NO: 854573 - DNA, 148 bp, Homo sapiens
tttgcagcagctggaccatgttcctcattaacatctgtctgtccgcttagtcatcacatcatttcactgtgattatgtttgagaccttcaacaccccggccatgtacgtggccatccaggccgtgctgtccctctacgcctctgggcg

SEQ ID NO: 854574 - DNA, 100 bp, Homo sapiens
cgcatccctgccccggcgccgtccgtgcccgcgggacctgacagccgggtcagaggtgaccagaagtcagcagcttcccagaagccccgaagccggggca

SEQ ID NO: 854575 - DNA, 99 bp, Homo sapiens
ggggcttcctcggtggcgggcatggaggcttcgcgctgccggctcagtcccagcggcgacagacactttttcaaaaatggcaatggtatcagaattcct

SEQ ID NO: 854576 - DNA, 100 bp, Homo sapiens
gcccatcttgagtcagatttattcagatggtccaggcgaggctttgagggccatgaagtggatttggcatgataacatgcagtttcttcaagacaaaaac

SEQ ID NO: 854577 - DNA, 107 bp, Homo sapiens
gattagtaactggcatagacaactatgggcagcaagtctggaaaagtttgaaattccagtaaaaattcgtttgagtcctgaaccgtggacccctgaaactggtctgg

SEQ ID NO: 854578 - DNA, 98 bp, Homo sapiens
tctggcgtttgttcctttgggcgtgacgccagcttcaacgggaagaagacatgtgcagaccaggctggtggaacctcgagcttcggcgctcaacagtg

SEQ ID NO: 854579 - DNA, 100 bp, Homo sapiens
ggcccagcctctcgaatgggcacacctgtgtagcctgactggctcatggagaaagcctacctaagaatgaagccgggacccggcagaatggctcctgtga

SEQ ID NO: 854580 - DNA, 98 bp, Homo sapiens
accacaaggtgtacgatttgaccaaatttctggaagaggatcaaaaccattcaagtgcaagatatgccattttgcaacagctcagcttggagatgcca

SEQ ID NO: 854581 - DNA, 98 bp, Homo sapiens
ggaagacaaatatggaaacaaatactatgaagacaacaagcaattttttgctgctgcacaatatgtctgatcatgaacaacatgtgtttcagagatgc

SEQ ID NO: 854582 - DNA, 98 bp, Homo sapiens
gaagtcgcctctgtgctcgtgagtgcatggggtataaggttcatcatgcctagtggcgtataagaagaccccgccaccggtccctccacgcaccactt

SEQ ID NO: 854583 - DNA, 98 bp, Homo sapiens
ggaaagcaccatgacgtccatccatttcgtggttcacccgctgccgggcaccgaggaccagctcaatgacaggaggccatcctctggacactccacat

SEQ ID NO: 854584 - DNA, 99 bp, Homo sapiens
tgagcgggaccaccctgggcacagcaggcatcggaggtcaagagacaactgcctttgaaagagagtgagtgactgtttccaaaacagcaagcataggga

SEQ ID NO: 854585 - DNA, 100 bp, Homo sapiens
cgcccccgcggctggagggtgtgtggacgaatgtggaacctcgctctgtggctgtgttcccttggcactccttagtccccttcctggcacccagccagcc

SEQ ID NO: 854586 - DNA, 101 bp, Homo sapiens
cagagcctggagtctgcgaaggccgggacccggttccccggcccacagtgggggtgtgcaaacccgagagaactgggaggtcccaggtgattgaaaagttt

SEQ ID NO: 854587 - DNA, 99 bp, Homo sapiens
gaagatgaagaccagagaaaccctgcaaaggagtccctagagacacctagtaatgaaaacaacagttttgttggcatgtgaagctccagtttcctcaaa

SEQ ID NO: 854588 - DNA, 100 bp, Homo sapiens
gtgcacaaatctgagaaattttggagagagaatgctgtgaggttaaatgagaagaattatgaactcttgaagcgggctggtccgagtctctgttttggaa

SEQ ID NO: 854589 - DNA, 98 bp, Homo sapiens
tcgcttccggtgcaatgggtttgaggactgtcccgatggcagcgatgaagagaactgcaacacgatgaggcgagtggtacgacagagcaagtttcggc

SEQ ID NO: 854590 - DNA, 100 bp, Homo sapiens
cgctgcgccgggccccgggccccgatggccccgaccgcgtgctggagctcttcgacccacccaagggttgccacaccatttggaggttttgaaaaagcat

SEQ ID NO: 854591 - DNA, 98 bp, Homo sapiens
aggggcaataagctgctgttcaggtaccccttccagagaagccaggagcacccggcgtcccagacaaggtgtgagatggcagacaggtttgcaggaaa

SEQ ID NO: 854592 - DNA, 99 bp, Homo sapiens
gtaaaaaagattgaggagtctgaaacaattgaggattctagtaatcaagcagcagccagagaatgggaggtgaagagcgattatatgttagagatagct

SEQ ID NO: 854593 - DNA, 100 bp, Homo sapiens
ctgactgctcaggaagtaaaatcggcagtggttgcaggaatccagcaggctcacgcggaacagttggccaacatgagaatccaggatctgaaagtcagcc

SEQ ID NO: 854594 - DNA, 100 bp, Homo sapiens
tggaatgggagagagagcgcagaatatcaagtgctggaaaattctgtttgaagatttccggtcctggctttctgatatttctaaaattgacctggaatca

SEQ ID NO: 854595 - DNA, 100 bp, Homo sapiens
cagttttatggcctgccgtgcgccaggcacagctccctgggctttactcctcacgagcagcatggcttctcgctgtttctgggatgctgacactgacaac

SEQ ID NO: 854596 - DNA, 98 bp, Homo sapiens
tggtctctggctccctcctcccagggccaggcgccgctcagaacgaccttcactgcctggtgtaactcccacctaaggaaagccggcacccagattga

SEQ ID NO: 854597 - DNA, 98 bp, Homo sapiens
ggagccccaacacacggtccacagctcatcatgatggacttggagctgccgccgccgggactcccgtcccagcagtttccgttactatggcaatgacg

SEQ ID NO: 854598 - DNA, 98 bp, Homo sapiens
gtcgaaaagaatactgtgaattatgcaagcacagatttgcttttacaccaagtgtgttccagagaacaagccttcagacatttgctatattgacgctg

SEQ ID NO: 854599 - DNA, 98 bp, Homo sapiens
ttatttaaatctctgtgtgttccttattttgtgcttgaacttgatcaaacagatttattgctaaacatgggtgcatttttggataaacccaaaactga

SEQ ID NO: 854600 - DNA, 100 bp, Homo sapiens
cgcgggctgcgcgcttctgtgggtgggggaaggcaggactgacgcagagggccaccttatcttagttccagaatttagtcttcctttggaatactaccta

SEQ ID NO: 854601 - DNA, 100 bp, Homo sapiens
ccaatatcgaactgaagaaaggagggaaggatataccagtcactatccacaatttagaggagtatctaagagttgatagatccacagactcaagtatcaa

SEQ ID NO: 854602 - DNA, 100 bp, Homo sapiens
ctcagaggagtacttcgccacttactttaatgagaagatctccattcctgaggaggaggcaggcaatccatggaccttgtggaacttgtgtctctttttc

SEQ ID NO: 854603 - DNA, 100 bp, Homo sapiens
cgggaatatatccgaagcctgaagatggttccaagtattccctatctaggtcctcagaatggttggaatgaccctccagctttgaacagagtacccaaaa

SEQ ID NO: 854604 - DNA, 98 bp, Homo sapiens
agaccggtcggcactgtgcagagatcagagtactaagagacagataccctcaaaaagttatggataaaatacttagtatggctgaaggcatcaaagtg

SEQ ID NO: 854605 - DNA, 99 bp, Homo sapiens
gttgattggagatatgcccttagttggagctttgtctatcttcttccttaggaaaccagtcaggatggctaactggttggctccccacatggtgcccta

SEQ ID NO: 854606 - DNA, 100 bp, Homo sapiens
tgtcggattaccccgacattctccacctcctgggaggccagccattcccaaatgccccaaggatgaagaacggagacgtctctgctggatgaaccgaatc

SEQ ID NO: 854607 - DNA, 100 bp, Homo sapiens
tttgtacacatgcaaagtgtccaatgatgcaggctctgctctgtgcacgtcttcaatcgtcatcaaagaaacccaaacctttcgggtgaccgtgatcttg

SEQ ID NO: 854608 - DNA, 100 bp, Homo sapiens
tgtcaggtcgggaaccatccttggaaatcctgccgcggacttctctgcacagcatccctgtgacagacactaccccaagcagtccttcaccatggtggcg

SEQ ID NO: 854609 - DNA, 100 bp, Homo sapiens
ggcgctgcgcgagattcgcgcgcagcttgaaggccacgcggtgcagagcacgctgcagtccgaggagtggttccgaggtctgaaggacacaccaactcag

SEQ ID NO: 854610 - DNA, 100 bp, Homo sapiens
acaccaaatgaggacacatggcctggagttcattctttaccacattttaagccagggaacccatattgaaatgtctattggaattattttgggaatttca

SEQ ID NO: 854611 - DNA, 98 bp, Homo sapiens
ggtcaagaccaaggatggcgtggtggagatcaccggtgagactgtggagatgagaaggtggtggacactcgtgatggaatggaaatcgtcctaccgtg

SEQ ID NO: 854612 - DNA, 100 bp, Homo sapiens
aaataacccacgcagggactctcagcccacaagtgaagctattgtggtatctgaacgggaactatttggttctgttggtgtcattggtggtcattcttcc

SEQ ID NO: 854613 - DNA, 100 bp, Homo sapiens
tggagaaaaattttaacgtttgaggaaacagaaactggccatggtataatggaagaaccagaacttactttaataagcaccactgataccagtattgctg

SEQ ID NO: 854614 - DNA, 100 bp, Homo sapiens
ccagaacttttggaactagtgccggcggctctccaccccccaggcgggccttttttgaaggactacattaccattcaaagtattgcagcttcctccattg

SEQ ID NO: 854615 - DNA, 98 bp, Homo sapiens
aggactcctcgctccttcaagcctccaccacctcgcagccggggaggcaactggagcgaaaccagcgacagcaacctcaagcccagcagcgaagagtc

SEQ ID NO: 854616 - DNA, 98 bp, Homo sapiens
ttgaaggcctccgcctcgccattctggtcgtccttggccagcaggtccatgagggtctgccctgaagcgtctctgcctaggcaaagaacacagcagta

SEQ ID NO: 854617 - DNA, 100 bp, Homo sapiens
gcggcaggggaggacgaggtggacgtgggcgtggtgggcgcccaaaccgtggcagcaggaccgacaaggttgtctgcattcaaaagagcattctattaaa

SEQ ID NO: 854618 - DNA, 100 bp, Homo sapiens
tggatgctgatctggactcctccgtgcccgctgacattatctcatccacagacaaacttggtctcacagggatactgggtttgggcattgcggctcccaa

SEQ ID NO: 854619 - DNA, 100 bp, Homo sapiens
tttcggcatgtgtgtggacacgctcttcctctgcttccgtctgcgtgggctgatcaaccttgggaacacatgcttcatgaactgcatcgtgcaggccctg

SEQ ID NO: 854620 - DNA, 100 bp, Homo sapiens
cctttgattttgaagatgaccactttggaaatggtgatgatgaacagtctacacagatggctgcaagttgggaagatgataaagttacagaagcatcttc

SEQ ID NO: 854621 - DNA, 98 bp, Homo sapiens
catgtgcagtgtcgacaattgcaggatgcacagattctgtttcaggtatgtcccaaaagtctgtgtgtgtctactcctggacatcgcactgatctttt

SEQ ID NO: 854622 - DNA, 98 bp, Homo sapiens
ctacatgtaaaattaatgcagttcccggcgcatattaaatttcctattgactacccctattcaccacctaccttcagattcttgaccaaaatgtggca

SEQ ID NO: 854623 - DNA, 100 bp, Homo sapiens
tgattaaggatttagccaaagaaaaagataaaactgagaaagaattgcccaaaatgagccagggccctggaaatacaaggataaatggaggatggtgctc

SEQ ID NO: 854624 - DNA, 100 bp, Homo sapiens
ttgatatcacagaggaaactctgcattctcgcttcctggagggctggagccaggtagctcagcactgatgctcaccatggaggacttgctgcaggctgcc

SEQ ID NO: 854625 - DNA, 98 bp, Homo sapiens
gaagacttgctagttaggattttattactggcagcatgtatatcttttatccaagagttgaagattggctcctcatgtcctcgcctctgccacaaacc

SEQ ID NO: 854626 - DNA, 100 bp, Homo sapiens
atcctctgcttccaggacaagtcctgcgcttggggatcctctgtacgcccgttcactggagacctgagcctgccatactgagtctatggacagttccaca

SEQ ID NO: 854627 - DNA, 98 bp, Homo sapiens
ggaccccggcgcgctgaatgcagagtccggcagcgtcttctcttgagggagcaatttggagaagagctggaacccagactcgcgccctggatgccatc

SEQ ID NO: 854628 - DNA, 100 bp, Homo sapiens
cagccccgggccaggccgcggccggggcaggagcgcagggacccgagtgtatagccctccagagtggatccgctaccatcgctaccatggcaggtcggcg

SEQ ID NO: 854629 - DNA, 100 bp, Homo sapiens
cttttgtgtatgtgatacctatcatgtttttgaacacatgagaagagcaagttagtaccttgtaccaaaacatcaaccttgtggagccaagattaattca

SEQ ID NO: 854630 - DNA, 98 bp, Homo sapiens
tgatcggcagtttgttcacgaccctcaacttggctactccctgccttgtgtgggaaatggaagttccagtattaccgaaaatctctctaccgatcacc

SEQ ID NO: 854631 - DNA, 99 bp, Homo sapiens
tgaaagccctttggaacctccggagcaatgatacaggattactagatatgtcatgggacgtaacgatggtggatacctaatgattgattcaaaaactgc

SEQ ID NO: 854632 - DNA, 99 bp, Homo sapiens
tgcgagctcgccgggcgccctttagacatactggtagacacagtctgggccctctcttaccttactgatgctggcaatgaacaaatacagatggtaata

SEQ ID NO: 854633 - DNA, 98 bp, Homo sapiens
aatgactggaaactgattggaaactctttgggaaagccactcgaaaaggcaggtgacaaacattaccaccccagctgtgcacgatgcagcagatgcaa

SEQ ID NO: 854634 - DNA, 98 bp, Homo sapiens
tcgtctgcatggctctgtcactcacggacatggtccggcgaggagagatcatcgacaatgacaccgaggaggagttctacctccggcgcctggatgcg

SEQ ID NO: 854635 - DNA, 100 bp, Homo sapiens
tacttggactcttgattggaatgttctccctgcagcagtcagcccaaaggaagtttcagaatggcttcggttattgcctttccttggtgtactcgcactt

SEQ ID NO: 854636 - DNA, 138 bp, Homo sapiens
gacactctgaagattattgagcggctggaccacctggagaatgtcatcaagcagcacattcaaggaatagccaggccagaagaaggaaggcctgtggtgagtgggacaggaaatgacatcaccaccccaccgaacaag

SEQ ID NO: 854637 - DNA, 100 bp, Homo sapiens
aacaatcttgaatcatgaagctactaaccagagccggctctttctcggaaatctgaaatagagtactatgctatgttggctaaaactggtgtccatcact

SEQ ID NO: 854638 - DNA, 98 bp, Homo sapiens
agcgcatgcaacagaagtatgaggccagccgggaggacatctacaagcgggaaattttctgtatcagcaaaaatccctgaaaccaaatggtgccagaa

SEQ ID NO: 854639 - DNA, 99 bp, Homo sapiens
ccgcccttcttcccctccgaaatgtaccacaatgaattctgaacttgactattatgaaaagtttgaagaagtccatgggattctaatgtataaagattt

SEQ ID NO: 854640 - DNA, 100 bp, Homo sapiens
ctcatccagcatctgaaggagcacctgctgcacggcaacatgaccagcagtgacatcctcctgtgctacaccacgcccaacctgcaaatcctgtaagtct

SEQ ID NO: 854641 - DNA, 100 bp, Homo sapiens
ctcacgcatcgtgcccctggagaacggagagattatgtttgagaccttcaacaccccggccatgtacgtggccatccaggccgtgctgtccctctacgcc

SEQ ID NO: 854642 - DNA, 99 bp, Homo sapiens
tgccttaaactccctaaaatctccgcagctctggttcctgttgcggccgagatctgaaactggacaatgtcctgttggaccacgagggtcactgtaaac

SEQ ID NO: 854643 - DNA, 100 bp, Homo sapiens
ctgaagattattgagcggctggaccacctggagaatgtcatcaagcagcacattcaaggaggctctgtcggtggtgagcgacgaccagtccctctttgac

SEQ ID NO: 854644 - DNA, 100 bp, Homo sapiens
gacatgaagctgttgaagaccctcctggatattcctgcaaacccaacaggggtcaaaccttggtcaaatatcatggaaatcctggaggaaaaagatggag

SEQ ID NO: 854645 - DNA, 98 bp, Homo sapiens
cccggcccagtgctccagagaaaggccggcctgcagcacccgccaccgtcgccggccgcccgcacgtccgtccggtttattacagaggtcagctggga

SEQ ID NO: 854646 - DNA, 100 bp, Homo sapiens
taatgctgtccgccaggccctgcaggacctgctttcggagtacatgggcaatgatttaagtcgtggaactgaacatttatttggctgatcctcatcatga

SEQ ID NO: 854647 - DNA, 100 bp, Homo sapiens
accctgagactcccctaaaggccagaaaggtagcaacacaagtcggaatagaatggaacctgtcccctgttggcagagttaccccaaaggaatggaggaa

SEQ ID NO: 854648 - DNA, 100 bp, Homo sapiens
tctgaaaggcactttattatgcaggtggtctgtgaagccacacagtgtccagatacgaggtttccagagtgtggattctttggcatgtatgacaaaattc

SEQ ID NO: 854649 - DNA, 100 bp, Homo sapiens
tcagtagcaccagtgtttatgtccctgctatgtggatatttggtagcaatgactgatgtggaaactacatatgcagattttattgcttcaggaagaacag

SEQ ID NO: 854650 - DNA, 98 bp, Homo sapiens
gagctcgatgtcaggcatcagatgactgaagacttcctggttgccacaccatttggaggttttgaaaaagcatcaagaatggttaaatttaaagttcc

SEQ ID NO: 854651 - DNA, 100 bp, Homo sapiens
gatgattatgaatgacaggcttactgaatatcctcttataattaatgcaataaaacgcttccatctttatccagaggtttcaagacaacagatgaattgt

SEQ ID NO: 854652 - DNA, 98 bp, Homo sapiens
gttgaaacacccacagactgccaagtgggacaactttctggcttttgaaaggctccttcttcagccccctctcccaacaactccgacacctgttccaa

SEQ ID NO: 854653 - DNA, 98 bp, Homo sapiens
acggttcttaccagtttgtccaagttactggagccctcctctcctcagatctcattcgtcggttcggatccaagccagttctgtggtcagcaaggctc

SEQ ID NO: 854654 - DNA, 98 bp, Homo sapiens
gggatttgagtgatgagcaaaactgtgatgagctcacagtgcctgcactttaccccagtagccctgaagtgtgggccccgtaccctctgtacccagcg

SEQ ID NO: 854655 - DNA, 102 bp, Homo sapiens
gaacaagaacttgaaaatgtaaagactcttaagacaaaattagagattcgtcagcgaactgcagctcaaagaaacctttctccaacaccagcaagccctaac

SEQ ID NO: 854656 - DNA, 98 bp, Homo sapiens
gcctgcctcagcctccaaagtagctgagactacagaatccaattctcagttttgaactacctatgaatttggcaaactggtttcctccaccaagaatg

SEQ ID NO: 854657 - DNA, 98 bp, Homo sapiens
tgattcaaaacatctatcgtaatccccaaaacagtgcacagacggctgacggctcacactatcctgtttgaccaaactcagagatcaattaaggcaca

SEQ ID NO: 854658 - DNA, 100 bp, Homo sapiens
aaggacagcttttgatttattaaatttaaatagattagtaactggcatagacaactatgggcaggaacaagatcactcaaggtgaaggataatctactaa

SEQ ID NO: 854659 - DNA, 100 bp, Homo sapiens
cctggactttgaccaagctggccaggtggcctcagcctccattcagaagatgggtgtgaacctgacacgcagcaacaaggagacggtgaagcacagcgac

SEQ ID NO: 854660 - DNA, 100 bp, Homo sapiens
gtgggaatcttgatatctagtttacatttagaaatgaaggatatccaacaggatgatggatgtctagaaaacacccctgacactgcagagttcagtcgag

SEQ ID NO: 854661 - DNA, 100 bp, Homo sapiens
tgagatggacctgggaactccaacatatgatgaaaaccccatgaagggctatggaacacacctgatgaatcatttgaaagaatatcacataaagcatgac

SEQ ID NO: 854662 - DNA, 98 bp, Homo sapiens
ccactctacagcgtggagttctccgaggagcccttcggggtgatcgtgcgccggcagctggacggccgcgtgctattatgtttgagaccttcaacacc

SEQ ID NO: 854663 - DNA, 99 bp, Homo sapiens
aactggtcgccatcaagaaagtattgcaggacaagagatttaaggtgtgttccagagaacaagccttcagacatttgctatattgacgctgagctgtca

SEQ ID NO: 854664 - DNA, 100 bp, Homo sapiens
gatagtactccttgtacctcctgcaacccagaaccctggctgaccactttgaaggaggatgctccagcaggtctcgatctagaagacggtcacgaagtag

SEQ ID NO: 854665 - DNA, 115 bp, Homo sapiens
aaggcattcagatgataatggacagaatcatctagaaggacaaatgaacttcaatgcagattctagccaacataaagtatttcactggccttgaatgtggacataagttttgtat

SEQ ID NO: 854666 - DNA, 99 bp, Homo sapiens
ctgaagaggcggcgctcagacagggtctccgtctctccaccgggggcttcatccttccagggaggagaagagggactccagaatggctgaggagaagaa

SEQ ID NO: 854667 - DNA, 100 bp, Homo sapiens
cccgcacctccccctgagcctgagcgccctaaggaggtcgagtttgatgcttccaagatcaaggattttaaactgtctacggttcttaacctcatctgtt

SEQ ID NO: 854668 - DNA, 99 bp, Homo sapiens
tcttttcagagacagttatcacatctgtgggagacgaagaaggcagaaggagccacgtgtgacgtttctccagatacttcatgctgttcacctgtgtcc

SEQ ID NO: 854669 - DNA, 98 bp, Homo sapiens
gggaacccaacaagatgctagagcatcgagaagttcgtgatagacaccacagtcttgtctctgctggatgaaccgaatcctaacagtccagccaatag

SEQ ID NO: 854670 - DNA, 100 bp, Homo sapiens
aaacagagaaagataggcggccatggtccaaccttgaagatagaatgagtccatttaagtcccaggacggtggaaactagctagtagattgcagccatgt

SEQ ID NO: 854671 - DNA, 100 bp, Homo sapiens
agccccactacatggtgctggaatatgtggatctgggcccagtgttcaccatcataccaggggccagaggcgatggcttgcctccatgagacccgaacac

SEQ ID NO: 854672 - DNA, 100 bp, Homo sapiens
ctacgggctttggagaaattgaggaaactgaggaaagaggctgcagcgaggaaagaattgcttcagattgctggaattagcccacatggtaatgctttag

SEQ ID NO: 854673 - DNA, 98 bp, Homo sapiens
ttcaaatggtacttggagaatgtctttcctgacttaagggctcccattgtgagagctagtggtgtggtgtggtatctgtgcgctttgaagaagatgaa

SEQ ID NO: 854674 - DNA, 110 bp, Homo sapiens
aaagccaggcgctacctccgagcggagtgcttccgggtagagaagaacctgctcatctttgggaatgggtaccacagaccatgtcatcgtcctggcgtccacgaaccgag

SEQ ID NO: 854675 - DNA, 100 bp, Homo sapiens
gcttggatggccacttacctgaatgaccacctagagccttggatccaggagaacggcggctggcgtgctcactgtgccatctgcacagaccgaatatggg

SEQ ID NO: 854676 - DNA, 147 bp, Homo sapiens
aaatgccaatacattctgatatattaaaagttattttggactacctctatactgatgaagctgtggtgataaaaggccttggacaagattcgctatgagagcctgacagacccttcgaagttggacagtggtaaagagctgaaaatt

SEQ ID NO: 854677 - DNA, 100 bp, Homo sapiens
ggtccattttctgaaccatctgaattctacaaagctgctgatcctattgtgaattttgtggcgaaaatctaagcaagcagaaatttactcgagcagtgaa

SEQ ID NO: 854678 - DNA, 100 bp, Homo sapiens
cgaaataccaccggaactggtcgaatgaggcacctaaaaattgtataccgcagattcagtggataaagcaacatttatggttggcagctatggacctcgg

SEQ ID NO: 854679 - DNA, 100 bp, Homo sapiens
aaagaacatcaagaatccctggacatgaacagtgctcgggactttattgattgtttcctgatcaaaatggaacagcttttcggagactgggaagcccaac

SEQ ID NO: 854680 - DNA, 99 bp, Homo sapiens
ttagatcccgccctggagctgggtcccaggaatgtgctgctgttcctgcaggacaaggattctcaaagttggattggtggaaacaatgaaccattgaca

SEQ ID NO: 854681 - DNA, 100 bp, Homo sapiens
atggaccccgatggtgtcatcgaggtaagaaacggttgtggatcttgaagctttggaaaggagaactctcttcagaggtcgaagacgacgagaagatgac

SEQ ID NO: 854682 - DNA, 100 bp, Homo sapiens
caagatgcggaggctgcctcggcggagcagaggaaccacacgctgatcatgagtgggaataaggtgtcaatcactactaccccatttgaaaacacatcaa

SEQ ID NO: 854683 - DNA, 98 bp, Homo sapiens
gccgaagacactgcgactccggagacagcccaaatatcctcggaagagcgctcccaggagaaacaatggacgtgactctggacccagacacggcctac

SEQ ID NO: 854684 - DNA, 121 bp, Homo sapiens
ggaaaagtaagcacagaaaatggagacgcacccagagaaagaggctcatcactgtcagcttgccacagctaccttggatggtaaactccagctctttctagctgagtaaccactgacctgt

SEQ ID NO: 854685 - DNA, 100 bp, Homo sapiens
cgcagcctggacgacatcgacctgtccgccctgcggcaaatgaaggacgcaatgactaccacccgatgttctttacccatgaccgagcctttgaagagct

SEQ ID NO: 854686 - DNA, 100 bp, Homo sapiens
gctcaagttcaactcttacatcagttaatagtagcaaatatgactggactggaaccatcaaacaaggctgcagaggaagaagttgcctatgaagaaaggg

SEQ ID NO: 854687 - DNA, 98 bp, Homo sapiens
gtggaaaggctctcagtgaaaaaggacagctttcctgcccgctttggaggagtccactttgtcaaccagccctggtacattcatgccctctacacact

SEQ ID NO: 854688 - DNA, 98 bp, Homo sapiens
acaacctcttgaggatcgaatcttcactcccgctgtctcagcagtctacagcacgttggtgacaaagttcctgctgatataaggttaacttccatcaa

SEQ ID NO: 854689 - DNA, 100 bp, Homo sapiens
ttatagcagatacaggagctggctatctagaagttggcagacagaactgcccaaaggcagagaaaaggtgttcttcagatgatgcagacgagaattgggg

SEQ ID NO: 854690 - DNA, 98 bp, Homo sapiens
gttttgtggtattcaatggagctctaaaaacatcttcaggatttcttgctaagtccagcatagttgaaggagaaaaggttctgcaggacgatgagttc

SEQ ID NO: 854691 - DNA, 99 bp, Homo sapiens
accagcgaggaggtccgcacacttgaggagttactgaagcccccagaagatgaggctgagcattacaaggatcttttgccagaaatgagggcatactgg

SEQ ID NO: 854692 - DNA, 100 bp, Homo sapiens
acaagtcctgcgcttggggatcctctgtacgcccgttcactggctgaagccgacgtagcttctctgaacagacgcatccagctggttgaggaagagttgg

SEQ ID NO: 854693 - DNA, 100 bp, Homo sapiens
ctctctgcaacaagactttcaccgccaaacagaactacgtcaagcacatgttcgtacacacagttgattcgatgtcatcagtcccgtggtggagcctgtg

SEQ ID NO: 854694 - DNA, 100 bp, Homo sapiens
gcctggactgttgcgggccccgggacctgggctgggaacccgcggtggagcgggacacgaacgtggctgctgatactttggctgtgaggcaaaaaaggag

SEQ ID NO: 854695 - DNA, 100 bp, Homo sapiens
tttggagaaaatctatcgtgaggttcagctgatgaagcttctgaaccatccacacatcataaagctttaccaggagttgtaagacgttcatcgccgtgtt

SEQ ID NO: 854696 - DNA, 100 bp, Homo sapiens
caggttccgcacggccgtcagggtggtcattgcaatattaaggagtctgcttcagattaagatgaagatgaagagtagaagtacatggaaccccactctt

SEQ ID NO: 854697 - DNA, 101 bp, Homo sapiens
gtcggcggcgcccggatgggcagctgaggagaggccattcccctggtactggccctgtttgcctttgttggcttcatgctgatccttgtggtcgtgccact

SEQ ID NO: 854698 - DNA, 100 bp, Homo sapiens
tacgggccttctggagatgcttccgaactgtgggcaaaaatggcgctttgacagatccaaatgcttctgctgcccagcaggctgttctccagcagcacat

SEQ ID NO: 854699 - DNA, 100 bp, Homo sapiens
cctccacttgtgcagaagggtgaatgccatgtcaactttgttcggaaggagcagatgttcaatgagctgctcacgtataatgcgcctcatcttatgcaag

SEQ ID NO: 854700 - DNA, 100 bp, Homo sapiens
tcctggacccagctgagcgggcggtcattcgcatcgcaggctttggtgttaagatgttgagtactgccaacatgaagagcagtcagtacattccgatgca

SEQ ID NO: 854701 - DNA, 98 bp, Homo sapiens
cctgccttagcttccaagaatgctgaggttacagcacccagaggcctccattcaggctgttttttcagatgcccaaatgcatatttgggcattagaag

SEQ ID NO: 854702 - DNA, 99 bp, Homo sapiens
gaaaatggggcggaagaaaatacaaatcacacgcataatggatgaaaggaaccgacaggtcagatgtaccaacagtaccagcaacaggccggctatggt

SEQ ID NO: 854703 - DNA, 100 bp, Homo sapiens
cgcggtcatgggcggctcagcctccagccagctggacgagggcaagtgcgcttacatccgaggtacctcaataataatgagttgacagcggtaccatccc

SEQ ID NO: 854704 - DNA, 98 bp, Homo sapiens
tcctgtccgactgtggtgtctttgctgagggtcacattgagctgcaggttgaatccggggtgcctttagatggctgagagctagcaaggaaaactcag

SEQ ID NO: 854705 - DNA, 100 bp, Homo sapiens
cactgtggtcactgttgagatctccgtcaacagccttggtcctctctctatcctagacatgggagaaaactggttgtcctggatgtttgaaaagttggtc

SEQ ID NO: 854706 - DNA, 99 bp, Homo sapiens
tggtccgcggcttctcggagcttgtactccaaagattcaggtttactcacgtcatccagcagagaatggaaagtcaaatttcctgaattgctatgtgtc

SEQ ID NO: 854707 - DNA, 99 bp, Homo sapiens
catcaggaaattttgattttactgagacaaagtacctgctacaaagtttgtagttcagaaccagaaaatgttcaggctgacccagagaattataccagc

SEQ ID NO: 854708 - DNA, 100 bp, Homo sapiens
tgcagaactttacatcaatgaacatgagttggtgacatcgtgaaagtcacaaggatgaatataaatggccagtgggaaggcgaagtgaacgggcgcaaag

SEQ ID NO: 854709 - DNA, 98 bp, Homo sapiens
actgggactgcaaggtggtttcctgtaaaaactgcagcatccagcgtggacttaagaaggatgagcaattcttaggttttggctcagatgaagaagtc

SEQ ID NO: 854710 - DNA, 98 bp, Homo sapiens
cttgaatcgctctctcccagatatccggcacccaaaacggcaaacttgatgtcaattctaactgtgttaatgaagagcaaccagaggctgaagtaggt

SEQ ID NO: 854711 - DNA, 98 bp, Homo sapiens
cagatgtggtggaatatgccaaggaaaaactggagagcttcatcaaaaatagtgatagctttgataagatatttggccttgacattaaaggcagagac

SEQ ID NO: 854712 - DNA, 98 bp, Homo sapiens
gccgccgccgccgccgccgcgccgagcggaggaggaggaggaggcgaggaggagagactatgaaggatttgggggcagagcacttggcaggtcatgaa

SEQ ID NO: 854713 - DNA, 98 bp, Homo sapiens
tgattaactcattcaaggttacccagttgtcaaggatgctatctaaatgggccttttaattcaaatctactgactatcccgaagcaaaggtcatcttc

SEQ ID NO: 854714 - DNA, 100 bp, Homo sapiens
aagtagacatggcgagcgactccccggctcgaagcctggatgaaatagatctctcggctctgagggatgaacgtgaagccagagaaaatgtgaagagaga

SEQ ID NO: 854715 - DNA, 100 bp, Homo sapiens
tgagaacatggaactgaaggtgggggattttgggctggcagcccggttggagcctccggagcagaggaagaaaccgagtgtgtcagcagccaggactttc

SEQ ID NO: 854716 - DNA, 98 bp, Homo sapiens
tggagcacttcctattccactggattgggaaagaccatggcagactgaggctgatgtgaatccaaaggcctatccccttgccgatgcccacctcacca

SEQ ID NO: 854717 - DNA, 100 bp, Homo sapiens
ccgtgcccaggagcttgacgccttagataacagccatcctattgaactctctgatgtaaaggatggagtaaatcaagcagcacctgcatttggatttggc

SEQ ID NO: 854718 - DNA, 98 bp, Homo sapiens
gctgaaggaaaacctccttatgctgatatacatccaatgaggttgtgcatgcctaaagggctatctttcaggacacaaacggacaataaagaccccca

SEQ ID NO: 854719 - DNA, 100 bp, Homo sapiens
cacacgcccactaaagcccagaagaatgtggctaccagcgaagaaggatgccctgcagtggtctcgccatccagctacagtggagggagaggagccagag

SEQ ID NO: 854720 - DNA, 98 bp, Homo sapiens
ctgtcgctgcccgtgtgattactgagactcagattgttaggaaaaaagcattgcctgacagcggtgaagatcgagatacaaaagaagctctaaaggag

SEQ ID NO: 854721 - DNA, 99 bp, Homo sapiens
tcaactgctgtattgcagaacagcctcagcctggttacacatcattttggaatgactgtatatcatctggattacgtggctgtatgttaattgaattag

SEQ ID NO: 854722 - DNA, 100 bp, Homo sapiens
agcaacttgagggataactaccgatttgcacatacgaatgttgagtctctggtgaacgagtatgatgataatggagagccaagaggcaacagcgaaaact

SEQ ID NO: 854723 - DNA, 100 bp, Homo sapiens
tatgatgccaacgtgtccttcaatgtttcccgggagctcttcttcatcaacatgtggcagaaggtgcacaggtttcatattccagaaggttggaaagttg

SEQ ID NO: 854724 - DNA, 98 bp, Homo sapiens
gtcctgtggctcagctctacagcttacctcctgaaggaagattttcagtcaatgacttatggatttaaaatggctaacagtgtgacagatcttcgagt

SEQ ID NO: 854725 - DNA, 98 bp, Homo sapiens
tacgagccggccctcatgttcagcatccccaggctggccatcgtgtgtttctccttggaccaagatgactgatggaaaactctccacctctacaaatg

SEQ ID NO: 854726 - DNA, 51 bp, Homo sapiens
ccggcggcggcggcgtgagccaccgcgcagataaaataccatgaggagttt

SEQ ID NO: 854727 - DNA, 100 bp, Homo sapiens
accagtgtaataccctgaatcccggttacacatcattttggaatgactgtatatcatctggattacgtggctgtatgttaattgaattagcattgagagg

SEQ ID NO: 854728 - DNA, 100 bp, Homo sapiens
cttccggggacgtagccgccacattccagttccgcacgcgctgggattcggagcttcagcgggaaggagggcgtctctggccgagcctctttttgtggaa

SEQ ID NO: 854729 - DNA, 98 bp, Homo sapiens
gttcaccgccaaccccttcgagcaagacgtggatgaggagcgggaaggcctcctgcaccctggagaccgtgtgggaagacaagcacaagtatgaggag

SEQ ID NO: 854730 - DNA, 99 bp, Homo sapiens
cgccacccgatggaagattcgatggacatggacatgagccccctgaggccccagaactatcttttcgggcttgaactgcatagacctaatctattgttg

SEQ ID NO: 854731 - DNA, 99 bp, Homo sapiens
cgattccttcactccagtgtgtggggcagatggcatcacctacctgtctgcctgctttgctggctgcaacagcacgggggacttgatctcatcttcatg

SEQ ID NO: 854732 - DNA, 100 bp, Homo sapiens
cttgaaagtgcctgccaaagccaagctcaccaaactgaagatgccttctcagtcagttgaggaaatttggtgagcggcctccacctaaacgacttactag

SEQ ID NO: 854733 - DNA, 98 bp, Homo sapiens
ccctggagggaccttctgccaccgccccagcctcatctccaggcttggctaagccccagatgcccccaggtcccgttcttgttatcagttggagaaaa

SEQ ID NO: 854734 - DNA, 98 bp, Homo sapiens
ccgtgcgcacccaggagaaggagcagatcaagaccctcaacaacaagtttgcctccttcatagacaagctattattcatggactatccagtctaacag

SEQ ID NO: 854735 - DNA, 100 bp, Homo sapiens
tgctgctggtggcccctttgcagtttttgtgtgtcctgggaccttgaaagcaattgtggactcaccatgtatatatgaagctgaacaaaaggcgggtgct

SEQ ID NO: 854736 - DNA, 100 bp, Homo sapiens
gcgcatatcctgggtagcctctaggaagcgctagacacatggctgatcccttatccaacatggttctaaccttcagtactaaagaagatgcagtttcctt

SEQ ID NO: 854737 - DNA, 100 bp, Homo sapiens
tgactatggcaaggatctctgtcactgagatgttaattattcatactgcatgactgaggattttggaggcagagagagattcatctgcaatatttggaac

SEQ ID NO: 854738 - DNA, 100 bp, Homo sapiens
tcaaccataaagacatcttaattgggcacgaaagaggttttcaaaattcacttctacagatcgtaattccagagaaaatccaaacaaatacaaatgacag

SEQ ID NO: 854739 - DNA, 99 bp, Homo sapiens
tactgttgaaagcgacaagtggaggcgccgctctagcggccgggactctgaactatggcgcttcgagagctgtgcccaggagtgaacaaccagccctac

SEQ ID NO: 854740 - DNA, 100 bp, Homo sapiens
tggaatctgatcctccacttcagagaacaggggcatgttatttgaaagcaattgagacgcaaccgaactttgcagtagcttggagtaatcttggctgtgt

SEQ ID NO: 854741 - DNA, 98 bp, Homo sapiens
tcctcccggcgcggcggcgccagcccgcgcggggaccgccaccgagcgaggtgtttttggggaaaaaaatcacaatctggacgtgagaaaggacatga

SEQ ID NO: 854742 - DNA, 100 bp, Homo sapiens
ttcagtgcagagtccttggctgggaggatcaatgatgcccatcacctcttcatgaccactgcctgccaggaggctaactacggtgccctcctccgggagc

SEQ ID NO: 854743 - DNA, 100 bp, Homo sapiens
tgttagatattgccttgaagctcttcaagactggtttgatgctattaacttcgtagacgaggtacaagaaaattccccaggacacagagctggtttggag

SEQ ID NO: 854744 - DNA, 100 bp, Homo sapiens
gcaagctgggcggcaccctggccaggaagcggagggcgcgcgaggatgacgtccggttgtttgccttcgtgcgcttcaccaccggggatgccatgagcaa

SEQ ID NO: 854745 - DNA, 100 bp, Homo sapiens
ttgctaaatgtagacaatggttagagaagaattttccaaatgaatttgcaaaacttactgtagacagatttgaccagttttgggccatcaatcggaaact

SEQ ID NO: 854746 - DNA, 98 bp, Homo sapiens
aggagagaatgctgacagtcctgcagattggccatctgcaagcttcccttctccgtggagagcaggaagacagtcatgggacctcagggagccaggag

SEQ ID NO: 854747 - DNA, 100 bp, Homo sapiens
tttaagtctggagcaggcactgagctgtctgtgcgcgtgaaagccctgtgtaaggaatgtgtagtagaacgttgtcgcatattgcgtctgaagaaccaac

SEQ ID NO: 854748 - DNA, 98 bp, Homo sapiens
cagccccgagcgggacagcgcggcggggagcgacgagtcgtgatgtctcgggagtcggatgttgaggctcagcagtctcatggcagcagtgcctgttc

SEQ ID NO: 854749 - DNA, 99 bp, Homo sapiens
ttttggctgctgcaggagccattttaggtggaatatgtgatcaagtgtgacatgtcagctctgcagaagattctgtatcgccatatgcaagccaagggg

SEQ ID NO: 854750 - DNA, 100 bp, Homo sapiens
atgcagaaacgtaaagaaatgcaattgagatccagctccaggtcccacaggggctcttcttccccacgaaaaagatcttattcaagttcatcatcttctc

SEQ ID NO: 854751 - DNA, 98 bp, Homo sapiens
aacgtgttggaccttccggagcttctcagaagacagagggttttcttttgagtgcacctggtggacatatggaatgtcatagaagcattgcgggaaaa

SEQ ID NO: 854752 - DNA, 100 bp, Homo sapiens
ccgataacgtcgtgtcgaccacaggacaaccctccatatgataagggagccttcagaatcgaaatcaactttccagcagagtacccattcaaaccaccga

SEQ ID NO: 854753 - DNA, 147 bp, Homo sapiens
gtttttgaccagaaaaccgacaaccttcccagaaagtccaagctcgtggtgggtggaaaagtgttcgccgaggacggggacaagttctggcggatgcccgagtgctacatccgcggcagcaccatcaagtacctgcgcatccccgac

SEQ ID NO: 854754 - DNA, 99 bp, Homo sapiens
catcatgttgctttccactgacaggacagaactcagcgacatgtcctcacctacatggaggatgcagtgtgccagctgctagaaaacagggaagatatt

SEQ ID NO: 854755 - DNA, 98 bp, Homo sapiens
accagtgctaccatgggccaactgtatgagctgctgcagaagaatattttgcctgctggaacctgctgtatctactcaagagtggaagttttcacagg

SEQ ID NO: 854756 - DNA, 108 bp, Homo sapiens
tggtactcagcaagctcgagttaaagttggatgtgctggaacaggtggccagcatcgaaatgttcagccttttagtgatgaagatgcatcaattgaaacaatgagcca

SEQ ID NO: 854757 - DNA, 98 bp, Homo sapiens
ggcctcaaaagttttgcattgaaaaagttggcaaagacacttggttaccaagaagccatacatgtacaagtacagaaagctcttctcaggatgttgaa

SEQ ID NO: 854758 - DNA, 98 bp, Homo sapiens
gggagccacggtgccaggaccatctacaagagccaaatcaagattgcgtttctcaaagtcctacagtcccaagagtactatgatccctattttcaaga

SEQ ID NO: 854759 - DNA, 98 bp, Homo sapiens
gacaatccaaaacaaacgctattcctctcaccctaccaggacatcctcggaaagtatttattctaggccaggctccagtattcctggctcaccaggtc

SEQ ID NO: 854760 - DNA, 99 bp, Homo sapiens
ctacccaatgcagtacccaccaccttacccagcccagcccatgggcccaccggcctaccacgagaccctggctgagcatcctggccagaacaagccaag

SEQ ID NO: 854761 - DNA, 100 bp, Homo sapiens
ctattaaaaacgtatacctgaagctttggggccatttggatcacacgatgttttttcaagattttagaccctttctaagtagcagtccactggaccaaga

SEQ ID NO: 854762 - DNA, 98 bp, Homo sapiens
agagagtcgtaaacatcctgtggactacacaccgtttaacaagatgcaacagtattctggcattcctctgaatattgatttgctgaatagcccagact

SEQ ID NO: 854763 - DNA, 98 bp, Homo sapiens
atcggagtcagctaccagtacgcccttgacctccagacgcagcacaatcactttgccatgaactccatggttgtgtgtgtcccgctgtggattctcat

SEQ ID NO: 854764 - DNA, 100 bp, Homo sapiens
cattcagctgtctcaaatgcagaaactggcgatggaatatgagaggagccctctggaaagaaaaggacagaccctgtgctttcatgaaagtgaagatctg

SEQ ID NO: 854765 - DNA, 100 bp, Homo sapiens
gagcagaagggaggctccaagacctcatcaacaattaagggttgccacaccatttggaggttttgaaaaagcatcaagaatggttaaatttaaagttcca

SEQ ID NO: 854766 - DNA, 100 bp, Homo sapiens
gcctcccaaaatgttgggattacaggtagaagaatacatgttcacttccagtgaacaagagcatgttcccaaactcaattttgggtcgcccacccttcac

SEQ ID NO: 854767 - DNA, 98 bp, Homo sapiens
tctgcaggtggatcagaactgtgttcgcaattcttacgatgtcttctctttgctacggtttcactgaagaaacttcttagagattcattgcacttctg

SEQ ID NO: 854768 - DNA, 99 bp, Homo sapiens
cccgacgtgtactgctccaagtacaacgaagccaccggcgtgtgccccgacggcgacgaccatggcaatgacaggctcaacaccttgctcatccatgag

SEQ ID NO: 854769 - DNA, 100 bp, Homo sapiens
gcatgctcacccgcctctacaacatcaagaagatgttcctcctgctgatcaagagaagctttttatccagaagttacgtcagtgttgcgtcctctttgac

SEQ ID NO: 854770 - DNA, 98 bp, Homo sapiens
acatgtctgtacctactgatggtgctgtaaccacctcacagattccagcttcggaacaagagaccctggtagttggcaaaaaaggagaaagccactaa

SEQ ID NO: 854771 - DNA, 99 bp, Homo sapiens
aacccttccagctcgatctgctcttcgtctgcttcttcctcttcagtcaaggtacaaagaggatggtgaagctttgctaattttgctaccctcagaaaa

SEQ ID NO: 854772 - DNA, 99 bp, Homo sapiens
gggagtcccactggtctagaacccggctctgagggcactggcctagttcccgacttgtttctcagatgaacaagttgttatgggcaataagctccttgt

SEQ ID NO: 854773 - DNA, 74 bp, Homo sapiens
ttcagtctataataaagagatgttgagaaagatcagtctaaagaaaaggagaagaaagtgaaaaaaacaattcc

SEQ ID NO: 854774 - DNA, 100 bp, Homo sapiens
gaagtgtttcagggggtcgaggtcgtggtggaccacgtggtggcaaatcctccatcagttctgggattgcttggcattttgtacagaaccagtttttgcc

SEQ ID NO: 854775 - DNA, 99 bp, Homo sapiens
gatttgtttgtttctgccagtgaaaaccaccaaaacaatccagctgttccctcagggtctcactctgtcactcaggctgaagtgcagtggcgtgattgt

SEQ ID NO: 854776 - DNA, 100 bp, Homo sapiens
atacgcagcccgtccccaagctgggacctgcagagaaacgcctcctgattttgtcttacaatggaacttaaaaagtcgcctgacggtggatggggctggg

SEQ ID NO: 854777 - DNA, 100 bp, Homo sapiens
ctctgctgctgttgcacactgggttgcagcctatggcctgttatttgtctcaacaaaagaggttacacatcattttggaatgactgtatatcatctggat

SEQ ID NO: 854778 - DNA, 100 bp, Homo sapiens
tcccctgggccccctgggcagcctggctacacaacgcatcagagcagagtgacgatgatcctgtttgtcctggagctggagtgggtgctgagcacaggac

SEQ ID NO: 854779 - DNA, 100 bp, Homo sapiens
aagaggcttgtctgggaaatatcaaacatcatcaaaattgttccagaactgcagtgaactctttaaaacacagattctagcctaaaagaccaaacaaacc

SEQ ID NO: 854780 - DNA, 100 bp, Homo sapiens
catccctttccgtgggaaattctacaagtggaaaacgtaccggggagtctcccgggacctgcccgttatgatctggatctatggaggcgccttcctcatg

SEQ ID NO: 854781 - DNA, 100 bp, Homo sapiens
ccagcataggtgctgggttcatttaccctttggtcggaacggatgtttctgcattgaatagccctggaagacagaattcttgtctctccaaagatctggc

SEQ ID NO: 854782 - DNA, 110 bp, Homo sapiens
tgggatattaaatatacgacacatccaggagtttattggagcgcagactgatggcgcaaaggaggtgctatctccagttccttgcactcctgttaacaagcacctcagcg

SEQ ID NO: 854783 - DNA, 100 bp, Homo sapiens
gcacatttgacttggaagcaatgtttgaacaaactcgaagaacagctgtggaaagaagttgcaaaacactgggattcactccttctccagttgcacagcc

SEQ ID NO: 854784 - DNA, 100 bp, Homo sapiens
ttaggcagcttacaactcacaagtgcatgggagattcctgcatcttttgcgctctcaaggttaatgttcgtgaagaaattgaagagttttttccaagaat

SEQ ID NO: 854785 - DNA, 99 bp, Homo sapiens
agaagtccagagctgaggactgcctgtttgcaggtctatgctccatcagcaagcactgccgactacaatagggactcgccaggctatccttcctccaaa

SEQ ID NO: 854786 - DNA, 50 bp, Homo sapiens
ttctggcccagggcatactggatgcagggcctctgattcgcgccggcccg

SEQ ID NO: 854787 - DNA, 99 bp, Homo sapiens
ccagtcgcctcacctctcctatcgtctccacccacctggacactcgtaatgtggcctttgagagcgcctgcctccagcaccctgaagatgctgtgtgat

SEQ ID NO: 854788 - DNA, 100 bp, Homo sapiens
tctacaccctgttaatgttgatattttgacctccttccatgaatcacaaatgttcttaatggcatctagaatgcaggagcattggtttgaaaaggcccta

SEQ ID NO: 854789 - DNA, 100 bp, Homo sapiens
gtgaagtcagtgcctcagttgctgcatgttggcagataaattgaacatgactccagaagaagctgaaaggtggattgtaaatttgattagaaatgcaaga

SEQ ID NO: 854790 - DNA, 100 bp, Homo sapiens
acatctccatggagatcccccaagaatttcagaagactgtatccaccatgtactacctctggatgttgtcccgagcaagagaagcagtcctggatgccca

SEQ ID NO: 854791 - DNA, 100 bp, Homo sapiens
agtaacgcaggaacagaaaaccaaacaccacatgttgtctcttagaagtgggagctgaacggatttttttcccaggaagccatcccgtcagaggggttca

SEQ ID NO: 854792 - DNA, 99 bp, Homo sapiens
ccccgtgccccgaagacataaatccctgagtgcccgggaggagccttaacaagcgcacggagccctcaaggctgtattcatcaccaaagaaaaaactta

SEQ ID NO: 854793 - DNA, 98 bp, Homo sapiens
acgagggccggttgccgggcgcgggcgagaaagtgatgtcttggcattgcccattttcaagcaggaagattccagccttccattggatggtgaaacag

SEQ ID NO: 854794 - DNA, 100 bp, Homo sapiens
tattattgtagatctagaagtcactttggaagaagtatatgcaggaaattttgtggaaaaattgtatgctgctatgcatgaacctgatggagtggccgga

SEQ ID NO: 854795 - DNA, 98 bp, Homo sapiens
gcgccacaacgtccgactgcactcacacgacgtgcgctatgggtcagtggttgaaggcctttcactgttggacttgggagtatctccgtattctggag

SEQ ID NO: 854796 - DNA, 100 bp, Homo sapiens
tgaagcagacgccatgactcaggacgcccagaatgccttgagaagaggagctctttgttcaatgcctagccacctattcctacagacacggcagtggaaa

SEQ ID NO: 854797 - DNA, 98 bp, Homo sapiens
cgaatcagacaagacagccgtgctcaccttaataagagaagaggtcaaagcatgaagaaattgatctggtcagtttagaggagttttataaggaggct

SEQ ID NO: 854798 - DNA, 98 bp, Homo sapiens
tggtctccggggccgctggattctgaggaccagcagatggccagtcacgagaacccagaaggtagaagatagcaccatgccgattcgtcgaactgtga

SEQ ID NO: 854799 - DNA, 100 bp, Homo sapiens
ctcactgcggcctcaaactcctgggctcaagtgatcctcctgcctcagcctcccgagtacctgagattagcccagcagggcactgtggcatttgaagatg

SEQ ID NO: 854800 - DNA, 100 bp, Homo sapiens
tgtgaaacagagaaagataggcggccatggtccaaccttgaaggttatcaatagtctggctgtctatcgtcatcgtgagactgactttggtgtaggagtt

SEQ ID NO: 854801 - DNA, 100 bp, Homo sapiens
atcctcatgaacccagagggccggaaggaaagccaagaactcatagtgcagacagatgaagacccttcaagtggaaataaagagattatttcgcatatta

SEQ ID NO: 854802 - DNA, 114 bp, Homo sapiens
cacaaagatctattaagattgtcacatcttaaaccttccagtgaagttggtacgccttattacatgtctccagagagaatacatgaaaatggatacaacttcaaatctgacatc

SEQ ID NO: 854803 - DNA, 100 bp, Homo sapiens
cccggtgcactttgtcttccatgacaccaagttggatgccatgctggaggagttcaagaaggaaaggcctaaagaatgtatttgacgaagcaatattggc

SEQ ID NO: 854804 - DNA, 98 bp, Homo sapiens
ttcactctctccagcaacatcatcatggacacctccaccttcctgctcaggttcaggagtccttgcaggctatggggagtagtgctgatagttgtgac

SEQ ID NO: 854805 - DNA, 100 bp, Homo sapiens
ggaacttgtgattgagcagtttgaagacttgctagttaggattttattactggcagcatgtatatcttttaacagctttgctgagccatcaaggtctaat

SEQ ID NO: 854806 - DNA, 98 bp, Homo sapiens
tttgcctcaagacccagctattgttcagatgagatcaactggcctgagaaggatgaggcacccccacctgatgcccaggatctgattaccttactcct

SEQ ID NO: 854807 - DNA, 100 bp, Homo sapiens
aacatctctcaaggccaaggtgctggagaccttcctggccaagtccagacctgagctcctggagttggacagtttgcggttgtgaagaaatgccgtgaga

SEQ ID NO: 854808 - DNA, 98 bp, Homo sapiens
cacaatgctgctggcagcgagtaaagtcttggacagacttaaaccagttataggggtaaacactgatccagaacggtgccagagtgggtcatcgctcc

SEQ ID NO: 854809 - DNA, 100 bp, Homo sapiens
ggaatttgtcaaaaacctgctgccaaagtctataggaacagtacgtatttggcattcaagcacctaccggcttgagagcacactgaattatggaatggag

SEQ ID NO: 854810 - DNA, 100 bp, Homo sapiens
atttgaacttgtccccatgcgtttttacttggtaccgtacattttctcagttggcatttgatggagaaaaactcaggagtgtacctcacagccttctagg

SEQ ID NO: 854811 - DNA, 100 bp, Homo sapiens
tcccggctcccagcccactgagtggcttcagcctcgctgaggcggggtttcaccatgttgcccagactggtcttgaactcctgagcttaagcaatccacc

SEQ ID NO: 854812 - DNA, 99 bp, Homo sapiens
aacgagcagctcatcacccagtacgagcgggagaaggcgctgcgcaagcacgctgaggaggacaggaagatgtcacccaagcgcatagctaaaagaagg

SEQ ID NO: 854813 - DNA, 100 bp, Homo sapiens
gcccaatgtagagtacaaatgcaggttgtacagcagttagagctacagagacactttttcagaaatcttggatctatactggcctatgccttcttgggga

SEQ ID NO: 854814 - DNA, 99 bp, Homo sapiens
ttattacaaacagttgccaatttggacactctagtagctgtaatagaatgccagcaaccagaagcagacttatacaggacgtggccgctttggagagtc

SEQ ID NO: 854815 - DNA, 100 bp, Homo sapiens
agatggcaagaactgccatttgcaacctaatcttgggaccgtgtttcttcgcctcgcctccctggtggtcctgctcttctctctctggaatcagatcact

SEQ ID NO: 854816 - DNA, 98 bp, Homo sapiens
gtcctggatgggctccacaatgaactacaaaccattggcttccagtaaaggcatgacttcctggcaccacagggaaaatcgggtgcaagcccagaaac

SEQ ID NO: 854817 - DNA, 60 bp, Homo sapiens
tggtcctcgatccgcccacagacctcaaattcaaagggatatctgcattacctccacctc

SEQ ID NO: 854818 - DNA, 98 bp, Homo sapiens
agagcaaagataagaagagaaaaagagaagaagatgaagaaaccagcttgatatgttgctctttcagtctcacatggcaacgaaaacaacttgtatgt

SEQ ID NO: 854819 - DNA, 100 bp, Homo sapiens
tttaaaagaaaaagaaaacagattattattgcaacaaagcaccagcgagcccatgacgacccagtggccctaaagtacaccttccatgaggtgattaccg

SEQ ID NO: 854820 - DNA, 100 bp, Homo sapiens
cgaacattatgatgacagctcggcaagaagtgaccagatgttaaaacaagtggctggggcccagaagacacctgctttgagtttggtgtttttcctgcca

SEQ ID NO: 854821 - DNA, 100 bp, Homo sapiens
tcaaggacatcaggacaccgggagtgggagagattggactgggagactcagcaggattgcagtaacggatgctccgcagagtgtaccggagaaggaggat

SEQ ID NO: 854822 - DNA, 100 bp, Homo sapiens
gcgggccctgcgcgcctgatgggtcgaggcggacgcgcggctgcgtcaggacaaagcaggacctcataaggaaatctacccctatgtcatccaggaactt

SEQ ID NO: 854823 - DNA, 100 bp, Homo sapiens
ggctggtgcgggctcggccgtcttctgggtgctgggtgacagcgggaaggtgaccacagtcgtagccactctaggccaaggcccagagcgctcccaagaa

SEQ ID NO: 854824 - DNA, 100 bp, Homo sapiens
cccaaccacagttcctgtccccagatgtcctgatgcccaccatggcaggggagcccaatagactcccagctgtccctttccccccaacacatcgcttgac

SEQ ID NO: 854825 - DNA, 100 bp, Homo sapiens
tgcagatgaggaaattgagactttgacaagtcaaagagcacagctggaatgcaagtcaaaactgataaatttcaaacggaagagagtggcagcatttaga

SEQ ID NO: 854826 - DNA, 122 bp, Homo sapiens
agggagcgtcatcatcagcctcaaacctgcactttatcccagtgtttccaactgtacaccaaagaggagcgggtcttagtggtgcaatggctagtataagcgtgcgttcgagtaccccaggc

SEQ ID NO: 854827 - DNA, 100 bp, Homo sapiens
cttggatcttttcatgaactcctgctggagccacccaagaatttaattgtcctgaatccactcacagtaactgaggaggaaatacgaccatcactagaga

SEQ ID NO: 854828 - DNA, 99 bp, Homo sapiens
agtcctttggtgacaccaagtttgttcccaacttgcccaaggtttcccaggcagctgcagacttgaaacagttctgtctgcagaatgctcaacatgacc

SEQ ID NO: 854829 - DNA, 113 bp, Homo sapiens
ggtctaggcggagaaccgcctgggcgatgagtgagaacctcgacaacgaggccttctggcggccgcccctggtttctcctggggggtgatgagcgggagcggctctgggccga

SEQ ID NO: 854830 - DNA, 100 bp, Homo sapiens
ttaatgttgataactcagtaacagcaaaagtcagaaaagtggcaacagcaccacctgctccagcatataaaggtatgtgacgcattcccagactcttcag

SEQ ID NO: 854831 - DNA, 98 bp, Homo sapiens
tctatttattgtactgtgaataatgatgaaggagagtggagtggcccaccacctgaatgcagagcagagtgacaaagacctcgatgatgccttggata

SEQ ID NO: 854832 - DNA, 100 bp, Homo sapiens
cggctactacttaataatgacaatctcctcagggaaggggcagcacaccaggtgattggtgaaaacactaaacaaccctgagcccagggccaacccctac

SEQ ID NO: 854833 - DNA, 98 bp, Homo sapiens
aggaatgactcatcttgaagcccagaataagattaagggttgtacaggctctttgaatatgactctgcaaagaagtgtcattgttgcagcaaaaaagt

SEQ ID NO: 854834 - DNA, 99 bp, Homo sapiens
ttccagactcggtgctgtacccgcctgtcacatttgaagacgagcactgaggatgaggaaccaactgaagaatatgaaaatgttggaaatgcagcatct

SEQ ID NO: 854835 - DNA, 100 bp, Homo sapiens
ttcatgaaggccggcagcatcaatgtctggaacatctgtcccctgttcaaagaccaacacaggcatccgtaagaacttggagcaggagatcatccagtac

SEQ ID NO: 854836 - DNA, 100 bp, Homo sapiens
ccccgtggcgcggcggcggggaggcgagttacatggacacagaacagtatgaagaagcagtacgagactatgaaaaagtataccagacagagaaaacaaa

SEQ ID NO: 854837 - DNA, 99 bp, Homo sapiens
caaagattacctattaccagaacacactgacaccaaatttgtatcctactgtggggcttcaaacaccaggagaagtggtcgatgccaattttgggcaac

SEQ ID NO: 854838 - DNA, 100 bp, Homo sapiens
tcgcagacctcgaaatgatagacggtcaaaatgcagatcttcgtgaaaacccttaccggcaagaccatcacccttgaggtggagcccagtgacaccatcg

SEQ ID NO: 854839 - DNA, 99 bp, Homo sapiens
tgagcttcaacaagaacctgaggacttgccggagcagccttacttgcagcctccactcagcatcttggtgattgagcgccgggcctttggccacacagt

SEQ ID NO: 854840 - DNA, 100 bp, Homo sapiens
gtggcatctgtgacaacttgcttaacagtaaatgtcctgagggaacaaaacccatgctgatatttgctggcgatgatttcgatgtaacagaagattatag

SEQ ID NO: 854841 - DNA, 100 bp, Homo sapiens
gacaacaccgagtatgagaagctaaaggttggtcttcaggttgtggcagtcaaggctccagggtttggtgacaatagaaagaaccagcttaaagatatgg

SEQ ID NO: 854842 - DNA, 100 bp, Homo sapiens
cactttaaccccaaaattgagtcctacgctgctgtgaatcacatatcccaactgtcagaggagcagtgctatatcggaaaggccctccattttaccatgc

SEQ ID NO: 854843 - DNA, 98 bp, Homo sapiens
gcaagcaaacgtgaaaaatggattaaggctgatgccccaaaaggcactagaatggatcttggagaatgtctgaaagtccatgacctggctttaagagc

SEQ ID NO: 854844 - DNA, 100 bp, Homo sapiens
gcattctctgaaaaccttgatcctgagaataacaagcctttgtattcatttgaagataatgcagactatgtttatgatgttatgtggtcacctacccacc

SEQ ID NO: 854845 - DNA, 100 bp, Homo sapiens
gccctgggactgtgataacggagcactatggacccaccaacatccgcatccgatgccatttaggaaggacctgtttatctctgatttctggagttcagca

SEQ ID NO: 854846 - DNA, 100 bp, Homo sapiens
ttaactgcctccattacactgctgagtcacacacaacgcttgttatgttttcatcacttctctccagaaggaaaaccagtagattcccagacatcgcgaa

SEQ ID NO: 854847 - DNA, 100 bp, Homo sapiens
tatcccagcgaagcatgcaaactgaacagttcgagattgtcgtcatcctagaaggcattgtggaaacaactgaccattcctcaagaattttgtatccaag

SEQ ID NO: 854848 - DNA, 98 bp, Homo sapiens
aacacctgatgtgacacagaactcagagccaagggctgaaccaactcagaatgcattgccattttcacataggaagaaggtagataatgactataatg

SEQ ID NO: 854849 - DNA, 99 bp, Homo sapiens
tgaagaagtggctgtagggagcatagctgctacactgaagatgaagcaaggcccaatgacccaggcggtggtttgtgatgaaaatggttccaagggcta

SEQ ID NO: 854850 - DNA, 100 bp, Homo sapiens
aacttatggctacaaagagggcaaaccgtgcattattataaagctcaaccgagttctaggcttcaaacctaagtccagaacacatattacataatggagc

SEQ ID NO: 854851 - DNA, 100 bp, Homo sapiens
ctcgcctcgactccaaatggttgaaaacagatatacagtttgcttgcctaaactggacttgaagcaatttaaactactggagatctgccattttataata

SEQ ID NO: 854852 - DNA, 100 bp, Homo sapiens
ctgctggccaaatttgaagagaatgcgcccgcacagtccatcggcatacggagacagtattttaaccacatcagcatcgaggactcgcgggtctacgagc

SEQ ID NO: 854853 - DNA, 98 bp, Homo sapiens
ggaagcgattaatgataaaatttcatggagaagaaggccttgactacggaggggttgccagctgcagccgaagccatatggtgtcaccagtgcacggg

SEQ ID NO: 854854 - DNA, 100 bp, Homo sapiens
ccggacccgacagcaggaagagatgctggggcttcaagcccgcaccaactatgagaaagccatctcccagggccaccaggccttcttattggagggggac

SEQ ID NO: 854855 - DNA, 100 bp, Homo sapiens
ttgaaattatgattgacagacttgaaaaagccagttctaatcagccagcaaccccaacacgcacaatagcagcaaccccaattcagacacttccacagag

SEQ ID NO: 854856 - DNA, 121 bp, Homo sapiens
ggaactctgagtatgtgaccgaaccgatccaggcctacatcatcccatcgggagatgctcatcagatcccgcccaatgacccccgcatcaagaaccaagccgactgcatcccgttcttccg

SEQ ID NO: 854857 - DNA, 100 bp, Homo sapiens
tcctccgcctggtgggtccctccctgctgcgggacagcagctgtaacagatcaactcctagcaatcatgatcggatacagcgtctgaggcaagaatttca

SEQ ID NO: 854858 - DNA, 100 bp, Homo sapiens
atgcaagatgtggcagaagaacaagaagttgagaccgagaatgtggaaacaggtgggctcttaggatcccccaggaccccatcgacgatgccatgggtgg

SEQ ID NO: 854859 - DNA, 100 bp, Homo sapiens
cagggaagtgcctagtcaagtacgcaggccacgtgggctcagattattcactgaccagcgctgacctgtcagcccttcaaggcttcaactcgccaggaat

SEQ ID NO: 854860 - DNA, 100 bp, Homo sapiens
tgggacggcagccctcagtgcctgccatggactggagttgatccccctcatattgtgtacagcatgtctacatcctgagcctaaagagcgagatcagctt

SEQ ID NO: 854861 - DNA, 100 bp, Homo sapiens
ggctctcggctgcagcgctggggagaactaatgccgacgtgatgaccgccctgtcccagggctacaggatgccccgtgtggagaactgcccagatgagct

SEQ ID NO: 854862 - DNA, 99 bp, Homo sapiens
aagaatttggtccaggtgtaccagcagaaactgatattacagaaacaagcgaatggaagttggatacactttgtgacttgtacgagacactgaccatta

SEQ ID NO: 854863 - DNA, 100 bp, Homo sapiens
ggagtcagggatggctcttcctcagaggcggggtttcaccatgttgcccagactggtcttgaactcctgagcttaagcaatccacctgcctcggcctccc

SEQ ID NO: 854864 - DNA, 99 bp, Homo sapiens
tatccagcacctgcggccagatagccagttacccgctggccctggtccggacccgcatgcaggcacaagcttcatggcggctgaagagatgcattggcc

SEQ ID NO: 854865 - DNA, 100 bp, Homo sapiens
gaccagcgtggttcctttcgtgctggcgccgcgacctccggatgacccgggcttcggcccccaccagagactcggtgcgagaagatgtactaaattcatt

SEQ ID NO: 854866 - DNA, 100 bp, Homo sapiens
ctggcacttgtcctcctgtttctatagaaactgggttggaagtcagagctgcacaaagggaaaggcggtttgctgtgtttcaaagaagggtgctgaccac

SEQ ID NO: 854867 - DNA, 100 bp, Homo sapiens
tatggacccttctacctggaatactctcttcttgcagaattatgttgatggcatggacctgggcaaaaaggtcagcatccccagagacatcatgttggaa

SEQ ID NO: 854868 - DNA, 98 bp, Homo sapiens
gaatgccgacagttgttaatgtcaccatcctcaacggcatgggagtcacaggaagaattgtagataaggatagtgacaacctctggtgggacgccttt

SEQ ID NO: 854869 - DNA, 100 bp, Homo sapiens
aagaaaatgagacagaagcagtgaccgtgcccacgccaagcaacacagtcactcctggcggcaaaccaaacaaaaccagagtcatctggggaaaagtaac

SEQ ID NO: 854870 - DNA, 100 bp, Homo sapiens
acctgggcctcagtgtcttctccatgctctgctgcttctggcctctgggcatcgcagccttctacttgtcccatgagataacggaggagatgatggatca

SEQ ID NO: 854871 - DNA, 100 bp, Homo sapiens
agcaggtttaaaattttacataagaagttacctttttcagaagagcttaaagcagcgcctgggtaagagtaacatccaggcacggttaggccgacccata

SEQ ID NO: 854872 - DNA, 100 bp, Homo sapiens
tggtgggttcttggtctcactgagttctagaatgaagctgcagaccctcgcagtgagtgttacagctcttaagagtgatcagcagctggactgtgccttg

SEQ ID NO: 854873 - DNA, 98 bp, Homo sapiens
acaaaatgggtaaatgcacaattttctaagggttgcaatattatctcatatctttggggctgcttagatttcttttttcaatgcttcattgttgcgga

SEQ ID NO: 854874 - DNA, 100 bp, Homo sapiens
gtgcactgacagtgcttatgaaggacgcaatcaagcccaatctcatgcagacactggaggacagtgacttgttaccaccgcaacagcagagcctgccatc

SEQ ID NO: 854875 - DNA, 100 bp, Homo sapiens
ggtacatcggggatttctggctctttcctcttcgccttaaattcgagcatacctgaagagagatacaagatgaagagcaagcccctaggaatctgcctga

SEQ ID NO: 854876 - DNA, 100 bp, Homo sapiens
cagagttctggtttaccatcttcagaaatgtggacatgctgagtgaattagtccaggctgaagccgacgtagcttctctgaacagacgcatccagctggt

SEQ ID NO: 854877 - DNA, 99 bp, Homo sapiens
ttttaggagttcagatgtttggaacatttacttatcactgtgttgtaaatgacacaaagccagggattatcgagattgcagcctgtcactccacacaca

SEQ ID NO: 854878 - DNA, 100 bp, Homo sapiens
gcgcaggaggcggtggagcgcagagcgggcgagcgcgggaaacagtgcttcttagtcctacgtcagcagcagtttaatgtccaggctcttgtggcggtgg

SEQ ID NO: 854879 - DNA, 100 bp, Homo sapiens
tgcccttctttgagccagtgtttggagaaggaggaatatttggtccctggtcagtttctgctttgagctccacctcagatcaggcgtcccaatcgagaag

SEQ ID NO: 854880 - DNA, 98 bp, Homo sapiens
aagtgaaccggcaaatgctgcaggaactggtgaacgcaggatgcgaccaggttgcccgaagctcagcagagagtcggaggctgctttttaaacctgat

SEQ ID NO: 854881 - DNA, 98 bp, Homo sapiens
ttcacttactgcaggattttcagcttcagcaagcagcttaatgatgctgaaaataagtataagattttggaaaaagagttccaacagttcaaggacca

SEQ ID NO: 854882 - DNA, 100 bp, Homo sapiens
ttttctctttagggtgaagtttgaaagcatcatgcccagattatcagtggatttttgaaagagccaaatggagaagggtatatttaatgagcgaacaggt

SEQ ID NO: 854883 - DNA, 100 bp, Homo sapiens
aatgctgtcctcgctgttggcgcctgatcaaccccgtataaccaaagatgtaatttgttttcatgctgaagatttcttagaagtagttcaacgaatgcag

SEQ ID NO: 854884 - DNA, 98 bp, Homo sapiens
ctttttgagcggtcccgcatcaaggctctggcagggaagtcgagacaacatgagtgtgattttgatctgttttccaaatgcacccaaagtatcgccag

SEQ ID NO: 854885 - DNA, 100 bp, Homo sapiens
tccctgaaactgtgtaattttgaggatccttctggtcttaaagccaatttagaagcaattctgtggtgttcttggtcacacatttatggagtttctgaag

SEQ ID NO: 854886 - DNA, 100 bp, Homo sapiens
tgttagaatctgggactttcttcgttgccatgaggaaagaattctccgagatgatgtctttctacctaaagatattgacctagacagtgtggatatggat

SEQ ID NO: 854887 - DNA, 100 bp, Homo sapiens
ccaattgcagctcctgaaccggaactcaaaacagacccatctttggatcttcattcattaagcagtgcagaaacacagggattgttcccagaaagggaga

SEQ ID NO: 854888 - DNA, 98 bp, Homo sapiens
gcctccttgtggtcctgctcgttggaggctgtgcagcagaaggcctcccagaagttcctgccgaatcgtcttcgtcacccccggggtccgaggtagcc

SEQ ID NO: 854889 - DNA, 99 bp, Homo sapiens
ttcaatgcagattctagccaacataaaggagttgtatcccgcattttgtattcacaacggaggctccgaccttgagcggctccccacagccagcacctg

SEQ ID NO: 854890 - DNA, 98 bp, Homo sapiens
gcctccgagcccgccgccacatcctctgagattgggaaaatgaggtacgttagtgttcgcgattttaaaggcaaagtgctaattgatattagagaata

SEQ ID NO: 854891 - DNA, 99 bp, Homo sapiens
gtggttggacagtcagcatttgcagactttgcccctgcccttgatgtggactggcagaacaacacgacctttgcctcctgtagcacagacatgtgtatc

SEQ ID NO: 854892 - DNA, 100 bp, Homo sapiens
aggactgatttttagaactccacatttgagggcccaagggatgcagacagtgatgaaaacgacaaaggtgaaaagaagaacaagggtacgtttgatggag

SEQ ID NO: 854893 - DNA, 98 bp, Homo sapiens
aaaaactaatggaattagcctgcaacatgaagatgagtgccaaaccaaatatggaaatgctaatgcctggagatactgtaccaaagtttttgacatgc

SEQ ID NO: 854894 - DNA, 100 bp, Homo sapiens
agaagacggaggaggactcagaggagcctctgcctgtgagtttctggatattgtagagctgctgctccagtctggtgctgaccccactctccgagaccag

SEQ ID NO: 854895 - DNA, 99 bp, Homo sapiens
gttcttttggggtagtgtctgggatccagtacgagttgaatcattgttcaaataaggggaaagcctcctgaagctgatggtgtggatagatcatttggc

SEQ ID NO: 854896 - DNA, 99 bp, Homo sapiens
aaaatcctagaaaaggccataatgggacaatagagtttaccagcttggatgcccacaagggagtagccggagaattttcatccttgggccttctcatca

SEQ ID NO: 854897 - DNA, 98 bp, Homo sapiens
ggctcagcggaaagcgacaggaaaggtcacaagaggaccagattaaaaatgctattgataaactttttgtgttgtttggagcagaaatactaaagaag

SEQ ID NO: 854898 - DNA, 98 bp, Homo sapiens
aaaactcgtgtccatcaaaatccagatgctggatgacacccaggaggcatttgaagttccaggtttcccaaactctcgattgcctcttgcaagcagat

SEQ ID NO: 854899 - DNA, 124 bp, Homo sapiens
gttccttcagccaaagaaacaagccgtggaataggtgtatcaagtaatggtgcaaagcctgaagtttccaatacttatctacaggaatcgccatgaccccagctctgagggaggcaacagcaaa

SEQ ID NO: 854900 - DNA, 100 bp, Homo sapiens
cttttccaagctggcttcatggtttgctcagaattctcggggcggcacagttccagggtttatgctggattgaatattttttttggaatggcaagcattg

SEQ ID NO: 854901 - DNA, 100 bp, Homo sapiens
ttaccatccagaagtgtctcccactgaaggcatccgtggttgtttttaagaagtggatgcacccccaagtgacacctactgatgactcaaacccttggtg

SEQ ID NO: 854902 - DNA, 99 bp, Homo sapiens
cggaggcaggaccagctgcagctgcttaatcagttcaagaagttccctcagatgacctcatatcaccggatgctattacaccgggtagctgcctatttt

SEQ ID NO: 854903 - DNA, 100 bp, Homo sapiens
ctggaagtagaaaagttatctccagccgctgagctacatctaatcttcaacaacaaggagatcttcagctcgccgtggcctgcaggaaggctcttgacag

SEQ ID NO: 854904 - DNA, 100 bp, Homo sapiens
gaaacctgctggagtgaggcctgaatatgcactttctggttggaatttgaataacatgcctgtcctggaacagtctgttcttgcacatattaatgtggac

SEQ ID NO: 854905 - DNA, 98 bp, Homo sapiens
gaagatgaactggacaaatactctgaggccttcactatcatggaccagaacagggatggcttcattgacaagaacgatctgagagacacctttgctgc

SEQ ID NO: 854906 - DNA, 100 bp, Homo sapiens
cccaaacagcggcgtttcacggtggcacatacatgggtcaaagaattgactgtagatccaactgctgctggtgatgttcgtccaataatgcaccatccac

SEQ ID NO: 854907 - DNA, 100 bp, Homo sapiens
tctcactgacttcaagaatgaagccgtggaccctcacggtagatgcctgtgaagggacacctgaaaaaattcagatgaccaacgtccacacaggtagaag

SEQ ID NO: 854908 - DNA, 100 bp, Homo sapiens
ccatggacccccccgacctcctgagcgtggaactgagcacctcccggcccccccagcatctaggaggggtgaaaaatcaagactggtgccccgtgccgtt

SEQ ID NO: 854909 - DNA, 100 bp, Homo sapiens
cacagctgtggatatctggagcattggttgcatctttgcagagatgctggtggaggccattgtcttgccaatgaaccacaaggagaagtttgagaacttg

SEQ ID NO: 854910 - DNA, 98 bp, Homo sapiens
tccagcctggtgtcaccaccgtcatcgacaatttctacatctgcccgaccaacaagaggaaggttagtggttacttggatgattgtacctgtgatgtt

SEQ ID NO: 854911 - DNA, 100 bp, Homo sapiens
cccgttgtgtttgtgaaacagagaaagataggcggccatggtccaaccttgaaggttggagaaacgtacggtaaggatataacctcccggggcaaagaca

SEQ ID NO: 854912 - DNA, 100 bp, Homo sapiens
ctgtgtggcccagatggctccaacaagcaaaaggaaggatgcagtgactcttgctgcccagaatgcacagcgatgtacatggcctgctgtaaacacccag

SEQ ID NO: 854913 - DNA, 100 bp, Homo sapiens
tattgccaagacaagagatgctggctgtaggccatacatggcaaatgcagtttccaagtacggctctcagttccaaggcaattcccagcacgacgccctg

SEQ ID NO: 854914 - DNA, 99 bp, Homo sapiens
atctttgctgcaagatcgaggctgtcctctggtgagaaggtggtgaggcttcccgtcatattccagattcccaaatgctggaaaatcctctttgctaag

SEQ ID NO: 854915 - DNA, 99 bp, Homo sapiens
tgccttttgcctcccaccgtgattctgaggcctccccaaccatgtgcaattatacctgtggaagggggacaggagcagcagacagattccaccaaaggg

SEQ ID NO: 854916 - DNA, 100 bp, Homo sapiens
gaagcttttgtcgtctaccgctggcaaggagatgcccgccaaaaagctctgaaggacttgctgaaatgggtcttagaggatgaaacaagtgaagatgcta

SEQ ID NO: 854917 - DNA, 100 bp, Homo sapiens
tttcttgctatttaaagatttttgtttgaatgaaattaatgaagctgtacctcaggtgaagttttatgaagaggtaaatgagctggatggtatcccgttg

SEQ ID NO: 854918 - DNA, 98 bp, Homo sapiens
cctgatttacgaacagaactgagtaaaagaatagctccgtgttatcaagggtacaggcatccttcacctgctattgttgcaagaacagtcagaatttt

SEQ ID NO: 854919 - DNA, 99 bp, Homo sapiens
atgctcagccttccaattttttaagaagcgggagtctcgctctcagtcaaaatctccaacgggaactcctgctcgtgtaaaatcggagagcaggtcagg

SEQ ID NO: 854920 - DNA, 98 bp, Homo sapiens
tccaatctgggaagcaccgagactctagaagaaatgccctccgggtcacaggataagaaaattcatttgcaaattgcccgacaaaggtaaaaagatct

SEQ ID NO: 854921 - DNA, 98 bp, Homo sapiens
agccgggatctcaggtcctcgggggcggcggccacgccaaggacggcagtctctggtcccagcccaccccatggcccctcccagtcccagcaccacca

SEQ ID NO: 854922 - DNA, 100 bp, Homo sapiens
cctccttctttgttcaagactgggcttccaccgagcagtgccggtggtggtgtgcacattgagccccggtatagacagttcccccagctgaccagatccc

SEQ ID NO: 854923 - DNA, 100 bp, Homo sapiens
cttcagaaaagcatgcatacagttgggatataaatagagccctgaaggaaaacattaccgatgctatttggttaagtgggcagaccaacatccacctcag

SEQ ID NO: 854924 - DNA, 100 bp, Homo sapiens
cgctttcacagagtcaatgaaggaaatggcacaagcgcagtgggagagccagtgtaactccttcaagactggagtgacacacactgcatctgcatctgcc

SEQ ID NO: 854925 - DNA, 100 bp, Homo sapiens
attctgttggactggcaaaacagatagctttgcatgctgaactggcatttccggagagttcttttgaagtcacttcagaaggatctacatgaggaaatga

SEQ ID NO: 854926 - DNA, 100 bp, Homo sapiens
ctcacactctctagaagcagagcacagggtcaatacacctaagaaacaaggaggactgggacccatgaacattcctttggtatcagacccgaagcgcacc

SEQ ID NO: 854927 - DNA, 100 bp, Homo sapiens
cagatggcaggaaccggcccagccatgtctggatttccaagaggtcgttctgaccccaggtgacaatccccaattccttgggaaacctggacgcatccag

SEQ ID NO: 854928 - DNA, 98 bp, Homo sapiens
ggcaacgacacaagaaacacaacttcagacttgcagaaaaccagtgaagggaaattgtatgctgctatgcatgaacctgatggagtggccggagtcag

SEQ ID NO: 854929 - DNA, 100 bp, Homo sapiens
cacggtcactgcagctgaagccgctgcccctgctacagggtgcagagcctccagctccaccatgagctgcacgccgcccacctcctctccagcacagacc

SEQ ID NO: 854930 - DNA, 100 bp, Homo sapiens
aagatttggcctactcttcttatgtccaccagtatagctctgggaaatttgacaatgcactgttccaagaccaaagattaaattaagagaaggtaaagct

SEQ ID NO: 854931 - DNA, 100 bp, Homo sapiens
gctgcggcggctggggccatatgatgggtgatgagggttcaggttgattatgagagtgaggaagaggaggagagggagggcgaggagaacgacgatgaag

SEQ ID NO: 854932 - DNA, 100 bp, Homo sapiens
caagcctgaaggaaaggcagaactgcctgattacaggagctttaacagctatgtttccagtgtcctctgggtgtttccaagagcaacaagaaacgaataa

SEQ ID NO: 854933 - DNA, 98 bp, Homo sapiens
cggccgtgagctgcggcaggacggctggaggtggaaaatgagcttatatatgaagaagtcagcgagtggacaaagccaggcgcaatggatagcaaaga

SEQ ID NO: 854934 - DNA, 98 bp, Homo sapiens
gaggaagaggtggccataccgttgaccgctcctccaactaaccaaactgcaacttccagtgagtccctctgtgtgtctggatcagggaatgcaattaa

SEQ ID NO: 854935 - DNA, 100 bp, Homo sapiens
gaagtgaaccaagcattcctcagggccatcactgtgcatgtccccatgccctcagcaggagtcgtggacatccccattgtggagaaggaggcgcaaggcc

SEQ ID NO: 854936 - DNA, 100 bp, Homo sapiens
ggaagaaaacgagccagtgatttacaatagagcaagttcaaggagcagggacaagttacaggaatgttctccaagcagcaatccaaaagagtctcaagga

SEQ ID NO: 854937 - DNA, 100 bp, Homo sapiens
ttcatgaactccaagccaaaatcacagctttgagtgagaaacagccaacaaatggaattttcttgagcatgtttctaatcgttttgccattggaatccat

SEQ ID NO: 854938 - DNA, 98 bp, Homo sapiens
catcggcggcggcttccgtcacctccgctcccccgatcctattcccagtcgtataagccaatggacacgtcagtgttatctgaagaaggaggagagcc

SEQ ID NO: 854939 - DNA, 98 bp, Homo sapiens
tgcagggctttttggctgccgagcaggacatccgagaggagctatgaagacatgattggtgaggaggtgccatcggatcaatactactgggctccttt

SEQ ID NO: 854940 - DNA, 98 bp, Homo sapiens
cagcctcctgtgaccactgttgatcttagcaaagcaatgtctcaagatggtgcttctcagttccaagaagtcattcggcaagagctagaattatctgt

SEQ ID NO: 854941 - DNA, 100 bp, Homo sapiens
tatgccaaggaaaaactggagagcttcatcaaaaatagtgatagctttgataagtgtgacgtttctccagatacttcatgctgttcacctgtgtcctcgc

SEQ ID NO: 854942 - DNA, 100 bp, Homo sapiens
attagcttcgcagtctggaaagctttaggagttcacagttgaaactggaacgccaagctgaagaagaacgaatacggaagcacaaagcagctgctgagaa

SEQ ID NO: 854943 - DNA, 98 bp, Homo sapiens
gatcctctgtacgcccgttcactgtactaaggctcgtacgtctgcatcgattatcttacgtggggcaaatgatttcatgtgtgatgagatggagcgct

SEQ ID NO: 854944 - DNA, 100 bp, Homo sapiens
ggcgctggagaccttacgacgggttggggatggcgtgcagcgcaaccacgagacggccttccaaggtgacttaagagattaaaattaatttggttgctgt

SEQ ID NO: 854945 - DNA, 99 bp, Homo sapiens
ttcacatctctcaggctacatgttgcaaaggttaaattccaggataagttctgaacgtcgaaaagaaaagtctcgagatgcagccagatctcggcgaag

SEQ ID NO: 854946 - DNA, 131 bp, Homo sapiens
acggcgaccgcctctgcttcaatgtgggccgggagctgtacttctatatctacaagggggtccgcaagaggctgctggtttgcctagaagagtccatttatattcacaacattaaagacatgaagctgttg

SEQ ID NO: 854947 - DNA, 100 bp, Homo sapiens
cgaagaaacagacattcaacatgattgcatttgaatctcttgcatggcaccaagaatgttaccaattcaagcagtttaagattgccaagacaaaatagtg

SEQ ID NO: 854948 - DNA, 100 bp, Homo sapiens
gacaccacctcagcccactgagcaggagtcacagcacgaagaccaagcgcaaagccaggcccagacatgtccgtccttgtaagttaaaagcttccatggg

SEQ ID NO: 854949 - DNA, 98 bp, Homo sapiens
taaagtctaccttacagggtataactttacattagcagatatactattgtactatggacttcatcgctttatatgttttccaagcagtgaagcacttg

SEQ ID NO: 854950 - DNA, 98 bp, Homo sapiens
ggcagtggctgtagctgccctttccgtttccagggttccgaccagacttacagattccagtctgctgttagatgattattcatccaagttgagcccca

SEQ ID NO: 854951 - DNA, 100 bp, Homo sapiens
gctaaggtattcctggaagcagagtaaataaagctcatggcccaccagctagaaagatcagccagcattactaacctgtcactggatagatctggttctc

SEQ ID NO: 854952 - DNA, 100 bp, Homo sapiens
tcggtcgcgatgggggcgcaggaccggccgcagtgccacttcgacatcgagatcaaccgggagccgggaagaggagcaggacttggatggtgagaagggg

SEQ ID NO: 854953 - DNA, 98 bp, Homo sapiens
tggtcaggtggaacccatgcctggagcctcaccgcttcaatgacacagaggcgaacagtcagcttcaacaagcagcaggtttgatcaaccattcttct

SEQ ID NO: 854954 - DNA, 98 bp, Homo sapiens
ccggagctgagaccgggcggccacagtccgcagggatgaacctcgagttgctgggtggtactgtgaaggcaaggagcttgaaaattccccagatattc

SEQ ID NO: 854955 - DNA, 100 bp, Homo sapiens
caagctggccgtggctctcttggcagccttcctgatttctgcagctctgtgtgaagacgccatggagttggtgctggtcttcctctgcagcctgctggcc

SEQ ID NO: 854956 - DNA, 133 bp, Homo sapiens
actgggaggatgaattcgacctggagaacgcagtgctcttcgaagtggcctgggaggtggctaacaaggaaaaagcggatggtggttcctgctgccctcaaggtcgtgcgtctgaagcctacaagaaaggtga

SEQ ID NO: 854957 - DNA, 99 bp, Homo sapiens
gtgcattcccatcctcgctcccacctgtcagccttctaccccatgagaaagaccagatcacaaaatttgtccaggatagacatagagctagaagaaaca

SEQ ID NO: 854958 - DNA, 100 bp, Homo sapiens
agcgccgcgaacttggtggccagcgccgcgcccggggccgtgcgctctcgggccactcggccgcagatatttgatttaatggatgccaaagcacgtgctg

SEQ ID NO: 854959 - DNA, 98 bp, Homo sapiens
aagattattacagtaaaaacaaaagaaaggcaagagaatacttactagttaaagacgtgaagccctccaatatgctagtaaacacaagaggacaggtt

SEQ ID NO: 854960 - DNA, 100 bp, Homo sapiens
agacaaaccacggccaagccccagcacactagttgacaaagatcaggacatgtattcctctgagaaaccttggacagcagattttggtttaatatctgat

SEQ ID NO: 854961 - DNA, 98 bp, Homo sapiens
ctgcatctctgcaaactcaacttgctgggccggtgcaactattcgcagtccgagcgagagacacgggctcaaggaacccaagagagtggaagaactgc

SEQ ID NO: 854962 - DNA, 100 bp, Homo sapiens
cgcagcagcagcggcagtcacaggcacatcagcaaagagatgtgtgcaacagcaccgatcttccggaagtcgagatcattagcctgctggaggagcagct

SEQ ID NO: 854963 - DNA, 100 bp, Homo sapiens
tgcattcaacctgctgcatttggtgacaaagagccagccagtagcccttcgagcctgtgggcttccctcagctgcagaaccttggcctgaaaatgctaca

SEQ ID NO: 854964 - DNA, 100 bp, Homo sapiens
gaaaaaccctgtggattacatggacctgcctttctcctcctccccaagtcgcagtgccactgcaagcccacaggtctgcaataatttccctgctctcatc

SEQ ID NO: 854965 - DNA, 98 bp, Homo sapiens
tcaattcaggatcgagatatgaagcgaaataccttagtggaattgctcactttttggaaaaattggcattttcggaaactctgatgaggaagaaagtg

SEQ ID NO: 854966 - DNA, 99 bp, Homo sapiens
tggagacgcggcctcggaccagccatttcggtgtagaagtggcagcacggcaggaaataatgcaaaaggtgtcccaaggctcctgaccagtgaacaaag

SEQ ID NO: 854967 - DNA, 100 bp, Homo sapiens
ttaaggattccaagtaactcttatttggtcctgggaactccaacaagggagcaaatcagagaaatgaacccaaactacacagaatttaaattccctcaaa

SEQ ID NO: 854968 - DNA, 126 bp, Homo sapiens
tcatcctgtccatcgtgtgcctgatgatcacgcagctggctggcttcagtggaccagtgttcttccagagagcaaagccctgaggactggatttccctgtgcctacttcatgatcatgaattccag

SEQ ID NO: 854969 - DNA, 100 bp, Homo sapiens
catcaccctgcacgaggtctatgagaacaagacggacgtcatcctgatcttggaactataacgaaggaggcccaacttcattcaataaggagcctgacgg

SEQ ID NO: 854970 - DNA, 99 bp, Homo sapiens
atgtgtgctctgcgctgaggtggatttgtaccggagtcccatttgggagcaagagccatctactcgtccgttaccggattgtgggattagtgatatgct

SEQ ID NO: 854971 - DNA, 98 bp, Homo sapiens
tcattccatggctccaagtttaaaagaactacgtgttttatccaacagtctctggctgatgaacttgctcttgtggatgttttggaagataagcttaa

SEQ ID NO: 854972 - DNA, 99 bp, Homo sapiens
gggtttcttgcaaaacgcttctccggctgcaccctgaccgatgggaccctggtcagggaagtcaaagatgcatccctgagttcttcctagcaggcaagc

SEQ ID NO: 854973 - DNA, 98 bp, Homo sapiens
ctgccctacctgccaggcagtggggaggaagaccatagagggtttaaagaaacacatggaaaactgcaagcaggctggagtgcagtgacataatctca

SEQ ID NO: 854974 - DNA, 98 bp, Homo sapiens
accagtgagaaattccttgaaatttgcaagtattccactgaactgaagaaactctactgccaaattgcaaagacatgccccatccagatcaaggtgat

SEQ ID NO: 854975 - DNA, 100 bp, Homo sapiens
agacgggagtattatgaaaagatcgtttacttcaaggacacccatcccaagtttcccgctggagggaagatgtctcagtacctggagagcatgcagattg

SEQ ID NO: 854976 - DNA, 100 bp, Homo sapiens
gaaaacaccatccaagcagccaggcagtatcgggagcaggaaagccagtgttgtggaccctagcacagaggcccggctgcccctgaagtggatggcccct

SEQ ID NO: 854977 - DNA, 98 bp, Homo sapiens
ataaaaatacaaccctttcattttattaaggatccaaagaatttaacattagaaagacatcaactcactgaagtagcaaatggttatgagccttagag

SEQ ID NO: 854978 - DNA, 98 bp, Homo sapiens
ctaggcacaaccaatgcgagcctgcctcttaacctgattcgcctttgccagtctcatctcgtgtctgctttgttaagttccatgatccagactcagca

SEQ ID NO: 854979 - DNA, 99 bp, Homo sapiens
ccgattccagcccaacaaacctttctatactcaagggatgaactttttgggattctccaaatactccatcagtgtatcctgtcttcaggtgatgctttt

SEQ ID NO: 854980 - DNA, 98 bp, Homo sapiens
cctggacccggcctgggagaagcagcagagaaagagaggtggagaagagcgagtacttgagaaagaagaggaagaagatgatgatgaagatgaagatg

SEQ ID NO: 854981 - DNA, 100 bp, Homo sapiens
gctccatggtgggattgtcgggcggtcagcggacttcgtggtagaatccattggctctgaagtggggtctctggcctttgaagaagatggtggagagaat

SEQ ID NO: 854982 - DNA, 100 bp, Homo sapiens
ttggcttcgctttcagggtttttaatgaccacaacaagcaagcatgcagcttactgcttgaaaggcttcaatgttagctgcagaaaatgacccttatgga

SEQ ID NO: 854983 - DNA, 98 bp, Homo sapiens
cgctgccagcgacatgttcaagtgtgtgctgtatttatggagtttaaagattaatcatcccaaaacattgtttctgcttcggggaaatcatgaatgca

SEQ ID NO: 854984 - DNA, 105 bp, Homo sapiens
agccttcaaatacttcctgcaaggcatgggctacagagcatcgtgcatcaagtcaccagggtggtccattcaagctgcagatttgtttgtcatccttgtacagca

SEQ ID NO: 854985 - DNA, 98 bp, Homo sapiens
tagtgttgctttggatcttgtggaaagtcagactgatggggagaaagaagatcagtttaatggaagccctccaagaccacagccaaggggaccaagaa

SEQ ID NO: 854986 - DNA, 99 bp, Homo sapiens
ttgggatttaccaaagcttgaagcgcttattcgtagaacgtttagaaggaactttgtgttaaagcatcatgtattcttggtccgaaactgggagaagat

SEQ ID NO: 854987 - DNA, 100 bp, Homo sapiens
gtataggctgaggctacctgtgaacagtacgcagtgaatgttgtgtcagaaactatttaaaagaagcactggtgaatataattgccgtgcatgcagaggt

SEQ ID NO: 854988 - DNA, 51 bp, Homo sapiens
cccagccccctgctatgacccttgcgaaacctagaagtcggaatccggaag

SEQ ID NO: 854989 - DNA, 100 bp, Homo sapiens
acatcccagtcctcagtcctcagtcatcttgccaaagaatttagaacgagtctacgtggacacgcaagtttcagcgagcggggatttcctgcgaggccga

SEQ ID NO: 854990 - DNA, 98 bp, Homo sapiens
tgaaagtgcctgccaaagccaagctcaccaaactgaagatgccttctcagtcagttgagcaaaacccttgaagatcgtttgaaaattgaagcaaaaaa

SEQ ID NO: 854991 - DNA, 100 bp, Homo sapiens
gtggcggctgccaaggagacgattacctctctagtgacccttcagctgttaaccctggttggccatgacgatcagcttgatggaccaaaatacaaatgca

SEQ ID NO: 854992 - DNA, 100 bp, Homo sapiens
gctgatctgagctcagacctgccaatttaccagagataattgataacaccctgtaacagctgaggtaagcttgatgattaccaggaacgaatgaacaaag

SEQ ID NO: 854993 - DNA, 100 bp, Homo sapiens
gaaagaaaaggagtcagggatggcccttactcagggttcaggataagtttgaggtgctgaattacacaagcattcctatctttctcccggaagtcaccat

SEQ ID NO: 854994 - DNA, 100 bp, Homo sapiens
gagctgatgctgcccgagaaattgaggccgttgtacaaccatccagcagatactcctgggcatggaagtggatgggctgagactcctcgaacagatcgag

SEQ ID NO: 854995 - DNA, 100 bp, Homo sapiens
tggtccctcagtcacacatgccagagattgctcaggaagcaatggagctttctaaaaccaatttttccaacaacaacgatttccgtgctcttctgcagtc

SEQ ID NO: 854996 - DNA, 98 bp, Homo sapiens
aaacactcagctgcaagtccaaagccacaagtcctgacacagctctccctgaggagcagccacattccagctcccagtgcgcccctctccactgtctc

SEQ ID NO: 854997 - DNA, 100 bp, Homo sapiens
agtatctttttacaggacttaaattgaatatgtttcgacagcaacaaaagattcttcaacaatctagaattgttcagagccagagattgaaaacaattaa

SEQ ID NO: 854998 - DNA, 100 bp, Homo sapiens
agccttccaagctctactgtgacttcagagacactgccaagcagccttagccctagtgtagaggaagttcaacacaattgccagcttcatagaatatctt

SEQ ID NO: 854999 - DNA, 100 bp, Homo sapiens
cagccgaactggaatctggatgagcagctcaagcagatccgtgagagatttgtaaaagagccagcatttgaggacataactctagaatctgaaagaaaac

SEQ ID NO: 855000 - DNA, 98 bp, Homo sapiens
cgtttgttcaggaaccaccagtgacagagctaatccaaaaatgtgattttcccattatgaagttttcactctacttcttggcttatgaggataaaaat

SEQ ID NO: 855001 - DNA, 100 bp, Homo sapiens
gttgacagtgggcctgcagccaaggaaggaggcctgcaaattcatgacaggattattgagtgtcctgtttcccagaggaacagttcatttcaacagccag

SEQ ID NO: 855002 - DNA, 100 bp, Homo sapiens
tcaaatggaacattttgatgcatcacttagtacctatttcaaggcattgctaggccctcgaggtatcatttaaaggatgtgattgttggaaaaatttact

SEQ ID NO: 855003 - DNA, 98 bp, Homo sapiens
gatgtgtaccaacaagagaaggcacgcatgggctcagcgggactcagaggttgctccttgagggcaggacagttcttatggctttatccgttgcgtaa

SEQ ID NO: 855004 - DNA, 100 bp, Homo sapiens
agcaacctttacctataaagaagttctggagcaggtgagcgtcctgaccaccctggagcgtaggttcaacctgcagagcgctgacgtgggtgtgatcgct

SEQ ID NO: 855005 - DNA, 99 bp, Homo sapiens
ggaggaggaacttcgaaccatggaccaggccctcaagtccctgatggcctcagaggaggaggaggaagagcaagcaggccctgagggactataagaagg

SEQ ID NO: 855006 - DNA, 100 bp, Homo sapiens
gcggaggcggccgctgctcgaggggatcccaacaagccctcaggattcagaagtgttaaagctcctgtcactaaagtggctgcgtcgattggaaatgctc

SEQ ID NO: 855007 - DNA, 98 bp, Homo sapiens
ctgatcaagccaacaacagtgacggaatgcctccatacatgcacagggtggtggtttcctatcctcctcagagtgaggcagaacttgaacttaaagaa

SEQ ID NO: 855008 - DNA, 98 bp, Homo sapiens
aaactggagagaattcagttttattcaggttggccacattcgtgcggagcgtgacattctagtggaggcagacagtttgtgggttgtgaaaatgttct

SEQ ID NO: 855009 - DNA, 100 bp, Homo sapiens
ttggtttatgacctcttttccctttccaacaagcaagacaagtcattgtggtatctgaacgggaactatttggttctgttggtgtcattggtggtcattc

SEQ ID NO: 855010 - DNA, 98 bp, Homo sapiens
ccgaggggacaggccgagcgcggggcgccggaggcagcctgttcgacatgggcggtgagtattactgcttcgcttccgacatcacctgctcctttccc

SEQ ID NO: 855011 - DNA, 100 bp, Homo sapiens
tgagtccttctactggcagctgccggagacataccagggagacaagaaactggcgatggaatatgagaggagccctctggaaagaaaaggacagaccctg

SEQ ID NO: 855012 - DNA, 98 bp, Homo sapiens
gggacggatgaaagtacgggtcgcgagaggttgttcgcgccttgagagttaagcgaagtgtggtggcttccaagaactgataaatttcaaacggaaga

SEQ ID NO: 855013 - DNA, 100 bp, Homo sapiens
ccggtgtcttcagataaggtcacgcaaaaacagttccaactgaaagaaatcgtgcttgagatgttgatcttgtctcagaatattgcccaactggaggccc

SEQ ID NO: 855014 - DNA, 98 bp, Homo sapiens
tccaggagtcagggatcgtgaaggacgccagcatcatacaccggctgttcgaggccttgactgtaggagtgggaatagctttgcgaaaaatgggcgca

SEQ ID NO: 855015 - DNA, 100 bp, Homo sapiens
tggtgacctttttggagggaaagaaagagccctggactgtgaagagtgaggagaccatagctgcacagccaggtgtgtgaccgatgtcggcagaaaactc

SEQ ID NO: 855016 - DNA, 99 bp, Homo sapiens
tccttgaagtatttggctgaggagttttcaatcccagagtggtgaaaggacataggaaggagtctggggaactgtactacagcattgaaaaagaaggcc

SEQ ID NO: 855017 - DNA, 100 bp, Homo sapiens
cctaccttctctatcagatgctgtgtggaatcaagcaccttcattctgctggaattattcatcggaattataaggctgtctgcagagatttgaaaaatgg

SEQ ID NO: 855018 - DNA, 98 bp, Homo sapiens
ctgctgcactgacggcgggtgcccgcgcctcagatcagggagcagagaaacatgaaggcacaggtcagtcctctgggatcactgatcaagagaaggag

SEQ ID NO: 855019 - DNA, 99 bp, Homo sapiens
agaagcagcgggggggcaggcgatcgaagagctctgtgacgatgacccgccagagatcccacacgccacattcaaagccatggcctacaaggaaggaac

SEQ ID NO: 855020 - DNA, 100 bp, Homo sapiens
tctcggtcactgtgtccaacaagatggcagcaaagagtgccaaggccactggtgaatacatcaagacctggaggccacggtacttcctgctgaagagcga

SEQ ID NO: 855021 - DNA, 100 bp, Homo sapiens
gcctctgaaacactaccactgctggcgctgaccttcatcacagacaacagcctggtggcagcggggctgacgtttaccctacgtcctggtgaggtgacgg

SEQ ID NO: 855022 - DNA, 100 bp, Homo sapiens
ttatatcctccaggaatactggccaggtatcactaccattaaagttaacattcgtaatgccaattccctgggaggaggcttccattgctggacctgcgat

SEQ ID NO: 855023 - DNA, 98 bp, Homo sapiens
ctctataacaagtatatcacaaatgaagctgttgtcatttctggaaggaaactggcccagcagatcaagcaggaagtgcggcaggaggtagaagagtg

SEQ ID NO: 855024 - DNA, 100 bp, Homo sapiens
accatctattgggagattgtctcagtaccaagaaccgttacatctacctggtcattgttggaaactgttactacatttttactggaaatactattattca

SEQ ID NO: 855025 - DNA, 98 bp, Homo sapiens
acggcttccacgaggcgttcatcgaggagggcacattccttttcacctcagagtcggtcggggaaggccacccagaatgtcatacccaggctatcccc

SEQ ID NO: 855026 - DNA, 100 bp, Homo sapiens
gcagccctgtgccttgacaagagcctcatccacaccgtgttgctgcaaaaggactatcagggaaaccggctcctgaaatcaggtgtcccattccagcctt

SEQ ID NO: 855027 - DNA, 98 bp, Homo sapiens
ccaactagcattctgaaagtgcattaacatttgtggccttgtgctctttcatcggacttctaatggtcctgaatctgtgcctccttcccttcttaaag

SEQ ID NO: 855028 - DNA, 100 bp, Homo sapiens
tttgccggcatgagcatctccatccacatctccactgatggcctcagcctctccgtgcctgccacgcgccaggctgaaggtgatgtggccgccctcaacc

SEQ ID NO: 855029 - DNA, 100 bp, Homo sapiens
ggagccggatcaggagccgccgccgccatatcaggccaaagagtgtggccagatgcaaaataagtggctgatgataaacattcaaaatgttcaagacttt

SEQ ID NO: 855030 - DNA, 98 bp, Homo sapiens
atactttacgcttgtgtgataaaactgggggccatgctatgatagtggaagcttatccaaaataatagatccagaagaagtgacctgaagtttctgtg

SEQ ID NO: 855031 - DNA, 98 bp, Homo sapiens
tgtcaacttcctcttcagtcatcagtgcccagactctcacagtatggaggcaagctgataaacacaatatacctcgaatctgttttttaaacaagatg

SEQ ID NO: 855032 - DNA, 99 bp, Homo sapiens
tttctataggattttattgcacaaaggcaacggtgactttcaaagctatttttatgattcccacaaatccaccaccaacattcagaaagccagaacttt

SEQ ID NO: 855033 - DNA, 100 bp, Homo sapiens
tgtaagaaagattcttaagctgcctcattcttccatcctcagaacgtgggagacctacctgatgcagatattaaacctccagaaaatgtactgtttgtgt

SEQ ID NO: 855034 - DNA, 99 bp, Homo sapiens
agcagcatgagctctgggtctgggtccctccgaacaagtgaaaagaggtccttgtatgtcaggcatcaacttctaactcatctcgccaggagaggcctc

SEQ ID NO: 855035 - DNA, 100 bp, Homo sapiens
tctgtcactacttcatgcgcctgctgaaggacaaggggctactcctgcgctgctacacgcagatgtggtgaagctgtagagaaaaacaagcgtctcatca

SEQ ID NO: 855036 - DNA, 100 bp, Homo sapiens
ggagccatgaaggccttgtgctgaccaagctgctcacctcgtattctaccttgtaaatactgttatttgtatatactgtaaatgatgacatcggtgggca

SEQ ID NO: 855037 - DNA, 132 bp, Homo sapiens
ggccccagcgcttctatgagtccggggccaaccatcccgtctccagcccgggcttacgccccgccgacaggccaaaggatgccattcgagccctgaagaagcggctcaacgggaaccggaactacagagagg

SEQ ID NO: 855038 - DNA, 100 bp, Homo sapiens
aaaacaccaggcaaaaagaagcattaatgagatgctggcagacagacacctccagagagacaatcttcatgcacaggtgttgacagctcttctaccacaa

SEQ ID NO: 855039 - DNA, 100 bp, Homo sapiens
gaagaacagctgtggaaagaagttgcaaaacactgggtgggccttcaccttgatcatcatctcctcctacacggccaacctggccgccttcctcaccgtg

SEQ ID NO: 855040 - DNA, 100 bp, Homo sapiens
tcatggaagttgattactcagtctctaaaaagctaaggtttgaggaactactggccaacctactaaatgaacaacatcagatagcgaaggaactatttga

SEQ ID NO: 855041 - DNA, 100 bp, Homo sapiens
gtgtttggatcagctgatctgtggaatggtgttggaatattttttgattcttttgacaatgatggaaagatttcttcagaggccccacagtatcaaatat

SEQ ID NO: 855042 - DNA, 98 bp, Homo sapiens
ccgcgctgcagggaacagcggggcaaacacagatataatttctacagtagaatttaatcattctggagaattactagcaacaggagataaaggtggta

SEQ ID NO: 855043 - DNA, 99 bp, Homo sapiens
accaggccaccttcgtgaacgcgctgcacctctacctgtggctctttctgctgggcctgcccttcaccctctacatgtctccacaaaccggaggactac

SEQ ID NO: 855044 - DNA, 100 bp, Homo sapiens
cagagagatgcctaccagcagaagctggtacaacttcaggaaaagctccctagatctttagcttctactcccactgctcctaccactccagcaacgccag

SEQ ID NO: 855045 - DNA, 100 bp, Homo sapiens
gcgcaggtgctagcggccccttcgccctgcaggaaccaaagaggttgttgtaaatgtggatgatgatggagtcatttcattgaacttcgagtgtgataag

SEQ ID NO: 855046 - DNA, 99 bp, Homo sapiens
tctgatgtacaacaccccgagagctgctaccattgttgctacctcagaaggctccctttggggactgagcatcctggccagaacaagccaaggagccaa

SEQ ID NO: 855047 - DNA, 100 bp, Homo sapiens
atttctgccaacatccccgctcaccaggagccccttgccaggagtgttcaagatgctctctctggaccgatcccactagaaccatggagtctggcagtac

SEQ ID NO: 855048 - DNA, 101 bp, Homo sapiens
cgcagaaaccccgttgacaaggcactgctttttcatgacgacggaatcagtccccaatgcctggaaattcctcattggattactgtgttttaaacagaatt

SEQ ID NO: 855049 - DNA, 98 bp, Homo sapiens
tcggctccgccgccgcgaaggacagcctttccgcgcgggactccggggcgccacgggggccatgtaagcaggaactttatattgctgttggaatatct

SEQ ID NO: 855050 - DNA, 100 bp, Homo sapiens
cttttaccaggttttttttatcgctgccttgatatacacttttcaaaatgctttggtgggaagaagtagaggactgttcacccgacagctacaaagtgca

SEQ ID NO: 855051 - DNA, 100 bp, Homo sapiens
taattcagcctttggaagttttttgctatgagactctgcacggaggagtgcagggtcctgggacactctgaccagtgctggatgccaccactgccctcac

SEQ ID NO: 855052 - DNA, 100 bp, Homo sapiens
gtttctttaaaactgccctggacgacaggaaagagtcggaacacacagatgggcacacctctgtccagagtgttattgagaagttgcaggaagaaaatcg

SEQ ID NO: 855053 - DNA, 98 bp, Homo sapiens
cgtcacacatgaagaacacacagcggtggaaaagcatgcctgttttgtagccttgaggctgaaaacctagacttctgggagtatgcagattacagaag

SEQ ID NO: 855054 - DNA, 130 bp, Homo sapiens
cccaccaggcctcaccatcagcaactcctgtccagccaaccttcccaacataaaaagggagctcacaggtagcagaggctcaacgggcagagtttagccctgcccagttctctggtcctaagaagatcaa

SEQ ID NO: 855055 - DNA, 99 bp, Homo sapiens
ggaaatgacttttgaattatctgctttggaagattatccatgacactgttctgccctgctctgctctaacaacatttaccaagatcactccatggatga

SEQ ID NO: 855056 - DNA, 98 bp, Homo sapiens
gcaactctcagttcgagagtaaagatcttcttcagcagtatcgttctgctgtgtgcaaactagacagtgtgaataaggatcttaacagtcaattagag

SEQ ID NO: 855057 - DNA, 98 bp, Homo sapiens
tttcaaaatgctttggtgggaagaagtagaggactgttgtctttgatttgcgtcagtgtcatcgacagatgcagcagcaggcggctactgcacaagct

SEQ ID NO: 855058 - DNA, 100 bp, Homo sapiens
ataagatttacatccagaaacatgacaacgtgaggtacagagtgaagacagtgtcctcctgtttgttattgcatggacgatcacggaaatcatccgttac

SEQ ID NO: 855059 - DNA, 100 bp, Homo sapiens
gggatatgtccagcgacttggagagagaccatcgccctcatgtcccaggtgtgtgatggcggctgcaatctgtcttgtgggtattaatgcaatcttcagt

SEQ ID NO: 855060 - DNA, 98 bp, Homo sapiens
acctttgctgtattcacacaccttcctaaaatgacagatggcgagacctggacaggaaatgccctcttcagattgaccaaccgagcaccagcatctgg

SEQ ID NO: 855061 - DNA, 120 bp, Homo sapiens
gaaaacatggtattttgaaatatgattaaactcctgatgctgcagcagaggctaagaatattaatggccagatctaggttatgtcgcttaaaaaagaaagcacaggcagaagcaaatgct

SEQ ID NO: 855062 - DNA, 98 bp, Homo sapiens
aagaatggctgttgaacatccacaaggcacctgcaaggcctcaggagtgcaagtagctgatgaagtatgtcgcattttttatgacatgaaagttcgta

SEQ ID NO: 855063 - DNA, 100 bp, Homo sapiens
acggatcatagtgccccacaacgtgagcaaggagttctgcacggagcatctgttaagaacatcttcagccagccggcctgcttccctgccaagagtgcct

SEQ ID NO: 855064 - DNA, 99 bp, Homo sapiens
aattagaaatgcaacttgagaaacccaaacctgtaaaaccagtgacgttttccacaggcatcaaaatgtgaagccgtcccagtccttcatgacctccca

SEQ ID NO: 855065 - DNA, 100 bp, Homo sapiens
cgatgaccaaaccagtgacagtggtggcaccacaatctcctaccttccaaggaactgttaaccttcaaggacgtatctgtggacttcactcaggaggagt

SEQ ID NO: 855066 - DNA, 98 bp, Homo sapiens
gcgggatgccgttccttcgcgcgtgaggctgcggctctgacgctttcagaaggagttctcactcgaagataaagaacagctcgctaaccacgaaagag

SEQ ID NO: 855067 - DNA, 98 bp, Homo sapiens
atatttctcttttgtctgcccctattgtaagtgcagatggaacacaacaggacttttgggaaaagatatttcagaagttcagtgcatatcaaaaaagc

SEQ ID NO: 855068 - DNA, 98 bp, Homo sapiens
ctgtgggctggtgttccttgactggagacaacctgcagcctcctggcaccaaaggtgaagcagactgtggtgaatttagcaacacttatgaagtttct

SEQ ID NO: 855069 - DNA, 100 bp, Homo sapiens
ccttggaagaactccgtgcccagatgctcataaggattgtcctctttctacaaaagtggcggcttatttggcctccccaggacggactggagcatcagta

SEQ ID NO: 855070 - DNA, 100 bp, Homo sapiens
caatcctggagctgctgttgcagcacttgttccccaaacaagtgctcctacattctgccaaacaggcaggactcgtgaaattgtgatgccttctaggaac

SEQ ID NO: 855071 - DNA, 100 bp, Homo sapiens
acagcgtctgggaagagagcagccaggggcggacgaaaccatcggtagactccacaaggttcatatttggtgcttagacaaattcaaaatgaggaaacat

SEQ ID NO: 855072 - DNA, 110 bp, Homo sapiens
gggaccctcgcgcgcgaccgccgaatcgctcctgcagcagaggcttcagggatgacttcttagggggcaggggaggtagtcgcccaggcgaccggcgaacaggccccccc

SEQ ID NO: 855073 - DNA, 100 bp, Homo sapiens
ttgccaaaccaggttgcatttcctgaaggggaagagcaagatgcagtcagtggagattttaccaaatgttgcaagaactctggagttcttatggtagtaa

SEQ ID NO: 855074 - DNA, 100 bp, Homo sapiens
aaggactcaggtgaggactggaggagacgttgacatttagggatgtggccatagaattctctctggaggagtgggaatgcctgaaccctgctcagcagaa

SEQ ID NO: 855075 - DNA, 100 bp, Homo sapiens
ttctgtgttagaaaaactaggggaaaggaaaccatgcaacagtcaaccttctgagctttcttcagagacctcagaaagcataacccctactgtagaacta

SEQ ID NO: 855076 - DNA, 101 bp, Homo sapiens
ccctatgactactcctctgtgatgcactatgggagggtggctttgcaaaatgttacgagatgacagatttgacaaataacaaagtctacgccgcaaaaatt

SEQ ID NO: 855077 - DNA, 100 bp, Homo sapiens
cagtattgcctcatcattccgaaggtactccaaagattcaggtttactcacgtcatccagcagagaatggaaagtcaaatttcctgaattgctatgtgtc

SEQ ID NO: 855078 - DNA, 98 bp, Homo sapiens
gcacctcaggagggaattcagcctcagtgatgtccatgagcataagctgtggccatgactactgaagtaggctctgtgtctgaagtgaagaaggactc

SEQ ID NO: 855079 - DNA, 74 bp, Homo sapiens
gcttacattttcagccatcagttttagattttggaatacagattacttccttaggatagattgccagaagtgga

SEQ ID NO: 855080 - DNA, 99 bp, Homo sapiens
ctgaatctgccgcagctagaaatgctcaagaaccagctggaccaggagtataacatgtatggctggtgggtgggagaactgaacagcctcgttgggatt

SEQ ID NO: 855081 - DNA, 99 bp, Homo sapiens
aagcactctcaggaacctggcaacaggagacctgtcttctggttacctggatgatactaagcaggaaacagctaatgggcccacctcctgtctgcctcc

SEQ ID NO: 855082 - DNA, 99 bp, Homo sapiens
tgaaatctacataaagactaaaacattttaccaattttgcattgtttgtttgaaattgcattgacgactgactatgtcttcagcagtggtgcagttata

SEQ ID NO: 855083 - DNA, 98 bp, Homo sapiens
ggctacacagtatataaggtcaccgcccggaaagaagattggcccatgcacaagctggaatgttctcccatggttgtttttggggaaaactggaatcc

SEQ ID NO: 855084 - DNA, 98 bp, Homo sapiens
ttaagaaaggacagcattcctgtgacctctgcctaccatccataaaatactcattcccctctcagaagtgcctagctgccactccatttatatgaggc

SEQ ID NO: 855085 - DNA, 51 bp, Homo sapiens
ccgacctcgtaacgccacaaggaataatggagacggggtttcgccatgttg

SEQ ID NO: 855086 - DNA, 99 bp, Homo sapiens
tgccctttttgcaccccagggagctgctgctggtcacagatgtgacattgatgtgtccactgaagccatgtatgctgcaaccagacgagaagggtttaa

SEQ ID NO: 855087 - DNA, 100 bp, Homo sapiens
cgcccctccacagacccagggcatttggtggacacttttgcttgcagttaggtcaagtggagtaaccctccactgagtgaagaaatgttgcctcctggag

SEQ ID NO: 855088 - DNA, 100 bp, Homo sapiens
agacgacgctcacagagctgagacgtacagtccagtccttggagatcgacctggactccatgagaaatctgacttcctgctatatcctgatcatcactat

SEQ ID NO: 855089 - DNA, 98 bp, Homo sapiens
cagatatgcctgctaacatggataagcatgccctgaaaaagtatcgtcgagaagcctatcatcgattctgaagaatatttctgtgtaaaaagaatttt

SEQ ID NO: 855090 - DNA, 100 bp, Homo sapiens
gagaaagagattgccatgatatttacaactctttgctacaactgtcaaaacaagaaaatccatcctctcagtattggaaggaagtggcagaaaaacggag

SEQ ID NO: 855091 - DNA, 100 bp, Homo sapiens
aaatggcgctccaacaccagcctgctgcagcagaacttgaggcagctgatgaaagtcgatggtggtgaagtagtgaagagctcctgaaggaagcactaaa

SEQ ID NO: 855092 - DNA, 100 bp, Homo sapiens
gaagaaactcaatgatcgtgtcatgagaggaatcttttaactgagccagtcggctacttggaatcttgtttctcggccaagaatggtactccaagacagc

SEQ ID NO: 855093 - DNA, 100 bp, Homo sapiens
atgaaggagtctatgtctgtgtagcaaggaattaccttggagaggctgtgagccacaatgcatcgctggaagtagccaccaaaattgcctggaaaagagc

SEQ ID NO: 855094 - DNA, 100 bp, Homo sapiens
cacgaattgtgagagtaagagttatagccggaataggccttgccaagaaggatatattgggagctagactaatctggtagcttctggtgctaatgaatct

SEQ ID NO: 855095 - DNA, 98 bp, Homo sapiens
tgcttggcagcagaaggatttggcaacagactttgtttcttggagtccacttccaattccaagctcgagaagctgcaatttgggagctcgaagaacga

SEQ ID NO: 855096 - DNA, 100 bp, Homo sapiens
tgatgttgggccaggaagttggttactccattcgatttgaagactgcagtagtgcaaaaaccattcttaagggagccttagcatcatcaaatctaaaatt

SEQ ID NO: 855097 - DNA, 99 bp, Homo sapiens
tcctcaggagctgtggggtcccctgctagaagtgggggactcggcggggactctcgttggggagatagagattcagaaggcacctggagaaaaggacct

SEQ ID NO: 855098 - DNA, 99 bp, Homo sapiens
atgacagtctccaaattcgcctccatctgtaccatgactattgcccagaagaaaagatgtttggttttcacaagccaaagatgtaccgaagtatagagg

SEQ ID NO: 855099 - DNA, 100 bp, Homo sapiens
tcagagggaagatctttttcctcaattggaggcaggtggaagtcatcataaagtttctgtttcacccgtcgtccatgttcgaggactctgtgaatctgtg

SEQ ID NO: 855100 - DNA, 99 bp, Homo sapiens
ctactatagtgttcctgagctgccaacgatacctgaggggggttgttttgatgaaagtgaaaggaactagacaaagaactcccagtgcttaagccatat

SEQ ID NO: 855101 - DNA, 98 bp, Homo sapiens
gtatcccgttgtttcagaggctgcaaacaacaattttggagtggtacttacagattcctctaggcacagtggagtcttttagagattcctgccaaaaa

SEQ ID NO: 855102 - DNA, 100 bp, Homo sapiens
ttcataaagcaaaatttgccgaacgagggttcgcagaaaggtggggcagagctcatctgacgtggcatcagtattctaccttgtaaatactgttatttgt

SEQ ID NO: 855103 - DNA, 98 bp, Homo sapiens
acactgtccggatcttccctccctgggtcagtttgaaaaggaggatcgagctcactgtggagtatccatggagatgtggagccttgtcaccaacctct

SEQ ID NO: 855104 - DNA, 100 bp, Homo sapiens
cttcagctgctcggacagatgaagctccccaaggagctgcagtcataccctaatgatcccagcaagataatgtcctgtcttctaagatgtgcatcaagcc

SEQ ID NO: 855105 - DNA, 98 bp, Homo sapiens
agcgaaaagttcaaacacacgtcagcagacatgaagccattattatatcaggaaccgaaatggccaagcatatccagaaagaaatacagcgaggtgtg

SEQ ID NO: 855106 - DNA, 100 bp, Homo sapiens
cagcttttgtgagaaaattttgccgtggttggacaaatcagtagatttcattggaagcaattttggaggtggtggaagctacaatgattttgggaattac

SEQ ID NO: 855107 - DNA, 100 bp, Homo sapiens
aggaactggtagtgccgatggcaatgatggttatgaagctgatgatgctgagttaaagccttccatctgaagtatgatgaagttcgtctggatccaaatg

SEQ ID NO: 855108 - DNA, 100 bp, Homo sapiens
actgcggcccgtggcggcgtgcgcggggacctgcgctgactaggtccggggaagatctatgcagttagatcagttgttcccaacaaaagcaataatgaaa

SEQ ID NO: 855109 - DNA, 100 bp, Homo sapiens
tcagccgccgcatcgcgggggtggaggacatcgacatccaggcgaactcggcctatcgctaccctccgaagtccgttccaagatgagatgggattctcca

SEQ ID NO: 855110 - DNA, 100 bp, Homo sapiens
gctgaactgggtgctttatataggatcttcagtcgtgctggtgaagcctgcaaaaaggtgatacttaatgtaccttctaaactagaggcagacaaaataa

SEQ ID NO: 855111 - DNA, 98 bp, Homo sapiens
tttaccatgtcaccctcaaaagagtccagattcaacaggctgccaataaaggagcaagatggctaggggtttgtctacagattttgagcgttcgaagt

SEQ ID NO: 855112 - DNA, 100 bp, Homo sapiens
caaagggagagggtgaccgacatcccaactaggtctgtgtgaaaatgtgtgaccctgccaaaggagcagctggccagagaaccatcgctgcccttctgcc

SEQ ID NO: 855113 - DNA, 98 bp, Homo sapiens
caatacgtttccattgtgatcccaccttctgggcaaagaatgtagtcaatttagggtttgctgacatcccgacaggaaagactagcccatatatcctg

SEQ ID NO: 855114 - DNA, 100 bp, Homo sapiens
ttatcaccacacgactgggtatatttcctctctgacaaatgctgtgcttcatgaagttaaaagagaggggctccccgtggaacaaaggaatgaaatcttg

SEQ ID NO: 855115 - DNA, 101 bp, Homo sapiens
aactctggcaaaagctctcacaagcaaaagccttggagaggaggagaatgtatcaagatatggctcgtggacagcagaaaattcagtctcagcagaaaaat

SEQ ID NO: 855116 - DNA, 100 bp, Homo sapiens
aagaagagggtggtaaaaagcctaccatacttgccgactgaaagggacatctacagggctgagtgtttggatctcaaagacggaattagattggttcctt

SEQ ID NO: 855117 - DNA, 98 bp, Homo sapiens
agatccgctttggagggagaaaggagattgcctcggattccgacagcaggttcctcaagccaggacctacgcacctgttgtgagtggtgttatagttc

SEQ ID NO: 855118 - DNA, 98 bp, Homo sapiens
aactcagaagtggagagaacgtctgaggctacatagccagtacaaatttctcttcagcaacgggtagcagaattggaaaaaattaatgcagaattttt

SEQ ID NO: 855119 - DNA, 100 bp, Homo sapiens
gatgagcagattagactgatggaccagaacctgaagtgtctgagtgctgctgaagaaaaggtgaattttgaagtcttcatcagtatatccatattaaaac

SEQ ID NO: 855120 - DNA, 100 bp, Homo sapiens
tgttgagttttatcattttcgttaagtgaccgtgcgcagcgctgtaactattatgtttgagaccttcaacaccccggccatgtacgtggccatccaggcc

SEQ ID NO: 855121 - DNA, 100 bp, Homo sapiens
tatccccgtttccagagccgcggccctcagggcgtggaagacggggacagatcacttctccctgggctcccaggccctcctgcagcagcccccgcctggg

SEQ ID NO: 855122 - DNA, 100 bp, Homo sapiens
atatggtggtctctctgcaggggagttccagctgatccggcagacactcctcatcttcttccaagacctgcacatccgaatggagtcttgctctgttgcc

SEQ ID NO: 855123 - DNA, 100 bp, Homo sapiens
acggctattcatacaccatgcaaaacagaaccttccaaatttccttttccaactaagcaatttcatcacgaaaacctggtcaatctgattgaagttttta

SEQ ID NO: 855124 - DNA, 100 bp, Homo sapiens
attcgaaacatagtggaggccgcagcagtcagggacatttctgaagcgagcgtcttcgatggtgagaagatgacagaggaagaagtagagatgctggtgg

SEQ ID NO: 855125 - DNA, 130 bp, Homo sapiens
gtcctctccccgcagctgctgccccggcgcaccgactggaccgggaaggagcatcccaggacctaccagaatctggttttaaaatcaaagatgggaaaatcggagaaaattgcccttccccatggccagc

SEQ ID NO: 855126 - DNA, 100 bp, Homo sapiens
agtatacccgaaatgttgttagatattgccttgaagctcttcaagactggtttgatgctattaacttcgtagacgagctgccaaggggccaagggatgag

SEQ ID NO: 855127 - DNA, 100 bp, Homo sapiens
ctgtcactgcagctagcgaccagaagcaaggttgattcttcaccacactgaaaccattaggaaaaatccttgtggttaacagcagaggcttcagagtgta

SEQ ID NO: 855128 - DNA, 98 bp, Homo sapiens
taaattgttggcgggtttcatgggcgtcatgaataacatgcggaaacagctgggctcaaaatgcagagaactcaaagatattcatttcggccagtgtt

SEQ ID NO: 855129 - DNA, 100 bp, Homo sapiens
ggcattgagatgctggagacagacacattcaaattgcactgctaccagacactgacaggctcttaaagactctgaccaagtagcacagagtgatggggag

SEQ ID NO: 855130 - DNA, 99 bp, Homo sapiens
tttgttttatcctgtatgaactttgacggtggatttggttgcagaccaggttctgaatcccatgctgggcagatgaccggtggtttcctgagctgcatc

SEQ ID NO: 855131 - DNA, 100 bp, Homo sapiens
gacggtcacccgaatcgcagggagtcgccgctggagaggggctcggcgcccggcggggactgcagaagctaaaccagccccagaaatatttgaaaatgaa

SEQ ID NO: 855132 - DNA, 100 bp, Homo sapiens
agcagatggctcgagaatacagagagaaaattgagacggagctaagagatatctgcaatgatgtactgcaggaaaaccgaaagcgccatggctctagtcg

SEQ ID NO: 855133 - DNA, 99 bp, Homo sapiens
gaggttcctggcttatcagggcagtccgatgatgtccctgcagggaaggaaccagtgatgcccatggatcagtcatccatgcattctgaccatgcacag

SEQ ID NO: 855134 - DNA, 100 bp, Homo sapiens
aagctcaagatgtaggacatctccatcaattcaggaggctccctccgggttacccccactccagagcttttgcaagaagctgaagtatggaaagaacaag

SEQ ID NO: 855135 - DNA, 98 bp, Homo sapiens
ctaatcaacagagttacatagctgctatcagtgcccgctttgttcagctgcagcatggagagatagataaacggatacagtttatgtaacttgatgga

SEQ ID NO: 855136 - DNA, 100 bp, Homo sapiens
tgtcaccttgtcccgctgcagccgagatgccgggggagcggggccttccacaccccctccgtgggtgtgtgggctcaaaatctccttcgccaagaccaaa

SEQ ID NO: 855137 - DNA, 98 bp, Homo sapiens
agtggagaaagccatcaagaaatttggagttaactttatgaagtgcatcataaaacaacgttttatttgaagttgctgatacggaattcagatgggag

SEQ ID NO: 855138 - DNA, 100 bp, Homo sapiens
ttcatttcaacagccagggagaaagcctggatgctcaagggatgaagaaccaggaggccagctggttacagataagttccatattgactgggattccgta

SEQ ID NO: 855139 - DNA, 100 bp, Homo sapiens
accaaccctgagcattttggcactccagtcataggaaagaaaacaaatagaggaagaagatctaatcatatggaatgaaagctactggttgattttaaag

SEQ ID NO: 855140 - DNA, 98 bp, Homo sapiens
aattgctcggaagttacacagaggacaatgcttcccaggctcgagttgatgcccacagttgaaaatgctatggattgtctattagaattatctgccac

SEQ ID NO: 855141 - DNA, 99 bp, Homo sapiens
ttgtggataagcacaaagtcaagagacagcgattggacagaatttgtgaaggccaggagtggtggctcacacctgtaatcccagctctgggaggccaag

SEQ ID NO: 855142 - DNA, 99 bp, Homo sapiens
catgattgagtgaagccaccccgtccgcagccaggattggttgccgtggtctttactgcttttctccctgatgtgtgaaacaagcgccttctatgtgcc

SEQ ID NO: 855143 - DNA, 100 bp, Homo sapiens
cctcctttagaaaactgatcttaatacagcaaatacttccctggacaagaaagccagatgaaactgatctaccagggccgcctgctacaagacccagccc

SEQ ID NO: 855144 - DNA, 99 bp, Homo sapiens
caccactcctcccaaaaagctaccccggctgaagaagtggaagactccaatgtagtattattgattccacagaatacagccaacctccaggtttcagtg

SEQ ID NO: 855145 - DNA, 100 bp, Homo sapiens
cagtaaacacatattagactggaaaattcttctctttttagctcgtggcacaaaatcctgatggactccacgaaaggcattatcctgcactgaaaactct

SEQ ID NO: 855146 - DNA, 100 bp, Homo sapiens
gaatttgtacacatgtacaatgcccaatgcgatgctttgcatcctaaatcagcattgcagtgtcgagatggctatgaaccctgtgtaaatgaaggaatgt

SEQ ID NO: 855147 - DNA, 100 bp, Homo sapiens
caggaatacatggaagtccgggagagaatacacagagccagtttgcagtatcttcagagtctgaattttgagcggatagtgatgagccagctaaatcccc

SEQ ID NO: 855148 - DNA, 98 bp, Homo sapiens
tgaacttcaccatcctacagatcttccctttcacctatgaaagcaaacgtatgggcatcatcgtgcgggtatttgaaatggacatcgctaaacagtta

SEQ ID NO: 855149 - DNA, 99 bp, Homo sapiens
gaaaaactcagtgagacacaatttatcattgaataagtgttttaagaaagtggacaaagagaggagtcaggagtataatgtctcaggaaggcgattatg

SEQ ID NO: 855150 - DNA, 100 bp, Homo sapiens
ctggggagcgcctcgtcgacatgagtgatgtggaggaaaacaacttcgagggcagagcaacaggacctgtaccgaatcctgaaggcctacaccatctacc

SEQ ID NO: 855151 - DNA, 100 bp, Homo sapiens
ccggcagctccttaccttcctggactgattcaggtctgtgtgtcatgattgcggcctccatttatacagacaggcgtgaagacattcacgacaaaaacgc

SEQ ID NO: 855152 - DNA, 100 bp, Homo sapiens
gaggctcaggaggcagcatccagtgataacatcatggtccagctcaacgggacccaggtggagtctgtacagctcaaagtcaacatagcccgaaaacagc

SEQ ID NO: 855153 - DNA, 99 bp, Homo sapiens
tgggaaagaccttgatcccaacaatgttatcattgagaacgtcaaggtcgtgggaaataaaaggcagttctacacagactgcagcaacggttgcatctg

SEQ ID NO: 855154 - DNA, 100 bp, Homo sapiens
ctgggattcgcgctgctgggcacccacggagcctccggggctggccgtcctcatcgtcagcgggaacctcagcttcctgaactggctgactatggtgccc

SEQ ID NO: 855155 - DNA, 100 bp, Homo sapiens
tcagtttccccatctttagaacggggctcttgtttggaactgtgcccgccacagcctgcaaatctatgtactttcatcagcgcggccagtaagtttgcac

SEQ ID NO: 855156 - DNA, 100 bp, Homo sapiens
gatttggaaatgtcatccgatggcacaatcaggttgatacccaaagatcagtattactgtggtgttctctatttcactgggagtgatattttcaataaga

SEQ ID NO: 855157 - DNA, 100 bp, Homo sapiens
aagagagcagtaccctgatggagtcccttgcagggtgcttcaaggatgaccgcatcgtcttctggacttggatgttctccacctacttcatggagaaatg

SEQ ID NO: 855158 - DNA, 100 bp, Homo sapiens
cggaactcgagaggaccaacaagttcatcaaagagctcattaaggacgggaagaacctcatcgctgcgacgaaaagacttcctcgttctgcccatcttcc

SEQ ID NO: 855159 - DNA, 99 bp, Homo sapiens
aacggcggcgacaagggtgttcccgaactagagtggcactattcctgatcagagaactccagttgcttcaacacacagtatcagtagtgcagccacccc

SEQ ID NO: 855160 - DNA, 100 bp, Homo sapiens
agaagtagctgaatgtgttactccattgctgaggagtgcgtcgtctcggagatgcagccaagaaagccatcagtaaattgacaaccaggacagtaaagaa

SEQ ID NO: 855161 - DNA, 98 bp, Homo sapiens
gcttgatgaaggcgtggatagcctgaaggcagccattcagcttcctgcctgacacagctcacttcaagaagtgcacaatgtcagaacgtggaattaag

SEQ ID NO: 855162 - DNA, 100 bp, Homo sapiens
cacttataagaacttggcccagctggcagcccagcgggaggatctggagacagccatggagttctacttagagaaatgcactcggtgatggaaagagagc

SEQ ID NO: 855163 - DNA, 99 bp, Homo sapiens
gtggttgagacaagtgcaaaaaatgctattaatatcgaagagctctttcaaggaatcagtgttgacttcaaaatcaaaactgtagagctaagaggaaag

SEQ ID NO: 855164 - DNA, 100 bp, Homo sapiens
gctgtggccctcagaatttaaacttaaggaaagagtgggaaagtgaggggctgttgataatcaggtgtatgtggccacagcctctcctgcccgggatgac

SEQ ID NO: 855165 - DNA, 100 bp, Homo sapiens
tggaaagtggaaaagaagccagtgttcatatccaactggaaggccggccatccattttagaaatgagctccttaataagcatttatagtcagtttttggc

SEQ ID NO: 855166 - DNA, 100 bp, Homo sapiens
ttgacctgactgtccgcacgcagaagcagggggatgacagctctgaatgggggaactccttcttctgtactatactggcaattgctggagaagattttgc

SEQ ID NO: 855167 - DNA, 100 bp, Homo sapiens
gcgaatgctgctgcagagctcggaggggcgctgtgtgtacatcacccccatggaggccctggcagagcaggtatgggctattccatgtatcgggaattct

SEQ ID NO: 855168 - DNA, 100 bp, Homo sapiens
gagatgctgctgaatgagaaaggtgctgtgctgtggctttcattgagaagctagacgcccagtctttgaatctaagtcaggaggattttgatcgctacat

SEQ ID NO: 855169 - DNA, 98 bp, Homo sapiens
ggcagtgcatgaagccaggggtcatcagccatgctccagacagtgtggttccaggcatgaacaaccgggaggtgctggagcaggtggagcgaggctac

SEQ ID NO: 855170 - DNA, 98 bp, Homo sapiens
ttagtgtgctctgagggagggtccgagccagccgctgttttgccggaggagcccctcaggccagctggagaaagagctttcccggaggcccaagaagg

SEQ ID NO: 855171 - DNA, 99 bp, Homo sapiens
cgaggactccgctcctgcccagacaaatgctgtgcttcatgaagttaaaagagaggggctccccgtggaacaaaggaatgaaatcttgactgccatcct

SEQ ID NO: 855172 - DNA, 100 bp, Homo sapiens
cgaccaatacactgaggccctggcccagagggacaagttggtgaccagattgttgaaatcaatggggaacctacacaaggaatcacacatactcgagcaa

SEQ ID NO: 855173 - DNA, 98 bp, Homo sapiens
ctctggccagctgactgcacttcttttttgagaaaggaaggaatatatcctgactgattggtgggccaggaggcagattctcatcagatttggaagga

SEQ ID NO: 855174 - DNA, 100 bp, Homo sapiens
atttgacacctatgaaacatatgttggctgcctctgctggagaagtgcctcccctggtgaagacacaaactgtcaccatctcagataatgccaatgctgt

SEQ ID NO: 855175 - DNA, 100 bp, Homo sapiens
accttctcggcctctttgcggagaatcgtgaccaagatgtggaacagtgcgtgcaggagctgcggcaggggctgctggtgtggcagcaggaggagccctc

SEQ ID NO: 855176 - DNA, 100 bp, Homo sapiens
aaggcaaggagagaatgtatgaagaacagtcacaggacagggaagctatgcgaaattatttaaaagagcgaggggatcaaacagtacttattcttcatgc

SEQ ID NO: 855177 - DNA, 100 bp, Homo sapiens
ctgcagagaacagccccaatcaccgtccttacacggcctctgatttcatagaagggcgaactttctgaccaagtatacaactacccagagggcctaggag

SEQ ID NO: 855178 - DNA, 100 bp, Homo sapiens
agaagtttttcttccaaacagagctgcaggcatctgatctacagattgcggcttatgcctttacatcttttggcaaaaagctaaccaagaacaagatgct

SEQ ID NO: 855179 - DNA, 100 bp, Homo sapiens
aatggttcgggtagggactcttccaatgaggctgctggccctggattatggagcggacattgtttactgtgagctgctacaggagctgagagaccctacc

SEQ ID NO: 855180 - DNA, 100 bp, Homo sapiens
tttctatcccagttctttggcttttactaaaaatggacgcctggcaaccaaaaacgatactggagtatttgtgtcagacattgtcaaaggaggaattgca

SEQ ID NO: 855181 - DNA, 98 bp, Homo sapiens
aagagtgtgcagcggattaaagctaaagacatagttcctggtgatattgtagaaattgctggattttatggaagaccttgggttatggaacagagaaa

SEQ ID NO: 855182 - DNA, 98 bp, Homo sapiens
ggagctgggaaaggaatgagaagacagaagtcagagacaagaagaggctaacatgactgataccactataatttagtcattatgcagttgctcggcgc

SEQ ID NO: 855183 - DNA, 100 bp, Homo sapiens
tcaggcgtctgagacttggtgggaacggaccttcctcttagtggactgttcatcaccattcatgacaaaggtcatcttgcaacaatgctgaattcttggc

SEQ ID NO: 855184 - DNA, 98 bp, Homo sapiens
cacaggctgaccgagtgagcctgcggaacctgcgcggctactacaaccagagcgaggacggtggagtttgtccatatgctcaatgctaccatgtgcgc

SEQ ID NO: 855185 - DNA, 100 bp, Homo sapiens
cccaccgtcgcctggtgcctcccgcctccgtgtgccctggttgtgagaagacgtctgtgtcgtgcgaagttggtgagatggcaaagcagtatatagagaa

SEQ ID NO: 855186 - DNA, 99 bp, Homo sapiens
catcacataggggtttctgttaaggaactcgatttatatttggcatactttgtgcatgcagcagtctgaacaggaattaagaataactcaaagtgaatt

SEQ ID NO: 855187 - DNA, 100 bp, Homo sapiens
agaaagacaaagacccagtgaacaaatccgggggcaaggccaaaaagaaggacatgaagaatgcaaccctctccctgaattctaatgacagtgagccaaa

SEQ ID NO: 855188 - DNA, 100 bp, Homo sapiens
cgtcgctgctggcacttcaggctctgttcagtgaattctacagtcttggtgaagaacacgaagaagactaatccagagataaaagaaaaaccctgccatt

SEQ ID NO: 855189 - DNA, 152 bp, Homo sapiens
cagccttagatgctcttagtaaagaaaaggcttggcagacattcatcattgacttactattgcactgtcacagcaagttttataggatcacattgacaaaagtaccatggagttttatgagtcagcatattttattgttcttattccttcaa

SEQ ID NO: 855190 - DNA, 98 bp, Homo sapiens
ggatctgcagctagtacctgtattcttaccattgaaatttcaggtatgtcccaaaagtctgtgtgtgtctactcctggacatcgcactgatctttttc

SEQ ID NO: 855191 - DNA, 100 bp, Homo sapiens
cacgctgggagctgtagactggagctgtagacaggagctgttcctattcgggcatcttggctcctccttgagtgttcagtgtgaggtggagctgatagag

SEQ ID NO: 855192 - DNA, 99 bp, Homo sapiens
tcctgttccaccttcagagcgtcacggcgtacgccctcatggggaaaatctccccggtgactttcagagacgaagtttcatcatgttgtccaggctggt

SEQ ID NO: 855193 - DNA, 100 bp, Homo sapiens
ccagctcatgggcacggctcgggacgggaaaacaaagtgcatgatgaagtcttcagactgtgtcataaagcatgctggtgtatacagtactggccttgca

SEQ ID NO: 855194 - DNA, 100 bp, Homo sapiens
gctgtaatgttccaggacacctgccatcatggagggttatccagcacctggaggatacctgctacctgataccatggccaagcggaatacagtgatagga

SEQ ID NO: 855195 - DNA, 99 bp, Homo sapiens
ggtgatgagccgggcctggcggacgcggcgccatcgcagtcaggctgttactgaggcggagacacgggtgatgattggctttctggggagagaggaagt

SEQ ID NO: 855196 - DNA, 51 bp, Homo sapiens
ctaaactcatccttcaaagaaacatgttgtacatcagtacacagaagagac

SEQ ID NO: 855197 - DNA, 98 bp, Homo sapiens
cttaaaacctgaaaacattggaccacacaaagtcttactgttccctgtattgaacactgatatacaaggaatgaatagaagtcaagaaaaacagacct

SEQ ID NO: 855198 - DNA, 98 bp, Homo sapiens
ctgttttccttgcggcggccgtggaaggcgacccggcggctgtggaggccacgctcagctcgccaggcggcgcagggctggagtacaatggcgcaatc

SEQ ID NO: 855199 - DNA, 100 bp, Homo sapiens
tttgaagtatttgacgaaaatagactgacagagggataaattggaagaaatcttgcggggattaactccaaggaaaaatgatattggagatgcaatggtt

SEQ ID NO: 855200 - DNA, 100 bp, Homo sapiens
atgcaactgaattgagtataagaaaagccttcattacaagtactcggcaagttgtcaggttacagagacagttgacggctttggagtgaaagctaggagc

SEQ ID NO: 855201 - DNA, 100 bp, Homo sapiens
gtctgcggcccctggaggaggtcatgcagaaatacatcagatacatcatgtttgagaccttcaacaccccagccatgtacgttgctatccaggctgtgct

SEQ ID NO: 855202 - DNA, 138 bp, Homo sapiens
cagcgcttctatgagtccggggccaaccatcccgtctccagcccgggcttacgccccgccgacaggcaggatggggaagcagaatagcaaactggcccctgaagtgatggaggacctggtgaagagcacagagtttaa

SEQ ID NO: 855203 - DNA, 100 bp, Homo sapiens
catgaagacatagagcttctgcaggctgaccggttccctgatgtgttacctgcttctgctactgatccaaactgcagaacttctcattcatccccaaggc

SEQ ID NO: 855204 - DNA, 98 bp, Homo sapiens
ccaaatctgggaccagtctcggcaaatattacacttctctccttgctggtggttcgtgagcacttctgaggagcagggctgggtccctgccacctacc

SEQ ID NO: 855205 - DNA, 100 bp, Homo sapiens
cagcaccaagaacccactgcagtgctgaggtagggaccatctttgccctcagctggctcatcacctggtttgggcatgtcctgtctgacttcaggcacgt

SEQ ID NO: 855206 - DNA, 100 bp, Homo sapiens
tggatttcctgaagatgtttacagtgcagtcttatcgaaggatgtgcatgaaggacagcctcttctcaatgcttccatgcctatggctgttctaaaattg

SEQ ID NO: 855207 - DNA, 128 bp, Homo sapiens
ccaatccctaaggacagcttttgatttattaaatttaaatagattagtaactggcatagacaactatgggcagattccttatggcagaaagtatgacaaggcatggctcctgagcatgattcagagca

SEQ ID NO: 855208 - DNA, 98 bp, Homo sapiens
atcacccgcaacccggtgttcccgcgctttatcaagattatcgaggtctgtacaacccaccctacagtgctcagtcacaccctgctgcaaagacccaa

SEQ ID NO: 855209 - DNA, 99 bp, Homo sapiens
gtgaaatctggcatattagcgctagccctgcagacagaggtgtgctgacgacctgctacaacagaactgccccagagcacatcagctatgtgccccagc

SEQ ID NO: 855210 - DNA, 100 bp, Homo sapiens
gaacacgactccatccggctgcccctggagcacctggtggaagaacaagtggcagatgtggaaacaacttctgtgcatctcatcgttatgcagaaactca

SEQ ID NO: 855211 - DNA, 100 bp, Homo sapiens
aggggaaggaaacctctctgaaatctgacacctgctctcccggcaaggaaacttcgcaggctgaatctacctgttactcgtattttggacaatcttatgg

SEQ ID NO: 855212 - DNA, 98 bp, Homo sapiens
aattattgaaaacttacagcaagatggttcatcttttgccctagagcaattgaagggctgtcacatggtgactgaagaacttcattccataacgtttg

SEQ ID NO: 855213 - DNA, 149 bp, Homo sapiens
gttatgttactttgccacttcttcacggaccagtttcagttcgccgatgggaaacccggagaccaaatccttggcacctgaatggacagaagaggacctcagccaactgacaagaagtatggttaagttcccaggagggactccaggtc

SEQ ID NO: 855214 - DNA, 98 bp, Homo sapiens
gctacaggattctggaaccgtggagacaccgagaaaccatgagtgtaaggttaccccagagtatagacaggctgaagccgacgtagcttctctgaaca

SEQ ID NO: 855215 - DNA, 100 bp, Homo sapiens
ggggtcgagcttcctgataacgaggctgtggagcagcacagaactgataaatttcaaacggaagagagtggcagcatttagaaagaatctaattgaaatg

SEQ ID NO: 855216 - DNA, 98 bp, Homo sapiens
tcctcggagcaccccatccctgacgacaaaggctgtgctcttggtgaggaagttttggataaccagtcccagcctcgtgaccctgggcctcagtcagc

SEQ ID NO: 855217 - DNA, 99 bp, Homo sapiens
acagaggccagcgcgctgcaacacaagatcaagaactccatctgtgatccttacgtgagagtgacgttatatgacccaatgaatggagttcttacaagt

SEQ ID NO: 855218 - DNA, 98 bp, Homo sapiens
ggagaagagcccagcacaacgaaggtggcaagtgcaggcagctgtcccggttatgccggaatcgttgcaggtgagtccatcagaaacaggagctgaca

SEQ ID NO: 855219 - DNA, 100 bp, Homo sapiens
gaacaaagtaattttctgaagggaagctgcagaatatggaaaacatatattggagctacatggatgttagcactctacgtatatgaatatctgctccatg

SEQ ID NO: 855220 - DNA, 100 bp, Homo sapiens
gcgaacgcggagagcacgccatgaaggcctcgggcacgggtcagccagcagccggcccggggtgtcagccaccccacccaagtccccggtctacctggac

SEQ ID NO: 855221 - DNA, 100 bp, Homo sapiens
gtcgtctagaagaagtgatgggtatccggtcttagaatacattccagaaaatgtatcaaggtcttcaatgaaatttatccagtatggacttactcttacc

SEQ ID NO: 855222 - DNA, 126 bp, Homo sapiens
ctgagtttgcggagaggtcagtaactaaattggagaaaagcattgatgacttagaaggaagtacatttgaagaacgcaagtagagggagtgcaggaaacaagaactacaggatgtaggaagaccct

SEQ ID NO: 855223 - DNA, 99 bp, Homo sapiens
tacagtgactccatcttcttcctctcggtcgccatgcatcagatcatgcccaaagaaccccagctcaaagggattgtgacaaggttattcagccagcag

SEQ ID NO: 855224 - DNA, 100 bp, Homo sapiens
taacgatgaggacaaacagaagattctggacaagtgtaatgaaattatcaactggcttgataagaatcagggtggctttgcaaaatgttacgagatgaca

SEQ ID NO: 855225 - DNA, 51 bp, Homo sapiens
gtatgtggtcaacttcggggccgggggtgccgtgagcgatgtggagatgca

SEQ ID NO: 855226 - DNA, 99 bp, Homo sapiens
ccagagctgagggctacagcaacgtgggcttccagatattaacctggctgcagagccaaaagtgaaccgaggaaaagcaggtgtgaaacgatctgcagc

SEQ ID NO: 855227 - DNA, 100 bp, Homo sapiens
gccttgccttgctgctctacctccaccatgccaaggttcgagaacttgtcttggacaattgcaaatcaaatgatggaaaaattgagggcttaacagctga

SEQ ID NO: 855228 - DNA, 99 bp, Homo sapiens
ccagtcccacttcaaacattcgtctcggaaaccccgcctcttacagtcacgaggcataaacttggaggaggcagtggagagagcatcctggtatcacag

SEQ ID NO: 855229 - DNA, 100 bp, Homo sapiens
acgcccccgacctcgtgcggccaagacgtggatgttcctgctcttgctggggggagcctgggcaggccaaagatgaagaggaagcctttctggattggag

SEQ ID NO: 855230 - DNA, 98 bp, Homo sapiens
ggagctgctgggcgaagcacgctactacctggtgcagggcctgattgaggactgccagctggcgctgcagtctctgaaagccactcggaatttctcca

SEQ ID NO: 855231 - DNA, 100 bp, Homo sapiens
cttggttccccctccctcagcttccgccccaaaaggtattgttgcagcatctggcagtgagactgaggatgaggacagcatggacattcccttggacctt

SEQ ID NO: 855232 - DNA, 98 bp, Homo sapiens
agtgacagaaccgtggacagcaacatttcccacaggacacgaagtttgtcggcccttgccttggcagagctgagatcatgcatgcattttcagttgct

SEQ ID NO: 855233 - DNA, 99 bp, Homo sapiens
cgcctccgaagatgggggatttctacgacccggagcacccgacccctgacaatggctgccatccggaagaaactggtgattgttggtgatggagcctgt

SEQ ID NO: 855234 - DNA, 98 bp, Homo sapiens
ggccaccggctggagcggatcccacacctccggaccgagggacgcgggaggaagaaggcacctacgatcaaactctggagttccgtaggggaggtgat

SEQ ID NO: 855235 - DNA, 100 bp, Homo sapiens
gagctacctgtcgcctcagggccggcggtactatgtcaacacgaccaccaatgatgctgagctcaggagtagcagccaaggttcccaaaaaatagtcgag

SEQ ID NO: 855236 - DNA, 100 bp, Homo sapiens
gaagtagttataaaagcaaacacaggattcaccacagtacttcacatcgtcgttcacatggggggtgagcccctccagactccgaataggagatcaagag

SEQ ID NO: 855237 - DNA, 100 bp, Homo sapiens
taaacagccatgttgctcacacaaagcctgtttggtggtctcttcccacggacgcgcgagacaatgaggagaatgttggctcaattaagaaacatcaggg

SEQ ID NO: 855238 - DNA, 100 bp, Homo sapiens
aacagcaggcacccaagcgggcggcaggaagggatgagaccatgcagcctgcgaaaccatcctttcttgaatattttgaacaaaaagaaaaggaaaacca

SEQ ID NO: 855239 - DNA, 74 bp, Homo sapiens
tcttgggtgaaaaatatatccgcagggttcggatgagaccaggcctgaagctgcccagcaggcattccaaggcc

SEQ ID NO: 855240 - DNA, 100 bp, Homo sapiens
aaggaagtaaaagaaagaaatattttgttatatgggcttctcatatcttacccacaggtgaccaagaatatggcccaggtgaccaaagccctggacaagg

SEQ ID NO: 855241 - DNA, 100 bp, Homo sapiens
ctccctcccgcgcgtgctgcgggtctgctcgggggtctacttcgagggtgactctcctattccatctgtttcttcgggatcatcttcacctctttcagcc

SEQ ID NO: 855242 - DNA, 100 bp, Homo sapiens
ttcttttcctcagaactactatattcagtggctaaatggctccctgattcatggtcaaaatgcagatcttcgtgaaaacccttaccggcaagaccatcac

SEQ ID NO: 855243 - DNA, 100 bp, Homo sapiens
gagaaaattataaagatcattccatggctccaagtttaaaagaactacgtgttttatccaacagaatcagcaatctaagtccagaagaagagcagggact

SEQ ID NO: 855244 - DNA, 98 bp, Homo sapiens
gaaaaataccacgacaaaaccaccctaatattgatgagtgtactcaggtccaacacctctgctcccagggccgctgtgaaaacaccgagggaagtttc

SEQ ID NO: 855245 - DNA, 100 bp, Homo sapiens
ttgatccagaagaaccgccgagtggtgctggcctccttcctgctcctgctgctggggctggtgaaatgttcagagtgaaagaagaaagcagtagcatttc

SEQ ID NO: 855246 - DNA, 101 bp, Homo sapiens
gctcctgtcttccattgaggcagaaggttatgccaaggacgccctgaatctggcacagatgcaggagcagacgctgcagttggagcaacagtccaagctca

SEQ ID NO: 855247 - DNA, 98 bp, Homo sapiens
aaaaaatgcagataaagtgtttgccatgaaaatattgaataaatgggaaatgctgaaaagagctgagaaatatggctacacacacctttctgcaggag

SEQ ID NO: 855248 - DNA, 100 bp, Homo sapiens
gaaggatttggcaacagactttgtttcttggagtccacttccaattccaagggagagcctggggatgtacaggagatgcctgctccagaatctcctcctg

SEQ ID NO: 855249 - DNA, 100 bp, Homo sapiens
gcggctgcggtcgggccaaggttccgcgccgggcgtggacggtgtggggcggtcccggccccgcaggctgaagccgacgtagcttctctgaacagacgca

SEQ ID NO: 855250 - DNA, 99 bp, Homo sapiens
aaggagctactgcaaatgtctttcgtggaagacataagcttaattggcttagtgtcgacttcaataattggaaagactgggaagatgattcagatgaag

SEQ ID NO: 855251 - DNA, 99 bp, Homo sapiens
ccacctgctgcacccacgaatctgcccacccctcctgtaacccagcctgtttcacttcttgggtggttctcttcccaaagtggaagccaaattcatcaa

SEQ ID NO: 855252 - DNA, 100 bp, Homo sapiens
atgctttcttcaagatggaacaaagactgttgagtatgctccatgtagatcacgccataaaattttgagtagaaaaatccagaaatttgaaaatcagtat

SEQ ID NO: 855253 - DNA, 100 bp, Homo sapiens
ttcctgtacagcctgcagaactgtgtcgtgaaaactacccctaaaagccaaaatgggaaaggaaaagactcatatcaacattgtcgtcattggacacgta

SEQ ID NO: 855254 - DNA, 100 bp, Homo sapiens
tgataaagggctctgaaagctagaagaaaaggtgtacttgcaagaaacctcaggacttgagtaacagcaacatggtgagaattatgaagatgatgaccta

SEQ ID NO: 855255 - DNA, 100 bp, Homo sapiens
cctggcctcgctcctgttctcaggacaagcaggttaaaacgtttggacctctggccgcaggaaatgggaccaaccttgatgaatatgtggctttggtgga

SEQ ID NO: 855256 - DNA, 101 bp, Homo sapiens
aaccgccagatcaacctggagctctacgcctcctacgtttacctgtccatgtttaagtgctgtggggctgctaactacacagattgggagaaaatcccttc

SEQ ID NO: 855257 - DNA, 121 bp, Homo sapiens
tcctcccttctggtgtactgggtgggaggtggaactagtcggacaaagccctcgcgtcggacccttgccagaactgaatgtatcctgtcaggtataatgtcagtgaatggcaagaaagttc

SEQ ID NO: 855258 - DNA, 98 bp, Homo sapiens
gaaaactctcagtccagaaatgcagagctttgtgagataccacccacttctgatacaaagtcagatactgcaacagagcatcgaactggctccacaca

SEQ ID NO: 855259 - DNA, 98 bp, Homo sapiens
cagcgcgctaaccctttactcgcgacctttcgcttcaccttcacagcagccctgcgaggttattcagcttctcaaggctggaaaagcgaaggaagttt

SEQ ID NO: 855260 - DNA, 100 bp, Homo sapiens
ctcttcaatgctgtttcaggcttaaacatcacagcagataatgaagctgattttttagctgaggtgatgtacagttcattgattatgaatattctggata

SEQ ID NO: 855261 - DNA, 100 bp, Homo sapiens
aagacctccatgatgagccatctccacttaatgactgtctcacattggccggcaacttgttccagcccggaagatggtgagatccatccagaaatctgtc

SEQ ID NO: 855262 - DNA, 100 bp, Homo sapiens
gtagagctgataccaaccaaagaaaataacacaggatacattaatgcctcccacatcaaggtgaaagaacttgtcctggacaacagtcggtcgaatgaag

SEQ ID NO: 855263 - DNA, 99 bp, Homo sapiens
gactgattgtcatgctcagggaccctgtggagagcttcctgcctgacacagctcacttcaagaagtgcacaatgtcagaacgtggaattaagtgggctt

SEQ ID NO: 855264 - DNA, 98 bp, Homo sapiens
tgaatgactggaaactgattggaaactctttgggaaagccactcgaaaagctgaagaaatcaggggagaaacccctgcttggtggaagcctgatggaa

SEQ ID NO: 855265 - DNA, 100 bp, Homo sapiens
cttggcagacaaaaagcagagaataattctttgagcccccttacccaggaatggaacaacctccacaccatccttactatcagcaccatgctccacctcc

SEQ ID NO: 855266 - DNA, 100 bp, Homo sapiens
ctccatggatgaacacaatgcagccaatatatcaattgtagatatagatactaatcaggaggagaatatagcaacttcgtcttctggaaacaactttggt

SEQ ID NO: 855267 - DNA, 100 bp, Homo sapiens
attgaaaacatctcccaatgaagattttcacccgatggaagactaattgtgtcatgtagtgaggataaaactattaaaatttgggataccacaaataagc

SEQ ID NO: 855268 - DNA, 98 bp, Homo sapiens
gagtgtgttgcaaacatgaaagttttacagctcccagcacagtaggaaagagaaatttgagtcctagtcaagaggaagctggcctggaggacggagtg

SEQ ID NO: 855269 - DNA, 100 bp, Homo sapiens
ggccgggttgccagattacgggggctttgaccacgacctttgaagagcttcattttgagatcaagccccacgatgactgcacagtagagcaaatctatga

SEQ ID NO: 855270 - DNA, 98 bp, Homo sapiens
ggctgctgccaagggctacattgaggtgatgaggcacgggcgagagcgggaagagcacgttcatcaagcagatgcgcatcatccacggcgccggctac

SEQ ID NO: 855271 - DNA, 100 bp, Homo sapiens
cctggctcaatatctaatcaatgtcaggttttgcacactagggaccaagaagccctcggggacactgctgagaaaagactgccgaagggaagaccagcgg

SEQ ID NO: 855272 - DNA, 99 bp, Homo sapiens
aaaaaattaaattttaaccatgagggaaatcgtgcacatccaggctggtcagtgtggcaaccagatcggtgccaaggtggatgaagactacatccagga

SEQ ID NO: 855273 - DNA, 99 bp, Homo sapiens
tggactgcagcctcggcggtcagcagaaatgcccggcgaagccacagaaaccgtccctgctacagagcaggagttgccgcagccccaggctgagacagg

SEQ ID NO: 855274 - DNA, 100 bp, Homo sapiens
aggacggccgccccttctgctgtggctgttttgagtctctctatgcggagtactgtgaaacctgtggggaacatattgaaaactgctttatggagtaaat

SEQ ID NO: 855275 - DNA, 100 bp, Homo sapiens
gttattttgttttgcagttcggggccaagctggagggaaggagccatgtgttcacatgtcatgtggaccagtatttaactgtggaaaccgcgggtggcat

SEQ ID NO: 855276 - DNA, 51 bp, Homo sapiens
caggtcaagagcctctgcgagaagataagtaatggaacatcatctgtgatc

SEQ ID NO: 855277 - DNA, 100 bp, Homo sapiens
tgctgctgctgctgcccgcgtccgaggctcgcgggcggcgggcccgggttaaaaagatcaagtggcatgagcagccttttggggaaaattggtgccaaga

SEQ ID NO: 855278 - DNA, 100 bp, Homo sapiens
cagaggagtgtgccatattccaatggctgagccgttttgccccaaaacgagagagtgtgggccaaactgaaattgcagaaggcttcagaacgatggcagc

SEQ ID NO: 855279 - DNA, 98 bp, Homo sapiens
tttttggcagtgccactggcctagctcgatattatccaggtccggtttatcactaaaatatggcatcctaatattagttccgtcacaggggctatttg

SEQ ID NO: 855280 - DNA, 100 bp, Homo sapiens
tctggcccacccatatctggagcagtattacgacccgagtgacgaggaaccatgcaagaagcgcagccaccagaagtccttaaaacagcaggaaaggtgg

SEQ ID NO: 855281 - DNA, 100 bp, Homo sapiens
aaaagaatactgtgaattatgcaagcacagatttgcttttacaccaagtgttggggatgtcctttgcactgaccctgaactgccagattgacaaaaccag

SEQ ID NO: 855282 - DNA, 99 bp, Homo sapiens
ccgggactccctgtgccttgcttggagctgacgccgacggaaacatgatcaggggcaagtcttgttggatgtcgtcttcaagcatctagatttgactga

SEQ ID NO: 855283 - DNA, 100 bp, Homo sapiens
agctatacatgatgtcttcagccagtataaaaacacagctcgacagtacgcctacttctataaagtcatccagcatgacgtatcccagactttactcaag

SEQ ID NO: 855284 - DNA, 100 bp, Homo sapiens
aaaatattacaagagtttccggggagaaactttaggatatactcggtttcaagatgcatcaatctcaaataattctacaagtaaaaggaaatctgagtct

SEQ ID NO: 855285 - DNA, 100 bp, Homo sapiens
agtgaactagtctccctgcagaatgcctctcaccacttagaacccaacatggatttgatcaacctgctcacggaagtggcagtttttgtctttgataaaa

SEQ ID NO: 855286 - DNA, 100 bp, Homo sapiens
catgttcaagaaactgaagcaaaagatcagcgaggagcagcagcagctccagcaggcgctggctcctgctcaggacagaatgacttggaagataacggag

SEQ ID NO: 855287 - DNA, 98 bp, Homo sapiens
tagcagccacgtggggcacttctccagggagttctgggaaatcgttcattcatttacagatgaacagaaaagactcttcttgcagtttacaacgggca

SEQ ID NO: 855288 - DNA, 100 bp, Homo sapiens
agccggccccggcgaggaggcgcggaaccatggccgatgggggcgagggcgaagacgagatccagttcctgcgaactcccagaatgtgaccgtggacgag

SEQ ID NO: 855289 - DNA, 100 bp, Homo sapiens
cctttatggagaacctgcttcaaaatcaaatcgtgattgtttcaggagatgctaaatgtggtaagagcgctcagacatgggaaagcggaaccaccaaaag

SEQ ID NO: 855290 - DNA, 100 bp, Homo sapiens
agcccgctgtaattggaagaccagattttgaacatgccgtggaagcttctaaactttctagtcaagtgcgggcattctatgtgaacgtgctgaatgagga

SEQ ID NO: 855291 - DNA, 100 bp, Homo sapiens
tgccagtgagaggcccaagtccctaggtccaaggatcttataaaggaagctatccttgacaatgactttatgaagaacttggagctgtcgcagatccagg

SEQ ID NO: 855292 - DNA, 100 bp, Homo sapiens
gatctccttaacggacacgcagaaaatattgctgacactgctgaagccagttgcttcttcagctgaccgggctcacttgctcaaaacacttccagtctgg

SEQ ID NO: 855293 - DNA, 98 bp, Homo sapiens
ccgagggccaccccctggtcctctgccctcgcgccccgctagggccagatggggtcgaggatttggtcttttgggttccatttttggaaaggatggtg

SEQ ID NO: 855294 - DNA, 105 bp, Homo sapiens
atagaaataaatccaatggtggaagattcagatggagctggatgtgatggagctgcttgaagaagatctcacatgccctatttgttgtagtctgtttgatgatcc

SEQ ID NO: 855295 - DNA, 100 bp, Homo sapiens
tgagtctttgggggcagcctgcagaggctgcggtacccctgggatggcgtgagcactcccccagcgatggacccatctgtgacgctgtggcagtttctgc

SEQ ID NO: 855296 - DNA, 98 bp, Homo sapiens
ggagagttaatgagtatggaaattgacttagaagatgatgtacattcctcctctgtgtacagtgtacttgaccagaggattcatgaggggcagtattg

SEQ ID NO: 855297 - DNA, 114 bp, Homo sapiens
cactatgccctggaggatgacccgctggcggctttcaaacagcggcaaagccggctagagcagggcaccttctctttcatcatcgaaacctggagagaggagttaggagaccag

SEQ ID NO: 855298 - DNA, 99 bp, Homo sapiens
cggctttgaccgagaggctgctggagctcgtgtttggacgcgtcactggaaggactgagcgcattcaggagcctggaggaactcatcttggacaacaat

SEQ ID NO: 855299 - DNA, 98 bp, Homo sapiens
atgaggtcaatggattaataaggtgcctggtggtgctagctcctcccacctcagcacctgctgcatctggagcagcccaagcctcaggatggacaaga

SEQ ID NO: 855300 - DNA, 100 bp, Homo sapiens
cagtcactggtttgcagagtccagataatgcaccccggaccatatttattataagtatgtataaagatagccagcctagaggtatggctgtaactatctc

SEQ ID NO: 855301 - DNA, 100 bp, Homo sapiens
accctggatcaaatggagccttatctcatagagggcatatcaagagaggagatttctttcacaactcatccagaagtttatctctgtgctgaaatcagtc

SEQ ID NO: 855302 - DNA, 100 bp, Homo sapiens
tatatcatgggaagcactctcacttattaaagatcttgtttcagctcaaattctcaagagcaaccttgcatcaatggaacaacaaattgttcatctggaa

SEQ ID NO: 855303 - DNA, 100 bp, Homo sapiens
ggtccttgcctgctgtgcagtctgatgaaagacttcagcctctgctcaatcacctcagacaatgattgaagctcacgttgatgtcaagactaccgatggt

SEQ ID NO: 855304 - DNA, 98 bp, Homo sapiens
cgcggcgaccgccaagaaaggcagcgaggtggagagcggttcttcgcagcaatagcctgctggagtcaacagactactggttgcagaatcagaggatg

SEQ ID NO: 855305 - DNA, 100 bp, Homo sapiens
ccaggctaccatggtctacaagactctcttcgctctttgcatcttaactgcagggcttttttccagacttcaagctcccattccaacagtaagagcttct

SEQ ID NO: 855306 - DNA, 100 bp, Homo sapiens
atgaagaaagtggttcaacagctccggctggaggccggactcaaccgcgtaaaaactgaagttgctgaagatcctcaacaagtttcaactgtccatctcc

SEQ ID NO: 855307 - DNA, 100 bp, Homo sapiens
actgatcgcgctggataaagatgcgcctctgcgatttgcagcctccccggtgattgagaatggccagctggagtgtcctcaggggtacaagagactgaac

SEQ ID NO: 855308 - DNA, 100 bp, Homo sapiens
agagtcggcacctgaaggacatggagttgccagaggttccaccctctgaggaggaagaacaggaagcctgggtgaatgccttgcttggaagaatattttg

SEQ ID NO: 855309 - DNA, 100 bp, Homo sapiens
tccaggctcggagcgcggcacggagacggcggcagcgctggactaggtggcaggtactctctgaagatggcagaagctcaccaagctgtggcctttcagt

SEQ ID NO: 855310 - DNA, 98 bp, Homo sapiens
ctgggctagtggccacgctgcaaggctttctcctgtttctcagaggatttatcaattatgcaaaagttcggaagatgccagaaactttctcaaatctc

SEQ ID NO: 855311 - DNA, 99 bp, Homo sapiens
gggccgtgaacgaaagcagtgacggaggagcttgtaccaccggtcaatgtgcgaaatggaatgagcttgcatgactgccttatgaaagcactcaaggtg

SEQ ID NO: 855312 - DNA, 100 bp, Homo sapiens
tcaaggtggccatagaatggccgggcgcctaccccaaactcatggaaattgatcagaattaaacaaccaccatgtcgagcaaaaaggcaaagaccaagac

SEQ ID NO: 855313 - DNA, 100 bp, Homo sapiens
gatctctccagtttccatatgttgagattctacttattcatcagtttgttgtgcttgtcaagatcaggtttcagcaagcagatggtggaaattcttcaca

SEQ ID NO: 855314 - DNA, 98 bp, Homo sapiens
tggaatgtaagaccccgactcttcctggtgaagcatctgatgcacgttccatccggcgctcagctgggcttgaggccccttcacagatgtagtcacta

SEQ ID NO: 855315 - DNA, 98 bp, Homo sapiens
aaaaattttgttctataatgacgaacaagataaggagcaatccaatccatctatggtattggacatagaatatgattctataacagactcttccagaa

SEQ ID NO: 855316 - DNA, 99 bp, Homo sapiens
acatcctagcccctttccttactggatcctcaaaccagaagaaaacctgaatctctgaggatgaagcctgctgggagcgtgaatgacatggccctggat

SEQ ID NO: 855317 - DNA, 98 bp, Homo sapiens
acatggaacagggactcactggggatcttaccaatatatttgagtccttcctgcctcagttattggcctatcctaaccccatagatcctctcaatggt

SEQ ID NO: 855318 - DNA, 100 bp, Homo sapiens
ttcttctaatggatgggaacatggggagagaaagttggtgttggcaagatttgcttgtggtgcaacgagaaagggaagtccttctactccacagaagctg

SEQ ID NO: 855319 - DNA, 100 bp, Homo sapiens
cctattcggccatctttgctcctccctgcaactaactccattcttaattgataagtacctaggacttctgagaactactgatttaatttcgctcccagga

SEQ ID NO: 855320 - DNA, 100 bp, Homo sapiens
tcctctcccaagtattcactctatgaagtgcatgtcagcggagtacctggagtagaacagaaaaattattatgtctgtgttcccttgggactcattggaa

SEQ ID NO: 855321 - DNA, 98 bp, Homo sapiens
agctgcttaggcagcaagtatgtcagtgaggagacttgtcacatgcatcaggaccagaggaagaaggtagataatgactataatgcccttcgagaaag

SEQ ID NO: 855322 - DNA, 98 bp, Homo sapiens
gacgggaaggcgggagacgagaagcctgaaaagtcgcagcgagctggagccgccggagcctctgcaatcccagataatggaagaaggtcctgtctaaa

SEQ ID NO: 855323 - DNA, 99 bp, Homo sapiens
caggaggctaagaaagtggtgaatcccctgtttgagaaaaggcctaagaattttggcattgtcagaagaagaagttgtagaaggagagaaggaagtcga

SEQ ID NO: 855324 - DNA, 100 bp, Homo sapiens
atcattgagtccatatttaggacctatccagcagactataatgtaactgcaaactccaagctggtcattatcacggctggggcacgtcagcaagagggag

SEQ ID NO: 855325 - DNA, 100 bp, Homo sapiens
ttcatgaagaagaagagagtgtgctctgtaaagaaataaaggccatcgaagacggcaatttggaggaaatggaagaggaagtacggcttaagaagcgaaa

SEQ ID NO: 855326 - DNA, 98 bp, Homo sapiens
tgattttgctgttctgaatgggggaaagattaatagtgacatttggaagctacctggaccagccctgccttgagaccgtcaaccgcatcaagttgtac

SEQ ID NO: 855327 - DNA, 100 bp, Homo sapiens
ggactgcagcctcgtgcggacgctcgtgcacagatacctctgtggctgtgggctgctgggagtgggcatctggctctccgtgtcccaaggcaactttgcc

SEQ ID NO: 855328 - DNA, 100 bp, Homo sapiens
cccctgcccagatccggaagaacggtgaatttcccccgcagatcctgaaattcctgttcaggtcactcaggatattgagcctcatttgggagccttgttc

SEQ ID NO: 855329 - DNA, 100 bp, Homo sapiens
ccttcctcttggctgcagacacagactggaagccccattggatgagaatgacctagaggaagatgtggactcagaaccagccgagatagaaggggaggca

SEQ ID NO: 855330 - DNA, 100 bp, Homo sapiens
tgcgcgtcctcctccccaggcccgccgcctccctgccaagttcgtgccctcgtgaggctggcatgcaggatggcaggacagcccggccacatgccccatg

SEQ ID NO: 855331 - DNA, 98 bp, Homo sapiens
ctggtcgccatcaagaaagtattgcaggacaagagatttaagtatcaccttttgccatgatagcatttctttcattggacagttccttacaagggctc

SEQ ID NO: 855332 - DNA, 100 bp, Homo sapiens
cgacgtcgtgatccagaagtccagagctgaggactgcctgtttgcaggttttgaagggagcacctgtgagaggaatattgatgactgccctaaccacagg

SEQ ID NO: 855333 - DNA, 98 bp, Homo sapiens
ccagtcggagacctctgccgcaaacatgctccgccagatcatcggtcaggccaagaagcatccgagcgttctgatctacaatggccaactggacatca

SEQ ID NO: 855334 - DNA, 100 bp, Homo sapiens
tctgatactcgattgagtgaagggttttcaattcatacgcgggatagccccaaatgttacaaattgtcgttccaggggtagaggaggcatgaaggatgac

SEQ ID NO: 855335 - DNA, 100 bp, Homo sapiens
agaaactattatcatcagtgatagtgatgattcagaaacacaaagctgttcttttcaaaatgggggctaagccagctctaccataaccagagtcagggac

SEQ ID NO: 855336 - DNA, 98 bp, Homo sapiens
aaggtcttggcctccaaccccatcatggaggagtctgaggggggcctctacatctgtatgaacacgtttctgggctttgggaaacagtatgtggagag

SEQ ID NO: 855337 - DNA, 98 bp, Homo sapiens
agcaatggttgtatcaactatgaaggtgctggagaatctggtaaaagcaccattgtgaagcagatgaggatcctgcatgttaatgggtttaatggaga

SEQ ID NO: 855338 - DNA, 100 bp, Homo sapiens
aaccctcagcgacatctttctgcttttcaagagttccgatttcatcactcgtgacttcactcagccaacatgggcctggaattgatatattcacacctgg

SEQ ID NO: 855339 - DNA, 98 bp, Homo sapiens
gctgcggccatctggggatattcccacaaggatgaggggcaccaccacgaggcgatttgtgggccataccaaggatgtgctgagtgtggccttctcct

SEQ ID NO: 855340 - DNA, 100 bp, Homo sapiens
gtgaaataaacagccatgttgctcacacaaagcctgtttggtggtctcttcccacggacgcgcgagacaatgaggagggcagagcggcttgggtaaatcc

SEQ ID NO: 855341 - DNA, 98 bp, Homo sapiens
aaagatccatgcccagtggcagaaaggcatttgcaagtaaaatcactggcatgttgttggaattatccccagctcagctgcttctccttctagcaagt

SEQ ID NO: 855342 - DNA, 98 bp, Homo sapiens
gcgaatatcgtcatcgttagaaggttattgagccacatgatatatcagtggcactcaacacccgaaaattgtggagcatgcaccttcatgttcaagca

SEQ ID NO: 855343 - DNA, 100 bp, Homo sapiens
aatggtgccgtcagtctgcttcctcatccccccacccaataaggatgccattgagatggccagcagagtacagaatgcaggctattctgtgagccggcca

SEQ ID NO: 855344 - DNA, 99 bp, Homo sapiens
agctcatctctgagacccggaggaggttcgaagctgagtatgtgacagctgactacacagacttagtcttctccactccgtgttcctgcagctagagac

SEQ ID NO: 855345 - DNA, 98 bp, Homo sapiens
gaccccgaaaacggaagcgcagggagaaggaagaggtgtttgaaaagggacaatggtgacagatccaggcaccgagctccacgcaatgcccggatgtc

SEQ ID NO: 855346 - DNA, 98 bp, Homo sapiens
tcagactttaccgtgccattggaaatatacacctgttcttcccggagcctatcagcaaagccattcccaaggctatggctacatgcaccagaccagtg

SEQ ID NO: 855347 - DNA, 99 bp, Homo sapiens
ccgcggcgcggtcggtcggcgcctgttctcgggctgtttggcgggtcaaaatgcagatcttcgtgaaaacccttaccggcaagaccatcacccttgagg

SEQ ID NO: 855348 - DNA, 100 bp, Homo sapiens
gggtggtgctcgcacacagcaggatttaagaggtacaccaggggttggaaaaaccacactaggcaaagaacttgcgtcaaaatcaggactgaaatacatt

SEQ ID NO: 855349 - DNA, 100 bp, Homo sapiens
tgaagactctgggattaatgctaaatttgtgaatgctgtgtatgataccttacttaatactgtccagcccagaatcaaatgcaggttccatctggatatg

SEQ ID NO: 855350 - DNA, 100 bp, Homo sapiens
gaacatgctgtgtgggctcagccgggagacccctggagaggcgggagttaaagttcctcgtaattttcgcttgttggaagaacttgaagaaggacaaaaa

SEQ ID NO: 855351 - DNA, 100 bp, Homo sapiens
aacgaggtggccgaatcttccttcaggatatcaaggtaaaagtacacctgtaagccagcttggttccgcagactttcccgaggcccccgatccattccag

SEQ ID NO: 855352 - DNA, 98 bp, Homo sapiens
tgcagtgggacaggtggcggcgaccggcggcgtccgaggaggaatagccaggccagaagaaggaaggcctgtggtgagtgggacaggaaatgacatca

SEQ ID NO: 855353 - DNA, 74 bp, Homo sapiens
tgcaactactttagaagaaacgacaccattgtttttagggcatggtgctgatgtgaaatgtgtagactggcatc

SEQ ID NO: 855354 - DNA, 100 bp, Homo sapiens
aaccaagcactctagatgccctcaactatgctctccgctgtgtccacagcgttcaagatcaagagcagagattgaacacgaagcactgattgatggaaac

SEQ ID NO: 855355 - DNA, 100 bp, Homo sapiens
gaaacttctctgtcagtactatattggaaaaacctcaaaatatgatggtggttggacagtcagcatttgcagactttggaactagaagatcttctgccat

SEQ ID NO: 855356 - DNA, 100 bp, Homo sapiens
cgccttcaacaccaccttcatctccaccatcggtgtctggggaagccaatgaaactcagattgcagaagcactgaagcgttacagtgaacgggcattctt

SEQ ID NO: 855357 - DNA, 100 bp, Homo sapiens
taccacaattcagggctccatcctggcagacaggtgctacttttactgactggtttacctcttatgtcaaaaatgttgtatcaggtggcttccccatcat

SEQ ID NO: 855358 - DNA, 98 bp, Homo sapiens
gccgaagccttcagtgggactcccccagcagatacattctcactttcatccatcccaggggaatcacttacctatgccagcacaactttcaaactctc

SEQ ID NO: 855359 - DNA, 100 bp, Homo sapiens
taaagaaacagaaaaagttaaaatcaccaaggtgtttgattttgctggtgaagaagtaaggtctacgacgttcctccatcggtgagcaaggatgtgcccg

SEQ ID NO: 855360 - DNA, 100 bp, Homo sapiens
cttgaaagtgcctgccaaagccaagctcaccaaactgaagatgccttctcagtcagttgaggtattctaataggctctacaagtatgatcacaactttgt

SEQ ID NO: 855361 - DNA, 100 bp, Homo sapiens
ccaccatgccgggacatcgttatcgaaatggaagacaccaaaccattactggcttctaagataaggagggttcctgcccccaggtgaacattaactttcc

SEQ ID NO: 855362 - DNA, 106 bp, Homo sapiens
tgttcatggaagaggatgttggacttcttacttgtgtaaacaggaacatcgataagtagtgtaaaaacttgcacaatgaaatccgaagccaaggatggagaggagg

SEQ ID NO: 855363 - DNA, 100 bp, Homo sapiens
tgggaaagcctggcccacacacgtggtctgtagcgacagcggcttggaagtgctctaccagagttgcgagtcccaagagtggcccaaaagagagaattta

SEQ ID NO: 855364 - DNA, 99 bp, Homo sapiens
aggcattgaagctgctgctgagcccgggaggatctgtgccagttcagaagcaggcgagcctcttccctgatgaaaaagaagataacttgctgggtacca

SEQ ID NO: 855365 - DNA, 98 bp, Homo sapiens
gatcttcgaacttttgacacggctttggaaacgacgtcatgtgttaggctttaatttgtgcctggtgctgacctgatgctgtgcagggacactcactg

SEQ ID NO: 855366 - DNA, 98 bp, Homo sapiens
cccaagggagaaagaggcatgttaagccaacaagtggaaatgccttcactatatgttctcctttcagccaagacctttcaccagtgcaggggatagaa

SEQ ID NO: 855367 - DNA, 141 bp, Homo sapiens
cctggaggtgggcaaggtgatccagcaaggtcggcagagcaaggggcttacgcagaaggacctggccacggttgacatcatggacatatgtgagtccatcctggagaggaagcggcatgacagcgaaaggtctacttgcag

SEQ ID NO: 855368 - DNA, 99 bp, Homo sapiens
caaactacagcaagcccatcctacagcaaggcccgagaagatacagtttgttctcaattatttgaagatacttacaagagacagggccttgctctgtca

SEQ ID NO: 855369 - DNA, 100 bp, Homo sapiens
gaggtttctcaagcctcagggccatccccgcctgctgctctggtttaagagctctattatcaagtcctaaattttggaatgattgtctcatcggcactaa

SEQ ID NO: 855370 - DNA, 98 bp, Homo sapiens
ttgatggaatctatgcaaatatgaggatggttcatatacttacatcagttgttgccttcactatcatggaccagaacagggatggcttcattgacaag

SEQ ID NO: 855371 - DNA, 100 bp, Homo sapiens
aacaaaccctgcaggttctaagaagactcttcccggttgatcgtggattatttgagctttcagtggacacgctacagtttctgctcttcttatacattca

SEQ ID NO: 855372 - DNA, 100 bp, Homo sapiens
atttgaaagggaaagtgatgtccctctgaaaactgaggaatttgaagtgaccaaaacagcagatatcacagtgatttgtccatgggaggcattcagccac

SEQ ID NO: 855373 - DNA, 100 bp, Homo sapiens
gcaagacaagctcagaactgagaagctgtcaccacagttctgacccagtgggtgatatatgccatccgaaaccttaccgaagacaacagccaaaaccaag

SEQ ID NO: 855374 - DNA, 100 bp, Homo sapiens
tttagttaatcacgatttctctcctcttgaggtaaagtgttgagagaggagaaccagtgcattgctcctgtggtttccagccgcgtgagtccagggacaa

SEQ ID NO: 855375 - DNA, 99 bp, Homo sapiens
gaagcgagggtctgaagttcacgactactagaaggggaggggagtggaaaggctctcagtgaaaaagattaaagaagctaattgatcaagaaatcaagt

SEQ ID NO: 855376 - DNA, 99 bp, Homo sapiens
ccatgtgttcgagtgtaatttagagagcagcgtggagagtatcatctcaccaaagcaaatgaagaaacacccctgccgccagtgtgacaagtctttcag

SEQ ID NO: 855377 - DNA, 100 bp, Homo sapiens
cctggggaacttctgatgaggatgttacagatgctggtcttaccacttatcatctccagtcttgtcacaggttaccttgaggatagttttgtaaaatctg

SEQ ID NO: 855378 - DNA, 100 bp, Homo sapiens
tgggatctttgaaatgctaagattcttggataccacagtatcataaaattcctctaaatgcagaagcgagcagctgcaaagcatctaatagaacgctact

SEQ ID NO: 855379 - DNA, 100 bp, Homo sapiens
ctgttttggacttgtctattatgtccttgttggcctaactgtgctgagccaagtgccaatggatggcaggaatggtttggaagaggacagttgcccttta

SEQ ID NO: 855380 - DNA, 100 bp, Homo sapiens
gggagggggcagtcctcgccggcgagttcagcttctgggaggtgatcagtgatgaacatggcatcgaccccaccggcacctaccacggggacagcgacct

SEQ ID NO: 855381 - DNA, 100 bp, Homo sapiens
atgtcagctgcactcacagccaggaagacaaaggaatttagatcaccacctcaagaacagaacactgagctgaaggttgaagtggagagcttgaaacgag

SEQ ID NO: 855382 - DNA, 101 bp, Homo sapiens
caagaacaagggccgcgatgtggaatgagatggaagattttcgaggtatagcagaagaatcatttccaagctttctcaccaattcattatttggtaacagt

SEQ ID NO: 855383 - DNA, 99 bp, Homo sapiens
gcaaaccagattctgtgggactcctgtgggactacaatactggcagagtgggagcaccattagtttgctgtgaaatcaaattaaaaaactgggaggaag

SEQ ID NO: 855384 - DNA, 100 bp, Homo sapiens
tttaagaggtctgcctggttctgggaaaacaacattgtctcggtgagaacccagaagaaaggcggggacaggttctaatccttttagtggagcaggcact

SEQ ID NO: 855385 - DNA, 98 bp, Homo sapiens
taaatgtcattactgaaactcagtgcactctagatcatctggaccatataattccagaccacaacttcctttttccagaatttgaaattgtaatagaa

SEQ ID NO: 855386 - DNA, 98 bp, Homo sapiens
gaactacagaacagcacgtaccagaggtggaagtccaagtcaaacgcagaaggactgcctcactgagcaaccaagagcagaagatgatgaaacacccg

SEQ ID NO: 855387 - DNA, 100 bp, Homo sapiens
gataagccttctgggagaaaacttctttttaatgcattaaagcacatgctccgacagttagttaatatgtgcatcaacccagatccagagaagcgaccag

SEQ ID NO: 855388 - DNA, 98 bp, Homo sapiens
agcagctggactatggcatctatgttatcaaccagttgcgacaaccaccagttaagcgtttgagacttcgtggtgattggtcagatactggacccaga

SEQ ID NO: 855389 - DNA, 99 bp, Homo sapiens
ggtaaccaaagtcacaaatcatcctagtaataaagtgaaatcagacccacaacgaatgaatgaacagccacgtcagttcacaaagatgtccaaaactaa

SEQ ID NO: 855390 - DNA, 100 bp, Homo sapiens
tatgaatgccacagactatgtagaacacgctaaagaagaaacaaaaaaagctatcaaatatcagagcaaggcaagaaggagagttaagaaagacgtggac

SEQ ID NO: 855391 - DNA, 98 bp, Homo sapiens
tgttgtgaagtgggtgtctcggtgggcctcctgctccacgacgtgaccatggccgggctgcaggagctgcgattccctgaggagaagccgctgctccg

SEQ ID NO: 855392 - DNA, 100 bp, Homo sapiens
tgaacgtcaccgaggagaagtaccaggaggcgttggccaaggacacagcaggatgccaatgcctcttccctcttagacatctatagcttctggctcaagt

SEQ ID NO: 855393 - DNA, 99 bp, Homo sapiens
gatgaagtgcagaggtttttttctggaagctcataaaatggtgagagaagcaaatatcaagcaggcaacagcagaaaaacagctaaaagaagcacaagg

SEQ ID NO: 855394 - DNA, 99 bp, Homo sapiens
tgattaccatggcgaggagtctctgtccgggggcctggctaaggaaaccctattacctccagctgaagtcacctgggagcccccctggacctgagctgc

SEQ ID NO: 855395 - DNA, 100 bp, Homo sapiens
gggccctcctgtgacctgcatgtactgggggattcgcagggaggatgtcgggacaccccggaagctgggaaatgaaacatgttccaaatcaagtatagat

SEQ ID NO: 855396 - DNA, 100 bp, Homo sapiens
gaccaagtcctcgctggactgctcagggtgccagacctcatcatatgctgtgatagcatttggatgtgccagctgtccaaaattaacttgtgggcgagag

SEQ ID NO: 855397 - DNA, 100 bp, Homo sapiens
agcatgcagcttactgcttgaaagcgacatcaagaggattggggtgcggctgcccggccaccagaagcgcatcgcctacagcctgctgggactcaaggac

SEQ ID NO: 855398 - DNA, 100 bp, Homo sapiens
ccacccccggaggaggtccaaaaggccaagaccccgacgccagagccctttgactctgagaccagaaagccagacactctgggggctctgcccaatcttc

SEQ ID NO: 855399 - DNA, 100 bp, Homo sapiens
cacacattgaatgggccaaggaaaaatcgagcagaaagaatgtctttcagagctacagagacttctgaagtggagagtctgcgacctcctcggttcttca

SEQ ID NO: 855400 - DNA, 98 bp, Homo sapiens
atgccgcagcccgagtcccagaaggcggcgatcctgggctgcgggcaaggcggatgaaaactttcggaagagaaagttgcctgtggtaagttcagttg

SEQ ID NO: 855401 - DNA, 100 bp, Homo sapiens
ctgtggattacatggacctgcctttctcctcctccccaagtcgcagtgccactgcaagcccacagtttgtgaagaaatatgggaacctttttagcttgga

SEQ ID NO: 855402 - DNA, 99 bp, Homo sapiens
gcagtttgataaaacatggtggagacagcggctgaaatggaagcatatgttctagaagacattcttgagctgtgctccattgaagtgacttgtgaatca

SEQ ID NO: 855403 - DNA, 115 bp, Homo sapiens
taggacaggctgaggctgagtctcagtgttgccctgttcagtctgaggtgactattatatggttaaaaagattttggaggaaaacagttcaggtgacttgaacataaattgcgta

SEQ ID NO: 855404 - DNA, 100 bp, Homo sapiens
aagagcagctggtcgagaaaccaaatatattctgatagttggtggtggtgttgctgggcttgcttctgcaggcgcagcaaagtcgatgggtgcaattgtt

SEQ ID NO: 855405 - DNA, 100 bp, Homo sapiens
attgagcgtgtcctgcggaaaacagagaggttccagaaatggctgcaggccaagcgcctcacgccggacctggtgcagagctgatagacacacaccttag

SEQ ID NO: 855406 - DNA, 118 bp, Homo sapiens
agtgttattggagggagccttggctccttcatggcaatgcccagaaatggaagcagattaggattcttgggatggccagcatattccagtacttttctccattttttgtggtttatta

SEQ ID NO: 855407 - DNA, 100 bp, Homo sapiens
aaagcctcctacaagagtcctaccaaaaaaattgcttcccaagaagaaggtgctactatacagtggatgtcatctgtagaagcaaagattgaagacaaaa

SEQ ID NO: 855408 - DNA, 112 bp, Homo sapiens
cgcggctcgaggcatccctgcagggcgctcctccgagtccctcggcgctctgagcccacagcaatgaggtcttactgtgtagcccaggctgctctggaactcctggactcaa

SEQ ID NO: 855409 - DNA, 98 bp, Homo sapiens
taaccctgccaaatacatcagcttgtaggagacagagatgttcattctggacagagtggaaggtgatacttgttcccttaatgagtttaccataactg

SEQ ID NO: 855410 - DNA, 100 bp, Homo sapiens
atgtctcaagatggcggccaatgtgggatcgatgtttcaatattggaagcgctttgatttacagcagctgcaggtttacccaaggtccagcctagcccct

SEQ ID NO: 855411 - DNA, 100 bp, Homo sapiens
gtgatgaaactccttcggatggccctcagtggacagcagatttaatccagagactgacttcactatagaacccacagttgtatcaatggttggggaaaga

SEQ ID NO: 855412 - DNA, 99 bp, Homo sapiens
tctgagagagggaagtcgcctctgtgctcgtgagtgcatggggtataaggtttggtgcacctcgatttggaggaagtagggcagggcccttatctggaa

SEQ ID NO: 855413 - DNA, 98 bp, Homo sapiens
gggctcccaggacctccactaatcaccagaacaaaatgtgcagttcagacttggttccttcaacctagagaaagttgaaaacccagctgaagtcatta

SEQ ID NO: 855414 - DNA, 99 bp, Homo sapiens
tagaagcttccactccctcctgcccagatccggccaaggacctcagcagaaactaattctgaagcaagcccttatagttgtgctgcagtggtgtttcaa

SEQ ID NO: 855415 - DNA, 100 bp, Homo sapiens
tgccagcattagcctggctcaatatctaatcaatgtcagtcttactactttgaccgcgatgatgtggctttgaagaactttgccaaatactttcttcacc

SEQ ID NO: 855416 - DNA, 100 bp, Homo sapiens
cttattcttcaactctacattcttctggagcatggacaagcgaatttcagtcagtggaatgaccctgcataaaaaggcagctgaagatagactggcaagc

SEQ ID NO: 855417 - DNA, 100 bp, Homo sapiens
aaagcctttcttgccaatcggaggatttcccaagcagttgttgcacaggtaacagttgaccacgttgttcctgagcctgggacaagcctgctcgctgcct

SEQ ID NO: 855418 - DNA, 100 bp, Homo sapiens
accaatgccactcagctttgaggaaaagccagtttatatccaagacttagatgagtgcactgacaggcagaactcaccagtcacatcaccaggatcctct

SEQ ID NO: 855419 - DNA, 99 bp, Homo sapiens
tcgacttccaggagaaacactaatcactggtgctggagaatctggtaaaagcaccattgtgaagcagatgaggatcctgcatgttaatgggtttaatgg

SEQ ID NO: 855420 - DNA, 100 bp, Homo sapiens
aagttgcgaaggatccccaacggggaggccaacgtgaagaacttcgtagatcagaagtcggttgtcggtctcactggactacaatcaaggtgccagcagg

SEQ ID NO: 855421 - DNA, 99 bp, Homo sapiens
tgtgaacttccagcagccggcggacgaaggacagaataacgggctcccagattcacaagccccaccaagaggatcaccccaggaacgcttggaggctga

SEQ ID NO: 855422 - DNA, 99 bp, Homo sapiens
cgcgtacaccatccaaagcataggatgaccggaaagaagggatgaccgcgtttgtggaaaagagaaaggccaacttcaaagaccagtgagaaccagctg

SEQ ID NO: 855423 - DNA, 100 bp, Homo sapiens
cttggggaagccacggtcgttcccagttattcagcttctcaaggctggaaaagcgaaggaagtttcctacaatgcactagcctcacacataatctcagag

SEQ ID NO: 855424 - DNA, 98 bp, Homo sapiens
gatgagatttatgactgcaaggtggagcactggggcctggaccagcctcttctgaaacactgggatgtgccgtttgggggtgctaaagctggtgttaa

SEQ ID NO: 855425 - DNA, 98 bp, Homo sapiens
gctgatgagggaggtgcccctgcgttgtaccatccgcctgtgggacacctaccaggctggaggctctcaggtcatttttaccaacccattggagatag

SEQ ID NO: 855426 - DNA, 100 bp, Homo sapiens
tgctcagccagctcctgcgaccgccctgcgcttcgtgcaccggggcggtccgttgccaaagccaggtttgccatgcagaacttgaattggggacttgttt

SEQ ID NO: 855427 - DNA, 100 bp, Homo sapiens
ccgaggagagtggaagtgtgagaggcacacctctgtgcagaccacatcgagcgacaccatcatccgagcagtattgatttttgcagaaggaatttttaca

SEQ ID NO: 855428 - DNA, 98 bp, Homo sapiens
gaatcaattttgcatgagaggattgaacaagagattgagatggaaatgaaagggccaatgcaggaaaccatctatgacttctggaggatggtgtggca

SEQ ID NO: 855429 - DNA, 111 bp, Homo sapiens
aagtcaaaacgggcaataagactctttaaagaaggcaaggagagaatgtatgaagaacagtcacaggacagttgagccccatatgggggttggcaggcagcagagaggccc

SEQ ID NO: 855430 - DNA, 99 bp, Homo sapiens
ctctgaaagctagaagaaaaggtgtacttgcaagaaacctcaggacttgagtaacagcaacatggttcaaaatggaaagtatttattgaccaaattaac

SEQ ID NO: 855431 - DNA, 100 bp, Homo sapiens
tgaagaccaagaaggatgattctcactcagcagatgcccagacctggaggatccccagggtcttctcatggttgcagcaggaaggacacctctctgagga

SEQ ID NO: 855432 - DNA, 99 bp, Homo sapiens
gacatgatgcaatcttcaggaaagtaagaggccagcagtatctgttggaaatgttggccagcttgcaatggatctgattatttctacactgaatatgtc

SEQ ID NO: 855433 - DNA, 103 bp, Homo sapiens
aatttccaaggggattcaaacttcaacagaatgtggcaaccagggtggttatgctgcataccgctacgcccagcctacccctgccactgccgctgcctacagt

SEQ ID NO: 855434 - DNA, 100 bp, Homo sapiens
gtcctgacaatgggcagaacgaattcagtgatatcattaagtccagatctggtagtatagatcaatcagtgttaaaagaattaccccctgaactcctggc

SEQ ID NO: 855435 - DNA, 98 bp, Homo sapiens
ttgaaggtgcaagatactatataaagatgaccagtgtcccagtgaaggaacgagtgaaggtgtctcagaactggagactggggcgctgccgagagggg

SEQ ID NO: 855436 - DNA, 98 bp, Homo sapiens
aggaaaaactggagagcttcatcaaaaatagtgatagctttgataagtataagtgtgctagcggagtgtctagattgtcctgaattgaaagcaactgc

SEQ ID NO: 855437 - DNA, 100 bp, Homo sapiens
ttggggttgatgaaacttacctctttgaatctgaaggtttaggatgcctttgtggaactgtacggccccagcatgcggcctctgtttgatttctcctggc

SEQ ID NO: 855438 - DNA, 98 bp, Homo sapiens
gattcccaacttattgtttcatcagctaagacgacatagacagcctaaacccagttctcagggacaacccgcagcttcatgaggaagtgaaagtctgg

SEQ ID NO: 855439 - DNA, 98 bp, Homo sapiens
ggatcccgcagatcggagacggggcctggaggccgagcagaagcgcaacgcagagtcggtgaagggcatgaggaagagcgagcggcgcatcaaggagc

SEQ ID NO: 855440 - DNA, 98 bp, Homo sapiens
ggatgaaaaacttccgtaacatccaggttgatgaagctaatttattgacttggcaagggcttattgttcctgatgtaacagtccctcccaagcctgtc

SEQ ID NO: 855441 - DNA, 98 bp, Homo sapiens
tggcctgaggcttggataagtgggggcaactccaacaacattgccaccgtggacatctccgcaggcttcgtgggcttagacacctacgtggaaatccc

SEQ ID NO: 855442 - DNA, 98 bp, Homo sapiens
agcacacttttactctacgcaactgttgctttttcatggcaagtatatcgcgtcaacacagcgacctgacgggacctggcgcaagcagcggagggtga

SEQ ID NO: 855443 - DNA, 98 bp, Homo sapiens
gaaaggagctggtgcctgtgcaagttgttgagatgtggtggtacagtgggagctattctgacatgtccactggaagttgtaaaaacacgactgcagtc

SEQ ID NO: 855444 - DNA, 100 bp, Homo sapiens
catgactctgctaccagctttgtggatgctggaaatgcttacaaaaaggcagatccccaagggtgttgaaagcagcaggggcctagaagacattaaaccg

SEQ ID NO: 855445 - DNA, 99 bp, Homo sapiens
tcctgggatctttgaaatgctaagattcttggataccacagtatcataaaattcctctaaatgcagtaaatttggaaggcaaagccagccctctgtcac

SEQ ID NO: 855446 - DNA, 100 bp, Homo sapiens
gagaaatttcacagtacatcatccaaaagaggagtccatgatggaggcagaggtaaacttggagaggccagtccctgagacgaataggaccttgtccctg

SEQ ID NO: 855447 - DNA, 100 bp, Homo sapiens
agaaacatgggtggaagctgggccagggattgggaaaatctcttcaggacggcaccgaaagcgaaggaagctcctgctcctcctaaagccgaagccaaag

SEQ ID NO: 855448 - DNA, 100 bp, Homo sapiens
ccttttaccatgaatagttctactccttctacaggtgtgtatggaggaggaagccaagaatctggtgagcgaagccatcgcagctggcatcttcaacgac

SEQ ID NO: 855449 - DNA, 98 bp, Homo sapiens
tgtttgttatgtttgccgtggtttttatcaccacacgactgggtatatttcctctctgagtttgccagatccggcccggtgcctgggttccaggagga

SEQ ID NO: 855450 - DNA, 100 bp, Homo sapiens
aagctaatccttaactatccaaaagccaaaatggaagatggccagcttggtgctaacagtggtttgcacatcatcatctttgatgaaattgatgccatct

SEQ ID NO: 855451 - DNA, 99 bp, Homo sapiens
aggattcttacagtttagctccttggcaacagcagcaaattgaagactttcgacaaggaagtgaaacaccaatgcaggcacagttggtggatctgaaat

SEQ ID NO: 855452 - DNA, 98 bp, Homo sapiens
ccacgtaggtactgtgtgaggcccaacagcggaatcatcgatgcaggggcctcaattaatgtatctgatcagtgtactgttacccggacatacctatt

SEQ ID NO: 855453 - DNA, 98 bp, Homo sapiens
ccatgtcaatgtaatggacacagcagcctgtgtgaccctgaaacatcgatatgccaggtcaagagcaatctgaatccaaatgcaaaggagtttgttcc

SEQ ID NO: 855454 - DNA, 100 bp, Homo sapiens
tcctggaaggcaagaacacggatgaggagatagtggaatgctggcacaaaggacaagtggaatacatgttggtatcttttgatcatgaaaataaaaaagt

SEQ ID NO: 855455 - DNA, 100 bp, Homo sapiens
gaggagctgggttccaggacttgctccttccagaagcaggttgctggcaacagcatcagggagaatggggccaagacatatctgaagagatggattaaga

SEQ ID NO: 855456 - DNA, 51 bp, Homo sapiens
gaaatccggaatttaacagtgggccgcgatgggcctcttggaacattggtg

SEQ ID NO: 855457 - DNA, 100 bp, Homo sapiens
caagaggagtcaaaatacgatcttatttcaatatggtgcgcaccctgtggcatgaccctcgtcacataggctggaaagatttcaccgcctacagatggcg

SEQ ID NO: 855458 - DNA, 100 bp, Homo sapiens
accggatcatccaggcgctgaagggcaccatcgacccgaagttgcggattgcagccgagaacgagctcaaccaggactggaagcaaccccaaaattagac

SEQ ID NO: 855459 - DNA, 98 bp, Homo sapiens
gaaacttgatgcttctgggccaccatttgccagggcctcgctcgaggcaacgcggtaaaaatattgcttcggtgggtgacgcggtacagctgcccaag

SEQ ID NO: 855460 - DNA, 100 bp, Homo sapiens
aggctggagatctacctggaacccttgaaggatgcaggtgatggtgttcgatacttgctcaggtgaaagaaatcacccgtgatattaagcaattagatca

SEQ ID NO: 855461 - DNA, 100 bp, Homo sapiens
tgaattaccaagaggcagcaatctacctccaggctgcagccttggatatagccatgattaaaatggtcgccccgtccatggcctcccgagtgattgatcg

SEQ ID NO: 855462 - DNA, 100 bp, Homo sapiens
cttctctgcatcccagccatcacctggatttacctgttttctgggagcttcgaaggaatagccaggccagaagaaggaaggcctgtggtgagtgggacag

SEQ ID NO: 855463 - DNA, 100 bp, Homo sapiens
atcggtctgagttgggtcacgtacccgacgtgctatagctgaggatggggttggtacaggtcttgggcctacactggagttttatgcgcttgtatctcag

SEQ ID NO: 855464 - DNA, 100 bp, Homo sapiens
ttcccaaaccagttcagaagccacccaaaagtaatgttaacaataacccagcctccggcctctcctcctctccgtcaacacccacccaagtgaccaagca

SEQ ID NO: 855465 - DNA, 98 bp, Homo sapiens
tgagcctgttggaggaactggcccggaaacaggaggactcgtccctcatggaccttgctgacgtcttcacggccccagctcctgccccgaccacagac

SEQ ID NO: 855466 - DNA, 100 bp, Homo sapiens
ctgacaatcaaaaacttcctcgaatttcagcgtaaactgcagcatgatgttctgaagcttgaggaagaggtacgtccacaggacactgtatcggtaattg

SEQ ID NO: 855467 - DNA, 98 bp, Homo sapiens
gcaatgaacaaatatggagccattcttagtcaaaaagctcatcttgccttatcaaccgcccttctacagccaagatgtatcccagatgtatgagaaca

SEQ ID NO: 855468 - DNA, 98 bp, Homo sapiens
tgtacctggagtgatggatggcgttccctcggctaataactatcagggtggatttggaacaacactcatggctaagcatcctggtggggaagaagttt

SEQ ID NO: 855469 - DNA, 100 bp, Homo sapiens
tgcagtggtgtgctttggacctgtgtacccacccaaggctaaaggcagagccaggtaagaatgattgatgttggctgatattggagtgctcattcacatg

SEQ ID NO: 855470 - DNA, 100 bp, Homo sapiens
atactaatttacatgaagtgccttatcctgatgcaagaattgcggagtttaagagagctgtgaaagtagcaacaggacaagaactctcaaacaatatttt

SEQ ID NO: 855471 - DNA, 98 bp, Homo sapiens
cagaactggctttcaaggactttgatgttggcgatggactccatgtaactgaatatgaggacaatttgaagaactcatgggtatggaaagagctatat

SEQ ID NO: 855472 - DNA, 100 bp, Homo sapiens
cttcaggaagctgagattggtatatgacaaatgcaatgaaaactgtggtgggatggatcccattccagtcgaggctcacagtaatgaaaccatagggagt

SEQ ID NO: 855473 - DNA, 100 bp, Homo sapiens
tgtactcactgctgcaggcagccctgctctgcgtcaacgccatcgcagtgctgcacgaggagcgattcctcaagaacaggttggatgtaagaaaagcatg

SEQ ID NO: 855474 - DNA, 98 bp, Homo sapiens
aaagatgtcaagattgagccttgtgggcatttgatgtgcacctcttgccttacggcatggcagattaccagagactgatgactgtggcggagacgatt

SEQ ID NO: 855475 - DNA, 109 bp, Homo sapiens
gactcctacttcctctgtatagagcaactgttgaactcagctgcctgtaggtgcattttctagaatcatgaaactttgtgaagaaaaatgtgaaacagatgaaatacag

SEQ ID NO: 855476 - DNA, 99 bp, Homo sapiens
tgaaacggagccagcggctgaggaggggccccagcagcccccgaaggccctatcaggacatggagtatgaaagacgttagagatgtttatgattacttc

SEQ ID NO: 855477 - DNA, 99 bp, Homo sapiens
ttatcatagctcactgcaacctggaacccctagtctcaagagatcctccagcctcagcctccctgttttttggctgcaggattaagtaatgatgagtct

SEQ ID NO: 855478 - DNA, 98 bp, Homo sapiens
ctcatatcctgtttatgctcctcaaaggaagccatacgggagagagactctgtgaaggtaaagaaggtagtcaatgtgcagaaaacttcagtcccaat

SEQ ID NO: 855479 - DNA, 100 bp, Homo sapiens
aaggccacagaagatgctgaaggaggggatggccctcgtttacctcagagaagtaaatttcagtgattccagcagtagttcaagtgatgattctccagct

SEQ ID NO: 855480 - DNA, 100 bp, Homo sapiens
atctggtattcaacaaataattgagtgctttcgatcagtctggcggcaagaagaacttacacgtattaaccaatcttttactggagctgaaaggaaagct

SEQ ID NO: 855481 - DNA, 100 bp, Homo sapiens
ggaggtggagggcgcccagggccgagctgccagggccggacacctaggctgagccctcagctgcagatctgggacacggccggccaggagcggttccgca

SEQ ID NO: 855482 - DNA, 100 bp, Homo sapiens
ttcctgtccttactccctctttaagattgcgtacccactgcagagtgctgaagacggggtagccacgagatgtcagtattgaatatggtggtgaggcgtg

SEQ ID NO: 855483 - DNA, 100 bp, Homo sapiens
agtgaatttaagcccacatatcaggaccgagtggccccgccaggtggcctcagccccgagtccaagaagatcctgacacccgccctcaagaagcgggccc

SEQ ID NO: 855484 - DNA, 98 bp, Homo sapiens
gagccggagcgcggagcccggctcccgcaccatggaggaggacgacagctacgatgtccagctcgccgctgtccaagaaacgtcgcgtgtccgggcct

SEQ ID NO: 855485 - DNA, 100 bp, Homo sapiens
gcagcatggggacctccggggaggcctgccgctgtaagccaatggagatcttcgtggatgatgagacgaagttgacgctgcatgggttgcagcagtacta

SEQ ID NO: 855486 - DNA, 100 bp, Homo sapiens
ttctttccccctttaacttagaggaacgaggattatacagaaatttgaagtcgggaactacaagcggactgtgaagcggatcgacgatggccaccgcctg

SEQ ID NO: 855487 - DNA, 126 bp, Homo sapiens
cattgataaactggtacaaaacaacgtgttattgatcttcgctgtaacccaagaacaagttcatttatatgaggcaagtggtcaaactctaaaaatcaaaaaacttcatgtcaaaggaaaaaagac

SEQ ID NO: 855488 - DNA, 100 bp, Homo sapiens
tcatattgtacttgcgagtgagacccggctggaggaatgttttaattcttcggaaataccaagtggtctcttacgctggggaggaggaggaggaagggag

SEQ ID NO: 855489 - DNA, 100 bp, Homo sapiens
aatgagaagatctatgctccacaaggcctcctcctgacagaccctattgagcgaggactgcgagttcacggatgataccatcggggaccttaagaagctg

SEQ ID NO: 855490 - DNA, 100 bp, Homo sapiens
gcagctacaaggctaaaatggctcggaggaacaagcgaccctccgccaaggagggccaggagagtttttcatcgggagatcatttcggagatgggggagt

SEQ ID NO: 855491 - DNA, 98 bp, Homo sapiens
tgcatactcgctgcccgccggctccctcccccgcgtccctgcgaccgccgcggcgaagatggcaaatatcaatattccaatgggagcctttcggccag

SEQ ID NO: 855492 - DNA, 99 bp, Homo sapiens
ttcgtagctaagacttcgcgacacccttgaagctgagaaatgattatgagcctcaaacaatttgtgagcatctccagtacttgtttgccttgttgcaaa

SEQ ID NO: 855493 - DNA, 100 bp, Homo sapiens
ccggagtgagaagcaagaaggccctggacacagcaatatctctgggctttcacagatggtactgtctagttgcaggaaaacaagctcagggctcccactg

SEQ ID NO: 855494 - DNA, 100 bp, Homo sapiens
ttggccggtgcttccaggaaaccattgggtcacagattgtcactgctgttccaagggcacacgcagagggatttggaattcctggagagttgcctttgtg

SEQ ID NO: 855495 - DNA, 99 bp, Homo sapiens
cctctggagtagctgggactacagagccgagagtgtgtggagcagttacagctggaagaccgggtcctctgcctccacagtagatggcgaatcctctat

SEQ ID NO: 855496 - DNA, 100 bp, Homo sapiens
ctggaaaaactgcgaaaagatttggaagaagagaagacaatgagaagtaatctagagattgagaggatccagaatccagatctctggaatagctaccagg

SEQ ID NO: 855497 - DNA, 100 bp, Homo sapiens
ttcgagcaccccaacgtggtcaggaatggaagttggatacactttgtgacttgtacgagacactgaccattacacaggctgttatttttctcaatacgag

SEQ ID NO: 855498 - DNA, 100 bp, Homo sapiens
cgagtacttcgttccaacatggacatcctgaagccaatcctggagtacaaaatttcaagctttgagcagaggctgatgaatgaaatagagtttcgcttgg

SEQ ID NO: 855499 - DNA, 99 bp, Homo sapiens
caaatgtaactcagcgaattgtaatggaaagcatatggacaggtctacgccacatcacttagacaagttggatggcttgaggactggtactaaaaggaa

SEQ ID NO: 855500 - DNA, 100 bp, Homo sapiens
gatatgaatatcatcttggctggaggccaggtggacaacctgtcatcactgacttctgaaaactgatcctacagttaaagacttaatcggaggcttcacg

SEQ ID NO: 855501 - DNA, 98 bp, Homo sapiens
aaacttcaacatctggaacatgtgatggaaaattatactcagtggctgcaaaaagaaacatgccctgaactgtcacagaatgaaaccagcgctcttca

SEQ ID NO: 855502 - DNA, 100 bp, Homo sapiens
gaagagaaaacattgaagcttcagaaattgttagaaaggaacacttcctcgtgggtactgtataacatggcttcattttactggagaattaagaatgagc

SEQ ID NO: 855503 - DNA, 100 bp, Homo sapiens
ggcacgctctatagccaaggaaggcttcgagaagattagcaaaggtgctaatccagtggaaatcaggagaggaattggattatgaacgcattcataaaaa

SEQ ID NO: 855504 - DNA, 98 bp, Homo sapiens
gccctcgctggaccagaccatggccgcggccttcgccacacccactcgcccgggtctatggccacggtcggagagtggtcctgtgtgcgctgcacctt

SEQ ID NO: 855505 - DNA, 100 bp, Homo sapiens
aaactcgaagaacagctgtggaaagaagttgcaaaacactggagtgctgcagcagctcccagtccagtgctaggaaacattcccccaggagatggcatgc

SEQ ID NO: 855506 - DNA, 98 bp, Homo sapiens
gaagagctggctgaaaaagacgacatcaagtaccgtacctctatacgaaagtaggcggtacgaaccctaatggaggcagttttgaggaggtcctcagc

SEQ ID NO: 855507 - DNA, 100 bp, Homo sapiens
atcagagctagcaaactacttccagagcagattcacaatgacatcctttcaagaagtcccattgcagacttccaactttgcccatgtcatctttcaaaat

SEQ ID NO: 855508 - DNA, 100 bp, Homo sapiens
cctgcgtgctgcccagagcccccatagagagagggacacgtgatggaccgtaggaagaaggcactgaccgactacaagaagctgcgggccttctttgtgg

SEQ ID NO: 855509 - DNA, 100 bp, Homo sapiens
ctaaatacaagagtggcctattgtattctgacaagtccctgtacacccagctgtgcttttaccggtacatttttgatgcggagtgtgcactggagaaact

SEQ ID NO: 855510 - DNA, 98 bp, Homo sapiens
agaaaacacaggagccggagcagaagcaaagagagcagtggaatagtgaccattctttattctgcctttgtcctggtgagcacatctgatatggcaga

SEQ ID NO: 855511 - DNA, 100 bp, Homo sapiens
agcatgggctcgcctgtcaacgcgcagatgctgctgctaggggtggtgggagcagccgtgggacgcgtggccgggagcgggggtgacagcctgggattcc

SEQ ID NO: 855512 - DNA, 98 bp, Homo sapiens
caagatggacggtttcgccggcagtctcggtcacggagctgctggacgtctccatggagctgggctgtttcctggctggagcgctcgtctcctctcag

SEQ ID NO: 855513 - DNA, 98 bp, Homo sapiens
ttacacacttcaatggaaccctccacttttccatgtgtccgccctgtgtccatggtgcccgggacagcaatgtgagtgaatggagggtgtgcagggtg

SEQ ID NO: 855514 - DNA, 100 bp, Homo sapiens
cgaaaatctgggctaagtgctggcaagagcgatgtctactacttcagattttgaagccagcttcataaggctattggacaaaataacgaatggttctcga

SEQ ID NO: 855515 - DNA, 111 bp, Homo sapiens
ctgtattgccgctaatgtgtgtgcctgcccacaaggcttcactggacccagctgtgaaacggaccattcccggagtaataaatccagttggagcagcagtgatgagaagag

SEQ ID NO: 855516 - DNA, 100 bp, Homo sapiens
gccttcgagaggcaggaagaggcctgggagttctgggaggtgatctctgatgaacatgccatcgactccgctggcacctaccacggggacagccacctgc

SEQ ID NO: 855517 - DNA, 100 bp, Homo sapiens
tgcacttacaggctatttaaaaagcaacttaaatacttatggagagtgtttgaaagatgtatggtgatcttgaaacctccagacacaagaaaacttctag

SEQ ID NO: 855518 - DNA, 100 bp, Homo sapiens
agaggcggatctacagacataggtcagccatgtcatctgagcctcccccaccaccacagccccccacccatcaagcttcagtcgggctgctggacacccc

SEQ ID NO: 855519 - DNA, 100 bp, Homo sapiens
caggaatttgataaccatatcaactcctatgatcatgcacacaagcagtcacttatataagaagaaccttgatgtgaccaagatccggaagggaaagcct

SEQ ID NO: 855520 - DNA, 99 bp, Homo sapiens
tcctagtcaggaagaggacacacagagtattggtcctaaagtccagagacagagcactaattagatcttagcaaagcaatgtctcaagatggtgcttct

SEQ ID NO: 855521 - DNA, 100 bp, Homo sapiens
ctattctgaatccctgatgacatcagctcccaagggctctgtgctgcaggaagcaaaactgtaggcatccgtgtcattctggaccttactcccaactacc

SEQ ID NO: 855522 - DNA, 98 bp, Homo sapiens
ccatgtcctgcagtgacaagattgcacgccgaatatgtgggagtccatgtcctgcagtgtggcctgatgtaatcaaactaccatatttcaacaccatg

SEQ ID NO: 855523 - DNA, 100 bp, Homo sapiens
aggcagagtgcacggctgaagaagcatatacacttacagaggtctttgatttgcgtcagtgtcatcgacagatgcagcagcaggcggctactgcacaagc

SEQ ID NO: 855524 - DNA, 100 bp, Homo sapiens
cgagggctccagaacccaggaagttcttcaggagagaataccatgggtaccacctgaatgcattgaaaatcctaaaaatttaaatttggcaacagacaaa

SEQ ID NO: 855525 - DNA, 99 bp, Homo sapiens
ctcaacgtggacgtggtcaagtacgagagtggccctgacggaggggaggaaattgtgtctgcagttcaatactgccatcagaaacggatcgtacatcga

SEQ ID NO: 855526 - DNA, 99 bp, Homo sapiens
gaacaaaggtgctgctgatcatctgaggttgcctgcatggcagtgaagaacatggacctttgggtgattgtagagaaggctccaaaagccagggtgcct

SEQ ID NO: 855527 - DNA, 98 bp, Homo sapiens
ggtcctttttatcctggaccaggacctggggacttccccaatgcttatgaaccagacataagttcagaggaatctgtctccactgtagaagaacaaga

SEQ ID NO: 855528 - DNA, 98 bp, Homo sapiens
gtccgacagccaggcccgggagaatcggcagaaccaattgaaagaccaacagcaacagcaagtggtatcgttatgtcctgatgacacagaatgcctga

SEQ ID NO: 855529 - DNA, 99 bp, Homo sapiens
ttatttttgtgatattctccagcatatcttttctgttgtgacagacacttcacatactgctggtgaaagacccctgacaaaagacaatcatcttctggg

SEQ ID NO: 855530 - DNA, 100 bp, Homo sapiens
ctgggggccggtggcggatggagcccgcgatggagccggagactctggaggcgcgaatcaggaccaggcccagctggatgcagcctccgtgtcttccatc

SEQ ID NO: 855531 - DNA, 100 bp, Homo sapiens
gctgacggaggaggagtcagcccccatcggcatccgtgttctagatacaagccaatggtggcagagtctacatagaactatgcttcgtggtgttctgggg

SEQ ID NO: 855532 - DNA, 98 bp, Homo sapiens
aggagcgtgacccggccagctccctcagcgaggggtgccccggctaaaggactcagcccaggagagtgttattactcgagatattcatcgtacatttc

SEQ ID NO: 855533 - DNA, 100 bp, Homo sapiens
ggaagacgaatgtcttttcagaaacctaaagggactattgagtatactagccactccatccccaaattcaagattagaaagatccctgactgcttctcaa

SEQ ID NO: 855534 - DNA, 100 bp, Homo sapiens
gtggtaaaacttggagatcttgggcttggccggtttttcagctcaaaaaccacagctgcacattctttaggttgatatggaggtgactcttccaggcgag

SEQ ID NO: 855535 - DNA, 99 bp, Homo sapiens
tgtccccaaacactcttagccaggaggagggtgatcagatctgtttgtaccatatccggaaaagttgtagctttcaagaaccaatgaggccattcttct

SEQ ID NO: 855536 - DNA, 101 bp, Homo sapiens
ccccctccctaccgcccctgtcccgccggggagcggcggcggccttggactttgctgtctttcctcgcggagacagacggagtttccctcttgttgcccag

SEQ ID NO: 855537 - DNA, 100 bp, Homo sapiens
cggctacgcctgcccagtattctaccaggcctggtgctggcctcctgtgatgggccttcgcactcccagtccgcaaccatccctctgttcatgcgaaaca

SEQ ID NO: 855538 - DNA, 99 bp, Homo sapiens
gctaagtcccggcagcgggaacacagagagcgaagccaggactcctcatctgtttttaagagggaaatctgagttttcaaggaaagccgaatacagttg

SEQ ID NO: 855539 - DNA, 100 bp, Homo sapiens
ataagcagcttcggaaaggagccaatgaggccctggtacctgacagtgtaaagaaggagctcctacaaagaataagaacattccttgctcagcatgccag

SEQ ID NO: 855540 - DNA, 99 bp, Homo sapiens
taagaccaagtcctcgctggactgctcagggtgccagacctcatcgttttgatacttatagaggactcccttcaatttccaatggaaattatagccagc

SEQ ID NO: 855541 - DNA, 98 bp, Homo sapiens
ggtgtccacgctgtccccgcagcccggcagcgggtgttcctcccacctcggatgaggagaagaagccaattccaggagcgaagaaacttccaggacct

SEQ ID NO: 855542 - DNA, 100 bp, Homo sapiens
atctctctaccgggggaattgcaggcccatacgatttgagccaccaatgctggatttccatgaacaaatctacctgttactcgtattttggacaatctta

SEQ ID NO: 855543 - DNA, 100 bp, Homo sapiens
tgggcgcccaccaacaatggatggcaactccctgctctcggtaccaaggcgaggattaaatccaccacacagggtgaaatctatctccatgacaacattc

SEQ ID NO: 855544 - DNA, 103 bp, Homo sapiens
ttcgagcctagctgctcgcacaggactcggccacctgcccttcctgcaccgactggccaggtgttcctgcatgaagccaccgtgcgcctgatggcaggagcca

SEQ ID NO: 855545 - DNA, 98 bp, Homo sapiens
gtcgcgggagtcgtagggaggacgccgggacacctggaagccgagaaatgtttgaaagctgaatggctctatagtcaaggcaaggggagagcatatcg

SEQ ID NO: 855546 - DNA, 100 bp, Homo sapiens
gtcacaggcacatcagcaaagaggaaatgcatctacaaccacaactgtgatagacagcaaaaatggatctgtgcccaaatcccccggaaaagtgctgaag

SEQ ID NO: 855547 - DNA, 98 bp, Homo sapiens
ccattggagctcatcagactgaccgtgtcttacatcagttcagagagccaaagaagcctaaagccccagacaatccatttcatggcattgtttccaag

SEQ ID NO: 855548 - DNA, 100 bp, Homo sapiens
gaaaatggagtctaaacacctataagcagcgtgcagggtcaaagacagccggccccccatgtcagtggtctaggatggccagtgaaggcaccaacatccc

SEQ ID NO: 855549 - DNA, 100 bp, Homo sapiens
tgacacgtattgtctcaagattaaaggtattggtggcatggatggaacacaacagcagatttttaaaatgttagcagaggtactaggaggaatcaattgt

SEQ ID NO: 855550 - DNA, 98 bp, Homo sapiens
ctcgagtgcctgcaggatgtgagggaggtgaaaagccatacaagtgtacctgggaaggctgcgactggaggttcgcgcgatcggatgagctgacccgc

SEQ ID NO: 855551 - DNA, 100 bp, Homo sapiens
gtcacggtccagcggtcacctacccccagcaccacctccagcccctgcgcctcggttgctgaaaagccaggagtcaaaatgactgagcgctttgactgcc

SEQ ID NO: 855552 - DNA, 100 bp, Homo sapiens
ttggcgctgaggtggcccgtggggcagacatttgcctgaaaaaattaaggatgaccagcagctgaagaatatgagtggccaatggttttatgaagccaag

SEQ ID NO: 855553 - DNA, 100 bp, Homo sapiens
gcctcatcccaggttgccttggaaaatgccaacgccgtgtctgaagggtttcatcaccttaaatggttttgaaccaatgaaggtgtattcccttaaaaag

SEQ ID NO: 855554 - DNA, 100 bp, Homo sapiens
gtcgtgatcgtgactattcagatcatccaagtggaggttcctacagagattcatatgagagttatgccaccttctgggtgaaccctcagttcaagatccg

SEQ ID NO: 855555 - DNA, 100 bp, Homo sapiens
aatcataaaagatgctgctgctaaaggtatccaggaaattgctgactctgtaaagtttgcagaaaaaacttcagcatgtgccaggaacacaacctcacct

SEQ ID NO: 855556 - DNA, 100 bp, Homo sapiens
ggagtccggctttaactatttctaaagttctcctctccatctgctcacttcttacagattgcaaccctgagcacagactgtgacttctgaccaagagaaa

SEQ ID NO: 855557 - DNA, 100 bp, Homo sapiens
tccctcccccttctttcgatcagagatcggcggagaccctcgaagtgcgcaaacttgacactcaccctgaccggtcttagtggtgcaatggctagtataa

SEQ ID NO: 855558 - DNA, 100 bp, Homo sapiens
aaggccctggacacagcaatatctctgggctttcacaggtcttaacttgcagagtcagtttaatctggaaaatgtcactgttttcaatacaaatgagcag

SEQ ID NO: 855559 - DNA, 99 bp, Homo sapiens
aatgattcagattttgaagctaaagttaagcagcttacgaggaaatatttcagtaaaagcagttaaaaaagaagtagaaaagaaactccgatgtcttct

SEQ ID NO: 855560 - DNA, 100 bp, Homo sapiens
tcttcctcacttatgtgccactattggggctgaaagccttcctgggccttttcttcatagtcaggcctggtgatcctcagtcagctcaggataaagcacg

SEQ ID NO: 855561 - DNA, 98 bp, Homo sapiens
ttgaagaattaattttgcaattattaaatatgctatgccaagctcagccccgaagtgcttcagatgtagaggtagacatagctgacattgagaatgaa

SEQ ID NO: 855562 - DNA, 99 bp, Homo sapiens
gagtgcctgccctgagcagccgtgacccaggaggctctcacgtggagtccccagaacagcatcaactcctcacgatgctcctgacggtggtggacagac

SEQ ID NO: 855563 - DNA, 100 bp, Homo sapiens
aacaatttctacacctgggaggcttgcgacgatgcttgctggaggatagaaaatgaccctaattttcagtgcaaattcaaaggtctctggagtaaggaaa

SEQ ID NO: 855564 - DNA, 98 bp, Homo sapiens
actgttcagtgctgctcagctgacggctgaatgtgccatcgtcaccctggcaaaagtcaacaactctagcttaattggagtaggctatactcagactc

SEQ ID NO: 855565 - DNA, 100 bp, Homo sapiens
gccctcaatgagcacatgaccagcttagcttctgtcctaaagtgttcaaagcttctttcagacaccagtgttattcagttctacccaagcaaatttgtcc

SEQ ID NO: 855566 - DNA, 98 bp, Homo sapiens
aagatctatgccatgcactgggggaccgactcaagccaaaactcagtgccctcaaggctcggaagaatgtggagagttttctagaagcctgtcgaaaa

SEQ ID NO: 855567 - DNA, 100 bp, Homo sapiens
ggaacccctgactgatgcagaaaggatgaaaacatggagaaggcgactctgccgtcggtgacgctcatcgtgggctgtggcgtgtcctctctcaccctgc

SEQ ID NO: 855568 - DNA, 99 bp, Homo sapiens
gggaatcctctccaaagaaggaggagactgtagcaaccgcttacaaacacgcagatggcaagaagattgatggcaggagggtccttgtggacgtggaga

SEQ ID NO: 855569 - DNA, 98 bp, Homo sapiens
tagccagtgtgcagctccctaatgatgatgctcagtttgatgcgtcacactacgacagtgagaaaggaggttgctgaaaagccaggagtcaaaatgac

SEQ ID NO: 855570 - DNA, 99 bp, Homo sapiens
gctgcagccgtcatgccggggatagtggagctgcccactctagaggagctgaaagtagatgaggagtgggaatagctttgcgaaaaatgggcgcaatgg

SEQ ID NO: 855571 - DNA, 100 bp, Homo sapiens
agggactcaggcagtacgggaagaacttcttcagaattagaaaggagctgcttcccaataaggaaacaacatgccttgaattggaacgctacctacagac

SEQ ID NO: 855572 - DNA, 112 bp, Homo sapiens
ctgcgcctcccgccgcgcccgggatgtattcgtccccgctctgcctcacccagtgacttgctgtctcctgactcagtcctgagttgcttgtatcctggggatcatggaaaga

SEQ ID NO: 855573 - DNA, 98 bp, Homo sapiens
cggccaacttccattgaacttcccagcactcgaaagggaccgaaatggagagcaaagaatgaaactagtgatcgagaagatggcctccccaaaggaca

SEQ ID NO: 855574 - DNA, 99 bp, Homo sapiens
tatattgaagcagccattagatttaaagatctcaaaaactttcatgtagacctttgtcgtccatttgctgctcactggaccaggaagaaacaggctcct

SEQ ID NO: 855575 - DNA, 98 bp, Homo sapiens
tcaccaaatggaaagttaatcgaagagttttgcagaacactgaaatctatggactctaaaatggacttcatttaaagaaacccacggaccattaatgg

SEQ ID NO: 855576 - DNA, 100 bp, Homo sapiens
gctgaaggccctacgggagaaaaccgggcgcaaggcaaagatgccttttgatgccaacaaactgtattgcagtgaagtgctggccatattgctccaggac

SEQ ID NO: 855577 - DNA, 100 bp, Homo sapiens
aggtgagaaagcttctggcaagaggtgctgatatcaacacggtcaacgtggacggcttgacagccctgcaccagatggagtcccctgtttccacaccagc

SEQ ID NO: 855578 - DNA, 100 bp, Homo sapiens
agtggttggttgcagttgtgtagtagttaaggaaggaacacacaagtagttatctttcaggctgtctttgaatacttccatgaccctgaacactagctga

SEQ ID NO: 855579 - DNA, 99 bp, Homo sapiens
gagccgggagttcaagaagaacactccagaggcactctgatggttctaaaacatccctacccaagaaaagtggaagaaccctccatttatgaatctgtc

SEQ ID NO: 855580 - DNA, 100 bp, Homo sapiens
cccgggcctcccattgcagcatctgtgacaactgtgtgggtggcgacatgtctaagaatgtgagccagtcacagatggcaaaattgaaccaacaaatggc

SEQ ID NO: 855581 - DNA, 98 bp, Homo sapiens
tcatcgtgctattcctggtctacatcctgcgggtgcctttgaaaatcaacgacaacttgagcacagtgcatttgcacagtataacttggaccagttta

SEQ ID NO: 855582 - DNA, 100 bp, Homo sapiens
tatgaacttctcaacaccattgatgcctgccagtgccattttgatatcgaggctgaagatgagaagtcagtcctgatggcagctgtgcagagtgggggtg

SEQ ID NO: 855583 - DNA, 98 bp, Homo sapiens
gttcttaggctcagcgtcagttacctgagagccaagagcttctttgatgatcagaaaaggcttctgctttctttaaaaaataaaactacttgaaaaga

SEQ ID NO: 855584 - DNA, 98 bp, Homo sapiens
gaaatgtagccagtggggccgccaggggcatatgatattttcctgaatgcaaaagagcaaaacattgtgtttaatgctgaaacctacagcaatctcat

SEQ ID NO: 855585 - DNA, 98 bp, Homo sapiens
atggcctactggggataacattcatgcagaacatcagatcaaagtatctgtgtcttcaggaggtgactgcattcgaacatacaaaccagaaatcaaga

SEQ ID NO: 855586 - DNA, 100 bp, Homo sapiens
cagcaagaattcagggatcggtctggaaactgtgttccctgcaaccagtgtgggccaggcatggagttgtctaaggtaaagctttccagtttgaatttag

SEQ ID NO: 855587 - DNA, 107 bp, Homo sapiens
gcgcctccgctacttccagggctacgcgcgctccgcgcagctcagggtgagcttgtcggccacagactgctacattgtgcatgagatctacaatggggagaatgccc

SEQ ID NO: 855588 - DNA, 98 bp, Homo sapiens
caacacggtgggcgccgacatcatccagctgcctcaaatcgtcgtagtgggaacgcaggcagtcacccgcagggccaaggtggctcccgctgagagga

SEQ ID NO: 855589 - DNA, 98 bp, Homo sapiens
cgtggctacctgtcatttcaatcacagcagcaaaaccttcatggtgatccatggctggacggctggagctattggccagaaactccctccattttctt

SEQ ID NO: 855590 - DNA, 100 bp, Homo sapiens
ggtccggcgagcatcacgccgaggcccattttccagacgaccacgacgaggccggggtcaccttgttggggagttcctggaagtgacttgcatcaatcct

SEQ ID NO: 855591 - DNA, 98 bp, Homo sapiens
atgatagcacaaacatgccattgatgcaaacgcagcaggtctttcacagacgaaaggttcttaatttgatgaagttcagtttatcaccttttcctttt

SEQ ID NO: 855592 - DNA, 98 bp, Homo sapiens
cagcagtttagctataatgggagtttctcctcccatgagctcagttgttgtggaaaaacatcatccagtcacagtggccagcgagaccgaggagaatg

SEQ ID NO: 855593 - DNA, 100 bp, Homo sapiens
ctcagcgactcttctgacctccgcgcgacgtacccgccgccgccgttggctggagacgaagttatacggaagcgtctcctcattgatggagatggtgctg

SEQ ID NO: 855594 - DNA, 120 bp, Homo sapiens
ctgcacctgccttcagaacagggcgctcctgagaccctccagcgctgcctggaggagaatcaagagctccgaggacactgggtccccttggagcctccccaggcttaatgattgtccaga

SEQ ID NO: 855595 - DNA, 100 bp, Homo sapiens
acagcgattatgacctctctccaaagtctatgtcccggaactcctccattgccagtgatatgtttccacttgagcggcacagtgacagaacctgcaatac

SEQ ID NO: 855596 - DNA, 100 bp, Homo sapiens
aacctgaagttagaaaggctcaacgagaacaagctatcagacctgtcgcgaaatcgcctttcagaaattcctatagaagcatgtcactttgtttctctgg

SEQ ID NO: 855597 - DNA, 100 bp, Homo sapiens
gaaaaatggaaacctacatcaaattggaaaagcttggagagattgtagaaggcatgaaacaaaaaatgtggagtattgaaaatattgccttcggttctgg

SEQ ID NO: 855598 - DNA, 98 bp, Homo sapiens
tgaaacagtgccgacttgcaaacggtgaatatgcaggttttgatgagacgcagccaacagctgaatctggtggaaaaggaaaagtgattaaactttta

SEQ ID NO: 855599 - DNA, 100 bp, Homo sapiens
cagcagcccggactggcggtgagcgcgagggaggctactgagaagcccggcgacggaggaacgcaggtctgctgccagacagttaaatctcacacagaaa

SEQ ID NO: 855600 - DNA, 98 bp, Homo sapiens
ccattcctctcccctattgctggctctgcagggctctgatcaagcggatccaagccatgattcccaaggagtctactcttcatcttgtgttgagactt

SEQ ID NO: 855601 - DNA, 100 bp, Homo sapiens
gctgaactacgacaacacattgctgagcttgaaatccaggtgttctccacgccgcacgggctcgaggtgcacgtgcgcaggtcccacagcggtaccagac

SEQ ID NO: 855602 - DNA, 100 bp, Homo sapiens
tcctaagactcgaaggcagcacaggacctggaaaaattacatcacaacattctgaaattttttggttattgtaatgatgttgatcgggagttgagaaaat

SEQ ID NO: 855603 - DNA, 98 bp, Homo sapiens
agcaaacgggcgccccggagccttgctgagaggcagggagtctccggtggactgcagcgttagcaaatgcagcaagctggtgggcggaggcgagtcca

SEQ ID NO: 855604 - DNA, 99 bp, Homo sapiens
ccggagcgcttgaaggagctgcggtcttactactttgaccgcgatgatgtggctttgaagaactttgccaaatactttcttcaccaatctcatgaggag

SEQ ID NO: 855605 - DNA, 100 bp, Homo sapiens
agttaaagcagtcaaacatgctgaccgctcaagagattctacatcagtttggtttcactcagaccgattgggactttaaccaggacatctgacagtgagg

SEQ ID NO: 855606 - DNA, 98 bp, Homo sapiens
tatcgttctatttctctagctattgccttattttttctcatggatgttcttcttcgagtatttgtagaagggtcaatcagacatttacaagaagcatc

SEQ ID NO: 855607 - DNA, 98 bp, Homo sapiens
gatcaccggcgtgccccaccatgtcagacgcagccgtagacaccagctccgaaatcaccaccaaggattccagaattggaaataacgggagggaggac

SEQ ID NO: 855608 - DNA, 98 bp, Homo sapiens
gccaatgacagtagctggaatgacataaaaaactctggatatatatcacgaaggatgccctgcagtggtctcgccatccagctacagtggagggagag

SEQ ID NO: 855609 - DNA, 100 bp, Homo sapiens
tgactgaggtgatgatgaacacccagcccatggaggagatcggcctcagcccccgcaaggatggcctttcctaccaggaaaacctcacagcacgggtagc

SEQ ID NO: 855610 - DNA, 100 bp, Homo sapiens
aggttttgcctttggtgttcaacaacttcatccagcccttatacaaagacctttcggtctttcccagggaactccgatgaagtgttccaacaaaatgagc

SEQ ID NO: 855611 - DNA, 98 bp, Homo sapiens
taactgagttgctgaagcaaggacagtattaacatacatatgatagttgagaaagacacatattctgatcatgaagaaataaacacaagttaaatatg

SEQ ID NO: 855612 - DNA, 100 bp, Homo sapiens
ccttcatccgagacctgaaaaagactttagaagacagctttccatcgacactaggccctttagaccagcctctgaagggaatcctagcgatgatcctgag

SEQ ID NO: 855613 - DNA, 98 bp, Homo sapiens
aagatggagaaattgtatacactggaacagaatcaacccagaacggatagctccctcctggaaaagatgccagtgagagcaggtgccagcaggggaag

SEQ ID NO: 855614 - DNA, 99 bp, Homo sapiens
tcggattaagacatcggagtcggagacctgagagatgttaaccaaattcgagaccaagagcgcgcgggtcaaaggtgcagtggctactggggaagaccc

SEQ ID NO: 855615 - DNA, 100 bp, Homo sapiens
ataacggctgcacctggagattgacgcagagtgggcggcggtggtggaggcctcatgggacctgtcaggatgatttcatctggacacgagttaacaacag

SEQ ID NO: 855616 - DNA, 99 bp, Homo sapiens
caacaggacattgagcaagtttgggaggagctattatccattcctgagttacaggcagccaacatccctctggtgtcagaacttgccatcgatgacatt

SEQ ID NO: 855617 - DNA, 100 bp, Homo sapiens
ccaatgtcaagcccgagcggaaaatgaagctagaggacttcatcaagaacctccgagcacccagtttggccttctctgaggtcagatcggaacaactcac

SEQ ID NO: 855618 - DNA, 98 bp, Homo sapiens
aacccgcgaaatgatgggatagcgttgcaaatccttaaaagagtcttaacggttggcatcactctcttcactgtgtctcataggaaatctctttggaa

SEQ ID NO: 855619 - DNA, 98 bp, Homo sapiens
ggagagaaaaaacctcaaaatgggattcctttgcctccccagatcttcaatgaggagcagtactgtgggccaccaccaaagatccctgacaagcagtt

SEQ ID NO: 855620 - DNA, 100 bp, Homo sapiens
gctatgatggaaatagcttgtgctgctgctgctgctgctgctgcatgtctaccaggagaggagggaactgcggagcggggtgttggaactcgccataagg

SEQ ID NO: 855621 - DNA, 98 bp, Homo sapiens
agaggcctgccatactacattcgcttaaattttgcagagaaaggaccttttttctatcagtgcttatgtttatgctcagaaaccacaaatggacattc

SEQ ID NO: 855622 - DNA, 99 bp, Homo sapiens
gggtacgagagggcttcttcaaaccagaatatcaggagactggtctctgtgctgacttccacccgagtggggcagttgtggccgtaggactgaacacgg

SEQ ID NO: 855623 - DNA, 100 bp, Homo sapiens
ggctgtacactctcattgggtcaaagcgttgtagaatgaatgaagacactggcactgattatataacaccttggcagctatctcaagtcgttgatggagg

SEQ ID NO: 855624 - DNA, 100 bp, Homo sapiens
ggcagaagacatggaaatttctgctcatagagtggtgctggccgcctgtagtccttattttcatgccatgtttacaggttcctcatgccatgcacctgct

SEQ ID NO: 855625 - DNA, 100 bp, Homo sapiens
tgccaaacggaggaatacctcgtatgcaacctcaggcttcagccagatcttagaaatgaagttgaaaaattacgcaatgaagtgaatgaaagagagaaag

SEQ ID NO: 855626 - DNA, 98 bp, Homo sapiens
gccgagtgggaggatggcggaatgtcttgggacaaggtgcgcattcctggtgtgctgcagcgattgggagtgacatactttgtggttgctgtgttgga

SEQ ID NO: 855627 - DNA, 100 bp, Homo sapiens
gcttctaccagcccatgcccctgaaggcctcgctggagatcgagtaccaaggtgatttcacctggaacagcatgtcaggccgcagtgtacggctgaggtc

SEQ ID NO: 855628 - DNA, 99 bp, Homo sapiens
acaccaagaagccctgcacccggtctttgacatgcaagggccgttgctccagggagaactgcaaatatcttcatccacccccacatttaaaaacgcagt

SEQ ID NO: 855629 - DNA, 100 bp, Homo sapiens
tgaggagtccaacatcaccatgcagcttactactttgtatgagaacttaagtatacacaaccagcagttagaagaagaggttaaagatctagcagacaag

SEQ ID NO: 855630 - DNA, 100 bp, Homo sapiens
gggcccccaaactgtcacagaaagagctgttaacacttcctagataacggctcaaactggaggattataaggatcgcctgaaaagtggagagcatcttaa

SEQ ID NO: 855631 - DNA, 100 bp, Homo sapiens
gacccggagcatccgcatcattaacacgctcacgtcgcaggagcacacactggagatgctcagccagcattgggcagcccccgcttcctgctcccctacc

SEQ ID NO: 855632 - DNA, 121 bp, Homo sapiens
gtcatttcgtacatatgagagggttgccttttcgtgcaactgaaaatgacattgctaatctgtcggaaaaggtaacagaagatggaactcgaaatcccaatgaaaaacctacccagcaaag

SEQ ID NO: 855633 - DNA, 100 bp, Homo sapiens
agaaatgaaacttctcaaatgagccaacctgagtcacaagctgttggagccactgctgtgtatcctatcgatcttgtaaaaactcgaatgcagaaccaac

SEQ ID NO: 855634 - DNA, 100 bp, Homo sapiens
gcggaaccatggccgatgggggcgagggcgaagacgagatccagttcctgcgaactgactttctgcagggcgactgcaccaaagcgaaacagaagctgaa

SEQ ID NO: 855635 - DNA, 100 bp, Homo sapiens
aagaagtccgagacacgcggtgaggcggcgacgggctccggatttgaggcttaagcaacttcttccggggaagagtgccagtgcagccactgttacaatt

SEQ ID NO: 855636 - DNA, 100 bp, Homo sapiens
gcttggggatcctctgtacgcccgttcactgatcatggaagggaagtggttgctgtgtatgttactggtgcttggaactgctattgttgaggctcatgat

SEQ ID NO: 855637 - DNA, 100 bp, Homo sapiens
caagtttacgacaaggaggttcagtggacccttggagccatcctctacaggacccgctttctaccattaaggtttgaagaaaaggcccaagtggatcccc

SEQ ID NO: 855638 - DNA, 99 bp, Homo sapiens
ttaaagctggtctgttctaactgaggttgtaaagctctctgaaatagtgaccttagcgaagcaagcacatgtggatgtgaaatttcagttgccaatatg

SEQ ID NO: 855639 - DNA, 100 bp, Homo sapiens
aagacccagtgcaaagacatcaccatgaacactagcaattgaaagacatgacaattgtgcttatgactacctggaagttagagatggaaccagtgaaaat

SEQ ID NO: 855640 - DNA, 100 bp, Homo sapiens
tcttggagtccacttccaattccaaggcagcaaagtaatggagaacggccttctcttcaaagaacttctgcagactccaaattttcgaattaccgtggtt

SEQ ID NO: 855641 - DNA, 100 bp, Homo sapiens
acggtggagctaagtagccaaggattctggaaaactggcatccgttctgatgtctgtcaggtgactattatatggttaaaaagattttggaggaaaacag

SEQ ID NO: 855642 - DNA, 100 bp, Homo sapiens
ttttatattcatctcaaaaacaaaattctgaactcaggacttggcaagtccataattcagcagccaaatctttccctcgaaggtttgttttgcctttaaa

SEQ ID NO: 855643 - DNA, 100 bp, Homo sapiens
cttgctggaggacctgcacctagccacttctgattgtccttctcttgactcatggaatgctttgtgagaaagaactacaaagccgggtccctcgatatta

SEQ ID NO: 855644 - DNA, 100 bp, Homo sapiens
tggatcccaacactggacggtcaagagggtttgggtttatcctgttcaaagatgcagccagtgtggagaaggttgttcatgtcaatggatatggaaagat

SEQ ID NO: 855645 - DNA, 100 bp, Homo sapiens
tcaaccacgttctcataccagcctgaagaaatctgggctgcaatttaattacaaaactgagccttggaacatttcaggcctggcacggaatgcagttttt

SEQ ID NO: 855646 - DNA, 100 bp, Homo sapiens
gtctggatcaaaaactcagaaaatacgtggttggagagctcatctggaattttgccgatttcatgactaaccagttactgttgcccagaaatggttgaat

SEQ ID NO: 855647 - DNA, 100 bp, Homo sapiens
ccagctctgctgccacctctgacagggaattgacataggggatagcttaactattccagatgaattcacggaagacgaaaaaaaatccggacaatggtgg

SEQ ID NO: 855648 - DNA, 100 bp, Homo sapiens
tattaaaggaagcacacctaagctgagatctgtatctgtggacctgaatgttgatccctcgcttcagattgacatacctgatgcgctcagtgagagagac

SEQ ID NO: 855649 - DNA, 100 bp, Homo sapiens
ccccgtgggggacggggcagcggggacgcggggtctcgcggcgcctggcagcagagaccaccagaaggtttgaaggatgacctctaggaagaaagtgttg

SEQ ID NO: 855650 - DNA, 98 bp, Homo sapiens
tcagatcagagtctcacatggagtggacgtggggcggattcccagagtccaccaagcatgtttgtgtcattagtgaaactggaaaagcaaaatacaaa

SEQ ID NO: 855651 - DNA, 99 bp, Homo sapiens
cttttttcttgctgaaacattaaaaggcaaaatcagtaaaggcttggaggatttaaaacgtgttagtccagtaggagagacatatatccatgaaggact

SEQ ID NO: 855652 - DNA, 98 bp, Homo sapiens
gtttcctgagttgctgtttcttgggactgcgaagctatacaggctacatttgcctgaaaaaattaaggatgaccagcagctgaagaatatgagtggcc

SEQ ID NO: 855653 - DNA, 100 bp, Homo sapiens
ataaacatcagaacctcaattctgttgatcttcaaaatgctgcagaaatgctcactgcaaaagtgaaaggagcaaatatcaatgcacagacagaagaaac

SEQ ID NO: 855654 - DNA, 100 bp, Homo sapiens
cacctggttctgcctctggtcctactgggagtccagttgttaaacttcaggatgccttggccagtaatgcttcaacccccgctgggggcagaccctgcag

SEQ ID NO: 855655 - DNA, 98 bp, Homo sapiens
aggaggaagataccaactagagataaaaataccagaaacatacccatttaatccccctaaggtgcccctgggcgctgggattgctctagcctgtaagt

SEQ ID NO: 855656 - DNA, 100 bp, Homo sapiens
tcaaactcctggactgaaacgatcctctcatctcagcctccaaaagtgctggcattacagggtcatcgagcagctcggtgggaagcagctggtcatgaac

SEQ ID NO: 855657 - DNA, 98 bp, Homo sapiens
aagatgggcgacccggatctcctggaagtgttggcggaggaagctccttgacctgtttatggtttgggattggtctacttacctagctgattatgggc

SEQ ID NO: 855658 - DNA, 100 bp, Homo sapiens
agctcatcttaggctgtgctgtgaactgtgaacagaagcaaggaatgtgaattggacccttgctgcgaaggaagtacctgtaagcttaaatcatttgctg

SEQ ID NO: 855659 - DNA, 98 bp, Homo sapiens
tacaggtcaaagaggtcctctccaagctgagcacgctcgtggaaaccacactcaaagagattatgtttgagaccttcaacaccccggccatgtacgtg

SEQ ID NO: 855660 - DNA, 99 bp, Homo sapiens
agtatcactacctccaccagatgttgggggtatctccagggcagcttactaaaaagtatagctcatgctcaacaatatttctagatgacagcacagtca

SEQ ID NO: 855661 - DNA, 98 bp, Homo sapiens
ataccaactgtctcaagctaccgatgtgaatgcaacatgggttataagcaggatgcaaatggagattgtatagatgaggaagaggaagaattcattga

SEQ ID NO: 855662 - DNA, 100 bp, Homo sapiens
cggcacggccatctgtgtgtctgggcagtgcaaggtcacttttacaaagagaaagtttggattaatgaagaaagcctatgaacttagtgtgctctgtgac

SEQ ID NO: 855663 - DNA, 99 bp, Homo sapiens
tgaattggcaaaagctgctaagaagaaacttcaatctgtttctagagaggaaggatctccccagctgtcttcagcaaggccgtctcctgcccagagaaa

SEQ ID NO: 855664 - DNA, 98 bp, Homo sapiens
cattatctgcataccagaggtactacagtttacagtctgactactggaagatcaatgtccgagttaccaccatggatgcagagctggagtttgcaatc

SEQ ID NO: 855665 - DNA, 100 bp, Homo sapiens
aaccatttcctacacagtttgcaccccagcatttgttcagtgctcagcacaggagtttgaccagacagagtagacgtcaaatatgtaccagtagtttgat

SEQ ID NO: 855666 - DNA, 100 bp, Homo sapiens
ttggagtgaaccggagaccccgaaaacggaagcgcagggagaaggaagaggtgtttgaaaagataatcagacagctaaatggagtctgagcagctgttcc

SEQ ID NO: 855667 - DNA, 100 bp, Homo sapiens
tttcctcaatgaagttgaggttcaggaaggattcctgagattccaggaggaagtactggcgaagtgctccatgaaagagcgggatttagaattggccgct

SEQ ID NO: 855668 - DNA, 100 bp, Homo sapiens
ggtcataaattaactgatagtgaagatgaatttcctgaaattacagagggtgtccttctgtgctgaacatgtccgtaggaatgccctggcacttcatgct

SEQ ID NO: 855669 - DNA, 98 bp, Homo sapiens
gacgacgaggaagaggaggtttctgaggtatcattgcccagtgcctaagatcttttatgttcagctcactgtaggaaataatgaattttttggggaag

SEQ ID NO: 855670 - DNA, 98 bp, Homo sapiens
tgagagctacaacttggagaatggaaaagaaccattgaagcttgagagaaaagcccccaaaagcagctattcagtttcaccagtgatcattaaagaat

SEQ ID NO: 855671 - DNA, 99 bp, Homo sapiens
gagcgccctgtaaggtatattcggaaacctatcgattacacagttctggatgatgtgggccatggtgtcaaggcacctgaatggacagaagaggacctc

SEQ ID NO: 855672 - DNA, 98 bp, Homo sapiens
aagaattgaaaactgtgacgaacaacttgaagtcactggaggctcaggctgagaagtacccgcaactacacagtccctgatccccccggcctcttcga

SEQ ID NO: 855673 - DNA, 98 bp, Homo sapiens
ttgccttaaactccctaaaatctccgcagctctggttcctgttgcggccggtcaaaatgcagatcttcgtgaaaacccttaccggcaagaccatcacc

SEQ ID NO: 855674 - DNA, 98 bp, Homo sapiens
tctgaatacactcgtgaccgaaatgaacgagctgctgaccaggagcccactgtggctttgccagccttctggactccgacagtgcttaccatctgtgt

SEQ ID NO: 855675 - DNA, 100 bp, Homo sapiens
ggcgatctggagaaagaacggcagaacacacagcaagagttgtctctgtgggaagtttgtcctccgtccattgcgaccatgccgcagatactctacttca

SEQ ID NO: 855676 - DNA, 100 bp, Homo sapiens
tgacttaagccgatcccagaggctctttgctgctgtcagtatcaccactggtcaagcaggatatcaatgagtgtattcttgaaaactatcccgagtgctc

SEQ ID NO: 855677 - DNA, 98 bp, Homo sapiens
cgagcaccagagtcggcgtaactatcgcctgacagggtgtcgtgaaaactacccctaaaagccaaaatgggaaaggaaaagactcatatcaacattgt

SEQ ID NO: 855678 - DNA, 100 bp, Homo sapiens
gttgtcttctcctgataatgtaaattgccgcgatacccaaggcagacattcaacacctttacatttagcagactataatgtaactgcaaactccaagctg

SEQ ID NO: 855679 - DNA, 100 bp, Homo sapiens
tggtttggaaggagacaaaatcctcaccactagtccatcagatttctttaaaagccatagttattgcttttttaggaccaaaggatatatttccttactc

SEQ ID NO: 855680 - DNA, 100 bp, Homo sapiens
ctcaacaaccatttctaagtgtacatggactggacctgcctggagcccagcccagagcatctcctcagtgctcatctctatccagtccctgatgactgag

SEQ ID NO: 855681 - DNA, 100 bp, Homo sapiens
ggcaaaacagcagtgaccgagatcgtcaacagacacctagctcccctgtttgacaaccctaagttggataaggagctgcgggcaatgctgagagagaagt

SEQ ID NO: 855682 - DNA, 105 bp, Homo sapiens
caaaagctttgaagatcctcccaaccatgcccgtagccctggaaacaaagggaagggcaagggaaaaggagagaaggttcaaggtcaatgatgggagaacgagaa

SEQ ID NO: 855683 - DNA, 99 bp, Homo sapiens
actgccataaacgctgtgcatcaaaagtaccaagagactgccttggagaggttactttcaatggagttgttgacctcctgtactggagagacattaaga

SEQ ID NO: 855684 - DNA, 100 bp, Homo sapiens
caaatgcagcttgagaacgtgtcggtggcgctcgagttcctggaccgcgagagcatcaaactggtgtccatcgggagcggacatggactacgactcgtac

SEQ ID NO: 855685 - DNA, 100 bp, Homo sapiens
atgtgattaatgtattccaccacctccgccagttaagaggaaaaaggttagtactccagtagttaagcaaggaccagtgtcacagtcagccacacagcag

SEQ ID NO: 855686 - DNA, 100 bp, Homo sapiens
gggatcggggcgcaagcggctccccaaccgggagcggctcacggcggaggacgacgcgctcaaccagatcgcgcgggagaaaagactgtatcttcaccat

SEQ ID NO: 855687 - DNA, 99 bp, Homo sapiens
ggtggcagcctggctctgaagtggaattatgtgcttcaaacaggttgaaagcatcaaggcatgccatgggttgcctctcataaatggccaaagctgtga

SEQ ID NO: 855688 - DNA, 98 bp, Homo sapiens
ttcaggcaatcctgcttgctgtgtgcttaatcatttctgcatgtgcaagtcttgtgaaaatgccattgtgtgctggaaacctggcaagatggaagatg

SEQ ID NO: 855689 - DNA, 100 bp, Homo sapiens
gtctctgctttgctgatgtatcctcagcaaccggaactgcctgacatggtatttgaagtataccatacaactgttttgaaaatccagcgtggacaatggc

SEQ ID NO: 855690 - DNA, 100 bp, Homo sapiens
ttcttaaaggactgatttttagaactccacatttgaggtcaaagctcagattcacagttgcataagccgtcacctggaatgtcttagaagccgtgaggta

SEQ ID NO: 855691 - DNA, 144 bp, Homo sapiens
agggaaccgaggggtccaccgacctcccgttagcccctgagagccgggtggaccctgaggtccttcacagcctgcaggatatgattcatagtccagcgtttgagtgagcactccagtcagaacgaactctgcattgtgaacatc

SEQ ID NO: 855692 - DNA, 100 bp, Homo sapiens
gaatttcagtcagcctcagaggttgacttctacattgataaggtccagtgcacgtgccaacattacactgtcagggaagaagcgcagaaaactcctccag

SEQ ID NO: 855693 - DNA, 98 bp, Homo sapiens
gaaagtccctttggccttgcagacctctatagaggagcgtgtggctcatctacgaagagtccagagtacagttgtgaatttggctccgcgaagtatta

SEQ ID NO: 855694 - DNA, 100 bp, Homo sapiens
aaggagttaaagttacttacactgtgcagtatttcatctgcaagagaaatagtgtggttagaaagagaagagcgagccaggcagcactacgagaagcacc

SEQ ID NO: 855695 - DNA, 98 bp, Homo sapiens
tttatgatgaggcaataagcagcttctttagaaatgtggacaccagctcttgcagtgtttactcaacttcctcaggatacaagtgtcgaggttggaaa

SEQ ID NO: 855696 - DNA, 100 bp, Homo sapiens
ctgcttttgtggcgctcttgctcctctctccttggcctctcctgggatcggcccaaggccagttctccgcagtgtgtggaccagttgacaaagatccaaa

SEQ ID NO: 855697 - DNA, 98 bp, Homo sapiens
cggcctagcattgctctcgccatggctctcagcgatgctgacgtgcaaaagcaggcagtggctctgccaatgatcctgtgagtattcaggaatcactg

SEQ ID NO: 855698 - DNA, 98 bp, Homo sapiens
gcctgctggagagcctggaccagctggagctcagataaccatgatgactacacagacttctactatgacatttgctccttttgaggatacattgagtt

SEQ ID NO: 855699 - DNA, 100 bp, Homo sapiens
tgaagaccagcaggaaagcagtgagcccttacaggtacagaggtgcagttccatggtacaccataaatcttgacttaccaccctacaaaagatggcatga

SEQ ID NO: 855700 - DNA, 100 bp, Homo sapiens
caacaatacagaagttaagatttattgtcaaccaaggaacatcatttacagcgagcaatttcagcacagcaagtgtttagagaaaaaaaagagagtatgg

SEQ ID NO: 855701 - DNA, 100 bp, Homo sapiens
gacttggaaagtcacccaaagccgccccaagtgcagggttctggcttccagtcgtcgcggagggagaagtatggcaacgtgttcaagacgcatttgttgg

SEQ ID NO: 855702 - DNA, 98 bp, Homo sapiens
ttggttaaaggagctgccgtcagcactgtgacttctgccgtgttcaccgtgggagacaacgtggtttcaggcagcgatgaccgcacggtgaaagtctg

SEQ ID NO: 855703 - DNA, 100 bp, Homo sapiens
cacacgcacgtagtagacatcactcgcaccagccctggcatcccaggatttggaattcagctgtgagctcatgagctgatggatgtttccaggagtaccc

SEQ ID NO: 855704 - DNA, 98 bp, Homo sapiens
acaaatcaaactgcaaatctgggatacggttagagatgacaacaagagacaacacccatgcctggtggagttctccaagctgcctgaacaggagcgca

SEQ ID NO: 855705 - DNA, 98 bp, Homo sapiens
gctcttgctcctctctccttggcctctcctgggatcggcccaaggccagttctccgcagagcaccaaaactactttggaatagatgaaaaccttggtc

SEQ ID NO: 855706 - DNA, 98 bp, Homo sapiens
aacaagccattcatgggccggttttatgagtgggaaccatttgcagaagtatctggagtccatctttcaccatcttctcctgagattgtactggaccg

SEQ ID NO: 855707 - DNA, 100 bp, Homo sapiens
tatccaatccctgccttttgagtccaggtggcaatgatagtaagaaatgctaaagatacagctcatacaaaagcagaacggaatattctggaggaagtaa

SEQ ID NO: 855708 - DNA, 98 bp, Homo sapiens
ctaacatcacctgcttcatccttgtttaatgactttggtgccctcaacatctctcagagacgaaagggacctggtggccttagtctttcaggtggaac

SEQ ID NO: 855709 - DNA, 101 bp, Homo sapiens
cccgaacgcggtcagcgcagaggaggatggctacaccctctttgtggcaggctttgaggatggcggggcaggtaatggagtcggttagacaactacaaatg

SEQ ID NO: 855710 - DNA, 95 bp, Homo sapiens
gcaaagcgcccagcctgccgcctcgctgtccctgcggcttctggggggccgacgagattgaaatgatcatgacggaccttgaaagggcaaaccag

SEQ ID NO: 855711 - DNA, 100 bp, Homo sapiens
gtctgaccggcttgcccgcttggccaacgaagggggatctggacaactctcctctgtccccaccttcaccaaggaccaaaagcagaacgcatactcgggc

SEQ ID NO: 855712 - DNA, 100 bp, Homo sapiens
tttagggatcagcctgtgttttttagatatggagtctggagaacggttaccatcctcagcagcctcctctactacaccaacttcatcttcgacaccttct

SEQ ID NO: 855713 - DNA, 100 bp, Homo sapiens
gactgaaaaacctgaggctgatgacccaaagaagcccctgaatgtgacagtgatccgcaggggggaaaaacaccagcttagacttgttccaacacgctgg

SEQ ID NO: 855714 - DNA, 100 bp, Homo sapiens
agttcaagtagcaactatatcagtatctggagtccatctttcaccatcttctcctgagattgtactggaccgtgaccactcttcttccattggctgcctc

SEQ ID NO: 855715 - DNA, 100 bp, Homo sapiens
gagaagtggcggcatcgagaccatcgccaatgagtacagcgacaggtgtaccccgtggaggatgcgctatcttatcttgaccaggtgaagctgcagtttg

SEQ ID NO: 855716 - DNA, 100 bp, Homo sapiens
tggaattttgccgatttcatgactaaccagtgattgacttctaaggactcttggtacatgaggaagaaacccggaaggggaagaggaaagcaaaggcgtc

SEQ ID NO: 855717 - DNA, 100 bp, Homo sapiens
gggtttcccaagcaaggttccttggaagaagatgtctgcagaggcttggcactgctgcaccaccaaaggcaaacttcattgaagctgacaagtattttct

SEQ ID NO: 855718 - DNA, 98 bp, Homo sapiens
ttaggcagcaagtatgtcagtgaggagacttgtcacatgcatcaggaccagagattcgggaactggagcctctcctctgtcacagtgacaatccatct

SEQ ID NO: 855719 - DNA, 98 bp, Homo sapiens
ttgctgagaaagatgatgatctaaaacgaacagccaaaagatatgaagaaatccttgatacattgcctaagatactgagccatatcgccccagcattt

SEQ ID NO: 855720 - DNA, 100 bp, Homo sapiens
tgccagttgcaatggaatttcataatgctgtggagtacaaagagaagatctatgttttacagggcagttcaattaacctccagaagatggctgaacctgc

SEQ ID NO: 855721 - DNA, 98 bp, Homo sapiens
agcaccttgctgaggaatatggtgaacgtgctataaataaagttaaaagtgttagagatgaagtgctgacttgctcatcagttttgcacagtggcaat

SEQ ID NO: 855722 - DNA, 75 bp, Homo sapiens
caggcgtgtactgcctatgtgtgctgcctggcgcaagcgctggtttgtcctccggcgaggccgcatgagcggcaa

SEQ ID NO: 855723 - DNA, 98 bp, Homo sapiens
cagggctcccgtgtctgctcgccctccgacgctgctcaggttactataacaacagtaccaaggtggctgtgaaaaccctgaagccaggaactatgtct

SEQ ID NO: 855724 - DNA, 98 bp, Homo sapiens
taagagagcaattggatattattcagcgactagtaagcctatgtcatttcatccaccacattacttaggaagctgaaaccccacgtagtgttcttgaa

SEQ ID NO: 855725 - DNA, 100 bp, Homo sapiens
agaggttctgaagactgccctcatccacgatggcctagcacgtggaattcgcgaagctgccaaagccttagacaagtggagccgccaccaaaatgcagat

SEQ ID NO: 855726 - DNA, 109 bp, Homo sapiens
ttgctgtttcttgggactgcgaagctatacaggctgagaaggaagccaacatccttttggagccatgaatattgtccgaactccatctgttgctcagattggaatttca

SEQ ID NO: 855727 - DNA, 100 bp, Homo sapiens
aatcacagcttcagatcactggttcttgattattacagacctctttctgaaaagcccggaattggtacaagccatgtttcccaaactgaacaatcaagaa

SEQ ID NO: 855728 - DNA, 100 bp, Homo sapiens
agctcgatggcagcagttcctctgctagttccacagcaacaagtaatacagaagaaaatgatattgatgaagaaactatctggctcaccctagaagccca

SEQ ID NO: 855729 - DNA, 155 bp, Homo sapiens
cacgacaaatgtgtgcgatcggaggaatgcctgagcgggacatggactcaacagatctgtctgcctgcaatctacaagatgccacagcccccattttgccaacgaggcagctgaggttcccagaggctcaataccagcaccatgagccgcagcac

SEQ ID NO: 855730 - DNA, 127 bp, Homo sapiens
gctgatatgaattcttcagagtcagttggcagtgatgcaccttgtgttgtaaaagtggatgctttgttcttcctgaaggatttcttcacaagtctttctgcagaagtagagcttcaaatgactccag

SEQ ID NO: 855731 - DNA, 100 bp, Homo sapiens
aggattcacgagaagaaaattggcaagagtggagacaaagagatgagcaggttggtttcagtgctgatgaaacttgggactctgcaatagatacatggag

SEQ ID NO: 855732 - DNA, 98 bp, Homo sapiens
gcctcactgccctccatattgctacaatagctggccacctagagctcactaccctgggaaatcttacaccttcaagcactgtgtttttctgctgtgat

SEQ ID NO: 855733 - DNA, 100 bp, Homo sapiens
gtgaatgcaaatttattggctgaagctggcactagtcaagatggaggtgatgctgccggttgttatgacaatggaaaacactatcagataaatcaacagt

SEQ ID NO: 855734 - DNA, 100 bp, Homo sapiens
cgatgggaggaagagcgagacctaagagggtacctgtagctgggaatgtcctacgtgttaccggtgcatgtccgttccgaggaatgggatttaatgacct

SEQ ID NO: 855735 - DNA, 100 bp, Homo sapiens
ttgactgctctgctcctctatgctggacatcaaatttccagtacctcctaaatggctctactttgaacctgctgggcaaggaagagattttcaaggaaac

SEQ ID NO: 855736 - DNA, 98 bp, Homo sapiens
gctgccccaatccccggcagctctctcagattgcagagggaatggcatacatcgagcggaagaactacattcaccgggacctgcgagcagctaatgtt

SEQ ID NO: 855737 - DNA, 98 bp, Homo sapiens
ggcccatgttgtaaggcgttgtgcttcagacgggattctgcaattcgaaagcagcttgttaaaaatgagaaggtcattcaagacacagatatgcactt

SEQ ID NO: 855738 - DNA, 98 bp, Homo sapiens
gagaacttctttatccttcgaaggaagcctgtggagttccatgccattgcagtgtcaactaggcctcagttacttttcagtttgcccaaattgagccc

SEQ ID NO: 855739 - DNA, 98 bp, Homo sapiens
gggctaataatgctggcaaagtggaaaaatgtgcgattcaagatggaaaaggtgatgtaaccattacaaatgatggtgctaccattctgaaacaaatg

SEQ ID NO: 855740 - DNA, 100 bp, Homo sapiens
caccgaacccagcattttcggcaaccgctgctggcagttttgccaggtgtttgttaccttggaaactttgagggaaattttgagtcactggaccttgcgg

SEQ ID NO: 855741 - DNA, 100 bp, Homo sapiens
ttgtaccttgtgacagaatatgccaaaaatggagaaatttttgcatctgcaaacatagagaattctgggcttccacacaactccagtgctaactcaacag

SEQ ID NO: 855742 - DNA, 100 bp, Homo sapiens
cgtctaggggagcgaaggctgaggtggcagcggcaggagagtccggccgcgacaggacggttgcaatgaatgtgtatgagttatcatcagctgccggatt

SEQ ID NO: 855743 - DNA, 100 bp, Homo sapiens
gagaagaagttaaaacatttcagggcaagccaattatgtatacgctcaacggcaagaaagtggaagttgccgtcaaacagatcatcgctggaaaagccgt

SEQ ID NO: 855744 - DNA, 100 bp, Homo sapiens
aagtgagcatggatatcccagatatccttcgagccaagaggacatctgaaatctatagccaggtgatgagaagctacaaggcgaccatccagcagacctt

SEQ ID NO: 855745 - DNA, 99 bp, Homo sapiens
gaatgtggccctgagtgatggacacaacaccgcggaggaggacatggaggatggtacatggactatatcgcacaacaggtgctagttttgagaaggccc

SEQ ID NO: 855746 - DNA, 100 bp, Homo sapiens
cggcttcaatatcttcacccagcatgatcactgtgtccactactatgatcttcgtaacactaaacagccaatcatggtattcaaaggacaccgtaaagca

SEQ ID NO: 855747 - DNA, 101 bp, Homo sapiens
cttcctgatttctgcagctctgtgtgaagtgactgtcgggcctccagaaaacattgaggtgaccccaggagaaggctccctcatcatcaggttctcctctc

SEQ ID NO: 855748 - DNA, 100 bp, Homo sapiens
caagaaaggagagaagatgaaagtcctggaggacgatctagggcagccctgcagaggtacctgttctactgtaatcgctatatgaaccacatgcagagcc

SEQ ID NO: 855749 - DNA, 101 bp, Homo sapiens
ttgtgccgctataatctgtacactctctgctattgtctgctgcatccaaatcttctccctggacctcgtgcatacgttacaggcccaaaaactgcgactgg

SEQ ID NO: 855750 - DNA, 100 bp, Homo sapiens
aacagccatgttgttgactaagctgaaggaaactgctgaaaacagcctcaagaaaccagtaacagattgtgttatttcaacttcagtgccctgaacggtt

SEQ ID NO: 855751 - DNA, 100 bp, Homo sapiens
agaggttctgccatgcaagtgtcgtgagatggagaataaagaaactctcaaagggttgcacaagatggatgatcgtccagaggaacgaatgatcagggag

SEQ ID NO: 855752 - DNA, 101 bp, Homo sapiens
cggagcccaagccgggtgctggcacatccgaggcgttctcccgactctggaccgacgtgatgggtatcctgaaaatgcttggacagaagagatgagtacta

SEQ ID NO: 855753 - DNA, 98 bp, Homo sapiens
ctatctgccacacatccagcgtgagtgatgagttggaacaattcatggaaaatcaaggtgcatcgagcccaggtatcctcattttaacaacaaacctc

SEQ ID NO: 855754 - DNA, 100 bp, Homo sapiens
gcccgaccccgtcccgaccctggccgccccgagcggagcctggagataccggggagaccacgacgctgcctcctgggcgccatgagttcctgttcagctt

SEQ ID NO: 855755 - DNA, 118 bp, Homo sapiens
catactctgttcttgaacccgttttggagaggtgtacacctgatcagctgtatcgcatagaggaatacaatcattgtgacagctatgaaattcgccctggtaaacaccttggagtgtg

SEQ ID NO: 855756 - DNA, 98 bp, Homo sapiens
ctttccagttgtttgacaagagtggaaatggagaggtgacatttgtaccttctccaggcaaattccgttcccctgcagcaccatctcctttggctctt

SEQ ID NO: 855757 - DNA, 100 bp, Homo sapiens
tggctgctcgataaatcagacagaacagttaatcctcaatttaagcctgatctaacccctagaaacagtgctgctcaacaagagttcgaagacaactgga

SEQ ID NO: 855758 - DNA, 100 bp, Homo sapiens
aaaaatcaatctcagggctacaaccagtggcagcagggtctcaccatctgctacctggatatgctgatgaccagtgaggagcgccggaagcagctgaggg

SEQ ID NO: 855759 - DNA, 98 bp, Homo sapiens
cgccgccctggcctctctcaggaatctctatactcccaacgtgaagcatccttttatcaagaatgccaaacctgtatcaatattaagagacctgatca

SEQ ID NO: 855760 - DNA, 100 bp, Homo sapiens
tgcaaagcccagcgcgctaaccctttactcgcgacctttcgcttcaccttcacagcagccctgcgaggttttcctcctccaccaggcgctccacctccat

SEQ ID NO: 855761 - DNA, 100 bp, Homo sapiens
tgtggatgtgtatggaccttcagttccaaagatgatgaatctgaaaggaaatccggaattatcacagagagttccaccatcttcctctgaagacgtagcc

SEQ ID NO: 855762 - DNA, 100 bp, Homo sapiens
gaggaatcccatgaccagcatgcggtgctagacacttagcctgtgatgaggagagagtggaagaagcaaaactgctggtgtcccaaggagcaagtattta

SEQ ID NO: 855763 - DNA, 100 bp, Homo sapiens
cagcccgtcttccttcccctcccttgcatgatggaaacaccatggctgcggcggcccagctctctctgacacaggaatagccaggccagaagaaggaagg

SEQ ID NO: 855764 - DNA, 100 bp, Homo sapiens
ggggagattgaagtaaccccttctgctctaaaactaggtgtgcaactgaggaacatggctcaagaaactaatcacagccaagtgcctatgctttgttcca

SEQ ID NO: 855765 - DNA, 105 bp, Homo sapiens
ctcaagccgaagccttcagtgggactcccccagcagatacattctcaggagcttctgataattggaggtgttgcagcccgggatcagctctctgttttggaaaat

SEQ ID NO: 855766 - DNA, 100 bp, Homo sapiens
ttaagaaacatccacagcagcgactggcccaagttctttgaaaagggtgtgggccgaagatatgctcatgtggtgttgaggaaagcagacattgacctca

SEQ ID NO: 855767 - DNA, 99 bp, Homo sapiens
tgagcgaggcggagaaggtgtacatcgtgcatggcgtccaggtccgggcccaccagctggtcttgccaccttgcgacgtagtgatcaaagccgttgctg

SEQ ID NO: 855768 - DNA, 100 bp, Homo sapiens
ttacatttctccacctcatttgaagaacgagcttcgtagcccacggagctgaggtggaaaaatgctaatcactgaaagaaaacattttcggtcaggaaga

SEQ ID NO: 855769 - DNA, 98 bp, Homo sapiens
aacgcgctaaggcaaagcacctgttggtacgccttattacatgtctccagagagaatacatgaaaatggatacaacttcaaatctgacatctggtctc

SEQ ID NO: 855770 - DNA, 100 bp, Homo sapiens
agaagtgagacagctgaagcgtgttggggaaggagctgtaaagagaattcgggttttcagaccacccaactactctggtaccattgctttggccctgtta

SEQ ID NO: 855771 - DNA, 100 bp, Homo sapiens
cttccaggacaagtcctgcgcttggggatcctctgtacgcccgttcactgagaccatggcgagcccagggaaagacaattatcgaatgaagagctataag

SEQ ID NO: 855772 - DNA, 100 bp, Homo sapiens
gacttttcagcctttgacccaaagactgagtgagtcacctgttttcaccacttatgaatcagtgttgttccatcaactacaagaaataaagggagttcag

SEQ ID NO: 855773 - DNA, 100 bp, Homo sapiens
cagatgttttcccattgttcaaggacaaaggtggcccagaattttccagtgccctgaaaaatagtcatgcatttagaagattttaatgaaggtgcttcat

SEQ ID NO: 855774 - DNA, 100 bp, Homo sapiens
gtgaaacgtgtttcaagaccaaaaaacacaataccaggcatacatttggcagaataaatgaaccaggtctgccatcatggatgttctcgcagaagcaaat

SEQ ID NO: 855775 - DNA, 98 bp, Homo sapiens
gccccgcggggagcgcccccggcgcgatgcccttcaggaaagaacactctgctccagccaaggtggtgagggcagctgttcctaaacagcgcaaaggc

SEQ ID NO: 855776 - DNA, 100 bp, Homo sapiens
atttattgccaaagacaaagaagccagagctaagcttgaactggcagaatttggtgttcacttggcagaactgactgtagatccccagggggcactggca

SEQ ID NO: 855777 - DNA, 100 bp, Homo sapiens
tatggtattggcaggactgcgaccagagatcgtgttggacattagctcccgagcgctggccttctggacatatcagatgtgggacctaggaaaaggcctg

SEQ ID NO: 855778 - DNA, 100 bp, Homo sapiens
agttcctgtgtgtgcatggtggtttgtctccagagattaacactttagatgatatcagaaaacatgcacatctctgaaagccaacaagaattcttcagaa

SEQ ID NO: 855779 - DNA, 100 bp, Homo sapiens
gcttcatgggattggtaaatatggcaacgactcttaccgaattttttgtgtcaatgagtggaagcagcacatggattaattgatgtatgttgagtttatg

SEQ ID NO: 855780 - DNA, 100 bp, Homo sapiens
agaattcgcttgcaagttaaggctgcaattagaagtggatcggttggaagaactgaaaatgcaaaacatgaagaaagtgattgaggcaattcgagtggag

SEQ ID NO: 855781 - DNA, 100 bp, Homo sapiens
tggatgtttggggatagaaagatgaatgggacatgatttgtgtgctccaatgagctcagtccagtgcacgcttaaaaaggcctcttaagagccttgatgg

SEQ ID NO: 855782 - DNA, 100 bp, Homo sapiens
ggaatttcaggctatatctatggactttggatgaaaaaaacttttggtgttaatgagtaccgccattggattaaagaggatatggatatagatgaagggc

SEQ ID NO: 855783 - DNA, 100 bp, Homo sapiens
ctcgctcacgcagcaggagcaggggacgaagtgctgatgagctccttctaactgagatgatgtttaatggccttttcaatgacctttctgcagaacaggc

SEQ ID NO: 855784 - DNA, 106 bp, Homo sapiens
tctcgtagtcctgggagcacagcagaagtaaaggaaggcagaggaagccacggccactggaccctggcgagggttccaaggacacagacagttcagcagggcgacg

SEQ ID NO: 855785 - DNA, 100 bp, Homo sapiens
agaaagaaggaggagtgggggaggcgaacagtctcgttgctgcctctgtgtacgctgaggggggagggaggagtgagatgtggatgttgcttttgcacct

SEQ ID NO: 855786 - DNA, 100 bp, Homo sapiens
ccggaatccgtaacatcagtttcatggtgaaacgcataagagatactgctggtcaagagaggtttagaacattaactcccagctattatagaggtgcaca

SEQ ID NO: 855787 - DNA, 100 bp, Homo sapiens
acgcggcctacgtgaacaacctgaacgtcaccgaggagaagtaccaggaggcgttggccaaggtctattatcctcccagtccacaacgctgaaccgtggc

SEQ ID NO: 855788 - DNA, 100 bp, Homo sapiens
gaagtaatctggaatcagaaagcactacgctaagttttgcactgattgcaaaaataaagtcctccgagcatacaatatccttattggtgaacttgactgc

SEQ ID NO: 855789 - DNA, 100 bp, Homo sapiens
ggagaatgtaactgaaagatacatggcttgcaaaaagtaaaccacgatcgttatgctgacatgttcaaaagaaagctgcagaatggaaaatcaagataga

SEQ ID NO: 855790 - DNA, 100 bp, Homo sapiens
agaaatgtccacacagcaaatcaaacagaaataaggtagactcaatgggatgcacagacaattagaacattaactctcatctcaaaaactatacaaactt

SEQ ID NO: 855791 - DNA, 98 bp, Homo sapiens
gaaaacaagcaaatgctgccttccttgttggatgctacatgatgctgtctttgcaggtgccatgcctacaatggcaagcatcaagctgtctacacttc

SEQ ID NO: 855792 - DNA, 100 bp, Homo sapiens
ctttgtgaagttgttagagtacatgagcattacttgggaccaggaagaaacaggctcctgccagcaccgacagcaacgaaaatgttcccacggagatcag

SEQ ID NO: 855793 - DNA, 100 bp, Homo sapiens
attaagggttattactacaatggcatgttggagacttgggcaatgtgactgctgacaaagatggtgtggccgatgtgtctattgaagattctgtgatctc

SEQ ID NO: 855794 - DNA, 98 bp, Homo sapiens
gccatcgttgctgccttcttcgtcaagatgctgtctttgcaggtgccatgcctacaatggcaagcatcaagctgtctacacttcatcccattgtgaat

SEQ ID NO: 855795 - DNA, 100 bp, Homo sapiens
ttgtagccagaccagatgggccgcccagctctctcgggactaggcagcttattcaaaagttgacggatgtcgcagaagagtgtcagaacaatcagttaaa

SEQ ID NO: 855796 - DNA, 99 bp, Homo sapiens
ttatatcctacaactgggttatatggcctgggttgccaactatgagagaccccgaatgaacgccaactccctcctggccagccccacaggcctcagccc

SEQ ID NO: 855797 - DNA, 100 bp, Homo sapiens
actccccatcacacacacaaggaagcagctggccgaatgtcaaaagcaccttggacaaattgaaaagtgaggttactattgaatgtaaaacaaggtactg

SEQ ID NO: 855798 - DNA, 98 bp, Homo sapiens
agatacatgaaccagagaacttaatgcccacacagatcattcctggaaaaggtcaatgagctgaaggagaaaggcaacaaggccctgagcgtgggtaa

SEQ ID NO: 855799 - DNA, 100 bp, Homo sapiens
gaggacttgaaaagctgagatatgatgattttgaagtcatttcacatcgaagccatgatttaaatatcggcgttaagcgggaggaagcactgaaacaaca

SEQ ID NO: 855800 - DNA, 99 bp, Homo sapiens
tagctggtttggcttgagagaagccaaggacccgactcagaaacccagtttcagctcctggcatcagctctattcaaatctggttcagattttacagct

SEQ ID NO: 855801 - DNA, 99 bp, Homo sapiens
gccggctccctcccccgcgtccctgcgaccgccgcggcgaagatgagtatggtgtttgcgaaaacttgcggaagctggagatcacaggcgtgtcttgtc

SEQ ID NO: 855802 - DNA, 100 bp, Homo sapiens
ccaaggagttcaatcacttggcgtgacttcactacttttaagcaaaagatgctcccaagaagatattgctgataaactaggtgtggatatctctgcaaca

SEQ ID NO: 855803 - DNA, 139 bp, Homo sapiens
tgggaaggcgtgggcgacccggtgtgtggcgcgcccagagccccgcgtttcagccctagggaaggatgtacagttacccagcacgtgtacctcctcctcctcctattgctcgggctgtagtgccctcgaaacgtcagcg

SEQ ID NO: 855804 - DNA, 100 bp, Homo sapiens
gcccccgctctgacgatgatggccacgcagaatgtcccgcccccaccctaccaggacagcccacaggttttgggatttgagattgacgcggtgaactctg

SEQ ID NO: 855805 - DNA, 100 bp, Homo sapiens
agaaaggaagtactcgccgagtggaacgggcaatgaggcagacacagaaattccgggtagatatgcctggctcaggcagtgcattcatccccaccatcaa

SEQ ID NO: 855806 - DNA, 100 bp, Homo sapiens
ttccctgtgtgcctgcagtttttcaccctcacgctgatgaacttgtacttcacgcaggaataagacgagttggaagaagacctgatcaacaacttcaggg

SEQ ID NO: 855807 - DNA, 101 bp, Homo sapiens
gagctactgtactggctattggaaggaggagattctgaagataaggagatacaaagccagcctgcgtatttaacaatgtggaatattatgatggagacatg

SEQ ID NO: 855808 - DNA, 100 bp, Homo sapiens
agcctgccgtttctttcacttccggagaataataataacctggatgcctgctgtgctgttctctctcaggagagtacaagatatctttatggtgaaggag

SEQ ID NO: 855809 - DNA, 100 bp, Homo sapiens
aaattgctgcccttattggaatcatggttggctctttctacatccctgggggctatttcagctcaggtttggtgcacctcgatttggaggaagtagggca

SEQ ID NO: 855810 - DNA, 100 bp, Homo sapiens
ttggctggaaaaactctctgctcgtcatcaaggcagcatcatcatcgttattgattctatagatcaagttcaggttcgaattacgttaatgaaatttcta

SEQ ID NO: 855811 - DNA, 98 bp, Homo sapiens
aggcaatactttgtacatcctcacccacaagcgcattctgaagttcctcaaattgtttacctgtgaccgcatcaagcagtcagcagctggcaccaagc

SEQ ID NO: 855812 - DNA, 98 bp, Homo sapiens
gaaaataagctcaagcagacaaatctccagtggataaagctgccagagaaactacgcataggctggaataacaagatggtgaaaactgctggcttatg

SEQ ID NO: 855813 - DNA, 100 bp, Homo sapiens
ctcggcggcgggcggcagcatgtcggtggcggggctgaagaagcagttctacaaggcgagccaggcttcctgtgtccagtaccggttagtggtccgggat

SEQ ID NO: 855814 - DNA, 98 bp, Homo sapiens
atggatgtcttcccgtgtctccccgaacaccctatgggatgccatatcttgggatccaggtggacccagaaatggaaccagtgaccatctggagactg

SEQ ID NO: 855815 - DNA, 100 bp, Homo sapiens
gaagtagagatgctggtggcagggcatgaggacagcaatggttgtatcaactatgaaggatttacaaaccgaactttaggaaacttcagaggaatgggca

SEQ ID NO: 855816 - DNA, 100 bp, Homo sapiens
aggaccagcctggaagtgcctgagatcaacgctttgctgctggtccccaagtcccaggccggcccaccatgatgatcagcaccacggccatgaacactgc

SEQ ID NO: 855817 - DNA, 98 bp, Homo sapiens
tcaattcttcgacaggaaaaaaatttgctggatattgatgcgccagtcactgatgagggcagaagtgcagttgaccaagcaggtggtgcacagattgt

SEQ ID NO: 855818 - DNA, 98 bp, Homo sapiens
gagttttttcctttctccaatactcttctcacaagctctgcagacaagaccctgtctatatgggatgcaagaacagtccaaactgctttgcaggaacg

SEQ ID NO: 855819 - DNA, 100 bp, Homo sapiens
aaaagagagagcttgtgaaactgagggaataggattaaagcaaggagagccaatcatgactggcaaaacacagaccagcaacgtcaccaataagaatgac

SEQ ID NO: 855820 - DNA, 100 bp, Homo sapiens
gatcaggtctcgttcccgctcaagatcaagacacaggcataggactagaagcaggagtaggacaaggagtaggagtcgcaattctgtggtgttcttggtc

SEQ ID NO: 855821 - DNA, 99 bp, Homo sapiens
catccgtggttccaagtgtctataagaacctggttcctaagcctgtaccacctccttccaagatggacgacctcagtgggaggtagaagggaagataat

SEQ ID NO: 855822 - DNA, 100 bp, Homo sapiens
ggctctggcgcctatggctctgtgtgagcaaaggcacaacaccacttgctccaccacctaaacctgttcgaagaagattaaaatcagaagatgaattaag

SEQ ID NO: 855823 - DNA, 100 bp, Homo sapiens
gattctttctctggaactgaaccagaggttcacaaaacaagtgtagtaggccggaaggtggtggtcgtacgctgtgaaggcatcaacatttctggcaatt

SEQ ID NO: 855824 - DNA, 100 bp, Homo sapiens
gtgtatggtggtggcaggggccatcgctgccgtctttcacacactgataggatctggagtgggagagcaggatgggggactgatcggtgccgaagagaaa

SEQ ID NO: 855825 - DNA, 100 bp, Homo sapiens
agatcaaatggcacttcattggccacctacagaaacaaaatgtcaacaaattgatgggattatattccatcacaacaagatattctgcttgccagaagac

SEQ ID NO: 855826 - DNA, 98 bp, Homo sapiens
ttcatttccatttctaccttgtatgcctcaatttgctggatttaagcactgctgcactttatgagcccattgcagatgcaaaggctcctgagaagcgg

SEQ ID NO: 855827 - DNA, 98 bp, Homo sapiens
aaaaaccttctactcatggacaaagagaaagctgatgtaaaatcaacagcatttaccttccggtcttccaaggtcatagagaagagatactttttaag

SEQ ID NO: 855828 - DNA, 100 bp, Homo sapiens
tcgatgcattgatgttgaagtctcccacagtgaagggcctgatggaagcgctgaattcttgccgccaggatggggaaacagaacagcaagctgcgcccgg

SEQ ID NO: 855829 - DNA, 125 bp, Homo sapiens
gtttttctccctgatgaacatggtaatttgacgactgctcttcctcctgttgtctcgaacccaatttatgacaaccgtgaaaggaagcatgtttacaccaatgccaaaaagcagatgctaatttc

SEQ ID NO: 855830 - DNA, 100 bp, Homo sapiens
atcacctcctggatggagccgatagtcaagttcccgggggccgtggacgacaaggagcatccaagatacctgatcccagaactttgcaaacagttttacc

SEQ ID NO: 855831 - DNA, 99 bp, Homo sapiens
ggacagatggcctacatcaagctggaggacaggacgtcagctgttgagtggaatgtcatggccagctcctcggacagtgaagatgacagtttcatggct

SEQ ID NO: 855832 - DNA, 98 bp, Homo sapiens
atttgctagccattgtctcatgaaccatcctgatttagcaaaagacttaacaggtaattattcgaggtggaggacatattttaccctatgaccagcct

SEQ ID NO: 855833 - DNA, 100 bp, Homo sapiens
gtatggccacagaagttgctgctgacgctctgggtgaagaatggaaggaattacatgaatgacagtcttcgaaccaatgtgtttgttcgatttcaaccag

SEQ ID NO: 855834 - DNA, 100 bp, Homo sapiens
agcctgccccgccctggggacgaagagctgcagctcctcctgtgcggctgttccatttcctccaagtcaccggcttacagcaaaagaagtgtttgataat

SEQ ID NO: 855835 - DNA, 100 bp, Homo sapiens
gatggaaatgaagtataataccaagaaagccccacttgagcctggctgagggagataagaataagctggtgcccctgcccgcctgtctccgtactgccat

SEQ ID NO: 855836 - DNA, 100 bp, Homo sapiens
gcacggaggaggagcaggagcgcggagccgcgagccccgagccccgagcccggcgcctggctgagtagtcacagggattatggacccagaacagatgctg

SEQ ID NO: 855837 - DNA, 100 bp, Homo sapiens
tcgcccctccacagacccagggcatttggtggacacttttgcttgcagttaggtcaagtggaggtattagaaaactactcggatgctccaatgacaccaa

SEQ ID NO: 855838 - DNA, 100 bp, Homo sapiens
ttcccgggaggggggagcggcgttggaggccaccgtttccagaattctgaaggtggactctatgtatgcatgaatacatttttggcctttggaagggaac

SEQ ID NO: 855839 - DNA, 99 bp, Homo sapiens
tctggctcttggtcgggctcagcctcggtgtcccccagttcggcaaagaatatcctccgaatcctaaatctagagctccaaggatgctggtcattaaga

SEQ ID NO: 855840 - DNA, 50 bp, Homo sapiens
cttgccacccagctgcgcagcttcgatgccgaggcctgcctggagcccca

SEQ ID NO: 855841 - DNA, 100 bp, Homo sapiens
gtgcaatgcttgccttgggactaatgacatgcttgtcaggttggatggcaagcatgtggtgtttggcaaagtgaaagaaggcatgaatattgtggaggcc

SEQ ID NO: 855842 - DNA, 101 bp, Homo sapiens
cccagcaccacagtccttctgcagtccctcgtccagccacccccaggagtcaaattgactttatcagctttaatcgatgggaagaacttcagtgcaggagg

SEQ ID NO: 855843 - DNA, 101 bp, Homo sapiens
gtgaaatgtcatgcctctgaaaatgaagggatgcttgaagatggaaagaaatttgattcctcccgggacagaaacaagccctttaagtttatgctaggcaa

SEQ ID NO: 855844 - DNA, 99 bp, Homo sapiens
gacgctgctgggtccgctgagcggggcgacccgaggtgaagtggatcctaaagagaggatagcacgccaacgaaaattattacagaagaaacttggcct

SEQ ID NO: 855845 - DNA, 98 bp, Homo sapiens
atttacccagaagtagtccatatgtccctgctatgtggatatttggtagcaatgactgatgtggaaactacatatgcagattttattgcttcaggaag

SEQ ID NO: 855846 - DNA, 100 bp, Homo sapiens
ccaacacagatgtccaagctgccaattgaagactgggatagtttccaagctattttggatcatacctacaaaatgcatgtcaaatcagaagccagtctcc

SEQ ID NO: 855847 - DNA, 99 bp, Homo sapiens
ggaactttctatgatcaggcagttgtcaggtcagcacttatcaccccgcacctgtctctccaggacattccacagccgtggtcagtctgcctggctccc

SEQ ID NO: 855848 - DNA, 98 bp, Homo sapiens
ctcagtttgcacaagggaggcgacagagacagcagcaggtgaggtggtcacttatcagtggaacatcccagagaggtctggccctgggcccaatgact

SEQ ID NO: 855849 - DNA, 100 bp, Homo sapiens
ccgccccggatgcggccggagggcgcgggaatggagctcggaggcggcgaggagcgcctgcctgaggagagcagctgtttggggcaacttcgttaatatg

SEQ ID NO: 855850 - DNA, 99 bp, Homo sapiens
aagacctcagatgtgaagtccattaaagacatagatgcccttgtaggaggagaagttggaggcttggagtttggcaagttaccatttggtgcctgcgaa

SEQ ID NO: 855851 - DNA, 100 bp, Homo sapiens
taaggccaaaaatgtgcatactcacagagttagagagagggatggtgttactgtaaaatggggaaaggagaaatttgaaggtgtagaattgaatacagat

SEQ ID NO: 855852 - DNA, 100 bp, Homo sapiens
cgtccatcatagtcaactgcgtggaagagaaggtttggtgcacctcgatttggaggaagtagggcagggcccttatctggaaagaagtttggaaaccctg

SEQ ID NO: 855853 - DNA, 98 bp, Homo sapiens
gtccccagggaatgccacagcatcctccagcacctcaggcggtaaatgactcgtgctaccagaatgatgattctgtcctaaaatccctcgttgagatt

SEQ ID NO: 855854 - DNA, 98 bp, Homo sapiens
cccgactcttaaaaatcaggaaggacaaacacctttagatttagtttcaatccagaatgaagagagtgtggtgctttttctggtcgcgtggactgtga

SEQ ID NO: 855855 - DNA, 100 bp, Homo sapiens
ccacgagacagatgtgaacttccagggcaagaacctggacaccgtgaagattgcagatctgactcagaagatctttgaccttcgaggcaagtttaagcgg

SEQ ID NO: 855856 - DNA, 100 bp, Homo sapiens
gatgtgttccgacagaggatgatgcagatgtacagacacaagcgggccaacaaataggtctacttccccagcaggacagcatcattctcctatatcttct

SEQ ID NO: 855857 - DNA, 100 bp, Homo sapiens
ttctctcaagaaatggtgttcttctctgacctgaaatacgaatgtagagatgggcggaagccatttccaattaaccatggtgaaactagtgatgaaactt

SEQ ID NO: 855858 - DNA, 99 bp, Homo sapiens
tgagatgacactgaagacaaatttttttgccactagaaacatgtgcaacgagttactgccgataatgaaacctcatgggtcatcctctcgaaggtgttc

SEQ ID NO: 855859 - DNA, 100 bp, Homo sapiens
gaggagaccataacccccgacagcgccatggcccagattctgccaattcgttttcaggagcatctccagggcacagtcagtggtgtgctgctagttacac

SEQ ID NO: 855860 - DNA, 100 bp, Homo sapiens
aaaattcttcagacattacgagaaatgttagagaagaaagacagctttgtggaagagtgcttagatgagtacgaagatgatgaagcagggcagaaagagc

SEQ ID NO: 855861 - DNA, 98 bp, Homo sapiens
agccctcagtaccagagacagaagcagatggattcgtccttttagggctgatcccttatccaacatggttctaaccttcagtactaaagaagatgcag

SEQ ID NO: 855862 - DNA, 99 bp, Homo sapiens
tggaaagtatgcaccagctgtcatcgtttgtcagaagaaagcagctggctcagaaaacaggagatcatgaatcagacagataaaaatcaacaagaaatc

SEQ ID NO: 855863 - DNA, 100 bp, Homo sapiens
gagcagcaagaatggcacggtctgcctcagtccaccctgtaccctgggttgtggacctggcctattagcagatgccaagatgcgggtatttgaacgttca

SEQ ID NO: 855864 - DNA, 99 bp, Homo sapiens
tttcatgcaaagacatcagctacttaagcgccacgagaaggaaatctgaaatagagtactatgctatgttggctaaaactggtgtccatcactacagtg

SEQ ID NO: 855865 - DNA, 100 bp, Homo sapiens
ccgggatcgccgagcccgacctcgggcgccccgccggtcacctccgcgcggacaccagactgtgagctgcttgtccccatcctgcggccgtcctggggac

SEQ ID NO: 855866 - DNA, 99 bp, Homo sapiens
ggcaagacttggagaaaaggaaagctccatcaaagaggacccccagccagcccggttctcggacagcgacaccacaggcaagctgggctttgaggaatt

SEQ ID NO: 855867 - DNA, 99 bp, Homo sapiens
ttgcagaagcctgtagaaaacaggaagaatttgatgttgccaacaacggctcttctcaaacttttggaacagcgatcgtaatcaatcctgagaaagaca

SEQ ID NO: 855868 - DNA, 100 bp, Homo sapiens
gagaattcaggaaaatcaggccaagagaggcggggtttcaccatgttgcccagactggtcttgaactcctgagcttaagcaatccacctgcctcggcctc

SEQ ID NO: 855869 - DNA, 99 bp, Homo sapiens
gtttctgcaagacatgacacaaagctgctagcagaaaatcaaaacgctgattaaaagaagcacgatgcacaagtctggcgttctgaggaaggccattga

SEQ ID NO: 855870 - DNA, 118 bp, Homo sapiens
atcacctttatccacctttttcagatcttctcctgaagacagtcccatcattcccgaaacacagccacaccatgttaccatatgtgcctcttccaggcatggaagctacatataacac

SEQ ID NO: 855871 - DNA, 98 bp, Homo sapiens
ataagtgaaacacggaaactgagtatgggatctgatgatgctgcctacacacaaggttcgatacaagaggctgttttcctagcgtggcttgctgcctt

SEQ ID NO: 855872 - DNA, 100 bp, Homo sapiens
gtggccggctcccctctcggggcaacccagacgtgcaacaaagtgcgatggattttaaacaatttgaacctaatgacttttatttgaaaaacactacatg

SEQ ID NO: 855873 - DNA, 50 bp, Homo sapiens
ctgcccagccaccagcaaccccccagaaatcttacaggctggtgttaaag

SEQ ID NO: 855874 - DNA, 98 bp, Homo sapiens
ttgatatacacttttcaaaatgctttggtgggaagaagtagaggactgttgtttccactgtatccaaaaggaggggagaagttgcagtttgattatgg

SEQ ID NO: 855875 - DNA, 100 bp, Homo sapiens
cgccttcctatcaaacagctatgaaactggtgcccttgaaagatgaagatgatgttgatgttaggcctgcaagaaaaagcgaggctccatttactcacaa

SEQ ID NO: 855876 - DNA, 51 bp, Homo sapiens
gcaccgggaggccgggccgagcgctctagccggcccggtccttggactgaa

SEQ ID NO: 855877 - DNA, 100 bp, Homo sapiens
atctaccacgccgtcaaggaccggcacaaggacgttctcaagtggggcgatgaggaagcgagcagctgcaaagcatctaatagaacgctactaccaccag

SEQ ID NO: 855878 - DNA, 100 bp, Homo sapiens
gactcgccgggcgctgcggtggctccctgggccgaggccaagaagcttgagagaagaaaaatttcagaaaaattgtctcaatttgactagaatatcaatg

SEQ ID NO: 855879 - DNA, 99 bp, Homo sapiens
gggactttcttcgttgccatgaggaaagaattctccgagacatggagaagggctgtcacttcctgcacatcttggcctgtgctcgcctgagcatccgcc

SEQ ID NO: 855880 - DNA, 100 bp, Homo sapiens
gaacttccgtacgacctcgaggatgccatggtgttctggatcaacaaggccgccctccccactgttaccaacatgaagctgctcgcagcaactgtgctac

SEQ ID NO: 855881 - DNA, 99 bp, Homo sapiens
caacagctcggcgggctggaaggtcctgaatctgtgcctccttcccttcttaaagtagtgatgaaacccatagcaactgttggagaaagctaccaatat

SEQ ID NO: 855882 - DNA, 114 bp, Homo sapiens
gagcatcgcatagatggaactagacctttttcttgggttggatgatgtgttcccgcgtctactacatggtaagaccattgcaattggaaaagttctgaaactggttccagagaa

SEQ ID NO: 855883 - DNA, 100 bp, Homo sapiens
agagtactacagtgaagcagatgccagagtggagcgtgttatatgttatcattgctacctttgtcattgttgttgccttgggaatcctgtcttggactgt

SEQ ID NO: 855884 - DNA, 100 bp, Homo sapiens
tgtggatgttgttgaaataaaaaataccttaaggaagcacatatatagagctcagaaaaaatgcctgtcttaaaggctgaagcgtcacattataactctg

SEQ ID NO: 855885 - DNA, 98 bp, Homo sapiens
tgctcccagctacagagggtaccgggatgcctgcaccattactgcaagtgaacaatggcctcaccctcagtgaccttcctctgcacatgctgaacaac

SEQ ID NO: 855886 - DNA, 100 bp, Homo sapiens
ctaagtctcatttgactgatggattttaaaacctttgggattatatgagggaacaagggaaactctcagtcgtcactgtactacccttggtgatgctctc

SEQ ID NO: 855887 - DNA, 100 bp, Homo sapiens
gatggggtgataggggagatccggctcagcgtcgtgcacactggggttgttcatgaggacctccgcctgctcttggagacccacctgccgtccaaaaaga

SEQ ID NO: 855888 - DNA, 149 bp, Homo sapiens
ccccaggcttctgcgcagaatgcttctcagcagcaacatccccaaacagcggcgtttcacggtggcacatacatggatcagttcgacagcttagacaagcatacacaatggggaattgacttcttggaaagatatgccaaatttgttaa

SEQ ID NO: 855889 - DNA, 98 bp, Homo sapiens
aacacggaggtcaagtttaagggtactttggtgcatgaagctcaactcaactatttctacatctctcctggaggcgaacagctgcttggagaactaca

SEQ ID NO: 855890 - DNA, 100 bp, Homo sapiens
gcgccagccactcggagctaatccacaatctccgcacaattctgtggtgttcttggtcacacatttatggagtttctgaagggcagtggagattactgcc

SEQ ID NO: 855891 - DNA, 98 bp, Homo sapiens
ggccctgagcgcactctggagggattctggcatcagggaggctttcagccggagaagcgagtttcagctgctccagcggcgccatgagcaaatgaaaa

SEQ ID NO: 855892 - DNA, 100 bp, Homo sapiens
tgctgaagctgtgcaccgaggtccgtgtggccaacgagctcaacgccaggcgccgctcctttacagatgctgtctttgcaggtgccatgcctacaatggc

SEQ ID NO: 855893 - DNA, 99 bp, Homo sapiens
aaagaacccacaggtgcatttcacagcactctgggcgaaaattggatgtgaaaatgaagccagaccgagcgctggataaaacaagccttagaagaaggg

SEQ ID NO: 855894 - DNA, 100 bp, Homo sapiens
agaaacctgtttcaacttgaagacaccgtatgaggtgaatggacagccagccaccacaatgaaaggttatcactgtgaatataagatgcggacaggaagg

SEQ ID NO: 855895 - DNA, 98 bp, Homo sapiens
ggcaaagtcatgggagcagagctcagacatgttctcaccacccttgaaatgacatcagatgtaccatcactgggtccagccattgcctctggaaactc

SEQ ID NO: 855896 - DNA, 100 bp, Homo sapiens
tttgtgtcctgagatcaaatggcacttcattggccacctacagaaacaaaatgtcaacaaattgatggacttatgaaaatatgcatcagtttaatactgt

SEQ ID NO: 855897 - DNA, 100 bp, Homo sapiens
gtcaaccttctgagctttcttcagagacctcagttccgagaggaacccgtgcaatagttcggtgccgcgtgacctccggcggcccgccagcctcatcggc

SEQ ID NO: 855898 - DNA, 100 bp, Homo sapiens
gttggctgcatatttgcagaaatgtttcgtagaaactatcagaggactcctgaaacctggagagctacctgctgtataaaggctggcctgagggcatttg

SEQ ID NO: 855899 - DNA, 100 bp, Homo sapiens
tctggctcttggtcgggctcagcctcggtgtcccccagttcggcaaagtggatgaatacattgccattgccaaagaaaagcatgggtacaacatggaaca

SEQ ID NO: 855900 - DNA, 100 bp, Homo sapiens
ccacagtggaaaacatgggcagaattaatcataggtcaagcagaggaactctaatgaatcattgattgaccagcactattttaccagttggaatgaatga

SEQ ID NO: 855901 - DNA, 100 bp, Homo sapiens
gatggataaatcgaaaggagagcccgtcattagcgtgaaaaccacaagcaggtccaaagagagagccgacgcccccaacccatccctcatcccagagact

SEQ ID NO: 855902 - DNA, 98 bp, Homo sapiens
tcgccttcccggccgcgtcggagtccggcggcgacctgcctctgaaacatggcaggctcggatgctgagcgtcatgaacaggatgcacgtggtcagcg

SEQ ID NO: 855903 - DNA, 100 bp, Homo sapiens
ggaagccagagccacacacaccatcatggtcctggaaatgggtcctgatgaatatgaagagatggaagaagaggaggaggaggaagaggaggaagacgag

SEQ ID NO: 855904 - DNA, 100 bp, Homo sapiens
tgggcccatataatccagacacttgtcctgaggttggattctttgatgtgttggggaatgacaggaggggcgacagccagttttgtagtcaaaaagcagt

SEQ ID NO: 855905 - DNA, 98 bp, Homo sapiens
gaataatatttatggagcatatattatggaacacagatatctatagagaaatggggtttggtcactatgaagaagaagaaagctgttgggagaaacaa

SEQ ID NO: 855906 - DNA, 100 bp, Homo sapiens
tttttcaccagggaaatcagagacaatgatggggctcttccccagaactacaggggctctggccatcttcgtgcatttattgcagcgctgtacattgata

SEQ ID NO: 855907 - DNA, 99 bp, Homo sapiens
tttaattaatcaggaatgtgaagaaattctacagggttatgtggtccgaatcagtggtgggaacgacaaacaaggtttccccatgaagcagggtgtctt

SEQ ID NO: 855908 - DNA, 101 bp, Homo sapiens
cacacctctagtggacccctcagtatatggatacggagtacaaaaacggcccttggatgatggaggtaacattgtataacactgatcaggatggtagtgat

SEQ ID NO: 855909 - DNA, 100 bp, Homo sapiens
ggctgcagcagtgaggccaagctccagtgtcccacttgcatcaagctgggcatccagggctcgtacttctgctcgcaggagcagcatccagttggacttc

SEQ ID NO: 855910 - DNA, 98 bp, Homo sapiens
ttggctggaaaaccccaaaagtgtacataaggtcatcaccgagtggtcttctcacatcatccttcaggcagcaccaagagtcactggcagcagagaga

SEQ ID NO: 855911 - DNA, 100 bp, Homo sapiens
agaatcgaatctcttctccctccccttcttgagtcaccatcatgtctcttctcaccaccctctgaatctgcattagccagtcaactagccctttcagcgt

SEQ ID NO: 855912 - DNA, 100 bp, Homo sapiens
ccctgtgcttatgacaagactgccttggcattagagagttgtctgctggttctcagcttgaagaagattctgcagtccttattgatcctttttcttggcg

SEQ ID NO: 855913 - DNA, 100 bp, Homo sapiens
aagccacccaggtgtaccccaagctgtacttgtcacctcgaattgagcactctttgtgctatggaagtgcttcctcttgcactaccttctccacctcgtc

SEQ ID NO: 855914 - DNA, 99 bp, Homo sapiens
ttactttactggaaagaaaactattgaaacagtgaaagcagacagggtgcaggcagatgacctggtgaagatgctcttcagcccagaagagatggacct

SEQ ID NO: 855915 - DNA, 100 bp, Homo sapiens
gtgagagcccagagcctggcaggagtccagaaagccagatggctgaacatcagagtgggaaactgtgaaaagctcagaacctgttaaagagacggtccag

SEQ ID NO: 855916 - DNA, 100 bp, Homo sapiens
agatggtgacagacaaaaggctatgaagcgtttacgtgtcccccctttgggagctgctcagatgttcattctggacagagtggaaggtgatacttgttcc

SEQ ID NO: 855917 - DNA, 100 bp, Homo sapiens
attgccttattttttctcatggatgttcttcttcgagtatttgtagaaggaaaaagagccccatatattgcttatctcactcgttgtcgacaaggactac

SEQ ID NO: 855918 - DNA, 100 bp, Homo sapiens
gcttcgccgctgcgcaccccagcggagccaagccccacgctggccggacagggccgcctgtcgccgggacatgaaagatcagatgtcaacttcatctgtg

SEQ ID NO: 855919 - DNA, 101 bp, Homo sapiens
aactggccaagaagggccttactccttcacagatcggtgtgccacggaccacaatgtggacaacaccacagagatgctgcaggagtggctggcggctgtgg

SEQ ID NO: 855920 - DNA, 98 bp, Homo sapiens
gcaatcctaccatgtcagccttcccagtagctggaactacagccattccacagattttgaagtacaccgaaactggcttgctatcactcacagtttgc

SEQ ID NO: 855921 - DNA, 100 bp, Homo sapiens
gagcaggaacctggagttttcaggacggctgtcctcagcgaggggccgtgcacccgctcctgagcagcgccatgggcctgctggccttcctgaagaccca

SEQ ID NO: 855922 - DNA, 98 bp, Homo sapiens
gagggcgcgctcgagacgctcctgagggacttgccatgaggtgttgaagccttgtttcactgagttggagagactggacctaaatggcgcagcatgac

SEQ ID NO: 855923 - DNA, 99 bp, Homo sapiens
gctcatcagagggaagatctttttcctcaattgatgaagtggccattctgcctgcccctcagaacctctctgtactctcaaccaacatgaagcatctct

SEQ ID NO: 855924 - DNA, 51 bp, Homo sapiens
ggagccgcgcagccctcggagcacgagctgaagaagcaggtggagagtgcc

SEQ ID NO: 855925 - DNA, 100 bp, Homo sapiens
ggtgctgcaggtgttcaagtgcagggagttcccgttacaatcactagtgttgcagaaatgcactcggtgatggaaagagagccactattctgaagaacac

SEQ ID NO: 855926 - DNA, 100 bp, Homo sapiens
caccaacaacaccacaataatccacagccaagagccagcccctgggcaacaaagtggaaatggagattgtgagcatgttggaaaaaaacgcaacacttct

SEQ ID NO: 855927 - DNA, 100 bp, Homo sapiens
cccgtgctgctgttgatgctggctttgttcccaatgacatgcaagttggacagacgggaaaaatagtagcaccagtccttatgtcgtcagaagatcgaga

SEQ ID NO: 855928 - DNA, 100 bp, Homo sapiens
aatatacactccttggaatgaagaaagggaatgaaagctactggttgattttaaagtgcctgggcctcacaggtttggagatgtcccagaataaggcaca

SEQ ID NO: 855929 - DNA, 100 bp, Homo sapiens
attcttaatcaggatgcaaagaattatcatgcctggcagcatcgacaatgggttattcagcttcctgtgcttcccagaattccatcatctgactgccatc

SEQ ID NO: 855930 - DNA, 98 bp, Homo sapiens
ggagtgggcaggaaagcagcgggactttcagatcagagttgactgcaataatgaaaggagtgtccacactaaaacattacagaatacctccagtgaag

SEQ ID NO: 855931 - DNA, 98 bp, Homo sapiens
tgcggagtccataccggagcgcaatggcgtccaaccccgaacggggggagattctgctcacggaactgcagctgtatgcaggagctattcttgaagtt

SEQ ID NO: 855932 - DNA, 100 bp, Homo sapiens
cagcacagccagcaccgcacgccctgcaagggaggatctctctaggagctgacactcgaaccttcacgacccattcggatttttccaggactcaggagtg

SEQ ID NO: 855933 - DNA, 99 bp, Homo sapiens
ggaactcaggcgcctcttcttagttgatgatttagttgattctctgaagctcagagtcaagatctccactgaagttggcatcacaaatgttgatctttc

SEQ ID NO: 855934 - DNA, 98 bp, Homo sapiens
ttggtgtccagatggacagagttgatcagcatttaaatcaaacggtattgagatggattgggttatgaaacataatggtccaaatgacgctagtgatg

SEQ ID NO: 855935 - DNA, 100 bp, Homo sapiens
tcctgtcctggatcagtttctttgtcatgtagccaagactggagaaacaatattgttcctcatgtggttaatttggttcattctttcaaaaatgatggtc

SEQ ID NO: 855936 - DNA, 99 bp, Homo sapiens
cgacgccgccgctcttcagtttgcccgaagcgcggacgcggtttacgtgtctttggtgcaacactaacaaggcttgtctggactacccagttacaagcg

SEQ ID NO: 855937 - DNA, 100 bp, Homo sapiens
agggaattaatttttccatctaattatgacctccttcgccacttacagtatgcaacacattttcctatacctctggctcgcttctcatatgtgcggatga

SEQ ID NO: 855938 - DNA, 99 bp, Homo sapiens
tggtctgctccggatggctccgcaagtcccccccggagaaaaagttgaagcgttatgctctgacgcccgctctgcggcttcggtgtttgaacaggccac

SEQ ID NO: 855939 - DNA, 100 bp, Homo sapiens
ctccaccgaacgatacacacgttggatcaaccagctgacgccggagcagctcctaacccaggccaccagcccctcgggttccaagatgcagctactggag

SEQ ID NO: 855940 - DNA, 100 bp, Homo sapiens
agtaactgaactttctcgaatttgttcccttgttggaatgccacaacctgatttctcctttcttaggatgccacaggcaaagatgcaatctacacaatcc

SEQ ID NO: 855941 - DNA, 100 bp, Homo sapiens
gaaaagcgcttctacctctttgggccgttacctcaaaagttttccaagagataacttcaccaagatgtccagtgataggcaaaggtccgatgatgagagc

SEQ ID NO: 855942 - DNA, 100 bp, Homo sapiens
tggaagtgagaccgaaatagactctgaagtaatatctggactttgaaattcacaacctccaagagggaaaacatttctccagattatccactcacccttc

SEQ ID NO: 855943 - DNA, 100 bp, Homo sapiens
ccggcgacaggactttgggtctgggtgagccttctcgtggcggcggggaccgtccagcccagcgattctcagtcagatttggacacctcccacactgagt

SEQ ID NO: 855944 - DNA, 100 bp, Homo sapiens
tggcttcgaagtcagacaacaagtttggaaaatggcatcatcccaagaaggaaggcactggaggagtttgcagaaatgaaagaaagagaagagaagaagg

SEQ ID NO: 855945 - DNA, 99 bp, Homo sapiens
tggttacaaccgcagcagtggtggctatgaacccagaggtcgtggaggtggccgtggaggcagaggtggcatgggaattggcagagggggtcgatttgg

SEQ ID NO: 855946 - DNA, 98 bp, Homo sapiens
cgagatgtaccatcctgcctactgggtcgtcttctcggcgacaactgccctgctcttcatcccaggtggctgttcctttgatgagcactacagcaact

SEQ ID NO: 855947 - DNA, 100 bp, Homo sapiens
aggaggaggttttcaggaccaaaattgtggaaaagtcactctgtgccggtggtggtgtgcacattgagccccggtatagacagttcccccagctgaccag

SEQ ID NO: 855948 - DNA, 100 bp, Homo sapiens
gccgagggcgtcgcggactctccccgcgatgatgccggtaccaaccaagaagctgaagaaatatgagaaagaatatcagacaatgcgagagagtcagctg

SEQ ID NO: 855949 - DNA, 98 bp, Homo sapiens
cctccgaaaagcgtttccgcagacagaagtggggagaagcggagctgctaaatcctgaagatgacctcttaccagggaagattcgagacagcaatcgt

SEQ ID NO: 855950 - DNA, 100 bp, Homo sapiens
cagcaggcatcatccgctatgcaattgggggacctgatttcccatcgccttctgtccccctaaaggcttcagatcctgaggaggcgtcccaggcccagga

SEQ ID NO: 855951 - DNA, 98 bp, Homo sapiens
ttgaaggccctacgcagttccgacaaaggtcgcctttgctactaccgcgactggctgctgcggcgcgaggtcttgggcgtctttggtactggcttttt

SEQ ID NO: 855952 - DNA, 100 bp, Homo sapiens
aagattcgagacgcttatcagatgctgaagaaacaaggtttgtttaagcatcttaaacacgtggcatggaagaccagaagagaagtggaatcctcagacc

SEQ ID NO: 855953 - DNA, 98 bp, Homo sapiens
ccccagacaacctattgataccacagctgaactttcttctaagtgccacagtgaatgccggtggtggtgtgcacattgagccccggtatagacagttc

SEQ ID NO: 855954 - DNA, 98 bp, Homo sapiens
aaaacctaaccatgaagacttgaacttaatacagcaagaaagaccatcaagtttaccagttttgctgatttgggaaaataaagactatggatcaacta

SEQ ID NO: 855955 - DNA, 100 bp, Homo sapiens
gcggagctgacggtggaggttcgcggctctaacggggctttctacaaggcaatactgaacactgcgcagcttgcagaggtctcctggcagccctcattag

SEQ ID NO: 855956 - DNA, 98 bp, Homo sapiens
gaggagatgcttcaagaggctgccagcctggagaccaggtggagccgccaccaaaatgcagattttcgtgaaaacccttacggggaagaccatcaccc

SEQ ID NO: 855957 - DNA, 100 bp, Homo sapiens
ctcggtgctgcacaacctcaaggagcgttactactcagggctcatctacgtattatcgggggacccacggggtcattgtggtttacgacgtcaccagtgc

SEQ ID NO: 855958 - DNA, 98 bp, Homo sapiens
gaattcagaaggaacttgcagaaatcacattggaccctcctcccaactgtaggtctcgtgggctgcctaaactaaaagagtcacgttcccatgaatcc

SEQ ID NO: 855959 - DNA, 100 bp, Homo sapiens
tgggtcaaccaagaacgtcaaacactccaacgattgagagcatttaaagatgaagcgagcagctgcaaagcatctaatagaacgctactaccaccagtta

SEQ ID NO: 855960 - DNA, 100 bp, Homo sapiens
agttattggcaggctgccatgacaaccaggcaatgctggatagataccgaattcttatcacaaaggccagggagctggagagcagagaggcagagctaag

SEQ ID NO: 855961 - DNA, 100 bp, Homo sapiens
ataagatcaatgccctcattaaagcagccggtgtaaatgttgagcctttttggcctggcttgtttgcaaaggatgaaagatatgatcatctggatcctac

SEQ ID NO: 855962 - DNA, 100 bp, Homo sapiens
tgcagagtgggctggcgggctggtccaggacaagagaaagtggtgccagccataccttcagagtgttattttcctttttgtcataaggtgtctggaaatg

SEQ ID NO: 855963 - DNA, 100 bp, Homo sapiens
ggctgtgacatctattccatctgtgagtgactctttgacatggagagaatttcactatattcaggtccggaccctatttgtcagtggccttcctctggat

SEQ ID NO: 855964 - DNA, 98 bp, Homo sapiens
gtccacgtatcagacagacttcatcctgctattgacctgttgtattggcgggacatcaagcagacgggcatcgtgtttgggagtttcctgctgctgct

SEQ ID NO: 855965 - DNA, 104 bp, Homo sapiens
actctgccacctcgcagagctacacgcggagcagatctcacattcttgaaggtggcattgaagagcactaagatcggaagatgagtgagcttgaccagttacgg

SEQ ID NO: 855966 - DNA, 100 bp, Homo sapiens
cgggcatttcgagcatcttgtgggctctcccaagtcgcggcccctcctctgagagccacagtcagacagccgatcgccagtacatggagggcttcaacga

SEQ ID NO: 855967 - DNA, 100 bp, Homo sapiens
ggcagagctacctgtcgcctcagggccggcggtactatgtcaacacgaccaccaatgggaagaaacccttttttcttggagccagcaataattatcacaa

SEQ ID NO: 855968 - DNA, 98 bp, Homo sapiens
ccgggacacctggaagccgagaaatggcaaccacgagacagacaacatgaaccagatctacggtttcgagggtgaggtgaaggccaagtacacagccc

SEQ ID NO: 855969 - DNA, 99 bp, Homo sapiens
cttggctgacatcgcccagaagctgcagttggatagccccgaagatgcagagttcattgttgccaagatgatgaggagtctgatgaggaagctgtgaag

SEQ ID NO: 855970 - DNA, 100 bp, Homo sapiens
aaaccctgaatttataactgatttctgatgaagaattgaaaagaagagtagctgaggagctggcattggagcaagccaagaaagaatccgaagatcagaa

SEQ ID NO: 855971 - DNA, 100 bp, Homo sapiens
gccctcttgataaaaagagatgtggggggattctcgacctgctaacagaactggaccttttcgctaatgttctctatgggccactccacaccaagcaggc

SEQ ID NO: 855972 - DNA, 136 bp, Homo sapiens
ggatgagctgcaattcaaggacgagaagcttgcagagcagcttgggcaagctgaggagctcaggtgacctcacaaagttcggccgtggggatgcctcctccccagccccggccacaaccttggcccaaccccaaca

SEQ ID NO: 855973 - DNA, 98 bp, Homo sapiens
cagcgcccggagcaagcggagctcccccaagagccggaaagtggaaggaggcaaaaccggaagaccttatggattcaaaacttagatgtgtgtttgaa

SEQ ID NO: 855974 - DNA, 100 bp, Homo sapiens
gggtctcttgttgaaatccgaaatttcttgggtgaaaaatatatccgcagggttcggatgagaccaggaggaagataccaactagagataaaaataccag

SEQ ID NO: 855975 - DNA, 101 bp, Homo sapiens
cggcaggaaggccactcacagggcttcaacaagctagctgaggatctatctggttcaatagatgacctccccatggggacagaaggagctctgagtcctgg

SEQ ID NO: 855976 - DNA, 100 bp, Homo sapiens
ggtcaacagcggcctcagttctgtacgcccgtttggtggagatcgtgggcatgcatgaccttggcgtgggcattaccctgggggcccatcagagcatcgg

SEQ ID NO: 855977 - DNA, 98 bp, Homo sapiens
tgaccgaagatgtctattttcctaaggacctccgaggaacagagtgacttttttgaacgaaccattctgtgcaacagccttgtgtggagttgtgctgt

SEQ ID NO: 855978 - DNA, 103 bp, Homo sapiens
aatccctaaatgagctgaggaaggagtgcactgcaaaaagatgccagaagtgggtggagaactgtaggagagcagacttagaagataaaacacctgatcagct

SEQ ID NO: 855979 - DNA, 98 bp, Homo sapiens
tacgagctgcaggaggttatcgagcctaaagtaagctgcaaattaggccggtctgcgtcgacgtcaggtgtgcctcctccatcagtcactcccctcag

SEQ ID NO: 855980 - DNA, 100 bp, Homo sapiens
atcctacgtaaccagaccaagctgtgggacagttgatattcataaagagaaagttgcaagaagagaaattggtattttgactaccaataaaaacacttca

SEQ ID NO: 855981 - DNA, 99 bp, Homo sapiens
gtgtgcccgcatgcctggcctaaagggcttcgtggatgagcacaccatcaacatctccctcagtctgcaccttgacaacacttactacaaagaggcaga

SEQ ID NO: 855982 - DNA, 100 bp, Homo sapiens
aaagcttctcctttgggttgtactcatagattgtgtaggcgttggtcttctgatagcaactttaatgtgaagctccaccatgaggcgaggtggatggagg

SEQ ID NO: 855983 - DNA, 112 bp, Homo sapiens
gggacttgatcaggctctgccctgtctgacagaactcattctcaccaataatagtctcgtggaactgagcggcactgcagaggtggagctgaagaagggagccactctcaaa

SEQ ID NO: 855984 - DNA, 100 bp, Homo sapiens
gtttgctctcatgaacatgcaatgagaagactgatcaatctgtgattccactcagttacaacagcttcataaccaagtcttactggaacaacaccaattg

SEQ ID NO: 855985 - DNA, 98 bp, Homo sapiens
cctgacagcctggaacaacgtcaagtacggtgtgaacccacatccctgcccccagggccacctgcaggacgccgacacctacccctcagcagacgccg

SEQ ID NO: 855986 - DNA, 100 bp, Homo sapiens
cagatgcacacccttcctgggtgatgaaaccaccatcatgggttcgggtcccatagaccccaaagaacttctcaagggcctggacagcttccttaaccga

SEQ ID NO: 855987 - DNA, 100 bp, Homo sapiens
tctcaggcaccagtgccattaacgagctggcgaagatgggcgacccggatctcctggaagtgttggcggaggaagttgttgacctcctgtactggagaga

SEQ ID NO: 855988 - DNA, 98 bp, Homo sapiens
tgcactcgagtgtccagacctgctcgatggagaagatggggagccccgaggatgacctgattgggattccattcccggaccacagcagtgagctcctg

SEQ ID NO: 855989 - DNA, 98 bp, Homo sapiens
ttgtcatgtcttacctctttgctcagcaccctggaggagaagaggttctgctggaacaagctggtgtagatgcaagtgaaagctttgaagatgtagga

SEQ ID NO: 855990 - DNA, 100 bp, Homo sapiens
ctgaaaagccctcaagaaagcctcagtgatcttggtgccatagagagtctccgggtccctggaaaggagttcaaagaaggacgcagagccagccacacag

SEQ ID NO: 855991 - DNA, 100 bp, Homo sapiens
cgtacctctgtctgggactgtcgccagacttcgggaagcagtgtctatggaaacaaagatccccactgatcagaagccatgcagtgacacccgctaagac

SEQ ID NO: 855992 - DNA, 100 bp, Homo sapiens
ccccctccccttggtgaagagcctacttggcccctaccttgttttcatggcatccaccatcaatgggtggatctccttacgtagcagccaaaataaatga

SEQ ID NO: 855993 - DNA, 100 bp, Homo sapiens
caaaatgaaggatgtacaaacatccacaccagggccatccagagtagagatgtggcccagttcagaaatgttgtcacacaattggaagctgatttagaca

SEQ ID NO: 855994 - DNA, 100 bp, Homo sapiens
gatggcgtgtcctatgcttgcaaggacctgggggccgacatcatcctggacatggccaccctgaccggggctcagagatgctgcccccacccccttaggc

SEQ ID NO: 855995 - DNA, 100 bp, Homo sapiens
ctgggccagtattatcaggcatggagatgctactgatgtcagggcatattctcaagatgcctacctgaaaggcaacgaagcttatagcggcaatgcccgc

SEQ ID NO: 855996 - DNA, 100 bp, Homo sapiens
ggggatattatcaaatctactactgttcatggcaggagctttcaagttgtggatggaataaaaaagaaaaatatagttctgcaccaaatgcagttgcctt

SEQ ID NO: 855997 - DNA, 98 bp, Homo sapiens
actccccagcagcacgtgttggaatggacttcggaccctggcctcttgggatgcaaaggtaaaagtacacctgtaagccagcttggttccgcagactt

SEQ ID NO: 855998 - DNA, 100 bp, Homo sapiens
tagagctggccctgggctgtcactataggattgcccacgcagaggaaaaatccaagctggagagtgagctagccaactttgggcctcgcattaatgatat

SEQ ID NO: 855999 - DNA, 100 bp, Homo sapiens
ataataccaagaaagccccacttgccaagacaatgcaaactccagtgaacattcccgtgcctgtgctccggctgccccggggccctgatggcttcagccg

SEQ ID NO: 856000 - DNA, 117 bp, Homo sapiens
gaagttacatttagagactgaaatcactgcaccttaaaaacaaaagattgagctgcactgtattcctgaagagcgtgttgtgaatcacatggcagcaaaaattattgaaaatgtctg

SEQ ID NO: 856001 - DNA, 100 bp, Homo sapiens
tcctccttgccaggccttcaaccactatctcagtgcaatgggtccttccaaccctcctgctaccatgaagattgcagtgattggacagagcctgtttggc

SEQ ID NO: 856002 - DNA, 100 bp, Homo sapiens
atagtgcaggtgttggaagtgaaaggcgtgcagtatggtgaatatgttaataaccaagctagctccgcaccaactcccttgtcatcaacttccgatgatg

SEQ ID NO: 856003 - DNA, 99 bp, Homo sapiens
aactccatttgcaacattcctcacttctggactttctcaaaatgtactcaagactgatcttctaagttcactggaaatgattttatccccaactgtggt

SEQ ID NO: 856004 - DNA, 100 bp, Homo sapiens
atactctgttatagataaacaagggccacccagtgctcctgcagaagatcgttcaggaacacccgacagcattgcttcctcctcctcagcagctcaccca

SEQ ID NO: 856005 - DNA, 98 bp, Homo sapiens
ctgcctctctctttgccgagctttccgcgacggccgctccgaggacttccgcaggacccgcaacagcgcagagggaggcgcttggaaaccaccgtcaa

SEQ ID NO: 856006 - DNA, 98 bp, Homo sapiens
gtgtgttgaattcctggactgggcagagagtgataatgaactctcaagtggaacaggtgatgtgtctaaggattgtcctgagaagatcctgtattctt

SEQ ID NO: 856007 - DNA, 100 bp, Homo sapiens
tctgttagtccccagagcctccaagggaaaacgaacagctttgctgagccatcaaggtctaatggaagcatggttcggcattcttcatctccatatgtag

SEQ ID NO: 856008 - DNA, 98 bp, Homo sapiens
gggaagatgataacagctaagccagggaaaacaccgattcaggtctgccatcatggatgttctcgcagaagcaaatggcacctttgccttaaaccttt

SEQ ID NO: 856009 - DNA, 115 bp, Homo sapiens
ttaaatcctctttacatcatagactttcagctacttgaagatagccatcagccgctacgtgactcttttctccagggaacaacctatcttcagcactcgagctcatgtcttccaa

SEQ ID NO: 856010 - DNA, 100 bp, Homo sapiens
gatctacttcttgcctggaatcccatttgtttggggttggtagaaggtgttattgggaaaattcaacttcattcagctccctgtgctgtcaggaatctac

SEQ ID NO: 856011 - DNA, 100 bp, Homo sapiens
gccggtgccgcaggagccgagcatggagtaccagggcccgtcacagctggagctgactctccaggcatccaagcaaaatggcacctggccccgagaggtg

SEQ ID NO: 856012 - DNA, 131 bp, Homo sapiens
cttccgctggctcagccgcaagtacccgtccatcatagtcaactgcgtggaagagaagtgtcctggcaggttacaatggtaccatctttgcatatgggcaaacaggcagcgggaagacattcactatcaca

SEQ ID NO: 856013 - DNA, 100 bp, Homo sapiens
agatccacaaaccagagaaagctttccagcagtcagttgaacaagacaacttatttgatgagtttgggctttgcaaaactgagaacaaagccaagtcggg

SEQ ID NO: 856014 - DNA, 98 bp, Homo sapiens
tccatcgaacattccgagaatgcgagagaaagagcctccgtcaccacataagcaaaatatgctgtgaattccatcaagaagaaagtcaacgacaagaa

SEQ ID NO: 856015 - DNA, 98 bp, Homo sapiens
tggccaagagcctaaaggtggacccccgggcctgcttccggcagttcttcactaagattaagacagcggtggcctacccgagcgcagtgtgtccttga

SEQ ID NO: 856016 - DNA, 98 bp, Homo sapiens
ttccgggagcctagatcctgtgctttactctgaagactcatatgttccatttaaggctctgaagatggggagagaattctggatgatccaggtgggcc

SEQ ID NO: 856017 - DNA, 100 bp, Homo sapiens
tcacctccagttattacagaggagcccatggcatcatagttgtgtatgatgtgacagatcagatcacattccagttcatagcaacattttctactctggt

SEQ ID NO: 856018 - DNA, 98 bp, Homo sapiens
tggcatctatgttatcaaccaggctgagggtaaaaagctgggattggtaggctgggtccagaacactgaccggggcacagtgcaaggacaattgcaag

SEQ ID NO: 856019 - DNA, 99 bp, Homo sapiens
ctggcggcagcggcggtggcggtggctgagcagaggacccggcgggcggcctcgcgggtcagaacattaaccaggtggtatttgttggaaatttcttga

SEQ ID NO: 856020 - DNA, 100 bp, Homo sapiens
ctcctgcttggaaacttgctgggtggtgtctgcgttacagatttatggtaatggaaagactaggaatagatttacagaagatctcaggccagaatggtac

SEQ ID NO: 856021 - DNA, 100 bp, Homo sapiens
ctgcctaggcattttgctgtctcctcctaatacgacatgaagaggagcatcggcggcgtgaggaagaaatgatccgacacagagaacaggaggaactgag

SEQ ID NO: 856022 - DNA, 100 bp, Homo sapiens
gctacaaagcagatcgtattccttcagaggccagttatgtggaattcagctgctcaaacaccagatcggagcgtgctttggacaccatgaattttgatgt

SEQ ID NO: 856023 - DNA, 99 bp, Homo sapiens
tgggcttccacacaactccagtgctaactcaacagatggagtcccctgtttccacaccagcagtgctgccaatacaccttttggtgccagtggtcaaca

SEQ ID NO: 856024 - DNA, 50 bp, Homo sapiens
gggcggggcgcagagccaggcagcgcagtggcgccctgctcaagccgtgg

SEQ ID NO: 856025 - DNA, 100 bp, Homo sapiens
gcttttcaagtatgccaccaacagtgaagaggacccgtgccagccccaacaaacttaaagattactgaagtaacatcagagggtttcagagggacttggg

SEQ ID NO: 856026 - DNA, 100 bp, Homo sapiens
tctgggcgcccaccaacaatggatggcaactccctgctctcggtaccaagcctattctgcaaacttggagttcttgtcaggcataggatttcactatttg

SEQ ID NO: 856027 - DNA, 100 bp, Homo sapiens
cctgaggaggcgagctagccgggagttacaccgccaccgccaggtgtggggtgcacactgaaaatgccacgctccttcctggtgaagagcaagaaggctc

SEQ ID NO: 856028 - DNA, 98 bp, Homo sapiens
gaaacctttccaacacagatgtccaagctgccaaagacttgaggtttaacagaataagagaaattccagggagcgccttcaagaaactcaagaatttg

SEQ ID NO: 856029 - DNA, 98 bp, Homo sapiens
tcaatcttaccagagggccctcagataagaatgtgccttttgatgaaagaactttatctttctacaatgaagagtggaatttctatgtttaaggaata

SEQ ID NO: 856030 - DNA, 99 bp, Homo sapiens
tgcctgcctgcctgcctgccggcccttgaacttaaatcgtctgaagttgtgatcctaagcacttcaagtcagagaagacaggacggggacagttgaggg

SEQ ID NO: 856031 - DNA, 100 bp, Homo sapiens
atatatgttttacttagtagaacatcgtgttgctcaggcaacaggagagactcctatagcagtcatgggcgaggcttcgggagcaggaaagaaaagaagc

SEQ ID NO: 856032 - DNA, 98 bp, Homo sapiens
gcccgcaagggcggagggggcccgaaggacttcggcgcgggactcaagtacaactcccggcacgaggtattgttgcagcatctggcagtgagactgag

SEQ ID NO: 856033 - DNA, 99 bp, Homo sapiens
cactggggtgctgacacatggggctctgtggagctgcccattgtggggaagtgaagatggctgaagagggggagaacctggaagctgagattgtgtacc

SEQ ID NO: 856034 - DNA, 100 bp, Homo sapiens
aggaagtggctttttatcagttgcaacaggactgtgacctgagctgtcagatcaccattcccaaagaatccacattcatctcaatggaaggatcctgcct

SEQ ID NO: 856035 - DNA, 100 bp, Homo sapiens
gagcaaatccgaatcggagtgaagttcaggcaaacctttctctgttcctagaggcagctagtggcttctatactcagatacagaagatcattgagacact

SEQ ID NO: 856036 - DNA, 99 bp, Homo sapiens
actgcctgacctcattcgaagctgccattgaatatattcggcaaggaagcctctctgctaaaccccctaaacacatcatccatggccttttacctgcag

SEQ ID NO: 856037 - DNA, 99 bp, Homo sapiens
gggtcagaaggggccgtgtatgcttcgagatgaaggccatggtggcgtgttacccaggcaacgggctcgggtacgtaaggcacgttgacaatccccacg

SEQ ID NO: 856038 - DNA, 98 bp, Homo sapiens
agatccagaagactgtgatcgagcccttaaaaaaccatcagagggttctcgcttcagcacaagatccggagttttgaagaagcgcgaggtctggaccg

SEQ ID NO: 856039 - DNA, 100 bp, Homo sapiens
ccaccatctgccctcagtcagttgggggcttatttcaaaacctttgtccctcagttccaggaggcagcatttgccaatggaaagctctaggaaacaccag

SEQ ID NO: 856040 - DNA, 100 bp, Homo sapiens
ctgactatgaggccaccagtcagagacaacacttccttcagaaaacgggaaacttccatttgtcacacgtcttggtccagataaatcccaggaagtagca

SEQ ID NO: 856041 - DNA, 100 bp, Homo sapiens
ttgatgaagtccagaaatctggaaacatgatacaatctgcaaatgggagcaatggaccacagaaattctgcattgaaaaagttgggaaagaaaattggct

SEQ ID NO: 856042 - DNA, 98 bp, Homo sapiens
tgaagtgaacagctgagcagctcgcagagagcagggtgtttgccagcttcccagtaaaaatgatgaaaaagaatatccacacagaagaattgatatca

SEQ ID NO: 856043 - DNA, 100 bp, Homo sapiens
agcgtcttgtccacccagatttcttcagccagaggtctcagattcctctctttggtgctgacactattggccagagaagtcctgatggaccggtactgag

SEQ ID NO: 856044 - DNA, 98 bp, Homo sapiens
cacgtaccagaggtggaagtccaagtcaaacgcagaaggactgcctcactgagcaaccaagaggaaatcctcattgacgattcaatttgttgaaggcc

SEQ ID NO: 856045 - DNA, 100 bp, Homo sapiens
aggccctcatcaacgcgggagacttccacggcctgcagaagatgctcatgaagcagcaggaccggctggaggagcgagagcaggacattgaggaccagct

SEQ ID NO: 856046 - DNA, 99 bp, Homo sapiens
ctcgagatgattatcgtaggaggagtcctccacctcgtcgcaggaatggtagtgctattggccttccagtcccacctatcacagccttaatcaccccag

SEQ ID NO: 856047 - DNA, 99 bp, Homo sapiens
acatattcctaatgctgtggattcctgtctccaaaagctggcctctgcgggcaccttccgggtgctgaaggagccccttgccttcctgcgagccctgga

SEQ ID NO: 856048 - DNA, 100 bp, Homo sapiens
tcctggcctcccatctggtccagttcctgcagacagcagagatggtgaagccctccaccccatcccccagccacgagtccagcagctcatcgggctccga

SEQ ID NO: 856049 - DNA, 100 bp, Homo sapiens
ccaaggccctcctggatcactactatgtatggaggcaaaaacattagttcacacacaaacattgttttcagattgtagaaggcatgaaacaaaaaatgtg

SEQ ID NO: 856050 - DNA, 50 bp, Homo sapiens
agcacttcctgaggacagaagccaaggagaagaaggaagttgtggaagag

SEQ ID NO: 856051 - DNA, 98 bp, Homo sapiens
ggccactgttaaaggcgacgtgcacgacataggcaagaacatagttggagtagtccttggctgcaataatttccgtgtatgtggtagaagaccaaaga

SEQ ID NO: 856052 - DNA, 123 bp, Homo sapiens
tcagcaggcctttgctggacagatgaagagtgacttgtttctggatgattctaagagtaccaaacgattccctggttatgattctgaaagcaaggaatttaatgcagaagtacatcggaagca

SEQ ID NO: 856053 - DNA, 100 bp, Homo sapiens
tgtttttggcaactatgttatacagaagttttttgaggcagaggcaaggctggcagcaaaacgggctgcccgggcagaagcaagagatatacgcatgaga

SEQ ID NO: 856054 - DNA, 50 bp, Homo sapiens
gcgagatggagcagctcaaggagggatgatcatggtgattttactgctgc

SEQ ID NO: 856055 - DNA, 100 bp, Homo sapiens
tgtgggaagtctccatggtgaagtataggctgaggctacctgtgaacagtacgcagtgaatgttgtgagcgtgtaggagccttcactatggtctgcaaag

SEQ ID NO: 856056 - DNA, 98 bp, Homo sapiens
tggaccctcaccccctcgcaggggccgggatgactttaccagaatgcaggacatcccggaggagacggagagccgcgacggggaggctgtagcctccg

SEQ ID NO: 856057 - DNA, 99 bp, Homo sapiens
tctcggcctctgccggagaaacaggtgtgggattatgagactggagattttgaacgaactcttaaaggacatacagactctgtacaggacatttcattc

SEQ ID NO: 856058 - DNA, 100 bp, Homo sapiens
agcctgctgtctctggctatgttggtgggatgttacgtggccggaatcattcccttggctgttaatttctcagaggaggagatgaccgccgggttctgct

SEQ ID NO: 856059 - DNA, 99 bp, Homo sapiens
ctggaaaacaatgtctgtcttgaagctccgggaaccaggaaaatgagctggaaatggcagcaattgaagagaggtatggcaaagatctgctcaacctct

SEQ ID NO: 856060 - DNA, 101 bp, Homo sapiens
cctcgccagcagccgtccggagccagccaacgagcgcaccgaacaagatttgtgatgaaatggagcctggaacaaactcttttcgggtagaatttcctgat

SEQ ID NO: 856061 - DNA, 100 bp, Homo sapiens
cttcaccacgcggctgcacaactgcaggaacaccgtcacgctgctggaggaggttgggataattcttcactattccacccttgccacagtactatgggta

SEQ ID NO: 856062 - DNA, 98 bp, Homo sapiens
aagaatttgagcctctgctgaattggatgaaagataaagcccttaaggacaaggctgattcaccccaagagtggccgttcctaccacgaggagttcaa

SEQ ID NO: 856063 - DNA, 100 bp, Homo sapiens
ccttctgctgatgagatttatgactgcaaggtggagcactggggcctggaccagcctcttctgaaacactggggtgaccccaaaggagccatgataaccc

SEQ ID NO: 856064 - DNA, 100 bp, Homo sapiens
ctaccatccataaaatactcattcccctctcagctccctgtgctgtcaggaatctacaggacttggctcgtatttacattcgacgcacacttagaaattt

SEQ ID NO: 856065 - DNA, 98 bp, Homo sapiens
gtgcagcggattaaagctaaagacatagttcctggtgatattgtagaaattgctggtgtctcaatgcttgtacctactgcaaaactaaacacgccaga

SEQ ID NO: 856066 - DNA, 100 bp, Homo sapiens
cattaaaaagaaagaccttcatcacagcaatggagaagagaaagcacaaagcatggagaccctccctccaggagatacataaataacggttggcatttgg

SEQ ID NO: 856067 - DNA, 100 bp, Homo sapiens
aagcagctcttccggaagatcaactgcagactgtcctattgcatctcaagcccacatggattaattgatgtatgttgagtttatggagctgccttttggt

SEQ ID NO: 856068 - DNA, 100 bp, Homo sapiens
caaccagaaagagattgggtacttaatgatagatgcaacgatcaggacacaaggacatcctatagaattggagacacctggagcaagaaggataatcgag

SEQ ID NO: 856069 - DNA, 100 bp, Homo sapiens
cccgcggacccactgggttgccaagctcgcgccggatgcggagcgcggtgctgccggtggagcttcaggacaacataacgatgcacggatgaaccttgcc

SEQ ID NO: 856070 - DNA, 125 bp, Homo sapiens
tcaacatgacactcctggggtctgagcattccttgctgattaggagcaagttcagatcaggttctgatctacaatggccaactggacatcatcgtggcagctgccctgacagagcgctccttgat

SEQ ID NO: 856071 - DNA, 100 bp, Homo sapiens
attgtgtacacactacagctggaggacagaaacaagagaatccagcaactatcacaagaatactccttagccacttcaattgggataaagagaagctaat

SEQ ID NO: 856072 - DNA, 50 bp, Homo sapiens
tgacagtgaggttgacaaaaagatagtgattatagagcacaaatccatca

SEQ ID NO: 856073 - DNA, 100 bp, Homo sapiens
cgagaacatcgtggccaactcgctgctgctgaaagcgcgtcaaggtataaaaaccaggtgccaataaatgtccatgcaaaccctggaaagtatattattg

SEQ ID NO: 856074 - DNA, 98 bp, Homo sapiens
ttgtagccgctgtgcttgtcaagctgccgggccgcaagtacagccctgggtacaacaccgaggtgggagacaagtggatctggctgaagtgaacgggc

SEQ ID NO: 856075 - DNA, 50 bp, Homo sapiens
ccttctaccccatgagaaagaccagtccaagccttatgcatttgatcggg

SEQ ID NO: 856076 - DNA, 98 bp, Homo sapiens
tgagaccagcctgaacaacatagcaattttctggagtgtttgtgactggactttaacatttccaaaatgtggcgacagtgactgttaagtcttcccaa

SEQ ID NO: 856077 - DNA, 101 bp, Homo sapiens
ttgaggatgaatgtttgcaaatcattttgaaattgccaagtgccacatacacttatggaaaagtatttctagttcgtaaaataagtggccatgatactgga

SEQ ID NO: 856078 - DNA, 100 bp, Homo sapiens
aatcctgtaacttcgcactcaggttttttcactccaaccagaaagatatgcaaacttcgttttttaaaaacatgatatctaaaaagcagaatgtgcagag

SEQ ID NO: 856079 - DNA, 99 bp, Homo sapiens
tgcaccgtgagcaaccctatcagcaacaattcccagaccttcagcccgtggcccggatgcaggacagacccctcaggggtttcttccagaaaacaagtt

SEQ ID NO: 856080 - DNA, 100 bp, Homo sapiens
ctcgccgccccagcctggcgggagaaggaggaggagcagcaggcctccgggcccggcgccgccgcccgcagtccctgctatgtggatatttggtagcaat

SEQ ID NO: 856081 - DNA, 100 bp, Homo sapiens
ctatgtttaaacagatccacaaactgaacagagattataagcacaccacagagactaaccagttcaggaagtgttctgattgggagtccatatacccctg

SEQ ID NO: 856082 - DNA, 99 bp, Homo sapiens
cctcctgagtagctggggctacagtgtcaactgttagccacgcagatgccgattgctttgtgtgtgtcttcctgagccatggcgaaggcaatcacattt

SEQ ID NO: 856083 - DNA, 100 bp, Homo sapiens
cgaggattatacagaaatttgaacatttacagccgaacaataccagcaacatcaacagcaactggcactcatgcagaaacagcagcttgcacaaattcag

SEQ ID NO: 856084 - DNA, 100 bp, Homo sapiens
caggcctgcgccggcggcagagaggatatcttgggcgggggatgtgagcgctgagcccttggcagcaaatgccagatgttaatgtaagctgggatggaga

SEQ ID NO: 856085 - DNA, 98 bp, Homo sapiens
tttggccaaattgggcgagggcacaaaataaccacttaccccttctcaccgaggaagagcgggagaaaggcctgccacagtgactcaggtcactcaag

SEQ ID NO: 856086 - DNA, 99 bp, Homo sapiens
cattgaagactctgggattaatgctaaatttgtgaatgctgtgtatgataccttacttaatactgagtggagtcggttcttatacaactatgggctgaa

SEQ ID NO: 856087 - DNA, 98 bp, Homo sapiens
gcctcttgccaaagtgtcccttttaaaagggatgtcctttaactccattgcctccagttagtattgctattcgatttacctatgtacttcaagattgg

SEQ ID NO: 856088 - DNA, 100 bp, Homo sapiens
tgaagaccccagttttgctgaccttattcaccatgacttatcagacttaattcagtgcacaaatgagatgaatgtgaacatcccacagttggcagacagt

SEQ ID NO: 856089 - DNA, 100 bp, Homo sapiens
tccgtatctgcctaggcattttgctgtctcctcctaatacggcacacaagccatgccccctcttttctctttgggataccaccagtgccgctggaactat

SEQ ID NO: 856090 - DNA, 98 bp, Homo sapiens
gggcacacttcgagctgcggctgcacctcatctacctgatcaatgacgtgctgcaccactgggttttggccaaattgggcgagggcacaaaataacca

SEQ ID NO: 856091 - DNA, 100 bp, Homo sapiens
gctccagctcctcagtcaacagctacagccaattttgctaactttgcacatttcaacagtcatgcagttcgatcctttggtacagaagacagaccgacag

SEQ ID NO: 856092 - DNA, 99 bp, Homo sapiens
tggactttgtcactcccacccctcttggaactagatgggatactctccattgcataatgtgaagttaccagaagcagatgacatccagtacccgtccat

SEQ ID NO: 856093 - DNA, 143 bp, Homo sapiens
aacctttccaccccaaatttatcaaagaactgagagtgattgagagtggaccacactgcgccaacacagaaattatctgtgttccagatcatctccctggtaatttaccccgtgaagtacacccagaccttcacccttcatgc

SEQ ID NO: 856094 - DNA, 100 bp, Homo sapiens
tggactccagttatgcaaaaagagggaatgaaagctactggttgattttaaagtgcctgggcctcacaggtttggagatgtcccagaataaggcacaatg

SEQ ID NO: 856095 - DNA, 98 bp, Homo sapiens
cggagggactgcaccttctccatcaggtgcagaaggaggcaagtgaggcctatctggttggcctttttgaagacaccaacctgtgtgctatccatgcc

SEQ ID NO: 856096 - DNA, 98 bp, Homo sapiens
gggtcctgagggattacagcgacaagaaagaagattggcccatgcacaagctggaatgttctcccatggttgtttttggggaaaactggaatccctcg

SEQ ID NO: 856097 - DNA, 98 bp, Homo sapiens
caaaatgaagatggcacatggcccaggcagaccttgcagtcaaagtatccaagcccaccaatgggatctgtctcagcacccaacctgcctacagcaga

SEQ ID NO: 856098 - DNA, 98 bp, Homo sapiens
agagactgaccttctatggattcctcatggctctctcaaagcaccgtggaatcaaccaagccctcggtatccatcacgaattgaaaaaattgactatg

SEQ ID NO: 856099 - DNA, 100 bp, Homo sapiens
acagaagcagatggattcgtccttttagcatgttggcagataaattgaacatgactccagaagaagctgaaaggtggattgtaaatttgattagaaatgc

SEQ ID NO: 856100 - DNA, 100 bp, Homo sapiens
aggagcgccgtaccccgagagccggtgaaatgacaatggatgctctgttggctcgattgaaacttctgaatccagatgaccttagagaagaaatcgtcaa

SEQ ID NO: 856101 - DNA, 99 bp, Homo sapiens
tgcagcagtgaggccaagctccagtgtcccacttgcatcaagctgggcatccagggctcgtacttctgctcgcagggcaagtgtccagagaatggctgg

SEQ ID NO: 856102 - DNA, 98 bp, Homo sapiens
ttctgccatgattgtgaggcctccccagccacgtgaaactgatgttttcactccagaatgcaaattcaaggaatctgtgtttgaaaactactatgtga

SEQ ID NO: 856103 - DNA, 98 bp, Homo sapiens
cccgggatcgagctgagaatagggacggccccaagggtctcccttgatctgagaatggctacctctcgatatgagccagtggctgaaattggtgtcgg

SEQ ID NO: 856104 - DNA, 99 bp, Homo sapiens
cctaggcatcttattgatcctccagtcgagttaaagccttccatctgaagtatgatgaagttcgtctggatccaaatgttcagaaatgggatgtaacag

SEQ ID NO: 856105 - DNA, 98 bp, Homo sapiens
acagcacaggggaggccctggtgaacttcactcaggcagagctgtccaaaccagagaaggtgtcaatccctgagcgctacgtggagctagatcccgaa

SEQ ID NO: 856106 - DNA, 100 bp, Homo sapiens
agccacgagggtatgaatgccgggatgctgtgaacgagtgtgatattactgaatattgtactggagactctggtcaggtctgctggagtttgctggaggt

SEQ ID NO: 856107 - DNA, 99 bp, Homo sapiens
cctgccattcttatcatttctaagcaggttcatgccagcccagaacagagaatcaggtcatcatcagatttgaaatatttaaagtggatacaaaactat

SEQ ID NO: 856108 - DNA, 100 bp, Homo sapiens
tgaagcgggagaaggatcgtctggtacagcagcttaagcagcagggttttggaaatttgcccatctgcatggcaaagaccgatctttctctgtctcacca

SEQ ID NO: 856109 - DNA, 99 bp, Homo sapiens
agcccttgaacacatccttcaagcagtagtcccagccacaaatgtgaacacagttttaagaattcctcctaaaaatcatgaccaccccaggaaaagaga

SEQ ID NO: 856110 - DNA, 100 bp, Homo sapiens
ccgtgctgctgttgatgctggctttgttcccaatgacatgcaagttggacagacgggaaaaatagtagcaccacataagcttaaatcgtctcagaaggac

SEQ ID NO: 856111 - DNA, 100 bp, Homo sapiens
ccagccctgaggcgctgtcgccggagccgcctgtgtacagcctgcaggactttgacacgctggccaccgtgggactttctgaagaccttttcccccgatg

SEQ ID NO: 856112 - DNA, 51 bp, Homo sapiens
atcgcctttctggtgggaggcttgattggaataagacgagttggaagaaga

SEQ ID NO: 856113 - DNA, 153 bp, Homo sapiens
agcttcattcagatgtggtggaatatgccaaggaaaaactggagagcttcatcaaaaatagtgatagctttgataagctttctggtgaggcagactgtaattaacatttgtagaagaaagagactggaaagtgactcctacagtcccccccat

SEQ ID NO: 856114 - DNA, 100 bp, Homo sapiens
gggatggagagtggcctggctggcaacggcacagtggaagcattgacatttcctccttcttctggaaagtcattcatcatgggagcagatgaagcccttg

SEQ ID NO: 856115 - DNA, 98 bp, Homo sapiens
aagctgctggagggcgaggaatgcaggcttcccagctggcgtgtatgttgtaaagagagttcttcagcttcagcgtcatcatattactctcaagatga

SEQ ID NO: 856116 - DNA, 98 bp, Homo sapiens
tctcttccatttgatcaccatggcacacatgcttcagatactacttacagtagacacaggtcaaatggatgatgtactggattatatttgcacttttc

SEQ ID NO: 856117 - DNA, 110 bp, Homo sapiens
acaaggtggccgacaacctggccatccagcttgctgtaattgttgatgaacagcacttggatttcctgttggcatatactatttcggctattcatcagtgtagttcctgg

SEQ ID NO: 856118 - DNA, 99 bp, Homo sapiens
gcggacccagtggcctcggcgattatggacccggccgaggcggtgctgcaagagaaggcactcaagtttatgctatccagacagagcagctaccctcag

SEQ ID NO: 856119 - DNA, 100 bp, Homo sapiens
caactgcaggaacaccgtcacgctgctggaggagggaactgactcttttttggagtaaactgcaaagaagaattgacccttctttagatacttttttgga

SEQ ID NO: 856120 - DNA, 100 bp, Homo sapiens
gcctggaccagtatgagcgctactcagagcagcacaaggaagctgccttcttcaaagagctggcttgagaaagagatccaagatcttgaaaaagctgaac

SEQ ID NO: 856121 - DNA, 114 bp, Homo sapiens
atgctggtcaagaaaattcagcctttagcaaaagccacttccagatcagaccctgatcctgaaaatccagaacccacaactacgaatgaatgtccatccccagatacttctcaa

SEQ ID NO: 856122 - DNA, 98 bp, Homo sapiens
ctcccacaggaagtgtcacacagcagtcaagtatgtcccaaacgtctactgctctggcccatttagagtctcttgcagtggatgttgaggtggccaat

SEQ ID NO: 856123 - DNA, 99 bp, Homo sapiens
ggagaaggagctgaaagacaaacaccccagcttgttccaggcattgctggagatggatctgctgaccggaatgaattcttccaaaacaaaactagaact

SEQ ID NO: 856124 - DNA, 100 bp, Homo sapiens
ctgctgcttctgggtcctgctgtcccccaggagaaccaagatggtcaatgtgacggtggactacattagaccagccagcccagccacagagacagtgcct

SEQ ID NO: 856125 - DNA, 50 bp, Homo sapiens
ccggggagcagtccgctacggaggcacagctgtcaccaagagaagtccta

SEQ ID NO: 856126 - DNA, 100 bp, Homo sapiens
tctggatagtcgtaaacttcctatgataatcttcagtcgtgctggtgaagcctgcaaaaaggtgatacttaatgtaccttctaaactagaggcagacaaa

SEQ ID NO: 856127 - DNA, 100 bp, Homo sapiens
gttgactttataaaaagcacgctacccaaccttggcttggtacagatggaaaagaccatcaatcaggatcttaaatctttaagaagtcagacatcaagag

SEQ ID NO: 856128 - DNA, 100 bp, Homo sapiens
cctggacgtgggtggggctgtgacagctgtcagcgtctgcccagtgctccacccttctcaacggccaagaagacgctggagggaggctgttaggagggac

SEQ ID NO: 856129 - DNA, 98 bp, Homo sapiens
gtgctgaaatgattaacaacaatgtgattgtgaggaatgcggaggacattgagcagctctatgggaaatacagaatacgccatcaataaattgcggca

SEQ ID NO: 856130 - DNA, 98 bp, Homo sapiens
accaaaaatgtaaagaggaaaaatgcacttatgctgataaatatacccaaacaccctggagacgaattcctgatgacatcattgatgatgttgacagc

SEQ ID NO: 856131 - DNA, 100 bp, Homo sapiens
tgtagaagcactgaaaaaggatcacgggacctcagcagccatgtcgaagccccatagtgaagccgggactgccttcattcagacccagcagctgcacgca

SEQ ID NO: 856132 - DNA, 98 bp, Homo sapiens
ggactttgtttttcctgggaactgcaggtgtaaggagctcaagtactccaaggacctgccccagatatccatcatattcatcttcgtgaacgaggccc

SEQ ID NO: 856133 - DNA, 98 bp, Homo sapiens
ttgaattgcagccacaagagccaaactcattttttgatggaatagatgaccgcacctcgagcaggagtggggatgccacgtctgcccccagcgcccgg

SEQ ID NO: 856134 - DNA, 100 bp, Homo sapiens
cttgctgaaaaggaagttttctggaatgggcatgttatttgaaagcaattgagacgcaaccgaactttgcagtagcttggagtaatcttggctgtgtttt

SEQ ID NO: 856135 - DNA, 122 bp, Homo sapiens
gcgaagtggttgagaagcctgtacctgttttatacttgcttttgcttcagcgttctgtggttgtcaacaggtggatttgtttaaaaagagtcttctgttgattcctattcacctggaagtcc

SEQ ID NO: 856136 - DNA, 100 bp, Homo sapiens
tcagacaccagccataaacgtcagtgtgcccaccacccttccctctgccacgcaggtgccgatggaagtccttaaggccaagaagcttgagagaagaaaa

SEQ ID NO: 856137 - DNA, 99 bp, Homo sapiens
tcctaagtccttcggccgccaccatgtccgcctcggctgtcttcattctggacgttaagggcaagaccactctgcttcatttttgggagaaaacttctc

SEQ ID NO: 856138 - DNA, 100 bp, Homo sapiens
ctcatctgtgcagttccatcccggtgcacagattgtgatggttgctggattagataatgctgtatcactatttcagaaactctataaaacaggtcgggag

SEQ ID NO: 856139 - DNA, 98 bp, Homo sapiens
catgcaacagaagtatgaggccagccgggaggacatctacaagcggatcttaccaatatatttgagtccttcctgcctcagttattggcctatcctaa

SEQ ID NO: 856140 - DNA, 100 bp, Homo sapiens
actgtcagatggattgactatggaaaagttgccaaattggtttcccaggcagctgcagacttgaaacagttctgtctgcagaatgctcaacatgaccctc

SEQ ID NO: 856141 - DNA, 100 bp, Homo sapiens
aagacagagggctctgatctgtgcgacagagcgacaggcagcatccccattacggtgcggcacatcgagtccatgatccgcatggcggaggcccacgcgc

SEQ ID NO: 856142 - DNA, 98 bp, Homo sapiens
gattatcttcttgaaaggagggacttagcagtagacttcattttttgtttagttttagttgaagttctaaagcaggtcacctgaatggttgagcatgg

SEQ ID NO: 856143 - DNA, 147 bp, Homo sapiens
ggacttctggagggccgtatgtgaggccgaccagtctcatggcggtcccaggtctctcagtgacataaagggccctggccaacgtcaacattgggagcctcatctgcaatgtaggggccggtggacctgctccagcagctggtgctg

SEQ ID NO: 856144 - DNA, 98 bp, Homo sapiens
caggagaagctggagctggcagagaaaaaggccaccgatttcctctgtgacgagggtgcaggtatctctggggactacatcgatcgcgtggacgagcc

SEQ ID NO: 856145 - DNA, 100 bp, Homo sapiens
gatcaatccagatggcagccagtcagtggtggaggaaacagagcaaatgcagcgttacaatcaaagacttattgaggaattgaaaaacagacagactcaa

SEQ ID NO: 856146 - DNA, 100 bp, Homo sapiens
gcggctcctgagggatcggtctcagccgcgcgggtggacatcttcaataaggagctactgctaatccccatccacctggaggtgcattggtccctcatct

SEQ ID NO: 856147 - DNA, 99 bp, Homo sapiens
tcagataagcttgacattacagccaagatggtgctgtcccagagacaacgagatgaactgctgaccggttccctgatgtgttacctgcttctgctactg

SEQ ID NO: 856148 - DNA, 99 bp, Homo sapiens
cagtgcttcggggcacttagcacagcgcctggcgcaaggtccttgaatgggcaagagggcacatgaagtacggcgtcctccacattcacggcctctaca

SEQ ID NO: 856149 - DNA, 98 bp, Homo sapiens
aggccctggcccagagggacaaggaattcacaattgaaactgaagggaaaacatttcagttaacaaaagacatgatcaatgtgaagagattccagaaa

SEQ ID NO: 856150 - DNA, 100 bp, Homo sapiens
gtcagaggaggaattacaacttcattttacttatgaagaaaaatctcctggcaattacaatgatcacagtcgtgttaaactgcaaaatgctgagaatgat

SEQ ID NO: 856151 - DNA, 99 bp, Homo sapiens
atgactacaaaggagtgtttacatcgtttttgtgcagactgcatcatcacagcccttagaagtacatcgagtgaaagcattcctcaaactgccacacaa

SEQ ID NO: 856152 - DNA, 99 bp, Homo sapiens
acctgtgttgctatgtcaacactgggtgtcattgaagcaatagcacagatcactgtcaaaggcaaatgttctgaaaaagactctgcatgggaatggcct

SEQ ID NO: 856153 - DNA, 100 bp, Homo sapiens
tatgcatgctagcaaaagcacagaaagaccacttaagcaaacttaatataccagacactgcaactgagagacaagagagacacctccaacttcgacaaag

SEQ ID NO: 856154 - DNA, 98 bp, Homo sapiens
acaaaggaaggggagcccgggacccccgggggcgcagttttcggctttgtgagaaaccttaccatcaaacacgatggccagcaacgttaccaacaaga

SEQ ID NO: 856155 - DNA, 100 bp, Homo sapiens
cagagatcaaaccacttctaaatgataagtctcgtttcctctcagtccatccacccttcatggggccagagccctctctccagaatctgagcagcaatgc

SEQ ID NO: 856156 - DNA, 98 bp, Homo sapiens
ggccctcgatgtgctctgcgtgttgctggcggaatggccaaagactatgacgggtcttcctagcacatcagggacaactgccagtgtggtcatcattc

SEQ ID NO: 856157 - DNA, 100 bp, Homo sapiens
gctcccagcccctcgtgggagacctgcgccagaggatggacaagtttgtcaagaatcgaggggcacaggagattcagaggagaaggcagagcccccccag

SEQ ID NO: 856158 - DNA, 98 bp, Homo sapiens
aacagcggaggacgaagagcgggacccgagccctggctggacgtaaagaaagaagtgatgcactcaattctgcaatagataaaatgaccaagaagacc

SEQ ID NO: 856159 - DNA, 99 bp, Homo sapiens
ttagctgttgatgctgtaattgctgaacttaaaaagcagtctaaacctgtgaccacccctgaagaaattgcacaggtcttggctgttcaaccgtacttt

SEQ ID NO: 856160 - DNA, 100 bp, Homo sapiens
atgtcaagatcacagcaagttaataacttcaccagaaaatatggacttgaaggagcagccaggtaacactatttcggctggtcaagaggatttcccatct

SEQ ID NO: 856161 - DNA, 99 bp, Homo sapiens
tccggccccaggtcaccgccagcacgcgcctgcttcccgtctgcgcgagtccacgcagctccccagagatcttgcagctgctatagatcgaatggacaa

SEQ ID NO: 856162 - DNA, 99 bp, Homo sapiens
ggaacccggcgcggcggcggcacgatggtcatggcgtatttcgtcgagaatttttggccaccaaaaccctcaacaggggcatctctgagttcatcgtga

SEQ ID NO: 856163 - DNA, 100 bp, Homo sapiens
acccaatactacacaagaaggagaggaaatggaaactgatatggatggttctgacaaagagattgatgtgattgatgtgacccgccaggctgactgcaag

SEQ ID NO: 856164 - DNA, 114 bp, Homo sapiens
gatgccaacgtgtccttcaatgtttcccgggagctcttcttcatcaacatgtggcagaagaaagcatcatcattcaccagttacgaatgaactccagatgaaatggtaaaccaa

SEQ ID NO: 856165 - DNA, 99 bp, Homo sapiens
gtggtgaaggtccggggcttgccctggtcttgctcggccgatgaagtgcagaggtttttttctggaactgtggctgcaccatctgtcttcatcttcccg

SEQ ID NO: 856166 - DNA, 98 bp, Homo sapiens
ctggtgtgcagtactctgctggcctgagtgctgactttaattacagaaggctagatgaactgcagaagcaactacaagaagacataaggcaaggccga

SEQ ID NO: 856167 - DNA, 100 bp, Homo sapiens
ttatagagaaggacaccaagtacagtgtcattgtgatccggagatcaccccttctgtgtcattctctgaggaaaacaagttcttctcaaggaggaaagtc

SEQ ID NO: 856168 - DNA, 98 bp, Homo sapiens
gacgggccaacgccgtggccagctccactgagagaaccccaggacattcactgaacaatgccagggatacaagtgccatggatactctaccgctaaat

SEQ ID NO: 856169 - DNA, 99 bp, Homo sapiens
gaggagcagcgcaacgagctggaggccctggagtccatctaccctgactccttcacagtatctctcagaagatagaagtgtgcaagaagtactacagaa

SEQ ID NO: 856170 - DNA, 100 bp, Homo sapiens
cagtcagggagacatagctcaagcccggaagctgtacaaatgcccaggtcacctcatcatctcaaggaggagcattcccctgggctaaggcactggggcc

SEQ ID NO: 856171 - DNA, 100 bp, Homo sapiens
ccctggctgccttgagaggtcacttctgcctttccagtgacaaaatggtgtgggtctccttggcagctgtattctggagtctggatgttgctctctaaag

SEQ ID NO: 856172 - DNA, 100 bp, Homo sapiens
tagaagtgcttaaggaagagtgatgaagatgaacgactttcgaagtaaaatgcaatcaatatttccaacaattcccaagaactccgaatcggctgttgag

SEQ ID NO: 856173 - DNA, 100 bp, Homo sapiens
gcggtcgacatgttccaggtcccggatagcgagggcggccgcgccggctccaggtgtctcgtgcctctgctggaccctgactctgggctcctggtcctgg

SEQ ID NO: 856174 - DNA, 99 bp, Homo sapiens
ttcagttctgctctgcaaggatatataataactgcatcttgcagacagagtggccatgtatgtgcatgcatatacactctacagtgctgttagaccttt

SEQ ID NO: 856175 - DNA, 100 bp, Homo sapiens
gcagctccctaatgatgatgctcagtttgatgcgtcacactacgacagtgagaaaggagggaagaaggagaaagggccaacccctgaagaagcaatacag

SEQ ID NO: 856176 - DNA, 100 bp, Homo sapiens
gagactctaggcaggctggcaggcaacaccttaggtgacaacactgcagctgaaggaggagttgctggatggagaggattataatttccttcaaggagcg

SEQ ID NO: 856177 - DNA, 100 bp, Homo sapiens
tgtaaagaacttgcagttgaaggagtataacacagtgatgtcttggcattgcccattttcaagcaggaagattccagccttccattggatggtgaaacag

SEQ ID NO: 856178 - DNA, 100 bp, Homo sapiens
tttaagaagaaaaagaaggccctgagtcaaagaagatgcctcgaactaaacaaattcatcccagaaatctaagaggtcgctacccacaggagaacaaggg

SEQ ID NO: 856179 - DNA, 99 bp, Homo sapiens
tggagtcgaaggccgtgaggtatttttctaagacaggtgatttggcttctgcacagttaggaggagcaccaaaccgatgggaggttttgtcagccacac

SEQ ID NO: 856180 - DNA, 101 bp, Homo sapiens
tacctattgtccaaagcagtcgtaagaagaggtcccaatcccccactctttccgccctaatggaggtctccagtttcggaggtgatacgttcctgtgctgc

SEQ ID NO: 856181 - DNA, 100 bp, Homo sapiens
gcggcacctacggcgacgtctacaaggtgaggcaatggaacaaggtttacgagactgctgtcgatccatacgaattggaaagatcctgattcagagtgat

SEQ ID NO: 856182 - DNA, 100 bp, Homo sapiens
gaacgaattcagtgatatcattaagtccagatctgcagggagaaggttttaaggtgaaaacgaagaaagaaatccggcatgtggaaaagaagagccactc

SEQ ID NO: 856183 - DNA, 99 bp, Homo sapiens
cgcttcccgccaccctgccctgcccacccgccaggcagtggagctactgctgtggttcaggcagccctatgcaaacccaggcaagaacgtgtagcaata

SEQ ID NO: 856184 - DNA, 98 bp, Homo sapiens
agtggtctacggctctggctctaaggctcccaggccagtgccagtacttgggcttgccagtggcggattacttcaagcagtggattaatctgaaaaag

SEQ ID NO: 856185 - DNA, 100 bp, Homo sapiens
cggcccgcagcgcaactcggtccagtcgggggccaattcctgtccccccagcagcatggcatcgtgtgctgaaccctctgagccctctgccccactgccc

SEQ ID NO: 856186 - DNA, 100 bp, Homo sapiens
ctgcgcgaagctggccaaagcctgcccagacggctcacctgtgcgggatggaacaaaagctttggtgtcatccccagcactcctctggccatccatacac

SEQ ID NO: 856187 - DNA, 100 bp, Homo sapiens
tgtggttcactgtgcatcgcccactccagaagtagcatggaaatggagggcatcttcaaccacaaagggtggctttgcaaaatgttacgagatgacagat

SEQ ID NO: 856188 - DNA, 98 bp, Homo sapiens
aaatcctgtgcaagctcagcttggagggtgatgtagtaaacctattgatggcaattttgctgactgtggaagtgactcatccaaactccatgccagct

SEQ ID NO: 856189 - DNA, 98 bp, Homo sapiens
tgaggccaggagtttgagagcagccttgacaatatgatgcttttactgactctgctatcagtgctaaagtgaatggcgaacacaaagagaaggacctg

SEQ ID NO: 856190 - DNA, 100 bp, Homo sapiens
aaagtggtacccttctcgagttggtctgcagctagaatgtgccttccatacagcaaagtgcgagaaactacaaaaggagaaggaggagctggagaggcgg

SEQ ID NO: 856191 - DNA, 100 bp, Homo sapiens
attgttccacttcgttatgttaagtttcagaatgttaacagtgtaactagatttaccgcattgtttctcagaagcaaatgtcagacagacgcgaaaatga

SEQ ID NO: 856192 - DNA, 100 bp, Homo sapiens
gaacatggcacgaaagagatcaagtgtcccttttgatgagaagaataagcctcattctgattcaacagcagagatcaaagaaaagacttctgttttctgg

SEQ ID NO: 856193 - DNA, 100 bp, Homo sapiens
ttctcaacctggtgctttccagtaagaagccaggcactgctgtggtggagtttgcaaccgtcaaggcagcggtgcctttcctgaagactatcttctggtc

SEQ ID NO: 856194 - DNA, 100 bp, Homo sapiens
tcatcgccaggccccaggcctcctgtgggacgccagtcaccagcaggagcagccaaccagcagcagccatcatggagccttctgaggaaatgcaggcaca

SEQ ID NO: 856195 - DNA, 100 bp, Homo sapiens
atctgaaattaggccacaagctatagagcaagtccaaacccagactcatgtagcatctgccccagcaaatggttatgagccttagagtttctgaactcca

SEQ ID NO: 856196 - DNA, 100 bp, Homo sapiens
gaaatgtggatgaaacaggaaacaatccttctgtttctttaaaactggaagaaaagtcgacttcaatgttcctatgaagaacaaccagataacaaacaac

SEQ ID NO: 856197 - DNA, 100 bp, Homo sapiens
aataaagaaaatgaagatgatgtagagattatgtcaacggactcctcaagcagtagtagacagttcgtgtttggttaaagagagacagtggacagtattg

SEQ ID NO: 856198 - DNA, 99 bp, Homo sapiens
agatgctgtgggcccgcaagagaaagcagagcattagtgaccagaaggatcccaaggatcgaatggttcaggttgtgaaatggtacctctcagcctttc

SEQ ID NO: 856199 - DNA, 100 bp, Homo sapiens
ccctgcaatttgaagatacatgagacagcagccaaacccccagaaacagattgtctcagtttacctagctttgaaaatgccatacccatgggagagaaga

SEQ ID NO: 856200 - DNA, 100 bp, Homo sapiens
aggaagatggtgaactttatgcaattctgagttgactccaatccagatgtattttggaactaggtagaatatgactggctccaaaaccaaggagggagtg

SEQ ID NO: 856201 - DNA, 100 bp, Homo sapiens
aaatgtggactgaccaaaaagcagctggacagcacaattggaatccaccctgtctgtgcagaggactgagcagggggaggaacatttaagctgatggaag

SEQ ID NO: 856202 - DNA, 100 bp, Homo sapiens
cgtctacctgtccaccgtcgtgaccgagaactcccccactggaaaggattctgaaagaaatgaagtcagccctcagaaatgaagttgactgcctgctggc

SEQ ID NO: 856203 - DNA, 100 bp, Homo sapiens
cagatcttgaaaaaaaaaggagagaagctgaagcattgcttcaaagcatggggctaactccagaatcccccattggtcctactgctctgttggctcatga

SEQ ID NO: 856204 - DNA, 100 bp, Homo sapiens
aggctcagaaagatggatttttgcatgagacgcttctggacaggagtcagtggatcggtggggaaaatgctgcttaccctgggccctgggctgtagaaag

SEQ ID NO: 856205 - DNA, 100 bp, Homo sapiens
tgaaactgatctcaaacagcgacgagagatccgtgcaggcacagccttttacattgatcagaaagcatcatcattcaccagttacgaatgaactccagat

SEQ ID NO: 856206 - DNA, 100 bp, Homo sapiens
cgatattgatattgaagcaatgcttgaggctccttacaagaagattgaaaatattgaacttcccatggatacaaaaacaaatgaaagaagaggattttgt

SEQ ID NO: 856207 - DNA, 98 bp, Homo sapiens
gtgaagatatatcaagtgtgtgacatccctcagccccagggctcgatcattaacccaggaggcaagtgaggcctatctggttggcctttttgaagaca

SEQ ID NO: 856208 - DNA, 98 bp, Homo sapiens
taccagcatgtgttggctgttgacccagaaaaggcggcccagatgaaatcccaggtggccattaagcagatgaatcttcagcagcagcccaagaaaga

SEQ ID NO: 856209 - DNA, 99 bp, Homo sapiens
ggctcacctgtgcgggatggaacaaaaggtcaaagagttagtggaagcagagttatttgcccgttatgaccgccttctcctccagtcctccttggacct

SEQ ID NO: 856210 - DNA, 98 bp, Homo sapiens
ctggatcagccacaaatgtacccccagtacacttactactatcctcattatctccaaaccaagggaataccttggcaagcagctccagtccgagcagc

SEQ ID NO: 856211 - DNA, 100 bp, Homo sapiens
aactccaggcacagcggagccggcgcggggtccacaaagctctttcgacgtgtagcagcagctttgccgggaatggaaagcacacaggacagaagcagag

SEQ ID NO: 856212 - DNA, 100 bp, Homo sapiens
tagatctgggatctggacacctgccccccgtcatgaaataaacggtgactggcaaagagctgatgcagtctggaataaaatccaagaagaaaatgttatt

SEQ ID NO: 856213 - DNA, 100 bp, Homo sapiens
ttcttataaaagggtcgatatttgggcctttggacttgttttgtgggaagtggccaggcggatggtgagcaatgataatggaacttggactcaactttgg

SEQ ID NO: 856214 - DNA, 119 bp, Homo sapiens
gctctactcccctccaagtcccagttacaggactcatcctcatggaggattgccccctgtgggtcactttctcagtcattttgagctcagcctaatcaaagactgaggttatgaagtcg

SEQ ID NO: 856215 - DNA, 98 bp, Homo sapiens
gaaggtgcgtgtggggctgggtctcggagtgggagacgtggagtgcagctggaagatcacgagtacaagcctttggaccctaaagacatccgcctccc

SEQ ID NO: 856216 - DNA, 100 bp, Homo sapiens
ttggaggatcacctagtaacacacgctacctctttctgggtgactatgtggacagaggctatttcagtatagaggaatgattggtaacagtgcttctcgg

SEQ ID NO: 856217 - DNA, 100 bp, Homo sapiens
ctctgaggctgatatgcaatgtcacttacaacattaatcagatactgcatttaagaataactgaagtgaagtgatggactccgatttggagagtagtaag

SEQ ID NO: 856218 - DNA, 100 bp, Homo sapiens
cgcctgcccagctttgcagcccccgaacgcggcctcgcacagggctaaggaatatgagagtttaatggaaaccaaaaattctggctctgattcaccttat

SEQ ID NO: 856219 - DNA, 98 bp, Homo sapiens
tgttgggaaacaagattgacctcgaaaacagacaaaaagaagttttcccatttccagaagttagccaagatgaacttaatgaaatcaatcagttcttg

SEQ ID NO: 856220 - DNA, 98 bp, Homo sapiens
taccactgacaataataagcaggacgcggattctgatagcggggacgattctgacaagaggtcgtgtgaagagagctggaaactgattacttctctga

SEQ ID NO: 856221 - DNA, 104 bp, Homo sapiens
catgactggaggggcgccctgggggttcagattgcaaggtggcaaggagcagaagcagcccttacaagttgcaaagccggcctcagaaagtgtgtttgtgtcca

SEQ ID NO: 856222 - DNA, 100 bp, Homo sapiens
caaatctggaacgggtggccgattactgcgagaacaactacatacaggagggtgcatctgcccggaagactcagactcctgcagcccagccagtaccaag

SEQ ID NO: 856223 - DNA, 101 bp, Homo sapiens
agctggaagagcaacagcgccggcaccgcgagcaccctaaagtcaacgtgcctgccatctggacccgcttctttcctgcctccgaggctctgaggtctgtt

SEQ ID NO: 856224 - DNA, 100 bp, Homo sapiens
ccaaagttgaagttttgacctataaaaaggcagatactgatctgctctgctgtgtgcgtgcaccagctgcctccaggccaactacacgtgtgagacagat

SEQ ID NO: 856225 - DNA, 100 bp, Homo sapiens
agcatttgactagacggtatgaatttctaagtaaggctattaaagaagcatttagatactttccttaaaggcaagagtggactgagggtattttttcctc

SEQ ID NO: 856226 - DNA, 100 bp, Homo sapiens
ctgacgcagtcactgcagcactggtggaacttgaggctcttgctgaagaggccagtgaagaggaacttccctctgatgttgatttgaatgacccatactt

SEQ ID NO: 856227 - DNA, 100 bp, Homo sapiens
caggagacgagtccccggttgtcatgctcccaaagagcaacagaaggctgaagccacagaacccctgaagtcagccaagccaggccaggaggaagacgga

SEQ ID NO: 856228 - DNA, 100 bp, Homo sapiens
gacaggaggcagtagccaaacacccaggttattcagcttctcaaggctggaaaagcgaaggaagtttcctacaatgcactagcctcacacataatctcag

SEQ ID NO: 856229 - DNA, 100 bp, Homo sapiens
tctgggtcctggactactttggtggaccaaaaatcgtgacaccagaagaatattataatgtcacagttcagtataagatgatctctgaattcacctggcc

SEQ ID NO: 856230 - DNA, 100 bp, Homo sapiens
agcctattgaaagttttaatgagtatttatttgctttacaaagccatctatgctactgagaccaaatgagagggttgacactgtatcagaaaaaccaagg

SEQ ID NO: 856231 - DNA, 100 bp, Homo sapiens
ctcagcagtaactcctccataaaaacaagtgtgtgcatctggctgttagaagaattcatgctcatccggaatccagagagacagacttgctcagtgggat

SEQ ID NO: 856232 - DNA, 100 bp, Homo sapiens
tcctgatgtttctcagtgccattgtgatgatgaagaaccgcagatccaacctcggtgctggtggtgcagtttgtcgaggccatcgtggtgttggtacggc

SEQ ID NO: 856233 - DNA, 98 bp, Homo sapiens
gcagaccagcgcccgaaggccgacacgctggccctgaggcaacggctcatcaggaaagaccacagcaagattctttcattcgtctcctcctagcctgg

SEQ ID NO: 856234 - DNA, 100 bp, Homo sapiens
tccattcttaatgaacgcgtagagcttctgcaaaggcagtgggaagaactatgccaccagaagctggataagaaatcatctccatccacaggaagcctag

SEQ ID NO: 856235 - DNA, 100 bp, Homo sapiens
atgagctacataaattcctaatctgggatacagctggacaagaacgaaacttggcacagacttatactcttactgatctgatgaatgagatcaaagaaag

SEQ ID NO: 856236 - DNA, 100 bp, Homo sapiens
agtggaagccaaattcatcaattatgtgaagaattgcttccggatgactgaccaagaggcttcaacggaccacaccaaaatgccatctcaaatggaacac

SEQ ID NO: 856237 - DNA, 51 bp, Homo sapiens
cgtggtcaagttcaccatgagaggaacaactctgctcatggtgattacatg

SEQ ID NO: 856238 - DNA, 99 bp, Homo sapiens
gggcatcctgtgttttgcaaacggggctgacctcccttcctggggagcaggaagggtcaggtcaccgagacttggagccagaatctgagcctcagctgg

SEQ ID NO: 856239 - DNA, 98 bp, Homo sapiens
caccttcacgatgtttcccttggtcaaaagcgcactaaatcgtctccaagatgaataatacggcagctagtccaatgtctactgcaacttcaagtagt

SEQ ID NO: 856240 - DNA, 98 bp, Homo sapiens
tctagccaaattcctgagggattcgggttgactagtggtggatccaactactcgctggccagacatacttctaatcttccagtaccaacaattgcagc

SEQ ID NO: 856241 - DNA, 100 bp, Homo sapiens
ctttaactctccttatgctgggtgaaaacaaagagaaacttttccatgtctgtaaatagtgctgctgtcctgcgattgacaggacgaggaggaggaggaa

SEQ ID NO: 856242 - DNA, 100 bp, Homo sapiens
aaatgacgaacacaaagggaaagaggagaggcacccgatatatgttctctaggccttttagaaaacatgctttagccacagtagaagacttccagattcg

SEQ ID NO: 856243 - DNA, 98 bp, Homo sapiens
gtggggagatgaacccaacctagtgggtgtaatacatcatgaactgcaggagctccatgaacctgcctccagacaaggcccggctcctgcggcagtat

SEQ ID NO: 856244 - DNA, 99 bp, Homo sapiens
gcagctccactgccgtcaactcctgttctcctcagagcctgagctcttcagtatccccatcagccagtttccgaggtgctgagaagcacagaaactccg

SEQ ID NO: 856245 - DNA, 100 bp, Homo sapiens
ccaccatttcttggaaggaaaattttgactcagcttacactgagctgaatgaaattggaaggctcagcagtggatttctaaatgtgctagaagtcctgaa

SEQ ID NO: 856246 - DNA, 98 bp, Homo sapiens
cgagaaccgtcagtttgagccagatgcctcaacaagaacttgatttaaactctccacgaaataccactttggaaagacagactttctattgtgttccg

SEQ ID NO: 856247 - DNA, 118 bp, Homo sapiens
gccgcccgactgccatcgcccggcccggccgcgcccgcggaaccagaccagcgtgaagcctctgcgggccttcttttcgtcttatttgaagtcattgccggatgtgaggaaaaaatcg

SEQ ID NO: 856248 - DNA, 98 bp, Homo sapiens
ggctcttcaggatctgctttcagagtacatgaacaacaaaaccctcgtggatgtgactttggaaaacagcaacattaaggatcaaatcagaaatctgc

SEQ ID NO: 856249 - DNA, 98 bp, Homo sapiens
atgaagttgttcattgtttgtcaccacaaaaaggacaggttgttgaagattggaaattcatagcccaggttcttgatcggatgtttctgtggactttt

SEQ ID NO: 856250 - DNA, 98 bp, Homo sapiens
ggcgcctctgcgcgcgggaagatggcggaacaggctaccaagtccgtgctgtttgtgtgtctggggaaatgaggcaagttatcctttggaaatgtgct

SEQ ID NO: 856251 - DNA, 100 bp, Homo sapiens
aattgcctccttatgtctccaacatggaccgcctgggggactcggaactgcctcagctgttgaagaacgctctgcagagagcagtagagaggggccagtt

SEQ ID NO: 856252 - DNA, 98 bp, Homo sapiens
caagcgactctccatggtttctctcaggttctgagactctaggcaggctggcaggcaacaccttaggaagttggtgagatggcaaagcagtatataga

SEQ ID NO: 856253 - DNA, 100 bp, Homo sapiens
agcagcccccggccctgcctcccaaacccactaccaggattgccaaccacttaacaggttcgggatgagtatcggcaggactacgatgctgggagaggag

SEQ ID NO: 856254 - DNA, 100 bp, Homo sapiens
gtggagtattccacgtcccgcggcttccgcagcgaggtggacatgttcgtggcccaggccgtgctacaatctgaacgaggctgccatcaccactttctct

SEQ ID NO: 856255 - DNA, 100 bp, Homo sapiens
gacttcctcgctgcagcggccctggcgggtgccctggctaccatggaccatcctgctggtcagcactgcggctgattcttcagcttgtctctaaccgagg

SEQ ID NO: 856256 - DNA, 99 bp, Homo sapiens
gaaaacgtctgtcccaccgactggcaggggatgctccgtcatcccgtgcgaagcctggtccaaggtacagtctgaaaatacagcctgttgagaaaatgc

SEQ ID NO: 856257 - DNA, 100 bp, Homo sapiens
catctcagacatttgatgacctccctgcaagatttggttatagacttccagctgaaggtttaaaggacatagctcgccttttgcaagaaaaggagttaca

SEQ ID NO: 856258 - DNA, 98 bp, Homo sapiens
ttgatgaagctcaagttgaacaagatgctcagcaccaatgttgttatgaattattcagagatcgagtctaaggttcgagaggcaacgaacgatgatcc

SEQ ID NO: 856259 - DNA, 100 bp, Homo sapiens
gggcgtacaggcgcagcggccgcagcagcagcggcagtcacaggcacatcagcaaagaggtgctggagaatctggtaaaagcaccattgtgaagcagatg

SEQ ID NO: 856260 - DNA, 98 bp, Homo sapiens
caaaagatcagcgaggagcagcagcagctccagcaggcgctggctcctgctcagcttcttgacctgagcaatggagaacctaccaggaaacttcctca

SEQ ID NO: 856261 - DNA, 100 bp, Homo sapiens
gaacgaaataaaccagaacatcgttcttcaaggaaggaaatctcagatggaggaagtgcaagatgaactcatccacagactgaccattggtcggagtgcc

SEQ ID NO: 856262 - DNA, 98 bp, Homo sapiens
acccaccggcccaccctacatttagcgcatcatgtgatccgggttatcaatactctggctgaccatcatcatcgtgggactgactttggtggaagtcc

SEQ ID NO: 856263 - DNA, 100 bp, Homo sapiens
gcgggcgttttcttggatgaattgcttgctttggaggaatactcccccagttgcaagaggcgcaggaccgtggaagacttcaacaaattctgcacctttg

SEQ ID NO: 856264 - DNA, 100 bp, Homo sapiens
ttcagctggccaacagcaccatcattgcatttacctcggatcatggagtatgctgctgctgttccgctttgcgtcctcgctacaaacgcctggtggacaa

SEQ ID NO: 856265 - DNA, 100 bp, Homo sapiens
gggatgccgaccaggagagcaacatcagtggccctttagcaggcagggccggccaaagcaagatcagcggagcgtgctttggacaccatgaattttgatg

SEQ ID NO: 856266 - DNA, 100 bp, Homo sapiens
ctctcaggacaacccagatgtgcaacaaagtgcgatggacacaactcagatgggaagttcatcgcccgggcacagcggatagagtacgactgtgaactag

SEQ ID NO: 856267 - DNA, 98 bp, Homo sapiens
gaaagcaatggatcatattgagatgagacaccaattattgcggtgatggtggccctgtcctctctgctagtgatcgtgtttattatcatagttttgta

SEQ ID NO: 856268 - DNA, 98 bp, Homo sapiens
cgcaaccggggcgaatcatggcggccgccaagccagattctactgcaactgaaagagcaattgccagactagcagtacatcctcttctgaagaaaaag

SEQ ID NO: 856269 - DNA, 100 bp, Homo sapiens
tatacaaactaatggaaggatacagctatgcaaatatagaacactaaagtgttacatgacagatgtatgagctccaattaaggaacagctatatcctgct

SEQ ID NO: 856270 - DNA, 99 bp, Homo sapiens
tcttctcccctgattcaagactcctctgctttggactgaagccatccaggggtctttaaccagaagagagaggagagcctcaggagttaggaccagaag

SEQ ID NO: 856271 - DNA, 99 bp, Homo sapiens
tcttctccatggctttccgggagctgcagtggctggtggccaagcacttcaaacctcatgggttctccagcgacaaggctaaggcgggctcctccgaat

SEQ ID NO: 856272 - DNA, 100 bp, Homo sapiens
aaagcctctttagcttatttttgtcaagctggttaccataccacggtcttcggtgtgttcagtgactgtttgctggataacctgccgggaataaaaacca

SEQ ID NO: 856273 - DNA, 98 bp, Homo sapiens
agacctttgtttttacattctgtccggagtttgagcagttgcgattcttgcagcatcaaatggctatggcagcagcagcagcacaaacagctcagcta

SEQ ID NO: 856274 - DNA, 98 bp, Homo sapiens
cccttccggagtccgccccgtgaggagaatgccagaggaagagcatttggcctgtgatatcaccggatccagttcatccaccgatgacacggcttcac

SEQ ID NO: 856275 - DNA, 100 bp, Homo sapiens
tgtctattttcctaaggacctccgaggaacagaggtgcagattcactttataggaacagcttcagcttcagtgatgaaaaactgaattctccaacagact

SEQ ID NO: 856276 - DNA, 98 bp, Homo sapiens
cgattctcccgcctcagcctcctgagtagcaattacagcatcactgtcctggtaactggggccaagtggctgtcagtgctggaagagaaggccatgaa

SEQ ID NO: 856277 - DNA, 100 bp, Homo sapiens
gatggcatggaaatatagcaatcggacaaatccggcagtagccatgaaccagagaatcagtcagagtgctccagtgaaacagccaccacccctggctccc

SEQ ID NO: 856278 - DNA, 100 bp, Homo sapiens
gaagaggaagaccctcctgccaaaaggaaatgcatctttatgtcagaaacacaaagcagcccaaccaaagggtctctaattaacagaagatggcaaagcc

SEQ ID NO: 856279 - DNA, 98 bp, Homo sapiens
aacggcgcgctggtggtcacggtgagctgcggcgagcggagcttcgcggggatcctgctggactgcacgaaaaaggcgaccattgacgaggtggagac

SEQ ID NO: 856280 - DNA, 100 bp, Homo sapiens
tacgaagtaaatggtggaccatcaaaaggcaaattgcaaaccataaggatgtttcgttccctgaggcgtagaggctccggtgttttttgtgccaattgcc

SEQ ID NO: 856281 - DNA, 99 bp, Homo sapiens
cagggctctgatcaagcggatccaagccatgattcccaagttaatatgatcctctgttgaagcaagaagacaaactgtatggtggagaaagaagtggga

SEQ ID NO: 856282 - DNA, 98 bp, Homo sapiens
gccccacaccctggagacattggggacttcattaatgaggtgtacctgaaggaaatcttaaaagaaattggtgttcagaatgtaaaagggatccacaa

SEQ ID NO: 856283 - DNA, 100 bp, Homo sapiens
gtaaccgggacctgaccgcacgcctggagctcttcactggctgcttcaaggatcctgatggtgaacatgccaggagagcaatgcaaaaggtgatggctac

SEQ ID NO: 856284 - DNA, 99 bp, Homo sapiens
acgcaaaacagactttttcattggaggagaagaagggatggcagagaagttacggcagtcccagtcctactgcacagacacagagtgtcttcaggaatg

SEQ ID NO: 856285 - DNA, 100 bp, Homo sapiens
cttgatcgggaactcctgcttctccttgcctcgaaatggaccccaactgctcctgctcgcctggaattgaatgatctggcacgggaccctccagcacagt

SEQ ID NO: 856286 - DNA, 100 bp, Homo sapiens
ggcctgtagaggagtggctgcaggaaaaaggctcagtagatgaaggcgtttctgagggcttgcctacacttcaaagcacgtctagcactaatgctcctcc

SEQ ID NO: 856287 - DNA, 98 bp, Homo sapiens
cgcgctcgcgctggtggcggtcgcctgggtccgcgccgagctgtcacgggaagtctttttaggataaacgtaggcctgcgtggcctggtggctggtgg

SEQ ID NO: 856288 - DNA, 99 bp, Homo sapiens
cacctcctcgccagcagccgtccggagccagccaacgagcgaatgttatggaacagttcaatcctgggctgcgaaatttaataaacctggggaaaaatt

SEQ ID NO: 856289 - DNA, 100 bp, Homo sapiens
cctccattgttggagtcctgtgcacagattcacaaggacttaatctgggttgttaaacactttaagatgagaaaaattgatctctgtctgagctctgaag

SEQ ID NO: 856290 - DNA, 98 bp, Homo sapiens
gccctcctgccaccggacctacagctgcattcactgcagagctcacttggccaatcatgatgaactaatttccaagggaaatctgcttcgccactgaa

SEQ ID NO: 856291 - DNA, 99 bp, Homo sapiens
cagaatgtgtctctgaagaggctcgctcactcattcaacagggtcccgggattcttgagctgtgcccagctgacgagcttttgaagatggcacaataac

SEQ ID NO: 856292 - DNA, 99 bp, Homo sapiens
gtcactgtgtggatgacaacagctggacactagtggagcaccacccgcacctaggattaggcatttccctggaaatggcagctgtgacagtaaaggaag

SEQ ID NO: 856293 - DNA, 100 bp, Homo sapiens
ccacgcttcagatcggagaaagttgctaatcagagaagcggcgttctggaggtgatggccatgactaccctcgagcagcctaccagcaagtgatccagcc

SEQ ID NO: 856294 - DNA, 99 bp, Homo sapiens
tttacttgttggggccctcttgataaaaagagatgtggggggattctcgacctgctaacagaactggaccttttcggttctaagctggtctatgtccat

SEQ ID NO: 856295 - DNA, 98 bp, Homo sapiens
atagagacaaattgaaacaacagcaagctgcacacaacaagccgctctactcctttgaagacaatgcagactatgtgtacgatgtcatgtggtccccc

SEQ ID NO: 856296 - DNA, 98 bp, Homo sapiens
cgctggctcagccgcaagtacccgtccatcatagtcaactgcgtggaagagaagcgcaaatctgtccaaggctgcctggggagcattggagaagaatg

SEQ ID NO: 856297 - DNA, 98 bp, Homo sapiens
caagccctgccgcacagctactactggagcgcgccggctccctatctgggaaacaaaggttctccaaaaaatgtggaatcctttgcatctatgctgag

SEQ ID NO: 856298 - DNA, 100 bp, Homo sapiens
tctaacatcacctgcttcatccttgtttaatgactttggtgccctcaacatctctcagagacgaaaggagttgttcctttggccacatatatgcgaatct

SEQ ID NO: 856299 - DNA, 100 bp, Homo sapiens
cgcaaaacttatgtgaccccgcggagacccttcgagaaatctcgtctcgaccaagagctgaagctgatcgtacaagggtcaggtgcctgagaacgaggct

SEQ ID NO: 856300 - DNA, 116 bp, Homo sapiens
tcaagacttggctgcggaggatgcacgcagacagggacaaggcgggggacggcctcgaggcgggtctaccactgctgtgaggaggccccgttgttccctcctgtctattttaaact

SEQ ID NO: 856301 - DNA, 115 bp, Homo sapiens
ggaaagccccagccacccatcaaatcagagagaaggaatccaccttcttacgctatggcaggactccatccccgtgtctacctccctccttggagacacttccgacacgacctct

SEQ ID NO: 856302 - DNA, 100 bp, Homo sapiens
aggagcagaaggggcccctgtcgggtgcagcgtcctgggagcatatcaaggctgtgcgaggcatttcatccttcatgaagccattcaggattttgaattg

SEQ ID NO: 856303 - DNA, 100 bp, Homo sapiens
ctgcgtcctttttcgtttttcggatgatgccttcaatactacctttatttccaccatagggccctcgtggacctcagggaattgatggagaaccaggtgt

SEQ ID NO: 856304 - DNA, 100 bp, Homo sapiens
gaacaccccgcctacctgtactcgtgggagtaatgttgcaggtcagtggaatccagtttttatgcagcctctgccagaggaagagattgtcatcagagat

SEQ ID NO: 856305 - DNA, 98 bp, Homo sapiens
agtggtcgcttcttctccttgattgctgctctctgaacactatagtcgtcgaatctcacaagcgtacggtctgatgaatgaactgttatctgagtcag

SEQ ID NO: 856306 - DNA, 100 bp, Homo sapiens
atgccctccacccatgccatgtccggcaccgccatccccatttctatggtcctcctcacctatggccgctggcagtctccaaacgtccacaactatcccg

SEQ ID NO: 856307 - DNA, 133 bp, Homo sapiens
tcagatgtggtggaatatgccaaggaaaaactggagagcttcatcaaaaatagtgatagctttgataaagaatgtgatcaatgggcaggactacgaagtgatgatgcagattgactgtcaggtgatggacacc

SEQ ID NO: 856308 - DNA, 100 bp, Homo sapiens
aggaaaatcatattatagatggagtaaagattttggaagatggcaaagttcatgacacccgtgatccaggacaacccctcaggctggggtccctgtgcgg

SEQ ID NO: 856309 - DNA, 100 bp, Homo sapiens
gagagcgtgcccggctgcagatagagattgggaagctgagggcagagttggacgaggtcaacaagaggcgaggcggctttgcacaaggtggacattccca

SEQ ID NO: 856310 - DNA, 100 bp, Homo sapiens
aggccagatctacgagctagagttgccatttcgctgggatttttgggtggtgcaaaggtgctaaaatgatgtattttctggacaagtcaaggcaggagaa

SEQ ID NO: 856311 - DNA, 100 bp, Homo sapiens
cggcgcctcaggcacctcggcccgggtttggaattcacccagttgcaggccgaatgcctggtcagcttaatgtgctgctggctgaggctggtgtgccata

SEQ ID NO: 856312 - DNA, 51 bp, Homo sapiens
acagcctctaattaaccacgcacccaggagagtccatcccgatccggctct

SEQ ID NO: 856313 - DNA, 100 bp, Homo sapiens
caactcaaaaaccatcccaacaagagaatgcaagacatatctgaagagatggattaagaatgctttggattaaggattgtggagcacatttcaatcattt

SEQ ID NO: 856314 - DNA, 126 bp, Homo sapiens
ttctgatctcaccaccctggtggcctttccctccagctctgtctatcctaccaaggttcgggagcggatccgcatcaatgggcagcccatcagtcctgagctcttcaccaagtacttctggcgcct

SEQ ID NO: 856315 - DNA, 98 bp, Homo sapiens
gacgcccgtgcactgggccgcgcatttcggcaagtgaaactggaacgccaagctgaagaagaacgaatacggaagcacaaagcagctgctgagaaagc

SEQ ID NO: 856316 - DNA, 98 bp, Homo sapiens
gtgagatcgtcagcgctgactccatgcaggaggtcccaggtgattgaaaagtttgaggccttggacattgagaaggcagagcacatggagaccaatgc

SEQ ID NO: 856317 - DNA, 98 bp, Homo sapiens
acagattactttgtgattgttagtggaacttctacccgacacttacatgccatggccttctacgttgtgaaaatggttcagattcagaacaagaaagt

SEQ ID NO: 856318 - DNA, 100 bp, Homo sapiens
cagaaagtgcatcctggcgggcgatcacaagcagctgccccccaccacagtctctcacaactgtccctacctggctcgcaagctgacccttgccatcccc

SEQ ID NO: 856319 - DNA, 100 bp, Homo sapiens
ttcaagggtcctttgagttcagttgtcttctcagagatgccaggaagcctcaggaagaggatcacctagcccgggtagaagaggcaatcacccgtatgct

SEQ ID NO: 856320 - DNA, 100 bp, Homo sapiens
agagcccgggcggcgctcgtacttctggccactgggcgagcgtctggcagaagtcaacgaaaggttccgttgtccttgaccacgtattccatcacgtaaa

SEQ ID NO: 856321 - DNA, 100 bp, Homo sapiens
agtggccaagacctctgctgcacaggaatccggagatgatgagtatcaaggggaccagtcagacacagaggacgaagtggactctgactttgacattgat

SEQ ID NO: 856322 - DNA, 100 bp, Homo sapiens
atgtccctgcttgtcagggctgagagcgacggaagaagccaatcctgcttgtgcatggtgataagcgagaggctaaggctcacctccatgcccaggccaa

SEQ ID NO: 856323 - DNA, 99 bp, Homo sapiens
tggaatgtttcagtttgggaaatctggatgccaaacgagattggggccatgccaaggactatgtggagggtacagctctgccggggggggaaaaagtgg

SEQ ID NO: 856324 - DNA, 111 bp, Homo sapiens
ctgggccgcacttaccaccccaagtgcttcgtgtgcagcttgtgcaggctcatcatatgcccgaagctcagtggttacggctgtgaaatttacaatttctgaccatccaca

SEQ ID NO: 856325 - DNA, 100 bp, Homo sapiens
cgcagtctgcttcagtgcagtgaaggccccagcccacgcagcaggaggacacactgccgaagggaccagttggacggccttctggctttagcgcctgtgc

SEQ ID NO: 856326 - DNA, 99 bp, Homo sapiens
tgaagctcacaggttgaaaaaccaaagctccctgctgcataagaccttgtcagaggtgcatcatttctggcatggcttcaggaagcattgtgctatttt

SEQ ID NO: 856327 - DNA, 100 bp, Homo sapiens
ggcaagttatggcaatgtgatcgtcatcacagtcaactatcgacttggagtactcgactccctgcgacaaggactgtgtactgcatgaatgaggctgaga

SEQ ID NO: 856328 - DNA, 100 bp, Homo sapiens
ggcttcgatcccttctctgatttgctgtcagccatgaacggatggatgtgatgcctgctagccaaaaggatgacagaaggcaggcactgccaggtgcacc

SEQ ID NO: 856329 - DNA, 99 bp, Homo sapiens
tttgttgaagtgggaagattggggccttctgattattttgtgaatggtagtgtctagaaagggtatgtcccttcaagagagaggtgccaatgtccaacc

SEQ ID NO: 856330 - DNA, 99 bp, Homo sapiens
ggaacttcatcatcatctacttcacaggaattgccattttttgcctgagaatacagatcaacccacagaacaaagcggatttccaaggcatctccccag

SEQ ID NO: 856331 - DNA, 100 bp, Homo sapiens
cggtcctggccgcgattttctgcaggccccacgagtgggaggtgctgagccgctcagggaaaactgaggctgccatcaaaaacttcagtccctactacag

SEQ ID NO: 856332 - DNA, 99 bp, Homo sapiens
tggaggaagcagtgacctccgccttacagcaggagactgaaaagttgaccactgaaaaacacacatactatctgactgcagattctcccaatatattgg

SEQ ID NO: 856333 - DNA, 100 bp, Homo sapiens
aatacctgagggggcagatgcgtgttcatgtcaaggagctgggagtggttctgggcctagacagcctgactgtcaggaatgcagaggtacagaacaagct

SEQ ID NO: 856334 - DNA, 100 bp, Homo sapiens
aggcacccacaggctgctgggaggagagcataagacttaattcagtgcacaaatgagatgaatgtgaacatcccacagttggcagacagtttatttgaaa

SEQ ID NO: 856335 - DNA, 100 bp, Homo sapiens
ggaagcagaggcacccacgctcctacaatattctcgctgaagtctgttaattctactttttgagtacttatgaataaccacgtgtcttcaaaaccatcta

SEQ ID NO: 856336 - DNA, 98 bp, Homo sapiens
aacgcggcgaccgccaagaaaggcagcgaggtggagagcggaattgaaagatgttggccatcgtgatcagatggctgcagctagaggaatcctgcaga

SEQ ID NO: 856337 - DNA, 100 bp, Homo sapiens
atcacgcccagctagccatcttctaattttcattccttcaaagaccctatcagatttggatatgtccttcatatttgattggatttacagtggtttcagc

SEQ ID NO: 856338 - DNA, 99 bp, Homo sapiens
ggacatcggcgagctgcaggaggggctcaggaacctgggcatccctctgggccaggacgccgaggaggaacttgcatcagcactgaagtcagccttatc

SEQ ID NO: 856339 - DNA, 100 bp, Homo sapiens
gggctaatgctaatgtcagcagacagattgaggacactgtattatacggttactatagtacaacaaataacactgtgactccaacctcacaacctgtgcg

SEQ ID NO: 856340 - DNA, 100 bp, Homo sapiens
gggccctcccccagcagtatcctgcatcgggagaaaacaagtccaaggatgaatcccagtccctgttacgggttccgagaagtaaagctttggaggtcac

SEQ ID NO: 856341 - DNA, 125 bp, Homo sapiens
acggtgaccttcgcttggtgtcctcctggcctcagcaacctgacaattctgtcgtgtcccggaacacctgattgagaatgaagtgtcaatactgcgccgagtgaaacatcccaatatcattatgc

SEQ ID NO: 856342 - DNA, 100 bp, Homo sapiens
gacagcctccgcgaggctgtgcgcacgctgctggggtacggctacaacttggaagcaccagatcaagatcatgatgaccacctaagaaaggaggaacaga

SEQ ID NO: 856343 - DNA, 119 bp, Homo sapiens
gacgataagatcaattcggaaccgaagattaaaaaactggagccagtccttttgccaggtcgttcctccaaagatgccgtgggtcagatatctgttcatgtggacatcactgccacccc

SEQ ID NO: 856344 - DNA, 100 bp, Homo sapiens
ctcggccctcattctgcacgacgatgaggtgacagtcacgacagggcctctggagtgcagtggcgtgatctcggctcactacagcgtctgcctaccgtgt

SEQ ID NO: 856345 - DNA, 116 bp, Homo sapiens
gagactgtgccgtggagggcctcgccatgtcctgctgcccgttggaggtccccctccccactaagtgcctctttgcatagcaccagtccccacccgcacgctctctggaccactac

SEQ ID NO: 856346 - DNA, 100 bp, Homo sapiens
atgtttcagtttgggaaatctggatgccaaacgagattggggccatgccaaggactatgtggaggctgcagagactgcaagtctggaagaacagctgcaa

SEQ ID NO: 856347 - DNA, 98 bp, Homo sapiens
ggacctccaaggaagccacgtgcagacatctacaaccttcgatctcctgacgagtccttcctcgggaggcggcgaaggcggtccaccctgcgcgtgat

SEQ ID NO: 856348 - DNA, 98 bp, Homo sapiens
ttgtacaagaaaatgcacttgaatttggacagtgaaaaggcccttaaaaaggtatttatgagcctccatttcttatactactgcagtgaaccaacatt

SEQ ID NO: 856349 - DNA, 100 bp, Homo sapiens
cattcaggtctctacaggagaagacgagatcgccccgatagtttgagagtaaatgggttaccagaggaagagctaaggcctgtttaaagaagaaaacccg

SEQ ID NO: 856350 - DNA, 100 bp, Homo sapiens
aaccaaagacgggcgcaaagattgcttgaagaaatccatgccatgaaggcagagatcctacaagaatccaggatgatgatcccagattgccagcgcaggt

SEQ ID NO: 856351 - DNA, 99 bp, Homo sapiens
tgggatgtggtatgataccagcaactggtctattatatcatttaaaccacatggctatctaaagagcttttaccctacgaaaggaaaacctggaaatgt

SEQ ID NO: 856352 - DNA, 100 bp, Homo sapiens
cggcagcccgtggagtcggctgagggaaaagcgaggcaaggcaggcggccttatgtttgatcatcggccaaggtcctggcgagaactgcctctgcggcta

SEQ ID NO: 856353 - DNA, 128 bp, Homo sapiens
tctggcctcgctcccttcatctggctatggcaccaacacgcccagttccaccgtctcgaaccacatccctgtgtttagtcccgcacttacagacggctcgctgggcgacatgatcttcttccattcct

SEQ ID NO: 856354 - DNA, 100 bp, Homo sapiens
cttgaaatgaatgcccgaagcttacagcagaagctggagactgaacgagagctcaaacagaggcttctggaagaggtgtggagagagtatgctctgtgtc

SEQ ID NO: 856355 - DNA, 100 bp, Homo sapiens
ggaccgcatcctctatgagtctcagcggcagagagaaaattcatgaaccctttcaacatgcctaatctgtatcagaagttggagagtgatcccaggacaa

SEQ ID NO: 856356 - DNA, 98 bp, Homo sapiens
agaggaaagaaaaggagtcaggaatgcctcttagttggttgaatctggcgatgtggaacccatggatatggagggctgactatatacaccatgttttt

SEQ ID NO: 856357 - DNA, 107 bp, Homo sapiens
ccaggaggtgacccaggaccttcattatgaaaacttccgttctgagagactcaagagaggcggcagggccaaagaatgtggtgcttcgcctagctgtaaaatttttt

SEQ ID NO: 856358 - DNA, 100 bp, Homo sapiens
gcagcgctagtccagctgaacactttccagccttgtttttcagcagctttgaggaaaagtataggaggcgatgcgaagttactggtgattctctgcattt

SEQ ID NO: 856359 - DNA, 100 bp, Homo sapiens
tgctgtgtgattgagcccctcctcagcctgtgggtggcctaagttcacagtattcatgggctgccctgggcaagagccagctctgtttagcactgataat

SEQ ID NO: 856360 - DNA, 98 bp, Homo sapiens
cttcgccatcgccagcatcgccaacccggactggatcaacaccggggagtctgcgggtgcagaggacgtggtgatggcgttttccaggtcggagacgg

SEQ ID NO: 856361 - DNA, 98 bp, Homo sapiens
ctcgcccagcgcctggcctgcagcttccagcacagctaccgcctgctggtgcctgtgcctggatcaaagtggaacagctgaagccatatcatgctcat

SEQ ID NO: 856362 - DNA, 100 bp, Homo sapiens
gctttcctgagtacacgcagccaatgatagaccacctggttaccatgaagatcagccactgggatggaacccagtgacttgattgtaaaaatttacagag

SEQ ID NO: 856363 - DNA, 100 bp, Homo sapiens
cggaagcgcagggagaaggaagaggtgtttgaaaagcaataccaggacgtgccgatgccggaggaaaagagcaaccccaagggcgtggagtggctgtggc

SEQ ID NO: 856364 - DNA, 100 bp, Homo sapiens
aaagaaaaaccacaggctaatgttccttcagctctgccatcactccctgccgggtcagggaccagcattagcagtacagggcccagccatgtttacagag

SEQ ID NO: 856365 - DNA, 98 bp, Homo sapiens
ggacttcaacatgcccctcactatctcccggcttccaccaacactttcttccaaatatcctgaagatgacccagactactgtgtgtgggtcccacctg

SEQ ID NO: 856366 - DNA, 100 bp, Homo sapiens
gtggccgttactgatcttacttcatccagtctaataggctctcaaaattagagagatgtgtaattgtccaccactgtctaatccagaccctcgattacta

SEQ ID NO: 856367 - DNA, 98 bp, Homo sapiens
gaaaccgaggctataacttgatctaccgatcaacaaggcatctcaagagacttgcgttgatgatacagtcctctggtgtggatgtggaagcagccaag

SEQ ID NO: 856368 - DNA, 98 bp, Homo sapiens
ggggttgtgatataaagacagggatatgagtgaagaaaacacagagccaccctggaaagtggtctcggaaagagggtcgtggtcccgcacggatgcgc

SEQ ID NO: 856369 - DNA, 100 bp, Homo sapiens
attgtgagctatttcagaactgttctcaggactcattattttaacatttgggagaaacacagccagaaggtttcaaccgcagcggaggtggtggctatag

SEQ ID NO: 856370 - DNA, 98 bp, Homo sapiens
caggcatctctgggtgggcaacttacccgagaacgtgcgggaagagaagatcatcgagcatttcaaacgagatcgagatggtgatcatggagcgtagc

SEQ ID NO: 856371 - DNA, 100 bp, Homo sapiens
ttttccagaggtgccctgaggagcagggaagcatggctattgtggatgtaaaagccatgttcaagtcttccgtgtgtgctaagatcgtgcagctcctggg

SEQ ID NO: 856372 - DNA, 98 bp, Homo sapiens
agaatttcacccaggttctgacagattggccatcgggactttgatgtggagaagcgacttcggagagacctcaggaggacacatgcactgttgtcaga

SEQ ID NO: 856373 - DNA, 98 bp, Homo sapiens
tcgatctccgccctggggtcattgtcagatgccaattctcggaagcaagaagcagagtggaaagaaaaggcaataaaggagctagaagaatggtatgc

SEQ ID NO: 856374 - DNA, 100 bp, Homo sapiens
ccccaaggtcctcctgggagaccagggcccaagggatgcagacagtgatgaaaacgacaaaggtgaaaagaagaacaagggtacgtttgatggagataag

SEQ ID NO: 856375 - DNA, 100 bp, Homo sapiens
gctgaggacacacccaggaaaagactcaggacggacaagcacagtcttcggaaggcttaatggttgttatgaggctctcgctggaggttccacagtggag

SEQ ID NO: 856376 - DNA, 100 bp, Homo sapiens
gggatgtctcaggaattgagaacaatgacgaccaatagctcagatcctttccttaacagatgtgttcagagcaacattgttttgttgacacaagcattta

SEQ ID NO: 856377 - DNA, 98 bp, Homo sapiens
taagggcagtggggaagcgtttgagacggagctgtggaggctgaatccttgaaggaggaggtgagagaggcacagaaaactttagaaactgttccttt

SEQ ID NO: 856378 - DNA, 100 bp, Homo sapiens
aagagagacatttctggctctgaaggcgaacgcttcgctggccatttaggagctctgctcaaagccagacggctaatagctcgtcagcttgctaaaatcc

SEQ ID NO: 856379 - DNA, 98 bp, Homo sapiens
gagacccgccgaattccgggagccggaccgggaccaggaccgggccccactttccacatcaacaaagagagcattgtggatgtagaaggtgttgtgag

SEQ ID NO: 856380 - DNA, 100 bp, Homo sapiens
ggccctgtgatccctcaagactggtccacggagtgtatgaccacaaacagccatcaaggtattcagtagaagcagatgaacagccagatgaagagatgga

SEQ ID NO: 856381 - DNA, 133 bp, Homo sapiens
cacggtccttcagaggaaagcgagctccaacccgcggccccggcgccaagccgccgtcatcttcttcctgtgccaggaaaacgactgtcttcttctgccaaaatgtcaggaattggaaataaaagagcagctg

SEQ ID NO: 856382 - DNA, 125 bp, Homo sapiens
ctgcacttcgcattttggcattgacatttaattttagggtcctttatatagaagggagagtagcctaactgagtccccattcaaagttcacttagaaaaactcagtttgagacaaagaaagccag

SEQ ID NO: 856383 - DNA, 100 bp, Homo sapiens
tacattgctgattatctcatgcagaataactgaagtgaagtgatggactccgatttggagagtagtaagacgtgaaaggaatacacttgtgtttaagcac

SEQ ID NO: 856384 - DNA, 100 bp, Homo sapiens
gcaaccagggtccccctcagtgagcaaaaagaagcacggcagcagcaaggaatatattaaaggaatctgtgaacctgaactagaagaaagagaatgttac

SEQ ID NO: 856385 - DNA, 99 bp, Homo sapiens
gtcctcgctcgtcaccagcaagcttgcggggtgcgtcagcaatttcctgctcctcttggttggtcaggcactgaagctcctacacaggtcactgttgaa

SEQ ID NO: 856386 - DNA, 99 bp, Homo sapiens
agcagatggtgtatctcaggagctcttctctgctggcttggtggatggtcacgatgtagttatagctactctccagagagaccggatcttcaaacattt

SEQ ID NO: 856387 - DNA, 98 bp, Homo sapiens
ttgaggccttcacagcatgtggttttgtgcaggttgctgaaaagccaggagtcaaaatgactgagcgctttgactgccaccattgcaacgaatctctc

SEQ ID NO: 856388 - DNA, 99 bp, Homo sapiens
gagactgacgatgtgttcgatgcattgatgttgaagtctcccacagtgaagggcctgatggaagcgggtttcccaaactctcgattgcctcttgcaagc

SEQ ID NO: 856389 - DNA, 98 bp, Homo sapiens
gctctttgaactttggatgctttattgtacaaagaacaagttgaaatcatcgcagaaggataaagttcgtcagtttatgatcttcacacaatctagtg

SEQ ID NO: 856390 - DNA, 100 bp, Homo sapiens
gcttatgattgtcatcgttacagccggcgaagaagaagcaggtcggagaccatgagaaacagcgtcaaatcatcttttcatgatcccaagctgaaaggca

SEQ ID NO: 856391 - DNA, 100 bp, Homo sapiens
gacgcaaaccccgagacccatgcctttgtcacgtccccagagggcaactccaacaacattgccaccgtggacatctccgcaggcttcgtgggcttagaca

SEQ ID NO: 856392 - DNA, 50 bp, Homo sapiens
tgagtcccaggagacgtgctcaactgaccaaccacatccgggagtcgctg

SEQ ID NO: 856393 - DNA, 100 bp, Homo sapiens
agggcttgttccggtttcagaggatcctgtagccataaagattgcagatgtgttttcgcattataacaaggacctgttgacagagcactgcacagaagct

SEQ ID NO: 856394 - DNA, 100 bp, Homo sapiens
actatatgaaattcatggagctcagaaaattgctgatggagtgtcagccataatggcaggtgaagaaattaatgaagactatccagtagaaattcacgag

SEQ ID NO: 856395 - DNA, 98 bp, Homo sapiens
ccatccagccagaacaagtacaacggctcactgaactcctggagaatgacccatcagtaagaaaaggaacggctgtagtagatctctctgggaatggc

SEQ ID NO: 856396 - DNA, 119 bp, Homo sapiens
tgtggtcagagatgctggacatcaccatgaaggagtctctcaccaccagggagatcagacggcaggaggtttgcagaaccagcgagtattatatgtacaggattccttagagggtgagg

SEQ ID NO: 856397 - DNA, 113 bp, Homo sapiens
aaattatgctgcagcatattgtactggcctgctgctggcccgcaggttaagctcaaatcttcgtcatgtgagagtatttgaaatggacatagatgatgaatgggagctcgatg

SEQ ID NO: 856398 - DNA, 100 bp, Homo sapiens
agcgaacattatatccagaatcatggacggacagaggatgcacttgtccaatcctcaatcctggtggacccccaaaagtacaagggcatatttaacggat

SEQ ID NO: 856399 - DNA, 100 bp, Homo sapiens
gtggacttggtgtgcattaacctgccgccgcccctcaccagacagatcgctgtcaaaaccctaggaactgcaagcacatgttgaccagataactgaaatg

SEQ ID NO: 856400 - DNA, 100 bp, Homo sapiens
ccgagacagacagcatactgaagtggtttgcaacatccttcttctggataacactgtacaagctttcaaagtcaatgtaccttctcaaaccagatttcat

SEQ ID NO: 856401 - DNA, 98 bp, Homo sapiens
cgcttcaggacactgtcacttctgaagggcagccagcccgttttcaatgccgggtttctggaacaggcccagctgtgagatacagtaagttcaagatg

SEQ ID NO: 856402 - DNA, 98 bp, Homo sapiens
catggatttcagcaccccttctgtgtttgatcagcaaagagaaatggatgatggaccttctcgaagagatcatttcatgaaaagtggatttgcctctg

SEQ ID NO: 856403 - DNA, 100 bp, Homo sapiens
tgcaggtcacgacatttagtgaggcatgtggagaccccaaggcaaaaccatcctatcttatcgacaaaaacctggaatctgctgtgaaattcatagtcag

SEQ ID NO: 856404 - DNA, 100 bp, Homo sapiens
tgtctgccaccatcttcgacttgagcgaagttttatgcaaggtgttggagagcacaatggctgaacaagtccttcctcaggctttgtatttgagcaatat

SEQ ID NO: 856405 - DNA, 100 bp, Homo sapiens
tccatttgaagggggaagtctcttgcaaattccagtcaaggccctaaaatataggagtgaacatggaaaggtttgcagaagaagcagatgttgtaatagt

SEQ ID NO: 856406 - DNA, 99 bp, Homo sapiens
tccagggtgggcgcctttcgccgtggacgccgaccgtccgggacgaggtgttcctgatccaagcagaaccctgttatttgaagagcctgagaaatctta

SEQ ID NO: 856407 - DNA, 98 bp, Homo sapiens
atctgtagcattcaagacttcaaactggttgtttttcaccattcagaacattgcctgaagcaggtccaccatgccgttagtaacgaggaacatcgagc

SEQ ID NO: 856408 - DNA, 100 bp, Homo sapiens
gcctgggcatagacttccttaaggacctagatgtgaaggctggtggaggctgtgtaatgaccattggagaaatgctacgatcttttctcacaaaactgga

SEQ ID NO: 856409 - DNA, 123 bp, Homo sapiens
tgttctgagtatttgctctgatgatgaactaatgactgaaggtgaagaccagtttgatggttggaaaagagactgttcaaaccactgaggatcagattttgaagagagatatgccaccagcat

SEQ ID NO: 856410 - DNA, 100 bp, Homo sapiens
agaatgcaaggaggcagccgtgtcacatgcgtttttctacagctcccagtagagcataactttgccatggttgtccatacaaaagcagcaggcaggacca

SEQ ID NO: 856411 - DNA, 100 bp, Homo sapiens
gatggagaagaatatgaatggaaagaaactgctagagatgcaaagaatatggccaaggatgtacatgatgcccttgtgcaaataataagcaaagaggttg

SEQ ID NO: 856412 - DNA, 98 bp, Homo sapiens
gaaaccccgccatggaggcttcattctggacgaggctgtttgtcccgctggctggaagcctggcagtgacacgattaagcccaacgtggatgacagca

SEQ ID NO: 856413 - DNA, 98 bp, Homo sapiens
aaaagagagaatttatctagaggaaaacccagagaaaagtgaaacaattcaggacactgcttaacagcattgcgcagtgatgaagtgattgatttaat

SEQ ID NO: 856414 - DNA, 100 bp, Homo sapiens
gactgtctcgacagatagctgacatcatcctcccaatgttagccaaacagcaggaactatccaagatcacgatgccagttatatttaatgagcctctgag

SEQ ID NO: 856415 - DNA, 100 bp, Homo sapiens
gcctaaatgaggaatgtctttcctaccatctaaaatacgaaggtttctggctggagtatgtattcccgtgtgccagagtgccaggtcaccacatactatt

SEQ ID NO: 856416 - DNA, 100 bp, Homo sapiens
cgtgtctccctctgcctggcggcagtcacggccaagaccttcactgcctggtgtaactcccacctaaggaaagccggcacccagattgagaacatcgagg

SEQ ID NO: 856417 - DNA, 98 bp, Homo sapiens
tatgttttagctacaaacatttatctaagcctgcctagggtagttaaaagacgagtgaatgctctcaaaaacctgcaagttaaatgtgcacagataga

SEQ ID NO: 856418 - DNA, 100 bp, Homo sapiens
ctggcgggcggcgcgcgcggctgcggggctccagggccgccccgcccgcaggtgctatgctgtgggccccgctcagggagccttttggggactgatccta

SEQ ID NO: 856419 - DNA, 139 bp, Homo sapiens
tgcagacccatggccgagcgcggggaactcgacttgaccggcgccaaacagaacacaggagtgtggctagtcaagcctaaacccaccaagggacgaatgcgcatccactgcttagagaatgtggacaaggcccttcagt

SEQ ID NO: 856420 - DNA, 100 bp, Homo sapiens
agagaggaaacttacccaagaaaccacttatccaaatacttacatttttgacttgtttggaggtgttgatgttttccaacctattggtggtatgtctgac

SEQ ID NO: 856421 - DNA, 98 bp, Homo sapiens
gattggagacctacaaagtgaatgaggttgagcgtctgatccaccatgtaaaggtccagatagtctccaaaaaagtgagctacagccatattcagtcc

SEQ ID NO: 856422 - DNA, 100 bp, Homo sapiens
caaaggagtcaggaatggcttttactcaggagtacttcttgcaagcagagctgacaagcaacgtcttaaaaacaggcgtggtgcgctgctgcgtgggaca

SEQ ID NO: 856423 - DNA, 98 bp, Homo sapiens
actcctcatcaccatccacgaccgaaaagaattcgctaaatttgaggaagaacgcgccagagcaaaatgggacacagatgctcacaactgtattcctg

SEQ ID NO: 856424 - DNA, 99 bp, Homo sapiens
gacaattgaagctcaagcagagcttacagtgcaagggccacccgttcatcgtgcagttcaatgatggaaatgccgccgtggtgtccatgtgggtgtgcc

SEQ ID NO: 856425 - DNA, 98 bp, Homo sapiens
gcagctccctgcatatctgaagcggctcccagtccctgaaagcattaccgggttcgctaggctcacaggatggcacatttcctagaggcagaatccta

SEQ ID NO: 856426 - DNA, 125 bp, Homo sapiens
ctcatgcatatgctactgctgactgtgaccttggagctgttttaaaagttaggcaagatctggtcaaaggagaccaagacacattccaccccagtggggggtcccataccactcatggatctgaa

SEQ ID NO: 856427 - DNA, 100 bp, Homo sapiens
gcaacaagtgtctttggttataaattatgatctacctaccaatcgtgaaaactatattcacaggatggacactccacagctgaccttgactgaactccgg

SEQ ID NO: 856428 - DNA, 99 bp, Homo sapiens
tcacttgactaatcttcgggcagagagaaggaaacacttagaggaagttctggagatgaagaactgcaagcacatgttgaccagataactgaaatggca

SEQ ID NO: 856429 - DNA, 50 bp, Homo sapiens
caagaagcagcctccacaaattgaaaggaaatctgaaatagagtactatg

SEQ ID NO: 856430 - DNA, 100 bp, Homo sapiens
tcaggcgtgcgcggacggtgtgcggaatagcctaacatggcagaccagagacagcgctcactgtctacctctggggagtcattgtaccacgtccttgggt

SEQ ID NO: 856431 - DNA, 100 bp, Homo sapiens
cttagcggccgccgtgaccctctcggggatcccacgatgttcttctacctgagcaagaaagtgctggagaatctggtaaaagcaccattgtgaagcagat

SEQ ID NO: 856432 - DNA, 101 bp, Homo sapiens
ggggcttcctcggtggcgggcatggaggcttcgcgctgccggctcagtcccagcggcgacagggtgaggtggctttgaccccgggttgcccggccagcacg

SEQ ID NO: 856433 - DNA, 100 bp, Homo sapiens
gtgcgacaagacctgtggcagtgtgctgcgcctgcaggactggcgctgcctctggtgcaaggccatggttacactcctcttcctgggtccaattattcag

SEQ ID NO: 856434 - DNA, 100 bp, Homo sapiens
tgataaaatttcatggagaagaaggccttgactacggaggggttgccagcgttacagtgtttctgccacctctgtacaaaagacaattttacttgtgtga

SEQ ID NO: 856435 - DNA, 99 bp, Homo sapiens
ggaaaccttttaaacacccaagcaacttggagcttcacaaacggtctcatacagaagtccatccactactgggtgtgaagggggatggcaaatccaaga

SEQ ID NO: 856436 - DNA, 99 bp, Homo sapiens
tcaaggaaacctttccaacacagatgtccaagctgccaacctatatatgcaaacagatttgcagtaccaacctatgcagccaagcaacctcagcagttc

SEQ ID NO: 856437 - DNA, 100 bp, Homo sapiens
ggggctgcggtcggcaaggaagcggagggggccggagaagagagctctggggtcgacacggtatgtcaccacgccgactgccagcagctgcaccgccggg

SEQ ID NO: 856438 - DNA, 98 bp, Homo sapiens
tcaaagattctttgtagcagacactgcaaatgaagctctcgaggctgctaagagactaagtgctttggaaataccagccagctcatgcatcttaagat

SEQ ID NO: 856439 - DNA, 100 bp, Homo sapiens
aagacttcatcacctctttgtacatcttctgcaattactcgttggaatcgaagcctcttaaaatggcagatgacttggacttcgagacaggagatgcagg

SEQ ID NO: 856440 - DNA, 98 bp, Homo sapiens
gattcagtgaaagcagcaaagaaggaggcgtcactttcacttgggtggagaaggacatcagcggatgcaacctgaagatcttcaacaaccaggagttc

SEQ ID NO: 856441 - DNA, 100 bp, Homo sapiens
aaagtatgttgttctcagctacttgggactcctctctcaagagaagctgcaagagcaacatctttcctcaccccaagatcaggagaacctcagtctgacg

SEQ ID NO: 856442 - DNA, 101 bp, Homo sapiens
atctgctgctgcctcttcatcctcttcctcttcctctcggagctcaccggatttataacgacagaagtgaatactcccccagttgcaagaggcgcaggacc

SEQ ID NO: 856443 - DNA, 98 bp, Homo sapiens
agaaaaatgaagatggaacatggccaaggggtccttctactcctaaaccaccgctgaaacttcacttctacacagaggctttctttcccagaaaccca

SEQ ID NO: 856444 - DNA, 99 bp, Homo sapiens
tttgatgagaactcagctgtccagctcacctccgcctccaggaagaccagactcccacccttccacacctccagagcagtgggacttcctcctgccctt

SEQ ID NO: 856445 - DNA, 100 bp, Homo sapiens
ggggactgatctcaagacctcatcacatcctgaaatgcttcatgggatggcccctcagcaaaagcatgggcagggtcaaaagggagaaaatggaagacag

SEQ ID NO: 856446 - DNA, 98 bp, Homo sapiens
gaaaagagaccgagtggatcatatcctgggtacagctctgccggggggggaaaaagtggtaccattttgggcgttcttgagcttcagaatgcaaccag

SEQ ID NO: 856447 - DNA, 100 bp, Homo sapiens
catgcgtcgtcggcctctgggcagcaggcgcctgtgtctggcagagctggtgtgagacgagacaatcctgccccgccgccgggataatcaagagttttgg

SEQ ID NO: 856448 - DNA, 99 bp, Homo sapiens
cggaggcgtcgcgggagcctttggggcaccacagagatgcggggttttggccaaattgggcgagggcacaaaataaccacttaccccttctcaccgagg

SEQ ID NO: 856449 - DNA, 100 bp, Homo sapiens
accctgagcgcaccctggaccccaactcagccttcctgcataccctggaccagcagaaacctagagtgggttcgggtttgtcacgtttgagagtgaggac

SEQ ID NO: 856450 - DNA, 100 bp, Homo sapiens
gctcagagatccaagtgcgcgccctggcgggtccggaccaagtgaatggtagtgtctagaaagggtatgtcccttcaagagagaggtgccaatgtccaac

SEQ ID NO: 856451 - DNA, 100 bp, Homo sapiens
agaagaggaggatgcggctcgtggtggatggcatggggcgctttggcagctgttcagcccctcggtgaccgtgcccgacatgagcctgcctgaccttgac

SEQ ID NO: 856452 - DNA, 100 bp, Homo sapiens
agacagagtactgggagcacatattcttggaccagaacttgtcgagatggtaaaagcaaagaaagctgctcaagaacaagtgctgaatgcaagtagagcc

SEQ ID NO: 856453 - DNA, 98 bp, Homo sapiens
tctccgcggcgcacctcgcggcgagaatccggaggagaaggagactgcaaggataggcccaggtctcctctgagcctccggcctccataagacccaaa

SEQ ID NO: 856454 - DNA, 100 bp, Homo sapiens
ctagtggcttcacatttcaacctgaaagaaaaggagtattttggaataacattcatagatgacactgctcagtgtcttgtggtgttggagtgatgcagag

SEQ ID NO: 856455 - DNA, 98 bp, Homo sapiens
gtcttgtggatatcagagaagaagaaacagagggaggcagtcgaagactctccctccctggattgttgtcacaagggcaaacttgaagataaatcttt

SEQ ID NO: 856456 - DNA, 99 bp, Homo sapiens
tggaatattggggggctcggctgcagacttggccaaatggacgggactattaaggatctgacggcattagccaaagaactaagagaactccggattgaa

SEQ ID NO: 856457 - DNA, 100 bp, Homo sapiens
cacaaggagctgatggccgctgacaggggacgcagacgtatgaccttagcagacattgaacggattgctcctctggaagagggaactctgccctttaact

SEQ ID NO: 856458 - DNA, 100 bp, Homo sapiens
acttctctgtcgacggctatgacagttctggatacctgcccactatgtctatccgcaggcttttgtgcagccgggagtggtcattccacacgtccagccg

SEQ ID NO: 856459 - DNA, 98 bp, Homo sapiens
aagatctgatttataccattataccagcaaagagaatgtatttccttttctaaatccttgttaagcaacgttgcagtattttacagagctagcccaag

SEQ ID NO: 856460 - DNA, 99 bp, Homo sapiens
gaagcatgaaactcagtctctcgccctggatgcatgttctcggaaaatgcttggacagaagagatgagtactatttccactaaggcctagaattgccta

SEQ ID NO: 856461 - DNA, 100 bp, Homo sapiens
atatcctgcagaagaaaatggatttcgttatatcccctttagaatatatcagatgatgaaacatgcttggaataattataaaggttatgcctggggatta

SEQ ID NO: 856462 - DNA, 98 bp, Homo sapiens
ctttccacgacggtgacacgcttccctggattggaacactgagctgaaggttgaagtggagagcttgaaacgagaactccaggacaagaaacagcatc

SEQ ID NO: 856463 - DNA, 98 bp, Homo sapiens
tctggagacctgggtgtgggtcaagcaaccaggacttctgcacggacctggccgtctccagtgccaacttcattcccacggtcactgccatctcgacc

SEQ ID NO: 856464 - DNA, 100 bp, Homo sapiens
ctctcaggacttccggtcgccatgatggctgtgggcggtaaacgcggttagtgcaagcatctgggccatcttcaatgtatttcaggacagccaggagggg

SEQ ID NO: 856465 - DNA, 100 bp, Homo sapiens
cggcccctgcacgtccgcaaccttctcagcgcctatggcgaggtcggacgcgtcttctttcaggctgaggagcctctgcccctcccgagacacccgctac

SEQ ID NO: 856466 - DNA, 100 bp, Homo sapiens
ggtccacctgatcctgcccaagattaaccgagccccaagctttggaactgatcagaaaatagactatgatgtaaaaaggggagtgctgctaaatgcgttg

SEQ ID NO: 856467 - DNA, 100 bp, Homo sapiens
tgaacagtcctgtggaaaggccaagcagtgaccaggaagagggagaaacttctgctcagcgggtcacagaaagtcgagagagccaaatgacgattgagga

SEQ ID NO: 856468 - DNA, 99 bp, Homo sapiens
ggggccaccggctggagcggatcccacacctccggaccgagggacgcggatgacacccccaaccatggttgtgaagatgctagcgacacatcgctgttg

SEQ ID NO: 856469 - DNA, 100 bp, Homo sapiens
agaaaaaagtctaccatacaaaccagaccaccttcataattggagaaacaccaaaaggaatccgcagaggaccattcttagtggcactggggaaatcttg

SEQ ID NO: 856470 - DNA, 99 bp, Homo sapiens
cttcaccacaaaagcgaaatgggcacaccacaggtggttgtgtcaaaccgattggtgacatctccatgctgtattgtcacaagcacatatggctggaca

SEQ ID NO: 856471 - DNA, 98 bp, Homo sapiens
agaagaccgaagggaagacttccagtagctccaaggaggttaagttttttgctccactcaagcctgttagaatcaccatggaatacagctccagtggg

SEQ ID NO: 856472 - DNA, 100 bp, Homo sapiens
cttgggaaccgctcgagcctaccaggttctgtttacagaggaagatgtgaaattctacctcgcagaactggcccttgctttggatcatctgcaccaatta

SEQ ID NO: 856473 - DNA, 100 bp, Homo sapiens
ttgtgataacagtaactgccataaagcaggtggcagggcccagccccgaaccagacaagggacccctcaaggagcttcattctagcaggagaaaattgag

SEQ ID NO: 856474 - DNA, 100 bp, Homo sapiens
aggagatcactgccctggcacccagcacaatgaagatcaagtcttactactttgaccgcgatgatgtggctttgaagaactttgccaaatactttcttca

SEQ ID NO: 856475 - DNA, 100 bp, Homo sapiens
aaaagatgaacctttggagtttaaaagggttctggacaacatcaaacttcagcgcctgctcctggtcatcactaaccagatttacttggagtacatgtga

SEQ ID NO: 856476 - DNA, 99 bp, Homo sapiens
gagaagcctgaaaagtcgcagcgagctggagccgccggagaaagtatgctgaggccttggattaccaccgtcaggcactggtgttgattcctcagaacg

SEQ ID NO: 856477 - DNA, 99 bp, Homo sapiens
acctccggaccgagggacgcggattcacaatgacatcctttcaagaagtcccattgcagacttccaactttgcccatgtcatctttcaaaatgtggcca

SEQ ID NO: 856478 - DNA, 98 bp, Homo sapiens
aaaatgatgcttaatatcgatggctcaggctgcacgaagaaaaggttattaaagatagacgtcatcatctcaagacctacccaaactgttttgtcgca

SEQ ID NO: 856479 - DNA, 100 bp, Homo sapiens
catgtccctcatcatcaataccttctattccaacaaggagattttccttcgggagttgatctctaatgcttctgatgttgggcttacttggggatgaaca

SEQ ID NO: 856480 - DNA, 100 bp, Homo sapiens
tctctggacccctcccaggagggacccacagggctgaaggaagctgccttgtacccacatctcccgccagtgaagcgtgacattcaggaaaacgatgaag

SEQ ID NO: 856481 - DNA, 100 bp, Homo sapiens
aagaaaaaacttgatttggtgactgcaggaagcaacacgttgctgcttttattctacagataatgggctgaagtgcagtagtggagtagcgcaatcatgg

SEQ ID NO: 856482 - DNA, 99 bp, Homo sapiens
aggtgcagaaggagcaggccgataaggatatgggccctcacattttccaaacctgtccatctgctaactattttgactgcagagccatgtccattggag

SEQ ID NO: 856483 - DNA, 99 bp, Homo sapiens
acggcgaggccctcatgtaccacacgaaaaatatgtcgtaactgcaagtgtggccaagaagagcatgatgtcctcttgagcaatgaagaggatcgaaaa

SEQ ID NO: 856484 - DNA, 98 bp, Homo sapiens
attgtagaaactgtctttaacctgagttatggtgaatggttgcatggatttgaaaaaaaggcaaaagaatgtatggctggaacttcagggtcagagga

SEQ ID NO: 856485 - DNA, 98 bp, Homo sapiens
aaggcatcctgtaggataagtcaaaggaggaatttgcctcttctacagatagagctgttaaggaggaagaaggcacctacgatcaaactctggagttc

SEQ ID NO: 856486 - DNA, 99 bp, Homo sapiens
acaacttccagctggagagcgtcaacaagctgtaccaggacgaaaaggctgcctggagttgggagaggagcaatacaacacccctgtagccaccaccac

SEQ ID NO: 856487 - DNA, 100 bp, Homo sapiens
ttatcttctgctgttactgacctcaacataataatggagcccacagaatgctcagaattaagtgaatttgtgtctagatcattcccagtgaccccttctg

SEQ ID NO: 856488 - DNA, 99 bp, Homo sapiens
ttgacacggatatcacctttgccactgacattgcagagctgtgggctgtgttccacaagttcaaagtactatactggcaattgctggagaagattttgc

SEQ ID NO: 856489 - DNA, 100 bp, Homo sapiens
gctgatcgcagtccggaggtgaggcggaactctgagtgagcaagaagaacccatcaggtgattgtcaggcctctgagcccaagctaagccatcatatgcc

SEQ ID NO: 856490 - DNA, 99 bp, Homo sapiens
tagatttgaagcgcttcaaaggaccggacccagagaagaggaaaactctaccggtgcagtacgaggatgtcgtccaggaaagattgtgcagatgactga

SEQ ID NO: 856491 - DNA, 100 bp, Homo sapiens
ggggacccagctcttcttgcagccactggaagctgatcacctggagtgaagacctcacacgtttctgacgtagaagagcttacccctccagagcatcttt

SEQ ID NO: 856492 - DNA, 98 bp, Homo sapiens
tatcactggccggaaccgctccttggaaggtcgctgggaggtggcattcaaaggacgtagacaagtttggcaacgagatcacccagctggcccggccc

SEQ ID NO: 856493 - DNA, 100 bp, Homo sapiens
aaatgaaactggtgcacagatataaagaaatgttcaacgttgctggccataggaaaaggatacagagtagagtttcatgaacctgaaacttggtggaaat

SEQ ID NO: 856494 - DNA, 100 bp, Homo sapiens
cgtggatgtaatgttggagaactatagtaacttggtgtcactgggcatcctattttcattggtggtgatgctgtatgtcatctgggtccaggcagtggct

SEQ ID NO: 856495 - DNA, 100 bp, Homo sapiens
aaacatctgaccctttgaagattctggccaacgcagacaccatgaaggtgctgggagtgcagcggcctctcctacaggcattgtttccaagtcgtacgag

SEQ ID NO: 856496 - DNA, 100 bp, Homo sapiens
actttccaagtttgaagttggagatgctgaaaatgttgcttcatatgagagtgaaaaggctctcagtgtctgagttaaatgaaatcctggaagaaattga

SEQ ID NO: 856497 - DNA, 100 bp, Homo sapiens
aacactgcagaactaacagatctcttaattcaacagaaccatattgggagtgtgattaaggaaacagagcaaatgcagcgttacaatcaaagacttattg

SEQ ID NO: 856498 - DNA, 98 bp, Homo sapiens
tcatcctcccaagtggctgggattacagaagcatccccagacatccagttcaggagatccttgtcaagatggtatattcatttcaggacagcagaact

SEQ ID NO: 856499 - DNA, 100 bp, Homo sapiens
gcgaagccttgaaaaagctgccctgagacggtgtcccgccgaaagaatttcgctaaggagtttgtgatcagtgatcggaaggagctggaggaagatttca

SEQ ID NO: 856500 - DNA, 98 bp, Homo sapiens
gacatctggcagggtggggtgtgtcctcagaagatggcagctgctgtcacgtgtagcttttcccatgctgttccatttcctccaagtcaccggcttac

SEQ ID NO: 856501 - DNA, 100 bp, Homo sapiens
accgagccgtggagtatctgctcacgctgctaatccagtgtttccacgtcgtgctggcctcccacctgcaggacgagttcaccgtgcaaatgcaagcggc

SEQ ID NO: 856502 - DNA, 100 bp, Homo sapiens
aattgtggcagagtgtaatgctgtccgccaggccctgcaggacctgctttcggagtacatgggcaatctgaatttgtgatcagtcttgctgagaaaaata

SEQ ID NO: 856503 - DNA, 98 bp, Homo sapiens
gaaaagaggtgctgaaattattgtttgcacacctggtcgaatgattgacatgttagccgctaacagtggaactcaccttcgaggcttggaaaccacag

SEQ ID NO: 856504 - DNA, 100 bp, Homo sapiens
aatggcacaaagttctctcgatcagggcatacatctttcttcgacaaagggatgatccactcacaaatctgaatacggcttttgacgtggcagagaagta

SEQ ID NO: 856505 - DNA, 122 bp, Homo sapiens
tggagatgacaaaggcaaaattgtttattcttctctggatctagaccaggatatgggccctcacattttccaaacctgtccatctgctaactattttgactgcagagccatgtccattggag

SEQ ID NO: 856506 - DNA, 100 bp, Homo sapiens
gacaacttcagtgggcatcgagatgacggcatggaggaattcagcttagagaactatcaacacaggacaatgcaagcccatgagctgttccggtattttc

SEQ ID NO: 856507 - DNA, 99 bp, Homo sapiens
ggaaatcagccctggacctggcagatccttcagcaaaagctgtccttacagattccgaagaggctcaatctgtaaatccttctagtgttgatgaaaata

SEQ ID NO: 856508 - DNA, 100 bp, Homo sapiens
cccaggacactgtccggatcttccctccctgtgttctttcagaggaccaagacagttacctgtgtaatgtcaccttgtttaggaaggcagttgatgactt

SEQ ID NO: 856509 - DNA, 50 bp, Homo sapiens
cagaaggtcaacgccgcaggcacaggtgccgtgagcgatgtggagatgca

SEQ ID NO: 856510 - DNA, 98 bp, Homo sapiens
gccagactctgcttaaaccaagaaacagtatgtttagcaagcactgctatgaagactgagaattgtgtggccaaacctgattacatcaaccccagagc

SEQ ID NO: 856511 - DNA, 100 bp, Homo sapiens
ggcgaggagcatcccttctatgacagggttcagactaggcaatgtggtacatgctatacaggcaactgagcagagcattcatgccactgacctggtacct

SEQ ID NO: 856512 - DNA, 100 bp, Homo sapiens
taccgagatgcggttttcctcgcagaacgcctttatgcagaaggtgatcctgctatctgggctgggctaatggcagcctgtcacgctgatgataaactgg

SEQ ID NO: 856513 - DNA, 98 bp, Homo sapiens
aaaaagcctggtgagactttcttcatgtgttcctgtagctctgatgagtgcaatgacaacatcatcttctcagaagggtgtgctgatctgcaaaccct

SEQ ID NO: 856514 - DNA, 98 bp, Homo sapiens
agtgagctgtccctgctggaggagcgcttccggatattatgccttagaagtctcatatttcaaatcctctttggatcgcaaattgcttgagctgttgt

SEQ ID NO: 856515 - DNA, 98 bp, Homo sapiens
ttgaagtggaaaatcaagctaagcgcctactagagcagggtttggagactcaggcattccgcgagttatccaatgtaaatttagacttcccctaaagt

SEQ ID NO: 856516 - DNA, 99 bp, Homo sapiens
agaagatggctgccccagcagtgtccgggctctcccggcaggaaggaaaatcacctcggcagtgtttgaaggaaggatactgcaactctttgaagtacg

SEQ ID NO: 856517 - DNA, 98 bp, Homo sapiens
ctcgccggctccggcttcctctggcccaggcgccgcgcggacccggcagctgtctgcgcacgccgagctccacggagactttgaatgtgattgatcct

SEQ ID NO: 856518 - DNA, 100 bp, Homo sapiens
gcagaaagacttgaaggcgtatacaggaacaatattgatgatgtagtaaggtactggcttccctcctggacatggtttatcgaagtgatgagaaggagaa

SEQ ID NO: 856519 - DNA, 100 bp, Homo sapiens
gacacttcaggcatctgcaacctccgtggcagtaagaaagaggatccacctggttcatgaaccctccctcactgctctctgcacatcacggccacacagc

SEQ ID NO: 856520 - DNA, 98 bp, Homo sapiens
gcagtgcctggacactgcacagcagaatttatagaggaatgttatgaaaacctggccttcctggcctttggccaccactcaacctgcaaagacttcaa

SEQ ID NO: 856521 - DNA, 100 bp, Homo sapiens
gcggaactggtgtaccctggtggacgtgcacccagaggaccaggcggcggaccaagaatcgccttcagccctgtctggtgcatccttggcagaaagtgag

SEQ ID NO: 856522 - DNA, 98 bp, Homo sapiens
agctgggcgacggcgccttcggcaaggtttacaaggaagaagctccatgggcactggtctcagtggtgggaaacgtcctagtcaggaagaggacacac

SEQ ID NO: 856523 - DNA, 98 bp, Homo sapiens
tgagtggagtgagttggagaatctggtccttaaggatatgtcagatgagatggggtttgaccttgttgtccaggctggtttcaaactcctgagttcga

SEQ ID NO: 856524 - DNA, 99 bp, Homo sapiens
tggagacacggccagatctgccctccagtgaaaggaaagcaagccaggatggatatttacgacactcaaaccttgggggttgtggtctttggaggattc

SEQ ID NO: 856525 - DNA, 100 bp, Homo sapiens
ggagttcaacccagaaatccaggtttcccgcatccgatgtggactcagccactttgctgcactgaccagtgctggagaatctggtaaaagcaccattgtg

SEQ ID NO: 856526 - DNA, 100 bp, Homo sapiens
tcaagagataacaacaaatgttatgcaaaaataatctgtaatactaaagacaatgatgaccggaaagaagggatgaccgcgtttgtggaaaagagaaagg

SEQ ID NO: 856527 - DNA, 100 bp, Homo sapiens
gcgtctgccctggagcagttcgtgaacagtgtccgacagctctcagctcaaggggacggcaaaacagaacagaaaggcggagataaaaagaggggtgtta

SEQ ID NO: 856528 - DNA, 98 bp, Homo sapiens
tcggattaaggaataatttatgaagctccgttgactaccgtggagagatcataatttggggttcaagattccagtaatctatgccagcaattatgaca

SEQ ID NO: 856529 - DNA, 98 bp, Homo sapiens
caagcggcgccgcgccctcggcctgcacggccttccttgaatccagaagctggcaaacagcatcagccatgcagacctattgggacaccttctggagt

SEQ ID NO: 856530 - DNA, 100 bp, Homo sapiens
ccacatcgtgtacagctcaaaaaagctaatagatcagttaaagcccggaggaagattgatattgcctgttggtcctgcaggcggaaaccaaatgttggag

SEQ ID NO: 856531 - DNA, 98 bp, Homo sapiens
aatggtttcaccattgcagacccagatgatagagagtacccaaaggcaagtggaacagctctaatggggttgaagaaaaggagacttgggtggaagag

SEQ ID NO: 856532 - DNA, 98 bp, Homo sapiens
gtcatccacaagctctcctttggggacacgctacagtccctctgtcgtgaaatcaagcaacgacgtcgaggagttgcctccattctgcgactatgcca

SEQ ID NO: 856533 - DNA, 99 bp, Homo sapiens
tgatggcggctatagctgcatccgaggactgaaagaggtgtccccactgcctctaaatctcaaacgtttatacaaagagacactggaaattgaacccat

SEQ ID NO: 856534 - DNA, 98 bp, Homo sapiens
aacctcggagcttatactcctcccagtgacgggtctggagtgcgtgggggaccggctgttggcgggtgtgagatgcacaatgcgaaacctaggcccca

SEQ ID NO: 856535 - DNA, 98 bp, Homo sapiens
gacgagaaccagagaggagacgactttcttctccaagaactgataatgctatcaagaaccactggaattctacaatgcgtcggaaggtcgaacaggaa

SEQ ID NO: 856536 - DNA, 100 bp, Homo sapiens
attgtggcctgaagcctccagcgtccacacgaaaccagatttgcctgaaaatggctcggccaagttcaaaatgctatcttctttgagaagtcaaattgtc

SEQ ID NO: 856537 - DNA, 98 bp, Homo sapiens
tcccagtcggtggaggtataaataactacatgtaaaattaatgcagttcccgtgttatagttttgccgctggactcttccctcccttcccccacccca

SEQ ID NO: 856538 - DNA, 100 bp, Homo sapiens
tggacggtgtgagggggaccgggagaggcaccaaatctggcctgggggcccgagaagcttcctctcagattccaccttgaagatgttttctaaagaatca

SEQ ID NO: 856539 - DNA, 99 bp, Homo sapiens
gcagcaaagaagtgctatctggaaagagagaacatctaaatatattgctgtttgggttagcacaaaacctgcagaaagctctttcaaaagttgacatat

SEQ ID NO: 856540 - DNA, 98 bp, Homo sapiens
cctaacctgatcgcaattgggtctagtgaatctgcacagaaggcccttaagactgggccagtgccattcgcgtcgcagctctggactgcatggaagag

SEQ ID NO: 856541 - DNA, 100 bp, Homo sapiens
aaaggttcactactagtaaactgcagtcctttgaggatttagccagtatttctacctatggctttcgaggtgaggaatctttgtctgaagtggaagaaaa

SEQ ID NO: 856542 - DNA, 98 bp, Homo sapiens
gggcttcatcaactacctcacgagggaagtgtaccgctcctaccgccagctgcggacccagggctttggaggttgttcaaggctacaagcccccgggg

SEQ ID NO: 856543 - DNA, 100 bp, Homo sapiens
tctctcagaagttgcatcattagccagtagtagttacctgactgacattgaccgcatcgccacaccatcattcgtgcctacccaacaagatgtgcttcgc

SEQ ID NO: 856544 - DNA, 98 bp, Homo sapiens
gccactttgcattgactggaaacaatggcatttacagaaagagtcaacagcagtggcaacagagagtcccacgaactggctgggtatacagaaatgtc

SEQ ID NO: 856545 - DNA, 99 bp, Homo sapiens
cgacggcggaacccgtgggcctgtggactgcagcctcggcggtcagcagatctcttacctcagctagaagctccgagttctcttactcccagcagtgaa

SEQ ID NO: 856546 - DNA, 100 bp, Homo sapiens
tttcccaagagcagcggaaaatgatccagtcacaggggcaacttggtagtacccagagccaaggacttgtaccctgtgtaatgtttgtgctgaaggagat

SEQ ID NO: 856547 - DNA, 100 bp, Homo sapiens
agaattgcacttggaggacaaggtaacacgtacacagacctctcggccggaatctccagggatgaccagcccctccccacgcatccagataatctccacc

SEQ ID NO: 856548 - DNA, 98 bp, Homo sapiens
ttggaacccattggaaatgtccatccagttgggagctatgagtcctctgaaatgaacagcataatcacacgcgctgcaacgtgtggattctggatgga

SEQ ID NO: 856549 - DNA, 98 bp, Homo sapiens
ctggagacatgagcaagaaaagcctctgggagcagaagggaggctccaagacctcatcaacaattaagtgccggtggtggtgtgcacattgagccccg

SEQ ID NO: 856550 - DNA, 100 bp, Homo sapiens
gacagtttgaatatgcactctttggaaaattcccttatcgatattatgagagcagagcatgatcctcttaagggatattgacggccaagcactcctgctt

SEQ ID NO: 856551 - DNA, 100 bp, Homo sapiens
acccactgaggcacccggacctcgtcaggccgctgcagatgaccattccagagacttccttcatataggagctggaggacacagcacattggaaatcaag

SEQ ID NO: 856552 - DNA, 100 bp, Homo sapiens
gacgccaggacccactggaagcctagaaatgatgagaagcccaaggtcaaccccaaactctacatgtgtgtgtgtgaaggtctctcctgcggtaatgagg

SEQ ID NO: 856553 - DNA, 101 bp, Homo sapiens
gtccgacctctacaactgggaggtggccatcttcggaccccccaacaccctctacgaaggcggctacttcaagggttacacatcattttggaatgactgta

SEQ ID NO: 856554 - DNA, 129 bp, Homo sapiens
acaagagcttcatctgcgatggacagaataactgtcaagacaacagtgatgaggaaagctgtgaaagttctcaaggtctctcaggcagctgcagagcttcaacagtactgtatgcagaatgcctgcaag

SEQ ID NO: 856555 - DNA, 99 bp, Homo sapiens
cagcatcttggctgaccttgagtgcagctccccctataagcctcggcctccacaggcactaggaagcttttattttcttcatgagtccttaaaaaacat

SEQ ID NO: 856556 - DNA, 114 bp, Homo sapiens
ttgaccccacttccaaggaagaccccaagttcaaggaactggtcaagattgaaaaggccaaacctattaaatgtggaacatttggtgcaacatctttacagcagagatatttag

SEQ ID NO: 856557 - DNA, 101 bp, Homo sapiens
gcagcttcaaggtgacatcaccacctcattcccatggtttggcatggacatcggtggaacgctggttaaattggtgtatttcgagccgaaggatattacag

SEQ ID NO: 856558 - DNA, 98 bp, Homo sapiens
ccctctgcagcctctctgacaagtgggcatccgcttcgatcctgaaattccgcaaacactacgactagagtttgctaaggcaaacacgaagatggcca

SEQ ID NO: 856559 - DNA, 136 bp, Homo sapiens
cttggctttggaagtggtaactctttgggtgctgctataggctcagccctcagtggatttggttcatcaggatgacacagcaagaaggccctcaccagatgctgagcagatgccggcaccatgcctgtggacttcc

SEQ ID NO: 856560 - DNA, 100 bp, Homo sapiens
cggggcctggaggaaagagccatccctacggaatccattaccgcccagtggttcccagacacaggtaatcttgggcacctccaagagcaaagtttaggag

SEQ ID NO: 856561 - DNA, 123 bp, Homo sapiens
cagaactgttctcaggactcattattttaacatttgggagaaacacagccagaaggtgtcacaacataatgaaagttgctcaagccaaactggaaatgataaaacctgaagaagtaaacttgg

SEQ ID NO: 856562 - DNA, 100 bp, Homo sapiens
cgatggcctagcacgtggaattcgcgaagctgccaaagccttagacaaggtgctgttggcccaaaggttgccctgaagccccccatccagaggaagcaag

SEQ ID NO: 856563 - DNA, 100 bp, Homo sapiens
gctcacctgcgctgtgatgcctgcagagctgtggcttaccaggcttctgggaacttggcagacgcagcttagagagactcaccagcgagcgtcattgttg

SEQ ID NO: 856564 - DNA, 100 bp, Homo sapiens
gagactatagattacaaggacccgtgtaaagccggttctcagaggcactgtgactgacttccctggatttgatgagcgggctgatgcagaaactcttcgg

SEQ ID NO: 856565 - DNA, 100 bp, Homo sapiens
atgtgactgtaaatgcgcgcaactcagaaggggaggtcacaggcaggttaaaagtcggcttcctgtttgatgaagatagcaacggaaaactcaaaatggt

SEQ ID NO: 856566 - DNA, 100 bp, Homo sapiens
tccactgccaaaatgcagctcttacagaaatgtgtcttgttgcatttggtaatttagcagaacttgcctgactggcagccctatttgccacagaacggag

SEQ ID NO: 856567 - DNA, 100 bp, Homo sapiens
tctgataggctacatcgcggcatgagatgaagctgtgacaggtctatgctccatcagcaagcactgccgactacaatagggactcgccaggctatccttc

SEQ ID NO: 856568 - DNA, 99 bp, Homo sapiens
aatcagacctgctcacacttcagaatagagaaggctctccccttgtagtatctttaattggtgcacttttacgtgattttcccaatcgctgggagtact

SEQ ID NO: 856569 - DNA, 100 bp, Homo sapiens
cgggacagggatgtctacctggtaatagaggacttgaagcagaaagcaagtgaatacgagtcagaagatggacctccagttgtagctcattatgatatgt

SEQ ID NO: 856570 - DNA, 100 bp, Homo sapiens
ctgaggtcaaggagaaattgaactaaactctcctttgaagactggcgagtgaacgtgaaaaatgaagaaattgatgaaatgatcaaggaggctccgggtc

SEQ ID NO: 856571 - DNA, 98 bp, Homo sapiens
tttggaactgtcaggtacctcaaagcgacagaatgacttggaagataacggagcttcgaagcttctagcagaatatgaagtctttcgtcttcagctac

SEQ ID NO: 856572 - DNA, 100 bp, Homo sapiens
tgagcagctgggaaatttcactggcctagtgggaggtcctgactttgcccactgtctgctgctcttttgaaacagatggtcaccatgtttagatattagc

SEQ ID NO: 856573 - DNA, 98 bp, Homo sapiens
cctcatcacccatctggagcaaggaaaaaaaccttcgactatgcagagacatgagatggtagccaacccctcaggaattattttaggaccaggaagca

SEQ ID NO: 856574 - DNA, 98 bp, Homo sapiens
gaactactaggacgaagaatattgtttcaggcacagagtcccattcagcagctcctctggtgcaagtgtggtagctattgacaacaaaatcgagcaag

SEQ ID NO: 856575 - DNA, 98 bp, Homo sapiens
gtaagaagaaaaagagcaaagataagaagagaaaaagagaagatgaagaaacccagcttgatatgttggtacctgtataagaatgaaatccatgcact

SEQ ID NO: 856576 - DNA, 98 bp, Homo sapiens
tgaaaaatgcctgcacagccatactgtcggtggagaagagatggttctgtgaagggaaagaactgcacaacactcctgatattcaaatccactgtgag

SEQ ID NO: 856577 - DNA, 100 bp, Homo sapiens
tctttcttgacctttgtaaaaggaacagagttcagaggcagcagaaactggagttagtgaaaatgaagagaaccctgtgaggattatttcagtcacacct

SEQ ID NO: 856578 - DNA, 99 bp, Homo sapiens
gatcggtgggtttatctcaaggcctgagtagccggtaacaaacgagggttcccgggattggaccgacgcagccatgcacccccccaggcagcagcagca

SEQ ID NO: 856579 - DNA, 99 bp, Homo sapiens
atacctttgatctaagggttcagcctttcaatgtgacacaaggaaagtattctacaggttgttggtgtagcccaggccatcaacaagaaatcaggaaac

SEQ ID NO: 856580 - DNA, 100 bp, Homo sapiens
aactacgaatgaatgtccatccccagatacttctcaaaatacttgtaaaagtcctccaaaaatgagcaagattgtagaaggcatgaaacaaaaaatgtgg

SEQ ID NO: 856581 - DNA, 100 bp, Homo sapiens
ctgccattgcataccaggaacttcaatctatcctcaggagagacacagcataagagttcctgaatcgggagaacattatgaactgcatcttttgcactac

SEQ ID NO: 856582 - DNA, 100 bp, Homo sapiens
ggtggctatgtactttcacagcaaccagcttagtgctatcattgacttggtctgttccactttggggatgaaggttgttcggaatcctataattgaaaaa

SEQ ID NO: 856583 - DNA, 99 bp, Homo sapiens
ttcagaatgctaagcaagtaaacagtgcacttaaacagaaaatggaaggtggaattgaagaattcaaacctcctgagtgttcccagctgttagatgaaa

SEQ ID NO: 856584 - DNA, 100 bp, Homo sapiens
tgatcattgaaggagacttggaacgcacagaggaacgagctgagctggcagagtcctgtaagaaaagcctggagtgcacgaagttgtgcctaccccagat

SEQ ID NO: 856585 - DNA, 98 bp, Homo sapiens
caggcataaaatcatctccatattctcaggcacagagaaagttggatatgtcaagtgaccagatagctgccaatctgcaagcagttattaatgaagtt

SEQ ID NO: 856586 - DNA, 98 bp, Homo sapiens
tcaactgccattctggattccagaagatttaactacgtggtccggatttggaggccaatcactgccaccttttatttccctgtgggtccaggaactgg

SEQ ID NO: 856587 - DNA, 98 bp, Homo sapiens
ggggatagtgtcatcggttcggtaaagtttctgttctctggaatactcccccagttgcaagaggcgcaggaccgtggaagacttcaacaaattctgca

SEQ ID NO: 856588 - DNA, 98 bp, Homo sapiens
gagatctgaaggctggcaacattctctttaccttagatggagatatcaaattggaactcaagccaccgggggtcagagcagacgcagagtgtccaggc

SEQ ID NO: 856589 - DNA, 100 bp, Homo sapiens
ctgggaatccacgtcctagactctagccgtcccactgaccctctgagccacagcagcaacagcagctcagaggtgtaccagtgatggcaataagaaacaa

SEQ ID NO: 856590 - DNA, 100 bp, Homo sapiens
gtttgccatcccaaggccgaaggcttatccagaatcagatcacagctaaggggactgcccagctggcagatgcgttacagagcaacactggcataacaga

SEQ ID NO: 856591 - DNA, 100 bp, Homo sapiens
acctcatttggaaactattgtctactcacagtgatgaagtaacaggctgccagcgatccataggtctttccaatgggaaagccaaggtgtgcaactacag

SEQ ID NO: 856592 - DNA, 99 bp, Homo sapiens
acagggatagaagatgaagatgctctcattgctgatgtaaagaagtctgggccaacggtcacaaaagttgtcactgttgtgacaaccaaaaaagcagtt

SEQ ID NO: 856593 - DNA, 99 bp, Homo sapiens
acttgactactcgcatcgcgcactttttggatcggcatctagtctttccgcttcttgaatttctctctgtaaaggaggccctcagttatattaggagta

SEQ ID NO: 856594 - DNA, 99 bp, Homo sapiens
gatgatcgttgtgttgtacagccagaaaccggggaccttaacaatccacctaagaaattcagagttccagttcagacatcataagagatcttttagaag

SEQ ID NO: 856595 - DNA, 100 bp, Homo sapiens
ctggattctaaggcaacacttccttgaagaaacaagcttacaggaggagacatcacagctttcccagatcgggaggaaaaatatggaatgtgttttaccg

SEQ ID NO: 856596 - DNA, 99 bp, Homo sapiens
ttcattgtgatgctgatagcaaatggaatccttctcctcctgcttgtgagcccactgcctaaaacgttgaaggagaatcaattcttcaactcaagatgt

SEQ ID NO: 856597 - DNA, 101 bp, Homo sapiens
agtcaccaagaaattactgtctcaagtgatacggtggagtctttcattttggatcaggatgatttggaaaatccaatgctggaaacagcttccaagttgct

SEQ ID NO: 856598 - DNA, 100 bp, Homo sapiens
caataatttgcttgatggcttagaactctccacagccatcactcatgtccataaggagttccaagatgagatgggattctccaacatggaagatgatggc

SEQ ID NO: 856599 - DNA, 100 bp, Homo sapiens
gctttcaatgacctctggagacttgacctaaacagcaaagagtggatccgacctttggcttcagaatcccctactttgaaactagtgctgccaatgggac

SEQ ID NO: 856600 - DNA, 100 bp, Homo sapiens
ttcattgaggagcgggaggattgtaagatactgtgcctttgctccagggcatttgtggaggaataccttggcaagcagctccagtccgagcagccccaga

SEQ ID NO: 856601 - DNA, 98 bp, Homo sapiens
tacttctgctgcagcattccaagcagggagaaggttttaaggtgaaaacgaagaaagaaatccggcatgtggaaaagaagagccactcgtaacagcga

SEQ ID NO: 856602 - DNA, 98 bp, Homo sapiens
gctaccactcagatttccaaagatgagcttgatgaactcaaagaggcctttgcaaaagttggcattgtgtccagatctggcaccctgacttatgaagc

SEQ ID NO: 856603 - DNA, 100 bp, Homo sapiens
ggagatgcagggcttgcaactccaatgcctaccccgtcagttcagcagtgtaccacatgaaggaagatggttgggtgaaagtagaaagtacagatgtcag

SEQ ID NO: 856604 - DNA, 98 bp, Homo sapiens
aacggaggcctgcaacaaccatgtcagatgtaccaacagtaccagcaacaggccggctatggtgcacagcagccgcaggctccacctcagcagcctca

SEQ ID NO: 856605 - DNA, 100 bp, Homo sapiens
ggagaaggtgttgttgccggagctgagaccgggcggccacagtccgcagggatgaacctcgagttgctggaatgtttcatcattactaacaggatattcc

SEQ ID NO: 856606 - DNA, 98 bp, Homo sapiens
cgcgttccatgcgcacagggacagggaacccagcgggtgccgcttctccacccgaggcttccacctccaacgagccatgttccaggctgcaggagccg

SEQ ID NO: 856607 - DNA, 98 bp, Homo sapiens
tcgtttcgaattggaatatgctctaaatgcaaggtcctatgctgctttgtcccaaagcatctttacagttcaagtggatgaaaacagaagatacatgc

SEQ ID NO: 856608 - DNA, 100 bp, Homo sapiens
cctgttccagcaaacgcacaaggaaactgaacagccaagactcctataacaattttaccaacaacaaccctggcaaccctcggctctctcctcttcccag

SEQ ID NO: 856609 - DNA, 100 bp, Homo sapiens
tgtaccccagaagccctcccagaactttcagatccaggcagctgagccgacacctactcagataagctgtcattggaaggaatagtggtacaaagagctg

SEQ ID NO: 856610 - DNA, 98 bp, Homo sapiens
gcctgcagcgggagctggacggcgagcgcgagcggcgcgagaaatggtccactgtaggtgtgccaagtgtttctgttatcctacaaagcgaagaataa

SEQ ID NO: 856611 - DNA, 100 bp, Homo sapiens
gccatttattaccatgcttcaagagccattccttttggaacaatggatgttgagaaagagaaggaaacccacagttacctcagcaaagaggagatcaaag

SEQ ID NO: 856612 - DNA, 100 bp, Homo sapiens
gattcataagccaggctacctggctaatgatagactcctaccccagcgaccccccagttcccttcaggatgatggaggatgcggaggccccgggagagca

SEQ ID NO: 856613 - DNA, 99 bp, Homo sapiens
gacagtcgtggaatctgtgggttgaggcttccaaacttcctgggaaggacggtttaactatagatcaacacatcatcttgcatctcatgggttctatga

SEQ ID NO: 856614 - DNA, 107 bp, Homo sapiens
caggctcaagcaatcctaccatgtcagccttcccagtagctggaactacagctgcaagctttcttcctggtggcagatgacatcatggattcatcccttacccgccg

SEQ ID NO: 856615 - DNA, 98 bp, Homo sapiens
tcacagcctgaaaatgaaaaggaagcttcaggtggagacagcccgaaggacaaagcaggacctcataaggaaatctacccctatgtcatccaggaact

SEQ ID NO: 856616 - DNA, 100 bp, Homo sapiens
gaagtgccatcttcggctaggtcgtcacaggctccggctcatggcatcaagtggcatccatcataagggaacagaaagaacagcttcaaaagatgaaaga

SEQ ID NO: 856617 - DNA, 98 bp, Homo sapiens
ccaaggacagagtcagtgatttccataaattgaagcaaagctctgcagatggcatggggaggaggttgcactcagcccatgatcctggtctctcaaag

SEQ ID NO: 856618 - DNA, 98 bp, Homo sapiens
attgtcttatatttcaagttaaggtccaaaaaaactccagctgtgaaagcaacataaatgcagtcctgcgttaactgcggccgggaggctatgagcga

SEQ ID NO: 856619 - DNA, 98 bp, Homo sapiens
aaaacttttcagctatcttcccatccaatacttggtgactggtctattcaagttcaagtgaatacctgtcatttactccatcctttatagtgatgcta

SEQ ID NO: 856620 - DNA, 98 bp, Homo sapiens
ttgcaacccttccgggaagccatagctctgcatggtgttacaaaggtagattatggagatatatcgtcaagagttggtctaagacacaaactacaatg

SEQ ID NO: 856621 - DNA, 138 bp, Homo sapiens
gaaaaatggcaggattcattttgacatgcatgggttcctgaccaatgtcatccttgcagacctcaacctctcagaaaatccagcagctgtcagagggctccatgtttggccacggtctgaagcacctgttccacagcc

SEQ ID NO: 856622 - DNA, 50 bp, Homo sapiens
aataaacatgcaatgaacccaaaagggtatgcccaagaggacagagaacg

SEQ ID NO: 856623 - DNA, 98 bp, Homo sapiens
tgacttgaagactcagaatatcttattggacaatgaatttcatgttaaggttaaaaatctgtaagagcctgattttagaattcaccagctcctcagaa

SEQ ID NO: 856624 - DNA, 99 bp, Homo sapiens
gggtgcagcggaggcggcggcggcggcggcagtgacgtcgccggggaactctaatgatccaggacaaagaagttaccctggagtatgtatcaagcctgg

SEQ ID NO: 856625 - DNA, 99 bp, Homo sapiens
agagatgaggacagcattgctgctccttgcagccctggctgtggctacagggccagtgaattttgaagattgcaccggtcgacaaaggacagcctattt

SEQ ID NO: 856626 - DNA, 100 bp, Homo sapiens
atgctgactcagcctgttccattaaggctaacatttccaatgatcactggccatctttggttcaagaggctacaactgaggccttgaagctttgcttttg

SEQ ID NO: 856627 - DNA, 98 bp, Homo sapiens
atcgtcccctggactctctcaatatcctagaaggaaaacatcaccatggctacagaaattggttctcctcctcgttttttccatatgccaaggttcca

SEQ ID NO: 856628 - DNA, 101 bp, Homo sapiens
ctttgatgagctgtgtttgaagacaggagtctactttgactgctgtgtcagacaaattaaatttgtggacttctgtgggaagtatcgcctcccactgatgc

SEQ ID NO: 856629 - DNA, 51 bp, Homo sapiens
atgaagaggatgatgtttttggtgaaggtgatcagactctgagaatatggg

SEQ ID NO: 856630 - DNA, 98 bp, Homo sapiens
aaagatcttgcacatgaagctacaaaactgaatgtctacacaaggaagtacaggatttggcttttctagatgtcgtatccaaacttcgcagtcatgag

SEQ ID NO: 856631 - DNA, 115 bp, Homo sapiens
gcaagcaagaattttcttcccaggaagctcctctcgctccccggccgcccacccccagcctggtgaagctgtggtctaccaatctagacaactcagtggcaagcattgaggcaaa

SEQ ID NO: 856632 - DNA, 99 bp, Homo sapiens
tgccgcttcggccgaaggcccgagcgcccgaggcgtctgggatggtgtgggaccgggcctcattgaatttgaagaatgtgacactgctagtgcagttga

SEQ ID NO: 856633 - DNA, 50 bp, Homo sapiens
cgcaggaggcggtgcacagcgccaaggtctggagtgggactgactggctc

SEQ ID NO: 856634 - DNA, 98 bp, Homo sapiens
tgcaaaattcacagtgtggatctgcaggctgtgggacttgaagactatgggaagcaagtttccacgggctcccttgctcagcagtatgcgcaccctaa

SEQ ID NO: 856635 - DNA, 100 bp, Homo sapiens
tacatgatgaggcaattgttcccatcatccaccgcgaccttaagtccagcaacaggtatttgaagtataccatacaactgttttgaaaatccagcgtgga

SEQ ID NO: 856636 - DNA, 100 bp, Homo sapiens
ggaaaactggtcttattaacctaggaaatacatgttatatgaacagtgttatacaagccttgtttatggccacagagtgtgaggtgggcacagatagctg

SEQ ID NO: 856637 - DNA, 100 bp, Homo sapiens
ctttgtataacaccaagcagatgctgcctgcagaggctgaagccgacgtagcttctctgaacagacgcatccagctggttgaggaagagttggatcgtgc

SEQ ID NO: 856638 - DNA, 100 bp, Homo sapiens
acaactctgcttttccagaaactgtgccaggatcacgaggagaaaattctctatctaactccagagcaagaaaaggataaatctcatttcacagacaaag

SEQ ID NO: 856639 - DNA, 99 bp, Homo sapiens
caaagatgatgaatctgaaaggaaatccggaattatcacagatgagtgatagttgcttcaggaatcttgcagaagaccgcagtgggataaatctcaaag

SEQ ID NO: 856640 - DNA, 102 bp, Homo sapiens
ccggacccaaagtgccatgtctttaatgtgctgctacccccgtatgatgatgccactgtgaatggtgctgccaaggagccaccgccaccttacgtgtctgcc

SEQ ID NO: 856641 - DNA, 100 bp, Homo sapiens
gggccttgacgatctggacgccgatgccgatgatggctgggcagggtacagcttttatcttgcacatgaattttttgatgttcttcctgtgcataaattt

SEQ ID NO: 856642 - DNA, 99 bp, Homo sapiens
cgatacatagaacaaacacatactaaattggagcactctgtgtgtgcaaatgatatgagatcctgactccaaactccattcccaagggtttcatggacg

SEQ ID NO: 856643 - DNA, 100 bp, Homo sapiens
ccttggcaacagcagcaaattgaagactttcgacaaggaagtgaaacaccaatgcaggttatgagcccctggccccgctcccctcagctgctgcctctgt

SEQ ID NO: 856644 - DNA, 100 bp, Homo sapiens
ctggcagagcagcgggatgagttggaaggcttccaggatgacgccggacggtggatgtgatggcagaagacagagacaccattctggaccccaagataga

SEQ ID NO: 856645 - DNA, 109 bp, Homo sapiens
tatcttccacacagcaaactgtcatcaggagcttaaataggacagattttcacggcagtggatataccagggtttttaatgaccacaacaagcaagcatgcagcttact

SEQ ID NO: 856646 - DNA, 100 bp, Homo sapiens
agaaggaaaatcacagaggtaaagcatcatttcatcacatcctgtcaaggattcagaatggacagtttagaagaacctcagaaaaaagtctttaaggctc

SEQ ID NO: 856647 - DNA, 100 bp, Homo sapiens
ccagaagggatctcttcagggtggaatacgtcattgttctctacagaaagaaccaatgaacccaataggaacaaattctctgtggaaaacaaagcatagc

SEQ ID NO: 856648 - DNA, 99 bp, Homo sapiens
gcgggtcctggttgcaagagaggactctgaaaaggaatcttgcccaagcagtgatgaagttgatgaggaggaagaagaggataattatgaatctgatga

SEQ ID NO: 856649 - DNA, 98 bp, Homo sapiens
cgcttggttaaaacctgacacttttaacagggctagttgcacatagtgatttagatgaaagagctattgaagctttaaaagaattcaatgaagacggt

SEQ ID NO: 856650 - DNA, 118 bp, Homo sapiens
agactcactggccgaatggcagcagtagatgacttgcaatttgaagcaaaatgatgcttcaacacccaggccaggtctctgcctcggaagtgagtgcttctgccatcgtcccctgcct

SEQ ID NO: 856651 - DNA, 100 bp, Homo sapiens
ctccgcggggtaatggggggtcagagtgccggaccccagcacacagaagccgagacggcttggtggagccagtgaacgtggtggacaatggagatggcac

SEQ ID NO: 856652 - DNA, 100 bp, Homo sapiens
ctcatcgccatcacccgcaacccggtgttcccgcgctttatcaagattatcgaggtcacaaggacactaatgatcacctatgtgcccaaggacattgaag

SEQ ID NO: 856653 - DNA, 98 bp, Homo sapiens
ccaaatccaagaccagtttaatgaccttgttatcagtgatggctcttctctggaagatcttgtgcttacattgacgcagttagaagaaacaaataccc

SEQ ID NO: 856654 - DNA, 98 bp, Homo sapiens
cgggcactgttgctgctgcgggagtgtctcctttcctcttgggccgggcactttgggctgccagtcggttcactgttgctatgtcccctgaactgatc

SEQ ID NO: 856655 - DNA, 98 bp, Homo sapiens
actgacctgcgcggcatgctaaagaggctcaagggcatgaggcgcgatgagaagaagagcacaggaatagccaggccagaagaaggaaggcctgtggt

SEQ ID NO: 856656 - DNA, 98 bp, Homo sapiens
cagacccctccagacatccaatcagagcattcaagggatggtgaaatggatgatagtcgagatgatttgaaaggagaactagatgaatatgtccaaaa

SEQ ID NO: 856657 - DNA, 99 bp, Homo sapiens
aacaagctccaggacgtcttcaacacggtgggcgccgacatcatccagctgcctcaaatcgtcgtagtgggaacgcagattttacatcctgaagtccaa

SEQ ID NO: 856658 - DNA, 98 bp, Homo sapiens
cacagtattttgacatcagttatattccatctactgtctttttcttcaatgggcagcatatgaaagtggattatgggggcataaggaaatggtggcag

SEQ ID NO: 856659 - DNA, 100 bp, Homo sapiens
tctctcacgctcaagtcaccaagaagaatcttctggtcacaatgcttattgtggagccgccaccaaaatgcagattttcgtgaaaacccttacggggaag

SEQ ID NO: 856660 - DNA, 98 bp, Homo sapiens
gctttttaacgcgctgacgttgttcaacctggcccaggaccctcagtgcaaggagtggcagttctgtgcattccttggctcctggctggtcccctttg

SEQ ID NO: 856661 - DNA, 98 bp, Homo sapiens
cgaaatggcggggactgttggtctcggccctgcggaagggatcctcaattcctgagctagcacattctgatgcttaccagactagagaaatatgctcc

SEQ ID NO: 856662 - DNA, 98 bp, Homo sapiens
gaggatactggcagagcggaaggtgcagctacggctggcaagggaggttctgcgatgagtgtgtcccctaccccggctgcgtgcatggcagttgtgtg

SEQ ID NO: 856663 - DNA, 100 bp, Homo sapiens
agatatgctgaaagactttctccttggagaacacttattattggttggcaaccagaatgacgtggccgcacttctgaaacccatatcggaaaagattcag

SEQ ID NO: 856664 - DNA, 98 bp, Homo sapiens
agctttcactatggggtggagacgtggtactcagcaagctcgagttaaagttggatgtgctggaacagttcattcggctcctaaagaagtagcagtgt

SEQ ID NO: 856665 - DNA, 100 bp, Homo sapiens
tatgattcggcagatttatccacagctaaagatatgaagagaaggctactaaagacttggaacgatacaatagtcaaatgaagagagccattgaacagga

SEQ ID NO: 856666 - DNA, 100 bp, Homo sapiens
gctcactccgcccggccccagccctagcgctggccgcgaccccggcgatctcgtagtagaaattcttggggtgaacaaatgccggctgagctggggtcta

SEQ ID NO: 856667 - DNA, 100 bp, Homo sapiens
caaagataaaactcctgcccctcttcaacacctggacaccttgttagatggaacctacaagcaggcttctccagggaaagtgaccgaggcagtgaaagag

SEQ ID NO: 856668 - DNA, 100 bp, Homo sapiens
gatgaagagactgctcctcccgttattgccccgcgaccggatcatacgaaatcaattggcacttctctgtttgatgaagagggagccaagattgtcaaag

SEQ ID NO: 856669 - DNA, 100 bp, Homo sapiens
aggaagctaaggccgcgttggggtgagaccctcacttcatccgatgaacacaggcttcacagtggcaaactctgtctgattatccttacatgtattgcag

SEQ ID NO: 856670 - DNA, 104 bp, Homo sapiens
aaatggcccacatcaggacagctgttccttggccatcccaaagctattctgggggcaacagagcccgcgtgaccccaactctgccgaagcaggaccgtcctgtg

SEQ ID NO: 856671 - DNA, 100 bp, Homo sapiens
ccaggatccgatagctctctgcttattaatgtttccacgggctcccttgctcagcagtatgcgcaccctaacgctaccctgcacccacatactccacacc

SEQ ID NO: 856672 - DNA, 100 bp, Homo sapiens
cttcgcttggtgtcctcctggcctcagcaacctgacaattctgtcgtgtcccggttaaccccaaagattggctttccttggagtgaaatcaggaacatct

SEQ ID NO: 856673 - DNA, 98 bp, Homo sapiens
ccttggaacaggactacgagctggtgtccacgttaggatcccaaagctcagcaagatctggtgctctcatgaaaatctacatcaggaggacctagaaa

SEQ ID NO: 856674 - DNA, 99 bp, Homo sapiens
tcctgaggttttcctaagccatcccctggcggaaccgcccccagatacactgcctctaggactgggacagatagccactgagtacctgcttcaaatcac

SEQ ID NO: 856675 - DNA, 111 bp, Homo sapiens
gctgaggaaggccgtgttgtttgtctacctgggactagagccagatgaccaggatgccccagatgagcatgagccctctccatcagaagatgccccattatatcctcattc

SEQ ID NO: 856676 - DNA, 99 bp, Homo sapiens
gtatgcaggtgccttgagagcttcaggggaaatggcttcagcgcagtatattactgcagtatcaccttttgccatgatagcatttctttcattggacag

SEQ ID NO: 856677 - DNA, 100 bp, Homo sapiens
ggtgtacttgcaagaaacctcaggacttgagtaacagcaacatgtcctgaggctttctaccaatgcaggccagtggaaggaagcagctagcaaggtgacc

SEQ ID NO: 856678 - DNA, 99 bp, Homo sapiens
aggtggttcgaaagacttcaagcaattggaggcaggtggaagtcatcataaagtttctgtttcacccgtcgtccatgttcgaggactctgtgaatctgt

SEQ ID NO: 856679 - DNA, 109 bp, Homo sapiens
cgaactctgcaaagcctccagaggacataccacctccaggatcaggatgcagaggaaccagcacctatgacagaagatctgctagaagagcagtctgaagttttagcta

SEQ ID NO: 856680 - DNA, 100 bp, Homo sapiens
gttcgaagagcagcattggaaactctgtttacgttattatcaacacaggaccagtgctcgccagaaacccagagctaattatttagaagaccgaaaaaat

SEQ ID NO: 856681 - DNA, 98 bp, Homo sapiens
accagcttagcttctgtcctaaaggctaaggcagctggataagcacagccaggccacagcccagcagctggtgcagctcctcagcaagcagaaccagc

SEQ ID NO: 856682 - DNA, 99 bp, Homo sapiens
tatcatatcacctgaactgatggagagacagcgtctggagaccatcctcagtctctgtgctgaatacacaaagcctgacagtcgcttatctactgggac

SEQ ID NO: 856683 - DNA, 100 bp, Homo sapiens
gatatcaatggatgtcctagaagtcagtctcagatgctttcaccaacaatcaccagtggtttacacaacattgcaaggagcattgaaactcgaaactact

SEQ ID NO: 856684 - DNA, 100 bp, Homo sapiens
ccaatggcaactatgtttggatgttggatctacactttctcaagcactgtgatcttcaaattaaattcctcatctatgcctgtctgctgctgttctctgt

SEQ ID NO: 856685 - DNA, 100 bp, Homo sapiens
ctgatcctgaccacagagtccatcatgaagaagagtgagttcctctgctgccaggacagcttcctgcagttaatgaaggagttcccccttctgagtatgt

SEQ ID NO: 856686 - DNA, 100 bp, Homo sapiens
tctacgacccggagcacccgacccctgaggctgttttgctgcagcttctgaagtgttaaagcacttgaaggaacgatttccgcctaatagtcagcacgcc

SEQ ID NO: 856687 - DNA, 100 bp, Homo sapiens
cgcttcgaagttctcacggatctggccaacaagacgcacccgtccatcttcgggatcttcgacgggcacgggggagaggccagagaagatgtgatccaca

SEQ ID NO: 856688 - DNA, 98 bp, Homo sapiens
tacatctggattgtagccataagtggacttctgtctgtggaagcccgtaaagagatgactagaaaggctattaagacagtcaaacattttattgagaa

SEQ ID NO: 856689 - DNA, 98 bp, Homo sapiens
caatttggaggtggcaaacagcttcgcagtcactaatgcttatggccgcccatgccccatcattctttgggatgcatctttatcttcagcaagtaatg

SEQ ID NO: 856690 - DNA, 100 bp, Homo sapiens
gtacactcactgattcttaaggctctgttccttagagatccaaaggcagggcaagaatcctttcgttccatcacaaggtcgtattacagaggtgcagcag

SEQ ID NO: 856691 - DNA, 100 bp, Homo sapiens
taggatgctgtacaccaggccggccgctcctgccgtgcaaatgttcctcagcagcacatagcacctatcgggccagccagctgggtgtgtaccgggcctt

SEQ ID NO: 856692 - DNA, 98 bp, Homo sapiens
ttttttatcagcgcctcaatctctactcgaagaagaaagagaagaaacgttttctcagcttcctggacaagatcgacgtgatcaagcaggctgactat

SEQ ID NO: 856693 - DNA, 100 bp, Homo sapiens
cggatgaggaaactgaggcctggagaggttaaagagacccgttcagagtcctacagtggcaggaccctgatgctcccataagacagaaaatgccccttga

SEQ ID NO: 856694 - DNA, 100 bp, Homo sapiens
aatatatggctggacagctagctgcttatggctataaaattacaggtcctcttcctgatggatgggaacaagccatgactcaggatggagaaatttacta

SEQ ID NO: 856695 - DNA, 99 bp, Homo sapiens
aggaactggagcaattgaagctgactactaaggagaataagcctgctgttcatgtacaaggtcaggaacctttgactgcttccatgttggcatctgccc

SEQ ID NO: 856696 - DNA, 100 bp, Homo sapiens
accacttccagaggagtttgaattacaaggatttttggcattgagaccttctttcagcagaactattcactggctgaacttgatgagaaaattagtgccc

SEQ ID NO: 856697 - DNA, 110 bp, Homo sapiens
gtaggacctggcttgggtagagatgatgcgcttctcagaaatgtccaggtcctcatcaacctggccctgttgatgaaggaggcagagcttcgaggcagtccctcactggc

SEQ ID NO: 856698 - DNA, 100 bp, Homo sapiens
gacagaatatgctagtggaggggaaatatttgaattatttcctaacggatgttcagcgttcaagaaaattactcccaatatagatgaagaaggagcaatg

SEQ ID NO: 856699 - DNA, 100 bp, Homo sapiens
tattgtggtgacaattcagtgtggagtcgtgctgctccagagtgtaaagagtgcctggtgaagaatgtgatgggatcactagcatgtctgcggagagcgg

SEQ ID NO: 856700 - DNA, 100 bp, Homo sapiens
cttggagaaagccctaccctgcggaccgtcaagcacgattcaaaatggttgaaagcagagagagatcatcattgcctgaatttagctttgtgactgcaag

SEQ ID NO: 856701 - DNA, 98 bp, Homo sapiens
gtcaagtttaagggtactttggtgcatgaagctcaactcaactatttctacatctctcctggaggttgcagagcctgaggcctgtgatcagatgtacg

SEQ ID NO: 856702 - DNA, 100 bp, Homo sapiens
gttcccttgggaaccgcctgggaactccgccatgtcatccacttcgcccaacctccagggctgctcttcacctatcgtggtgaagtttgctgacactcag

SEQ ID NO: 856703 - DNA, 100 bp, Homo sapiens
atctctgtgtgttccttattttgtgcttgaacttgatcaaacagttgtcgagatgtccacagaaggaggatttggtggtactagcagcagtgatgcccag

SEQ ID NO: 856704 - DNA, 100 bp, Homo sapiens
ttggagtcagggtctttccccagctactcagcatacaggattcagaagaatgcgtttgtgaatcagcctacagcgaaagaactgacttcctctggtgggc

SEQ ID NO: 856705 - DNA, 98 bp, Homo sapiens
aagaagctggaggtcaacgaggccgagctgctgcggcgccgcaactttaaagtcatgatctaccagtacctggagtagaacagaaaaattattatgtc

SEQ ID NO: 856706 - DNA, 100 bp, Homo sapiens
ggaaatgtccagcttgaaaaggctcaacaggtggccactaacacggacaccagccgaaatgccggaaatgcggtcctgtttgagacagtactcaccatca

SEQ ID NO: 856707 - DNA, 100 bp, Homo sapiens
ctggggctccctgtatgcatggtgtggggttggtgtgattagcttcgcagtctggaaagctttaggagttcacagtggacgcttgactttcagggatgtg

SEQ ID NO: 856708 - DNA, 100 bp, Homo sapiens
gctgcaccaagtggcgaaggagccggctccaagcaggaaccgaatattgtatctgacgcatcctgtaatactgaagagcaactgaagacagttgatgatg

SEQ ID NO: 856709 - DNA, 51 bp, Homo sapiens
gttcctattgatggtccccccatagacggcatcagaattaatgtaactaca

SEQ ID NO: 856710 - DNA, 100 bp, Homo sapiens
gtgccgaggatgccatcattgccctttccaattacagacttcacatcaagttcaaggagtctcttgttaatactcgggaagaggctctgtcgggattggc

SEQ ID NO: 856711 - DNA, 98 bp, Homo sapiens
agcaactgagagctttgcttggaacattacagtattgaagggccaaggagattaagatcaagttgggaattctcctccagaagccagactcagttggt

SEQ ID NO: 856712 - DNA, 98 bp, Homo sapiens
gagccagtgatttacaatagagcaaggaagtccccatgggctgcaggggacaggaagatcctgatctgtgacaaatcgactggatggaattttcaggc

SEQ ID NO: 856713 - DNA, 100 bp, Homo sapiens
agacgcgggagtgggcttccctgaatatcagtcttactactttgaccgcgatgatgtggctttgaagaactttgccaaatactttcttcaccaatctcat

SEQ ID NO: 856714 - DNA, 100 bp, Homo sapiens
aaagttaaagtctgggatgagattcaatgaagtggccgcacagtatagtgaagataaagccaggcaaggggtcagtttaggggctggtgcaaaggatgag

SEQ ID NO: 856715 - DNA, 100 bp, Homo sapiens
cgtgggtaggagatggagaaattccaagttcagattctccaggtgggccatgcacagacacagctcatgtctcattaatcacaccaacaaaaagatcctg

SEQ ID NO: 856716 - DNA, 98 bp, Homo sapiens
gcagaacctgcgggccatctaccagtgcttcgtgtggagcggcacggctgaggcccgcaagcgcaagtttcttcactagttgaagaaggagaaaaaca

SEQ ID NO: 856717 - DNA, 98 bp, Homo sapiens
gatgtcctcagaggcctgagcaagaacctttccaatgggctgttgaacttcagttatcctgcaggcacaggtaatcctcctcttcccaatccttttgg

SEQ ID NO: 856718 - DNA, 99 bp, Homo sapiens
ttcattggatcaaacatgtcacaagagtcggacaaatcatcaatgctgtggtactgttgattttattgagtgccctggctgatccggatcagtataact

SEQ ID NO: 856719 - DNA, 99 bp, Homo sapiens
gaaggtccggggcttgccctggtcttgctcggccgatgaagtgcagaggtttttttctggtgcttccaatagtcctggtcagcctaattctgtgaagag

SEQ ID NO: 856720 - DNA, 99 bp, Homo sapiens
ttcaaccacgtggcccacatgggcccaggcgacggcatgcaggtgctcatggacctgcctctgatctctggaccggattcgtcccattctcgtcctcat

SEQ ID NO: 856721 - DNA, 98 bp, Homo sapiens
gaagaataaccctgcaaccccttctacagccatgggcattgctgatgacattttccctgttatcagttacttatggggccattcgctgcaatatactg

SEQ ID NO: 856722 - DNA, 98 bp, Homo sapiens
gctcaataccaatatcaacatcagaacagatctgagcaggttcctggtagagttacacagttgtgccgccagtatagcgacatgcctcctttgacgtt

SEQ ID NO: 856723 - DNA, 100 bp, Homo sapiens
atgttgaccttggagtcaagcaaattgctgctgaattcctttttgtcctttgcaaagagagagatagaatgagtccatttaagtcccaggacggtggaaa

SEQ ID NO: 856724 - DNA, 100 bp, Homo sapiens
tcacagcccccaccagtccaccagtgcagcagaatatgatgaactcggcttcagcaattctgtggtgttcttggtcacacatttatggagtttctgaagg

SEQ ID NO: 856725 - DNA, 100 bp, Homo sapiens
cccccgcggctgcagttccagggccaccccctcttccggggctccccagtgccaacagcaatggcactcccgagacggggtttcgccatgttggccagac

SEQ ID NO: 856726 - DNA, 100 bp, Homo sapiens
caaaactgaagatggtttgaaacagcttcacaagaaatgttcccactgccaggaggcaggcgccaccttgggctgctacaacaaaggctgctccttccga

SEQ ID NO: 856727 - DNA, 100 bp, Homo sapiens
gattctaagtccatcatcacgtgtcgggtgtcccttctggatggtactgatgttagtgtggacttgccaggaaatcctcattgacgattcaatttgttga

SEQ ID NO: 856728 - DNA, 98 bp, Homo sapiens
aacacatgccaaacatcatacttcggaagcaattgaaagttattaccagaggagttaaagttcctcgtaattttcgcttgttggaagaacttgaagaa

SEQ ID NO: 856729 - DNA, 98 bp, Homo sapiens
ggctaggacgccgagcggtgactccccgccgctcccgggggccgtgacggtgaactactgagttcttcattatgtctgatggagattatgattacctc

SEQ ID NO: 856730 - DNA, 100 bp, Homo sapiens
tcctatgatggcagcgaaaacttatcacggttttggttcagcttgttggtttagatgaggagagttcagagtttatttgcagaaacacctttgaccaccc

SEQ ID NO: 856731 - DNA, 100 bp, Homo sapiens
taccacagggaaagagacctttgcgttcctctggggtggcactttccatagctgtaggactgctggaggtgtttggatggactggtgaactaggacctgg

SEQ ID NO: 856732 - DNA, 126 bp, Homo sapiens
ccttcgcgcgctcgcggaaccccgtggcttccccgacgcagcccagcggcacggagaaaggaccaagaatcgccttcagccctgtctggtgcatccttggcagaaagtgaggaggaaaacaccccc

SEQ ID NO: 856733 - DNA, 98 bp, Homo sapiens
aatctggaagcgattcaagccaagctgaccaagaagccaaagaactggctaggcaaataagctttaaggaaagtgactattttaccccacagggagaa

SEQ ID NO: 856734 - DNA, 100 bp, Homo sapiens
cctcagtggacaatatgaagctgcctgagagatctctccagtgtgtccagcagccccacctccagtcccaagaccaaagtgaccacagtgacctctgccc

SEQ ID NO: 856735 - DNA, 100 bp, Homo sapiens
aagcccttcaccaacaaagatgcctatacttgtgcaagattatctgaaccttcttctattgcaaaacatgaagatagtttgcttaaggatttatttcaag

SEQ ID NO: 856736 - DNA, 98 bp, Homo sapiens
ttgattcatcagattttgcattggatattcgcatgcctggggttacacctaaacagatggggaaattgaggcagagaagccaagacatgtgctaaagg

SEQ ID NO: 856737 - DNA, 98 bp, Homo sapiens
ctcggaggatgcagcctttggactcaagatcgtcagtatttaaacagatcacatcatgcgtgagtacaagctagtggtccttggttcaggaggcgttg

SEQ ID NO: 856738 - DNA, 100 bp, Homo sapiens
taaggcagataagcccttgagcatccatcctcaaggaattaggtacagtaaattatcagaagcaaaatgatgcttcaacacccaggccaggtctctgcct

SEQ ID NO: 856739 - DNA, 100 bp, Homo sapiens
cgctcatcatcccccccgacgccgtcgcggtggactgcaaggggaaggtgtggctcattgactttaatccatttggtgaagtcacagattcactgctgtt

SEQ ID NO: 856740 - DNA, 100 bp, Homo sapiens
gatgatatagctggtcaagacttggcaaaacaagcattgcaagaaattgttattcttccttctctgaggcctgaggcagaagctcctcctggggtagaga

SEQ ID NO: 856741 - DNA, 119 bp, Homo sapiens
cgaattccacattctcatgcatttattgatctgactgaagattttacagcagggatggggaaagacaccatagtcataaaagaagaaagcaaaaaatataaatgaagtacttgtaccta

SEQ ID NO: 856742 - DNA, 99 bp, Homo sapiens
ggagcgtgatcacagtcctacaccaagtgttttcaacagccgtgctggtatagaggactctaagaagtggggcatgctgtttctggtgaaccagctgtt

SEQ ID NO: 856743 - DNA, 100 bp, Homo sapiens
acacagtggcttctgctcaccaacagatgaagacagatgcaccaacgaggacgagcctgtggagtgggagacacctgacctttctcaagctgagattgag

SEQ ID NO: 856744 - DNA, 100 bp, Homo sapiens
tttgtggtccacaagaggtgccatgaatttgttactttttcttgtccgggtgcggataagggacccgacactgatagatacaatcttgcttgaccgtttg

SEQ ID NO: 856745 - DNA, 100 bp, Homo sapiens
gcgcgggacggctctgtaggaaggaacttggttccccctccctcagcttccgccccaaaaggaccatcgagtctctgtataaggaactggtggaagaagg

SEQ ID NO: 856746 - DNA, 98 bp, Homo sapiens
tagcttcaaaaatgacaagttcgataaaagtgtgcagaccaagattgtcatggagactggcaataccaagaactctgcactgatggctaaaaaagccc

SEQ ID NO: 856747 - DNA, 98 bp, Homo sapiens
gcagcagcgcgggccagagcgcagcgccgagcgcggcccgggcgccatcgagccttggcggcggacgtgcagactcggtgaaatacctggagtgctca

SEQ ID NO: 856748 - DNA, 100 bp, Homo sapiens
ctccctttacgaggcagcattatgtctctttgaagagtttgctggaacattatcagatggcttagggaagacgatggacaatcggcatcagtcagagcgg

SEQ ID NO: 856749 - DNA, 99 bp, Homo sapiens
aatcgggcacctctgcagctgcagaagtgaaccggcaaatgctgcaggaactggtgaacgcaggatgcgaccaggcctgcaagaccccccaaagccagc

SEQ ID NO: 856750 - DNA, 98 bp, Homo sapiens
aggattccaagtaactcttatttgaaagctgatgtcctgaccactggagctggtaacccagtaggagacaaacttaatgttattacagtagggccccg

SEQ ID NO: 856751 - DNA, 100 bp, Homo sapiens
ccagaaaaacaggtcccgatcccgaccccaaaagagtattcttggatcttgcacaggaaggaattaaaggggaaaagtcttcatcatacccagaatgatc

SEQ ID NO: 856752 - DNA, 99 bp, Homo sapiens
ttgatccccggccgcggggccaggaagtcggagtttgagccccggaggcagagcggctgccatgtcccatgaagctgaggtcttgaagcagctggctga

SEQ ID NO: 856753 - DNA, 100 bp, Homo sapiens
atatggtaaaggaaccagtggaagacacagaccctagcactttatcctttaatatgttgctgggcatattggattttacccatcataggcgctgttctct

SEQ ID NO: 856754 - DNA, 100 bp, Homo sapiens
tgcgtgtccatccttaccaaaggattgtgaccgcagaccgagaacctatgagaaccccaaagacattaaagattgctgaaatacaggcaagacggattgc

SEQ ID NO: 856755 - DNA, 99 bp, Homo sapiens
agtattggtcttaaaacagtaattggagaacttcctccagcttccagtgtgcctgatgttgcacatttgccacttgagaagctgggaccctgtctccct

SEQ ID NO: 856756 - DNA, 98 bp, Homo sapiens
ctcagctggtcctagacatgcgtggcgtcggggctgtggcacggtcgggtccgggcctattctgcaaacttggagttcttgtcaggcataggatttca

SEQ ID NO: 856757 - DNA, 98 bp, Homo sapiens
gtccgaaagcagctggaggccgagaagatggagctgcagtcagccctggaggaggccgaggcccctggaggaattgctacacccccagtgtatggtca

SEQ ID NO: 856758 - DNA, 99 bp, Homo sapiens
ctactcccagatgcatccgtgtcaatgaccagctgaactcagaagaaaaaaagaagagaaagcagcgaaggaataggacaaccttcaatagcagccagc

SEQ ID NO: 856759 - DNA, 100 bp, Homo sapiens
ggtcttctgatagcaactttaatgtggcagctggctaagagtcttgggcaggctggtgaaattgagcctgaaacagaaggaatactaacagagtatggcg

SEQ ID NO: 856760 - DNA, 100 bp, Homo sapiens
gatcgctgtctgtggtcactactgtgtggggagttggcaacgcgacacagagccagatgatgaagatgatgaagaggaagatgaagaggaagaaatcgac

SEQ ID NO: 856761 - DNA, 100 bp, Homo sapiens
aaggacagttagaagacagtagtacatcgacgccatcagcaacaagcagggcgagctggagaattacgtgtccgacggctacaagaccgcactgacagag

SEQ ID NO: 856762 - DNA, 100 bp, Homo sapiens
gctatgcaaatatagaacactaaagtgttacatgacagatgtatgagaactgataaatttcaaacggaagagagtggcagcatttagaaagaatctaatt

SEQ ID NO: 856763 - DNA, 123 bp, Homo sapiens
gggaacctcacttcgtggtggtccactgcacaggctacatcaaggcctggcccccagcaggacatccccttgaatttttacggaatcagcctcagtttcaacagatgagacaaattattcagc

SEQ ID NO: 856764 - DNA, 114 bp, Homo sapiens
gcgttgcggcgaaaggaacggctgaaggccctacgggagaaaaccgggcgcaagaccatggtgaatccgggcagcagctcgcagccgcccccggtgacggccggctccctctcc

SEQ ID NO: 856765 - DNA, 100 bp, Homo sapiens
gcgtcaccatgggggctgtgctgggtgtcttctccctcgccagctgggatcccaaaatggctgggcgaaaacttgctctaaaaaccattgactgggtagc

SEQ ID NO: 856766 - DNA, 100 bp, Homo sapiens
ggacatctatgcttacatggagaaaagtggaatggagaaaagtggtttggagtccactgtgtgtgtgactaatgtcagggttttggccaaattgggcgag

SEQ ID NO: 856767 - DNA, 100 bp, Homo sapiens
tctgtggtgtgtttgctgttcccaggtatatgccctcattttgcttaagacctctggccagagcagggcatggaagattccttttaaaaagtaatactga

SEQ ID NO: 856768 - DNA, 100 bp, Homo sapiens
tgtctttctgtgcctggcttatttcagttaacatcgtgacctccagttccatccatgttgctgcaaatgagtacccaacatgtgagcagcttacttgtga

SEQ ID NO: 856769 - DNA, 100 bp, Homo sapiens
tggcagcagggagtgtggaaatgatgcaccggtttctgttccccttctttgactcagcctatcagggcttcgcatctggaaacctggagagagatgcctg

SEQ ID NO: 856770 - DNA, 98 bp, Homo sapiens
gagctgcttcttcctgccacgagggacaagggtgtataatgcactagtggcgtttatcagggcccctgattgctgattctgtccgcctgccacaccgg

SEQ ID NO: 856771 - DNA, 100 bp, Homo sapiens
tggaattgcatgggaaaatcatggaagttgattactcagtctctaaaaagctaaggaggaagaacgtgcaaaacgtgaggagctagagcgaatactggaa

SEQ ID NO: 856772 - DNA, 99 bp, Homo sapiens
gcggagctgacggtggaggttcgcggctctaacggggctttctacaagatttatgtgatcagtttggctgaaccccgtctgcccctgcagctggatgat

SEQ ID NO: 856773 - DNA, 100 bp, Homo sapiens
agagagtgaggagtggagcagcagccagcctgcattttgaaagcgaagcagaagccgtagaatcagcggcgagcctgttgaaagaacccacaggtgcatt

SEQ ID NO: 856774 - DNA, 100 bp, Homo sapiens
tgccatcccagtcttctccttcagtaaggtggatctttcaacatatcgttgtttagttttcaagaataaagccatcataagacctcatgccacagaagag

SEQ ID NO: 856775 - DNA, 100 bp, Homo sapiens
gccattcatcaagtggagacacgtttagcttaaaaacagctcattctcctaatgttttccttcagcaaggacaaaggaaactccgggacgttttacagca

SEQ ID NO: 856776 - DNA, 98 bp, Homo sapiens
agaattaggtggatttgcagcaatccaagccaagctccattcagaagatatagaacttgggccctcctgtctgtacagcgctgcccggccttcgggga

SEQ ID NO: 856777 - DNA, 132 bp, Homo sapiens
ttttctcaatacgaggcgcaaggtggactggctgactgagaagatgcatgccagagacttcacagtttctgctctgttgagccccatatgggggttggcaggcagcagagaggcccctttcaaggtgttcgg

SEQ ID NO: 856778 - DNA, 100 bp, Homo sapiens
atagttccctttcgagttgcagcttacaacaagaaaaagaagcgtatggactactatgactctgaacaaaaatatttacaccagcagctccagttcatac

SEQ ID NO: 856779 - DNA, 98 bp, Homo sapiens
ttaaccaggcacttccgaaagcacaccggggccaagccttttaaatgctcccactgtgacaggagagattaaacagattctagaaaatgaacttcaga

SEQ ID NO: 856780 - DNA, 99 bp, Homo sapiens
gtctgaatactgagtggagtgagttggagaatctggtccttaaggatatgtcagatgctactgatgcaaatgtgaagaatgaaagtctttcatctgtgc

SEQ ID NO: 856781 - DNA, 100 bp, Homo sapiens
ccgggacctcctggaagccaaaaatgctgagatctgtatctgtggacctgaatgttgatccctcgcttcagattgacatacctgatgcgctcagtgagag

SEQ ID NO: 856782 - DNA, 100 bp, Homo sapiens
tactatctaagtttatgcctaagggtcttgcctcacccaagctagagtgcagtggcctttgaagcttactacagcctcaaacttctgggctcaagtgatc

SEQ ID NO: 856783 - DNA, 100 bp, Homo sapiens
cgatgtgcagcccaagctctgggcccgctacgggcctgctgtctgctcactctcaccatgtcctgcccagggcctgaccctcctgaggggcccgggaccc

SEQ ID NO: 856784 - DNA, 100 bp, Homo sapiens
ccagcccctgtggaaaatactataccctcaatggaagcaagctttggatcaggtgcaaactggctcagtctaatggctggggggtgatggtgagccaccg

SEQ ID NO: 856785 - DNA, 100 bp, Homo sapiens
cgggtgcggctccaccccttccacgtcatccgcatcaacaagatgttgtcctgtgctggggctgacagggaaaaagacctcgatgaagttctgcagaccc

SEQ ID NO: 856786 - DNA, 98 bp, Homo sapiens
cgtgccctggccaccagcagatatgaaaaactgcaggctacttattggttttggagtgtcacagaccaaagccatcatgactctggtctctgggattc

SEQ ID NO: 856787 - DNA, 51 bp, Homo sapiens
ggagcccagacaccagccccccaccatgagcccccctccatgcgcctgaag

SEQ ID NO: 856788 - DNA, 100 bp, Homo sapiens
catgggcgacccagcccccgcccgcagcctggacgacatcgacctgtccgccctgcgggaccgccgggagagcctgcccacctccccaccctggacgccg

SEQ ID NO: 856789 - DNA, 100 bp, Homo sapiens
agctatccgggaaagggccgaatgcgatcaaacctaatccgcgagacttgctaacaaaattcctgcctttctaaatgtggtggatattgctggccttgtg

SEQ ID NO: 856790 - DNA, 100 bp, Homo sapiens
gaagttgccgcggggccttccgatccccttctgaagatgatgagaaactgaaaaagaggaaggagcgatttgggattgtcacaagttcagctggaactgg

SEQ ID NO: 856791 - DNA, 100 bp, Homo sapiens
ttaaacatgtcagctgcactcacagccaggaagacaaaggaatttagatcaccacctcaagaacaggtttatggtgctgctattcagttttatgaaccat

SEQ ID NO: 856792 - DNA, 100 bp, Homo sapiens
cccacatgaggacttaatggtacagattcattctattcttgcaaagattggaccaaaagcctactttggggataaaggattatttggtcttctggatttg

SEQ ID NO: 856793 - DNA, 99 bp, Homo sapiens
taaccagaccattgatgaggaatatgatagcatcaaaaacaacattgaagaggaggaaaaagaggttggctcaggaatcggtgagtttcaaggatgtgg

SEQ ID NO: 856794 - DNA, 100 bp, Homo sapiens
tacttgcaagaaacctcaggacttgagtaacagcaacatgcatcaaagctggacgactcctctcctacattccatatcagctgtacaccaagcagtccag

SEQ ID NO: 856795 - DNA, 100 bp, Homo sapiens
cagtgattcacattgtggaccaacgggtgcgcttctacccagtggccttcttttgctgctggggcccagttacagccaagttctacttctgaatctatgg

SEQ ID NO: 856796 - DNA, 98 bp, Homo sapiens
gctggagaagggagactacaaggacagcagcgactttggggcccgtcaccctcagggaatggatttgtaaactcaagagcttctccaaatttgattgg

SEQ ID NO: 856797 - DNA, 100 bp, Homo sapiens
cctgaaagcaaccaggaggcagtaaattcttcagctgctcggacagatgaagctccccaaggagctgcagcacgtttcttggagcaggctaagtgtgagt

SEQ ID NO: 856798 - DNA, 100 bp, Homo sapiens
caaaatgacgaacacaaagggaaagaggagaggcacccgatatatgttctctaggccttttagaaaacatgcatctggaatcaagagacccatggcatct

SEQ ID NO: 856799 - DNA, 100 bp, Homo sapiens
gcgtgtggaccccaaacaagtctgcgcaaaatttgtcgaggaggtttgccgcggcaggtgaccccagggtttgaagaaaaggagggggagctgctggtga

SEQ ID NO: 856800 - DNA, 100 bp, Homo sapiens
agaggttgttgttggagaagcaggctggcggaaacccttgataatgcttatgatcctgatgtgaacgctaaacaaatatggattgacaaaacagtgataa

SEQ ID NO: 856801 - DNA, 100 bp, Homo sapiens
cagaaagtgtggatttgtgtggagcacacattgaatgggccaaggaaaaatcgagcagaaagaatgtctttcaggttcagcttgttggtttagatgagga

SEQ ID NO: 856802 - DNA, 99 bp, Homo sapiens
cgacggccttgagcgaggaggagctggacaatgaagactattactcgttgctgaacgtgcgcagggagatcaataagatggagtggtggagccgcttgg

SEQ ID NO: 856803 - DNA, 98 bp, Homo sapiens
ttattcaaaacgtgtcaactctgcttaattaagcactttgatgatttaagaaatcttggtgtccctggccagtgtccttccacctgtccacaagcatg

SEQ ID NO: 856804 - DNA, 98 bp, Homo sapiens
cgagtctcgatgacttcgcgggacagagctggagctcgtgggtggagcgggccgacctgcccgcggctgacgattatgtttgagaccttcaacacccc

SEQ ID NO: 856805 - DNA, 100 bp, Homo sapiens
tgcctccgggattggactgatccaggctggacccacgtctgtctggtgataccaggggcagagggaccactctgacagatggacttcagcagaaatcttt

SEQ ID NO: 856806 - DNA, 100 bp, Homo sapiens
agcagattttggtttaatatctgattgggacaacattcagacccatttccagtcatgactaaaagatggcggcaaggcagcccaggcaaatgtaagaata

SEQ ID NO: 856807 - DNA, 98 bp, Homo sapiens
tgaagttcgccgagcacctctccgcgcacatcactcccgagtggaggaagcaatacatccagtatgagcgtgtccggagcggtgactggaaggggtac

SEQ ID NO: 856808 - DNA, 98 bp, Homo sapiens
gataaaactaccaacaggcacagagactgtaaattcacctgtcacccagaatgccgcagcctgatccagttggactgcagtcagcaggagggtttatc

SEQ ID NO: 856809 - DNA, 100 bp, Homo sapiens
tcaaaggcatcacatccagagcgctctgctggtcacagacatttctcttgggaagttgtgcatctgacaggaatatagtactgtacgatatgaggcaagc

SEQ ID NO: 856810 - DNA, 100 bp, Homo sapiens
gaggtgtgctgacgacctgctacaacagaatgaataaccctataccttccaatttgaaatcagaagcaaaaaaggctgccaaaatattaagagaattcac

SEQ ID NO: 856811 - DNA, 131 bp, Homo sapiens
tacaaccgcagcagtggtggctatgaacccagaggtcgtggaggtggccgtggaggcagaggtggcatgggatcaccggggaacccttgatccgtcgatcagatgataatgaaaaggccttgaaaatccgc

SEQ ID NO: 856812 - DNA, 98 bp, Homo sapiens
ggcagcggccggagccgggccgggcagctagcagggcgcttcggctccatctgatccactggaactccactctgtttggcagcattgatgaggctgtg

SEQ ID NO: 856813 - DNA, 100 bp, Homo sapiens
gcgaggcgagtgtggaaggactcctgaaccagctcgtcctggagcacctgcagctggcgcctctgcagtggggtatgggcactaggaaaagacttcttcc

SEQ ID NO: 856814 - DNA, 99 bp, Homo sapiens
ttgcagcctggtgggaatgaaggttctacagaaagtcaccagaggaagaacatccatgatagcagtcttctgtaaatcgaacttttcaagaattctctg

SEQ ID NO: 856815 - DNA, 100 bp, Homo sapiens
ggcagtagctgatgctgtcacctaccagctcggtttccacaggcacagctccatcgttacaatggcctctttagacccagctcctgcctcccagccttct

SEQ ID NO: 856816 - DNA, 98 bp, Homo sapiens
gcaataattatcacaattactgatgggagcaagttgactaccaccagtggagtccaggatgaggaatgaaatggaaaggcattttctggagcttcttc

SEQ ID NO: 856817 - DNA, 100 bp, Homo sapiens
tctacgtcgctgtcatgaactacctgcccactctggagttctcccaccctcacagggcaggaatttgacgtgagagccaaatgtgttatcaatgccacgg

SEQ ID NO: 856818 - DNA, 98 bp, Homo sapiens
ctgttaatccaatgaaatttgctgaacaagagaaaaaaaggaaaatgctttggcagggcaagaaagaagggtaaaatctctttgtggcttggaagcct

SEQ ID NO: 856819 - DNA, 100 bp, Homo sapiens
gtggagcaggcgttccagacgattgcacggaatgcacttaagcagtctgctccatctggacacaagcatctgacggtagaagagttatttggaacctctt

SEQ ID NO: 856820 - DNA, 98 bp, Homo sapiens
cttactctgacatctgattgccaaaatgctaaaagtcggctgtggcagtttaaggaggaacaaatgtctgtacagatgagacctgccagagccaaatt

SEQ ID NO: 856821 - DNA, 98 bp, Homo sapiens
gagtccgtaaggagcagcttccaggatcctgagatccggagcagccggggtcggagcgggatcttatggttggtgatgaggcaagtgaattacgatca

SEQ ID NO: 856822 - DNA, 100 bp, Homo sapiens
gaaaggattcgttacagccagagattgatctggccagtgggagcccctcaagctggcttcttgatatgtcttcattattttttgaacatttacttatttt

SEQ ID NO: 856823 - DNA, 99 bp, Homo sapiens
tggacgcaacggcggcgggagcatgaacgcccctccagccttcgagtcgttcttgctcttcgagggcgagaagtgtgtcaaggatgccacaatgccatc

SEQ ID NO: 856824 - DNA, 100 bp, Homo sapiens
ccagaagacactccccagggcagaaatagcgaccatggcgagatcctaattatctcatggctaatgaacgcatgaacctcatgaacatggccaagctgag

SEQ ID NO: 856825 - DNA, 100 bp, Homo sapiens
tgccggcaagagggagttaaggacattccaggcagaggcaagatggcttaatggtacaaataactccagagaccatgaatggcttgcggctagctttacg

SEQ ID NO: 856826 - DNA, 100 bp, Homo sapiens
ctgctacaccagcctcccaagcctcccagtgcaccttctaggagacaagcaaggaggcaagtgaggcctatctggttggcctttttgaagacaccaacct

SEQ ID NO: 856827 - DNA, 100 bp, Homo sapiens
tttctgagcttcatgacaatcaggacggtcttgtggaatcagtgtctgtccctgaagggtcattaaatcagctatgttcttcagaagaaccagaacaaga

SEQ ID NO: 856828 - DNA, 100 bp, Homo sapiens
gaggccagcgcgctgcaacacaagatcaagaactccatctggaatggaattctgctgttgagaagctgaagagtgaggcactgagaattctgctgtcaaa

SEQ ID NO: 856829 - DNA, 98 bp, Homo sapiens
cttgaccgaactgctgaagagcctgccatacttggttgaggcagaaatggtgcacagtgctttccaggcccagcgggctttccttctgatggcctctc

SEQ ID NO: 856830 - DNA, 98 bp, Homo sapiens
tgtggtattgtggaaattcccagaggactttggagaccagatatttgatttaatggatgccaaagcacgtgctgattgcatcaaagaaatagatcttc

SEQ ID NO: 856831 - DNA, 98 bp, Homo sapiens
cagtcagaatataaaaaggaagcagcaggacacgcccggaagccctgaccacagagacgcgtccagcctcaagtactacagccttccagcagccttcc

SEQ ID NO: 856832 - DNA, 99 bp, Homo sapiens
acaagcaagctgaatggaggccagatagtaccatgatagctgtatcatctggctcttgctgattgaattcctttggtgcagtttagcatgttcctctgt

SEQ ID NO: 856833 - DNA, 100 bp, Homo sapiens
ttctggccaggtgccgggaggggcgctgtgtcgagggcgatccccccaaagcagcgtcccgtgctaaagaccactttacctgcattgtgaaggtactttt

SEQ ID NO: 856834 - DNA, 98 bp, Homo sapiens
cgcgtctgcgggccccaaattgcgtaactccaaggacttttcggagacttttaaaaagcatgctttacgctgttattgtcaagccatgcaagtttaca

SEQ ID NO: 856835 - DNA, 100 bp, Homo sapiens
ctcggagaggtgctcggattctcgtagctgtgccggacttacagattccagtctgctgttagatgattattcatccaagttgagccccaaaccaaagaga

SEQ ID NO: 856836 - DNA, 100 bp, Homo sapiens
aacactgagaacaaagaacggaagtccttccagaaggagcttgtgatggaaacattggcaaatttggagcgacagatctatgcttttgagggaagctacc

SEQ ID NO: 856837 - DNA, 100 bp, Homo sapiens
tatgacatgtactcctatgtttgggatatcaagagtataatgtctatggtgaagtcttttgtacagtggttagcaccgggtgctcagcagttctgcttct

SEQ ID NO: 856838 - DNA, 100 bp, Homo sapiens
agggccccggactccgacggcggctcggacgccgactcggaggtgggtccggggagcccgactcggaccgcggaggttctaaatgagaagaaacttcaag

SEQ ID NO: 856839 - DNA, 104 bp, Homo sapiens
aacctcgtcaaagctgatcagcagctaaggtttctattacaactggttggtattcttttagaagacattgttacaaaacagctgaaggtggaaatgagtgagca

SEQ ID NO: 856840 - DNA, 100 bp, Homo sapiens
gatgatgcctgagttcagccctcagcagtaacaatgatgatgttatgttgatttctgtggaaagtcctaatttgacaactccaattacatcaaatccaac

SEQ ID NO: 856841 - DNA, 98 bp, Homo sapiens
ataggaatgtgatgttagagaactacagaaacctggccttcctgggttaccagatgtggtggtttacccaacaacattgtggatgtctgggagttttt

SEQ ID NO: 856842 - DNA, 98 bp, Homo sapiens
tttcattgttccactggacgctcatcagagggaagatctttttcctcaattgggcgtctctggccgagcctctttttgtggaaaacgacagcagcagc

SEQ ID NO: 856843 - DNA, 100 bp, Homo sapiens
attacagacatgggccactacacctggcgatctgtgtcttatacggttcgaaaacatggccaaaagaaatgccgagaaggaactgacagataggaattgg

SEQ ID NO: 856844 - DNA, 100 bp, Homo sapiens
atttactaactgtgtgaccttaggtggcattggtagggtggtcaacggagccttcatggtgctgaaagggcatcgatctattgttaaccaagtccgattt

SEQ ID NO: 856845 - DNA, 100 bp, Homo sapiens
aggtgacgaggagggagaagacgaggatgatgcggaaattaaccccaaggatcaggtcatccagctgatgaacgcgatcttcagcaagaagaactttgag

SEQ ID NO: 856846 - DNA, 100 bp, Homo sapiens
acccagaaaatgatagaatgagaatgaagtatggggaacaacctatcttcagcactcgagctcatgtcttccaaattgacccaaacacaaagaagaactg

SEQ ID NO: 856847 - DNA, 98 bp, Homo sapiens
gttccccatttgagaacaagactattgaacgcaccttaagtgtggaactctctggaactgcagatgaagaactagcactggatggcagttttgatcca

SEQ ID NO: 856848 - DNA, 100 bp, Homo sapiens
cacaggtgaatttaaaggagcagccctggtgtcacctatcagtaaaagctcgtttgacagcaagtttgtttaccagcaaataggactcggaccaattgaa

SEQ ID NO: 856849 - DNA, 100 bp, Homo sapiens
gtcatcaattctgcaaaacgtggttatcctttagaggatgcaacacacatagcacttcctgtttgagatggagaacgtttttactgtgtcatcagatcct

SEQ ID NO: 856850 - DNA, 100 bp, Homo sapiens
tcactcctttctggatctctcattggactcaagccagcatggctcacaccacaaaggttaacggcagtgcctcagatcaatgagctgagcaatgttcctg

SEQ ID NO: 856851 - DNA, 100 bp, Homo sapiens
cagaagagccaaggaataaacatgcaatgaacccaaaagggttgtggggtgatcatgggcaagaggctttagaatctgctcatgtttgcctaataaatgc

SEQ ID NO: 856852 - DNA, 99 bp, Homo sapiens
tctgtcccaccgactggcaggggatgctccgtcatcccgtgcgaagcctggtccaaggaaacctcgacctgtctcccagttggttgcacagcaggttac

SEQ ID NO: 856853 - DNA, 100 bp, Homo sapiens
ccctacacactggcctccctctaccaccgggagaagcaggctgcagtgcagaaggcaattcctatgtacaaaattgccaccaaaaacgatgttgatgtcc

SEQ ID NO: 856854 - DNA, 99 bp, Homo sapiens
tgcctcaatggaacccctgctctggcctacctggcggtcaagtctggcaccatctttgacaacttcctcatcaccaacgatgaggcatacgctgaggag

SEQ ID NO: 856855 - DNA, 98 bp, Homo sapiens
aaaaagcagcccaagctccagccgccatctcctgatattgatgatgttaagaagttcaaaccgggttacctggaagctactcttaattggtttagatt

SEQ ID NO: 856856 - DNA, 100 bp, Homo sapiens
aggaatggcatttgaaaaatgctattagagtagatggaaagtgcttttgcatctcttccaaagcacaaacctggtttctggtcagaggtagctgcggctg

SEQ ID NO: 856857 - DNA, 99 bp, Homo sapiens
ctacatcgatcctgagaaaggagacattgtcactgttgtgtcacctgcgctgctggaccgagagccactgaagatcctggtgtcgccatgggccgccgc

SEQ ID NO: 856858 - DNA, 100 bp, Homo sapiens
ttagaccactgtccaaccaagataagcctgaatgaagaccatcttctttgcaaaacacaagggaagtttaattagcattgacagcacctgtacagagatg

SEQ ID NO: 856859 - DNA, 101 bp, Homo sapiens
gccatcaagctggactcgggagtggtgaaacgcctgtacacgttggatgggaaacaggatgttgtacctcaggcgttgttagatcagtatttatctatgac

SEQ ID NO: 856860 - DNA, 100 bp, Homo sapiens
cacagagaagctcccagctttgaaggtcttgcggtggtcctcgatgggcttcctggaatattggtgtgtttatttgcatcagatgtgctggaattcatag

SEQ ID NO: 856861 - DNA, 100 bp, Homo sapiens
aaagagacctggagagaggaaaaaaaatgttcaccggcaacctgtccagagagatgcaggtcagctcctccagtaccacaacttctgagagtcaagatcc

SEQ ID NO: 856862 - DNA, 100 bp, Homo sapiens
tcaactactcctgcgaggaaaagattccttatggcagaaagtatgacaaggcatggctcctgagcatgattcagagcaagtgcagtgtgcccttcacccc

SEQ ID NO: 856863 - DNA, 98 bp, Homo sapiens
gcactgtaccccaggatgctgccaccatccccagctcagccatgcaggccccaacaggttgtctgcattcaaaagagcattctattaaagctacctta

SEQ ID NO: 856864 - DNA, 100 bp, Homo sapiens
ctcttctccacgcaggcttcaacagggtggttcacgggggcaagtgacagccctggtttctctgaaggctggactaattcaatcaagatcaactctaagt

SEQ ID NO: 856865 - DNA, 99 bp, Homo sapiens
tttccgctcctctgaagagtgaagtgagcaaatacaacccagcagtaggttattgaagacagcagccccagggagaatgctggagaaccagactcctgg

SEQ ID NO: 856866 - DNA, 100 bp, Homo sapiens
gaaaacttaatctacacctacgataaggacttgtcttacaaggaccggcactggcatgaagcctgtttccactgctcgcagtgcagaaactcactggtgg

SEQ ID NO: 856867 - DNA, 100 bp, Homo sapiens
ggcacgaggcctctgagcctagagagtgaagctcatcagcgatggcagtgtggtctgcgctgaagcactctgggaccatgtcaccatggacgaccaggag

SEQ ID NO: 856868 - DNA, 98 bp, Homo sapiens
cgccacattaaccctttcattttgtttggaagatggaccaaagcgatacagttcctatatgatagtggactcttcagatcacgaccctggagaaaaag

SEQ ID NO: 856869 - DNA, 100 bp, Homo sapiens
ctgatgtggcctatagggatccttcacttagggatgaggcagcactaacaccagaataacactgatgttgccatcagcagtcacacgactgaaacatgag

SEQ ID NO: 856870 - DNA, 100 bp, Homo sapiens
tcccatgtttttgagtatatccgttctgagacatacaaataatttggagtccaggaatgagactaagcatttatctgtaggaaaagatattattcaaaac

SEQ ID NO: 856871 - DNA, 100 bp, Homo sapiens
gcagagatcctgagtgtctaccagaagtgcaaggacaagcaggctgctgctaacttcctgcctgacacagctcacttcaagaagtgcacaatgtcagaac

SEQ ID NO: 856872 - DNA, 98 bp, Homo sapiens
gtaaaattggcaagacatatccttacaggcagagagtgtcttgggacaaggtgcgcattcctggtgtgctgcagcgattgggagtgacatactttgtg

SEQ ID NO: 856873 - DNA, 108 bp, Homo sapiens
tgcagaccgaagaattagctggaaattctgagacactaaaagaacctggaagctgtgctgaatggtttggtggccactgaggtgttgatgtggttttatgtcggagag

SEQ ID NO: 856874 - DNA, 100 bp, Homo sapiens
cagctgacgaagctcgggacaggatcaaccggttcctcccaggcggcaagtttgacaagtatgcgcccaagctggacagcccctacttccgacattccag

SEQ ID NO: 856875 - DNA, 99 bp, Homo sapiens
tccctctctccacggtaaggggaacgggaggatgaaattgctactatggagtgcatcaacaatggcaagtccatctttgaggcccgcttggacattgac

SEQ ID NO: 856876 - DNA, 105 bp, Homo sapiens
atcatttacagctgtctgaaggaagaaaggaaaattctggaaaacgcccagagatttaatcagcttaattggcttagtgtcgacttcaataattggaaagactgg

SEQ ID NO: 856877 - DNA, 108 bp, Homo sapiens
cgccctgcaccagccccaatcagacgccgctcctccaactaccgcgcttatgccacggagccgcacgccaagcgcgtgctcactgccgacttctgcgccggctgcaag

SEQ ID NO: 856878 - DNA, 100 bp, Homo sapiens
acacagaggaatgaccaccatggcagatggcaacagaggatgtcaacaattttttggaggttttgcaaaaggcatcaaattaaatcaagttcaaatattc

SEQ ID NO: 856879 - DNA, 99 bp, Homo sapiens
cgagaggcacaaatggctgccaaactggaacgtttgcgagagaaggcccggattgcatttctacaaggcgaaagaaaaggtcaagagaacctgaagaag

SEQ ID NO: 856880 - DNA, 98 bp, Homo sapiens
tttttctcatggatgttcttcttcgagtatttgtagaaggaagattaagattgcggccctgcgcatgtatactagctgtgtggagaaaactgacttcg

SEQ ID NO: 856881 - DNA, 98 bp, Homo sapiens
attttcaaacattaaaagcagaagataattttgaagacatcataactaaaccacctgttcgaaaggaagtccttgttcctgaagcctcagaatttgat

SEQ ID NO: 856882 - DNA, 98 bp, Homo sapiens
gcactacaacaggaaaatcatattatagatggagtaaaggatgatgaagtggttctgcagtgcaccgcaaccatccacaaagaacaacagaagctatg

SEQ ID NO: 856883 - DNA, 98 bp, Homo sapiens
tggcaggagcttttcgtaaagggaagtcatttctactggacttcatgcttagatacatgtataacaagccacagaatatattactgagcagcatatac

SEQ ID NO: 856884 - DNA, 99 bp, Homo sapiens
gcagtcctaccatgtcagccttcccagtagctgggaccacaggtttatgatagttctcaatctcatgagagcttctcagactggcgaggtgaactactg

SEQ ID NO: 856885 - DNA, 99 bp, Homo sapiens
gcagatcgcgtggagtgaaggtccctcagcggcgcgtaaccccagacacctacatgttctgattgggacctcagtggtcaaaatccctttcaccatcct

SEQ ID NO: 856886 - DNA, 100 bp, Homo sapiens
gcggcggcggcggctgctgctgctgctgcccgcgtccgaggctcgcgggcggcgggcccggtgaaaatgcctcgtgtaaaagcagctcaagctggaagac

SEQ ID NO: 856887 - DNA, 99 bp, Homo sapiens
gagtacctggaggctcaacggcagaagcttcaccacaaaagcgaaatgggcacaccacagggaaaacaaagtgcatgatgaagtcttcagactgtgtca

SEQ ID NO: 856888 - DNA, 99 bp, Homo sapiens
aatacgtggttggagagctcatctggaattttgccgatttcatgactaaccagtgtgaagagcgattatatgttagagatagctgatcaagtggaccag

SEQ ID NO: 856889 - DNA, 100 bp, Homo sapiens
tttgtccctttgcctcatcccaggttgccttggaaaatgccaacgccgtgtctgaagcaggggaaatgctgtctgtagctgagcacttcctggagcagca

SEQ ID NO: 856890 - DNA, 100 bp, Homo sapiens
gtcctgaaggagttccaccaggccgggaagcccatcgggtttgtttgtaaaaacaatggtgtgttgtttgaaaaccagctgcttcaaattggacttaagt

SEQ ID NO: 856891 - DNA, 98 bp, Homo sapiens
gattcgtgcatgggaatcggagaccatggcagtgcagctggtgcccgactcagctctcggcctgctgatgttgaggagctcaagcttgggaaaatggt

SEQ ID NO: 856892 - DNA, 98 bp, Homo sapiens
ggaggcccagaaagatgaaatcatctgccccagctgtaataggactgcccatccactgagacatactagagaccgttggatggcagcttaaccttcag

SEQ ID NO: 856893 - DNA, 100 bp, Homo sapiens
gacccaggagagcaaggcccagaaagagctccagggcctggaatggatggtttccctgtataataacaacttgaacggaatcttagccgatgaaatgggg

SEQ ID NO: 856894 - DNA, 100 bp, Homo sapiens
aaaggacaagccccacaatatctttaagagagatggctctgatgtcatttatcctgccaggatcagcctccgggaggtactgccaaaattatgacatgat

SEQ ID NO: 856895 - DNA, 100 bp, Homo sapiens
aagggcaacaattttctgtacaccaatggaaagtgcgtcatcctaaggaacatcgacggcagctggtggaatttttgaagaaaatggaatctcgaggccc

SEQ ID NO: 856896 - DNA, 98 bp, Homo sapiens
cagggtcgcgatgctgcccggtttggcactgctcctgctggccgcctggacggctcgggcgctggaggctgaggttcaactatgctacctggaagcac

SEQ ID NO: 856897 - DNA, 100 bp, Homo sapiens
tataaattggggtctctttttgaagataagaatgtgccttttgatgaaagaactttatctttctacaatgaagagtggaatttctatgtttaaggaataa

SEQ ID NO: 856898 - DNA, 100 bp, Homo sapiens
atttgccagacattatcagactggacagggttctcatgtatcagccatcttctgtaagggtgcccagtgtgacttcggttgatcctgctgctattccgcc

SEQ ID NO: 856899 - DNA, 98 bp, Homo sapiens
ctgcagaccttcccaggaagccagagccacacacaccatcatggtcctgggtgtactctgtgtgaccgcgcctatccctcggactgtcccgaacatgg

SEQ ID NO: 856900 - DNA, 98 bp, Homo sapiens
tgggaggtcatcgaaggctaccgggcccagcacagccagcaccgcacgccctgcaagggagaacatccagtcatggataaaaatgagctggttcagaa

SEQ ID NO: 856901 - DNA, 99 bp, Homo sapiens
tcgaatgaggcacctaaaaattgtataccgcagattcaggtattgtcaatatggactcgccatatggttctgtaacaccttcttcaacacatttgggaa

SEQ ID NO: 856902 - DNA, 100 bp, Homo sapiens
aagcaatcatcaagcacctcctcgaatggagatttacagacagtcatctgggtggaggacacccttttgggatcagcactgaaagtgacgccatatccca

SEQ ID NO: 856903 - DNA, 98 bp, Homo sapiens
gccctgctatgagaaacaacatgccatgcagtgcgttcagtgcaaaaagataaagcatatgatggctttcattgaacaagaagccaatgagaaagcag

SEQ ID NO: 856904 - DNA, 100 bp, Homo sapiens
gctctgaaaacagcatatgatgtgcttaaaaaaatgcagtcaaagaagatggatccacctgatgaggaagtagaccagttgcgtttggagagattacaaa

SEQ ID NO: 856905 - DNA, 98 bp, Homo sapiens
ttttccggtcccggcgcccggcgagggcgcgcggctggtgtccgccccgcccgaaagggccacccagtgctcctgcagaagatcgttcaggaacaccc

SEQ ID NO: 856906 - DNA, 100 bp, Homo sapiens
ccacctgttccgtagcttgccggtgccccgaagctttgacagatccaaatgcttctgctgcccagcaggctgttctccagcagcacatcaatagtctaac

SEQ ID NO: 856907 - DNA, 122 bp, Homo sapiens
gtgattttctttccccctttaacttagaggaacgaggattatacagaaatttgaaggtgacgactccgatgaggaagatctttgtatcagcaacaaatggactttccaaagaaccagtcgca

SEQ ID NO: 856908 - DNA, 98 bp, Homo sapiens
cccgagacacaccaggccggcaggctgagaaaagcgagaccgcgtgcgaggaccgagagaagaagaaggaggttcctgctgtgccagaaacccttaag

SEQ ID NO: 856909 - DNA, 100 bp, Homo sapiens
gttgatttgctccagtggtccaaggacactttcagtcctgatgagcatttctgggtgacactcaataggattccagaaaaatcctcagatcatgtatcta

SEQ ID NO: 856910 - DNA, 100 bp, Homo sapiens
aacactagtgtatggcatttttacaacatcaagcaaaatgatgcttcaacacccaggccaggtctctgcctcggaagtgagtgcttctgccatcgtcccc

SEQ ID NO: 856911 - DNA, 100 bp, Homo sapiens
tggactgtgcatagcagtagctgttgtttgggctgtgtttcgaaatgaagacaggccagtgacatatcaggcatttcgggaatgtacactggagaccaca

SEQ ID NO: 856912 - DNA, 100 bp, Homo sapiens
gaagagtctctgcagtttaaacatgaacagcaccaagctctcagctgacacctacgaagatctgaaggtgaccagaagtcagcagcttcccagaagcccc

SEQ ID NO: 856913 - DNA, 99 bp, Homo sapiens
ttcgagttcaaagagaccctcggaacccctgggcgctgcctatggcacagccaagagcggtaccggcattgcggccatgtctgtcatgcggccggagca

SEQ ID NO: 856914 - DNA, 98 bp, Homo sapiens
gccgtctactcggccactccggtcccgacacctagcctgcttggcccgccacaataaactgttgcagcagatgctcaaaccaggatcggatccagatg

SEQ ID NO: 856915 - DNA, 101 bp, Homo sapiens
tcggatgcagcatatcacagggttaacagtaaagactgcagaattgttacagaatgtcgtactctcaggaggctccaccatgttcagggatttcggacgcc

SEQ ID NO: 856916 - DNA, 98 bp, Homo sapiens
atttcacagaggacagctcctcagaagtgagtgagatcattggccgagacctgagtggcttccctgcacctcctggagaagagcctcctgcctgaacc

SEQ ID NO: 856917 - DNA, 98 bp, Homo sapiens
tagattcttatcacaaccaagtagaactggctcttcaaattgaagttaaagtattgcacaatcagctggtccttttccacaatgccattgccgcttac

SEQ ID NO: 856918 - DNA, 99 bp, Homo sapiens
atcagcggaagaccaaagaggatgagaaggacgacaagcccatccgagaggggtctggttgctgcttacagtggtgacagtgacaatgaggaggagctg

SEQ ID NO: 856919 - DNA, 100 bp, Homo sapiens
aacggtacagcacaaagtcgccaaggtgcggtctttcgaccactccggaaagactggctcttcgtggttgtggtatgcctggctgccttcctcatcttcc

SEQ ID NO: 856920 - DNA, 100 bp, Homo sapiens
tgggatcctccctgcgccatccttctccactcccggacccctgccccagtttcattgtactgacaacctcagctggcatcatggaccatgaagaagcaag

SEQ ID NO: 856921 - DNA, 98 bp, Homo sapiens
aggctggcggacaggcgacagcgacctgcggcagggtgtggtgctgcagcaggacagctacattgaggaccagaaactggtgctgagcgagagggcgc

SEQ ID NO: 856922 - DNA, 100 bp, Homo sapiens
acccaaacaaccgcagccgctgttcccaggatggtgatccgtgtatatattgcatcttcctctggctctacagcgttggccacggacagagcgaagggga

SEQ ID NO: 856923 - DNA, 98 bp, Homo sapiens
gtgagacatgcacagacagatctggcatctccactggacactggtcaggtggagttggcatgaacttaacagcagcagatactgtgatttttgttgac

SEQ ID NO: 856924 - DNA, 99 bp, Homo sapiens
agaatcctccaaaaccagtcatgaccactagacccacagctgttaaagcaacagctggacaggtagtgaatcaaatgaataagaagctacagacgggtt

SEQ ID NO: 856925 - DNA, 100 bp, Homo sapiens
cccgagcaaaccccagcaagatgcggaggctgcctcggcggagcagaggaaccacacgctgatcatgatgtccctggtagatttgggaaagaagctttta

SEQ ID NO: 856926 - DNA, 99 bp, Homo sapiens
cggacgccaggaaacagcaaatccaatagatccgactttatcaggctgggctctcgcttcagattcagacactggcttcatgtcctattgaccgtaaac

SEQ ID NO: 856927 - DNA, 100 bp, Homo sapiens
ggggttccctgacccccccatcctgcagcccaccttcctgcagtgtcgtggcaggttgagaacttgttgcttagtaaccaagggaccattaagctgtgtg

SEQ ID NO: 856928 - DNA, 99 bp, Homo sapiens
gataccaccagcaacttctaatggatcctcttccaaaaccacaaacttgcctacgtcagtaacagccaccaagaatcatgtcaaccctgccatggactt

SEQ ID NO: 856929 - DNA, 100 bp, Homo sapiens
cgtggagatgaagaattggattctctcatcaaggctacaattgctggtggtggatatcctcagaccatctcaaaaaggaggaaaagatgactatgatggc

SEQ ID NO: 856930 - DNA, 98 bp, Homo sapiens
atcctgatgccaatgggaaatcctttgctttcgttgggtggtttgctctgttagaggttcagatgtgtattattttaatactttataaatatgactgt

SEQ ID NO: 856931 - DNA, 98 bp, Homo sapiens
cgaaggccctatcaggacatggagtatgaaagacggcccctggtggacttgtacagccgccggtacttcctgaccgtcccgtatgaagagtgcaagtg

SEQ ID NO: 856932 - DNA, 98 bp, Homo sapiens
cggaacatcgtccctcctgacgctcagaaggatgccctgggctgctgcgtggtacagagtgtgaacatggctacgcctcttcattcccgtccatgccg

SEQ ID NO: 856933 - DNA, 100 bp, Homo sapiens
catgttggcccagcaaatgcaactagccaatgccatgatgcctggtgccccattacaacccgtggtttggtgcaagtgccaaagttgtgcatttcctggg

SEQ ID NO: 856934 - DNA, 100 bp, Homo sapiens
agatctgtaattacagctactccagcaacatcttgtccataaggctgaaccggcaacggatcctctggttggaagcatagccactcagtatttgaccaac

SEQ ID NO: 856935 - DNA, 100 bp, Homo sapiens
ctttgaaaaagtctcctaaacagacaggctacggatggatatgtcaggaatgtgattcttcatcttccaaggaggtatatcgaattccaaagaaaagtca

SEQ ID NO: 856936 - DNA, 100 bp, Homo sapiens
agcgacccgctgctcagcgtcctcatgtggggggtaaaccactcgaatcagcatgattcttcagaggctcttcaggttctcctctgtcattcggtcagcc

SEQ ID NO: 856937 - DNA, 100 bp, Homo sapiens
ctttcataccggcgtgactctgtgtacagctgtgtcactctgccgtatttccacagctttctgtacatgaaagggtttcttccggagaacaatcagattg

SEQ ID NO: 856938 - DNA, 50 bp, Homo sapiens
cccgggtcgtctttcgtgtggccgcgaggcgtcctgcctctgcggctctg

SEQ ID NO: 856939 - DNA, 135 bp, Homo sapiens
gctataataatagcaaacatcgatggcctactggggataacattcatgcagaacatcagcccgagcagttcagtgatgaagtggaaccagcaacacctgaagaaggggaaccagcaactcaacgtcaggatcctg

SEQ ID NO: 856940 - DNA, 98 bp, Homo sapiens
atggctccctgcagtaccctttaacggaactcttggtgtaataacagaagctacaataaaaatcagaccagtccctgaataccaaaagtatggctcag

SEQ ID NO: 856941 - DNA, 98 bp, Homo sapiens
tttgatgctagcctgtccgggatcggccaggaactgggtgctggtgcctatagcatgagagcactacaaacaccactggtttcccgaaaagccgtcca

SEQ ID NO: 856942 - DNA, 100 bp, Homo sapiens
gcgtgtcctctgaaaggtacttgatagaaaatgctgctgaagaacctagagtcttatgtattatacaagatactactaattcaaagacagtgaatgaacg

SEQ ID NO: 856943 - DNA, 98 bp, Homo sapiens
gacaagccgctggcagccgcggatctcaccgccgctcaggttgaaggagaagagccaggcgtgcggagggaacttggggtccattgaagagctgcgag

SEQ ID NO: 856944 - DNA, 100 bp, Homo sapiens
tggtgagaccagctcgcagagtgtggttgtagctgtggacagcacctgttcttcccggagcctatcagcaaagccattcccaaggctatggctacatgca

SEQ ID NO: 856945 - DNA, 100 bp, Homo sapiens
ggcactgaagagaatggcagatgcactggataactatgttattcgaggtattattatgccgctaccttcaagaagtaatttgcgtgctgtttattggagc

SEQ ID NO: 856946 - DNA, 98 bp, Homo sapiens
caggtgcccagaggactttcttccagcttctgctgtccttctttgtggagagcaaggaggtctgcaagatgctcatacacatgcgtcacccggaggtg

SEQ ID NO: 856947 - DNA, 100 bp, Homo sapiens
cgagcacgccggccccgcgcgcgcctcgaggccgagtcaaggtggcgctcaggcacgaggatggcgatgagaccacggagccaccccccagtgggtgccg

SEQ ID NO: 856948 - DNA, 100 bp, Homo sapiens
gtacaaaggagagtttaaacagccaaaacagttcattcatattcagcattgccatcacgaaagccaaagtggatttctccagtgtggtgtgcctgccccc

SEQ ID NO: 856949 - DNA, 100 bp, Homo sapiens
ctcagatgatgactcaggctgtgctttggaagagtatgcctgggtcccgccgggtctgaagcctgaacagagattattttgcagaggatgatggggagat

SEQ ID NO: 856950 - DNA, 98 bp, Homo sapiens
tttccccatagtatgagaagatcctgaagctcacggctgacgccaagtttggtttggcgaagctgtgaatggcaacctcgtggtgggcactctggcct

SEQ ID NO: 856951 - DNA, 99 bp, Homo sapiens
gcagggctgaagagaagatggaggagctggtggtggaagtgcggggctccaatggcgctttctacaagcataagcagtactataatggatgtagacagc

SEQ ID NO: 856952 - DNA, 100 bp, Homo sapiens
aggagcattaccacctcagccaccctgaccactatcatcaccatggaaaaagtgacttgagcaggtgaagtattacagacacttagcacctgatcacttg

SEQ ID NO: 856953 - DNA, 100 bp, Homo sapiens
cgaggaggaggaggacgatgatgtggacaccatgctgatcatgcagcgcctggaggctgaacgaagagcgaggatggtcctggtgctgcccaggaaccca

SEQ ID NO: 856954 - DNA, 99 bp, Homo sapiens
gggtataaatcaactacctaatgttatacaggctctggaaaaacatgaagcgggtccatatggaatatttgctggtagggatgcctccagaggactggc

SEQ ID NO: 856955 - DNA, 99 bp, Homo sapiens
aaggcgacaggaaccagctcgggggccaactctgaggagtccactgcagcagatgaagtacaacttgccttcctggtgtgaccgagtcctctggaagtc

SEQ ID NO: 856956 - DNA, 100 bp, Homo sapiens
ccggagttggcgtcccttctccctctccgagtgctgctcctgtcattgtggccatggacggagaatggggtactaagagaaaagcacgaagctgtggatc

SEQ ID NO: 856957 - DNA, 100 bp, Homo sapiens
atttttattgtctacctctgaaaccatgtacagtgaactgcctgaagaggttaaccctattgcttggtctcctgaatccatggaaaaatgcttacaggac

SEQ ID NO: 856958 - DNA, 100 bp, Homo sapiens
cttgccttctgagctttgtaccaaagacctgggaaaatacttcctcctgtgctggttccaagacacagcgaatataatcctcagcacagcctcttagctc

SEQ ID NO: 856959 - DNA, 100 bp, Homo sapiens
gccagcaagaaagtaattacagtgtttggagcaacagattatagcatttgatgagctgaagactgattacaagaatcctatagaccagtgtaataccctg

SEQ ID NO: 856960 - DNA, 100 bp, Homo sapiens
gtcttcttcaaaagagccgctgaaggtaatggaactgctggtccatctgaataaacgtataaaaagccgccccaaaatacaacttccagtagagacactg

SEQ ID NO: 856961 - DNA, 104 bp, Homo sapiens
tgagaagtacagggagcgagagctggagaagctgggattggagattccacccaaacttgctggtcactgggaggttgacatcatggacatatgtgagtccatcc

SEQ ID NO: 856962 - DNA, 100 bp, Homo sapiens
aaaagttaaataaattgcagaagttacttattcttttaagaggtctgcctggttctgggaaaacaacattgtctcggctggattctagtgacatttataa

SEQ ID NO: 856963 - DNA, 98 bp, Homo sapiens
gacggcgagcgcgagcggcgcgagaaatttttggctttcacccccaaccagtgaccaaagacttgaccactcaaagtccagctccccagaacactgct

SEQ ID NO: 856964 - DNA, 100 bp, Homo sapiens
gattttgacatattctacaacgtcactggatgcctaaggggatggagcctccattttctcacagatgttttccaaggtacatagggtttctcagagaaga

SEQ ID NO: 856965 - DNA, 100 bp, Homo sapiens
aggaagtcattaaaggacagtatggcaagctcacggacgcgtacggctgcctgggggagctgaggctgaaatctgtgatacgggaacaacacctccagag

SEQ ID NO: 856966 - DNA, 100 bp, Homo sapiens
taaggactatattgatgaagctgagaaagttgccaaagaagccaaagatcttgcacatgaagctacaaaactgatcccttcccactggaggcatgtgatg

SEQ ID NO: 856967 - DNA, 131 bp, Homo sapiens
ccaccccagctgtgcacgatgcagcagatgcaaccagatgttcacagaaggagaggaaatgtatcttcaagagtaatcaagtcagaggattatatgacttttatctgcctagagaagaactatggatctac

SEQ ID NO: 856968 - DNA, 142 bp, Homo sapiens
cgatgacaagaagaaggaaaaagatgtgcagtttgaacacggctaccggctcggcttcacagatgtcaacaaggtgctggctgccagctgctgcgccccccatgtagaaggtgcacctcctgggagcaggcacgtcttttgg

SEQ ID NO: 856969 - DNA, 106 bp, Homo sapiens
agaaaatgtttccgacacatagccctcgattatgtgcttcagatcatggaagggaagtggttgctgtgtatgttactggtgcttggaactgctattgttgaggctc

SEQ ID NO: 856970 - DNA, 100 bp, Homo sapiens
actccgccttcaatctgctcatgcattacccacccccctcgggagcagggcagcacccccagccgcagcccccgctgggttcatcatttacaacccaaca

SEQ ID NO: 856971 - DNA, 100 bp, Homo sapiens
aaaatacaaatcacacgcataatggatgaaaggaaccgacaggaacaccagatgcattttcacaattactcacctgtccatattgtgatagaggctataa

SEQ ID NO: 856972 - DNA, 100 bp, Homo sapiens
ctacactgtacatgctttttattacaagactacggagcataggaggaaaattcatcatctggtaattgaggagattgaggaaatgatgcagaactcccca

SEQ ID NO: 856973 - DNA, 100 bp, Homo sapiens
ctatagtctagtgataatcctgctgaaaacaaagtgttgcgtacagttcctctactagcagcatgcctcccccaggacaagtgtaaagtgaagatcggtc

SEQ ID NO: 856974 - DNA, 100 bp, Homo sapiens
gtgcagctttgtagttttgcgtgtgttgaaagtacaattctattgcacatcaatgatatcatcccagttcgttcccacatgcagggcagcacaaggagaa

SEQ ID NO: 856975 - DNA, 100 bp, Homo sapiens
agggcatatacagcttataattcctggagaatctgcttgttttgcggccaacagagcacttatggcaaggcatctcgagggggtggcaatcaccaaaaca

SEQ ID NO: 856976 - DNA, 100 bp, Homo sapiens
gtctgttagtccccagagcctccaagggaaaacggtgccttggaacactatgttaattgcctggatctggtaaacaagaggctaccttatggccttgctc

SEQ ID NO: 856977 - DNA, 98 bp, Homo sapiens
caagtcaagctacaaggcttttgcagcaatccctacaaacacattgcttttggaacagaaggttaccacacttgtaaactgtccccagaacccttcca

SEQ ID NO: 856978 - DNA, 98 bp, Homo sapiens
aacatccgagggtgcctgggaatcggtcgcctggaggaccagtatttcccatggaggccttcatcacggcggcttggattgtcctgtgccaactgtca

SEQ ID NO: 856979 - DNA, 100 bp, Homo sapiens
ttcactgcccgatatctggacctcttcaccaactacatctcactctacaacacgtgtatgaaggtaatgggtaaagtgccaaccatatccatcaacaaaa

SEQ ID NO: 856980 - DNA, 119 bp, Homo sapiens
cggtgctggctgggagttctggtctcaggcaaggtggggactgggcacatcatcaatacggaaggatcgagatcgagaccgggatcgtgaagatcggtctaaagatcgagaccgagaac

SEQ ID NO: 856981 - DNA, 98 bp, Homo sapiens
gagcactattatggatgaaggacgtgtctcaggagcttgatccagacctctacaagcaaatggagaagttcaggaagtggcgtgatctcggctcactg

SEQ ID NO: 856982 - DNA, 98 bp, Homo sapiens
tcgttacagacatggacaccattgagaagtcaaatctgaatcgacagtttcttttccggccctgggatgtcacgaatgctgaccccctgaaggtgtac

SEQ ID NO: 856983 - DNA, 100 bp, Homo sapiens
acctatggagattagggaagaaaagaaagaagacaaggtggaaaagttgcagtttgaagaggaggactttgctcatgagcgctcagagagctcagaagtg

SEQ ID NO: 856984 - DNA, 98 bp, Homo sapiens
tgtgattaccatggcgaggagtctctgtccgggggcctggctaaggaaaccctattacctccagcacccaccaaggctccggatgtgttccccatcat

SEQ ID NO: 856985 - DNA, 100 bp, Homo sapiens
gaccattgcttttctgttgcccatgtttagacacatcatggatcagaggtcattagaggaaggagaggggccaataggattcagtggtcccaatttaaag

SEQ ID NO: 856986 - DNA, 100 bp, Homo sapiens
ggcagaactgcctgattacaggagctttaacagcatgcttgagagttcaaaccggcttgatgaagaacacaggctaattgccaggtatgcggcaaggctg

SEQ ID NO: 856987 - DNA, 100 bp, Homo sapiens
ctctttccggttcagccctgtagtgctgttcaccttctacttaagcaaagtgcagaggaaagttccacttccagaaaaagaactacagaagacgatatcc

SEQ ID NO: 856988 - DNA, 99 bp, Homo sapiens
gaggggaaacacaaagccggctacgcgctgcgagaattaaagctatagagagtcccaacaaagaagatgatacccagtggctgacctactgggtagtgt

SEQ ID NO: 856989 - DNA, 100 bp, Homo sapiens
agaatcattataaatcccagtagcagtctgctggccagccaagatgagacaaagagctgaagaagcaggtggagagtgccgagctgaagaaccagcggct

SEQ ID NO: 856990 - DNA, 100 bp, Homo sapiens
atggaactgtacagcttagtgtacaggtaatttcttaccaaggactgactgcattgcacagatgatggatatttacgtatgtttgaaacgaccatcctgg

SEQ ID NO: 856991 - DNA, 100 bp, Homo sapiens
agccacagacggaacaagcatgcagagacgagttgtactgctgtcacaggaaatggacgctggattacaagcatggcagctcaggcagcagaagttgcag

SEQ ID NO: 856992 - DNA, 98 bp, Homo sapiens
gattgcaaatcagactggaagatggctccttcctcagagaagcttcctgttatgtaccttatggattctattgtgaaaaacgttggaagagagtatct

SEQ ID NO: 856993 - DNA, 100 bp, Homo sapiens
gaaaagctggcccgtgacctgaaggctgtcaagtatgtggagtgttctgcacttacacaggaaagaccacagcaagattctttcattcgtctcctcctag

SEQ ID NO: 856994 - DNA, 100 bp, Homo sapiens
gctacttcaagtctggcctgaagtacaaggtatcagacttggtgataattctgaattatgaccgtgctgtagaagcttttgcaaaaggcggaaatctgac

SEQ ID NO: 856995 - DNA, 100 bp, Homo sapiens
gccagagcctggagtctgcgaaggccgggacccggttccccggcccacagtgggggtgtgcaaacccgagagaactgggctatgattaaaagtttcatgg

SEQ ID NO: 856996 - DNA, 100 bp, Homo sapiens
gctgtattgccgcagttctagcttcaccttcacgatgtttcccttggtcaaaagcgcactaaatcgtctccaagggccatgaaatgacaagcattggact

SEQ ID NO: 856997 - DNA, 100 bp, Homo sapiens
gaggattcgctcccagagcagctgcggccagatgtgaaaggaccacccacccaccgtctgtcttgtggtcagtcaccctacaccgagacaacaacgtggg

SEQ ID NO: 856998 - DNA, 99 bp, Homo sapiens
aagaacctgatgaaaactcatcctctgtaacatcttgtcaggctagtctttggatgggaagcctgaagcaggacattctaaatgaaaagactgaattgg

SEQ ID NO: 856999 - DNA, 100 bp, Homo sapiens
gaaaattgtgaactaaggccccctgcccccttttcctggtgcatgtgaagttatcaaaaacagaacgtgctggccaaagcgctctatgacaatgtggccg

SEQ ID NO: 857000 - DNA, 98 bp, Homo sapiens
tggaccctgcccagcagaatttgtatagagatgtgatgttggagaactacagaaacctggtctccctagttgatggagaaccttgtgacctgtctttg

SEQ ID NO: 857001 - DNA, 100 bp, Homo sapiens
ctgcaccagaatagcatcacggtgaaaatcctatttataagagtgccgtaacaactgtggtcaatccgaagtatgagggaaaatgagtactgcccgtgca

SEQ ID NO: 857002 - DNA, 100 bp, Homo sapiens
gcttggagcggctttgcagggacatgcagagcatcctctatcacgggcttatccgtgaccagacaaaacttacctggggtccctacttatggttttacat

SEQ ID NO: 857003 - DNA, 129 bp, Homo sapiens
tcggaagcagaggaacaggtgccagtactgccgcctgctcaaatgcctccagatggggatgaaccggaagggttacctgtcctgctgccgattcctggatgacaatcagatcgtcaccagctctggaga

SEQ ID NO: 857004 - DNA, 100 bp, Homo sapiens
cgagacggcggcggagtcggaggaggagccggactccaggattctaacattttcagagaaccttttggaaagaacaagcctacttcaataaatgaaggag

SEQ ID NO: 857005 - DNA, 100 bp, Homo sapiens
atctggaatgtttcctggacaaagaagggcaaatgacacagctttgtgaactgatcaacaagagtggggaactccttgcgaagaacttatcccatctgga

SEQ ID NO: 857006 - DNA, 100 bp, Homo sapiens
tcactttagaccctccacctaattgcaggtgaagccatcagtgtctacagcttcagctattgcccgtgtgcagatggtgcttaatctctcttgtgccttc

SEQ ID NO: 857007 - DNA, 99 bp, Homo sapiens
tgaatgtttccatctcttcagagatgaaccaggtcatttgattgcccgcctcagaacgatggatctgcatctcttcgactactcagagccagggaactt

SEQ ID NO: 857008 - DNA, 100 bp, Homo sapiens
cgggacagtgacagcgaagaagatctggtcagctatgggaccgggctggagcctctggaagaaggaagaaggtagataatgactataatgcccttcgaga

SEQ ID NO: 857009 - DNA, 98 bp, Homo sapiens
gagagaggaattcctcaagacaccattccaggttcttgggtgtctctggggagtccctgggccagaccttcctccagactccagcccacctcttcgga

SEQ ID NO: 857010 - DNA, 100 bp, Homo sapiens
cactgatgtgtgaccctgtggtgctgccatcttccagagtcactgtggatagatccaccattgcaagacatttgctcagagacggggtttcgccatgttg

SEQ ID NO: 857011 - DNA, 99 bp, Homo sapiens
ggaagcataatatatgtgtctgagagtgtaacttcattacttgaacatttaccagtgcccctgggcgctgggattgctctagcctgtaagtataatgga

SEQ ID NO: 857012 - DNA, 100 bp, Homo sapiens
ggaatgtaagaccccgactcttcctggtgaagcatctgatgcacgttccatccggcgctcagctgggcttgaggaatggaagttggatacactttgtgac

SEQ ID NO: 857013 - DNA, 100 bp, Homo sapiens
ggcgccaccgcctgagggcggggtgtacgaaagagaaacccggagggcgccgggggtgaggtggctttgaccccgggttgcccggccagcacgaccgagg

SEQ ID NO: 857014 - DNA, 95 bp, Homo sapiens
tttgaccaatccagtgtgcacagaggtaggagaaaaaattgcccttagccgaagagttgaaaaacactggcggagctgtgactgatgagaattaa

SEQ ID NO: 857015 - DNA, 100 bp, Homo sapiens
atgatcatgatacagttgataaaattgttgacgagagtttcgctgttaaacacaacaaagaatttctcttgtcaatggccaacagagggaaggatacaaa

SEQ ID NO: 857016 - DNA, 116 bp, Homo sapiens
gtccaggaccagcccctgggaatggccttcgtcaccttccaggagaagtccatggccacctaggagatacttcaggggattaccggaagattctgctgaagatctgtggtggcaat

SEQ ID NO: 857017 - DNA, 100 bp, Homo sapiens
gactgcagaaaatcaacctatcctccttcaggaccaacaaagaagagattttatcgacatcgaaagtaaatttgccctaaggacccctgaagacacagct

SEQ ID NO: 857018 - DNA, 100 bp, Homo sapiens
tccggaccattttctggagaatggacagtttaagaaaagggaagcctttatgcctttctcaataggtggcacaagaatggctcaactctccaaatagaga

SEQ ID NO: 857019 - DNA, 100 bp, Homo sapiens
gctgtatgggaagaaatagtaggagaatcaaatgataaactgcgaggacagagccactggggtccacttcctaacacatgctgccatttctggcttatgg

SEQ ID NO: 857020 - DNA, 101 bp, Homo sapiens
tacacagtattgggaaatctgtgaaagttgtcatttacgtgctgaagcatattgacttgaggaaaacgccttccttggagtttggcatgatgatcattttt

SEQ ID NO: 857021 - DNA, 98 bp, Homo sapiens
gtgcggagtccataccggagcgcaatggcgtccaaccccgaacggggggagattctgctcacggaactgcagatgagctttgatccaaaccttctcca

SEQ ID NO: 857022 - DNA, 100 bp, Homo sapiens
tctacatgtaaaaggccactgactcctacttcctctgtatagagcaactgttgaactcagctgcctgtaggctcttgcagccaatgccggaacaggattt

SEQ ID NO: 857023 - DNA, 100 bp, Homo sapiens
aagaaatgagcagctttggataatgacgacagcaacccgaagacagggaaatttaggagactacctaggtggagaagcgtactgggccggcggcctgcac

SEQ ID NO: 857024 - DNA, 100 bp, Homo sapiens
agatgtggggggattctcgacctgctaacagaactggaccttttcgtataacaagaggattgcctgatccagccaagatgcagagcacttctaatcatct

SEQ ID NO: 857025 - DNA, 99 bp, Homo sapiens
gtcaccccagacaacatgtgcatggggaggaccagtcgtgggggagcagtaccatcaggcttggaggagaacctgtgtaagatctgcatggactcaccc

SEQ ID NO: 857026 - DNA, 100 bp, Homo sapiens
gcatatttagtcattcatttttgatcaggagaaagaagacagccatcatttgaaagcaccaatgttgttatgaattattcagagatcgagtctaaggttc

SEQ ID NO: 857027 - DNA, 99 bp, Homo sapiens
cggcgtataccaacccaccccacatggcccacgtacctcaggcaatggtggcttgctatccgggaaatggaacaggttatgttcgccacgtggacaacc

SEQ ID NO: 857028 - DNA, 100 bp, Homo sapiens
cccaactgatatccaggctgaatctatcccattgatcttaggaggaggtgatgtacttatgtttagaagaagaatgtgaatcctctctttgcacatctgc

SEQ ID NO: 857029 - DNA, 98 bp, Homo sapiens
aaagagaaaatagactttcttcttgaggatatggctttagttgcccctgaagctccttcagaacaagccagaagagtttttcaaacctacgacccaga

SEQ ID NO: 857030 - DNA, 100 bp, Homo sapiens
ggagcgaggaaaggtgtgctgtgcctgaggccaggtatgggggcaccttccagaacgtgtctgtgcagctgcccatcactctcaacaaattcttccagcc

SEQ ID NO: 857031 - DNA, 50 bp, Homo sapiens
ctcagccaacagagctgtggttggtgtggtatctgtgcgctttgaagaag

SEQ ID NO: 857032 - DNA, 99 bp, Homo sapiens
tgagttgccgttccctgagctggagcgggtgctgcaggcgccgccgccggacgtcggcaacggagaaggaagtcatgagacatcaatcaatatatgtaa

SEQ ID NO: 857033 - DNA, 101 bp, Homo sapiens
gcggtttcaaacggcttagagcaggccgcttggttctgacccagctgagggagagctggaccaggaacgactgaccaggcagcaagaactcacagccttat

SEQ ID NO: 857034 - DNA, 100 bp, Homo sapiens
agatacctgtggaaaacatccttggagaggtcggagatgggtttaagttggtgttggtattaggagatctgcacatcccacaccggtgcaacagtttgcc

SEQ ID NO: 857035 - DNA, 100 bp, Homo sapiens
ggcacgatacgtgttccagtcagaacttggagcgtgatgcccagaagtgtgtgaactggtctgtgaccacaaagatgagaaccgcatgctgagattggtg

SEQ ID NO: 857036 - DNA, 99 bp, Homo sapiens
gtaaacacaagtttatggtacagacaatttttgctccaccaaacacttcagatatggaagctgtgccttacccctcgtgaattcaactcttacggagct

SEQ ID NO: 857037 - DNA, 100 bp, Homo sapiens
agccgcttccctcaagagtaactacaaggctccaacaaaagaatcctctgaagaggagtatgactctggagttgaagaagaaggatggccccgccaagca

SEQ ID NO: 857038 - DNA, 100 bp, Homo sapiens
aggaagatagttcgagagaagaaaattttagaagttcatattgacaaagatacttttctgctgtgagaatgtaagatggatccagaagagcaggagctct

SEQ ID NO: 857039 - DNA, 100 bp, Homo sapiens
gtcagctgagaaaagcaaggagagtggctcggggctccatgggccttaccccttcggccagtcttaaacgggtgtcagcaagaagaaaaattaacaaaag

SEQ ID NO: 857040 - DNA, 98 bp, Homo sapiens
tctgacctgatgcgcttcccaccatccctgttagccaacgacagtgtgaaggcgaagtagttgctgtcagtggtggaacatccgaagaagaagagaga

SEQ ID NO: 857041 - DNA, 100 bp, Homo sapiens
cttaaatacgaccagctggtcatccctcccgaagttttgcggtgaggtcccagcttgaagagaaagaaaacaagaagttccctgtgtttaaggccgtgtc

SEQ ID NO: 857042 - DNA, 101 bp, Homo sapiens
ggaagaagtttcagactacaagtgtatttgcatgcccgagtctttgagccgtgctataccagtttgtccagattgtttatactagcaatgcagtttacggt

SEQ ID NO: 857043 - DNA, 98 bp, Homo sapiens
ggcgacgaaggcaaagggaaggtggtggacctgctggcgcaggacgccgacatcgtgtgccgctgccagggcgtctctggccgagcctctttttgtgg

SEQ ID NO: 857044 - DNA, 98 bp, Homo sapiens
ccggggcgatgctgtgggtctcgttgggcgccggtgtcctggcctcttcctcaggcccgacaacaagctcaaatacgtcaccaaatggcagaggacag

SEQ ID NO: 857045 - DNA, 100 bp, Homo sapiens
tgatttcagactcagaagccgacgttcgagaggaagattcttacctctttgatctcgacaataaggtagctacagcaagctgggtagcaggcagatccaa

SEQ ID NO: 857046 - DNA, 100 bp, Homo sapiens
actttggagcagcaaaagatttgcctggtgttagagagctgtttgaaaaagaacgcccgtgtatttaatgaaactcccatcaaccctcggaaatgtgccc

SEQ ID NO: 857047 - DNA, 100 bp, Homo sapiens
tcccactgggaaaagtataacacagggattcttttcctgccatggggatatgacattagccaggtgaaatcgagctatagcagattatcttcgttcaaat

SEQ ID NO: 857048 - DNA, 98 bp, Homo sapiens
ccatcgatgggagtggcattatttccaactatgaattctttgagaatcagtatattcatgtgttacatctctcttgaaagtgaagtcactgcttttgc

SEQ ID NO: 857049 - DNA, 100 bp, Homo sapiens
tcttggcagccttcctgatttctgcagctctgtgtgaagattacataccggttacggcacctccttcgtgcaaggtgtgatgcatccccagtgaccaaca

SEQ ID NO: 857050 - DNA, 99 bp, Homo sapiens
aacacctttccccagctctgcgcgtaccgcgctctttggaaacgaattactagacgcttgaagcaaagctgccatcccagaagacgacatgctctcagc

SEQ ID NO: 857051 - DNA, 99 bp, Homo sapiens
acggaagtatattcataagtggatttcttatgggtcaggtggtggagacatttgtgaatatctacacaaagcccccacagaacctttattgtgtaagtt

SEQ ID NO: 857052 - DNA, 98 bp, Homo sapiens
tcaaaaattgtggcctccatgtgggatagtcttggagaggagcaaaaacagcctttgtttagtaccagtcactcttttactttccaattgttctaagg

SEQ ID NO: 857053 - DNA, 144 bp, Homo sapiens
ggtgggaaacgtcctagtcaggaagaggacacacagagtattggtcctaaagtccagagacagagcactaattaggtactccaaagattcaggtttactcacgtcatccagcagagaatggaaagtcaaatttcctgaattgct

SEQ ID NO: 857054 - DNA, 100 bp, Homo sapiens
atgtaatgcctggaaagtatacaatgagtgtttgatatacagaggaaagtcacctataggaacctgagcacctggtatacagagcttcgggagttcaggc

SEQ ID NO: 857055 - DNA, 100 bp, Homo sapiens
caggaccgggcgccccggcaccgccgcgcgccacccgctaggatgccggtggccccagcgccctcagccgacggaggcagagactccccctaatgggcca

SEQ ID NO: 857056 - DNA, 98 bp, Homo sapiens
ggaatatgccaaggaaaaactggagagcttcatcaaaaatagtgatagctttgataactcttgcagtgtttactcaacttcctcaggatacaagtgtc

SEQ ID NO: 857057 - DNA, 100 bp, Homo sapiens
gtaatgactgggatatttactactgggccacagtgccctgcaggagtcattaaatcaaaacttcatgctgatcatcacccaccgagaagtccagcgggag

SEQ ID NO: 857058 - DNA, 101 bp, Homo sapiens
cgtttgcagctcactacagaaaggatgagagaagaagagaatgaaggaatagttcaactacgaatactaagaacccaggctcttgcagccaatgccggaac

SEQ ID NO: 857059 - DNA, 100 bp, Homo sapiens
caccccgagaaccgtcagtttgagccagatgaatcccacgtggcgaagtctcgattttggaattatgccagaccgtcttgatacatctgtgtcttgtttc

SEQ ID NO: 857060 - DNA, 100 bp, Homo sapiens
ttcagatgttgctagtgactcatattctcagtcttattgttacaggtatcgctgtgctgctcggagccagaacacacctgatagctctgcttcgaatctg

SEQ ID NO: 857061 - DNA, 98 bp, Homo sapiens
cacgaagtaggagtcgcaggagcagccgcagtagatctcgaagtatctcaaaaagtcgctcccgcctatgaaagagacaaccagcaccaagatgaagc

SEQ ID NO: 857062 - DNA, 100 bp, Homo sapiens
ctaactcatatgctttacacagccattgccttcttaggtgtggcagatcacaagtgcattccactcttcgttcaacttgttttggagagattaactcgag

SEQ ID NO: 857063 - DNA, 100 bp, Homo sapiens
gctgatagcaccatcttcaaatttgtggaagcttatacgccatttggaatgaacaggaaaaggctgaactttttacagataagttttgtcaagtatgtgg

SEQ ID NO: 857064 - DNA, 51 bp, Homo sapiens
tcttgcaaatgaagttttacaggagagccctatgagtttgtctctctggaa

SEQ ID NO: 857065 - DNA, 100 bp, Homo sapiens
cagtacagacaatcactccacatggttcaaatggttgtcctgatcctgatttagtattgaagttcggtcctgtggacagcacattaggctttcttccctg

SEQ ID NO: 857066 - DNA, 100 bp, Homo sapiens
gttgaagcaagaagacaaactgtatggtggagaaagaagtgggaaggatctgcgcggtgtgtgatccagtcttgggtgacaagtgggacggcgaaggctc

SEQ ID NO: 857067 - DNA, 100 bp, Homo sapiens
tgtccctctgaaaactgaggaatttgaagtgaccaaaacagcagacaaagacaataggtgcaggtatatattgaagacgaagttccgggagatgtggaag

SEQ ID NO: 857068 - DNA, 100 bp, Homo sapiens
ccgagtctggtccattgctatcagcccattactcaggtcagtaacagatccaagagatggaaagagagtagcgctcaaaaagatgcccaacgtcttccag

SEQ ID NO: 857069 - DNA, 100 bp, Homo sapiens
aaaccaccgcatcagatctgcgctgcggcagaggcaggaactgcaagcacatgttgaccagataactgaaatggcagcagtaatgaggaaagccattgaa

SEQ ID NO: 857070 - DNA, 100 bp, Homo sapiens
atgggaatgtacacgataattaaagagtaaagttgtgctcaacggtggacccccaaaagtacaagggcatatttaacggattctcagttacacttaaaga

SEQ ID NO: 857071 - DNA, 98 bp, Homo sapiens
attatgagaaagaagaagaattcctcactaatgagctctccagaaaattgatgcaggttcagagaagattcttcatgggaaatcaagttctaaaggtc

SEQ ID NO: 857072 - DNA, 100 bp, Homo sapiens
agcagtttcaaggaaacagggagctcaattcaaagaataccggcctgaaactggttcttgggtgtttaaggtggaagtttagctgatgctataagtgaaa

SEQ ID NO: 857073 - DNA, 98 bp, Homo sapiens
cctgtgctctccattactggaacagattcctctgtggaagccagggagaagaggagaatgtatgacaacatgtccacaatggtgtacataaaggaaga

SEQ ID NO: 857074 - DNA, 50 bp, Homo sapiens
tacgcgtacgtggtggagctctgcgtgtcttgataaagatgacatggtat

SEQ ID NO: 857075 - DNA, 98 bp, Homo sapiens
caacaagtcagttggaccacagcaaccactgagaaaacggaaccgaatagtcaagaggacaagaatgatggtggaaaatcaagaaaagggaatataga

SEQ ID NO: 857076 - DNA, 99 bp, Homo sapiens
gttggaggaactggcccggaaacaggaggacggctatgcagaagctcagcctggcctccaagaggaagaagccccacccgccaccgcctccagccaccc

SEQ ID NO: 857077 - DNA, 100 bp, Homo sapiens
tgagtccctgtctgagctcaaggagtcagtggatcggtggggaaaatgctgcttaccctgggccctgggctgtagaaagaagacaccaaaggcaaagtac

SEQ ID NO: 857078 - DNA, 100 bp, Homo sapiens
gtactacgagacgtgtgctacatacgggctgaatgtggagagggtcttccaggacggcaagataacccctgtgacagaaggctactgttgctgtaacaaa

SEQ ID NO: 857079 - DNA, 98 bp, Homo sapiens
aagacctctttggacccgaaattgtaagttcagacttggttccttcaacctagagaaagttgaaaacccagctgaagtcattagagaacttatttgtt

SEQ ID NO: 857080 - DNA, 100 bp, Homo sapiens
agaaaagaggaagagcaaccatttgaaccatgttgatctcctatcaagagtttttggcatttgaatctgttttatgtgctccagattccatgttcatagt

SEQ ID NO: 857081 - DNA, 100 bp, Homo sapiens
cacagctgagatgttgaattactccgttaatatatacgatgatggaaacctgctctccattgtgaccagtggaggtttcagcaagcagatggtggaaatt

SEQ ID NO: 857082 - DNA, 100 bp, Homo sapiens
tgtaaattatgtgaaacctccaaatgtgggttaatgttgaagaaggaaaatgcggaagtcgtcatttgacaagttttataaatgagtatttgaagctcag

SEQ ID NO: 857083 - DNA, 143 bp, Homo sapiens
aacaccgggccaaagtggacaagagaaagcagcggtcagttttcagagatgtcctgagggcagtggaggtgtcattccacacatccacaaatctctgattgggaagaaaggacaacagaagactgtctaaaggatgcctggat

SEQ ID NO: 857084 - DNA, 98 bp, Homo sapiens
cgagaatctcctcagctggctgagctatgttaccagactctggacattaatgtgaaggccccagccctgatgacaaaggcagtggtgccagaaatgga

SEQ ID NO: 857085 - DNA, 100 bp, Homo sapiens
cgagaatcccgtcccggcattccagagtgatggcacagcaatggctgccatccggaagaaactggtgattgttggtgatggagcctgtggaaagacatgc

SEQ ID NO: 857086 - DNA, 100 bp, Homo sapiens
tgagcatttttccttcacaatgctgcatttcattaaggttaactgtaatggcttcacaattgaagatgaagaactttctcatttgggatcagcgatattt

SEQ ID NO: 857087 - DNA, 100 bp, Homo sapiens
ccaaaggcaaagaagaaaaaatgtccaaatcattaaagaactacattactattaaggtatgagaaagtgccagtcatcttggttgggaacaaagtggacc

SEQ ID NO: 857088 - DNA, 99 bp, Homo sapiens
tgaaatcgcgtggactgcaacacccagcagcgcgctccatggctacatggaaaacaagcctctgggacttcagatcttcattgggacagctgatgagcg

SEQ ID NO: 857089 - DNA, 100 bp, Homo sapiens
aacgactgtggggacaacagtgacgaagagaactgtctcctggtgaccgagcacccgcctccgggcatcttcaactgaactctgtccaggattcttcttt

SEQ ID NO: 857090 - DNA, 100 bp, Homo sapiens
aagagatagatttaaagaatgaaccttggtataaattcttttcggaattggagtttgggaaaccggggatcccaacaagccctcaggattcagaagtgtt

SEQ ID NO: 857091 - DNA, 98 bp, Homo sapiens
agccagaatggcatccagagagaggctctttgaactttggatgctttattgtacaaaggtgtacaagttcagtgtaacagttgtaaaacctcagcaat

SEQ ID NO: 857092 - DNA, 100 bp, Homo sapiens
ttggaagttattccgtagcataagagctgaaacttcagagcaagttttcattgggcaaaatggggtaggaatgaattgatagccagatacatcaaactca

SEQ ID NO: 857093 - DNA, 100 bp, Homo sapiens
atgaacgtgcacagaaagctgtagcaagtttatctgttaagcttgaacaagctatgaaggtggaccttcaatcctgctgttctcactaaagcgaacattg

SEQ ID NO: 857094 - DNA, 98 bp, Homo sapiens
gaagctgtttgaagaggagaaattgcaaggatggaacattactgtggacctggtcattggccctaaagggatccgccagctgactagtcaggacgcaa

SEQ ID NO: 857095 - DNA, 99 bp, Homo sapiens
gagcggtgactccccgccgctcccgggggccgtgacgacctgatggccaaaagaaaggaagaaaatttttcctctcctaaaaatgccaaaaggccaaga

SEQ ID NO: 857096 - DNA, 100 bp, Homo sapiens
cagccactgctggatgttgaagtatacgctcaacggcaagaaagtggaagttgccgtcaaacagatcatcgctggaaaagccgtggagcaaggaggtgct

SEQ ID NO: 857097 - DNA, 100 bp, Homo sapiens
cctagaccctgcccaacagaatttatatagagatgtgatgttggagaactacagaaacctcgtctccctggttgaggagctcaagcttgggaaaatggtg

SEQ ID NO: 857098 - DNA, 100 bp, Homo sapiens
acttcctcagtgacaccccagaggccctcatcaacgcgggagacttccacggcctgcagagggctctgaactcctacttcgagcctccggtggaggagag

SEQ ID NO: 857099 - DNA, 98 bp, Homo sapiens
aattacaacacgcatggggagctgggcgagggcgccagctttgtgtccctggtgatgttggaacattaatgatggaacatggccaaacttcagtcatg

SEQ ID NO: 857100 - DNA, 98 bp, Homo sapiens
ccaagttccggagcctgctcctcaacatgctgcagagcaatttgtggagaagtcgtcctgtgcccagcccctgggtgagctgaccagcctggatgctc

SEQ ID NO: 857101 - DNA, 98 bp, Homo sapiens
aaaaatgcccatgtatagaaactatcatgccacagatactgctggtcaagagaggtttagaacattaactcccagctattatagaggtgcacagggtg

SEQ ID NO: 857102 - DNA, 148 bp, Homo sapiens
aaaatttccagaaggtgcctgaccagaaaggaactcccaagcgactgcaggcagaagctgagacggctaagggaaacttcgtggcttgcatgacagctattttacgacaaatggaagattaccattatgcccacttgatcaagacttt

SEQ ID NO: 857103 - DNA, 100 bp, Homo sapiens
gaagactgagagatgagttgtgtagcaccaacattttctttctgcctgaccttcatacctgatgaattaaaagtagacccaaatgatttgtacattgtag

SEQ ID NO: 857104 - DNA, 98 bp, Homo sapiens
tttctttcgcgctggctgcagctgacccggcgaagggagccgaccgggccctgggctggaggtaaaaccccacgatgacttcctgaagccacagatca

SEQ ID NO: 857105 - DNA, 99 bp, Homo sapiens
ccagcaccacctgaggatccagaaaccgccccagcgatggaagaggatcaggagctggagaggtgtgtgtgtgcaggccacagcagcatgcccttggtg

SEQ ID NO: 857106 - DNA, 123 bp, Homo sapiens
cagaaaatggtgcttaccaactacatgttccctcaacagccaaggactgaggatgccactatcgaaaacgatcggcatcccggggtcgctctggaagtcggtctagaagtcgctcaccctcag

SEQ ID NO: 857107 - DNA, 98 bp, Homo sapiens
catcacccaggtcatgttgctggccaatccactgaagagtcttgctatggagatacacttcaattcctacttcagtggaagagtcgggaaagaaagag

SEQ ID NO: 857108 - DNA, 101 bp, Homo sapiens
ctggcccaggcgcacacggaagtgaaaatcagaaagtgcagttgacagaagggtcacgttcacactacaatatcaattgcaactcaacaaggactccagtc

SEQ ID NO: 857109 - DNA, 100 bp, Homo sapiens
ctgtctgccggttcttgaggtgaatgtcggaatccattatctttcgggaaagctctctggggcagggaaaaccagtagattcccagacatcgcgaagtga

SEQ ID NO: 857110 - DNA, 50 bp, Homo sapiens
aagtcttggttgctgccaacaagcaagtctggaaaagtttgaaattccag

SEQ ID NO: 857111 - DNA, 98 bp, Homo sapiens
tcttcaggcttctcaagctggctgttctggatgggggcagcaggataccgcctggcacccacttagccaaacagacttctgctggatgtgtctaggag

SEQ ID NO: 857112 - DNA, 100 bp, Homo sapiens
tctcagtttggggcaagtttatacgggcaacaaagttatcttatgatgaggcttttgctatggctaatgatcccttggaaggcttccatgaagtaaacct

SEQ ID NO: 857113 - DNA, 108 bp, Homo sapiens
ctgcctcagcctcccgagtggctgggattacagccttccatacagcaaagtgcgagaaactacaaaaggagaaggaggagctggagaggcggttcgaggacgaggtga

SEQ ID NO: 857114 - DNA, 100 bp, Homo sapiens
tccagagtacaaccttccccacacttacgttgaaatgcaggcatgtcagagcgggagcgacaggtgatgaagaagctgaaggaggtggtggacaaacaac

SEQ ID NO: 857115 - DNA, 98 bp, Homo sapiens
ggcggtgtgtcaggggctaaagaggaggacgaagaaaagcagagcaagggaacccaggtcccgcagcccccggaagccaatagactccctcagggact

SEQ ID NO: 857116 - DNA, 100 bp, Homo sapiens
gagagcgtgaccgagagcgcgaatatcgtcatcgttagaagtcaatgcaaaatcatgctgccgtgttccgtgtgggaagcgtgttgcaagaaggttgtgg

SEQ ID NO: 857117 - DNA, 100 bp, Homo sapiens
tcacatctatgccatcacagacaccgcctacaggagtatgatgcaagtcagtcccctcttctgcaggtctgctgcaattcgctgggggtccactacagat

SEQ ID NO: 857118 - DNA, 100 bp, Homo sapiens
ggccctgggcaccactcacggggccctcagtgccaccaccatcttcagtagccacgatggaggtgatgaacctgatggagcagcctatcaaggtgactga

SEQ ID NO: 857119 - DNA, 98 bp, Homo sapiens
tgtggatgcctctcatcgggagaatgctcttcaggatagtatcttggccagggaactcaaacagcagatgcagctgagtcatccaatggtggctattc

SEQ ID NO: 857120 - DNA, 100 bp, Homo sapiens
tatcctgtgaaagacctgtcttgagaaaaggccagtgttgtccctactgcataggctcttctgaaaatggattgccaagagttagtcgcacgtctcatcc

SEQ ID NO: 857121 - DNA, 99 bp, Homo sapiens
gtgcggcccagcgagttggtcggtcccggggtcacccgctacgggaagcaggcctcgccacaggtcatcatcagatttgaaatatttaaagtggataca

SEQ ID NO: 857122 - DNA, 101 bp, Homo sapiens
ggctttcctacaactcatgcccagcagcagcaagcagatgtgttcagagcaacattgttttgttgacacaagcatttagaagaaagtttgtgattcctgac

SEQ ID NO: 857123 - DNA, 100 bp, Homo sapiens
aaaagcagtctaaacctgtgaccacccctgaagaaattgcacaggttcctaaaagtaaagctctagaggccgtcaaattggcaatagaagccgggttcca

SEQ ID NO: 857124 - DNA, 98 bp, Homo sapiens
ttactgccgcgccaccgagtccggaccggagactttggggcctaactagagcctacttggatgttaatgagctgaagaacattcttaaattggatgga

SEQ ID NO: 857125 - DNA, 150 bp, Homo sapiens
ctcggtggctgtgtataccctgcctttggtggtggcaccccagtcagaaacgggaccctgaagctgggatttagagaaaccccgttcaccaaggccatggaagtggaggctgcagaggcccggtccccagcccccggctacaagcgctcg

SEQ ID NO: 857126 - DNA, 100 bp, Homo sapiens
acggagtctgggccgcctgtggagcgctgcggggtcctcagtaaggttggaaaagagactgttcaaaccactgaggatcagattttgaagagagatatgc

SEQ ID NO: 857127 - DNA, 98 bp, Homo sapiens
ggccgacaaggaagtgaagaaggcgcatcactcccagctgcgcaaagcttgcgaggtggcgttagatggccctgctgtggcaccagtgaccaacggga

SEQ ID NO: 857128 - DNA, 100 bp, Homo sapiens
ctgtgtttgaaacaaacattcgaggaccgtcctccttctaatatttggaagaaaatagatcaatccagggactataaaaatggcaatcaactcagggaat

SEQ ID NO: 857129 - DNA, 98 bp, Homo sapiens
tctactgctgagtggtgcttctgcttctggagggagagaatgggtaccacagaccatgtcatcgtcctggcgtccacgaaccgagctgacattttgga

SEQ ID NO: 857130 - DNA, 99 bp, Homo sapiens
ggcagcccgtcggccgccgccaactacctgctctgtaccaactgccggaaagtgctgcggaaggtgctgactgggttacttttttaaacactaggaatg

SEQ ID NO: 857131 - DNA, 98 bp, Homo sapiens
acaactcttagatcaactcttgcctatgggatgctcaggtattgactgggctcccaagagcgaccgcattgtcacttgtggggcagaccgcaatgcct

SEQ ID NO: 857132 - DNA, 100 bp, Homo sapiens
aaactaaaaaatggcagctctcagaatgggaagaatgagagaagtcatatgcccggcacattggatatgtcaagtgaccagatagctgccaatctgcaag

SEQ ID NO: 857133 - DNA, 99 bp, Homo sapiens
gagcggatcccagacgtggctgcattgtccatgggcttctctgtgaaagaagaccctgatgctcccataagacagaaaatgccccttgatgatctggat

SEQ ID NO: 857134 - DNA, 138 bp, Homo sapiens
tacgactcacaaagcaacaaatggaggcatatgaaattcctcatcgaggaaacactggagatgttgctgttgagaagctcatttcagaagtgaaagttcaggtggaaaaccaggtacaaggcatctattttaacatta

SEQ ID NO: 857135 - DNA, 98 bp, Homo sapiens
ttctgtggcagttaggagactgaatcaaggtccagagaaggtggaggaatcctgatactgagcgaaaactctcccaccatgtcgcagaatggatactt

SEQ ID NO: 857136 - DNA, 100 bp, Homo sapiens
gaagaaatgcaatttgctgttggctggagtggttccttaaatgtcgaagaagggggatgtatggcattgagaatgaagtcttcctgagccttccatgtat

SEQ ID NO: 857137 - DNA, 98 bp, Homo sapiens
gatgagagatcccaatgggaaatccaaaggctttggctttgtgagttacgaaaaacacgaggatgccaataaggaggatttgttggtattgaggaaaa

SEQ ID NO: 857138 - DNA, 98 bp, Homo sapiens
catccataaaaattcatcagagagcattttactactgagctgcaaagtaagcactatcctttgtactccctcaacgtggcctccatgtggttgaagct

SEQ ID NO: 857139 - DNA, 100 bp, Homo sapiens
caatactacctttatttccaccataggtttacccaaggtccagcctagcccctaggcaccatgtcggacagtgatctaggtgaggacgaaggcctcctct

SEQ ID NO: 857140 - DNA, 98 bp, Homo sapiens
tgaaacagcaatcaaaaggactgaagtggggttaagagtcctggcagtcagtaacttttgaaaggcagcctgcctccttcatccgtatcgttgggaca

SEQ ID NO: 857141 - DNA, 100 bp, Homo sapiens
ggcaagaccatgacggaggatgatgacatcactaccggtgatcctgccatgaagcagtttctgctgtacttggatgagtccaatgccctggggaagaagt

SEQ ID NO: 857142 - DNA, 99 bp, Homo sapiens
cggccgaggcggtgctgcaagagaaggcactcaagtttatggagcctgcagacagggggatttgcctgggaaggagaagtagaaaacaacgtgtacagc

SEQ ID NO: 857143 - DNA, 98 bp, Homo sapiens
gggccctgtctgtgccggccgtgagctgcggcaggacggctggagatgccttcaattaagttgcagagttctgatggagagatatttgaagttgatgt

SEQ ID NO: 857144 - DNA, 100 bp, Homo sapiens
gaacaactgtgtgcttcccttttggccagggttgaaccacctttaaaagcagtaatggaacaagctaggcccttatattctcaagaccgaatccttcaag

SEQ ID NO: 857145 - DNA, 100 bp, Homo sapiens
atctggaaaggagacttcaaagcttccatcactgggacagaaagggagccctctggcacaaatggaagaagaaagaagggagcaagtagctaaaattaag

SEQ ID NO: 857146 - DNA, 100 bp, Homo sapiens
atcaaactgcagtgcattggcaaaaccgtggaaagccagctttataccaacccagaccctcctcatcttttccctgccttccatcctcctgtaccaattg

SEQ ID NO: 857147 - DNA, 101 bp, Homo sapiens
cctgggtccttcagtattaccaggtccctgaaaagctaccccccaaagtcctggagctgtggttccctctcccagcctgtgctgactcagccatcttccca

SEQ ID NO: 857148 - DNA, 100 bp, Homo sapiens
ccatgtgctgaaatgtttgacgacactgatggtttgctgtgttggggtggaagaggaggaggcgcccgacatcgacatataccactgcccaaactgtgag

SEQ ID NO: 857149 - DNA, 98 bp, Homo sapiens
ctgctggacgccgacaccttcagcgccctggtcaagacgctgcagcgggactgcctgaaagtcctacctccatctccgtgggccccagcaccagccga

SEQ ID NO: 857150 - DNA, 100 bp, Homo sapiens
agaatacattttatgaaacattaccagtggcaattaatggaaatggacccaccaaggaatgtatcctgtcaggtataatgtcagtgaatggcaagaaagt

SEQ ID NO: 857151 - DNA, 100 bp, Homo sapiens
tataaaatactgggagtttgcaggctctgccaaggctgagaatgacaaacatctaagtgtagggcctggccaggggccagggtctgcagtggatgagcac

SEQ ID NO: 857152 - DNA, 98 bp, Homo sapiens
cggagttcaagaccggcctgaacaacatagcgagaccctatctctaccataaaaaaggtgctggagaatctggtaaaagcaccattgtgaagcagatg

SEQ ID NO: 857153 - DNA, 99 bp, Homo sapiens
tctgccgtcaaccgcaggaggatgaagctgctgctgggcatcgccttgctggcctacgtcgcctaaatcaatgtggactgaacataaatcacctgatgg

SEQ ID NO: 857154 - DNA, 98 bp, Homo sapiens
aagaatgggtcccatattcaacatctgctagtctgtatattcgtcctacattcattggaactgaggtattgctgtctctaagccagacctgatcacct

SEQ ID NO: 857155 - DNA, 100 bp, Homo sapiens
ccgttgccagagtgtgggaggagagagcaagcagggaaagagagcgccaggtgcttagcaggaacaagatcttgatatttggcctctttgaagagacagc

SEQ ID NO: 857156 - DNA, 100 bp, Homo sapiens
actccaggggagccgtggcctcctctccgccctagcgctgagattggtgctgaagacatggacggcttccaggcagacacggaggaggaggaagaggagg

SEQ ID NO: 857157 - DNA, 51 bp, Homo sapiens
agttggtaaaaacttacctgatgaagaggtcctagcagaagatgtgactca

SEQ ID NO: 857158 - DNA, 100 bp, Homo sapiens
cgagtcgaagcgggaagatggctgcagacaagcctgcaggtgggtcatgataactgggtacgtggagttctgttccattctggggggaagtttattttga

SEQ ID NO: 857159 - DNA, 100 bp, Homo sapiens
tcagcacacagaggatgatgctgactttgatgaagctgttcgggggtcttgtctggattttggttgcctcctccaatgttcctctacctctactacaagg

SEQ ID NO: 857160 - DNA, 100 bp, Homo sapiens
gaggggttgttttataaactgcctggccgaatcagccttttcacgctcaagatggcagaaacggtggacacaagcgaaatggtcaacggcgctacagaac

SEQ ID NO: 857161 - DNA, 100 bp, Homo sapiens
acaacaagcaagcatgcagcttactgcttgaaagacagaaagaatttactttcaggttttcttacctaaagggagcaaagagaagagcaaaccaatgttc

SEQ ID NO: 857162 - DNA, 98 bp, Homo sapiens
gaaggaaactgctgaaaacagcctcaagaaaccagtaacagattgtgttatttcagtctatgttaacaatgaatgggcaaccagtgttggggaaggag

SEQ ID NO: 857163 - DNA, 130 bp, Homo sapiens
cacattcctgctttgcaaggctttctgctaaggatgtattgtggcttttgtttggattgcagcatgcagaattacaggggtttgttaaagttgttaagaataaggcctactttaagagataccaagtgaa

SEQ ID NO: 857164 - DNA, 100 bp, Homo sapiens
ctggggacctgagtgtgcgctgcacgctgctcctcatgctggactaccagggtacagaagtgcaggtggatgacatcaagcgggtctactcactcttcct

SEQ ID NO: 857165 - DNA, 100 bp, Homo sapiens
cgtaatgaggatgaagattcaccaaataagctatatactttggttacctatgtacctgttaccactttcaaaaattgggctaatggatactacagacaac

SEQ ID NO: 857166 - DNA, 100 bp, Homo sapiens
ggagcagcatccagaaaacggcgaggaagctgtggctctggttgaggatgtacagagagctcctggacaacagatgggaataactgggaacacaagtcca

SEQ ID NO: 857167 - DNA, 101 bp, Homo sapiens
atcaagcgggagttcaaggaggtgctgaagagcgaggagacttaattcagtgcacaaatgagatgaatgtgaacatcccacagttggcagacagtttattt

SEQ ID NO: 857168 - DNA, 100 bp, Homo sapiens
ccaggacctgctgggatgacgtgagttgaggaggctcagcggaaagcgacaggaaaggcacaacgtgtttgattgctctgctatcagataaagacctcac

SEQ ID NO: 857169 - DNA, 100 bp, Homo sapiens
ctttggcatgggcgtgtggtccaagggatcgcttacacctgagacgaactacagaacagcacgtaccagaggtggaagtccaagtcaaacgcagaaggac

SEQ ID NO: 857170 - DNA, 100 bp, Homo sapiens
tctgagttgtcctatgcccctatgactccagaccacttcccaagcctcttttgcaagctatcatggtgaacttacttcagattgtgcgggaccactgggt

SEQ ID NO: 857171 - DNA, 99 bp, Homo sapiens
aggagaccaaaataaaactaacagtctatgatgtcaaggataagtctcatgacaccgttaaacccatccagagtaatggctgcggccttacccaggacc

SEQ ID NO: 857172 - DNA, 99 bp, Homo sapiens
gtgtctctctctctggccttggcctctgtgactatcaggtcctcgcgctgccgcggcatccaggcgttcaggtatcgatatcctgaagcttgtagcagc

SEQ ID NO: 857173 - DNA, 100 bp, Homo sapiens
gccgagagaccctgatgcccacagcccccagcagaaaggtctcatcctgaacatttcttctgggatagccctgtttccttggcctctctactccatgtac

SEQ ID NO: 857174 - DNA, 98 bp, Homo sapiens
aagcttcaagtctcatctgcattaaagctctccattgaaccctctcacaaaagtagtgggcagcagtcagtgacaggtgtaacctctgtggatgacag

SEQ ID NO: 857175 - DNA, 99 bp, Homo sapiens
tgccaccagaacccaagagcagtggattcccagtgtccccacgagctgtgtggtccatgatgagtactatactggcaattgctggagaagattttgcaa

SEQ ID NO: 857176 - DNA, 98 bp, Homo sapiens
gggaggtgaatttccatgtcaacatagtccaggtgaaaggtgtagcagtcactcggcctacacccacagcatcgaccttgtgaacccagcgacctgac

SEQ ID NO: 857177 - DNA, 98 bp, Homo sapiens
ccgatgtgcgcccattgtaaccaggtcatcagggtgataaaagaaaatgtggctgaagttacccgaagttcagcttgcagtgtaattcagaagagtta

SEQ ID NO: 857178 - DNA, 100 bp, Homo sapiens
ctgtggtccagggcagggccactccaggacacattcagctaacgtattttagcaggtggagtgaggttgaagattcctgtgacagcgatgccatagagag

SEQ ID NO: 857179 - DNA, 98 bp, Homo sapiens
caactgggagaatgtaactgaaagatacatggcttgcaaaaagtaaaccacgatcgttatgctgagcatctccagctgccctggcaaagagcgtgctg

SEQ ID NO: 857180 - DNA, 98 bp, Homo sapiens
tttatttatttttaggttacgtttagcaagaatgaatgaagagatgcgggaatcagaaggactttatggacagccagaatatcctccgaatcctaaat

SEQ ID NO: 857181 - DNA, 99 bp, Homo sapiens
gacgactgggaccgggacctgctgctggacccggcctgggagaagcagcagcgcaagaggaattcttcagttggataaagtggacgtcatacctgtgac

SEQ ID NO: 857182 - DNA, 100 bp, Homo sapiens
ggacggcgcgtcctgctgaccccagccggcgccgagggcttggaatctcgagcgggaaaagcgggtcacagaaagtcgagagagccaaatgacgattgag

SEQ ID NO: 857183 - DNA, 100 bp, Homo sapiens
aatctgaaaactcgtgaggggaacgtgcgcgtgagtcgtgagctggcaggacacacaggcctgaccgccgctgcctacagagtcacactcaatcctccgg

SEQ ID NO: 857184 - DNA, 98 bp, Homo sapiens
tgcacagctagaggccgcgcagcagcaaaggatgagcggaaccttggaaaagaggtacagccccgtggtggaggccggctcggacatggtcttccggt

SEQ ID NO: 857185 - DNA, 100 bp, Homo sapiens
agcaagctgatgaagatctgctctctcaatatgaaaatggtagctccacagtaggttaaataggattgcgaatcaggtggccattcagcggaagaagcag

SEQ ID NO: 857186 - DNA, 100 bp, Homo sapiens
agggctgctattgtatatcacactaaagagactgacttgcataccaaatgtgtggtggatgtggatgcaaacaaggttattcttaatcctgtaaatacga

SEQ ID NO: 857187 - DNA, 99 bp, Homo sapiens
ttctaagtactttctcctactccataaagacttcaagaaactgttaaggcagcaataatagaagagcagaaacgaagtgaaaaggctgtggaagaggca

SEQ ID NO: 857188 - DNA, 100 bp, Homo sapiens
gcgaatgttccgcctctgggcgttcacgggcatgatggctcagaggtccagttccggccgtaccgcacagacgacttcatcacgcgcctgtactatgaga

SEQ ID NO: 857189 - DNA, 98 bp, Homo sapiens
taagcatgagtggaaaatcgttgcttcagaaaagacttcaagtgacctaaagaattaatgaccattcagaaataaagcaaaaagcaggccacaacctt

SEQ ID NO: 857190 - DNA, 100 bp, Homo sapiens
ggagactggatgatagaattgtgattttacaacgagatgctgctctccatagggatgctcatgctgtcagccacacaagtctacaccatcttgactgtcc

SEQ ID NO: 857191 - DNA, 98 bp, Homo sapiens
agctacaatgaagtatatgcagaggaggtcccacaggctcctgccctggactaccgagggttggggtctgctaggtccccggaatgagttgtttgacg

SEQ ID NO: 857192 - DNA, 100 bp, Homo sapiens
cattctttgcatacagagatcataaaaacatttggtagagttggccctaacgcagaacccaggttccgagatgagtgctggagtgcaatggcgtgatctc

SEQ ID NO: 857193 - DNA, 100 bp, Homo sapiens
agttatgggctctgtcgccgtggacattatacaacgtgaaggctgagatctttcccccttcgggaatggagtattgcagaacaggctccctctgctccct

SEQ ID NO: 857194 - DNA, 98 bp, Homo sapiens
acgagtctcagtccgaccgggctagctttggcgaggggacggagccggatcaggagccgccgccgccatatcaggcaatgatgcaacatcaattgtca

SEQ ID NO: 857195 - DNA, 100 bp, Homo sapiens
cctgctaccagttacgatggcaaaacagcagtgaccgagatcgtcaacaggtacctgtttcccaggcaactactgatcaggcatttctggaccccaaaac

SEQ ID NO: 857196 - DNA, 101 bp, Homo sapiens
ggcagggaggatgacggagctgcagtcggcactgctactgcgaagacagctggcagtctatcaggtgtttgaaagtgtggctaagaagtatgatgtgatga

SEQ ID NO: 857197 - DNA, 100 bp, Homo sapiens
cttcccaagccaaagaagaggaaagagcccgtgaagatcgcggcgccggagttgcataagggagatgtggaaaaatgctaatcactgaaagaaaacattt

SEQ ID NO: 857198 - DNA, 100 bp, Homo sapiens
gaattttcaccattgaatatattagaaccattctgccttggtgtggatgaggtcaccattgtcaacattttgaccaaccgcagcaatgcacagagacagg

SEQ ID NO: 857199 - DNA, 99 bp, Homo sapiens
tgtccgacccctggaagctgatgctgctggacgccactttccggggtgcacagcaagtggaatctgaacctgtgatgttaagaaatcagtaaatattaa

SEQ ID NO: 857200 - DNA, 100 bp, Homo sapiens
acgggtgaatgctgctaaaaacaagactggggctgctcccatcattgatgtggtgcgatcgttgagacatttgggaaatgatgaagtgcacattgtttgg

SEQ ID NO: 857201 - DNA, 100 bp, Homo sapiens
tagaacactaaagtgttacatgacagatgtatgagggaatttgaagtactgccttgtaattcttaatcagcctttggacaactattttcgtcatctttgg

SEQ ID NO: 857202 - DNA, 98 bp, Homo sapiens
cggggcaagaagcacagcatcatcctaaggacgcagctgtctgtgagggtccatgcctgcatcggaactgtctatcttgaccatgcaggtgccacctt

SEQ ID NO: 857203 - DNA, 98 bp, Homo sapiens
ctctcgctctgcctctccctctgcctctgcctctgcctggccgcggctctgggaagtgcgcagtccggttcgatctggggctaatgttctaatttgtg

SEQ ID NO: 857204 - DNA, 100 bp, Homo sapiens
cagagcaatccactactgccagaccagaagtatgtccgtggttcagaccctgtattaaagcttttggacgacaatgggaacattgctgaagaactgagca

SEQ ID NO: 857205 - DNA, 100 bp, Homo sapiens
atgagctgaggcagaagttcctagaagggtttgatgcctttttggaattactaaaatgtatgcaggtggtatgggccaagacagagaggatcggctgtgg

SEQ ID NO: 857206 - DNA, 100 bp, Homo sapiens
agctaggaattcccttggaagagggctgctgcaccgagccttcagcgttgtcttgtttaacaccaagaatcgaatcctgatacagcagaggtcggacacg

SEQ ID NO: 857207 - DNA, 99 bp, Homo sapiens
acacacgagtccatgtgaaagaattaggtgtcgtactgggatcatatactcctatgaaaggaggaatctccaatgtatggtttgacagatttaaaataa

SEQ ID NO: 857208 - DNA, 99 bp, Homo sapiens
ctcaactttgaagagatcgactacaaggagatcgaggtggaagagtgtttgctttcacaaccaaagttctgggccattcagacatcagccttgatcctc

SEQ ID NO: 857209 - DNA, 100 bp, Homo sapiens
ctggcagccgccttggtagcagcgggtgacatggaaggggcagtacaagcttacgtctctgctcttcagtacaatcctctcccctttgaattggagattt

SEQ ID NO: 857210 - DNA, 100 bp, Homo sapiens
ggatctggtgtaccaggcgaagctggccgagcaggctgagcgatacgacgaactcgcaaactttgagaagaacgtgagccaagctatccacaagtacaat

SEQ ID NO: 857211 - DNA, 100 bp, Homo sapiens
tttctgctcaagtcctgtcctcttctgaccaaagagaagatgagaatgtgcctactgctcctgatcctccaagtcaacatttacgtgggcatgggacagg

SEQ ID NO: 857212 - DNA, 98 bp, Homo sapiens
tcaccgtcaagacccccaaggacaaggaggaaattgtgatctgcgatcgagcctcggtcaaggaggaggtgcttcccaaggaccgtagatgcctctct

SEQ ID NO: 857213 - DNA, 99 bp, Homo sapiens
ccgcggcccgcctcagcatctggtacagccgaaaatggtgtcaacctccaacaacaaagatggacaagccttaggtacgacatcagaattcattcctaa

SEQ ID NO: 857214 - DNA, 98 bp, Homo sapiens
caataccttgggcccagtcatgaagatggaacctctgaataacctccaggaagagagaagggcacagttacctaagtatcaacgtaatcttcctcggc

SEQ ID NO: 857215 - DNA, 100 bp, Homo sapiens
ttatcattggctaaaaagaaaagccctgaatggttcaataagttatggctgcagcttcgattgccaatattgtaaaaagttctcttggtccagttggctt

SEQ ID NO: 857216 - DNA, 100 bp, Homo sapiens
acccagccacctatgcagtattacaatagccaaggggatgccacacataaaggcctgtaccctggttatccggtgttggctcctgctgcttactatgacc

SEQ ID NO: 857217 - DNA, 98 bp, Homo sapiens
agtgagcgaggagtcagaaactcagccactggttgccttggtaggcaataaaaacttaattcagtgcacaaatgagatgaatgtgaacatcccacagt

SEQ ID NO: 857218 - DNA, 98 bp, Homo sapiens
tggcattgaatgatttatagctaagactccaggacacccctgaagccgagaaatggagtcctaagcagacttaaagccaagaaaataagaagaggaaa

SEQ ID NO: 857219 - DNA, 98 bp, Homo sapiens
gcacagcatcatcctaaggacgcagctgtctgtgagggtccatgcctgcatcgagagtgataatgaactctcaagtggaacaggtgatgtgtctaagg

SEQ ID NO: 857220 - DNA, 100 bp, Homo sapiens
gagaagatgggaatcagagtggatcagcttcagccttcctacagcaacttcccactccaggtggccagacgggagttccagaccagtgttgtctcccggg

SEQ ID NO: 857221 - DNA, 98 bp, Homo sapiens
gaagatgcttcatctgcccctgcccagatccggaagaacggtgaatttcccccgcaggaagtgggaaaactcttgcctttgccatcccaatgattcat

SEQ ID NO: 857222 - DNA, 100 bp, Homo sapiens
aacgttgcaaactctggaaaaaaacttggattcacagtctgagaatgaggcttcaccagtaaaacggccacgactacttgagaatacggaacggtccgag

SEQ ID NO: 857223 - DNA, 124 bp, Homo sapiens
aggtgtcttcgcaatgcttgcatagagtgttctgtgaaccagaattcaatcagtgccggtggtggtgtgcacattgagccccggtatagacagttcccccagctgaccagatcccaggtgttcc

SEQ ID NO: 857224 - DNA, 100 bp, Homo sapiens
gcgcgaccttatctccaacaatgagcaactgcccatgctgggccggcgccctggggccccggagaggatggatgacatggctgtggatagtgatgaggag

SEQ ID NO: 857225 - DNA, 100 bp, Homo sapiens
aataggccactacatgaaagactgccctaaaaggaaaaggtttggcagttctctaccagtggaccaatcttttcatccccgtgtacctcaccatcagagc

SEQ ID NO: 857226 - DNA, 99 bp, Homo sapiens
gctgcgagaccctagaggcctgcggcctgcggtcagaaaaagagtgcacgccagtatcacgtacagttctttggtgacgccccagaaagagcttggata

SEQ ID NO: 857227 - DNA, 98 bp, Homo sapiens
gactggaaccatcaaacaaggctgcagagcaaggagcaaggaccaaccccagtggagaaaaagaagaaaggaaaaaggaaaagtgaaactacagtgga

SEQ ID NO: 857228 - DNA, 99 bp, Homo sapiens
cttgggatcccccagttccaaagtgtcttaaagcacaacatgcctttctggaggatcacaaaccatggagacctagtatcccttcaccaggctttagag

SEQ ID NO: 857229 - DNA, 98 bp, Homo sapiens
cggggccctcctgtgacctgcatgtactgggggattcgcagggaggatgtcgggacaccccggaagctgggaaatgtgacagctggagtatcagcctt

SEQ ID NO: 857230 - DNA, 100 bp, Homo sapiens
ccgatctcttcttgatctgtttcttgatatggaagcagctacagggcaggagtttattcatggaggacacactgctaagatttcagattttagctggaac

SEQ ID NO: 857231 - DNA, 100 bp, Homo sapiens
tgcgctgtcagcgatagcccagtggatggccattccaggccgcctgatcttcgacaacctaaagaagtccattgcctacaccctgaccagcaatatcccg

SEQ ID NO: 857232 - DNA, 100 bp, Homo sapiens
atgctggagcagaagttagcgcttctctctcggaccctaataggagtattcataccagcagcagcagcagcagcagcagtagcagcagcagcagcagcag

SEQ ID NO: 857233 - DNA, 98 bp, Homo sapiens
attttgtcatttcagtggaaagtctggcacaggacgggctctacgagtgcattctctgtgcctgctgtagcaccagctgccccagctactggtggaac

SEQ ID NO: 857234 - DNA, 100 bp, Homo sapiens
cattgatgacgatgctcacctccgccatgacgaaatcatgtttgggttccggcaaaagaatgcatgtgcagttgtccacaagccggcttcggactgcccc

SEQ ID NO: 857235 - DNA, 101 bp, Homo sapiens
agtcctctgagcagcctgttaccttctgcctcagtgccagagtccatgacaattaataacagcgacttgattgcatgtacagtgatcaccaaggatggcgg

SEQ ID NO: 857236 - DNA, 100 bp, Homo sapiens
aaacatacggagattgacaatcaatgggccatcttggacggtctggaattaactttcttctctggtgtatatggaacctgtattggtgctacaaataaat

SEQ ID NO: 857237 - DNA, 98 bp, Homo sapiens
agtcatgatagaaatgaaccatttgtctttagtcttggcaaagatcctgataacttaagtgactctctcttttccggtgatgaagaaaatgctgggac

SEQ ID NO: 857238 - DNA, 101 bp, Homo sapiens
agaagcaaacattcatatcccaacattcctgtgtcaattcgacggagctggatgaactcattcagacaatacaatggtgggtgaagagaagatgtctctaa

SEQ ID NO: 857239 - DNA, 100 bp, Homo sapiens
tcgaaaggagcaagagcaagatcaccgtgacatccgaggtgtggtgtggaacctataggccagagtatgcggttaactccattaaaacagatgtgcacag

SEQ ID NO: 857240 - DNA, 99 bp, Homo sapiens
ctgaaaacagaaggaaattgaaggaacttggagttaatggtctaatttatgatagagctgatagacacacaccttagctggatacaaaacatattatga

SEQ ID NO: 857241 - DNA, 98 bp, Homo sapiens
aagaaacctggatctttgctagaaagagaggctttgtgccttgggcaaagggcagcttactcctggaagaggactgactcaaggaccccagaacccca

SEQ ID NO: 857242 - DNA, 98 bp, Homo sapiens
tgctgttgtccaacagaacgacctagtatttgaatttgctagtaacgtcatggaggatgaacgacagaagaaagccctcagaatccattctgtggaag

SEQ ID NO: 857243 - DNA, 99 bp, Homo sapiens
agagccaaaagaatgaagtttttttggatgtggtcgagagattgtctgtactgatagcatctaatggggcatgtgtccgtttcgccacatcagtggtga

SEQ ID NO: 857244 - DNA, 100 bp, Homo sapiens
ggagcagacctggcgcaggggaaccacagtggggcccgcaagaaactgaagaagattcatgttacatgtaaagctgtcctcatttgtgactatggaccta

SEQ ID NO: 857245 - DNA, 98 bp, Homo sapiens
ctcatcaacaagggcgccagggtagcggttaccaagatgaacagactagccactttgcattgactggaaacaatggcatttacagaaagagtcaacag

SEQ ID NO: 857246 - DNA, 100 bp, Homo sapiens
ctcaagagcctcattatctaccacccgagatgccccaagctgggctcaaaatgcagagaactcaaagatattcatttcggccagtgttacaagatctcag

SEQ ID NO: 857247 - DNA, 98 bp, Homo sapiens
ttgaccagccgagggccatcgccttggaccccgctcacggcgggcgatgatgagatctcatttgaccctgatgacatcatcaccaacatcgagatgat

SEQ ID NO: 857248 - DNA, 100 bp, Homo sapiens
ctggtgatcacatccccaccccacaggatctgccccagagaaagtcctcgctcgtcaccagcaagcttgcggggaaggtgggagtcaatcattttgacaa

SEQ ID NO: 857249 - DNA, 98 bp, Homo sapiens
ctctggagccagtcttgaggtcctacatctccgaaagcaagctcttctagaagttgaacatacatatgatagttgagaaagacacatattctgatcat

SEQ ID NO: 857250 - DNA, 100 bp, Homo sapiens
ggtaacatccccgccgagagctacaccttcttcattgacatcctgctcgacactatcagccacccctttgctgtgaagttgcttgcgctctgtaagaaag

SEQ ID NO: 857251 - DNA, 100 bp, Homo sapiens
tatacgttgtgaaggaatgaccctaggagagctgctgaagggaagcagctcgagagtgtcgtagaaagaagaaagaatatgtgaaatgtttagaaaacag

SEQ ID NO: 857252 - DNA, 100 bp, Homo sapiens
gtctggagcaaggaaaagatccctggaatatgaagagacacagtatggtagccacacccccagggaacactgactatgccaaatggagactacattgaag

SEQ ID NO: 857253 - DNA, 99 bp, Homo sapiens
aaagctggtaatagatgtctgacaaactaaagaaagacttgtgttacggtgtgattaggcccactgggggatacgctgtcatgctacactggtcaatgt

SEQ ID NO: 857254 - DNA, 98 bp, Homo sapiens
gaggctctcaaagatgcccaggagaagctggagctggcagagaaaaaggccaccgatatccgagtgaagcctgacaggaccggtgtggtcacggatgg

SEQ ID NO: 857255 - DNA, 100 bp, Homo sapiens
tttgacttgcatcgtctacctacctctgccatcctctaccagccgcaactgcgagggctggagggaacactgactatgccaaatggagactacattgaag

SEQ ID NO: 857256 - DNA, 100 bp, Homo sapiens
atttacatttgaattggacaatacctggggaaatgcggaggacacatggaagttggggagaaattgggagttcttcggggaacatttcattgtactgttg

SEQ ID NO: 857257 - DNA, 111 bp, Homo sapiens
agcaacagccacatggtgttgacgggaaactgtcctccataaataatatggggctgaacagctgcaggaatgaaaagatgcaccagcaaggaatactgaagaccgatgatc

SEQ ID NO: 857258 - DNA, 130 bp, Homo sapiens
cacagagggacattcatcaaagggccaatgatgaccttgcagatgctgggctagaaaaactccatcttagccaaacaggcaggactcgtgaaattgtgatgccttctaggaactacaccccatacacaag

SEQ ID NO: 857259 - DNA, 98 bp, Homo sapiens
acatggcggaacgcaggagacacaagaagcggatccaggtgcctcatctccagacatggagcccagctatgggggaggtctctttgacatggtaaaag

SEQ ID NO: 857260 - DNA, 99 bp, Homo sapiens
tgcttctcaggtagcaagtacatggggaggtgctgcgacaagagactttggacaaaaattgacttgagtaggtgtaaggccattgtgccccaggccctc

SEQ ID NO: 857261 - DNA, 125 bp, Homo sapiens
caagagccatttcacccattgtcatctcgaacagtatcttcttcttcgctccctagcttagaagagataatcttgtgccgtggaaatcagaagggcaaaacgaagcagtcatgatgagaagcaca

SEQ ID NO: 857262 - DNA, 100 bp, Homo sapiens
ctagcccagcaaatgatcagccttgcaaataatcacagattagctatcctggtgtatagcctggaagcaggacgccgcctcttgaagctgggtaacgttc

SEQ ID NO: 857263 - DNA, 98 bp, Homo sapiens
ctttagtgtatcatgtagttggagtagatgtcggatttgaaaatccaatgtttgcttgtctggaaatggattatgagacgagggtgacaatagagtgt

SEQ ID NO: 857264 - DNA, 100 bp, Homo sapiens
ctcggactgtgccggcgccgcacccgaggctctcgccagcccggcgccccggtgctgagattttaccaaatgttgcaagaactctggagttcttatggta

SEQ ID NO: 857265 - DNA, 100 bp, Homo sapiens
tttgccacctagtgaccaaactgagaaaggaaacagattcattgtctgtctgaggatgagttaagttcttctacaagttcaactgataagtcagatgggg

SEQ ID NO: 857266 - DNA, 99 bp, Homo sapiens
aatggcgtattggagatagtcagtgcagtaaattcagtgtcagtatacagactagaccatacctttgaggcggtggatgaattttattccaagatagaa

SEQ ID NO: 857267 - DNA, 100 bp, Homo sapiens
attactgttatcgttgtgggaaccaggctgctatcatggaattagatgacactttaaaatattccttgctggagtgcaatggtgcgatctcggctcactg

SEQ ID NO: 857268 - DNA, 99 bp, Homo sapiens
ttctctcggctggatgttctcatcgtccctgccaactttccaagtctggggatggccaggttcttgttaaacctttgggagaccgaggatacctttttc

SEQ ID NO: 857269 - DNA, 100 bp, Homo sapiens
agctggtgggaaatacagaagcacagtcagcaaaagcaaagacccctcggggctgctcatctctgtgatcagtgttgttacagatcttataacagtcggt

SEQ ID NO: 857270 - DNA, 132 bp, Homo sapiens
aagaaaaagagatctacagacttcaacacatgtagaaacactactaactttttcagctttgaaaaggtaccataggagaggaggttatgatgtggaaaatgaagagaaagtgaagttgggcatgactaattc

SEQ ID NO: 857271 - DNA, 100 bp, Homo sapiens
agaaacttttagactcaccctaagagctgtcaaattatgggcaaaacgtgtgccttgcacatacaaaaaagaacctgttcgtatatctaatggaaataaa

SEQ ID NO: 857272 - DNA, 100 bp, Homo sapiens
gggaacccgcggtggagcgggacacgaacgtgcttcctgggtctgcaggtccagccggctggcaccctccatgtacccaggggagattccagccagacac

SEQ ID NO: 857273 - DNA, 98 bp, Homo sapiens
ttctggagtgtgtggagcagttttgtggtggtgaccaaggcggccatgattgtgaaccagctgtcgaagaaggaggcgtcgcggcgggccctgatggg

SEQ ID NO: 857274 - DNA, 99 bp, Homo sapiens
tgtggtgttgtcattgcctgagcgcgtcgagccagacagactgctgagcgactatattgagaaggaggtaaaggtgaacccgtgagcaactgtggtacc

SEQ ID NO: 857275 - DNA, 98 bp, Homo sapiens
agcaccaaatccaagatggcggccagcaggaggctgatgaaggaccaagaatcgccttcagccctgtctggtgcatccttggcagaaagtgaggagga

SEQ ID NO: 857276 - DNA, 117 bp, Homo sapiens
gcattgtaggtgagaatgaaacttatcccagagctttgctacattggaacagggccgcctctcaagccctaccattgaccatgccctgctggacatgcccttcctttgactccctgg

SEQ ID NO: 857277 - DNA, 98 bp, Homo sapiens
gaagttgctgatgaacctcctaccctcaccaaggaagaaccagttccactagagacacagtgaaactggaacgccaagctgaagaagaacgaatacgg

SEQ ID NO: 857278 - DNA, 100 bp, Homo sapiens
atgctgaggaggagttggagcaggggatcccaacaagccctcaggattcagaagtgttaaagctcctgtcactaaagtggctgcgtcgattggaaatgct

SEQ ID NO: 857279 - DNA, 50 bp, Homo sapiens
acagcaaacatggttcttaatgagtactaaggctcgtacgtctgcatcga

SEQ ID NO: 857280 - DNA, 100 bp, Homo sapiens
taaatgtagacaatggttagagaagaattttccaaatgaatttgcaaaacttactgtagccaaagccttctactaccccaacttcacctcggcctcaagc

SEQ ID NO: 857281 - DNA, 98 bp, Homo sapiens
tcgtctccaacttgctaaaaatgggtcacacagtgactgtctggaaccgcactgcagagaaatcttactactttgaccgcgatgatgtggctttgaag

SEQ ID NO: 857282 - DNA, 98 bp, Homo sapiens
tgaaagattctgccgaggcctcaaagaggccaagtggcatcagagctgagtgatggacgacctgcagtcccagaacctctccatggacatgactgact

SEQ ID NO: 857283 - DNA, 100 bp, Homo sapiens
agcagcagccatgccaatgcgatgggtgctggcacagatgagaagactctgaccaggatcatggtatcccgcagtgagattgacctgctcaacatccgga

SEQ ID NO: 857284 - DNA, 99 bp, Homo sapiens
gcctctcctgggatcggcccaaggccagttctccgcaggaagtgggaaaactcttgcctttgccatcccaatgattcatgcggtgttgcagtggcagaa

SEQ ID NO: 857285 - DNA, 98 bp, Homo sapiens
ggcgccggcagcggacagctcggacagcgcccagggccggagcccgagcccttggagatacttggagatgaagttcaacttttttcacttgatgaaga

SEQ ID NO: 857286 - DNA, 100 bp, Homo sapiens
agagcttggttaacttgggagaaagtttcatctgtggatggagtattgagtaatcaagtcagaggattatatgacttttatctgcctagagaagaactat

SEQ ID NO: 857287 - DNA, 98 bp, Homo sapiens
aaggacggctccttatttcactccacgctgtttttcttcaaataaagaacatggtgaaactgattcacacattagctgatcatggtgacgatgtcaac

SEQ ID NO: 857288 - DNA, 98 bp, Homo sapiens
gccggccgacccttcctgtcgctgacggcgactgcgggaggccaggtgctgcagatgattacaatagaattggttcttcattatatgctttaggaact

SEQ ID NO: 857289 - DNA, 127 bp, Homo sapiens
caccacctgcctgcccactggtcagccttcagggaccctgagcaccgcctggtctctttcctgtggccagcccagccatcgacgagtacaagccccaggatgctaccaccaacccgtccctgatcct

SEQ ID NO: 857290 - DNA, 100 bp, Homo sapiens
acccttaccatctatcggatattatggtgaaaggcttgaggataacaccattttcatattatactgggattatggagagtggagactgctgcacggactc

SEQ ID NO: 857291 - DNA, 98 bp, Homo sapiens
ccctgcggggaagaacgtgctactgctggtgtttgccagctctgagcctgtgccaggattccagggggataccctgcagctagcattcattgacctca

SEQ ID NO: 857292 - DNA, 98 bp, Homo sapiens
acaacagacttatttcttccacttagttctgaggtgaagacagatcatgggactgataaattgataggggccctgaaggactactaccacttctacca

SEQ ID NO: 857293 - DNA, 98 bp, Homo sapiens
ctactacacgaccatccaggacctgcgggacaaggaggagatgttaaagtaacccatcttgcaggacgacattgaagattggtcttctgttgatctaa

SEQ ID NO: 857294 - DNA, 98 bp, Homo sapiens
aactctgaggagtccactgcagcagcagtattaacttcacagaaaagtagtgaataccctataagccagaatccagaaggcctttctgctgacaagtt

SEQ ID NO: 857295 - DNA, 100 bp, Homo sapiens
agacaatgttgtctgcagccagcctgctcgaaactttagtcggcctgatggcttagaggactctgaggatagcaaaccatcatgtatgtcatgggagcac

SEQ ID NO: 857296 - DNA, 99 bp, Homo sapiens
ttcaaggatcttcaaagggtaaatgtaccctggaagagggatactggacctgtgatagagaccttacatgacccttggaacacttcgagatcaagtgat

SEQ ID NO: 857297 - DNA, 100 bp, Homo sapiens
gtgtggaaacagcagatgtaccctcagtacgccacctactattacccccagtatctgcaagccaaggtgcagctgcaggggatgacaccgaagatacaag

SEQ ID NO: 857298 - DNA, 139 bp, Homo sapiens
cctggacggggatggggacggtttcgtccgcatcgaggacttcatccagtttgctacggtctacggggcagagcaggaacgtcaaggtcgtgggaaataaaaggcagttctacacagactgcagcaacggttgcatctg

SEQ ID NO: 857299 - DNA, 98 bp, Homo sapiens
aagatcattttgtgaaagaaaagaataatttaataatgatgttgcaaagactttctaaaaccaatttttccaacaacaacgatttccgtgctcttctg

SEQ ID NO: 857300 - DNA, 100 bp, Homo sapiens
agtcattcagatggcaccttgactatatggaatgtaaggtcccctgctaaaccagtacagacaatcactccacatgaacctatgagaaccccaaagacat

SEQ ID NO: 857301 - DNA, 99 bp, Homo sapiens
aaaacttctacccaatggattcaccaagaggaaggagaattcaaccttttttgataagaatagccggatcgagctgggagatgtgacaccacacaatat

SEQ ID NO: 857302 - DNA, 100 bp, Homo sapiens
gccgaggatgccatcattgccctttccaattacagacttcacatcaagttcaaggagtctcttgttaatgtactgctaaagtcagacagcccaacaggtg

SEQ ID NO: 857303 - DNA, 98 bp, Homo sapiens
tatgaacttggagagtatataagaaagagatatagaaaattcttgaatgagtcctataaacatgaacagtgattcgcctttgccagtctcatctcgtg

SEQ ID NO: 857304 - DNA, 51 bp, Homo sapiens
tccggcggctgccgtgactccagtgcaaatggcgagcggctgcagctgcag

SEQ ID NO: 857305 - DNA, 100 bp, Homo sapiens
aactccaccgagcatgagctgaccgtcagcaccaggagcagcgaggcactcatcctgcacgccggcgagtgccagcgaaaaatggctacaaacttcctag

SEQ ID NO: 857306 - DNA, 100 bp, Homo sapiens
gtgccagctctccagagagaaaagggatcatggcccaagttgcaatgtccaccctccccgttgaagatgaggagtcctcggagagcaggatggtggtgac

SEQ ID NO: 857307 - DNA, 100 bp, Homo sapiens
cgagttcagcaatgccattgcatccatccggcatgccaggaaaatctctaacttccaaggtcccaccaacagttcagaaacctaccacagtaaatgttcc

SEQ ID NO: 857308 - DNA, 99 bp, Homo sapiens
tcggagttcagcagccatcagaaccaaggtgtgtgcagtggcctcagggatccggaaagtctaggactgaacttctcctaacatccagtaatggggacc

SEQ ID NO: 857309 - DNA, 100 bp, Homo sapiens
ggagcgcggagccgcgagccccgagccccgagcccggcgcctggctgagtagtacctaaaacagatccaggacctgcccccaactggcctccctgagatg

SEQ ID NO: 857310 - DNA, 100 bp, Homo sapiens
gcagctgagaacttggccctggtgtcttggaacagcccacagtggtggtgggcaagggcagacttgggccagcagcagtgggagacatttagtgaacgct

SEQ ID NO: 857311 - DNA, 100 bp, Homo sapiens
cgcttcttccagcccaaggatgaggggggctacttctactttgcatatgtccatttggagaggccccatttcaagtgctcagtggctgctggtggctacc

SEQ ID NO: 857312 - DNA, 100 bp, Homo sapiens
ggaccagctaagggaggcaagaagaagaaggatcctaatgctcccaaaaggccaccgtgttgatcccaagagcattccctagtaaaaacgcttcatgctg

SEQ ID NO: 857313 - DNA, 99 bp, Homo sapiens
atcaagagtataatgtctatggtgaagtcttttgtacagtggttagatccaaggattaatgtcgtgcttgctggtggccacgttgtgccccgagatgag

SEQ ID NO: 857314 - DNA, 98 bp, Homo sapiens
tgcacatgctgggctaccctgctcactttggacaggtcggatcatgctaaaaggagataatattactctgctacaaagtgtctccaactagaaatgat

SEQ ID NO: 857315 - DNA, 100 bp, Homo sapiens
gttgcaatgaaaaatttggcagataatcattgggcaaaaacttgtgagggcgaaggtcgtattgaatggtgttgtaggatttttagactctgaggagcag

SEQ ID NO: 857316 - DNA, 100 bp, Homo sapiens
catgtcaccccaccacccattccgaaatctaaccatggaggcagtgatgcaggaaccttcagaagtttagtctttttggagacataagtgttctacaaca

SEQ ID NO: 857317 - DNA, 100 bp, Homo sapiens
aagagcttcctggagatttgggaccggtccagtccagaggtcaaggaggcctatggcgagaagtttgttgcagactagagtaatgccttctagctttttc

SEQ ID NO: 857318 - DNA, 100 bp, Homo sapiens
ttccttactcatgcccttctgggggatagtttggctgctgaataccttatattacatctcatctccacagttcttgcctccagattaactttggctgagc

SEQ ID NO: 857319 - DNA, 100 bp, Homo sapiens
ctgggcccaggtgtcatcgaccttactcggccagaagatgcagagggactcagcccaaaaccatgtttgcccaagttgaatctgatgatgaggaagcaaa

SEQ ID NO: 857320 - DNA, 100 bp, Homo sapiens
cagacttctattttaatattgcaggccaccaagccatgcattattcaagtgataatagagtgacatccttcagagacctcattcatgaccaagatgaaga

SEQ ID NO: 857321 - DNA, 98 bp, Homo sapiens
cggagtgctgttggaagttcaatactcttcttcaatacatgaccgagaaattaggtgagcacctgcggatctgtccccagggctacacctgctgcacc

SEQ ID NO: 857322 - DNA, 100 bp, Homo sapiens
ggaatacttacattgcccaaaccagtgcatttcaaatcttcagccaaggaaggttccaacatggaatcgccacttatatatgtttcagttttgcttttga

SEQ ID NO: 857323 - DNA, 100 bp, Homo sapiens
gaatcagaaatctttactgattccaatagctgcagctttggaacagttcaagtctcttggtgctgagcccttggaggtggacttgaaggaatctggtgag

SEQ ID NO: 857324 - DNA, 100 bp, Homo sapiens
ccggcatagtacaatgaggcagccagcggatcttgggcctgcactgcccaaagtcttggaaacttgctggatatgatgtaccgggagccagcacgatggt

SEQ ID NO: 857325 - DNA, 98 bp, Homo sapiens
agaaactcagggcggccccttagctcctatgactggaaccattgaaaagatctctattccagctttctcggtaaccctaataaagaaaaccaaaactg

SEQ ID NO: 857326 - DNA, 100 bp, Homo sapiens
caagagaggaaacaaaaagttaaacaagcaagcctgccataagtgagaagacaagttggatggcttgaggactggtactaaaaggaaacgtgactgggag

SEQ ID NO: 857327 - DNA, 100 bp, Homo sapiens
ccatttttcttaaatggcccacatcaggacagctgttccttggccatcccaaagctattctgggggcaacagaggaaacttccattttagaagaatacag

SEQ ID NO: 857328 - DNA, 99 bp, Homo sapiens
ggactgcaccgcaccgagggcgagctccagatacccagaaataatcgcttaatgtatattcatagctaccaaagctatgtgtggaataacatggtaagc

SEQ ID NO: 857329 - DNA, 100 bp, Homo sapiens
gtttagaccacagacataaacagaaagtcttacatgacacaatggatctgaatcatctcttgaaagttaaagaagagtgtaagagtcctaaagctgagtg

SEQ ID NO: 857330 - DNA, 100 bp, Homo sapiens
gccagctatgggaacgtcatcgttatcaccattaactaccgtctgggaatactaggcgtgcagtatggtgaatatgttaataaccaagctagctccgcac

SEQ ID NO: 857331 - DNA, 98 bp, Homo sapiens
ccagagtggttggaggtgccctgcctgtcagaatgtttctgcacatgttcctaatacctacacttgtttctgtgagatgcacaggtgattgagctgta

SEQ ID NO: 857332 - DNA, 100 bp, Homo sapiens
atggcaagcactaaaccactatgcttaccgagatgcggttttcctcgcagaacgcctttatgcagaagggccgcaagcttcttatcattgggaccactag

SEQ ID NO: 857333 - DNA, 101 bp, Homo sapiens
cgtgagggtggagattatacatctctcatcatttcagcaacaaggaaataaattagtggcagagtaagggtgacttggctggagtgcagtggcgcaatctc

SEQ ID NO: 857334 - DNA, 100 bp, Homo sapiens
gattacaataaagagattcataagccaggctacctggctaatgatagactcctaccccagcgatgatgattggcaggaagcacatgagcgcctggctgaa

SEQ ID NO: 857335 - DNA, 100 bp, Homo sapiens
gccgctgactgtgcccctgtggaaggaggtggccaaggtggaatacgtcaggaagaagccaaaattaaaagaagtccaggtgaggttagaggagcatttg

SEQ ID NO: 857336 - DNA, 101 bp, Homo sapiens
ataaccagtccttcagagaacaagagggtttgactgccgatgtggaaatttgttttgtggacttcaccgttactctgacaagcacaactgtccgtatgatt

SEQ ID NO: 857337 - DNA, 100 bp, Homo sapiens
cggctccgggtggtctacgaactgtgatggcggcggccgcggtgatgggcccggcgcaggttactataacaacagtaccaaggtggctgtgaaaaccctg

SEQ ID NO: 857338 - DNA, 98 bp, Homo sapiens
ggagccaacatggcagcggggttcgggcgatgctgcagggatatcaacttacgagtgaagtggcccaacgatatttattacagtgacctcatgaagat

SEQ ID NO: 857339 - DNA, 100 bp, Homo sapiens
aggactgcgccgcgtcttcctcaagcactctcgagtggaccctgaggagctcttcaccaagctcgaccgcattggcaagggctcgtttggggaggtctac

SEQ ID NO: 857340 - DNA, 98 bp, Homo sapiens
aaagaaggcctgcggcaaagagatgagcttattgagatcaaatttggaccccttcaaccagtacactgaagaccagatttgggatgccctggagagga

SEQ ID NO: 857341 - DNA, 98 bp, Homo sapiens
caaaccgagacaagttcaccccgaagtctgccggacatgtctcaggaaggctatggaactagatctcaacctcctctggcccccggaaaacctaacca

SEQ ID NO: 857342 - DNA, 50 bp, Homo sapiens
attcagaaggagcaggattaccaaagggctcagctgtcgcaggccctgga

SEQ ID NO: 857343 - DNA, 98 bp, Homo sapiens
tcgatgagtcggagaagtcccgtaaaaatgcatttgcaaagggagaaaatgaaggccaaacagaagcaggctccagcttctgcaaaaacttggattca

SEQ ID NO: 857344 - DNA, 100 bp, Homo sapiens
gactacgcccgcagccatggcaaaaagctaccacctgccagtctgaagcaccgagatggtcaaacatgtgttgacatcaaggacaacgtggtggatgaag

SEQ ID NO: 857345 - DNA, 100 bp, Homo sapiens
ccctaaatgttggaattacagacatgggccactacacctggcgatctgtgtcttatacggccgcaaaagataagtaccgtgaattggctgtggaagggat

SEQ ID NO: 857346 - DNA, 98 bp, Homo sapiens
gaccatctacaagagccaaatcaagattgcgtttctcaaagtcctacaggttgctttctgcaatggagagcactgcttctttagagaaaatgcctgct

SEQ ID NO: 857347 - DNA, 99 bp, Homo sapiens
cgctgttgctggtctctggctccctcctcccagggccaggcgccgctcagaacggtgttttggggaacgagtttagtatattaaaatcaccagggtctg

SEQ ID NO: 857348 - DNA, 98 bp, Homo sapiens
gtgccccgacggggcgcgcgcgaagcgagcgagaaggcacggagtcgccgcggagcgcagcagcccctgtcaaagggaacaggaagcagtccacggag

SEQ ID NO: 857349 - DNA, 100 bp, Homo sapiens
agttccccgacaagtttggatcctgtgttccccactcccagctgcaggaggagctgcggggcctgagagagacgttcagcaacttcacagcgagcacgga

SEQ ID NO: 857350 - DNA, 98 bp, Homo sapiens
tacttcattttgttggccaagaaaagtaaagttgacatttggtcagttgggtgcatcatgggagaaatgatcaaaggtggtgttttgttcccaggtac

SEQ ID NO: 857351 - DNA, 100 bp, Homo sapiens
ccgcgacctccggatgacccgggcttcggcccccaccagagactcggctccgagctctgtccagtggtgggagtattacatcccctcctctttctccagc

SEQ ID NO: 857352 - DNA, 98 bp, Homo sapiens
aaattccacccagtatttcaagagtcacttctttacttggtgcaggaaggcagtctttgctacgtacagcaaaagcagagagactttcaagcagctgg

SEQ ID NO: 857353 - DNA, 100 bp, Homo sapiens
ttagaagaatgacttctcatccaactcttccttactggacagtatgatttggtgaaatgcctggctcctattcgagaccccaagaccgagcaggatggac

SEQ ID NO: 857354 - DNA, 99 bp, Homo sapiens
gaaagaagaagcaggtcccaaggggccaggcgcctcctccacctcctcctcctcctaggtaattctgaattgctcagctctgcagagtttattgcattt

SEQ ID NO: 857355 - DNA, 100 bp, Homo sapiens
ccggcccgcaaaagctgcaggagcatcgctaggtgttgccgccaccgggaagcggggctgcagatatttggagttcttacaacatggcagacattgacaa

SEQ ID NO: 857356 - DNA, 99 bp, Homo sapiens
gtagaggctcccgggacctgcgtgctgccgagagaggaagcgaagggcaccatctttggagtacgagacccaatctagtgcagaagccaaatttgtgaa

SEQ ID NO: 857357 - DNA, 100 bp, Homo sapiens
ccaaaatgcacaaactatggcttacaacatcacacccctgcgcagggccacagtggaatgtgtgaaagatcagaatgttggctaccagggtatttagcct

SEQ ID NO: 857358 - DNA, 100 bp, Homo sapiens
ataattaaagagtaaagttgtgctcaacgctattcctgcaccaactgacctgaagttcactcaggtcacacccacaagcctgagcgcccagtggacacca

SEQ ID NO: 857359 - DNA, 125 bp, Homo sapiens
tttgtcttctccgcacgactgttacagaggtctccagagccttctctctcctggtgcctgtgtagatcatcctagaatacctgtgtggtgctgtccttcctcaagactacctcattctcactggc

SEQ ID NO: 857360 - DNA, 100 bp, Homo sapiens
atcgatgtgcggcgtccgctgtataagtgttcggtgaccagtgacttggattttccaacacaagtcatcccattaaagactctgaatgcagttgcttcag

SEQ ID NO: 857361 - DNA, 100 bp, Homo sapiens
tcgaaggatggaagaagagacgaagagacagctggatgaaacaagctgtaacccttcacgtgccttaccttcactcaatactggcagctcttcccccaga

SEQ ID NO: 857362 - DNA, 98 bp, Homo sapiens
cttactcggagtgccaaaatgctgcacagatctaccgtcgcgtgaccagtggtgaatttggaagtgaaaagaaaactgctttgcatgaaaaagaggag

SEQ ID NO: 857363 - DNA, 146 bp, Homo sapiens
aaagccacgagcactgagcgcctcctgagagccagccctgacgtgaactcattttatctgccacgacccagaagcctggcagtgagctggacaacttggaggagattttggatgatttgcagaatagtcaattaccacagcttttc

SEQ ID NO: 857364 - DNA, 98 bp, Homo sapiens
aaacagcctctgcggtgtaaacagccgcggcgggcaggccaggactgtcagtgcccgcccctcggggcaggactatgatgatggatatggcactgctt

SEQ ID NO: 857365 - DNA, 100 bp, Homo sapiens
tcctatgacaatggactggcacagggagctggacttgaatctcatgaaatgaatactgcattgagggacggacttctggtcttcttcttcctaattgttc

SEQ ID NO: 857366 - DNA, 98 bp, Homo sapiens
ctcgagagaccagcaaggaatccaaatgcatcattcagatgcaaggcaactcgaccagcctgtgtcacttgtgaaaatgaagattcagctgatggtgc

SEQ ID NO: 857367 - DNA, 98 bp, Homo sapiens
aggccgtggaaacaaagggaggaactgtttgtagccctcgtccagacgccccaaacaaacaatcatccaattatgatgggttttgaaccccttgtgaa

SEQ ID NO: 857368 - DNA, 98 bp, Homo sapiens
tgacttgtgtattttcaactctgggatcacctgatcatttcagagatctctttgctgccactttcctcattaagaatggggcctttgtcaacgctgct

SEQ ID NO: 857369 - DNA, 100 bp, Homo sapiens
caaaagttgtcaggttgaaaatggaagagtaattgcctgctttgattccctaaaggtggacggcctgttcatcatcgggtggatgtacctgcctccccat

SEQ ID NO: 857370 - DNA, 98 bp, Homo sapiens
aaatgatcagtagcaccagtgtttatggcagttgcagtggtgcagaatggctgacctcagtcttgcagatgcattaacagaaccatctccagacattg

SEQ ID NO: 857371 - DNA, 100 bp, Homo sapiens
ctggagtgaactggattccatgtagagacccctggagtggaagtagtggaggaagtggaagtcgagaaaacagtggtagcagtagtattggcattcccat

SEQ ID NO: 857372 - DNA, 98 bp, Homo sapiens
gcattgctgaattcttctctgatatcttcctgtcatggttccccttctactacatgctgaaggtctgacctacgagaaacatggcaaccagcgccgtc

SEQ ID NO: 857373 - DNA, 100 bp, Homo sapiens
ctgtccatcgtgtgcctgatgatcacgcagctggctggcttcagtggaccagtgccagcgagatttcagattcctgtaaacctctaaagaaaaggagtcg

SEQ ID NO: 857374 - DNA, 98 bp, Homo sapiens
taatcttctagaagccctacaatcaggtgcagcattcagagaccgtcgaaagcggattccaaggaatccaggcgagtatagtgttggaaacaagcacc

SEQ ID NO: 857375 - DNA, 98 bp, Homo sapiens
agtcatggatgagctaatcaatgaggaacttgagacatttaattctcgttggagggaactacatgaagagataacggaggagatgatggatcaggcaa

SEQ ID NO: 857376 - DNA, 100 bp, Homo sapiens
ttgaggatattatctttaggaagaaacaacataaagaacttaaatggactggaaaagaattccatggcaacatcattaaagtgtcctttgccactagaag

SEQ ID NO: 857377 - DNA, 98 bp, Homo sapiens
tgattgcgttacaagctttgtctccttcgacttggagtctttgtccaggacggctgaagccgacgtagcttctctgaacagacgcatccagctggttg

SEQ ID NO: 857378 - DNA, 100 bp, Homo sapiens
catgattattgagcataagattgtcatagctgatgtcaagttggttgctgatttccaaaggaagtcctggctgagcaaggttggaagccctagttctcgc

SEQ ID NO: 857379 - DNA, 100 bp, Homo sapiens
gcttctaccggaggcgggacatctccagcaccctcatcgccctggccgacaagcacgcaagtctctaattaacagaagatggcaaagcccagccacagca

SEQ ID NO: 857380 - DNA, 99 bp, Homo sapiens
tttatcttacccagtgacatattcaggaatatggcaccaaggcattcttgcaggcaccaaggcacagcttagagtagacccgagtcctgctctgcggag

SEQ ID NO: 857381 - DNA, 100 bp, Homo sapiens
tgccttattaccgtcaaatcctccctgtcctgaacatctttaagaatatgaatgctaaaagatggcggcaaggcagcccaggcaaatgtaagaataggcg

SEQ ID NO: 857382 - DNA, 98 bp, Homo sapiens
tcttatactctagaatatacaaagacaaaaggagattctgatgaagaagttattcaagatgattggccatcgggactttgatgtggagaagcgacttc

SEQ ID NO: 857383 - DNA, 100 bp, Homo sapiens
ccagagaaagtggaagaatacaggaacagaaatttttatgaactgagccctcacatgacaaaactttcggtttgaagaataagaaaggagcaaagcaaca

SEQ ID NO: 857384 - DNA, 98 bp, Homo sapiens
ggaggaaggtggcaagatggtgttggaaagcactatggtgtggacttgaaagaggagattgatattcgactctccagggttcaggatatcaagtatga

SEQ ID NO: 857385 - DNA, 98 bp, Homo sapiens
gaaagtctcagcagacccttcctgagggccgagcaacagtgtagtggcgtattccacatagcaaacagttggttgaatctggcgatgtggaacccatg

SEQ ID NO: 857386 - DNA, 132 bp, Homo sapiens
cgcccatctgaaaatcttggtcaggtactattcggggaaagaattgaaccttcaccatataaggcaaagccaaagctaattgagccactcgactatgaaaatgtcatcgtccagaagaagactcagatcctg

SEQ ID NO: 857387 - DNA, 100 bp, Homo sapiens
ttaacaaatgaggacctacagggcagaaagcagttggacaaaaacatgagcaaccttcgcacctggttggctcgaattgagtctgagctttccaagcctg

SEQ ID NO: 857388 - DNA, 100 bp, Homo sapiens
tagaagagagagaggaggaatatcaaagggtccgagagagaatatttgcccgagagattttagtccatggagaacagaatgaaatggccagattgaaagc

SEQ ID NO: 857389 - DNA, 100 bp, Homo sapiens
atttcaagtcccccagttctgtccagacatctggtcttacctatagcacttaacaaagttggttgaatctggcgatgtggaacccatggatatggagggc

SEQ ID NO: 857390 - DNA, 99 bp, Homo sapiens
cgctgtcgctgctgctcgttcgagtcgcagggctctggaacttcatccattctctatgaaacctcttctgaggcgggcgatggcctatgaaactctaga

SEQ ID NO: 857391 - DNA, 100 bp, Homo sapiens
caatgatgtgtgcaataatgaatcattagtatcggacacagaaactttaacggatgaagagtcccggaaaaattgggaagaatttggaaatccagatggg

SEQ ID NO: 857392 - DNA, 98 bp, Homo sapiens
caagttgagcagatgacaaaacttcaagccaaacatcaagcagaatgtgatttgcttgaagatatgagatatttggatttgacctgcattttggaatt

SEQ ID NO: 857393 - DNA, 98 bp, Homo sapiens
cggccaacgccttggcactaggctactctccagagagaccggatcttcaaacattttaccaggaagcgccaaagggctatgcgaaggcgagtccacca

SEQ ID NO: 857394 - DNA, 100 bp, Homo sapiens
tacagcagagacgtcatacttggaaatggctgcaggttcagactctcgtggcattatccttcagtggggctattggactgacttttcttatgctgggatg

SEQ ID NO: 857395 - DNA, 98 bp, Homo sapiens
ccactactatatgccaagtgtttggaacagtttgcacggaggaatggttcctgaatgaattgaatgcatgggggagcagcctctgggagtgacagtgc

SEQ ID NO: 857396 - DNA, 98 bp, Homo sapiens
aaaaagctatgctggtccaccacctaaggtgactacagcaaaaaagcgaacatatgctgtcaggaggataagagatgccttcagagaaaataaaaatg

SEQ ID NO: 857397 - DNA, 100 bp, Homo sapiens
cgagaggaccaggaagcacctgactcagatgccgaggtggatggtgtggatgaagaggaggaggacgaaggacccatgccccctttgtgatgaagccaag

SEQ ID NO: 857398 - DNA, 98 bp, Homo sapiens
actgcccgacagtcctagctaaacttcgccaactccgctgcctttgccgccaccatgcccaaaacgtgcgaagaaccctgaagagcggcctgacccca

SEQ ID NO: 857399 - DNA, 109 bp, Homo sapiens
gcccaccctacatttagcgcatcatgtgatccggggcaccatgccggtggaaaggatgcgcatgcgcccgtggctggaggagcagataaactccaacacgatcccgggg

SEQ ID NO: 857400 - DNA, 100 bp, Homo sapiens
aaaacagaagagaactatatccgggaccgccttgccctctctttaaaggctaaagaattacctccaaagccattgtcaagaccacagcagtcatctgcac

SEQ ID NO: 857401 - DNA, 100 bp, Homo sapiens
atggccacttacctgaatgaccacctagagccttggatccaggagaacggcggctggtttaaaaagcagaaactcctcctagaactggaccagtatgccc

SEQ ID NO: 857402 - DNA, 100 bp, Homo sapiens
ttcaggatgggaaaccacgcaggcaaacgagaattaaatgccgagaaggccagtacgagtccctgtgaagcaggaagagtgagggcaggttcactgcagc

SEQ ID NO: 857403 - DNA, 100 bp, Homo sapiens
tcgtgagcgaattgtggcagagtgtaatgctgtccgccaggccctgcaggacctgctttcggagtacatgggcaatatcgtaaagctgaaaattgaaatc

SEQ ID NO: 857404 - DNA, 99 bp, Homo sapiens
agtgagctcggccggcaaccgagggacccgcgtccagcctcgtcacgtgttcaatatgctaaagaagtatgtccgcgcagaacagaaggacagacagca

SEQ ID NO: 857405 - DNA, 100 bp, Homo sapiens
caggtccagaagttcgatgagaggctggtatacacctccttctcccaagtgtgccggtccaacaaaagcccttgggtctgtttgacttgttcaagtgtcc

SEQ ID NO: 857406 - DNA, 100 bp, Homo sapiens
ttagagatggagcaagagtacttatgaaacttatgccgccagcatccgcacttccactaatagccaagtagacaagctgaccctgtcagggagtgacagc

SEQ ID NO: 857407 - DNA, 98 bp, Homo sapiens
aacctggaatcatgggagaaaaccagacctccacttccaaggatatagagcagtggcagatgcctggagagccctcaagaatcccagcattggggaaa

SEQ ID NO: 857408 - DNA, 75 bp, Homo sapiens
ctgcaagccggtgcagcagccttcagcttttggcagcatgaaagttagcagccctgtctctgcccctggtggtca

SEQ ID NO: 857409 - DNA, 100 bp, Homo sapiens
ggtgataacacactcagcatcactaaagaataactgaagtgaagtgatggactccgatttggagagtagtaagacgtgaaaggaatacacttgtgtttaa

SEQ ID NO: 857410 - DNA, 99 bp, Homo sapiens
gaacctgtaacgtcccactggtttggacatattcctctcctgatctggcctcatctgttccagggaggtgggattgaaattttgaacagaaaatgctga

SEQ ID NO: 857411 - DNA, 100 bp, Homo sapiens
ggatgaccttttccgaaagaccaaggcagctccctgcatctattggctcccactgactgacagccagattctgaaaaagagttccacgtcctcccttatc

SEQ ID NO: 857412 - DNA, 100 bp, Homo sapiens
actgatgtaaccaggtgcatatgtggttttacacatgatgatggatacatgatctgttgtgacaaatgcaggcctatatgaacccaatagcaatggcgag

SEQ ID NO: 857413 - DNA, 100 bp, Homo sapiens
ggagttcctagtgcaaatgcaagggtggagtgtatcatgacccacactctgatgatggcacagcccccaaagaaaatagacacctatacaatgatcctgt

SEQ ID NO: 857414 - DNA, 98 bp, Homo sapiens
agtcagcggtatattagttcagttaccactaccagacatgcttacatagaatatatttacggggaagaaatgaagagcaaggcattcctcttgaatat

SEQ ID NO: 857415 - DNA, 98 bp, Homo sapiens
tttagagatcctgctgtttggccaccccctgttcctgcagaacacaggttcctgggtggagctacccatgaacagcagcaatggcaatgataatggca

SEQ ID NO: 857416 - DNA, 100 bp, Homo sapiens
accgggccaaagtggacaagagaaagcagcggtcagttttcagagatgtcctgagggcagtggaggttttactgcaatcacagcaaccaaccccatttgg

SEQ ID NO: 857417 - DNA, 98 bp, Homo sapiens
gcggcctttgcggttccaacatggcggagctgacggtggaggttcgcggctctaacggggctttctacaagcatgatgccttcttctgtagagtgggc

SEQ ID NO: 857418 - DNA, 98 bp, Homo sapiens
gagaatgactgaggagccattgatgtgtatcaaattttctccggtggctaaaaagttgtttgtggtaactgcagtgagtgctatatctgtaatttttc

SEQ ID NO: 857419 - DNA, 100 bp, Homo sapiens
gcaaatacattgtctgtagttcagcacttggtctctaccagtgggactttgccagttatgatattctcagaagtacagtccatccagcgtctcctcccct

SEQ ID NO: 857420 - DNA, 99 bp, Homo sapiens
ctcacggagctgggcgacgagctgaccctgggagacatcgacggccctcaagagtattgagtatctggaggaggatgcccagaagtccgcacaggaggg

SEQ ID NO: 857421 - DNA, 101 bp, Homo sapiens
aaaccgagctcccgtctgccttgcagcaatggaagagttaatagttgaacttcgtctctttcttgaactcctggaccatgaatatctaacctcaactgtca

SEQ ID NO: 857422 - DNA, 100 bp, Homo sapiens
ctcaaagtgtgccttctcggggaaattcgaaatgagtcccatgactatcctcatagagtggccaagtttccagaaaacagaaatcgaaacagatacagag

SEQ ID NO: 857423 - DNA, 100 bp, Homo sapiens
caagatatccatagtaacacatacaattacaaaagcactttttctgtggaaattgttccaatatgcaaggctaaagtaaataatgccagcctgattggac

SEQ ID NO: 857424 - DNA, 98 bp, Homo sapiens
acaacaagcatcttgatctagaaaatataacggttacacggtgtgggcacacaacctcattgccattgctcgtcttcggggctctgatctgaaagtgc

SEQ ID NO: 857425 - DNA, 100 bp, Homo sapiens
taaggaatgggctaaatcaactggatatgatccagttaaactttttaccaagatatgcaatatgatgaggatgatgatgaaatcaccccggatttgtggc

SEQ ID NO: 857426 - DNA, 143 bp, Homo sapiens
cgctgccaccatccgcgaggcaggagagaggaggaggagtgcggcgcggcggccccgggaccaaggagtggaagtatgcgagacttaagagctcaagtgactagtggtctcctgccatttccagaagtgactcttcaagccct

SEQ ID NO: 857427 - DNA, 99 bp, Homo sapiens
tcgcctggccccggctctctggaccttgtctcgctcgggagcggaaacagcggcagccagagaaatgggacgtcggtcatcagatactgaagaagaaag

SEQ ID NO: 857428 - DNA, 100 bp, Homo sapiens
gagattccgcgagccgacaccatgcgatccaaggcgagggcgaggaagctagccaaaaaatctatctaccgccggggagccagaagatggaggaagctgt

SEQ ID NO: 857429 - DNA, 100 bp, Homo sapiens
gctcagcgcggacctagacctggaatcgcccaagtccctctactcgcgagcctcgtcacgtgttcaatatgctaaagaagtatgtccgcgcagaacagaa

SEQ ID NO: 857430 - DNA, 100 bp, Homo sapiens
gagtctggctattacttggatatcagcctatacaaggaagtgactgactccaggacagcacagaaccttctaagtctcagacacgtaaacccaagtgtgg

SEQ ID NO: 857431 - DNA, 100 bp, Homo sapiens
ctacccactagccgtgaaactgggaaccatcactcctgacggggcaggttttactgcaatcacagcaaccaaccccatttggcttataaagactcggtta

SEQ ID NO: 857432 - DNA, 98 bp, Homo sapiens
ctctcgctgcggcagacgggctcccccgggatgatctacagatatgttgatgatgtgatcagccgcattgacaggatgtttcctgaaatgtccatcca

SEQ ID NO: 857433 - DNA, 99 bp, Homo sapiens
ggcagcgcagtgcagatccgcaggcgcaaggcttcaggcgacccgtactgggcctactctgagtatcacaaagattaatgttacttcaacaaatggaga

SEQ ID NO: 857434 - DNA, 100 bp, Homo sapiens
ccaggatcctgagatccggagcagccggggtcggagcggataagccaatggacacgtcagtgttatctgaagaaggaggagagccttttcagaagaaact

SEQ ID NO: 857435 - DNA, 98 bp, Homo sapiens
ctacataataaggatgatgaattgtactctacagctattactactgaactatttcacaaacccattttgaaagtcaaaaaccgagcactgagtctttc

SEQ ID NO: 857436 - DNA, 98 bp, Homo sapiens
tggaagaatttttagctaatattggaacaagcgttcagaagcatttcctaaagtctccaaattttgatggctggtttaagacccggaggaaggaaatg

SEQ ID NO: 857437 - DNA, 99 bp, Homo sapiens
ttccacaaatgcagaagtaagaggatttatagatcagaatctcagtccaacaaaagcggcaacctttggcactgcatccatgagcatgcccacaggatt

SEQ ID NO: 857438 - DNA, 98 bp, Homo sapiens
cggaagaaaatacaaatcacacgcataatggatgaaaggaaccgacaggagcatctttccttgaagaagtacattattgacattgtggttgaaagtac

SEQ ID NO: 857439 - DNA, 100 bp, Homo sapiens
ctacaaattggattttctcattccactgtcaaaggttttgggatttgagattgacgcggtgaactctgtccagttttcaaaccacacaggtaaggcgttg

SEQ ID NO: 857440 - DNA, 100 bp, Homo sapiens
cttgaatcatgaagctactaaccagagccggctctttctcggttctgtacagagtaatgagatgtgtgacggctgcaaaccaggtgtttttttctgaggc

SEQ ID NO: 857441 - DNA, 98 bp, Homo sapiens
taaagacccgaaaatgttgcggagccagtctcagctagacctgtgcaaagactctccctatgaattgaagaaagagatggggacttgcttggggtctt

SEQ ID NO: 857442 - DNA, 99 bp, Homo sapiens
gcattggaaagaagcgaccgcggcggctgccacataaagaagatccctaatagtcatttctcaacaattatatagtcaactgatgtaacaatggtacta

SEQ ID NO: 857443 - DNA, 129 bp, Homo sapiens
gtcgctagcaaacctcatcccgcccgtgaaggccacgccattaaagcgcttcagtcaaaccctgcaggaattctgatgtgaaactaacagtctgtgagccctggaacctccactcagagaagatgaagg

SEQ ID NO: 857444 - DNA, 100 bp, Homo sapiens
acctcctcgccagcagccgtccggagccagccaacgagcgacctggccataagggacacctttgtgaatgcctctcggaccctgtacagcagcagcccca

SEQ ID NO: 857445 - DNA, 100 bp, Homo sapiens
ataactatgggaactatggatatggacagggatatgcagactacagtggttaatgttgaagaaggaaaatgcggaagtcgtcatttgacaagttttataa

SEQ ID NO: 857446 - DNA, 50 bp, Homo sapiens
gggtgtgcaaacccgagagaactggaaaagcacttggttctgcttcgaga

SEQ ID NO: 857447 - DNA, 100 bp, Homo sapiens
attgtccagaagacttggctcagaccagtatgatgtctgtgccatttgcctggatgaatatgaggatggggacaagctgcgggtactcccctgtgctcat

SEQ ID NO: 857448 - DNA, 100 bp, Homo sapiens
gtgtggacatctgctgccggaaggggtcccgaagccccctgcaggaactctacaacccaatccagctgggagaaccaccacagacgacgagctagaagag

SEQ ID NO: 857449 - DNA, 100 bp, Homo sapiens
taatgaggatgaagattcaccaaataagctatatactttggttacctatgtacctgttaccactttcaaaagtggaagtttagctgatgctataagtgaa

SEQ ID NO: 857450 - DNA, 98 bp, Homo sapiens
ttgtgaaggcgctaaggcacatatactcaggggtcctcataaacagtattctaccttgtaaatactgttatttgtatatactgtaaatgatgacatcg

SEQ ID NO: 857451 - DNA, 100 bp, Homo sapiens
tggcccctaatgtgaacttcatgcacaacctgttgcctatgcaaaacttgcaaccaaccgggcaacttgagtacaaggatcaggagaaggtctggggaaa

SEQ ID NO: 857452 - DNA, 99 bp, Homo sapiens
atcaagaatatccatggcattagtgccctgaggagctgaaacccatgaaggatggctctggctgctacgaccactccaaaggcattgactgctctgatg

SEQ ID NO: 857453 - DNA, 98 bp, Homo sapiens
cgcctgaaggaacgcgacggcggcgcccgcagattgcaaaagttgagaagctcaaaccattagaggtagagctgcgacgcctagaagacctttcagaa

SEQ ID NO: 857454 - DNA, 136 bp, Homo sapiens
tttaatgtggatgcaccatgccagaccgtggaagatttaacgaatggggttgtgatggcccaggttcttcaaaagatgtcaatgagtggtcattgaagataagaaaggaaatgagagttgttgacaggcaaataag

SEQ ID NO: 857455 - DNA, 98 bp, Homo sapiens
cccacggcaaagaccaccccacggccgccaccaagatgagcagggcccttgcggagttccgcgtccgaggtgtgaagatccagagacaatggccccga

SEQ ID NO: 857456 - DNA, 99 bp, Homo sapiens
tgacttaccaggtgtgattaatgcctctgaagaacacctgaagcagcactacattgacctgaaagaccgaccattcttccctgggctggtgaagtacat

SEQ ID NO: 857457 - DNA, 100 bp, Homo sapiens
cctcgactggttgatcagcagattggaaagactggaagcttcttcaggtgccgggcagcctacaacattgtgacacggctttcaagcttccggatcactc

SEQ ID NO: 857458 - DNA, 100 bp, Homo sapiens
cagcccggttggagcctccggagcagaggaagaagtgtatccagggcagcagtatctgcaaggaggccagtatgcacccagcaccgcccagtttgcgccc

SEQ ID NO: 857459 - DNA, 100 bp, Homo sapiens
gaaataatctcatgggcgatgacatattctgttattatttcaaacttttccaggtcatggacagtgtaattgcggaagatgtgactgcaaagcaggctgg

SEQ ID NO: 857460 - DNA, 100 bp, Homo sapiens
gcccccgccccaagccggcctaccccagatcatccaaaaaggtttgtgaagaaaattcaacctcagcaacttcagaaactgcccctgatacgtgtgagag

SEQ ID NO: 857461 - DNA, 100 bp, Homo sapiens
gggatgtcaggtcgggaaccatccttggaaatcctgccgcggacttctctgcacagcatccctgtgacagttttcggctttgtgagaaaccttaccatca

SEQ ID NO: 857462 - DNA, 100 bp, Homo sapiens
tgttattggatttgttcccttagcagaaattatgtcttgccacttgcctagtgaggcttttccgaacctggaaggagacgtctagaaatcccaactttgc

SEQ ID NO: 857463 - DNA, 98 bp, Homo sapiens
ggagtcgtgcggttggtgggggagccctgccctcctggttcggcctccccgcgcactagaacggaatagccaggccagaagaaggaaggcctgtggtg

SEQ ID NO: 857464 - DNA, 100 bp, Homo sapiens
gtgctgacctatcatcccagtttacatgaattaaaactgctattttggttggtggaatgtccacgcagaaacagcagaggatgctgaaccgtcgtcctga

SEQ ID NO: 857465 - DNA, 98 bp, Homo sapiens
ttgcaaagaaacaaccaggtcagcttcggacaaggttagcagagttaacaagcacaagccctggctggagcccacctaccacggcatagtcacagaga

SEQ ID NO: 857466 - DNA, 100 bp, Homo sapiens
tttgtctgcaacatcggggaagatgcagagttgtttatggccctctacgacccagaccagtccacttttatcagcctcctgctcttcatggatgaagcag

SEQ ID NO: 857467 - DNA, 100 bp, Homo sapiens
agggactgggactgcctacattgaggtggaatgaatcttacttgttgaatatcttctggttactagttggattcatttgtgaaagaatcattttcccctg

SEQ ID NO: 857468 - DNA, 98 bp, Homo sapiens
tttaaccaagaaaaattaccgagccagccagcaggaaatacagcatcttagcctgcgacgcttatgattagagccaacaatttgaaatggcctgctca

SEQ ID NO: 857469 - DNA, 99 bp, Homo sapiens
ggaactctgaacctcaataacgaggtgaaattgatcttcaaattctctccaaagttcaggctcaatacccaggagtttgtatcaacaatgaagttgttg

SEQ ID NO: 857470 - DNA, 99 bp, Homo sapiens
gctgaaggccctacgggagaaaaccgggcgcaaggaaggatttgatgccctggatccctttattcccatcctggtttccaactataacccaaaggaatt

SEQ ID NO: 857471 - DNA, 98 bp, Homo sapiens
cgtccccagccatgtggaactgggcgcgatgtatggaacccagtcctgagaggcctgcatgcagtcagcaggagccgaccctgggaatggacgcgatg

SEQ ID NO: 857472 - DNA, 100 bp, Homo sapiens
gcggtggccgcactgggaccccggaatcccgcgcgctgcccacgattcgcttctgaggagcgatctctctttgagtcggcatggaagaaggagaaggaca

SEQ ID NO: 857473 - DNA, 98 bp, Homo sapiens
taaatttccgctgtaagccgtccttccgtgaatcaggctccaggaatgtccgcgaggtgctggacgtcattgctcctccttatacctctgacttcgtg

SEQ ID NO: 857474 - DNA, 98 bp, Homo sapiens
ctgtgcccttctttgagccagtgtttggagaaggaggaatatttggtccctggtcagtttctgctttggatctctctaggagctgacactcgaacctt

SEQ ID NO: 857475 - DNA, 98 bp, Homo sapiens
cgacatgaagaaagacgtgcggatcctgctggtgggagaactgatctctagtaactaccagacctgtctcggccttctgatgcattacccattcatcg

SEQ ID NO: 857476 - DNA, 100 bp, Homo sapiens
gaaaacatgtactacagccagtcttctatgtttccacatcggtcagaaaaagatctcatggggcattcagaatgggaccacaaacgagggccaagaggat

SEQ ID NO: 857477 - DNA, 100 bp, Homo sapiens
gatggtttccgtagatggtggctttctttggacccttgacatcaaccagttactatttggaatttttgagagatatcttcaatctcctgtttttgttgcc

SEQ ID NO: 857478 - DNA, 115 bp, Homo sapiens
gagctctgctagccacccgtccgacaacttccggactcccaggttcattgaagagaagtcttccttcgagtacgggcaggtgaaccacgccctggcggccgccatgcgcaccctg

SEQ ID NO: 857479 - DNA, 74 bp, Homo sapiens
gaagggacaatggacttctggctttggccactttacttcctgccaggtaattggggcccccatcttgttgttgt

SEQ ID NO: 857480 - DNA, 101 bp, Homo sapiens
gcgcggaaccatggccgatgggggcgagggcgaagacgagatccagttcctgcgaactgtgtaggagctgcacgatctgggaacctcacgtttatggtggg

SEQ ID NO: 857481 - DNA, 98 bp, Homo sapiens
gcacagctaagatgtcaggacatcctggaagctgggaaaggtgttaaccttgatgcctgaaagaactggaaattatgaagatagattcagaagtcaaa

SEQ ID NO: 857482 - DNA, 100 bp, Homo sapiens
cgaagacgtcatgatgataaagagatctgtctcgtaactgtgtaatcaaggaactagcaccacaacaggaaggtaacccaggagaagtattccacacagt

SEQ ID NO: 857483 - DNA, 98 bp, Homo sapiens
aagcatgactttaaggatggtatatgtaccctgcttataacagagagaatggatcttggagaatgtctgaaagtccatgacctggctttaagagcgga

SEQ ID NO: 857484 - DNA, 100 bp, Homo sapiens
ccgacagactgaaggacagcggcaccgccagacggccagaaagttccgccatgagctggggcacggagctgtgggtttcccaggcagctgcagacttgaa

SEQ ID NO: 857485 - DNA, 98 bp, Homo sapiens
ttcaacagactggacttctcaactgccattctggattccagaagatttaactacgtggtccggggtcctgtattaataggaagttcacatggtggtgt

SEQ ID NO: 857486 - DNA, 100 bp, Homo sapiens
cttattgctgaggcagttggaagttatgacaccatggatctcttcaggcacactacagaactaaatatgcatggaaacactactatgaagtatcctgtca

SEQ ID NO: 857487 - DNA, 99 bp, Homo sapiens
gacaaagtacttgaatgcggaatccatagatgttcacagcgttgtcaccgaggtccctgtgaaacatgtagacaaatgtagccatagctgtaacgtata

SEQ ID NO: 857488 - DNA, 98 bp, Homo sapiens
atttagagggaatgatcatggttataatcaaaagtggtcttcagaatcttctttggtttcagattatcttgaagtaatcaaggaaccaatggacttat

SEQ ID NO: 857489 - DNA, 98 bp, Homo sapiens
ggagaccaaaagtatgttgtaccttgtgacagaatatgccaaaaatggagaaatttttggtaattgtcatgagaaaaccctggacaacagccatgaca

SEQ ID NO: 857490 - DNA, 100 bp, Homo sapiens
gctcgggcgccggcgagatgcctttgttcaccgccaaccccttcgagcaagacgtgggatgttatggaacactggggatggagtctggtgtgatcgcgga

SEQ ID NO: 857491 - DNA, 98 bp, Homo sapiens
taccgcctccgtagttacaaggattgtggagaatattgaagtggagccgccaccaaaatgcagattttcgtgaaaacccttacggggaagaccatcac

SEQ ID NO: 857492 - DNA, 98 bp, Homo sapiens
gagccccagaccagctctcaggatgactttccttgatacatcatcaaaggcatagcctttccaagatggtttatcagacatcactttgttcttgttct

SEQ ID NO: 857493 - DNA, 100 bp, Homo sapiens
ttatacctatagatattttatccacaactggccacagctgtgcttcttgtcaagtaagggagaattgactacgcttatacatcagcttcaagaaaaggac

SEQ ID NO: 857494 - DNA, 98 bp, Homo sapiens
ctgcaggaccaacctctcctctggatgctctagggaactctaatgatccaggacaaagaagttaccctggagtatgtatcaagcctggatttttggta

SEQ ID NO: 857495 - DNA, 100 bp, Homo sapiens
aggcagaaaaccaagcaaaggatgtgcagaaagagaggacctaccgagccatgtacgattacagtgcccaggatgaagacgaggtctcctttagagacgg

SEQ ID NO: 857496 - DNA, 99 bp, Homo sapiens
aagattgttaccgactctatcagggtataaatcaactacctaatgttatacaggctctggaaaaacatgaagtccctacagatgaagaagatgaaatgg

SEQ ID NO: 857497 - DNA, 99 bp, Homo sapiens
gaataatgcccagcggcccgccaggtcccgaggatgtactgagtaaagatgctggggaatgtgcaatatgccttgaagaattgcagcagggagatacta

SEQ ID NO: 857498 - DNA, 100 bp, Homo sapiens
gttggaagtcagagctgcacaaagggaaagggctgagtcatcactagagagtgggaagggcagcagcagcagagaatccaaaccctaaagctgatatcac

SEQ ID NO: 857499 - DNA, 98 bp, Homo sapiens
cctctgattggcaacatgttagctttgaagtggatcctaccagctattgacctgaaaagtggttctggaaaagtgtaccaaggccctgcaaaaggtgc

SEQ ID NO: 857500 - DNA, 100 bp, Homo sapiens
caccagcatgaaggacatgcgcaaagttctgagaacattacagcagatcaagaaatccagctcaactgcgcagttggacagcattggcttcagcataatc

SEQ ID NO: 857501 - DNA, 100 bp, Homo sapiens
agcaaatgccatctactgcccccctaaattgcaggccaccttggacatgcagtcgggtactctgtggatatccccttggacaaaactgtcgtcaataagg

SEQ ID NO: 857502 - DNA, 100 bp, Homo sapiens
gtatgatgaaaccacagtagaccctaatgatgaagaggaagagcagtaaacctcacgaagacatcattggtatcaggtctcaaaaccaaggttctttggc

SEQ ID NO: 857503 - DNA, 100 bp, Homo sapiens
ggaggaggaggaggattcagggaataggagctggggagcccttctgcgccacaggtgttatttggaagatggagcttcaaagggtgcctggctgaaccgg

SEQ ID NO: 857504 - DNA, 100 bp, Homo sapiens
agggggccagttcctgccgtctgctcttctgcctcttgatctccgccaccgtcttcaggccagccgtgctatcaagactaatcaggaccttctcccagaa

SEQ ID NO: 857505 - DNA, 99 bp, Homo sapiens
acgtggtagcggcggcgggggcacagccaggactacacttgctgctttgaaggatgaagttgtatctgttgaaaatgaactctcagaattgcaagaagt

SEQ ID NO: 857506 - DNA, 98 bp, Homo sapiens
ttagtcgtcaagaagctgttagcatgatcccaccactgctcctcaacgtgcggcctcatcataaggtggagccgccaccaaaatgcagattttcgtga

SEQ ID NO: 857507 - DNA, 98 bp, Homo sapiens
tgaacttggcattttagatctaattcaaggctggactccttgccaccaaaccaggaggccatgttgtctattctacctgctcactctcacacttacag

SEQ ID NO: 857508 - DNA, 122 bp, Homo sapiens
ggaactcggcggccgccatggcgtccaacatggaccgggagatgatcctggcggattttcaggctggaaagaaaccttcaaatccagccttctggtggatcaacagaaatggagaagagatg

SEQ ID NO: 857509 - DNA, 100 bp, Homo sapiens
acccagtgcgcccgcatcgtcgagatcccatgcgaggcccaagaaaactagaagtagtggaggtcaaatctcggcaaatcactatccgctgggagccatt

SEQ ID NO: 857510 - DNA, 98 bp, Homo sapiens
aagtcatggggctctgtcgggaagcaaatgaagctcgtgaccgagaacctgaaggaggaaccaatggaaagcgggaaggagaaggcaacctgagtgcc

SEQ ID NO: 857511 - DNA, 100 bp, Homo sapiens
aaaattgccaaggaactgggatttcaacctgaaagtggaggctgcgaaaatagcttttctgggagaagaggctacaaggacttagtgcatcagatgtaac

SEQ ID NO: 857512 - DNA, 100 bp, Homo sapiens
tgtcttcactgccctaagatggcctttaaggacaaatccttcagaaagatcaggaaatcaaggacctaaaacagaagatagccgaagtcatggccgtcat

SEQ ID NO: 857513 - DNA, 100 bp, Homo sapiens
tcttggatcagatgggaagagctatccttatcttttcaaagtcactgttggaggcccatgatattgtggcatcaaagtgttatgattcacctccatcaag

SEQ ID NO: 857514 - DNA, 98 bp, Homo sapiens
ataaatctcgcccaaacaggaaagacttggccttgaaagagctgatacagctgaaaaagccctcaatgtcattgttgacttactagaaaaatatggcc

SEQ ID NO: 857515 - DNA, 100 bp, Homo sapiens
atatctttaagagagatggctctgatgtcatttatcctgccaggatcagcctccgggagagctggaagtcgagtgtgctactcaactcaggagatttgga

SEQ ID NO: 857516 - DNA, 100 bp, Homo sapiens
agtcaagacgttattattaaagatgaagagagttcttcaagagccactcgatgtcttttgattggagagtttaatcaaacagaaggagtcttccattgtg

SEQ ID NO: 857517 - DNA, 99 bp, Homo sapiens
cgacatcatcctggacatggccaccctgaccggggctcagaatgaagaacaagctatggtacttcgaatttgccacatctgaatccatcttctcaacat

SEQ ID NO: 857518 - DNA, 98 bp, Homo sapiens
tcaattctcgagagaccagcaaggaatccaaatgcatcattcagatgcaaggcaactcgaccagtatctctcctctttgtcacaacctctttgccctg

SEQ ID NO: 857519 - DNA, 98 bp, Homo sapiens
tgattgactgtaatccatgtactttgtccaatgctgaaagatttaagtcgtggaactgaacatttatttggctgatcctcatcatgaaccgtgctttt

SEQ ID NO: 857520 - DNA, 100 bp, Homo sapiens
aggggagccggaggaggatgctcctgcctcccagagaggggagccggcgaggatcaaaatcttcgaaggaggctgcatggctacttggagaatgagccgc

SEQ ID NO: 857521 - DNA, 100 bp, Homo sapiens
tgatgttagagaattatgggaacgtggtctcactgggtgaagagcgattatatgttagagatagctgatcaagtggaccaggaaattgctttgaagttgg

SEQ ID NO: 857522 - DNA, 98 bp, Homo sapiens
ttgactcactagagtcagggaaacaggatccacctctgatgttcagtgaagactaccagaaaagtctgctagagcagtaccatctgggtctggatcaa

SEQ ID NO: 857523 - DNA, 100 bp, Homo sapiens
tcgctaacaactgcccagctttgagaataactgaagtgaagtgatggactccgatttggagagtagtaagacgtgaaaggaatacacttgtgtttaagca

SEQ ID NO: 857524 - DNA, 98 bp, Homo sapiens
tgcagaaaataaaatcacaattaaaagaacaagatcagaaatggcaggatcggggatctgatgagcttctttcttctggcatcattaacggacctttt

SEQ ID NO: 857525 - DNA, 99 bp, Homo sapiens
ttcacccagagcaaattgagacgtcccgggcaattgaaggaacagactaaaaatcgtgtcctggaaggaaactacaggtactaccagggattttcagtc

SEQ ID NO: 857526 - DNA, 100 bp, Homo sapiens
ggagggaaagagacagcttgagaaaagggactttggaaaaaggctgtctctagacagcagtcttgtggcaagtatatcgcgtcaacacagcgacctgacg

SEQ ID NO: 857527 - DNA, 100 bp, Homo sapiens
gcagcggggaaccttggggagaacacgggacaccgcggaagccgggaaatgtgtgtcccggcatggatatccggaacaacctcactaggttgcatgagct

SEQ ID NO: 857528 - DNA, 100 bp, Homo sapiens
gctacgctatgtggcgaatatcttcccttacaagggttatatatggaattatggtaccctccctcaggcaattaagttggaatatgcaaggttggttaag

SEQ ID NO: 857529 - DNA, 100 bp, Homo sapiens
cagctctctgttttggaaaatggacctccagggtcgtatagacctccccctcctatgggcaaaccaccaggttcaattgtaagaccctctgctccaccag

SEQ ID NO: 857530 - DNA, 99 bp, Homo sapiens
aaccactttaaccccaaaattgagtcctacgctgctgtgaatcacatatcccaactgtcagaggagcaggtggaagatgcaatgctgatgtttgataaa

SEQ ID NO: 857531 - DNA, 100 bp, Homo sapiens
tccctatcagatgccctgaagggcgttactgacaacgtggtggacacagtggtgcattacgtgccgggtgtcaaattgagaaccaggtagatccccacca

SEQ ID NO: 857532 - DNA, 99 bp, Homo sapiens
ccagaatcttccatgctccgtcacactgcagccaggcccagaggatacaggaaagtactacgacatttctgccaaaagtaactacaactttgaaaagcc

SEQ ID NO: 857533 - DNA, 99 bp, Homo sapiens
tgaagctctatttgaaatctctcttcaaattgggaggaaataatgctggccatacagttgttgtggattctgtggaatatgattttcatctcttaccca

SEQ ID NO: 857534 - DNA, 98 bp, Homo sapiens
taatcaaaaatcttgtacctgatgccgatattcaacgctttcgatgtgtgacagtgcggaagagggggtggacggagacactgtgaacatgtttgtgg

SEQ ID NO: 857535 - DNA, 98 bp, Homo sapiens
tcgcattgtctctttttcttggatggttgggagcagatcgattttaccttggataccctgctttggatgacattcctgaaagctcactcttctcacca

SEQ ID NO: 857536 - DNA, 100 bp, Homo sapiens
agaactgtcagtgtcccttccgagggtcagtttcccgagtacccaccagagggcgccactaaactgggatccacacacatcctcaccccacagaaactgc

SEQ ID NO: 857537 - DNA, 98 bp, Homo sapiens
tttgatcatgcggcacatcttgggggagctctttttggaatggcaactgtactcctgatgatattggtctgtgaaaccccgtatggctgctatgttct

SEQ ID NO: 857538 - DNA, 98 bp, Homo sapiens
gggacccggagaagatgtcttcgcggacggtgctggccccgggcaacgatcggaactcggacacgggtttactgcgaggaaatgcgtgaagagcggca

SEQ ID NO: 857539 - DNA, 98 bp, Homo sapiens
tcgcatcctccttcaggcccgcggcatctcccctggctccaccatccccaggtgtctcaggtgtgacgtttctccagatacttcatgctgttcacctg

SEQ ID NO: 857540 - DNA, 100 bp, Homo sapiens
caaagaggtccttatacgtacaggttgaatcatgtagctgctggtctcgtttcaccaagtctgaaatcggatacctctagtaaagaaatagaggaagcta

SEQ ID NO: 857541 - DNA, 98 bp, Homo sapiens
acctctgacaaaattctggggacgctgggaacactgaatcaacatgggcaatgagaacagcacctcggacaaccagggtcagccaggaggaaagggaa

SEQ ID NO: 857542 - DNA, 100 bp, Homo sapiens
cttcaaagctactgcagacgacgagctgagcttcaaaaggggggacatcctcaagcatggccgaaacagaagccctgtcgaagcttcgggaagacttcag

SEQ ID NO: 857543 - DNA, 99 bp, Homo sapiens
ggactctccattccagaaccatggcccaatttgtccgtaaccttgtggagaagaccccggcgctggtgaacggtggtgcggttgtgtcagaacccaaag

SEQ ID NO: 857544 - DNA, 100 bp, Homo sapiens
cagagactgtgccctcaccagatgctgaacctgctgagcaccctgatcttccacttcaccttcatcagaactacttacagattccagtctgctgttagat

SEQ ID NO: 857545 - DNA, 99 bp, Homo sapiens
gaagatcatgatcccaccattgcaggggaaatgctgtctgtagctgagcacttcctggagcagcagatgcacccaacagtggtgatcagtgcttaccgc

SEQ ID NO: 857546 - DNA, 99 bp, Homo sapiens
attggctgttacattacagataaaggccatgcaaaagatgcctgtgttattagtggaggcaaatacatgcaggcggtgattcagtatgggaagatagtg

SEQ ID NO: 857547 - DNA, 98 bp, Homo sapiens
agattactgttttctaatgatgtatgctcaagaaaagggcatatattacattcaggtgaagcaactcgtgcccatccgcgatcaatccctgcaggagg

SEQ ID NO: 857548 - DNA, 98 bp, Homo sapiens
ctgagtccatctttcttgatgaccttggaacaaatctaaaagaagctgccagacttggtattcacaccattaaggttgttaaaggccttacttatttg

SEQ ID NO: 857549 - DNA, 98 bp, Homo sapiens
gcagaacttgtatacatgctagaaagcaaacatctctctgtagtcctacaaggtggtaataagctgcagtcaacaggaaataaagcagaagacataaa

SEQ ID NO: 857550 - DNA, 157 bp, Homo sapiens
gaaccatggacggcagggctccctctggatgtggaattctccgtccctttccagggagggaacaaagcccacagcaccgtactatactggcaattgctggagaagattttgcaattgttgcttctgatactcgattgagtgaagggttttcaattca

SEQ ID NO: 857551 - DNA, 100 bp, Homo sapiens
aaaatacgaaggtttctggctggggacaccacatcatttgaagcattctttcaatccaaggcatcgaattcttggacaggaaaggtagagtggtcgacta

SEQ ID NO: 857552 - DNA, 99 bp, Homo sapiens
atccctttcgccttcttcctgcccgagctgctgtgattgggttattatacccctgcattgacagacatctaggagaaccacataaatttaaaagagagt

SEQ ID NO: 857553 - DNA, 100 bp, Homo sapiens
cctaaatgtggcgacttgtgcacacatgtagagacctttgtatgtagtgggcagcagtcagtgacaggtgtaacctctgtggatgacagcaacagttact

SEQ ID NO: 857554 - DNA, 100 bp, Homo sapiens
aggccagggaggacatctttatggagaccctgaaagacatcgtggagtattacaacgacagtaacggaagagagaagggcacagttacctaagtatcaac

SEQ ID NO: 857555 - DNA, 125 bp, Homo sapiens
aaaaggcaatcactagggaagcacagatgtggaaagtgaatgtgcggaaaatgccttcaaatcaggttatcaatactctggctgaccatcatcatcgtgggactgactttggtggaagtccttgg

SEQ ID NO: 857556 - DNA, 100 bp, Homo sapiens
ggccagatcttctgctgttagatgggcccgggcatcctcctctctgaagacgactccctgtatgagggcaccttcaccagggacctgaccctcatgggga

SEQ ID NO: 857557 - DNA, 131 bp, Homo sapiens
gttgcggagaccttctgaccaggaagttagtgaatctatggattttagatatctgccagatgaaaaagtggatccggattggtgccaatgtctccaacttcacttttgctcctagcacgattatatttcac

SEQ ID NO: 857558 - DNA, 100 bp, Homo sapiens
agacaggtggcgacggcagaggacgcatcagagcagagtgacgatgatcctgtttgtcctggagctggagtgggtgctgagcacaggacaggacaagcaa

SEQ ID NO: 857559 - DNA, 100 bp, Homo sapiens
cctgcggactagcgaacccggagagactaaagaagcgggcactgataatcgaaatatagttgatgatgggaaatctcagaaacttactcaagatgacata

SEQ ID NO: 857560 - DNA, 100 bp, Homo sapiens
gataattccaaatactgggtcctatggaaggacatacagcatgtgctcccaaatgtgtcagaagaaacagtgtctcccaccagagcacggaacatgaagg

SEQ ID NO: 857561 - DNA, 98 bp, Homo sapiens
tggccacgatcgcagactccaaccagaacatgcagtccctgcttcctgccgtcgttcatgcccaacttggtgcctcccaagatccccgatggagagag

SEQ ID NO: 857562 - DNA, 98 bp, Homo sapiens
ggcctcgccatgtcctgctgcccgaggaccattcttagtggcactggggaaatcttggcacccagaagaattcaactgcgctcactgcaaaaatacaa

SEQ ID NO: 857563 - DNA, 100 bp, Homo sapiens
gctccatctgtctccttgagcaaaaaagaaaagttgtttcctccaacattgatgttcctccagcaaggttttgattcccaccatggccatcacccagttt

SEQ ID NO: 857564 - DNA, 98 bp, Homo sapiens
cgggacgctgcccacggcgtccccggtcgcgggaatggatttgtaaactcaagagcttctccaaatttgattggagctactggtgcaaatagcttagg

SEQ ID NO: 857565 - DNA, 100 bp, Homo sapiens
aaaggcgcagaagagaaaaaaacagtgagaaatacggagatggatacagatacttggcatatcgaaattttatgattgacacgtatcgtctaaaccccca

SEQ ID NO: 857566 - DNA, 100 bp, Homo sapiens
aatgtgaagatacataagatcgtagccagacccccaggaaaagaatacttgagatccatttgtaaggaaagaaaaggaagcaacaacataatgcccagag

SEQ ID NO: 857567 - DNA, 98 bp, Homo sapiens
catatgtagcctacaaagttacaacacagaatctaggtcaacctattaagatacgtttccaggaatctgaagaacgaccaaaattatttgaagaacta

SEQ ID NO: 857568 - DNA, 98 bp, Homo sapiens
gccccggcctcggccccggacccgttgatgcggatgaaattaaaaggctaggaaagagatttaagaagcttgatttggacaattctggttctttgagt

SEQ ID NO: 857569 - DNA, 98 bp, Homo sapiens
aaagaccaattaaacattacattatccaaatgtggtcttgtaatgttaaacaatttagtcaagaataactgaagtgaagtgatggactccgatttgga

SEQ ID NO: 857570 - DNA, 99 bp, Homo sapiens
tcaggctcccttcacctacattttctgtgatggatgtggaacgttatgtagacctcgggactcaacaataaaccagaccagtatggctctatcttcatg

SEQ ID NO: 857571 - DNA, 100 bp, Homo sapiens
atctgactatggcaaggatctctgtcactgagcattttgaaagcgaagcagaagccgtagaatcagcggcgagcctgttgaaagaacccacaggtgcatt

SEQ ID NO: 857572 - DNA, 98 bp, Homo sapiens
gttttgaggatgaccccttcttctcgtgagttacgggagccaggagtccggggtcgcgcgggaattaaggttaattggaaggcctgccgatggtcttc

SEQ ID NO: 857573 - DNA, 100 bp, Homo sapiens
atgaacccaaccctttcagtaaatacttggaagataacagcgacctcttttctgaacagggccaggtctggattaatggctttaaccttggccgctattg

SEQ ID NO: 857574 - DNA, 98 bp, Homo sapiens
aatgtctttcctaccatctaaaatacgaaggtttctggctggaactggcaagggaactgaatttttcagtggatgaaatcaatcaaatacgtgtggaa

SEQ ID NO: 857575 - DNA, 100 bp, Homo sapiens
tcctgctctgtttactgtggattggatattctcaaggaaccacacatgtattaagatttggattaaagcaaggagagccaatcatgactggcaaaacaca

SEQ ID NO: 857576 - DNA, 100 bp, Homo sapiens
gggcggccaagcgctgttgaagggcgaacctttcctacacacccatacttctctgcccagcttggagcaggacagctatcgctttacaacattttgaagg

SEQ ID NO: 857577 - DNA, 98 bp, Homo sapiens
cctgcagcgggagctggacggcgagcgcgagcggcgcgagaaaattactgatctctcattacccaactatctgatggcatcttcggttggactgcttc

SEQ ID NO: 857578 - DNA, 119 bp, Homo sapiens
gctgaaagagctggggctccgcgaggaaaacgagggcgtgtataatggaagctggggaggccggggagaggagccagcaccgctctttgaccttgccatgcttgccttagatagtccag

SEQ ID NO: 857579 - DNA, 100 bp, Homo sapiens
gctggagtcatcgcgggcatcttgctgttcgtgattatatttcttggagttgtgttggtaatgaagaaaagggcaccgaggaagagaaccaatggcagag

SEQ ID NO: 857580 - DNA, 100 bp, Homo sapiens
gtgccatatgatttgcctccagaactgtatggaagtaaaggtacctactgtcaacaacgggaagtggaggccattactgaaggtgtagaggaagatgaag

SEQ ID NO: 857581 - DNA, 98 bp, Homo sapiens
tcagagggagaaatccaacgacctttctatccaggcaaaaatagacatcttattagttggagatgtcactgtgggctacctggctgatactgtacaga

SEQ ID NO: 857582 - DNA, 98 bp, Homo sapiens
ccgggaagccacatgcagccactgcaagagtcaggttccgatgatcgcgctgcagatactgtggcctcatgaataggaatgtctgcccatatgtcagg

SEQ ID NO: 857583 - DNA, 100 bp, Homo sapiens
atgcctagaccctgcccaacagaatttatatagagatgtgatgttggagaactacagaaacctcgtctccctggagacaatatggtttagataattctgg

SEQ ID NO: 857584 - DNA, 101 bp, Homo sapiens
aacattaaatgacagttcacataagaagttcttcgatgtatctaaacttggcaccaagtatggcaaatgtttgcagactacggctgaccgtacctcctgag

SEQ ID NO: 857585 - DNA, 100 bp, Homo sapiens
ccggcttgcgacgggcttctcccaccccctcacgcagagtgcagtcatgggccaccgcagtcctcctccgcctcctcctctctgcatgcgcgtcagagcc

SEQ ID NO: 857586 - DNA, 99 bp, Homo sapiens
ccgggccgccgcggctggtgggcgctgctggcgctgcagctgcacttgctccgggcgctggcgcaagctcatttagaggcgagttttgaggaggtagag

SEQ ID NO: 857587 - DNA, 100 bp, Homo sapiens
cgccaccatctttcgggctgccgagggtgttcttgacgattaatcaacagatgtccagaaggcttcttgggggaatattgtcaacatcgagacccctgtg

SEQ ID NO: 857588 - DNA, 100 bp, Homo sapiens
tgagctgagaaacaaagccacccagccaatgaagtttttgaatcagagccgacaggcacttgaattgaaaatggaaaaccctactgctggtggtgctgcg

SEQ ID NO: 857589 - DNA, 100 bp, Homo sapiens
aagtacaatggtgggcttaattttaggaatcccagtcagaagttccagcctgccactgttctctgatgccatgccagcaccaactcaactgttttttcct

SEQ ID NO: 857590 - DNA, 74 bp, Homo sapiens
gacaagtccgggagctgggcggccatttaccaggttccatgcctctgcagcggtgcctcatgtttgctgtgtag

SEQ ID NO: 857591 - DNA, 100 bp, Homo sapiens
tgggagccgttattggctgccgttaaggaccgttacgtttcccggggactttgaacatgtcggggatcgccctcagcagactcgcccaggagaggaaagc

SEQ ID NO: 857592 - DNA, 100 bp, Homo sapiens
atcaagtaaaggaacccaacagagatctcttctgttctccactgctaggttcttcacacacccccattcggcgtagtacccagagagctcaagatgtgtg

SEQ ID NO: 857593 - DNA, 98 bp, Homo sapiens
tgttgctgaacagttggagaagatctatgggtcagacagaattgaccccaggagcaagcacaagttcaaaatccacacttacggaagccccaccttct

SEQ ID NO: 857594 - DNA, 98 bp, Homo sapiens
gcggagaaatgtggggtcgtccaggagggtcgacaaggcaaagaacctgaagacgacccaaaagggtacctagtgtttgaaagatgtatggtgatctt

SEQ ID NO: 857595 - DNA, 98 bp, Homo sapiens
aagagaagccaggagcactgtggcacatatatgctgcaaaggacacggagaagataagggaatttcttaaaaagaacctgtctgagaaactctctgaa

SEQ ID NO: 857596 - DNA, 98 bp, Homo sapiens
ccacctaacttcatggtgatgcagcagcaaccaccaaaccaggggccacagagtttacatccaggcctaggagtggttctatagatggtaataaccaa

SEQ ID NO: 857597 - DNA, 100 bp, Homo sapiens
ccagtgccccctgcttctgccccagaaccggtcgaaaaccgtgtatgagggattcatctcggctcagattgttaggaaaaaagcattgcctgacagcggt

SEQ ID NO: 857598 - DNA, 99 bp, Homo sapiens
tccggggatgcgaaaacacccggccttactgaggaacaaagggactgagcagggggaggaacatttaagctgatggaagtggaagtggaagttgctgta

SEQ ID NO: 857599 - DNA, 98 bp, Homo sapiens
gattgacaatcaatgggccatcttggacggttcatggtgaagctggctgaagagacagatgggataattgtctccaatgaccagttccgggacctggc

SEQ ID NO: 857600 - DNA, 98 bp, Homo sapiens
ggcgagacgcgcgtgtgtgagcgcgccggaccaagcgggcccagaagcggtcaccttcaggccattcagaggaggaaagagaggggaatatgaagtca

SEQ ID NO: 857601 - DNA, 98 bp, Homo sapiens
tgcgggttttgactggacatgtttgtcagggagatgcctgtatattttgtgcattgaaggggaactgtgtcaatctgacagaagcactgtcgctctat

SEQ ID NO: 857602 - DNA, 100 bp, Homo sapiens
gccgctctccaccatccgcgaggtggcggtgctgaggcacctggagaccttcgagcaccccaacgtggtcaggtgccaatgggtcatgtttggttagaag

SEQ ID NO: 857603 - DNA, 100 bp, Homo sapiens
caggcaccttcgggccctcctgccttctgcacagccagaggacaacacatcacacacaagaaacagttgtgctcatgtgatgggggcctcagcactagga

SEQ ID NO: 857604 - DNA, 100 bp, Homo sapiens
atccctgtgaatgtgtttgctctcatgaacatgcaatgagaagactgatcaatctgaaacagcacttcttctcagtctcagacaagtactgcctccagaa

SEQ ID NO: 857605 - DNA, 100 bp, Homo sapiens
tgctgctgtccaggctggtgtgctctctggtgatcaagatacagtttgttcatatcaacaacttaaaactcatctgcagagcacatcaactagtgcacga

SEQ ID NO: 857606 - DNA, 100 bp, Homo sapiens
agagcaagtgtataatgactgtgcaaagaagattgttaaagtttgggaatacctgctactgcaattcagttcttcaagcactttatttttgtcgtccatt

SEQ ID NO: 857607 - DNA, 98 bp, Homo sapiens
caaggcctcccagtacgttgtgtgaagagtatcattcgacaggcatttattaatacagcaaaagaaatttatgaaaaaattcaagaaggagtctttga

SEQ ID NO: 857608 - DNA, 98 bp, Homo sapiens
ttaatgaccctaaaaatggcgattctgcaaccaagcacctgaaacagcagattgagaggatccagaatccagatctctggaatagctaccaggcaaag

SEQ ID NO: 857609 - DNA, 100 bp, Homo sapiens
acctcctttgcggagagctgcaagccggtgcagcagccttcagcttttggcagcatgaaagttagcaagggtgatgaagaagatgaagctaataaaattg

SEQ ID NO: 857610 - DNA, 100 bp, Homo sapiens
cctggcccggatgatgaggccagtgagtgatcaagtgatagcagaccccacgttagctgaaatgggaaaaaacttgaaggaggcagtgaagatgctggag

SEQ ID NO: 857611 - DNA, 99 bp, Homo sapiens
cttcattcagctcagcaccaccttgggttttccacaataaaagccagtttgttccaccattcaaaggtaactcagtcatccatgaaactgaatacaaaa

SEQ ID NO: 857612 - DNA, 138 bp, Homo sapiens
gaaattttctacacattttggaattcagttactcaggcactttcttctcaatttcatatggcaacaaactacgttccatcctcagagcagcctgaactgttcctaaagaaacttcagcagtgctgtgtcatttttgac

SEQ ID NO: 857613 - DNA, 98 bp, Homo sapiens
gccagacctgctgctgcttcaatgtccgcatcgcaaccaccgccctggccatctaccatgtggtctggccgtgggcctgggcttcggggcactggcag

SEQ ID NO: 857614 - DNA, 100 bp, Homo sapiens
agcaagcggcgtggacgaccgttgctgagctggtgtggaacgtctgtgatcagttgacatcacttgttagaagagcaactctgaaagaaaacgagcaaat

SEQ ID NO: 857615 - DNA, 100 bp, Homo sapiens
tcgtggcaatgttttgaaactggcaaaatcagcattcttgttatttaacacgggaaggaggtgacttcgcctgtgatggacttccagtgtgagcactggc

SEQ ID NO: 857616 - DNA, 99 bp, Homo sapiens
tcagccgcaagtacccgtccatcatagtcaactgcgtggaagagaagaaggtagaagatagcaccatgccgattcgtcgaactgtgaattctacccggg

SEQ ID NO: 857617 - DNA, 100 bp, Homo sapiens
tttcccgctggcgcgcagcctcagctagctcaccagcgactggaaccagcaactctgtcagggattgtaggatttatccttagtcttttatgtggagctc

SEQ ID NO: 857618 - DNA, 100 bp, Homo sapiens
caggagctgtatgaccttaacgtggagctctccaaggggatcccaacaagccctcaggattcagaagtgttaaagctcctgtcactaaagtggctgcgtc

SEQ ID NO: 857619 - DNA, 100 bp, Homo sapiens
gcagatgctccagttccctcacatcagccagtgcgaagagctgcggctcagcctcgagctgaagatccctgaaaacgccaacgtcttctatgccatgaac

SEQ ID NO: 857620 - DNA, 100 bp, Homo sapiens
gcccagagcctggcaggagtccagaaagccagatggctgaacatcaggttgttcctcaaagtcattcaagctgtactcgccgaaggagcccccgaacggc

SEQ ID NO: 857621 - DNA, 99 bp, Homo sapiens
ctgaagccggcggacggttttcgtacgggcggccgtgcgcgaggcgagggggctgaggccatggttctggagagcgttatgtttgccattctcgcagag

SEQ ID NO: 857622 - DNA, 100 bp, Homo sapiens
tgcctcgagcgctcaggatggaggaagactcgatccgcctgcctgcgcacctgcgtgtgatcccctgggcccgtttgttgtcgggggagaagacttagac

SEQ ID NO: 857623 - DNA, 117 bp, Homo sapiens
ataacaccggtcacaacgtcatctgctcgaggaacccagtcagtgattgattataccggaacagagccttccagtccctgtaataaatgtttatctccggatgtgacaccttgcttt

SEQ ID NO: 857624 - DNA, 99 bp, Homo sapiens
taagatcgacgtgtaccactacgaggtggacatcaagccggataagtgtccccgtagagtcaaccgcaatacgagaattggagacccaaccagccagac

SEQ ID NO: 857625 - DNA, 100 bp, Homo sapiens
ggtgggcttcgcagcgagcccctgtgcagataaactcaagccatggagggattactgcattacatcaaccctgcacacgccatttctctcctaagtgccc

SEQ ID NO: 857626 - DNA, 99 bp, Homo sapiens
tcattgtacagtcaaggcggcaggtgtgagttcttgatacgaatgaaaggccaagagtttgttgatgagattcaaggtagatatcctcatcttcttgaa

SEQ ID NO: 857627 - DNA, 100 bp, Homo sapiens
ctcgcctgcgcagcatgcaagagctcagcacgatccacatccagggcagtgagcagccctccctcacaaccaggcttgagaaagagatccaagatcttga

SEQ ID NO: 857628 - DNA, 100 bp, Homo sapiens
aagaagcaaatctatagaagaaagagaagaagagtaccagagagccagagaccgaatattttcccaagatggagaaactgcctacatccgggttaaagtt

SEQ ID NO: 857629 - DNA, 100 bp, Homo sapiens
tgtatatggcagttggtttcagcctactattgagcgagtggcactttaaagaggaggagacctccacagcccattcagcaaccccagcgtcagcggcccc

SEQ ID NO: 857630 - DNA, 98 bp, Homo sapiens
gcggatggccccaggtgtaagcgcagaaagcaggcgaacccgcggcgcaataacgtcaccttcaggccattcagaggaggaaagagaggggaatatga

SEQ ID NO: 857631 - DNA, 100 bp, Homo sapiens
agttgcggagaccttctgaccaggaagttagtgaatctatggattttagatatctgccagatgaaaaagatcgcttgggctttaaacaaaggtgtaaaaa

SEQ ID NO: 857632 - DNA, 100 bp, Homo sapiens
cctgtcatgaaacagcaaccagttgctatttctagcgcaccagcatttgaattatatccagatcgagagacagaagattctgaaagggttcaatgaaatg

SEQ ID NO: 857633 - DNA, 100 bp, Homo sapiens
ccaacgccaaacgcacgagtattacccctatctcagcagtgatggggagagccatagcgttccctgtattgaacactgatatacaaggaatgaatagaag

SEQ ID NO: 857634 - DNA, 100 bp, Homo sapiens
tttgtcaatgttagctcacagcttttggaagggcctaaggatcattttctcggatgcatcacggctcatcttccggctcagttcctccagtggtgtgcgg

SEQ ID NO: 857635 - DNA, 100 bp, Homo sapiens
tatctctaagcactgaagtcggtgtttggagaaaaggactcaggtgaggactggagctgcatatctatgtgagactgaattttcctcttagacttcagct

SEQ ID NO: 857636 - DNA, 100 bp, Homo sapiens
agagcaaagctgtcctaggccaaccagagattcatctttcatgcagtgacatgttgataaaaaatgatgagcggcggtgatgaagacaaaattgaacatc

SEQ ID NO: 857637 - DNA, 101 bp, Homo sapiens
ctggatattaaaccatttcttccctttcctcttgacactgcagctgcagtcaacctcttccccaatttcaatgcgtgatgatggccaaagagaagccaccg

SEQ ID NO: 857638 - DNA, 100 bp, Homo sapiens
tttgatgaaagatttgggcttgaagacccagaagatgacatatgcaagcacttaagtattcatcgaagagtcaccccagtagcggtgatcacagacatga

SEQ ID NO: 857639 - DNA, 99 bp, Homo sapiens
caagatgagttgcagcaagtcatacgggaggtttctggcatttgaagtcaaagagtattcagcgttggatgaattacaaaaggaatttgaaactgcagg

SEQ ID NO: 857640 - DNA, 98 bp, Homo sapiens
attcttattgaatactatcttgggtttaccgtatttccacaccattttgcttctccctttataaagacatcattaacatgcccgctggacctgtgatt

SEQ ID NO: 857641 - DNA, 50 bp, Homo sapiens
taaggattccaagtaactcttatttgctccgggagtgtgagctgagccct

SEQ ID NO: 857642 - DNA, 100 bp, Homo sapiens
ggtgtgaccccatatatgattttctttaaggatggtttagaaatggaaaaatgtatgttcagcccacaagagcttactggtgaaggaatgggacaagacc

SEQ ID NO: 857643 - DNA, 100 bp, Homo sapiens
ctctagctattgccttattttttctcatggatgttcttcttcgagtatttgtagaaggcgaatagcacccagtcctgcctggcagaagatcatgcagttt

SEQ ID NO: 857644 - DNA, 98 bp, Homo sapiens
atctggaattttgccgatttcatgactaaccagtcaacgaagtggtgaatctgttaaagtgcaccaactagatgttgccattcctttgcatctcaaaa

SEQ ID NO: 857645 - DNA, 98 bp, Homo sapiens
gcactgctccacctctgattccaccaccgggaaaccaagtgctacctcctggagcttctcttggaaatgggctcacaccagaggcagcaagagacctt

SEQ ID NO: 857646 - DNA, 100 bp, Homo sapiens
tattcatctcaaaaacaaaattctgaactcaggacttggcaagtttgggccccatggtatccctgtgacagtatttcccaaaagggaatataaggataaa

SEQ ID NO: 857647 - DNA, 100 bp, Homo sapiens
cccttccaggctgcccgggcctctggagatatagccagtgattcacccagtgaagtttattcttggaagagaccatcatctttgcataaacgaagtggca

SEQ ID NO: 857648 - DNA, 100 bp, Homo sapiens
gatacctgatgatgtacctctgccagcaggttgggagatggcaaagacatcttctggtcagagatacttcttaaaaccccagagggtataagtgaagaac

SEQ ID NO: 857649 - DNA, 98 bp, Homo sapiens
tggagaccaaagaagtctacaggggaagtgttcgccagttactacatgaaaagataagagatgcttatactcacccacaatttgtgaccgatgtaatg

SEQ ID NO: 857650 - DNA, 100 bp, Homo sapiens
aagaccttgaaagtctaaccatcatatttagaaccagctgtttaccagagtgtttaccgtggtttctgggcagtcctgatgctcctgggggtagttgctg

SEQ ID NO: 857651 - DNA, 98 bp, Homo sapiens
cagcgcggcctccgagttcaagacgcagccagtccgaatgggaaaaggacagcacaggatgccctccaaggatgagctggtccagagatacaacagga

SEQ ID NO: 857652 - DNA, 100 bp, Homo sapiens
ctggtgtgccgtggacgccgctgaccgccgcgcgcccgaaccgggtgtccacatgagtgcctctcccagcagatccaggcacagtaaccttggtgcacga

SEQ ID NO: 857653 - DNA, 100 bp, Homo sapiens
ccagaccaaacatttccacatcaagtgtttcacctgcaaagatcggagcacagtgctacttggaatgttcagctctgactcagaaaggtctcaaagcggt

SEQ ID NO: 857654 - DNA, 100 bp, Homo sapiens
tgttagaaggttctggtcttgcactaagaaacatggtggtggctttgaaggagctgtctattcggggtgactttcgaactacagttgaatacctgatcaa

SEQ ID NO: 857655 - DNA, 100 bp, Homo sapiens
ccagagctcccgggtcgtctttcgtgtggccgcgagggttacacatcattttggaatgactgtatatcatctggattacgtggctgtatgttaattgaat

SEQ ID NO: 857656 - DNA, 100 bp, Homo sapiens
cgaccttatgggtccagccaagcatttgctagtgtggacagtcattttgtttactcattcagccctgttgcaggtcccaataaactcttcataaggttga

SEQ ID NO: 857657 - DNA, 100 bp, Homo sapiens
cctggtgaaggggtcccataagaccctgaagctggtcgtcaaaagattctgatgctcacagtaccacctcaagtgcctccccagctcaatctccttgtta

SEQ ID NO: 857658 - DNA, 100 bp, Homo sapiens
cctcctcaaaggatgaggaggaagaagaagaagaaggagacaaaataatggcagaactccaggtggcaccttcattggggagtactgaatttcagccact

SEQ ID NO: 857659 - DNA, 100 bp, Homo sapiens
ggcaccaactattcgcggagctggaatgactggcaacccagtgaagcgtgacattcaggaaaacgatgaagaggcagtgcaagtcaaagagcagagcatc

SEQ ID NO: 857660 - DNA, 100 bp, Homo sapiens
ctaaatttgaaaaggagaaaatgaatgccaaatgggacacggactatgatttaatctccaaagaaccaaagccttttgtatttgagggaaaagtacgtgg

SEQ ID NO: 857661 - DNA, 100 bp, Homo sapiens
tgcatgaaaggcgcatcgtgattatctcgagcaaattaagcactgtagaagatgacggtgaaatgttccacacactggatgatggccacacaagatttac

SEQ ID NO: 857662 - DNA, 98 bp, Homo sapiens
tctggaaaggtaacagctatcaggagactttgaatgtgattgatcctggcttgatggacctaaatgggatgagtgaggatgccctggaatgggatgaa

SEQ ID NO: 857663 - DNA, 100 bp, Homo sapiens
agattcaaggtagatatcctcatcttcttgaacagacctcagagttgggtgtcacagaacatgttgaaggagacccttgcaaatttgcactgtgggtggg

SEQ ID NO: 857664 - DNA, 100 bp, Homo sapiens
ctgacgccgggaccgggaccgccgccgccgccgccaccatgagatctccctggatgtggacgcagaccgggatggtgtggtggagaagaacaacccaaag

SEQ ID NO: 857665 - DNA, 98 bp, Homo sapiens
gagatccagttcctgcgaactctctgcttatgataatgtcaacaaagttcgagtagctatcaagaaaatcagcccctttgagcaccagacctactgcc

SEQ ID NO: 857666 - DNA, 112 bp, Homo sapiens
cgcttggccgccagttcttctgcagccgaaggcgacacggaatcgatttgaaggaacaaggtcagaagtggaagagctcatgaacaaaatcagacagaatcccaaggaccac

SEQ ID NO: 857667 - DNA, 100 bp, Homo sapiens
agaaacgcatgaccgaaaatcagaagacaaacttgccaaagctacaagagacagtacgaattggagcaatgttggcttatacacctctggatgagaagag

SEQ ID NO: 857668 - DNA, 100 bp, Homo sapiens
ccagacaaagatcttagtcgggactagccggccaaggatgaagcctcacttcagcaggcaggatgtcggccgccactgtgctgtcccgggagccctacat

SEQ ID NO: 857669 - DNA, 98 bp, Homo sapiens
cactgggcactttcgattccttctttccaggctctagggtgagtggtgtcattgagcaaacacgaagtcgggctcatccaaggatgagattttgccag

SEQ ID NO: 857670 - DNA, 98 bp, Homo sapiens
catggagtcccttaatttacaagttaactgcaaacatagaagtgatggtgaaagttcatgttgttgatctaaaggcagaatctgtagctgctcctata

SEQ ID NO: 857671 - DNA, 100 bp, Homo sapiens
gcagtgtcagctgtacagccacactaactgtgacaggacagcccatgtactctcgtgaacatggtgctgctgcatctgagcgacttcagttggggacacc

SEQ ID NO: 857672 - DNA, 100 bp, Homo sapiens
atttgatgttggtccactatgaaggctacttagaaaaggacggctccttatttcactccacgccaaagaagcccaggatgacctggtgaagaccaaggag

SEQ ID NO: 857673 - DNA, 100 bp, Homo sapiens
gagaagtgtcccccttgcactttcctaactcagaagtggtgcatgggcaagcatgagccatgtacatcttcatgtgatcagccaggattttgattctcct

SEQ ID NO: 857674 - DNA, 98 bp, Homo sapiens
aacctcttgttcctcctgtcccaaaagaccatcctgctctcaactacaacatcgtttcagggtatgcccccgtgggtattctcttcctgattgctggg

SEQ ID NO: 857675 - DNA, 100 bp, Homo sapiens
tccgcatcaacaagatgttgtcctgtgctggggctgacaggttgcaaatgctgaaagcttaaatgcaattggtgtgttgatatacatggaccagactaaa

SEQ ID NO: 857676 - DNA, 98 bp, Homo sapiens
aaaaaacttgatcctcgaagagaaggtggtgatcaaaggattgcttccaagtatgatcatcaggcagaagaagatcttcgcaattggatagaagaggt

SEQ ID NO: 857677 - DNA, 119 bp, Homo sapiens
accgtgaccgagagcgtgaccgagagcgcgaatatcgtcatcgttagaaggaatttatgttgatgcagttaactccttgggccaaacagcactttttgttgcggcgttattgggcctta

SEQ ID NO: 857678 - DNA, 98 bp, Homo sapiens
gacatgtttgatcaaggtgggagctgaggctgatcagaactatcagaactacatcttaagggagtatctgactgtcttctctcagatgattgcatttc

SEQ ID NO: 857679 - DNA, 99 bp, Homo sapiens
gtactccaacattcatcgcagctggtgggtgtacacactgctgtttaccttggcgaggcctttcaccaagtccatgggaggttcccctgaaggatgcta

SEQ ID NO: 857680 - DNA, 98 bp, Homo sapiens
catacaggaaaaactttccagccattgctgaggtcatttttgcaagtaaggaaatacagtttggatctagcatctttgatcctgtatgcctatcagct

SEQ ID NO: 857681 - DNA, 98 bp, Homo sapiens
ctgtttcggttttcctggctcctcggcccttttctcccctgttgcagctgggagcggacgaagcgcgaagctgggggtgataaaagaaaatgtggctg

SEQ ID NO: 857682 - DNA, 100 bp, Homo sapiens
acctggtccatcttgataatttcatactctggcttggcaaagactgaagggaagccatggtgaatgcacagcaacttctatcgatctctttgggctgcct

SEQ ID NO: 857683 - DNA, 98 bp, Homo sapiens
cccttttagctgtattcttgttcccttgatggcacaattaaactgtgggactatatagatggcatcttaataaagatgtgttcagagcaacattgttt

SEQ ID NO: 857684 - DNA, 100 bp, Homo sapiens
ggtggaattgacagctgccactttatgctttcagttactcaagatggtggccaccgagtactaaattcacttgggaataaaagaaaaacataagaaaatt

SEQ ID NO: 857685 - DNA, 100 bp, Homo sapiens
gtatttcgaatagtgccaaagtttaaaaaggaaaaggttcagaagcagaagacaagttcacagcctggccagaagctgggcttacagagattctctaaag

SEQ ID NO: 857686 - DNA, 98 bp, Homo sapiens
accggctcctgctcaagatctcagagaaggaggaggtgaccacgcgcgaggcggacctacgtgggcgccatgcccgggaagatcatccagtgtttgaa

SEQ ID NO: 857687 - DNA, 98 bp, Homo sapiens
ggacctgaacctttccacccgaccaccgatgccacatcatgcacagacattaccagaaacatctttaccaaattatgccacaaatttgaaagacaaga

SEQ ID NO: 857688 - DNA, 100 bp, Homo sapiens
cgatgcaactgatagcagctctgatgacgatttggatgaatatacccttagaaaaaatgtggcagtggacttgccatgaggtgttgaagccttgtttcac

SEQ ID NO: 857689 - DNA, 100 bp, Homo sapiens
gacttctttcccagatgtttataatgagggcacacaggacccagatgatgtggtaccagttggccaaagaagagcctggtgttggtgcatgtgctttgga

SEQ ID NO: 857690 - DNA, 99 bp, Homo sapiens
gaagatggccaaagacaactcaactgttcgttgcttccagggcctgctgatttttggaaatgtgattattggtgtgaaatgacaatggatgctctgttg

SEQ ID NO: 857691 - DNA, 99 bp, Homo sapiens
aaaaagcaaactcttccgaaatcctgtaacaaatgatcgacatggctttgtctcaacccacttccttcagagtactctgtgcaaaaaacctggtgaaaa

SEQ ID NO: 857692 - DNA, 98 bp, Homo sapiens
cagctctccaatctgggaagcaccgagactctagaagaaatgccctccgggtcacaggataaggatcgaagagcagtcataaaaccacaaagtcaacg

SEQ ID NO: 857693 - DNA, 98 bp, Homo sapiens
tgattgtgacctctagcacatcacctacactaccacggccacactcaccactccatggccacacaggaaaccaagtgctacctcctggagcttctctt

SEQ ID NO: 857694 - DNA, 100 bp, Homo sapiens
cttcaagttggaacaaggagaagagctgtgtatggtgcaggcccaagttccaaatcagacctgtccaacaaaagatacagatattgtggatgaagccatc

SEQ ID NO: 857695 - DNA, 98 bp, Homo sapiens
aaaagaaagtcaggctaaagaacaatacgagcagatccttgcatttgtccaagaggcaagtatattaatagcagccagaagtgacacctgatggcaag

SEQ ID NO: 857696 - DNA, 100 bp, Homo sapiens
cttctctgaggcggcgagagatggtcaggtctggagctcgaccgggccagattttctggtctgactctggagagctagtctgtattgctactgaggaatc

SEQ ID NO: 857697 - DNA, 100 bp, Homo sapiens
aatactggtgcccaagcctggattaaaaagaggttgaaggctgcattgactcaccaccctgctgccatgtcaaatgggaacatgaacaccatgggacaca

SEQ ID NO: 857698 - DNA, 98 bp, Homo sapiens
cctcacctatttggtcctcttggtcctcggatgtcacagcttttccatagaacaattggaagtggagctagaacagtaagaggaccttgtgcatgaat

SEQ ID NO: 857699 - DNA, 101 bp, Homo sapiens
cctcaaactgaatcctctaaaggccccatacaatgaagtagacattggtggaaacatttatgagacggtttaagcggaagcatcttactgccattgactgc

SEQ ID NO: 857700 - DNA, 98 bp, Homo sapiens
ccagttgaatacagaacaactgctagacgatgtagtagcaaagagaactcgtcaggaaatgaaccgaaggcagacatatgaacaagcaaataagatct

SEQ ID NO: 857701 - DNA, 98 bp, Homo sapiens
tacactgtagcctagaactcctggcctcaagcgattttcctgtctcagcctacaaagttgctggaactctaggattctaccatcagaaaagaggccaa

SEQ ID NO: 857702 - DNA, 100 bp, Homo sapiens
cttcctcaatggggaaacccaaattgtagctgacgaagcattttgcaacgcagttcggagttattatgagggaatgggtactgttcaaaaaggaatgccc

SEQ ID NO: 857703 - DNA, 100 bp, Homo sapiens
tagcagctccatttctggagtctgggtcttccgaggccaggagcttgcctttccggactgtagaagcggccaggaagaaaaccaccccctcttaaggttg

SEQ ID NO: 857704 - DNA, 98 bp, Homo sapiens
tttaccccggaggagctgctgcagcagatgaaagagctcctgaccgagaaccaccagctgaaaggtcatgtacgtagaagggactgcagttgtgatgg

SEQ ID NO: 857705 - DNA, 100 bp, Homo sapiens
ctggtgcatctgtttgccggagggctgcaagatgaacaacgttaatgtggtatatacgccgtggtctaacctgaagaaaacagctgacatggatgtgggg

SEQ ID NO: 857706 - DNA, 75 bp, Homo sapiens
aagtagagaaagaaggcggagcagcaagaggtggaaacatacagaagaagcaaggaaattacagttagaggtcac

SEQ ID NO: 857707 - DNA, 98 bp, Homo sapiens
gagatccagttcctgcgaactaaagcgtggatacccatcaacgaagttttgatattggaattcagattggctatcagcgacgcaataaggatgtgttg

SEQ ID NO: 857708 - DNA, 98 bp, Homo sapiens
ttcagcacgtttgcagcggaaattcaggaaaccatcacagcactcagagagcaggcaatgaatcgctccctggctaatgtgattcttggaggctatgg

SEQ ID NO: 857709 - DNA, 100 bp, Homo sapiens
tacagagtgttgagaagtttattcagaaaagctggactggccattatggaggaggagctgcagcattcccattgtgtgaattgtgtcagtagacggtgca

SEQ ID NO: 857710 - DNA, 100 bp, Homo sapiens
gacaaaggcacagctggatgaatggaaagcaaagaagaaagcttctaatgggcctcattgatgctactcacagagacgtggatgtgctgttactgctttc

SEQ ID NO: 857711 - DNA, 100 bp, Homo sapiens
gaacaaagactgttgagtatgctccatgtagatcacgaattacatgaatgacagtcttcgaaccaatgtgtttgttcgatttcaaccagagactatagca

SEQ ID NO: 857712 - DNA, 98 bp, Homo sapiens
gaggaggaggatgaatttgatagagagctgacacttcctccatggcccatctatcgccggcatcctctcaagtggttacctgttcaagaatcaagcac

SEQ ID NO: 857713 - DNA, 100 bp, Homo sapiens
ggcgctgttcccagcctttgcggggcttagtgaggctcccgatggcgggagctccaggaaagctttgaccgccattgaaggcacagcacatggggagccc

SEQ ID NO: 857714 - DNA, 100 bp, Homo sapiens
ccaaaacctattacgaactcaaaagtcaaccgctgaagagcaggaatcactagatttgatctacttggcgactttggaaggtttaattggctgggaaatt

SEQ ID NO: 857715 - DNA, 99 bp, Homo sapiens
ttggggagatttttgaacttcgaggaagaaagaccacagcaagattctttcattcgtctcctcctagcctgggggaccaggctcgaactgaccctggac

SEQ ID NO: 857716 - DNA, 100 bp, Homo sapiens
ccaatgatggcaatgccattcttcgagagctaaagctccatggaatagagattcctgaaaggacagattatgaaatggacaggcaattcctcatagaaat

SEQ ID NO: 857717 - DNA, 99 bp, Homo sapiens
ttgttttttcatattacatctacaagaggggacaagtacctttatgaaccagtgtatcccaactcttgcagttcaatcctctggaacgacttggtgctg

SEQ ID NO: 857718 - DNA, 100 bp, Homo sapiens
ttgctcaagacttctttgtggctttgctaaaggacagggtggttctcttcccaaagtggaagccaaattcatcaattatgtgaagaattgcttccggatg

SEQ ID NO: 857719 - DNA, 100 bp, Homo sapiens
ttggatcctacaagcaagctgaatggaggccagatagtaccatgatagctgtatcattcaaaagaatgctgaaccgggagctgacacacctctcagagat

SEQ ID NO: 857720 - DNA, 100 bp, Homo sapiens
aaggagaataagcaagtgcaatgagggacagtatgatttggtgaaatgcctggctcctattcgagaccccaagaccgagcaggatggacatgatattgag

SEQ ID NO: 857721 - DNA, 98 bp, Homo sapiens
agcagcagcagccaggatgacctggagccaggggggccttcggaacagatgcacacccttcctgggtgatgctaaaccaggtggacaggtgaaatgtc

SEQ ID NO: 857722 - DNA, 99 bp, Homo sapiens
cgaagaagcatcgttaaagtctctcttcaccctgccgtcatgtctaagtcagagaggagaaggcagagcccccccaggctatgaatgccctgatgcggt

SEQ ID NO: 857723 - DNA, 100 bp, Homo sapiens
tctgatccagaccaggactttgacaaagagcttgaaatggcgattgaaaacctccaaaaaagcgaaggaatcacatcacacaaaagcggtttactcaaca

SEQ ID NO: 857724 - DNA, 98 bp, Homo sapiens
tcttgagtgtgtatctctacatgcgctctttgaaagcgccccggaatgacctgtcgcctgccagctctgttgctgagagatggatgttaaaaatcaac

SEQ ID NO: 857725 - DNA, 100 bp, Homo sapiens
aaactcactgactacggcatgtgtaagcgttttaccaacgaggatcatttggctgtccataaacataaacatgagatgacactgaaatttggtccagcac

SEQ ID NO: 857726 - DNA, 100 bp, Homo sapiens
agagtgtaatgctgtccgccaggccctgcaggacctgctttcggagtacatgggcaatgcaattaagttggaatatgcaaggttggttaagttggcccaa

SEQ ID NO: 857727 - DNA, 100 bp, Homo sapiens
cgaaatgaacatttttggaccctaggttttggctcattgggaccattgcaatttagagatgtggccatagaattctctctggaggagtggcattgcctgg

SEQ ID NO: 857728 - DNA, 98 bp, Homo sapiens
ggctgtccattgatgcccaggaccgggttctgctgcttcacaggctggacatggaggaaggcaaggaaggaggcacatggctgggcatcagcacacgt

SEQ ID NO: 857729 - DNA, 99 bp, Homo sapiens
aaaaactctgactaatgaagcatccacgaagaaggtagaacttgacaactgcccttctgtgtctccttacctcaatcctgataacttaagtgactctct

SEQ ID NO: 857730 - DNA, 142 bp, Homo sapiens
tgcatcctgcgttcccctccatccttctggatctggccaacaccaccggcacagtgacggcttcagagggtaacccaggcctgcacagtcccatgttggatcttgataatgatacacgtccctcagtgttgggccatctcag

SEQ ID NO: 857731 - DNA, 98 bp, Homo sapiens
atctgaagatgggaaagcccatcctttcaaaatcaacttagaatcagaaccacaggacccagccgccgcctccatctctgacggagactgtgacgccc

SEQ ID NO: 857732 - DNA, 100 bp, Homo sapiens
gaaagatgtaggcttggagcagaatcaccaagcatcgccagcaccaggtgctatacttggtagatcagaaactcaggagtgtcttttctttaatgctaat

SEQ ID NO: 857733 - DNA, 100 bp, Homo sapiens
ccccactctgaactcaagtcaccgtggagctccgccgccccgaaactttcaccgcgagcgggtccggcgccagctgccagtcgaggaaccgaacccagcc

SEQ ID NO: 857734 - DNA, 98 bp, Homo sapiens
cccagaaggctgcccagagaaggtctatgaactcatgcgagcatgtagctttgcagtttggggagggctgttttccatgattgactgtagtatggttc

SEQ ID NO: 857735 - DNA, 98 bp, Homo sapiens
tgctggattgctgcaaggctgagggacgagaacgagggcagctgcaatgactctccgcacggtattattgtcattgcaagcactattggcagctgcag

SEQ ID NO: 857736 - DNA, 100 bp, Homo sapiens
aaattcttaatggtgtttactacctgcactcccttcaaatcgcccactttgatcttaagaaatgcatcgtgattcctgtccattggactgtaaggtttat

SEQ ID NO: 857737 - DNA, 100 bp, Homo sapiens
ccaaggaactgggatttcaacctgaaagtggaggctgcgaaaatagtacgaggatgtcgtccaggaaagattgtgcagatgactgaagcagaagttcgag

SEQ ID NO: 857738 - DNA, 99 bp, Homo sapiens
ccttggcgggggactctgagggaggagctggggacggcgaccctaggagagccagagactgctgctactttgaaacgtacgatagaggccctgatggac

SEQ ID NO: 857739 - DNA, 98 bp, Homo sapiens
ttcaagggagctgataaagaacttcttcccaaaatggaaaccccgagactcttcagttgaagttcgtagtgattgggaagtgaaagaggaaatggatt

SEQ ID NO: 857740 - DNA, 100 bp, Homo sapiens
cttccggaaggactttggcgaggatcaatgtccgagttaccaccatggatgcagagctggagtttgcaatccagccaaatacaactggaaaacagctttt

SEQ ID NO: 857741 - DNA, 113 bp, Homo sapiens
catccgaaatcaacttggaaagtcaaattacgtgtggcatatggactcctgacgaccaacagaaacagctgacccttggctaacattacatgatttggagaaataattggaag

SEQ ID NO: 857742 - DNA, 100 bp, Homo sapiens
ggaggatgatgacatcactaccgggaagcgttgttgacgaccatggacatcatccacgatggatttggattcatgctggcttttggagacttggtgtggg

SEQ ID NO: 857743 - DNA, 100 bp, Homo sapiens
gttgaatttatcagtgtgcctgtcccagagtttgcagatagtgatcctgccaacattgttcatgactttaacaagacgctggccactgcagttgttcagc

SEQ ID NO: 857744 - DNA, 100 bp, Homo sapiens
ggcgtgcactacgagtacgtgatcatggggaccaacgccatcagcccccaggtgccaccccacaggagaccaggcgtgaattacccttcactaagtcggc

SEQ ID NO: 857745 - DNA, 100 bp, Homo sapiens
cacgactaccagccgcttcctggcatgtcagagaacccctccgtctatgtgcctgagtacatccaagccattatgatgatggaggaatctgttcaacatg

SEQ ID NO: 857746 - DNA, 100 bp, Homo sapiens
aggagatcgagaccatcctggctaacaaggtttgccaataggattatcctgctgccatcatgtcttggtttgttgatcttgctggaaaggcagaagatct

SEQ ID NO: 857747 - DNA, 100 bp, Homo sapiens
caggagaagctttgaaggctgtgaagaatggaggctccagagtgaaattaatgacactttgtcgatgaagatcttgattgtgacctctgtggaaaatgag

SEQ ID NO: 857748 - DNA, 117 bp, Homo sapiens
aacgacggttacatggaaccatatgatgcacagcaaatgataacaggctctggaagaggatctgaaccagaagaagcgggagcaggagatgttcttcaagctgagcgaggaggcgga

SEQ ID NO: 857749 - DNA, 99 bp, Homo sapiens
aatcacatgccaaaagaataaccaatggtcggctaagaagccaggctgcgtgtgtgaccattgtgaggtagatattttgttctaattttccagatgagg

SEQ ID NO: 857750 - DNA, 100 bp, Homo sapiens
ggggcggacggcgacgcagcccgcggcagaagtctggagggcagtatgagctttttgctgtgattgcgcacgtgggaatggcagactccggtcattactg

SEQ ID NO: 857751 - DNA, 99 bp, Homo sapiens
ctgcagccagcagcgtggaggagcctgaaggtactccaaagattcaggtttactcacgtcatccagcagagaatggaaagtcaaatttcctgaattgct

SEQ ID NO: 857752 - DNA, 100 bp, Homo sapiens
atcaaaataaaggaaacacatttcatatactgcaggtatgatacatacagagatattcttgaacaccacctgcaaaacaacaaattcaggattacttctg

SEQ ID NO: 857753 - DNA, 100 bp, Homo sapiens
tcatctggagaaccttttggccaggtcttactttgatcctcgtgagggcatccgcttcgatcctgaaattccgcaaacactacgactagagtttgctaag

SEQ ID NO: 857754 - DNA, 112 bp, Homo sapiens
gcgcgcagggcctgattacccaggtggataagctatctgaagacattgacctgctgaaatccaggatagagagtgagaaaaatgtccattccacaaggtttgtgacatattt

SEQ ID NO: 857755 - DNA, 98 bp, Homo sapiens
ggctgccccctgcgttcctccatccaaccatgagctggtggtccctccagctacaaggtgggcaccatggcggagaagtttgactgccactactgcag

SEQ ID NO: 857756 - DNA, 100 bp, Homo sapiens
ctgccgccgccgaaggaggggcaaagctcaagatggcggacaaaacgccaggcggatctcagaaggccagttcaaagatcttagcaaagcaatgtctcaa

SEQ ID NO: 857757 - DNA, 99 bp, Homo sapiens
gctaactgcctcctctggtatatggacaacccccaggaggagacatcacagctttcccagatcgggaggaaaaatatggaatgtgttttaccgctgact

SEQ ID NO: 857758 - DNA, 98 bp, Homo sapiens
agacttcaaagaaacattaagaacttggatcccattcacctgaggcacccgaagaagagaccatccatatttccagttccaatgacaggatttacaca

SEQ ID NO: 857759 - DNA, 100 bp, Homo sapiens
acagcatactgaagtggtttgcaacatccttcttctggataacactgtacaagctttcaaagtcaatgtaaaataccatgaagattttgaaaaaacaaag

SEQ ID NO: 857760 - DNA, 99 bp, Homo sapiens
caagctataaagaggaagcatgctgtcctatgtcagcaaaaactggagcagaaattggaggctcagcatagggcttccgttacaagatgaggtctgtgt

SEQ ID NO: 857761 - DNA, 99 bp, Homo sapiens
gaccacatgttcctgagcttgagatgctaggaagacttggaacatccatgatagcagtcttctgtaaatcgaacttttcaagaattctctgaaggaacc

SEQ ID NO: 857762 - DNA, 99 bp, Homo sapiens
ggccttcttggctccttccctgggctcttttatattgctggcaaaatagtggttcaagcaataaatgcgggagtgtttttctttaggtgtacaatatgc

SEQ ID NO: 857763 - DNA, 100 bp, Homo sapiens
cagagagatgagcctcaagaaccttctaataaggtgttaaagggggatattagacctgctattgaaactcatgaaatgttatatcaggtgattaaaaaac

SEQ ID NO: 857764 - DNA, 100 bp, Homo sapiens
ctgaaacgatcctctcatctcagcctccaaaagtgctggcattacagggtttccaggcctgaggtgcccgccctggccccaggagaatgaaccagccgca

SEQ ID NO: 857765 - DNA, 98 bp, Homo sapiens
tgctcagtttgatgcgtcacactacgacagtgagaaaggagattgactttgaagatgtgattgcagaaccagaagggacacacagttttgacggcatt

SEQ ID NO: 857766 - DNA, 98 bp, Homo sapiens
aaggccctacgggagaaaaccgggcgcaagtttgtggtgagccctggtggtcggaggatttggaaatgacccgccattggccctgggaggtgagcctc

SEQ ID NO: 857767 - DNA, 99 bp, Homo sapiens
ggctccagcatcaagatccgtctgacagagaagcctgtgtctcccaaatcaggaacactgaagagccctcccaaaggatttgatacgactgccataaac

SEQ ID NO: 857768 - DNA, 100 bp, Homo sapiens
aaacacatcatgaaggcctgttttgaagagaaggggaataagactgcatctgttcatatgaggaggcagacagtggggaggaagaatgccggtcacagcc

SEQ ID NO: 857769 - DNA, 109 bp, Homo sapiens
cgaagccacgctccggatggaaaacgtggacgtgaaggaggaatggcaggacgaagatcttcccagggtgaggacgcttgagcggaagttagaagcaaaaatgatcaag

SEQ ID NO: 857770 - DNA, 99 bp, Homo sapiens
ttctctgccttgctgatctgagctcagacctgccaatttaccagagataattgataacaccctgtaacagctgaagctcagagttctacagagtcacca

SEQ ID NO: 857771 - DNA, 98 bp, Homo sapiens
tgggtcctcggtcggtacagtctctgcacctcgcgccccagcagagcgatcgtcttctgatcaaaggaggtaaaattgttaatgatgaccagtcgttc

SEQ ID NO: 857772 - DNA, 99 bp, Homo sapiens
atgagaaggacaacacctacttaggtggcgtcctctcacaagtcttgcaggaagtgaatctgcctattttgacctgggaagagtgtgtggcagctctgt

SEQ ID NO: 857773 - DNA, 100 bp, Homo sapiens
ggaagtcaatcaagagactatccagcgggtgatttggatattgaagatgacatgaaagcacagatgaattgcttttatttgaaagccttggatggttttg

SEQ ID NO: 857774 - DNA, 99 bp, Homo sapiens
ctggacggctcgggcgctggagactgggcatttagctatggagacattattatcccttacttctaaacgagcaggagactggtttaaagaagaactccg

SEQ ID NO: 857775 - DNA, 101 bp, Homo sapiens
ggggaccaagccggggaccaagccggggactaaggcgagccggagaccgagcccgaacagcagggcgccctgcgtccggcagaggaggcgagcatcccgct

SEQ ID NO: 857776 - DNA, 100 bp, Homo sapiens
gggatctaaaggcgggactgccacgtccaagcaaaccgggaaaggagaggatcccggagccggacgtagacaagtttggcaacgagatcacccagctggc

SEQ ID NO: 857777 - DNA, 100 bp, Homo sapiens
gtcaccgaggagaagtaccaggaggcgttggccaaggctatgctttatggaggccaggcactgtttatcagctgctaatgtcatttttggtcaaactgga

SEQ ID NO: 857778 - DNA, 100 bp, Homo sapiens
gaccactagacccacagctgttaaagcaacagtaccttctccaggcaaattccgttcccctgcagcaccatctcctttggctcttcggcaaccagtgaaa

SEQ ID NO: 857779 - DNA, 50 bp, Homo sapiens
cagattcttccattttgaaaaagggtgctgtggaatctattgccatgaag

SEQ ID NO: 857780 - DNA, 100 bp, Homo sapiens
gacgaagaaaaaaagagcgacgagtgcaaggttaacgtccctaaaacccgccggactttctgtaagaagtgtggcaagcaccaaccccataaagtgacac

SEQ ID NO: 857781 - DNA, 100 bp, Homo sapiens
ggataacacagccatcatatgggatgtcagcaaaggtggaatgaatcttacttgttgaatatcttctggttactagttggattcatttgtgaaagaatca

SEQ ID NO: 857782 - DNA, 54 bp, Homo sapiens
gctaggaagacaagattagatggcagattttcttcaatcacatctgaataaatc

SEQ ID NO: 857783 - DNA, 100 bp, Homo sapiens
tcagcagaatttcaagcgaggctctgggcagagtggaccacggggagccccacgagggaacgtgtgaaagaagaattgtggggaaaaaaaagcaagcata

SEQ ID NO: 857784 - DNA, 98 bp, Homo sapiens
acaaaccatcacaaagttacctacgtgttagaaataaatctgatattgcaccttcacagcaacaagaaacctccacagctgttgagaaaaaggagaaa

SEQ ID NO: 857785 - DNA, 98 bp, Homo sapiens
ggagatccacagctaagacgccaggacccactggaagcctagaaatggatctaagcctttcccacgttatggttataaaccctccccaccgaatggat

SEQ ID NO: 857786 - DNA, 100 bp, Homo sapiens
acacagatgcctccttcacaaatcgaaaggagagaggccctgaagaagagcatcttggcatcctggatgaggtggaaagtgagaaatggtacctgtctac

SEQ ID NO: 857787 - DNA, 100 bp, Homo sapiens
ttaataatgatagaatgaagaccacaataaaagagacctctacttagctcagcaattcttacctttcgggaacatgccctgtgtgccgccgtcatttccc

SEQ ID NO: 857788 - DNA, 100 bp, Homo sapiens
gcctggagattcatgacaaaatcatggagctgtcccctttcctccaacccaacggcttactttcaaggaagtatttgagaatgggaaacctaaagttgat

SEQ ID NO: 857789 - DNA, 98 bp, Homo sapiens
gagacactttgcaaaaaaacttgatcctcgaagagaaggtggtgatcaaaggcacaacattctgaaattttttggttattgtaatgatgttgatcggg

SEQ ID NO: 857790 - DNA, 100 bp, Homo sapiens
ccactgtggacagatgaaacgaaaataccgagtttgtaatgtgactagacggccagccagtcatcaaacgccataggaaaaggatacagagtagagtttc

SEQ ID NO: 857791 - DNA, 100 bp, Homo sapiens
aaatatcatttgggtgtgagtccactttgcgatcgtcacactgaatctattgccaacatccagattgattgtagaaggcatgaaacaaaaaatgtggagt

SEQ ID NO: 857792 - DNA, 101 bp, Homo sapiens
cgctgcgcaggacttctcctggcggcgctgcggatccagggggtcggctgccaggtacagagttctaaagttcctgttgcttcagacaatggatgagcaat

SEQ ID NO: 857793 - DNA, 50 bp, Homo sapiens
ctggtctcgaactcccaacctcaggctggagggcagttgtgcgatcttga

SEQ ID NO: 857794 - DNA, 100 bp, Homo sapiens
cgcctgacagggtatctgaagtaaaagggggaatccaggtaaaaatggcttgtctaatagctgcattttgttagataaatgtccacctccaagaccacca

SEQ ID NO: 857795 - DNA, 100 bp, Homo sapiens
cctaccaagaagtctcagatcttttctacagcttctgataatcaaccaactgttacaatcaaggtctatgaaggcaactcatgcagcaattccagaaccc

SEQ ID NO: 857796 - DNA, 116 bp, Homo sapiens
gctggttctggtgctggtattggaacagtctttggcagccttatcattggttatgccaggttaagaatgtctgaggggtcaggcggtgctggcaagatggctgcacttgagaagat

SEQ ID NO: 857797 - DNA, 100 bp, Homo sapiens
ttttaacatgagcttttcaagaaatggaattgaaaagtccagaggaagaggcactccaggaataggaactacaaagctgaatttgcatcatgccgactgg

SEQ ID NO: 857798 - DNA, 99 bp, Homo sapiens
atgagttcagctactctagccaccaaactgattatgaattgccctgaaatctgaaaaatttcaattccaatcgtactgctctccatctaccccagagta

SEQ ID NO: 857799 - DNA, 99 bp, Homo sapiens
tgaattgttctcagtttctcggtttatgtgctcttccagattatagcatttgatgagctgaagactgattacaagaatcctatagaccagtgtaatacc

SEQ ID NO: 857800 - DNA, 99 bp, Homo sapiens
tgcagtggcgcctaaagtctgagagagggaagtcgcctctgtgctcgtttggtgcacctcgatttggaggaagtagggcagggcccttatctggaaaga

SEQ ID NO: 857801 - DNA, 100 bp, Homo sapiens
ggggcggcgcagagcctcccgggccacagtggcttttcatggcctgccactgaaaatcaagaaagaaccccacagtccatgttcagaaatcagctctgcc

SEQ ID NO: 857802 - DNA, 98 bp, Homo sapiens
ctggattccagaagatttaactacgtggtccgggtggacttaggtgaaggcaagatttgcttctgttgtgaagaatttcaaccagccaagtgcacaga

SEQ ID NO: 857803 - DNA, 60 bp, Homo sapiens
cggggaccttaacaatccacctaagaaattcagagtgggaaagaagcctaaggaataaag

SEQ ID NO: 857804 - DNA, 99 bp, Homo sapiens
aggacttgacgttcctgacgaagcaggagatcctcctctggaagagcctgtattgtcctcacaatagtatagaagaattcaagagaggagagagagaca

SEQ ID NO: 857805 - DNA, 100 bp, Homo sapiens
ttttcagaagatacactgacttctctaggcttaatgacaaaatgtcaatgaagagcttccagccagaagaaaacgaaatcgtgaggatggggaaaagaca

SEQ ID NO: 857806 - DNA, 100 bp, Homo sapiens
agcaagaatttatcaaaggaaagatggatccagacaaggtgtcactgacattcgaggacgtggctgtgctctttacctgggatgagtggagaaagctggc

SEQ ID NO: 857807 - DNA, 99 bp, Homo sapiens
atcattaagttggagcagggagaggagctgtggataacgggaggtgaatttccatgtcaacatagtcctggttaaagctgaagctcaacaaagatatag

SEQ ID NO: 857808 - DNA, 98 bp, Homo sapiens
ctctgcctatgacagcaccatggagaccatgaactatgcccagaacaatatgatgcgtttgtgaagtttacgcatgatcaaataatgcgacgatatgg

SEQ ID NO: 857809 - DNA, 100 bp, Homo sapiens
aaggaaaaactggagagcttcatcaaaaatagtgatagctttgataatcaggatttgcatgaagatgtcgaagaagctggtgcactgcagaaaaatcatg

SEQ ID NO: 857810 - DNA, 100 bp, Homo sapiens
gtctcactgcaccttcaatggcattgaaaagctgacttcatgagaccgaggatctcgttcgttgatcgatgctacatattcagcatgttagataatgagg

SEQ ID NO: 857811 - DNA, 99 bp, Homo sapiens
ttttcgtctaaaaataacaagaatgggaggagaagggagatcatgaatcagacagataaaaatcaacaagaaatcccatcataccttaatgatgaacca

SEQ ID NO: 857812 - DNA, 100 bp, Homo sapiens
gaaaactgtgaagttccatgccaggacggggatgattgagtctaacagggctcaaccacaggaattatctcttggaatctccgcataggttcagtgttgc

SEQ ID NO: 857813 - DNA, 99 bp, Homo sapiens
acctcgacacagtccctccctcggtttgcctactgaagagcttatcagagctctacttgggaaagatgaccgttcattaataaatttgcatctcatgca

SEQ ID NO: 857814 - DNA, 100 bp, Homo sapiens
gcaggtcttcacccaggccctggagtgcatgcgcagagagacaagagagacacctccaacttcgacaaagagttcaccagacagcctgtggaactgaccc

SEQ ID NO: 857815 - DNA, 100 bp, Homo sapiens
tgggaccatcccaaaatgacagagctctaccagtctttagatttcggaaacttctggcagcccagtgtctactggaaggcccaagccgcttgccagaaag

SEQ ID NO: 857816 - DNA, 98 bp, Homo sapiens
ggaagaggatgctgaagcagaggctgagaccgaggagaccagggcagaaggacattcaaccaattttgtggtaaccgtcctgttaccctccaagcggt

SEQ ID NO: 857817 - DNA, 100 bp, Homo sapiens
aacacctttgatgaaagctgcaagagctggtcatttgtgcactgtgcagtttcttattagcaaagggacatgttgtcttaacagattttgggctttgtaa

SEQ ID NO: 857818 - DNA, 100 bp, Homo sapiens
cctaagggcccttcgcgggagagcgtcgtgcacgcgggccagaggcgtgccctgaaactctaatctcattgcctggccagaaaaggaagtaatccctagt

SEQ ID NO: 857819 - DNA, 100 bp, Homo sapiens
gtggcctcgttacctgcaggtattgggagatccacagctaagacgccaggacccactggaagcctagaaatggtgaccaagaatatggcccaggtgacca

SEQ ID NO: 857820 - DNA, 98 bp, Homo sapiens
gagagtcagtgctctcaactctgtccattgtgaacacgtggaagatgaaggagaatccaggatatgttcaaggaatgagtgatttactttcccctctt

SEQ ID NO: 857821 - DNA, 100 bp, Homo sapiens
gagtccgagctcggggaccggcctctgcaggtcggggagcgctcggactacgcgggatttcgcgcgtgtgtgtgtcaggaaacggggtctctgggggatc

SEQ ID NO: 857822 - DNA, 100 bp, Homo sapiens
aggctaatacacaactgggttatggcacaacacatgcagtgtgctagtgcttggaaacaagagagatcttcctaatgccttggatgagaaacagctaatt

SEQ ID NO: 857823 - DNA, 100 bp, Homo sapiens
tggaaacattgaagagattgcatataatgctgtttcctttacctgggacgtgaatgaagaggcgaaggcaatctataagatggtttcctctgtaatgaaa

SEQ ID NO: 857824 - DNA, 100 bp, Homo sapiens
tttctgggtgacactcaacaggattcccgcacccagtcagcttgaagagtttcaaatggaccctaccactgagaaatcaagatggcagtctactatgggg

SEQ ID NO: 857825 - DNA, 98 bp, Homo sapiens
agtgcagcttatcgccttctgcaagatgacgaggaaatgaatattttgattaacctctcaaaggatgactggaggatacctgcccactatgtctatcc

SEQ ID NO: 857826 - DNA, 100 bp, Homo sapiens
cggcttcctcaacttcacgctggcgcgagccccgtcctccttcgccgccgcgcacaaccgcacgtgcagaacaaactcacgatgttggacattgcatcaa

SEQ ID NO: 857827 - DNA, 100 bp, Homo sapiens
cccaaacccaaattcttcgttctgtgcggcgacctcatccacgccatgccaggccagagatcctcagcaggagcctatggaagagatagaaaatttgaag

SEQ ID NO: 857828 - DNA, 100 bp, Homo sapiens
ggctgcatcacgggaggagctattggtttcagagaggaattacggaggttgagctggtccggaatccctaagccagtgcgtccaatgacgtggaagctcc

SEQ ID NO: 857829 - DNA, 106 bp, Homo sapiens
ccggcggtggcgcggcggagacccggctggctcttgcccctgttctttgcttctcgttttgttggtgaagatatcacagtgatgtctgcattcaacctgctgcatt

SEQ ID NO: 857830 - DNA, 132 bp, Homo sapiens
aaaactccagagctcccagaaccttcagtgaaagtaaaagaaccttcagtacaagaggctacttctactaggttttcctttggaatatggataaatacaccatgatacggaaactagaaggacatcaccatg

SEQ ID NO: 857831 - DNA, 98 bp, Homo sapiens
atgatgaacgtgaacaccagaggcacctaccttgctttgcattgagactccttgcattccgccagatacacaaagttctaggcatggatccattaccg

SEQ ID NO: 857832 - DNA, 100 bp, Homo sapiens
agccattttgagcaatggggaacgctcacggactgtgtgcagcagccgctcttctaaaacattcaaaccaaagaagaatatccctgaaggatctcatcag

SEQ ID NO: 857833 - DNA, 100 bp, Homo sapiens
aagggatatgctgaacagcagtgcaatggacataatgtattatactagtccactttatagagatgaagcttctctgcagaatgtcaaacaaagatcgaca

SEQ ID NO: 857834 - DNA, 100 bp, Homo sapiens
ctctcgctctgggtccctcagaatatgactctctgcctgaaaatagcgagacagggttgtggtctcctgaacagaagtctgtctccaaacacaaatcaag

SEQ ID NO: 857835 - DNA, 100 bp, Homo sapiens
cactgcccaccatttacaaacgccagaagcagcctgagggaactggcatgatagatgaagagttcactgttgcaagactctacattagcaaaatgaagtc

SEQ ID NO: 857836 - DNA, 100 bp, Homo sapiens
agggctacgagcgtctcctgaagatgcaaaaccagcgtggcggccgcgctctcttccaggacatcaagagctggaagtcgagtgtgctactcaactcagg

SEQ ID NO: 857837 - DNA, 98 bp, Homo sapiens
tccattcgactgccagaaaccattgacttagggaagacagagatgtcaatgaccccatgcccaaccgaggcggcaatggactagctcctggggaggac

SEQ ID NO: 857838 - DNA, 100 bp, Homo sapiens
aagaactttccagtatttgtctttctatgtttatgataagaatgttttacaaagagatctccgtatagtggtggtgaccgcggtggcttcaaaaattttg

SEQ ID NO: 857839 - DNA, 100 bp, Homo sapiens
atcagcagtgacacggacgaggaggaggaacagaaacacgcccccaccaggtttcaggctctgtataactatactcccaggaatgaagatgagctggagc

SEQ ID NO: 857840 - DNA, 100 bp, Homo sapiens
cccagagcctcagtttgtgcaggacaccgacatggaacagggactcactggggcccagctccatgaccttctccagctgaggcaggagaatgcctacctg

SEQ ID NO: 857841 - DNA, 100 bp, Homo sapiens
tggacgtcaacagcaatggcggaaggagaagatgtgccgccgctgccaacgtcgagcggcgacggctggtcagtatgggaatcctttaaataaatatatc

SEQ ID NO: 857842 - DNA, 132 bp, Homo sapiens
gcgcattgcctcgttggatgccgccaatgcccgcctcatgagtgccctgacccagctgaaagagagcccgcctgcacccaggtgaaataaacagccttgttgctcacacaaagcctgtttggtggtctcttc

SEQ ID NO: 857843 - DNA, 100 bp, Homo sapiens
gtgaccgagagcgcgaatatcgtcatcgttagaaggtgtcactgacgtttgaggatgtggctgtgctgtttacccgagatgagtggagaaagctggcccc

SEQ ID NO: 857844 - DNA, 98 bp, Homo sapiens
agggtcatgtttcctgtgtgaaattgcttctgtcaaagagttctgtgaaaacctctcagctgactgtcgggagaatgtgatcatgtcccagatcttgc

SEQ ID NO: 857845 - DNA, 100 bp, Homo sapiens
cgatgaagtgcagaggtttttttctgaatgaaactagtgatcgagaagatggcctccccaaaggacatcatgtgacagactctgagaacgatgagccctt

SEQ ID NO: 857846 - DNA, 98 bp, Homo sapiens
cctcttcaatttctgacaaaagcatttcacaggacatgcaacgccagtttcgtcactgatgttcactaccatcagacctcctaatgagagccagccct

SEQ ID NO: 857847 - DNA, 99 bp, Homo sapiens
gctccaccccttccacgtcatccgcatcaacaagatgttgtcctgtgctggggctgacaggccaaccctttaaattggatcccaaaatgactcacaaga

SEQ ID NO: 857848 - DNA, 100 bp, Homo sapiens
atgtctacaagattggagaagattggtggatccaaccgaagagaaaggggtgctccaccactccctcccatcccgaggtgatctttgcctgctcttctct

SEQ ID NO: 857849 - DNA, 100 bp, Homo sapiens
agaagactttactgaagtttatcttattaaatttatgaacttacaaagtgcaaggcataccaatcccattgtggaaaatggacagactcatccgtgtcag

SEQ ID NO: 857850 - DNA, 100 bp, Homo sapiens
ttactcatgagaccagtgcccatgaaggtcagactgagaaactctataaaacaggtcgggagatgcaggagaggatcatggacctgcttgtggtggtgga

SEQ ID NO: 857851 - DNA, 98 bp, Homo sapiens
gccttgctacggcacattgtgaaggagttcaagagagagggaaaactgcctttgcttctgagccggatgaaggaagtagggaaagtatttcttgctac

SEQ ID NO: 857852 - DNA, 100 bp, Homo sapiens
ggctggtttcggaaatgcccttacagcagcagattcagtaagctgtgaggtccgtaatgtcagacactggcaaacatcatatgttcttcaagtagagtta

SEQ ID NO: 857853 - DNA, 98 bp, Homo sapiens
ctgttggtgcatctcagattcctgcagcatctgatcagctctgcaaggaagagagcttcacgtctctggtcagtcaactgtcccggcccccaactttg

SEQ ID NO: 857854 - DNA, 98 bp, Homo sapiens
aaaaccccaaaagtgtacataagcgatctataactacaatgcttctcaagatgtggagctctccttgcagatcggtgacacagttcacatcctggaga

SEQ ID NO: 857855 - DNA, 98 bp, Homo sapiens
cgccggttcctcaccctcggggagcaacatggatccaggtgattgagaatgatagagccagcagaggaggacaagtttatgccaccaacaccagaggc

SEQ ID NO: 857856 - DNA, 100 bp, Homo sapiens
ggttactgaggggactgtgacacagatacagtaatccttcccctctaccaccggatatggctcctgggcagagttatcaaccccaatcagaatctgcttc

SEQ ID NO: 857857 - DNA, 100 bp, Homo sapiens
attcctggaaaaagaagttcatcagattcaaggaatcagagatcattgatttcttcctgggggcctctctcaaggatgaggttttgaagattatgccagt

SEQ ID NO: 857858 - DNA, 100 bp, Homo sapiens
gattcaacatcaacacttgcagggaaatgatcagtctgttggatagcgacgagctggggctgcagaagaagctacgcacagaggtcattcagctggagga

SEQ ID NO: 857859 - DNA, 98 bp, Homo sapiens
catcaagtacctgctgcttggcttcaacctgctcttctgggttactacaaaaggctgaatttgaagggagtaaaggtcagttgcagtgaagaaactcc

SEQ ID NO: 857860 - DNA, 121 bp, Homo sapiens
caataatttgcttgatggcttagaactctccacagccatcactcatgtccataaggaggtaaaatatacccaggaccataaacagatgaaaggtagaccaagtctgattttagatacacct

SEQ ID NO: 857861 - DNA, 99 bp, Homo sapiens
tttgattccctacaaaaggcaaagtttgatgtatcaggtgtgatccctcacatccacaaatctctgattggaaagaagggacagcagaaaactgcttag

SEQ ID NO: 857862 - DNA, 100 bp, Homo sapiens
caagtactgcgccgactgcgaggccaaaggaatttagataatgggctgtgtgcaatgtaaggataaagaagcaacaaaactgacggaggagagggacggc

SEQ ID NO: 857863 - DNA, 100 bp, Homo sapiens
gattccattatggaggaagagaggcacaacactttcactgggcgatggctgaccaggttccaagccatgtgggatcctaaacaagaagactgtgtcatag

SEQ ID NO: 857864 - DNA, 140 bp, Homo sapiens
ctttaattcgccaggatcttataaaacaaatgctgctgctatgaatatgggtcgaccattccaaaaaaatcgctcgaattacatctttacaagaggaggtgaagcatctcaaacataatctcgaaaaagtggaaggagaa

SEQ ID NO: 857865 - DNA, 98 bp, Homo sapiens
ggcaatccgcttacttgcaatcaagggttcaggtgcaagcagatgctgactcagcctgttccattaagatcagccaaatggccgatgacacagtggca

SEQ ID NO: 857866 - DNA, 100 bp, Homo sapiens
acctctgtattcagcatagctattcctgttgatggtgatgaagacaggactatcctattaagtgtaatctcactgcttaatgagcccaacaccttctccc

SEQ ID NO: 857867 - DNA, 52 bp, Homo sapiens
tgataggagcaatcaattttggatgtgctgacatctgaaatgtttgaagcag

SEQ ID NO: 857868 - DNA, 98 bp, Homo sapiens
ggagactagaggctggataccaaatagcagtggaaaccgggaacaatggcaaaagcctttgatgaagcattttcctctgagacaacagcggcaatacc

SEQ ID NO: 857869 - DNA, 100 bp, Homo sapiens
atgcaggaagtagaacatgcattaagttcaggaggagatgaccgccgggttctgctatggcacatggaacaagccatccactccagggtcaagcccatac

SEQ ID NO: 857870 - DNA, 100 bp, Homo sapiens
cacccacgaatctgcccacccctcctgtaacccagcctgtttcacttcttgagcagtgtcccaagagacagcgaaaaccccagctcggagcccacagagc

SEQ ID NO: 857871 - DNA, 100 bp, Homo sapiens
catatagcctgaaggccagagttcttttactgtctcatcttgctagaatgaaaattcctgagacccttgaagaagcaatgccctgccctaaggaagacac

SEQ ID NO: 857872 - DNA, 100 bp, Homo sapiens
cccgggtcctcctagaaattccccccgaagaagactcccccacatctgggtagaacgtcatgacatgaataccttaagcctgcccctgaacatacgccga

SEQ ID NO: 857873 - DNA, 99 bp, Homo sapiens
atcccaaaattattgaaaacactcgaagggttcttaaatgtgaagtggaattgatggccaggatggcaaaaaccattgacagcttcactcagaatcaga

SEQ ID NO: 857874 - DNA, 100 bp, Homo sapiens
aatattaacctggccatggaaatcgctgagaagcacctggatattcctaaaatgttggatgctgaaggtgtactatattctctcaagatgtccttttggc

SEQ ID NO: 857875 - DNA, 100 bp, Homo sapiens
tgttaaggattccaagtaactcttatttgtatgaccagtataagactccaatggagaacattgggctacaggactcactgctgtcacgatttgacttgct

SEQ ID NO: 857876 - DNA, 98 bp, Homo sapiens
gtgaatccaggaagagagactgactgggcaacatgttattcagaaaaggcgagtcactataggcgacactggtctcgatcccattccagcagtacttt

SEQ ID NO: 857877 - DNA, 98 bp, Homo sapiens
aagatctctggaagcgattaatgataaaatttcgtggagaagaaggccttgactatggaggcgttgccagaggtgacattgtgattgcaaaaagccca

SEQ ID NO: 857878 - DNA, 151 bp, Homo sapiens
aaaggtcaccagtcccaagtcgtccccctctccgccccccaggaggggcgagagggagccgcagctgatgtcaggctgtgccaagaccttgtaccactcggtccatgaaaagatcttcacacttccaggagactgtctgatctaccctgct

SEQ ID NO: 857879 - DNA, 98 bp, Homo sapiens
cctgctgacagctacaacgagggtgtcaaggttggtgttcgaggaagagacattgttgttcttggtgtggagaagaagtcagtggccaaactgcagga

SEQ ID NO: 857880 - DNA, 100 bp, Homo sapiens
cccatctgtaactctctggctatcatcttcacactgattgttgggaaggcccttggagaagatattggtggaaaactgtgtaatgcatcttgaagaccgg

SEQ ID NO: 857881 - DNA, 100 bp, Homo sapiens
ccacgtgcagacatctacaaccttcgatctcctgacgacacgcactcctggctttaaagtttatacttgcatttgccatacctgataagccacggcatat

SEQ ID NO: 857882 - DNA, 100 bp, Homo sapiens
atacacctcccacctgtcctcaggcatatcaaagacctcacctccacccgcgacaacccagtcccctgaaagcactatggatacctcactgaagaaggag

SEQ ID NO: 857883 - DNA, 52 bp, Homo sapiens
gcaggcgcccgcggcagcgaacgactgcctcttcaaggtgtgccccatgaac

SEQ ID NO: 857884 - DNA, 127 bp, Homo sapiens
caagtcgcctgcagccgcccgaagagccaagagtcagtattccggccagcttcacgaagtcagagaggtcttcagaactactagcagataatttggggggacttcatattcagaagtctatataaag

SEQ ID NO: 857885 - DNA, 100 bp, Homo sapiens
ctcctacagcacctttggggagcgatatggcaggaaccagggcaacacctggcaatggaacccactatgaagtttagcctggcatcagtgttaaggcctc

SEQ ID NO: 857886 - DNA, 100 bp, Homo sapiens
ggttggcagagagcttacaagaggcctgtgttcagaaggccaatgatgaggccaatcagagtgatacaagtgtctccttgtcagaacccaagagcaaaag

SEQ ID NO: 857887 - DNA, 100 bp, Homo sapiens
atcatcagtccaaaggggatcccactgctaaaaaggaaatccttgcacgaggaattcttcttccattaataaatcaactcagtgatcctgattatattaa

SEQ ID NO: 857888 - DNA, 100 bp, Homo sapiens
agatctcgaggaagttctcgtcctgacagatctccagctattgaaggataaccagcccgagtcatgcagtcttttcgagaaaggtgtggtttccatggca

SEQ ID NO: 857889 - DNA, 100 bp, Homo sapiens
actagacccacagctgttaaagcaacaggtctattctggataagcaggttttgtgaagacatttattctttcttggacctcagatttaccagacatctca

SEQ ID NO: 857890 - DNA, 100 bp, Homo sapiens
cgacttgctctttcaaaactgcagagttgtgatctctttgatgagtttgacaaaaattgcaggtgctgcagtgtctgaaatttccgggcctttctcaaca

SEQ ID NO: 857891 - DNA, 106 bp, Homo sapiens
atccccaaccgcctgcgaaacccaagccgccgcgtaggagcgtgcgttcgggccctcttctcccacctgttcgttcacagccatgaatgaaccacagtgcttctac

SEQ ID NO: 857892 - DNA, 99 bp, Homo sapiens
tctcagaagagtgagagagagctattagagattgtgaagaagaatttcgatctccgccctggggtcattgtcagatgaatacgttgccagcttgcatct

SEQ ID NO: 857893 - DNA, 100 bp, Homo sapiens
gataagctcatcagcgtggaggacctgtggaaggcatggaagtcatcagaagctttgacagatccaaatgcttctgctgcccagcaggctgttctccagc

SEQ ID NO: 857894 - DNA, 100 bp, Homo sapiens
agaatggcagccagggcagcagagtcgggtgaacgtgggctgcgggccagccgaggagcgggtgctgctgaccggcctccatgctgtcgccgacatccac

SEQ ID NO: 857895 - DNA, 100 bp, Homo sapiens
gcaagttggataaaaggaggacctctcgccaagggccccaatgagtggcacacagtctactatcaccgacaggttgaattgaccaaagcaatggtgatgg

SEQ ID NO: 857896 - DNA, 99 bp, Homo sapiens
ttgaagtggcctatcccaggacaggtggcactctttcagggtgatcagcccatgacctaaacctccagacaaaataaaacggaaaatttgctagaatca

SEQ ID NO: 857897 - DNA, 99 bp, Homo sapiens
gaacagggacagcacctcatcccctggatgggggaccacaagatcctcatcgacagatgaaggcttgactattgacctgaagaattttagaaaaccagg

SEQ ID NO: 857898 - DNA, 100 bp, Homo sapiens
catcttttcagcaagcctatatcacatgtttatgttctatgctccctaatgaagatgctattaaggagttgattatggaagattcccacaagagtaccac

SEQ ID NO: 857899 - DNA, 100 bp, Homo sapiens
tcagtttcagccacgaatgatgggaatacaacaggatccaatgcaccatcaggtgccgtgagcgatgtggagatgcaggaacactatgatgagttttttg

SEQ ID NO: 857900 - DNA, 99 bp, Homo sapiens
gagcactgggggtggtgccagtttggagctcctggaaggtgctgcttacaagactttctcttggctaaaatgtgtgaagagtcagatacatgaaccaga

SEQ ID NO: 857901 - DNA, 100 bp, Homo sapiens
gatggggaccgccctggacatcaagattaaaagagcgaataaagtttatcacgccggggacccagatgatgtggtaccagttggccaaagaagagcctgg

SEQ ID NO: 857902 - DNA, 100 bp, Homo sapiens
tgaagaaatttctgccatggttctcactaaaatgaaagaaaccgctgaggcttatttgggaaagaaggaaggattacggccaggagatacaaccagcact

SEQ ID NO: 857903 - DNA, 98 bp, Homo sapiens
gctcttcttcatcaacatgtggcagaagtcatggctccgatcttcatcttgaagaagagtgacattgggtgactgctgcttggaaaactgtccacact

SEQ ID NO: 857904 - DNA, 51 bp, Homo sapiens
acgtagcccggcttgtattggggcacaggcaggatggccgatgctgacagg

SEQ ID NO: 857905 - DNA, 98 bp, Homo sapiens
tggaatcaggcagttttgtgtccatgtgaacaactgataaacgaagaggctggggacactgagaggacccagtcggcattggcactgagcagagcccg

SEQ ID NO: 857906 - DNA, 100 bp, Homo sapiens
tccagtgagagtgacacaggtcaggaagcagaatattccttatatggatgtgaagttaccccagatgtaaacatttcaggccaaaaatttaacattaaac

SEQ ID NO: 857907 - DNA, 98 bp, Homo sapiens
ggaggggaccgagaatcaaggcgttgagcctcaaggttctaaggcccagcagctactacaaggattgcaagccagtgatgaaagtcaacagcttcagg

SEQ ID NO: 857908 - DNA, 100 bp, Homo sapiens
taccaagaaagttgggtttcttttactggcaaatagtacttcaagagcacagtcttatgtaagtccgatacatacttctgcatgtctatgcgaataccag

SEQ ID NO: 857909 - DNA, 105 bp, Homo sapiens
actttggcaatatacctgctccaatgacagtaggaaatattcaggcatctcaacagaaagcgtggatacccatcaacgaagttttgatattggaattcagattgg

SEQ ID NO: 857910 - DNA, 100 bp, Homo sapiens
tctgcgttgctcttgcttttcctcgctggggtgtacggaagagaggatggtgatgcaccggttacaaaagatgagaccacctgcatttcacaagacacaa

SEQ ID NO: 857911 - DNA, 98 bp, Homo sapiens
cagcagtgcccagatccccgacacaatggagtgagcgaaggagacgagcaggttgtgccagcgccaggctcaaggatgtccaatcaatggatgagctg

SEQ ID NO: 857912 - DNA, 100 bp, Homo sapiens
cgcctggcacccacttagccaaacaggataaaattgtccatggaccacgtgtgccttggtcactactgaagagctgcctcctggaagcttttccaagtgt

SEQ ID NO: 857913 - DNA, 98 bp, Homo sapiens
gtacctagagaatatatatcctgattctcaaattccacgtcactatttctcattgggagagtctggcaagttctccggcagttctccggcgcccccaa

SEQ ID NO: 857914 - DNA, 98 bp, Homo sapiens
gggtgcgaggtcgagtaccttccctgtcccatcgcaaacccaaagatccccgttcctggagattctgattgagctttcagaagaattattagataaat

SEQ ID NO: 857915 - DNA, 100 bp, Homo sapiens
gatgaagcttccaaaatcaccatttggaaggaacagtacagagttgtacaggaggaaaaccaggctcatccaaaatacttgagttgtattgcaatcagct

SEQ ID NO: 857916 - DNA, 98 bp, Homo sapiens
ctgaggccgaggcggagaaggggcttcctgagcgtcccagtacactgacagaggtgacgcatccaaagaagacattgacactgctatgaaattaggag

SEQ ID NO: 857917 - DNA, 100 bp, Homo sapiens
gccgccgtcggcagcaagaacagagagagaggtggacagatctgagagatactgagaccattgccctcttgaacatttaccgtaaccctcaaaactcttc

SEQ ID NO: 857918 - DNA, 100 bp, Homo sapiens
ccacggacctggaaattctcgcctgtcttcccttcacccagagcaaattgagacgtcccgtgccacccagatagcctcacaaaactttgacccagccact

SEQ ID NO: 857919 - DNA, 100 bp, Homo sapiens
catgccacatattaagacatatatgaggccttctccagacttcagtaaaattgcttggttccttgtcacaaggtgtagaatgagccaaggagactcaaac

SEQ ID NO: 857920 - DNA, 98 bp, Homo sapiens
agggtcaaatcagtcaacctagaccaatggacagcagaacagatacaggtaactataactacccaatattgcagccatggagtccatgcttaataaat

SEQ ID NO: 857921 - DNA, 98 bp, Homo sapiens
gaaaaattggaagctccaccacccaccccaggacagctgagatatgatttattcctgacgacattgaatgccaccactagtaccttccagtttgaaat

SEQ ID NO: 857922 - DNA, 100 bp, Homo sapiens
tacgaattgaaaaaggaaccccaaaggagtcgattcttaaaaactctgcttctgttgcatgtgatagtgatggaagatatgctgaaagactttctccttg

SEQ ID NO: 857923 - DNA, 100 bp, Homo sapiens
gcagattttaatttcagtgactgaattaaaaggtgtcaagaagctcagaatgcctaccgtatgtgaacgggagctgtgtgtgtttgcttttcaaaccctg

SEQ ID NO: 857924 - DNA, 100 bp, Homo sapiens
gacttggtcccgtcagccggaccccacctggacggctggggccacttgtggtcgccgggaggaaccctaaggactctgcaatatgaataattccctagag

SEQ ID NO: 857925 - DNA, 98 bp, Homo sapiens
tgcatctgctcctgcaagactctggagccagtcttgaggtcctacatctccgaaagcaagctcttctagaagttggatccactagttcctggactatg

SEQ ID NO: 857926 - DNA, 100 bp, Homo sapiens
ccgacccgggccccgccatgtccttcttccggcggaaagatggtggagccagggcaagatttactgcttgctgctttgagtgagagtggaattagtccga

SEQ ID NO: 857927 - DNA, 100 bp, Homo sapiens
tcaaagaccaggttcaagggtctctccagaaaatcttgtggacaaatccaggggaagatctgactgcagccatgagcagcaatgagtgcttcaagtgtgg

SEQ ID NO: 857928 - DNA, 100 bp, Homo sapiens
aagcgggaaagacaccacacattgcgcagtcgggaccatcgccggagcctgaggacacttctctgtcgtcacagttagattggtggaacgagaatgccta

SEQ ID NO: 857929 - DNA, 99 bp, Homo sapiens
cagagagcccaacgcctggtgctcaagactttctccgaggcaatggtggcttgctatccgggaaatggaacaggttatgttcgccacgtggacaacccc

SEQ ID NO: 857930 - DNA, 100 bp, Homo sapiens
ggacttcggaatgcactacaacaggaaaatcatattatagatggagtaaaggtcaatgagagtgaaatggctgtggcttctggccacctgaacagtacag

SEQ ID NO: 857931 - DNA, 99 bp, Homo sapiens
atttccagtatctatgcacgagaggccctcattgagattgactacggtgatctgtgtgaggatctgaagagacaatggacctcagatagcctatgttcg

SEQ ID NO: 857932 - DNA, 100 bp, Homo sapiens
atgctgctttcaatgacctctggagacttgacctaaacagcaaagagtggatccgacctttggcttcagttctattgtttccaccctgctagctcttatg

SEQ ID NO: 857933 - DNA, 98 bp, Homo sapiens
gattatggacccggccgaggcggtgctgcaagagaaggcactcaagtttatggtggaagttaaacgagctgagcctcgggacagcaagagccaagcgc

SEQ ID NO: 857934 - DNA, 100 bp, Homo sapiens
agatgacgccacattaaccctttcattttgtttggaagatggaccaaagcgatacagacatcgtctccgcgctggaggaccgtctcaggcccctggtgca

SEQ ID NO: 857935 - DNA, 100 bp, Homo sapiens
tcgtcttcatccagggcatcgtttgtccacactagaaattgaaaatagagcccaagaccttcatctctttgagactttgaagactgatccagaagccttt

SEQ ID NO: 857936 - DNA, 98 bp, Homo sapiens
tcgaatcacttaaaggagtggacattgctagcaatgagctcccaaagccatccagatctggacgttggtggttggctatgtgttgactgtttcattca

SEQ ID NO: 857937 - DNA, 99 bp, Homo sapiens
acagcttcagttaatgaaaatgggctaggtaatggaacttaatcgatctgagagtttatgtcatgaaaactcattcttcatcaatgaagctttagtaca

SEQ ID NO: 857938 - DNA, 129 bp, Homo sapiens
gccaccatccacgccagccgcaccatgccgctcctaagcctgcacagccgcggcggcagcagcagtgagaggttcacttcttaaaagagggatgtggagacgacaatgtatgtaacagcaaccttaaac

SEQ ID NO: 857939 - DNA, 100 bp, Homo sapiens
ccgaggcggagaaggggcttcctgagcgtcccagtacactgacagaggctggaatcgatggagaaagcatcggcaactgtcctttctctcagcgcctctt

SEQ ID NO: 857940 - DNA, 100 bp, Homo sapiens
gaccgagcgcctcgacctcggtctgagcccgctcccaaaagacttcaggcattgggcgcctgatggtgcatgtcattgaagctacagaattaaaagcctg

SEQ ID NO: 857941 - DNA, 99 bp, Homo sapiens
ggacctacatgcttcctgctgtggctgtctcggaacccgtggtcctccgcttcatgatgttcacgtcccagtatgcccactctgtaatacccccatccc

SEQ ID NO: 857942 - DNA, 100 bp, Homo sapiens
tgcagacatgcttcaggctcctctctttactgctgaagctttacttcgagctcatggtttcagtgttgactggtgggctcttggagtgctcatgtttgag

SEQ ID NO: 857943 - DNA, 98 bp, Homo sapiens
ttgccttggaaaatgccaacgccgtgtctgaaggttccatcaggcttgttcatccccagcatggccattggagcgatcgcaggaaggattgtggggat

SEQ ID NO: 857944 - DNA, 100 bp, Homo sapiens
caacctcagaggacaacgaagtgttcgtttgtgaagaaatatgggaacctttttagcttggagcttggtgacatatctgcagttcttattactggcttgc

SEQ ID NO: 857945 - DNA, 98 bp, Homo sapiens
gatggcgagaggctgcggctgtaccaggtatgacgctgggcgggatggcttcatcgacctgatggagctgaagctgatgatggagaagctgggggccc

SEQ ID NO: 857946 - DNA, 100 bp, Homo sapiens
atctgggcaacctcgggcagtaggtacccttactgttggagatctagtaatggtgaatggactgctttttcagctttcattacccctgaactttctggga

SEQ ID NO: 857947 - DNA, 100 bp, Homo sapiens
gcccagagagccctgacccggggtcactccgtcgccgttctcctcttgtctacgtgctggacccgggtcatctagtagcaggcacccaaatcaggcaact

SEQ ID NO: 857948 - DNA, 115 bp, Homo sapiens
ttggtgctacttcttgctatgttggagacaatactggcagatgattctggaccagatgaagcctgaggagccttccagctctaagatagcaggataggagacttctaagattgga

SEQ ID NO: 857949 - DNA, 100 bp, Homo sapiens
catacagtgacaacaggacatcaggaaatgcccaagaagggaagaaacccttttttcttggagccagcaataattatcacaattactgatgggagcaagt

SEQ ID NO: 857950 - DNA, 98 bp, Homo sapiens
gacaagttggtatggcgtgtgctatcagcattctgggaaagtattgtgcttctgctaagccaaaaacaggcacttgaagaactgaaacagtcagtcca

SEQ ID NO: 857951 - DNA, 99 bp, Homo sapiens
aaacagtcggcctatgactcgaagaatcagttgtctggaaacctgctgaggaaattcaaaaacagcaacgggtggcagaagctgtgggtggtgttcaca

SEQ ID NO: 857952 - DNA, 99 bp, Homo sapiens
gaaattgaagctcaagaaggtgaagatgatacctttctaacagcccaaggaagcaaaggtgtctaccagtaccactggcaaagccacaatgtcaagcac

SEQ ID NO: 857953 - DNA, 99 bp, Homo sapiens
ttcaccatcattgactccctctccctgtccctcttcacaagagcaagatcttgtgcaaaccctgagttgtttgtctatgataatcacacctgcatttgc

SEQ ID NO: 857954 - DNA, 100 bp, Homo sapiens
gtttggaggatcaatgctggcttccacggttgctgaaaagccaggagtcaaaatgactgagcgctttgactgccaccattgcaacgaatctctctttggc

SEQ ID NO: 857955 - DNA, 98 bp, Homo sapiens
ttaatcagtgactcaaagctgtgatcaccctgatgtcaccgaatggccacagcttgtaaaagtattgctgacagacagaacgccttggaggctgagtg

SEQ ID NO: 857956 - DNA, 101 bp, Homo sapiens
tatcacaaatgaatccaaccagccacagatactattaggagggttttgtaatcaacccccctcagcatggtcctctcatcccccgactggtaacgaccaag

SEQ ID NO: 857957 - DNA, 99 bp, Homo sapiens
ggagacgcccgaggacagggaggtgcgtctgcagctggcgcggaagagtgaacagcctatcccgctccaagtattgttaagccaagaggcccaactgga

SEQ ID NO: 857958 - DNA, 100 bp, Homo sapiens
ccgaggtcttcgggaattccagcgagggcactactgcagtcttcagttaagcaacaagtagaagctattgaaaaacagtacatttctgcaattgagaaac

SEQ ID NO: 857959 - DNA, 100 bp, Homo sapiens
cgtcgccgctggggactgggaaatcagggcatcggagagtgccacattaatgggttcaatggatccaaatgacttcctgagggaggcacagataatgaag

SEQ ID NO: 857960 - DNA, 100 bp, Homo sapiens
atggctctggtgctctgggaaatgacatctcgctgtaatgcagtgggaggatgacatgcacttggtgataagaaagcagctctctagcaccgtattcaag

SEQ ID NO: 857961 - DNA, 100 bp, Homo sapiens
acaagttcaccccgaagtctgccgcaccggaagcagtactcagaacaagtcatacctaatgctgcaggaaacatttccaaacgtgtatgaagatacatat

SEQ ID NO: 857962 - DNA, 98 bp, Homo sapiens
gcagttcaggggctgggcggctgaggtcagttcaccgggacctggaggcccagattgcgatcgtgacggagaaccaggccctgcagcagcagcttcac

SEQ ID NO: 857963 - DNA, 98 bp, Homo sapiens
aaagcctggtccacgccgtggccggagccgtggctgattcaccccaagagtggccgttcctaccacgaggagttcaaccctccaaaagagcccatgaa

SEQ ID NO: 857964 - DNA, 100 bp, Homo sapiens
aattcagcccctcttccagataccatttggctttcggctgtgcaggtgagcccattggcaggggtaccaaagtgatcctccatcttaaagaagatcagac

SEQ ID NO: 857965 - DNA, 98 bp, Homo sapiens
aggatatgctgtattcagctcaggaccaggcaccttctgtggaagtgcgacttcatgatagcatatcagaagagggctttcactacttggtgtttgat

SEQ ID NO: 857966 - DNA, 100 bp, Homo sapiens
tgaactagtagatagagccaaacaatcttttcaaggttgatgataattagaagcatgctttccactgaacttcccgacaacatttgttatgcagaatgtc

SEQ ID NO: 857967 - DNA, 99 bp, Homo sapiens
tctcatgaggaccctgggaatgtttcttattctgagattggagggctatcagaacagatccgggaattaagagaggctcaacagtcactggagcttatc

SEQ ID NO: 857968 - DNA, 99 bp, Homo sapiens
aggagccgcggcggggggaaaatggagcccttcaccaatgagttgtctgctggttctcagcttgaagaagattctgcagtccttattgatcctttttct

SEQ ID NO: 857969 - DNA, 100 bp, Homo sapiens
aagtgtggttcagggccagtgcatattagtggacagcacttagtagctttagcgtcacctccctcactgggcagcatgggggagaagtcagagaactgtg

SEQ ID NO: 857970 - DNA, 100 bp, Homo sapiens
ctggagttgagacagacgactgggatggaccagcaccaccatctccaccctgtgatatcacctgtcttgaaagttttcgtgactcaatggttcttggatg

SEQ ID NO: 857971 - DNA, 99 bp, Homo sapiens
acaaatgtttttctgttttgcctgaatacatgatttaaacaagagatttccacagaagaaaagcatcagatttttctttggaagcatctgtggctgaga

SEQ ID NO: 857972 - DNA, 100 bp, Homo sapiens
cgggacgccatgtccatggaggaccccttctttgtggtgaaaggctgtatttaaacttgaaacagatagaagtatatggcccttgataagaatctatcgg

SEQ ID NO: 857973 - DNA, 99 bp, Homo sapiens
tttgatttttggaaggatatagttgctgctatacaacacaattataaaatgtcagcttttaaggtttccacggccactccagtgccaacagccaattct

SEQ ID NO: 857974 - DNA, 100 bp, Homo sapiens
cagcccgaggacaagcggctgccccagctggacagccacctttgacccagtgcctacagatgccccgaccagcccccgagtctccggggaggaagagctg

SEQ ID NO: 857975 - DNA, 100 bp, Homo sapiens
caaagtgctgttattacaagcatgagccacggtgcccagccaccaccaggcctactgaacttgacgcactggtatttggccatctatacaccattcttac

SEQ ID NO: 857976 - DNA, 50 bp, Homo sapiens
tctcggcaggctcttcgggaagggtggaatgaatcttacttgttgaatat

SEQ ID NO: 857977 - DNA, 98 bp, Homo sapiens
aagcaagctcttctagaagttgagaccatgaaccaggcatctcctgctagaaagctggaagagattcttcatctggcagagctctgcatagaagtctt

SEQ ID NO: 857978 - DNA, 100 bp, Homo sapiens
tcccgaatcagcttcgtttggttccttggccaagctataacatcagaaatggtgaatgaatacaagaaaattcttttgctgaaaggatttgagctcatgg

SEQ ID NO: 857979 - DNA, 98 bp, Homo sapiens
tcttctcgcctcagcctcctgagtagctggagctacagaatggagatttacagacagtcatctgggtggaggacacccttttgggatcagcactgaaa

SEQ ID NO: 857980 - DNA, 100 bp, Homo sapiens
aagaacctgggcaacagctgctatctcagctctgtcatgcaggccatcttcagcatcccagaattccagagagctgcatctgggggaggtgttgtagcca

SEQ ID NO: 857981 - DNA, 100 bp, Homo sapiens
ccgagaatgggttctccctggaggaagtgttacggctcggaggcaccaagcaacgaagtggtgaatctgttaaagtgcaccaactagatgttgccattcc

SEQ ID NO: 857982 - DNA, 100 bp, Homo sapiens
gaactaaacaaattcatcccagaaatctaagagctcagcaaaacccagcagctcagattcctgccaggcagcgggagattgaaatgaaccgacagcaacg

SEQ ID NO: 857983 - DNA, 100 bp, Homo sapiens
tcatgattaaggaagaagtggatagttccgtgaagaagatcaaagctgcctttgctgaattacacaactgcaaagttccaatggtcctgtaaagaagtcc

SEQ ID NO: 857984 - DNA, 100 bp, Homo sapiens
aaaagagtgtgttgtgaacgaagtcagaatttcctgtgttccctttgccgctcctggagttcactgggtgtttgtgaaccgaagtttagcaatggaaaag

SEQ ID NO: 857985 - DNA, 100 bp, Homo sapiens
gaccagaatctagaagagccatccagatatgcacagactgtggggctcccagtgaccatgcattcaccgaacatgaggctgctgcgatctgccctcctcc

SEQ ID NO: 857986 - DNA, 100 bp, Homo sapiens
gacaagcacgagggcgcgctcgagacgctcctgagactgcctgcgctgctgacttaaggccccaacaccaaacacagaagcaacagccttacacagagtg

SEQ ID NO: 857987 - DNA, 100 bp, Homo sapiens
tcaggagtgtttggattccagatttgtattcgatagaccactgcctgtgtctcgtcttgtatctctaattggaagcagctattcaagatctctggcagtg

SEQ ID NO: 857988 - DNA, 100 bp, Homo sapiens
acttcatgcatttgaagcccatttccagagagctgcggcgggagctgtatggccgccgtcgcaagaaatgataccacgagtcaacccaaaagttgctggg

SEQ ID NO: 857989 - DNA, 99 bp, Homo sapiens
gaaaagtcacaaactccttcacactgcagatggaaataatgaagatgtttcattttcaagaccagcagatcttgaccttattcagtcaactccctttaa

SEQ ID NO: 857990 - DNA, 100 bp, Homo sapiens
cggaagtattgacggaaagcttgaattacctacatgactgctgtggatgtttttcgaaggataattttggaggcagaaaaaatggacggggcagcttcac

SEQ ID NO: 857991 - DNA, 100 bp, Homo sapiens
gatgcttgtgggagattcttttgccagacattactacttcctaggcagaatgcttggaaagcatcgagagtaaacatgaggttacgatcctgggaggact

SEQ ID NO: 857992 - DNA, 100 bp, Homo sapiens
ccgcatcccctcttattcaagaagcatctataggagtctactcttcatcttgtgttgagacttcgtggtggtgctaagaaaaggaagaagaagtcttaca

SEQ ID NO: 857993 - DNA, 99 bp, Homo sapiens
tcagccttacaagtggcgggggaaagcacacaggttacaagaggacccacctgtgggtgtcagtggcgcaccatctgaaaacaacatcatgcagtggaa

SEQ ID NO: 857994 - DNA, 100 bp, Homo sapiens
ataggaacctggtctccctggatgcctgaggaagtgcaccatggagaggaggaggtggagacttttgcctttcaggcagaaattgcccaactcatgtccc

SEQ ID NO: 857995 - DNA, 99 bp, Homo sapiens
tggggatcgctacggaccttaaaatacccgcaacagccccttcgtcccaagaacgtcaaggtcgtgggaaataaaaggcagttctacacagactgcagc

SEQ ID NO: 857996 - DNA, 100 bp, Homo sapiens
cctccaggtgacagcaatcagctggcctggtttgatactgacctgtaaatcatcctttagagcgcatcagcgaggaggtggggctgctgcagctccttgg

SEQ ID NO: 857997 - DNA, 98 bp, Homo sapiens
ctttattcatcgactcagtcagtctcttggtttggtctctaaaagtaaagggcttgagaaagagatccaagatcttgaaaaagctgaactgcaaatct

SEQ ID NO: 857998 - DNA, 100 bp, Homo sapiens
ttctacgtcttaaggcagagaatagccaggataaggtgccagctcaaaggtgccttagctggaccaattattgtggagccacatgtcacagcagtatggg

SEQ ID NO: 857999 - DNA, 98 bp, Homo sapiens
atcacaaacactcagagtggaaaaagtaccatcatttgaaacaggtgacgcatccaaagaagacattgacactgctatgaaattaggagccggttacc

SEQ ID NO: 858000 - DNA, 100 bp, Homo sapiens
tcggaaccgagccccgacaggctatgacgtaccgattacacctcaacaagaaggcaactgacaaacagccttatagcaagctcccaggtgtctctcttct

SEQ ID NO: 858001 - DNA, 100 bp, Homo sapiens
tgatgctattaacttcgtagacgagggacagatatggcttttctaaagactgctttggaaatggcaagaacagcagtatattccttacacaaatcctcaa

SEQ ID NO: 858002 - DNA, 100 bp, Homo sapiens
cagatttagacgtagacgtttccgaggacgcgagactgcagagagcttctttgaagggcagtctgcaccatgggactcggctaagaaagatgagaacaga

SEQ ID NO: 858003 - DNA, 98 bp, Homo sapiens
gtcgaggaccgagtcaggcagctgcatgaagcccacagggactttggtccagcatctcagcactttctttccactatgtgttctcatttcacccaaga

SEQ ID NO: 858004 - DNA, 118 bp, Homo sapiens
gcgactctggcctctgaaacactaccactgctggcgctgaccttcatcacagacaacagcctggtggcagcgtgggctcgggatgagtttgaaggcctcttcaagcagccagcagaaa

SEQ ID NO: 858005 - DNA, 98 bp, Homo sapiens
ttggaagttgttttcaaccatatccagcctttgccgaatacatcctatctgccacacatccagcgtgagagggtgatgagactggtgtgatggataat

SEQ ID NO: 858006 - DNA, 100 bp, Homo sapiens
agctaccaaagacgtagaaagaaatcttagcaggccctgctacccacaaggcgctggtttaataccatcctggatgattcccaccttctggttcactgtt

SEQ ID NO: 858007 - DNA, 99 bp, Homo sapiens
agaaatctcacattgccctggggactgagtcagagctgcagaaccacaggcctacaggacatctgtctggctactgaatttcttcacatggctcctgga

SEQ ID NO: 858008 - DNA, 100 bp, Homo sapiens
gggtcagacccagaggagaacagccctggtattgatgtcaccacagagctggacagctggattgacaagttttgtctggatgctgatgtgtttgtgctgg

SEQ ID NO: 858009 - DNA, 100 bp, Homo sapiens
cccgttgtgtttgtgaaacagagaaagataggcggccatggtccaaccttgaagggatacccacccaccatcccagggtctacaacatccacagccggac

SEQ ID NO: 858010 - DNA, 99 bp, Homo sapiens
ggaagagggttggaggcaaagttccgaatagggatgaggcatacgtgagtgcttgtgatttcacgtatttttgctgaactcgtaaaagagacacttgga

SEQ ID NO: 858011 - DNA, 99 bp, Homo sapiens
tgaagtatccagcgctcattgggaatttagttaaggtgaacggggtctgcatggaggggaagcagcatggggacgtggtgtccgccatcagggctggcg

SEQ ID NO: 858012 - DNA, 98 bp, Homo sapiens
cggactgagcagccaaagcttgacagagaacactgagctgaaggttgaagtggagagcttgaaacgagaactccaggacaagaaacagcatctggata

SEQ ID NO: 858013 - DNA, 100 bp, Homo sapiens
cagcaaacgtctacactgtacatgctttttattacaagactacggagcataggaggaaaattcatcatctgggtgtgagatggcagacaggtttgcagga

SEQ ID NO: 858014 - DNA, 99 bp, Homo sapiens
ggaaatccttcggatggtgaactcattagaaaacctgcacttgttgccaagtcttccatcttactagatgtgaaaccttgggatgatgagacagatatg

SEQ ID NO: 858015 - DNA, 100 bp, Homo sapiens
gtagtgtggctggtatcggtgttcccctggtttaactagcctgtttggtacctgtctgaccttcatgcgtctggtgaccctgcttggcaatgcattggag

SEQ ID NO: 858016 - DNA, 100 bp, Homo sapiens
catgaaagcacatgtttcagtgccactcacataagaagtgcccgacctagaggatcaagacataatgggagcatttttagacaagccaaagatggaaaag

SEQ ID NO: 858017 - DNA, 99 bp, Homo sapiens
gaagggtgaggaggatgagggtgaggagaagtatgaggtggtgaaactcaagatccccatggacaacaaggagcctgaagcaggacattctaaatgaaa

SEQ ID NO: 858018 - DNA, 100 bp, Homo sapiens
agctcgctgcctctcatcaaggccatcctgacagctgccatcgtgggtgttgagatctgcatagccactcctggacgtctgatagatttcctggagtcag

SEQ ID NO: 858019 - DNA, 99 bp, Homo sapiens
tgaggcctccccagccatgcagaactggtatacctcagttaccatgtgccaaagcattatacaactatgaaggaaaagagcctggagaccttaaattca

SEQ ID NO: 858020 - DNA, 121 bp, Homo sapiens
gtgaccatcgaaaggagcaagagcaagatcaccgtgacatccgaggtgcctttctccaaaaggtgtgtgcagtggcctcagggatccggaaagtctaggactgaacttctcctaacatcca

SEQ ID NO: 858021 - DNA, 100 bp, Homo sapiens
ccagtgtgcagcaggctacgagcaaagtgaacacaacgtgtgccaagtaaaagaatgtgtggatcatttaagtagagatgaggatgaagagaaactggta

SEQ ID NO: 858022 - DNA, 100 bp, Homo sapiens
gccatcactgagaaatctggattttcaaggagatgagtatgatgtatgtgccatttgtttggatgagtatgaagatggagacaaactcagaatccttccc

SEQ ID NO: 858023 - DNA, 100 bp, Homo sapiens
aaaaagatgcacggattggagaagcagaggccaagagagatgctgggatccggcgtccagaggaccagaggttaatttattctgggaagctgttgttgga

SEQ ID NO: 858024 - DNA, 100 bp, Homo sapiens
gaggaggctggagattccacccaaatcctcttctccaagaaggctatcgccccattccagcggagacttatgtaggagggaccttccctctacctccccc

SEQ ID NO: 858025 - DNA, 100 bp, Homo sapiens
ccaatgtcattgtgacctacaaagggaccctggcagaagtcagagctgtacaggaaatcaagccgggagaggaggtctgccatgtgaatctggaggggca

SEQ ID NO: 858026 - DNA, 100 bp, Homo sapiens
tggatgtgatgcctgctagccaaaagggtacctggaatggaaacacaaaagtagccataaagactcttaaaccaggcacaatgtcccccgaatcattcct

SEQ ID NO: 858027 - DNA, 101 bp, Homo sapiens
tgataactcaggatttacttgaaacaaaaggagaccctaatcttcagatcatcacgaagtatgtatatgagctcctggaaaaggattgtaatttgaaaaaa

SEQ ID NO: 858028 - DNA, 100 bp, Homo sapiens
tctttgattgaatacttacataatgcattggaacatgacatgagattaaggacccagatgatgtggtaccagttggccaaagaagagcctggtgttggtg

SEQ ID NO: 858029 - DNA, 100 bp, Homo sapiens
aatccccaatgttctgcgccgcattcgggagtctttctttcgcgtggtgccgcaatggagatgtatgcatttcgattcttcatccgcctgtagatgaccc

SEQ ID NO: 858030 - DNA, 100 bp, Homo sapiens
ttcaaccacctcgagcggctgctggacgaaggtaactgtgacatttgatgatgtggccttatatttttcggaacaagagtgggagatcctggagaagtgg

SEQ ID NO: 858031 - DNA, 98 bp, Homo sapiens
atctgctggatttccaggggaagcaacagaacaagcatgtgttcttttttgacaccaaaaaggaagccatgcctttcttggacatccagaaaaggttc

SEQ ID NO: 858032 - DNA, 98 bp, Homo sapiens
gggcctctgcattgcccgactccgtaggagcgcgggggcggctcctgctcttcctggactcctgagcagaggtcattaaacagctgatgaaaaaggaa

SEQ ID NO: 858033 - DNA, 98 bp, Homo sapiens
atccgtagatcttgaggactggatggatgttagcctggtgcctgccttcaatgtcctgggcattgaagttgatatcgatgtggagcacggagggaaaa

SEQ ID NO: 858034 - DNA, 100 bp, Homo sapiens
cgacaacatggaggccgtgaagaccttcaatagcgaggctccatctactctttgaagcttctgcccagcttgcattgtttctaggagaacctgcgtcata

SEQ ID NO: 858035 - DNA, 139 bp, Homo sapiens
tgagtcaggcgcctcagcacggggacccccgggccggccttcacgccgcagagccgctgcagggaaacactactatgaagtatcctgtcatgaccaagggttatgcagggtcgggtggtctaccatgcaggcctctttg

SEQ ID NO: 858036 - DNA, 100 bp, Homo sapiens
gagcaatggggaacgctcacggactgtgtggaggagatgttaaagtaacccatcttgcaggacgacattgaagattggtcttctgttgatctaagatgat

SEQ ID NO: 858037 - DNA, 98 bp, Homo sapiens
gaattgcaattatagcaatggtgacagcagaagaggaaatcataagtgcgctgccatttgtcaagctttccttagatgacttcccagacaacaaagac

SEQ ID NO: 858038 - DNA, 100 bp, Homo sapiens
agcgcgtcccaggaggagcaggacgaggagactacatcaatctgttcagcaccaagtgccatggctgcgatttccccgtggaggctggcgacaagtttat

SEQ ID NO: 858039 - DNA, 98 bp, Homo sapiens
gcttttccggcagttttgtgaaaccaggcctgggctggagtgttacattcagttcctggactccgtgatctaaccatgagctaccctggctatccccc

SEQ ID NO: 858040 - DNA, 98 bp, Homo sapiens
agacaagttccatcccacctttgagtcagggctgctgcaccgagccttcagcgttgtcttgtttaacaccaagaatcgaatcctgatacagcagaggt

SEQ ID NO: 858041 - DNA, 100 bp, Homo sapiens
ctgaaaatggggcggaagaaaatacaaatcacacgcataatggatgaaaggaaccgacagagagtgattgactgcctggaggatgagaaggcaaccctca

SEQ ID NO: 858042 - DNA, 100 bp, Homo sapiens
aaagaaggcaaggagagaatgtatgaagaacagtcacaggacagacacgatgaggcgagtggtacgacagagcaagtttcggcatgtatttgggcaagcg

SEQ ID NO: 858043 - DNA, 100 bp, Homo sapiens
cttgatatggtggaggacacagaaggctctgtgtggctgcacagtgaacgtccccactctggacggcaggacgatacccgtcgtattcaaagatgttatc

SEQ ID NO: 858044 - DNA, 99 bp, Homo sapiens
gcttcatgccagcattatggtgtccgcacatgtgagggctgcaagggcttcttcaaggtcttcaaagcttcacctttctccaaaggcagatgtgaagaa

SEQ ID NO: 858045 - DNA, 50 bp, Homo sapiens
gccctgtaggctggagggactgtgaggtttgagtcctgctggccggccct

SEQ ID NO: 858046 - DNA, 98 bp, Homo sapiens
gaacatcgaaatcgtgtatttcatgatttccgaaatggcttatgccgcaatcttgtttgcactgacagcaactctggaaagtggcttctaactcggcg

SEQ ID NO: 858047 - DNA, 99 bp, Homo sapiens
actcactctacgtggagttgggccctgcaggaaggacggacttcaggggcagatcggggctgctagtcgcatacccggagtaacacctgccgccatcat

SEQ ID NO: 858048 - DNA, 100 bp, Homo sapiens
ggtttggtgacaatagaaagaaccagcttaaagatatggctattgctactggtggtgcagttacatatgaggataacttaaaacattaagctatgcataa

SEQ ID NO: 858049 - DNA, 98 bp, Homo sapiens
tgatgctggagaccttgacacttatatcctccctggggcgtctctggccgagcctctttttgtggaaaacgacagcagcagcagtggcctggaagacg

SEQ ID NO: 858050 - DNA, 100 bp, Homo sapiens
ggcagtttccagtggcagcagtacagcattactttatagcaaacgactgatgaggtggaaagtgagaaatggtacctgtctacagacttcccttcaacat

SEQ ID NO: 858051 - DNA, 100 bp, Homo sapiens
caacaacttcatccagcccttatacaaagacctttcgggcaggtgacaaacattaccaccccagctgtgcacgatgcagcagatgcaaccagatgttcac

SEQ ID NO: 858052 - DNA, 98 bp, Homo sapiens
acagctccagggaaggcactcaaaagtggggggcaggaaaggggcggagaaactcatcatccacctgcggaaacatggcatcccctttgcactggcca

SEQ ID NO: 858053 - DNA, 100 bp, Homo sapiens
gaggagaccatagctgcacagccagggcccagacagaagagaagagtcacatcatctagatgatgaatgaaaagatatgtcattattctcctttgggcag

SEQ ID NO: 858054 - DNA, 100 bp, Homo sapiens
agtcagctgcaccactgcgatccctacggacttgtcttacaaggaccggcactggcatgaagcctgtttccactgctcgcagtgcagaaactcactggtg

SEQ ID NO: 858055 - DNA, 100 bp, Homo sapiens
tgataaatgcaaaacagtggctgttgcaggtccctccttgtggtccatttctgggcaccatgggctccacagtgtgcacagatgaacgaagttatggcag

SEQ ID NO: 858056 - DNA, 100 bp, Homo sapiens
gtcattgaggacaagtcgacgagagatcccgagtacgtctacagtcagccttacgagaaagcttcttgctatctacctccaccatgatgaaagtgtgtta

SEQ ID NO: 858057 - DNA, 95 bp, Homo sapiens
ttaaacctgaaccagaagatcgagagcctaactttgcaaccattggtctgcaggacatcactttagatgatggtgtggtggctcacgtctgtaat

SEQ ID NO: 858058 - DNA, 100 bp, Homo sapiens
aaattcccttatcgatattatgagagcagagcatgatcctcttaaggggccttaaagcggctgacaatgaccccacagctccaccatatgactccctgtt

SEQ ID NO: 858059 - DNA, 106 bp, Homo sapiens
tgcagtgtcttcagcgcattgctacctaccggctagccggtggagctcacgtttattcaacaggtgcaaccttgacatttttgagttctgatcatctcagccttcc

SEQ ID NO: 858060 - DNA, 98 bp, Homo sapiens
cacatcgtggagatggacaggagacctggaatcattgttgatacattccaccgttgatctgggggaaaagtggacacatccagacagccttgtatggg

SEQ ID NO: 858061 - DNA, 98 bp, Homo sapiens
gactaccagggactctttggggtgaaatgtgaggcgtgtcaccagtttatcacagggaaagtcctggagtcaatcctttcccatggtaccgtggcaga

SEQ ID NO: 858062 - DNA, 100 bp, Homo sapiens
gaaatcaaaactctcaaatatccactgagaaagtgaatcaactccagagacaatgatcttccattgtttgaagcactggacctttaatccactgtaggta

SEQ ID NO: 858063 - DNA, 100 bp, Homo sapiens
atttgttaaggattccaagtaactcttatttgattccaacaatgtctcacccatcttggctgccacccaaaagcactggtgagcccctcggccatgtgcc

SEQ ID NO: 858064 - DNA, 60 bp, Homo sapiens
agcgtcccggcgccgtcgcgccactcctccgaattgcaaatgcacaagattcgagaccta

SEQ ID NO: 858065 - DNA, 100 bp, Homo sapiens
ccccatttgaacaagcaaagaaggtgataaccatgtttgtacagcgacagaagagcttaaagcagcgcctgggtaagagtaacatccaggcacggttagg

SEQ ID NO: 858066 - DNA, 100 bp, Homo sapiens
cccacttcgccccggcggctcgccgcgcccacccgctccgcgccgagggctggaggatgcgttccctggggtccgggaatagccaggccagaagaaggaa

SEQ ID NO: 858067 - DNA, 98 bp, Homo sapiens
agagagaaagaggaggggaggaggaggaggattcagggaataggagctggggagcccttctgcgccacagccaagaagtatgatgcgtttttggcctc

SEQ ID NO: 858068 - DNA, 100 bp, Homo sapiens
gtactttgttacaggatctgccgaaggcaatataaaggatgtacagattatagtgtttccagaagatggcattcatggattcaactttacaagaacatcc

SEQ ID NO: 858069 - DNA, 98 bp, Homo sapiens
cgaccaggggcgccggggcagcagcgaccccacagtgcagcgctccgtgtttgcatcggtggacaaggtgccagagttcaaggcccaagctacaagca

SEQ ID NO: 858070 - DNA, 99 bp, Homo sapiens
gaagaggtcaaatacatgaaaaatggggcagaagaagagcagaaaatagcagccaggaaccaagaaaacttggaaattgcccggcatttacgccctgga

SEQ ID NO: 858071 - DNA, 98 bp, Homo sapiens
cgccctgaggctgtaggcatggcccaggttcgctaagctcttgctccgcctgccggctctgcgctccatcgggctcaaatgcctggaacatctcttct

SEQ ID NO: 858072 - DNA, 100 bp, Homo sapiens
acattagcccccagtttccagcttcaggtgtgaaccagacccccgtggtagacgtgcagagtccagtggtgacatggatgttctcctgacccatcccagc

SEQ ID NO: 858073 - DNA, 98 bp, Homo sapiens
aaatcatgcgctttgcaatgaaatctcgaaggggacctcatgtccctgtgggacacaatgcccccaagcatcttcatgatacagttaagaggaatctt

SEQ ID NO: 858074 - DNA, 100 bp, Homo sapiens
cgctccatccgggtcgctgacggctgtctctggactggacagcagtggcgtccgcttttctctaaggaacccgacctaatctgggagcctgcaagtgaca

SEQ ID NO: 858075 - DNA, 100 bp, Homo sapiens
cttgtcctgtttctcagatcgctcacccctgttctcggaaaccatccacgaccctgtgaagacattcagtgaagcttgcctgatggtaaggaaaccagcc

SEQ ID NO: 858076 - DNA, 100 bp, Homo sapiens
acatgcaatgaacccaaaaggttttagaaagagcgttttcgctacgtaaagcacattcgataaaggatatggaaaatactttgcagctggtgagaaatat

SEQ ID NO: 858077 - DNA, 100 bp, Homo sapiens
gagaagactcactggccgaatggcagcagtagatgacttgcaatttgaaggcatcaactcaattgtggccattgcatcatacactggatataatcaggaa

SEQ ID NO: 858078 - DNA, 100 bp, Homo sapiens
ttttgctcaacttattgtgagaggtatgcttcagaagtgtccttctgttgatgacttcgtaagtgccctcgtttccgacttggatctggacttcgaaact

SEQ ID NO: 858079 - DNA, 98 bp, Homo sapiens
atccacctttcaaatctacagcaaggtttactctgaatcccaatcctacaggagttcaaaacccacacatggctgaaaagacagaagttttgagtgaa

SEQ ID NO: 858080 - DNA, 100 bp, Homo sapiens
ccgaggtggctatggaggcaaaatgggaggaaggcaagaagcgaaaccctggccttaaaattccaaaagaagcatttgaacaacctcagaccagttccac

SEQ ID NO: 858081 - DNA, 100 bp, Homo sapiens
gtgagagctgcgccgcccagctacaggttttaaaatcaaagatgggaaaatcggagaaaattgcccttccccatggccagcttgttcatggtatacactt

SEQ ID NO: 858082 - DNA, 99 bp, Homo sapiens
gtatctgtacagcagtttcctcatccctgcagctgtgtttgaacagatgccttcaattaagttgcagagttctgatggagagatatttgaagttgatgt

SEQ ID NO: 858083 - DNA, 98 bp, Homo sapiens
gagttggagatgacctcatcttagttagcgtgtcctctgaaaggtacttgggtgaaaatcctatttataagagtgccgtaacaactgtggtcaatccg

SEQ ID NO: 858084 - DNA, 98 bp, Homo sapiens
gactctgcaatagatacatggagcccatcagaatggcagatggcttatgaaccacagattgtgttcagtgtggacccctccgagggcagccctggttc

SEQ ID NO: 858085 - DNA, 98 bp, Homo sapiens
cttcgcatttgtgcagctgtcctctgcaatgagtatgccaagatggaaggaagcctcatacagtgagattaataatccgtcggtattcctctgagaag

SEQ ID NO: 858086 - DNA, 99 bp, Homo sapiens
ggggcttgagagctgggttctattttccctcctcaaactgactttgcagccacggagagatgaaagaaatgacctgccgtgatatcgttaaagaagttg

SEQ ID NO: 858087 - DNA, 100 bp, Homo sapiens
gctgttgcagcacttgttccccaaacaagtgctcctacattctggcagcagagaccacactggctgtgcgcagacgcccctccgcagcgtccctcatgtt

SEQ ID NO: 858088 - DNA, 98 bp, Homo sapiens
aacaatcgtggctacaaaaatcaatctcagggctacaaccagtggcagcagggtgcagtgctgagccctctcatagccatcgcactgaaaatatccca

SEQ ID NO: 858089 - DNA, 99 bp, Homo sapiens
actggacaccttcgtcccctttgatccctgtgtgctgaagaggtactttaattatcggactaccaggttcctggctgaggaggggttttataaattcca

SEQ ID NO: 858090 - DNA, 99 bp, Homo sapiens
gaagtcggggcagagagtggccgctactactgtctgaacgtgcccctgcgggatggcattgatgaccagaagaaattaatggacttacgaaatgaatac

SEQ ID NO: 858091 - DNA, 100 bp, Homo sapiens
tgacaaatttcgaaaaactcaagtggcagcagtggaaactggaggcatcactcagcacattggtgcctttcttggtgtattacctgactgcttaaccgat

SEQ ID NO: 858092 - DNA, 100 bp, Homo sapiens
ttcggtggtttcttgtgaggacgcggcagcccgtggagtcggctgagggaaaagcgaggcaaggcaggcgggaacaacttgatacagagacaagtacaac

SEQ ID NO: 858093 - DNA, 98 bp, Homo sapiens
tccgcccaggcgcagatgcgggccctgctggaccagctcatgggcacggctcgggacgccaaaacagagtggagtacgagaaaagggtccgagcacaa

SEQ ID NO: 858094 - DNA, 100 bp, Homo sapiens
gacaagcacaccctgagcaagaaggagctgaaggagctgatccagaaggagctcaccattggctcgatgttaagggaagctaaggagaaggagaagcaga

SEQ ID NO: 858095 - DNA, 101 bp, Homo sapiens
ttgcagactgtggcgcaactggtcttggtagcggaggcacccgaatgctgcccgggtgagattcggtttatgctagagacgatgttggccctgaagaacaa

SEQ ID NO: 858096 - DNA, 98 bp, Homo sapiens
acggacagattctcaagggaggagttagagtggcagagaattcgagaagagaagcgagaagaacggaggaggagagagttagaaaagaaacgtttgcg

SEQ ID NO: 858097 - DNA, 100 bp, Homo sapiens
ctagttacctggccagggtacgcgacaattggcggagaaaggcctaaagaatgtatttgacgaagcaatattggctgccctggagcctccagaaccgaag

SEQ ID NO: 858098 - DNA, 100 bp, Homo sapiens
cgcggcacagagagggcctgggagcttgctgcagcttcaggccatcagcatcagcaaagccatcaacacccaggaggcccccgtgaaggagaagcacgcc

SEQ ID NO: 858099 - DNA, 100 bp, Homo sapiens
gcagggaagcctcagccaggccccagcacagccacaggtcctcaaccagcaggaccgggctgccctgagatcctgcccagtggggacctcctgatccccg

SEQ ID NO: 858100 - DNA, 98 bp, Homo sapiens
ggaagctgatgctgctggacgccactttccggggtgcacagcaagtggtaattcagaggtccgtggggccagccagcctgagcttgctcaccttcaaa

SEQ ID NO: 858101 - DNA, 98 bp, Homo sapiens
ttgtggaagacgctcctcctatagacctacaggctgaagctcagcatgctagtggagaagttgaagaaccggcctcaggagtgcaagtagctgatgaa

SEQ ID NO: 858102 - DNA, 100 bp, Homo sapiens
cctgaaaagtcgcagcgagctggagccgccggagtgctgaggaatgtaaacaagtttgctgggccttgcgagacttcaccaggttgtttcgatagctcac

SEQ ID NO: 858103 - DNA, 99 bp, Homo sapiens
tagcattaattgaaggtggaatgaaatacgaagatgcagtacaattcataagacaacggtggagaactgcgtgtgcaccctgaggaacctgtcctatcg

SEQ ID NO: 858104 - DNA, 100 bp, Homo sapiens
gttgtctcggcagcgcccgcggagacgtgaagaggaaccaaagaggttgttgtaaatgtggatgatgatggagtcatttcattgaacttcgagtgtgata

SEQ ID NO: 858105 - DNA, 99 bp, Homo sapiens
tggagcttcggaagaaggtagaggttctagagaacactaatagggaggagtctgctactagtcttatcagctcttaaaaacagaaactcatctgtccaa

SEQ ID NO: 858106 - DNA, 98 bp, Homo sapiens
cgacatgtctctagtggcggaagccttcgtctcccagattgcagcaaaagctggcaggctgacagaggcggcctcaggacggaccttctggctactga

SEQ ID NO: 858107 - DNA, 100 bp, Homo sapiens
gaaccaagagagaggttacagcttagcttccaggatgatgagtgtgggccatgtttgaggattgccccagcattcagttctatgagtaataaatatccac

SEQ ID NO: 858108 - DNA, 100 bp, Homo sapiens
actaaacaaattcatcccagaaatctaagagtttaagctatgaagaaggacatccctcacactctgaaacagatctccttcagagacagagttttgcagc

SEQ ID NO: 858109 - DNA, 98 bp, Homo sapiens
gatcatcaaacagctatggtgatgattagagacatactaatgtacatgggtgtgtttgaccatcgaatgaagtgctggcagaaatgggaagatgctca

SEQ ID NO: 858110 - DNA, 98 bp, Homo sapiens
gtggatgatcatcacctccattttcctaggtgtcattacagtgatcatcataggcttatgtcttgctgcagaagcccctgaatgtgacagtgatccgc

SEQ ID NO: 858111 - DNA, 98 bp, Homo sapiens
atcatcaggcaacaggagatgtgtgcacactgatgatgtgcctccaggacaaaggactggatctcccagccatccagccccggctagtggcggtcagc

SEQ ID NO: 858112 - DNA, 100 bp, Homo sapiens
agcagctcgagatggcaagcttaaacccttacctggggagacagcccaccgtttccatggtcgaaggtcagggcgagaagaacgtgaccttctgggggag

SEQ ID NO: 858113 - DNA, 100 bp, Homo sapiens
agcaacatccccaaacagcggcgtttcacggtggcacatacatggataaggagccccgtggaatcatccctttagagaatctgagtatccgggaagtgga

SEQ ID NO: 858114 - DNA, 99 bp, Homo sapiens
aatatttcagaggtcatgtcaaaagagttgatccacctgaagaattaggagctagtatttctgtcacaacagatgagctagagaaattgctctataaac

SEQ ID NO: 858115 - DNA, 98 bp, Homo sapiens
tagaggctttatatcctaaacttttcaagcctgaaggaaaggcagaactgcctgattacaggagctttaacagatgtccatgaaggaggtgggtgatg

SEQ ID NO: 858116 - DNA, 100 bp, Homo sapiens
gcgccatcctccagctttgccgccgcgctgcgcaagctcgccaaacaggcggaggagcccagaggaagctcttcgtgggcggtcttgactggagcacgac

SEQ ID NO: 858117 - DNA, 100 bp, Homo sapiens
gttgcctatccagaagaaaatacactactcatcaaggaagaaccaggtggatgaaaatactaggaaaagtttatttaagttacgttctacatgggatgaa

SEQ ID NO: 858118 - DNA, 100 bp, Homo sapiens
cggcacccagacaggtggcgacggcagaggattgaccagatataccatctggcatctccagcctcccctccaaactacatgtataatcctatcaagacat

SEQ ID NO: 858119 - DNA, 100 bp, Homo sapiens
cccacccgggcagccctcaccctggccagacgggtgcagggaacaactgggcgaaagggcactacacggagggcgcggagctggtggacgcagtgctgga

SEQ ID NO: 858120 - DNA, 100 bp, Homo sapiens
tacggcgtgcgcggctatcccaccatcaagttcttcaggaatggagacacggcttcccccaaggaatatacaggtcagttcaccgggacctggaggccca

SEQ ID NO: 858121 - DNA, 99 bp, Homo sapiens
cggataggtagagctgggcttctttcaggtcccaggaacagcatggctccagcaaaggatgactcttctcttccagaatattcagcctttaacacatct

SEQ ID NO: 858122 - DNA, 98 bp, Homo sapiens
gagggagtcgtcttgagcgacagtggtggacttgctttgtgaagagacagttcatgaacaagagtctttcaggacctggacagtgaagggagcccggg

SEQ ID NO: 858123 - DNA, 127 bp, Homo sapiens
agaaaaggcatctcaactccaaactgttgagactgcttttaaaaggaaccttagtcttttaaaggatggcaatggttatatcagtgcagcagaactacgtcacgtcatgacaaacttaggagaaaaa

SEQ ID NO: 858124 - DNA, 100 bp, Homo sapiens
gagctgctgcaggtccgagccatggatgctgaccggggagtcaatgctgaggtccactactccctcctgaaaggccctggccaacgtcaacattgggagc

SEQ ID NO: 858125 - DNA, 100 bp, Homo sapiens
gaaacttttggcatatgcactggattactggtcaaaaggtcaactaaaagcattgtttctagaacatgaggctgctttgtaccgcctcagtggagactgg

SEQ ID NO: 858126 - DNA, 98 bp, Homo sapiens
tcagtcggagcgaagcggctggcggagcagaacggattgcaggatgcaccctggtctaaaaagtgcaagatgctgttcccactgttggaggaattggg

SEQ ID NO: 858127 - DNA, 100 bp, Homo sapiens
ttaggaaatggaagatgggctatacctaaaattacctgcatgaacccccatttggaagccctttcctaatcaagacagtgactcggtggtactaagtggc

SEQ ID NO: 858128 - DNA, 100 bp, Homo sapiens
actgaagtttgccataaaagttgatggagattacctttggctggattataaagttggctggaagaaactgaaggaagtatttagtatggctggtgtggtg

SEQ ID NO: 858129 - DNA, 100 bp, Homo sapiens
gaggatggttgctgaagatgaacgacacagaggttgattttgaactggagtcattttctgaaaggaaagaagaggagaaggaagaattgatggaatggtg

SEQ ID NO: 858130 - DNA, 98 bp, Homo sapiens
gacatgccagcccagactttcatccaggcgggcaccacggcaggggctgagctaccctcatggaagggagaggaccgtaccggatctacgaccctggg

SEQ ID NO: 858131 - DNA, 100 bp, Homo sapiens
ttagcacatgcagatgagaagtccttaggaggcaagtgaggcctatctggttggcctttttgaagacaccaacctgtgtgctatccatgccaaacgtgta

SEQ ID NO: 858132 - DNA, 127 bp, Homo sapiens
tgcctggctttacagggctcagcattgctgaccagatcactctgctcaaagctgcctgcctagatatcctggttatgatgtgattgctcaagcccaatctgggactgggaaaacggccacatttgcc

SEQ ID NO: 858133 - DNA, 100 bp, Homo sapiens
aacaacagaacagtgtcgtgctagaagacttgttggaaaacatggaggcagacacctttgcaaccctgtgcagccagatgctggtttttcagcagcagac

SEQ ID NO: 858134 - DNA, 100 bp, Homo sapiens
ctgcggcgagtatacatgcaaagcttccaatgagtatggcagtgtcagctgtacagccacactaactgtgacagagtggatcatgacccatgaagagcac

SEQ ID NO: 858135 - DNA, 98 bp, Homo sapiens
ggctcgccagtcttggggacagtgtcagcatcttagcaaagcaatgtctcaagatggtgcttctcagttccaagaagtcattcggcaagagctagaat

SEQ ID NO: 858136 - DNA, 100 bp, Homo sapiens
ggcagcaccggaggcccaggtctccgtgcagcccaacttccagcaggacaagctcttcaacctttcagagaaaaggcatgacctgacccgcttaaacccc

SEQ ID NO: 858137 - DNA, 99 bp, Homo sapiens
tctgaccgagagggaagcgatgccacgggagatggaaccaaggagaaaccatttaaaacaggtctaaaggttcaaaccttgtactactcagctgatcac

SEQ ID NO: 858138 - DNA, 100 bp, Homo sapiens
tcctggttgagggtctccagggttctttggggcccgagcagagtcacctgatatgaaaaaggagcaagacccccctgccaagtgccacaccaaaaagcac

SEQ ID NO: 858139 - DNA, 98 bp, Homo sapiens
ggggcgatgtgtgattaccatggcgaggagtctctgtccgggggcctggctaaggaaaccctattacctccagctctttgccgagggcgtgtggtgag

SEQ ID NO: 858140 - DNA, 98 bp, Homo sapiens
ctgggcctgcaggtctctgtcgagcagcggacgccggtctctgttccgcaggatgggtgataaaagaaaatgtggctgaagttacccgaagttcagct

SEQ ID NO: 858141 - DNA, 98 bp, Homo sapiens
ccgccggcgccaccaccgcggtcactcaccgccgccgccgccaccactgccaccacggtcgcctgccacagggtcttactctgttacccaggctggag

SEQ ID NO: 858142 - DNA, 98 bp, Homo sapiens
ccgtccatggagccatgcgtgtgctgacagacctacctggtggttctgtgccttcccctactctcttctcatcttcgtatatgacgaagtcagaaaac

SEQ ID NO: 858143 - DNA, 98 bp, Homo sapiens
gggagccgagctggagctgccgcggcgcagccaggttatgaagacagtatggagtttccagaccatagtagacatttgctacagtgtctgagcgagca

SEQ ID NO: 858144 - DNA, 98 bp, Homo sapiens
ttgcttccctttcaccttctgccatgattgtaagtttcctgaggcctctccagccatcctgaacttgaacagagtatctgccaagcccgggcttccgt

SEQ ID NO: 858145 - DNA, 100 bp, Homo sapiens
ctctcaagggagcaagtggatccctggggcagagaggaagcttctagtgtactcttactttgaaaagacaattggaaccaagccagttgctcatattgac

SEQ ID NO: 858146 - DNA, 105 bp, Homo sapiens
ctggacaggaaaattcagagcctgggagacagcaagaccattcccgaaacggtcccctcctggatggtggccgtcatcctcatggcctcggtcttcatggtctgc

SEQ ID NO: 858147 - DNA, 99 bp, Homo sapiens
gctccttctcctggagacgcaactcaagatcctcacagccaccgtggacaatgccaacatcctgctacagattgacaatgcccgtctggctgctgatga

SEQ ID NO: 858148 - DNA, 100 bp, Homo sapiens
gggaacaaatactactacatcccgcagtacaagaactggagagatccaagagttgaagattggctcctcatgtcctcgcctctgccacaaaccatcctcc

SEQ ID NO: 858149 - DNA, 99 bp, Homo sapiens
ttgtatttgactgagagaaacccactgaagacgtctgcgtgagaatagagaccaccgagggcgaccattgacgaggtggagacggacgtggtggagatt

SEQ ID NO: 858150 - DNA, 100 bp, Homo sapiens
cgatccagacggcagggagtgcatcaaaggtgtgaacacagatgatctcaatgccacccaccaacactgtgttttggccggttcacaacctcggtttagt

SEQ ID NO: 858151 - DNA, 98 bp, Homo sapiens
caagcttaaaaacataccaactgtcaatgaaaaccttgaaaactattacctggaggtcaatcaacttgagagtctggacaaagtgccaaaggatcttc

SEQ ID NO: 858152 - DNA, 100 bp, Homo sapiens
actctacacttatcatgcagttgttacgtgataatctgacactatggacttcagacatgcagggtgacggctccctttcccaatggtagttttgtgaatg

SEQ ID NO: 858153 - DNA, 100 bp, Homo sapiens
gaaggcagcacaggacctggaaaaattacatgtgcaattaacagactttgagaactctgcctatgtggtgtttgtggtactgctcaccagagtgatcctt

SEQ ID NO: 858154 - DNA, 100 bp, Homo sapiens
ggtacaggtataatgttaatcaacttggtgatgcccatgactggaaccagaacagagttgatcatagtcgtgaaaaagaaaatgcaccagaaggtcctac

SEQ ID NO: 858155 - DNA, 100 bp, Homo sapiens
acaaatatggtggattataatacattcaggtcgttgaggacttccacatggagattggcacaggaccagactcaagacacacaactcataacagttgatg

SEQ ID NO: 858156 - DNA, 100 bp, Homo sapiens
cctgcctcatcccagccatgtcatcttatctacgaaatgattcaggtaacccaggtttttctgccttttatgtgccatttgcaaaggctttatactcttt

SEQ ID NO: 858157 - DNA, 100 bp, Homo sapiens
ctcttctgagtgcatttataacctcatacccagtgacttgaaggagcctccccagcctcctaggtcatcatcagatttgaaatatttaaagtggatacaa

SEQ ID NO: 858158 - DNA, 100 bp, Homo sapiens
gtatgataccttacttaatactcacccagtcagcttgaagagtttcaaatggaccctaccactgagaaatcaagatggcagtctactatggggaattgag

SEQ ID NO: 858159 - DNA, 149 bp, Homo sapiens
tttggatttgccaagattgaccaaggtgacttgatgacaccccagttcaccccttattatgtagcaccccaggtggatgaaactcagtttaagaagatcctcggctacatcaacacggggaagcaagagggggcgaagctgctgtgtgg

SEQ ID NO: 858160 - DNA, 98 bp, Homo sapiens
agttctttgtggatggacttgattctgatgagagtactggagaaaatgaaactgggattgacccatcaagatgcttggctcaataagaaaaccacgtt

SEQ ID NO: 858161 - DNA, 100 bp, Homo sapiens
agcagaaagcatttaaccagcatggctacttcatattttggaaagcagtttttaagacaacacaggttggagctgaaggagtgcccaggctgcggatgga

SEQ ID NO: 858162 - DNA, 100 bp, Homo sapiens
agtgagacaccagtggttgtggatttccacgcacaaggtgctgatactcaaagaaggtttaagttgtctgatctctctataaattccactgaatgtctac

SEQ ID NO: 858163 - DNA, 100 bp, Homo sapiens
ggatggcgacgtctacactgagtcggaggcgaagcttgtggagagactccagagcaaatacgagcaccaagtggcataatcacaagcccaggctggcctt

SEQ ID NO: 858164 - DNA, 99 bp, Homo sapiens
catcccctctgtgtggagatgcgacgaggacgatgactgcttagaccacagcgacgaggacgactgcccactgtgattgccaccaacattctcttggtt

SEQ ID NO: 858165 - DNA, 50 bp, Homo sapiens
cttaccaccgtcatggcagtcccagaactaagttcagaaaatcttagaac

SEQ ID NO: 858166 - DNA, 100 bp, Homo sapiens
ggaaatgttgtccaaagttcttccagtcctcctaggcatcttattgatcctccagtcgagtcaggatggctaaaggtgaccccaagaaaccaaagggcaa

SEQ ID NO: 858167 - DNA, 99 bp, Homo sapiens
agctggcagcagcatctcagcccaagagaaggatcaaaatacttgctggatggtggactcagagaccaataaaaataaactgcttgaacatcctttgac

SEQ ID NO: 858168 - DNA, 99 bp, Homo sapiens
cttgaatgtctgccgaaatgttcaagtttaccaaaagagaggcaccgctggaacactaatgaggttattctggtacaagttaacccaggagaagcattt

SEQ ID NO: 858169 - DNA, 98 bp, Homo sapiens
agccagctcctgcgaccgccctgcgcttcgtgcaccggggcggtccgttgccaaagccaggaattgtcttagaagaaagaaggcaagccaccatttta

SEQ ID NO: 858170 - DNA, 99 bp, Homo sapiens
ctattccatggaatatttgtcccggcactggctcttcagtcccttcaagaatggaagttggatacactttgtgacttgtacgagacactgaccattaca

SEQ ID NO: 858171 - DNA, 99 bp, Homo sapiens
tctaccataatatgaaacatggacagatatcaacaaaagaactagcagattttgtaagggaacgtctggctcttgctgattgaattcctttggtgcagt

SEQ ID NO: 858172 - DNA, 101 bp, Homo sapiens
cggatgattatgatctcatgtatgtgaatttggacaacgaaatagacaatggactccatcccactgaggaccgacacttggtggggttcccacacaagctc

SEQ ID NO: 858173 - DNA, 146 bp, Homo sapiens
gccgccgccgccgccatcatgagggaaatcgtgcacttgcaggccgggcagtgcggcaaccaaatcggcgccaagggttttggccaaattgggcgagggcacaaaataaccacttaccccttctcaccgaggaagagcgggagaaa

SEQ ID NO: 858174 - DNA, 100 bp, Homo sapiens
atgaagatgatgacgatgatgatgaagaggatgatgatgaagagaggaggagaacggggctgaggaggaagaagaagaaactgccgaggatggagaggag

SEQ ID NO: 858175 - DNA, 98 bp, Homo sapiens
ccaaaggctttagaaggttatatcacagatgagggaattggagttcgtaattggtccgaggccctgaacctaataaatgccagtgaaatgggatttga

SEQ ID NO: 858176 - DNA, 100 bp, Homo sapiens
gaagttcttccaattctgaattcagatgaacccaagacagctcatattgatgggcaagattcttgccaagagaattaatgtgcgtattgagcacattaag

SEQ ID NO: 858177 - DNA, 99 bp, Homo sapiens
taccagcagctgctgcagagcctggaacaggaggacctgtcagacgaggctgaaagggacgagtatgagttactctgcccagacaacactcggaagcca

SEQ ID NO: 858178 - DNA, 100 bp, Homo sapiens
atttttgaaagaacatgaccaccttcgaaatgcctagaaagagccatgaagtttgcctttgaggaattccacctgtggtaccagtttgctctgtccctga

SEQ ID NO: 858179 - DNA, 100 bp, Homo sapiens
ccgagaccgtgaccgagagcgtgaccgagagcgcgaatatcgtcatcgttagaaggccttgtctggttttagacagattcatgttatagatatggacact

SEQ ID NO: 858180 - DNA, 100 bp, Homo sapiens
actcctaggatagaaagtttggacaaggaaacaggtatcagcatgatggtagcagaaaccttatcaccaaggtgcaggagctgacttcttccaaagagtt

SEQ ID NO: 858181 - DNA, 98 bp, Homo sapiens
tccttcagtgtccatatgagcatttcagtggagaagaaaagaaactttgctacctgggaactgaagactacttagccctggaagaaagcgggactttt

SEQ ID NO: 858182 - DNA, 99 bp, Homo sapiens
ctgatcccaaaattattgaaaacactcgaagggaggtgctaatgatgctggataactatgtaagagatttcaaagcattgattgactggattcagcttc

SEQ ID NO: 858183 - DNA, 100 bp, Homo sapiens
ctgatttggcctctgtgctcccctccgcaaggggatcgttttctccagaatgacagcccatatcaaggcggtgtattctttttgacaattcattttccta

SEQ ID NO: 858184 - DNA, 98 bp, Homo sapiens
atccacgacctggacaggacggagcgcaggcagatgccatggacaatattaccaggcagaaccaattctacgatacccaagtcatcaaacaagaaaac

SEQ ID NO: 858185 - DNA, 100 bp, Homo sapiens
ctcagatcgctcacccctgttctcggaaaccatccacgaccctgtgggcaaacgcagaggcgggaacaaactagccctcaagacgggaatagtagccaag

SEQ ID NO: 858186 - DNA, 100 bp, Homo sapiens
aagaactacaggctttacttttgtggtagaccgtctaagagaaggaaagaaccggaggctgaagcaggccaaagaagaagctcaggctgaaattgaacag

SEQ ID NO: 858187 - DNA, 100 bp, Homo sapiens
cctttagaagccagatgttggccatgaatattgagaagaaacttaatcagaatagcaggtcagagagctctgaggaacatgaatacagtgatgaagctcc

SEQ ID NO: 858188 - DNA, 98 bp, Homo sapiens
tcgacagctgcaaggaggccgtcaccttcaaggccgtcagacaaggattgattatgtcaagtggccaggcatggaaggagcaaagaaggttcactctg

SEQ ID NO: 858189 - DNA, 101 bp, Homo sapiens
ggcatttcaacacagagagcaacttttattacgtggaacaagaagttggtgaaccatctaaagaagagaaggctgtggccaagtatcttcgattcaactgt

SEQ ID NO: 858190 - DNA, 98 bp, Homo sapiens
aaaccaaagtctcttctgctgggaaatcccagtacagatcgactcaagcacagagggttcggaaaccgcgttgctgcacggggccccaggggctgctt

SEQ ID NO: 858191 - DNA, 100 bp, Homo sapiens
atcttccccacacaatatatggtgagcaagctgcgttcctttgcctgcaacaggggtcaagatgagttttgcctgacttctttgatgtcctgaactttcc

SEQ ID NO: 858192 - DNA, 100 bp, Homo sapiens
ccactgaggcggtgcggaaagtttctgtctgggagtgcggaactggggccgggttggtgtactgctcggagcaatgggatttttctaaagacgttgcagt

SEQ ID NO: 858193 - DNA, 98 bp, Homo sapiens
gggagtgatgagaggttccgtcagtgtctgatgtcagatttatctcatgctgtgcagctcccaaaatggcgatgacaccggcacctggcccaacaacc

SEQ ID NO: 858194 - DNA, 98 bp, Homo sapiens
tttagccaacatgatgggagaagatccagaaactttcactcaagaagatattgacgccctagaaagtgaatttgtttcttgccaacttcatcagtgga

SEQ ID NO: 858195 - DNA, 100 bp, Homo sapiens
tccagcagattgtcctgtaatcgctattgacagctttaggcatatgtatgtgtttggagacttcaaagatgtatttttggtaactctcattcgacatcca

SEQ ID NO: 858196 - DNA, 100 bp, Homo sapiens
tatcacacggtggggcgagtattggtgtgaggtgacggcttcaacggaccacaccaaaatgccatctcaaatggaacacgccatggaaaccatgatgttt

SEQ ID NO: 858197 - DNA, 100 bp, Homo sapiens
agaaaaaggctacaaagctgctttcattggaataggcaggaaaagttcagtttggttatgtgtatggcatgagtgccattggctgccttgtgattcatgc

SEQ ID NO: 858198 - DNA, 98 bp, Homo sapiens
ttcgacattgccgtcgacggcgagcccttgggccgcgtctcctttgagaccagtgaccttttctatttcatagtaaacaaacttcatgagtacttgcc

SEQ ID NO: 858199 - DNA, 99 bp, Homo sapiens
ttacttttaatcatctttattatctcattgaagcttggaattacatagctggaaaggatcttacaggatatatcccctggggcagctggtggggctgaa

SEQ ID NO: 858200 - DNA, 100 bp, Homo sapiens
gttctctccctggaagatatcaatgtttctgtctgttcgtgaggactccgtgcccaccacggcctctttcagggaagccctatggggcggatgacttcct

SEQ ID NO: 858201 - DNA, 100 bp, Homo sapiens
gtagaagagctcatcctttctggggctgacatcatcaaagtgggaattgggccaggtggggaccaatgccatggacagccccctcctcaagtacagcgcc

SEQ ID NO: 858202 - DNA, 100 bp, Homo sapiens
aatgggtcagtaattgatgaagatgacccagtgctaggggaagactattacagacctccaatggaagtccgggcacatggcggagagcctcaccaacatg

SEQ ID NO: 858203 - DNA, 100 bp, Homo sapiens
gaagaagatgaggaagatgactcggaatcagaagctgaaacaggtccagacatcatctggtctccctgaacctgaaatcacaccatggatgattttgagc

SEQ ID NO: 858204 - DNA, 50 bp, Homo sapiens
ggagctcggctcagtgagagcaggtgttatccacgtgaccaaggaagtga

SEQ ID NO: 858205 - DNA, 99 bp, Homo sapiens
ggagatggcccgcgtgcttgggcttttggaaaagaagaagagagtccaactcaaagatatgggagaggatttggagtgcctctgtcagataatgaggac

SEQ ID NO: 858206 - DNA, 99 bp, Homo sapiens
agctgaccattgacaatcagccatgtcatccaggcctcttgaaagtccacctccttacaggcctgatgaattgctaccaagcagtttctcgaagagatt

SEQ ID NO: 858207 - DNA, 74 bp, Homo sapiens
aacccccaaattggctgggacagggggaagacgttttcatcccgctaatcttgggaataagaggaggaagcggc

SEQ ID NO: 858208 - DNA, 100 bp, Homo sapiens
attggatgtgaaaatgaagccagaccgaggctcctggatttggatttggaattgcaatatctggtggacgagataatcctcattttcagagtggggaaac

SEQ ID NO: 858209 - DNA, 100 bp, Homo sapiens
tgaaatgatggagaaggatgagctatgacttgctaaacaatctgttgtttgagattacgggaaatgatgagacgttcgttgagagcagctggtttgggta

SEQ ID NO: 858210 - DNA, 100 bp, Homo sapiens
ctcttgttactgagtatgataaacacctaggagaactaaatgggcagctgaaatattaccagggtgagcatggacaatcttgtgccaaaatgcttgtgaa

SEQ ID NO: 858211 - DNA, 100 bp, Homo sapiens
gcagtgtcagctgtacagccacactaactgtgacagattactctagtttgatgtcataatttctcatggagttaaaactggactcttcaaaatgatagag

SEQ ID NO: 858212 - DNA, 99 bp, Homo sapiens
tgacaccagcacagcaaacccgccgggatcaaagtgtaccagtcggcagcatggtttctccacagacactacccaaagcagtccttcactacagtggca

SEQ ID NO: 858213 - DNA, 100 bp, Homo sapiens
cggagactgcgggcccgtagctgggctctgcgagtgcctgagattgtgagggagacccaggacctaattgaacaaggggcactcctgcaagcccaccgga

SEQ ID NO: 858214 - DNA, 100 bp, Homo sapiens
acttgttttgtgggaagtggccaggcggatggtgagcaatgtactatactggcaattgctggagaagattttgcaattgttgcttctgatactcgattga

SEQ ID NO: 858215 - DNA, 101 bp, Homo sapiens
ccgggagtacatctacatgcattttggggagatacaagcaaggaaacgtgtggcatctggctaccatgagctgaagacaaagcctacatggggaaaagtgc

SEQ ID NO: 858216 - DNA, 98 bp, Homo sapiens
tgacacaatcatctactattcatgatgttaagcaaaagtttcacaaagcatatttaaccacttatgatacagtgaaacactacttggtattgaataca

SEQ ID NO: 858217 - DNA, 100 bp, Homo sapiens
ctccccgcctctgcgtctttgctcccggagcgcttgaaggagctgcggcatttaaatcaaacggtattgagatggattgggttatgaaacataatggtcc

SEQ ID NO: 858218 - DNA, 99 bp, Homo sapiens
aagattattacagtaaaaacaaaagaaaggcaagagaatacttactagttaaagatggcccctgagttctgcagcctcgaggaaggcctgccctatctg

SEQ ID NO: 858219 - DNA, 98 bp, Homo sapiens
tctgttccatcagcgtttgtttggttcaagttctttcttcaaagagtcatcagaataacatggattgaagagacttccgaacacttgctatctcttgc

SEQ ID NO: 858220 - DNA, 100 bp, Homo sapiens
ttggaattacaggtgtgagccactgcgcccagccatcagggaaaacaaagtgcatgatgaagtcttcagactgtgtcataaagcatgctggtgtatacag

SEQ ID NO: 858221 - DNA, 100 bp, Homo sapiens
tctggaatcagaaagcactacgctaaattggactggctaaggacgatcagctgaaggttcatgggttttaagtgcttgtggctcactgaagcttaagtga

SEQ ID NO: 858222 - DNA, 100 bp, Homo sapiens
gtcaataatgtggaggcaactcttttgttgttgaaaaatggggccaaccgagacatgcaggacaacaaggaattgcgaaaagccttgcagcagctacaag

SEQ ID NO: 858223 - DNA, 99 bp, Homo sapiens
gaccaggcaccttctgtggaagtgtctaccatcagagggagatctctgccccctggggctgagagaccccaacctttccccaagctgaagctgcagggt

SEQ ID NO: 858224 - DNA, 100 bp, Homo sapiens
ctctctctctgcttggtaccacagcctgaggaagaacttgatcctgaagagagggacaacttcctccagcagctttataagtttatggaagacagaggta

SEQ ID NO: 858225 - DNA, 158 bp, Homo sapiens
aattctttaagcattttccagaattggctgattctgctatcaatgcacagttagacctctgtgaggatgaagatgtatctaaccagacgtcctgggtcctctccagcatggcagccctctactggagggtgaaaggccaaggaaagaaggcaatcgac

SEQ ID NO: 858226 - DNA, 99 bp, Homo sapiens
tgacacgtacacagcaggactgagtgaagaagaacagctcgagagagcattacaagccagcctctgggaccgagatatgcctgaatattcagtcacaaa

SEQ ID NO: 858227 - DNA, 100 bp, Homo sapiens
atccaagatctcctcatgagctttggtatccttaaacctgacttaaggattgtctttgtacataacaaggatgggtttccagatttccaggattctgtgc

SEQ ID NO: 858228 - DNA, 98 bp, Homo sapiens
ttgaggatctggaggacggagaggacctgttcaccagcactgtctccaccctagaggtcaccggattgaaactgtctcaggaccttgatgatcttgcc

SEQ ID NO: 858229 - DNA, 98 bp, Homo sapiens
gggcaaccactgcgagtactgcttcaccagtgacatcgatgtggcccagcagttcagcttgaatcagagtagagtggaagagataaccatgagagaag

SEQ ID NO: 858230 - DNA, 50 bp, Homo sapiens
ctggactccatcctcttcctttttgaaaaacctctgcgccatgagagcca

SEQ ID NO: 858231 - DNA, 100 bp, Homo sapiens
tgacgcaggccttaaggagaaagtttcagggggtgctcaaaggatttaaaggagaactaattcatgtatttaacaaacatgatggtgccttgaggaatac

SEQ ID NO: 858232 - DNA, 100 bp, Homo sapiens
atcactgtaattcttgctgtagaaagcttaaacttccagactgcttttcaggaagccttggacgctgcaggtgataaacttgtagtagttgacttctcag

SEQ ID NO: 858233 - DNA, 98 bp, Homo sapiens
cttgctcccatccctgcagcatgaacaaggattcaggagcagttccagaaaaatcccgacagttacaatggtgctgtccgagagaactacacctggtc

SEQ ID NO: 858234 - DNA, 100 bp, Homo sapiens
agagctactgcaacacaacttttacagatggaacagatttggagttgaggctggtcaatggagacggtccctgctctgggacagtggaggtgaaattcca

SEQ ID NO: 858235 - DNA, 100 bp, Homo sapiens
ttgaggactttgtctctgatgagctgagaaacaaagccacccagccaatgaaggtttgcttggaatcagaaggaagatattataatgctcatatccagga

SEQ ID NO: 858236 - DNA, 100 bp, Homo sapiens
gagaggatctggtgtaccaggcgaagctggccgagcaggctgagcgatacgacggcaccaaggaaatcagtgctggtgtcgatgaacaaggcaacatcta

SEQ ID NO: 858237 - DNA, 100 bp, Homo sapiens
ctgaaatagttcagctctgtctgcatgacttgtcctgggactgaggaaaatttaccagtccaatatcagatggaaatgatgcggagccttcgccatgtaa

SEQ ID NO: 858238 - DNA, 98 bp, Homo sapiens
gaagttctgtcaaatacatttcagttcactaatgaagcccgagaaatgaaaccaccatcatgggttcgggtcccatagaccccaaagaacttctcaag

SEQ ID NO: 858239 - DNA, 100 bp, Homo sapiens
gttgtcgatgccgctgaatgggctgaaggaggaggacaaagagcccctcatcgagctcttcgtcaagctgagcgggctttggacaccatgaactttgatg

SEQ ID NO: 858240 - DNA, 100 bp, Homo sapiens
aggaacacaagaagtcctaaaatatctacgaagcaagatcaaagggatccagattagatgatcaaagatgtgctccaccacctgctaccacaaagggtcc

SEQ ID NO: 858241 - DNA, 100 bp, Homo sapiens
gggcagctacacatcttgaaagagaagctcttcctgtgagcaatgcaaacctcacaagaggcctgtgtgtggcagtaatggcaagacctacctcaaccac

SEQ ID NO: 858242 - DNA, 98 bp, Homo sapiens
ttgataaaaatacaaagattatttgccagggtttcactggcaaacagtgttgcattgatgaatcatagctgttgccccaatgtcattgtgacctacaa

SEQ ID NO: 858243 - DNA, 98 bp, Homo sapiens
cctttctaattaatggctacacttcgatggacctgttgaaaaaaatctgggaggttgaacttattaattcctcctccgcctcctcctctctgcatgcg

SEQ ID NO: 858244 - DNA, 98 bp, Homo sapiens
ggatgtgaagtagatgataaagatgatgatatccttctcaaccttgtgggatgtgaaaactctgttactgaaggttggaagctttcttagaatctata

SEQ ID NO: 858245 - DNA, 99 bp, Homo sapiens
acgaatctgcccacccctcctgtaacccagcctgtttcacttcttgagtttgctctccaaagctcggggaattgattccagctctgttaaactccgggg

SEQ ID NO: 858246 - DNA, 100 bp, Homo sapiens
aatgaagtaaatgctatcaaatgggacccaactggcaatctcttggcctcctgttctgacgacatgactttaaagtgcacagccagagaacaacacatca

SEQ ID NO: 858247 - DNA, 100 bp, Homo sapiens
cttgctgctgatgaagatgatgacgatgatgatgaagaggatgatgatgaagagcaaattcctcttgaagaaactgaacttccaggacaaggagaatcat

SEQ ID NO: 858248 - DNA, 99 bp, Homo sapiens
caagtttgaaagtggaacttgctgatggggagaaagaagatcagtttaatggaagccctccaagaccacagccaaggggaccaagaactcctccaggac

SEQ ID NO: 858249 - DNA, 100 bp, Homo sapiens
gctcacggaaaatgtctataaggccagcactccttgcccgaggacagagatggcgagcgcccggattggggatgagtatgcggaggacagctctgatgag

SEQ ID NO: 858250 - DNA, 100 bp, Homo sapiens
tcgtggccggctctcagtcgggctccatccgtgtctgggacctggaagctgccaaaacactatgttggccatggaaatgctatcaatgagctgaaattcc

SEQ ID NO: 858251 - DNA, 98 bp, Homo sapiens
attcaaaaacactatcccagggagtgcaagcttagagcgtctggccaagaatcagaggaagtggtatatattcttccaacttccatgcagtgaagagg

SEQ ID NO: 858252 - DNA, 98 bp, Homo sapiens
aagttaacccttaccacccagcagcagggcatcaagatggttctgtgaagggaaagaactgcacaacactcctgatattcaaatccactgtgagggag

SEQ ID NO: 858253 - DNA, 98 bp, Homo sapiens
gctttcacaaagataatagaagccatgggattcacgggacctttgaaatacagtaaatggggtgtaccagtgatggcaataagaaacaaaatgatatc

SEQ ID NO: 858254 - DNA, 98 bp, Homo sapiens
aattggaagctaaagctaccaaagacgtagaaagaaatcttagcagtttgctggaacattatcagatggcttagggaagacgatggacaatcggcatc

SEQ ID NO: 858255 - DNA, 100 bp, Homo sapiens
atctctgccttcctgttcacggtgaccttcgcttggtgtcctcctggcctcagcaacctgacaattctgtcgtgtcccgcattagtgccagcagtagttc

SEQ ID NO: 858256 - DNA, 99 bp, Homo sapiens
ctgagcctgccgccaagatgccggcctattttcagaggccggaaaatgccctcaaacgcgccaacggatgaattaaaccttgctgattctgaagtggat

SEQ ID NO: 858257 - DNA, 118 bp, Homo sapiens
tattcaccacaggaatcatgactcctggagaacggatcaagtgcttattacagatggcagttaaacagggaaaccaactgcagatgcaagtccacgaagggcaccatgtcgttgatga

SEQ ID NO: 858258 - DNA, 100 bp, Homo sapiens
ggccctgagggagagtgtggaagaagcaaccaaggaattcagagcctctgaattgcttcgaagtggactggacagatctaaataccttttagtgaaagaa

SEQ ID NO: 858259 - DNA, 100 bp, Homo sapiens
aaattgttcacaaaaaggagaggattttatagctaccttgggaaaactttcaggattacatggccaggacctttttggaatttggagtaaagtctacgac

SEQ ID NO: 858260 - DNA, 155 bp, Homo sapiens
tgtgtctctgggagggcgctgctttccccggccacccggcgcgatgatccagaatgtcggaaatcacctgcgacgggatgagctgtgtggcccagacccttccctgtcggacgagctgatctccatcctcaacgagctcactcagctgagcaaaa

SEQ ID NO: 858261 - DNA, 100 bp, Homo sapiens
caccacccacgttacctacttcagggatgaagatgagctggattcccacaccatggtgaagactagtgtggagagtgtgggcaccatgcgggccacaagc

SEQ ID NO: 858262 - DNA, 100 bp, Homo sapiens
ggactttcttcgttgccatgaggaaagaattctccgagttgaccagatataccatctggcatctccagcctcccctccaaactacatgtataatcctatc

SEQ ID NO: 858263 - DNA, 98 bp, Homo sapiens
gggacatgcatcgtcccctggactctctcaagtgctacaaagtacacagataaagacaatggagggatgcttgtatggtctccatatcacagtatccc

SEQ ID NO: 858264 - DNA, 100 bp, Homo sapiens
cagtagattctgacagcgatgatgatcccttggaggcattcatggctgaagtggaggtgccttggaacactatgttaattgcctggatctggtaaacaag

SEQ ID NO: 858265 - DNA, 100 bp, Homo sapiens
aagaagacctttaagaaacatcagcagctgaaaatccatcagtgccagcataccaatgaacctctattcaaatcaggaagcaccatacctcctgcgaaac

SEQ ID NO: 858266 - DNA, 100 bp, Homo sapiens
agggatggagagaggtggcgacctcacagtcctgaagaagaagaggacagtgctccagtgaaagtggaagaacaaaggaagatgagtcaggatagtgtcc

SEQ ID NO: 858267 - DNA, 98 bp, Homo sapiens
aatggttatgatggagaattgtatggatcacagtccctgaatagaagatctggcagggctacatccagaagatcaagtcgggagaggaggactttgag

SEQ ID NO: 858268 - DNA, 100 bp, Homo sapiens
atactggtgattctgatgatagtgcttcaggaattgaagacgtatcggacgatttaaagagtcccccaaatacattcagaaacaaatatcttataattac

SEQ ID NO: 858269 - DNA, 100 bp, Homo sapiens
cccacctgctgagcttgtcctccctcacctaccaacggcatagcaatcgcacagctgaggagggtaagaaggtggatggctctgtaaatgcctatgccat

SEQ ID NO: 858270 - DNA, 98 bp, Homo sapiens
gcagagtggtccaaactttttgaagctccaaacttctttcaaaagtacaaaggcatttcatccttcatgaagccattcaggattttgaattgcatatg

SEQ ID NO: 858271 - DNA, 100 bp, Homo sapiens
aagctcacctgaggactcacactgtgaggatcaaggttcaaaagcctctgaaaacaacgaaaacaaaaaagaaacagatgaagtttccaacactaaatca

SEQ ID NO: 858272 - DNA, 100 bp, Homo sapiens
agaacatcttcctgccccttttcaaggccactatcaacccccaagatcatcgagagcttcacctcttccttaaatatatggagtcttgctctgtctccca

SEQ ID NO: 858273 - DNA, 99 bp, Homo sapiens
accagcagtaacaacagcgaggaagaagaggacgacgacgacgaggaagaggaggtttctgaggttccttgttccaatatcaagtgttatctgcaatga

SEQ ID NO: 858274 - DNA, 99 bp, Homo sapiens
tctgctccatgtaggagctcagaaatcagctcaaacatttttatcagagatgccttcaattaagttgcagagttctgatggagagatatttgaagttga

SEQ ID NO: 858275 - DNA, 120 bp, Homo sapiens
gtctccaagtcctttttccaccagctcagatagcacagactttaggaacagtggaggccatgtgtcttttggcagtcagtccagatgggaattggctagctgcatcaggtaccagtgctg

SEQ ID NO: 858276 - DNA, 100 bp, Homo sapiens
ctcttggagccagaagctacatgacccctaaacggcacattgcaagcaacccgtgccttgatggtggttggcatcctcctgggagtgatagcaatctttg

SEQ ID NO: 858277 - DNA, 98 bp, Homo sapiens
tctttccccgtcagcatcccagccgtgctcacgtcgcaatgtatctgctgagcaaaaagatgaaaacaaagaagcaaagcctcgatccctacgcttca

SEQ ID NO: 858278 - DNA, 98 bp, Homo sapiens
aggaaatccgccaagttgttcgaatgacttctgctaacatggacccagctatgatgtttcgacagaggtagtcaaaccacacactccattaataaggt

SEQ ID NO: 858279 - DNA, 98 bp, Homo sapiens
gggaggagccgatactgagcttcttcctatttgccatggctctcaaaggtctatggccctgtgttcactctgtattttggcctgaaacccatagtggt

SEQ ID NO: 858280 - DNA, 99 bp, Homo sapiens
ctggtcagtgtggcaaccagatcggtgccaagttatggctgcagcttcgattgccaatattgtaaaaagttctcttggtccagttggcttggataaaat

SEQ ID NO: 858281 - DNA, 100 bp, Homo sapiens
ggcctttccgactgcacaaacgtcaccttcagcaaagtacagcgcttctgggagtccaactcggctgcccacaaggagggacaagaatccttcaagaaac

SEQ ID NO: 858282 - DNA, 98 bp, Homo sapiens
ccctgcccagcagaatttgtatagagatgtgatgttggagaactacagaaacctggtctccctagatttcagaagaaagtggtagcttcctttccaag

SEQ ID NO: 858283 - DNA, 100 bp, Homo sapiens
gccatgtgaaccgcttgtaccccggggagagacgagccccgagcccggctggacgccgctgcctcaggtcctcagccagcagagccacgttccttatgag

SEQ ID NO: 858284 - DNA, 100 bp, Homo sapiens
gaagtggctgtagggagcatagctgctacactgaagatgaagcaaggcccaatgacccaggcggatgtatcaggaatgccagctctgtgctctccaattt

SEQ ID NO: 858285 - DNA, 100 bp, Homo sapiens
acgacggtgacacgcttccctggattgggtgcggatagatttcctaaaccgacagtggacatcttcccttgtcctgggagtcatcacctgcgcgcctgag

SEQ ID NO: 858286 - DNA, 99 bp, Homo sapiens
tcccggatagcgagggcggccgcgccggctccaggttacctgtcctgctgccgattcctggatgacaatcagatcgtcaccagctctggagacaccacg

SEQ ID NO: 858287 - DNA, 100 bp, Homo sapiens
cagccctgaagaaaagggaaaacttgctgcggttgctcaaggttatcaatactctggctgaccatcatcatcgtgggactgactttggtggaagtccttg

SEQ ID NO: 858288 - DNA, 98 bp, Homo sapiens
tacgggtgcgagctctgcgggaagcggttcctggatagtttgcggctgagaatgcacttactggctcattcagattacgtggagaaccaccctttttg

SEQ ID NO: 858289 - DNA, 100 bp, Homo sapiens
ctttccaacacagatgtccaagctgccaaaggccccacagtatcaaatatccgcctggctggattagagtatgttctgcacttcactgcactgaatggga

SEQ ID NO: 858290 - DNA, 104 bp, Homo sapiens
tgaagccaccctggaagatggtttggaagaggaagcagtggaaaagacacacaggagcctgggcctgccaaggtggctgttaccagcagcagcagcagcagcag

SEQ ID NO: 858291 - DNA, 98 bp, Homo sapiens
atcctggtgataaatatagtgctttcagagaacttgaacagacagcagagaataaacctttaggtctacaaggaagtcttcacgaggagcagtgagaa

SEQ ID NO: 858292 - DNA, 100 bp, Homo sapiens
cagacggcgtttcggtccggacctattcctgctagtgcaggcctccaggtgtgatgaatgcagactctgctaccattttggctgtttggatcctcctttg

SEQ ID NO: 858293 - DNA, 98 bp, Homo sapiens
ccggggccgtggggcttccgcctcgtgggcggcaaggacttcgagcagcctctcgccatttcccggacctcaaaggaagaccttctgcaggctgattt

SEQ ID NO: 858294 - DNA, 98 bp, Homo sapiens
ctgatgagtcaaacatccctgcagaccatcaggtttaaatcctacttgctgagcatgggaatagctaacccagttaccagagaaacctacggctcagg

SEQ ID NO: 858295 - DNA, 100 bp, Homo sapiens
ggaagagaaagtcaaagcagataccaatgaatctgtctatgatcttctcccaaaggagttacagttacctccatctagagaaacatctgtagcatcaatg

SEQ ID NO: 858296 - DNA, 99 bp, Homo sapiens
gtcgacagtgactaccatgacgaaaacatgtactacagccagtcttctatgtttccacatcggtcagaaaaagattttgcagaaaaaacttcagcatgt

SEQ ID NO: 858297 - DNA, 98 bp, Homo sapiens
gcgctgagaggggctgcggccggagcgggcggctgagacaaaggcgacggaaggcgtggaagtgcgagtggccagaatcttcaacacctttgggccac

SEQ ID NO: 858298 - DNA, 100 bp, Homo sapiens
ttttaccggtacatttttgatgcggagtgtgcactggagaaacttactaccgatcatgagaaagggaggagtctgctactagtcttatcagctcttaaaa

SEQ ID NO: 858299 - DNA, 100 bp, Homo sapiens
gtcagtccgccgctcaccccgcggccgcaccttcccgccttctcagaaaaaggagaagcgggctctagggaactggaagttgctggccaaaggtctgctc

SEQ ID NO: 858300 - DNA, 99 bp, Homo sapiens
gagttccccctccagccccgcacacaactgggagatgaattaccaagaggcagcaatctacctccagaggatgccagcccccatcagattgcgggagct

SEQ ID NO: 858301 - DNA, 98 bp, Homo sapiens
agaaagcagagtgcacagaagaaagttggtgacaaagttcctgctgatataaggttaacttccatcaaatctaccacactaagagttgaccagtcaat

SEQ ID NO: 858302 - DNA, 99 bp, Homo sapiens
gaagatgaacatgtgaacacacacagtccaatgagaagaggatttgcagatttacagaatggctgcacattaatggaaagagaagcataaacctatctt

SEQ ID NO: 858303 - DNA, 98 bp, Homo sapiens
gtggcagaaacgtcaggccgtagccgaagcctcggaaggagcggcccacggcaaagttgtgctgcatggaaacaacctgttagtatttggaggtacgg

SEQ ID NO: 858304 - DNA, 100 bp, Homo sapiens
cacaatggccctcaccagaacccagccatgtggtcagcctgatctcggacttcacagccagcagaactgttgggataattcttcactattccacccttgc

SEQ ID NO: 858305 - DNA, 100 bp, Homo sapiens
tctacagcaagaagacggaaatccaaaggcagacagtacgggctcccttcgccaaactcttcattttctctctgctgcagaagaatattttgcctgctgg

SEQ ID NO: 858306 - DNA, 100 bp, Homo sapiens
cttccctagggagctgctcaagttacagaatgtctgaaggggacagtgtgggagaatccgtccatgggaaaccttcggtggtgtacagatttttcacaag

SEQ ID NO: 858307 - DNA, 99 bp, Homo sapiens
ttagatttgtaacaaaaattaatatgaacggaataaataattccagtgggatgtcctgccattgactctaccagaggagattcttcaagcttagttgct

SEQ ID NO: 858308 - DNA, 98 bp, Homo sapiens
tgagttccttttggaggatccgtcttcaggcagtgttttagagcactttgctgcaagggaccaccacctgcacgaccagaatatgacctggtttgcat

SEQ ID NO: 858309 - DNA, 100 bp, Homo sapiens
ctgtggtacaaattggataagcgtggttcccacaaagagtataagcgagggaagtcgtgcacgaacaccaagacaaatcttcctattttcaagctgaaag

SEQ ID NO: 858310 - DNA, 100 bp, Homo sapiens
cctctgagatcccagatcatgaggggaaggtgctattaacctggctttggctcagaaccgaagccaagatgtgagaatgaatggacccatgggagctgga

SEQ ID NO: 858311 - DNA, 156 bp, Homo sapiens
caccatccactggctccacatatggctcatctcagaaggaggagagtgctgcttcaggaggagcagcctatacaaagagcgactccagctcggacacagacagcttctacggcgcagttgagcggcctgtggatatcagcctttccccgtacccca

SEQ ID NO: 858312 - DNA, 100 bp, Homo sapiens
ctatgaagctcaccctgtgacgcacagaaaactgaatctgtagataacgagggagaatgaattgtcatgaaaaattggggttgattttatgtatctcttg

SEQ ID NO: 858313 - DNA, 100 bp, Homo sapiens
atgcacttctatgagcttgtggaagacacaaaagatggcatctggctggttcagataaccatgatgactacacagacttctactatgacatttgctcctt

SEQ ID NO: 858314 - DNA, 100 bp, Homo sapiens
gctcgaggtcgtatgaacgcacaggccgtcgctatgagcgggaccaccctgggcacagcaggcatcggaggtaagaatgattgatgttggctgatattgg

SEQ ID NO: 858315 - DNA, 100 bp, Homo sapiens
ctgaccagcagcgcagaggagccgtggaaaaaccaactatctaactccactcagcttgaacatgcgaaagtgacacagacagagttgatgcgtgagtcat

SEQ ID NO: 858316 - DNA, 100 bp, Homo sapiens
cagaaccacctcctttgcggagagctgcaagccggtgcagcagccttcagcttttggcagcatgaaagttagcattgagccccatatgggggttggcagg

SEQ ID NO: 858317 - DNA, 101 bp, Homo sapiens
gttcagctctgaaagactgttttcttggaaaggcattaaatgacggagcagcggaaacgcaggcaacgcctaggctttgtggatgtccagaactgcattag

SEQ ID NO: 858318 - DNA, 100 bp, Homo sapiens
ggaaagctcgttctgccgatgatcaaggaacacattatgcaaatgcttcaaaatcatatgttgggaaaacggattcgataaccattagcgtgtggaacca

SEQ ID NO: 858319 - DNA, 100 bp, Homo sapiens
ctcttttgacttggactatgactttcaacgggactattatgatagtgcccgaaggaggaaacagtgacagacctggagactgcagttctctatccttcac

SEQ ID NO: 858320 - DNA, 100 bp, Homo sapiens
agtattttggttttcttatgttttggagtcacacaagctaaagacgggccattttccagacctcatccagggcgtctctggccgagcctctttttgtgga

SEQ ID NO: 858321 - DNA, 99 bp, Homo sapiens
atacatagcaacgatatttggatatctaacatcgtaaccagagaagaaaggagactcacttatgtgcacaatgagatgcagaggatgctatttatggaa

SEQ ID NO: 858322 - DNA, 100 bp, Homo sapiens
ctatggctaaattacatattccagtaatggtggatgaagttgttcattgtttgtcaccacaaaaaggacagataaatttgcgcctcattttggtaagcgg

SEQ ID NO: 858323 - DNA, 100 bp, Homo sapiens
tcatttgaagaacgagcttcgtagcccacggagctgagaaggatgccctgcagtggtctcgccatccagctacagtggagggagaggagccagaggacac

SEQ ID NO: 858324 - DNA, 100 bp, Homo sapiens
cgcccaagcagcagctgccggagcccgagtggatcggggacggagagaacacgagcccatcaggaaaacggacgatgtattactaagctggaaaacatgg

SEQ ID NO: 858325 - DNA, 98 bp, Homo sapiens
gggatgtccagctcacggtggcctcctccaacgtgggcttcattgatggtcaaggaggaggtcaagttggcctgaatggacctctccagctctggctt

SEQ ID NO: 858326 - DNA, 100 bp, Homo sapiens
ctcagagtacagctgcaaccgcgaccatgggcgggaagaacaagcagcgaactaaagggaacctgagggtctcagccttagatccaaggacagtccaagg

SEQ ID NO: 858327 - DNA, 98 bp, Homo sapiens
gcagtgcagatccgcaggcgcaaggcttcaggcgacccgtactgggcctactctggtcctcattcccacgacccgatgcaactcccacaaggagaaca

SEQ ID NO: 858328 - DNA, 98 bp, Homo sapiens
aaatactgaagatgattgaggagaacaggtacatggtgcagtggccgggagcacgcatccttcggcgtcaggagctagatgccttcctggctcaggcg

SEQ ID NO: 858329 - DNA, 100 bp, Homo sapiens
agcctaggacaaaagcctggaggctccgacttcctcatgaagagactccagaaaggggcattctgaaggcaaatcctgtttagacccaggcaaaggttcc

SEQ ID NO: 858330 - DNA, 98 bp, Homo sapiens
tgaccgagaccgtgaccgagagcgtgaccgagagcgcgaatatcgtcatcgttagaagtcattgagaaggtcaaaacgaaattcagactctacggagt

SEQ ID NO: 858331 - DNA, 99 bp, Homo sapiens
cccttccccgatcctctccgtgggagccagcgagcctctctccctgatcttacgtgctcaagggtatttgaagtataccatacaactgttttgaaaatc

SEQ ID NO: 858332 - DNA, 123 bp, Homo sapiens
agcacttgtgttctgattagtggccaaataaatgacagtcagaacttcagctaaggtacaataaggaggcaggtggaagtcatcataaagtttctgtttcacccgtcgtccatgttcgaggac

SEQ ID NO: 858333 - DNA, 100 bp, Homo sapiens
gaaaaggtattcattaaagaaaataatgggaaggaagaagtatccaaggtagctacagcaagctgggtagcaggcagatccaaaggatatcatgaagttt

SEQ ID NO: 858334 - DNA, 98 bp, Homo sapiens
tgctggacacactggaggcgctggggtatagtggaggattacaagccaccgttctacgatgtggttcccaatgacccaagttttgaagatatgaggaa

SEQ ID NO: 858335 - DNA, 117 bp, Homo sapiens
aaaatgggcacgattctatactgcagaagtagttcttgcattggatgcaatccattccatgggttttattcacagaaagtctttatctcttgcaaggttcagtagtggcagatcatg

SEQ ID NO: 858336 - DNA, 98 bp, Homo sapiens
gtcttccagttcatctaactcttatttctccgttggcccaaccagtcccagcgctgtcgtgctcctctactcggaggaagaaggcacctacgatcaaa

SEQ ID NO: 858337 - DNA, 98 bp, Homo sapiens
ggtgttctgaaggaagttgtaagacagagatcagatttaaaggtggacccccaaaagtacaagggcatatttaacggattctcagttacacttaaaga

SEQ ID NO: 858338 - DNA, 100 bp, Homo sapiens
atgagcagagagctgtgaaatatctttggcttgcagccaacaatggggatctcacttgcttatctgaagaagattgtccaggctcatattgggaatgctt

SEQ ID NO: 858339 - DNA, 100 bp, Homo sapiens
ctgtcagcgatagcccagtggatggccattccaggacgtattatctgatggaccccagcgggaacgcacacaagtggtgcaggaagatccaggaggtttg

SEQ ID NO: 858340 - DNA, 99 bp, Homo sapiens
ggtgaattttgaagtcttcatcagtatatccatattaaaacgagatgacagaagccaaagtaattatgattgagaggatccagaatccagatctctgga

SEQ ID NO: 858341 - DNA, 100 bp, Homo sapiens
cttgaaacgttgagaaatataattcaaggaagaccgctgcctgctgatctgagggccaaagtttggaagatttggagtctctctacctttggtcttctcc

SEQ ID NO: 858342 - DNA, 100 bp, Homo sapiens
ccagcccctggctcgactggtccagccacaatgtcaagtgctccaaccctcaaatcaccgaggcggtgtctcagggcagcagcgactctcagatcctgga

SEQ ID NO: 858343 - DNA, 100 bp, Homo sapiens
cacaaccctaccaatgctactctcaacaagttcacagagagacattttaaatcctaaggatgtgatcacaactcgctttgagaattcctatcctagcaaa

SEQ ID NO: 858344 - DNA, 116 bp, Homo sapiens
aaactgcagcaagtgatcagagataatctctacttgagaaccattccatgtcaacaggacatactgctgtggcacctaccgagcaggtcctatgcggcagataagtctcgttggag

SEQ ID NO: 858345 - DNA, 98 bp, Homo sapiens
cgagagattcactatggaatcgttagagatgtttatgattacttccgagctgtcctgcagcgtgatgaaagaagtgaacgagcttttaagctaacccg

SEQ ID NO: 858346 - DNA, 98 bp, Homo sapiens
cggtattggatggaatgatatatgccattggtgggtatggtcctgcccacatgaacaggtcgcccaatggtgatctccagtgggatgcagtcaatgga

SEQ ID NO: 858347 - DNA, 98 bp, Homo sapiens
ttcagtgcagtgtctgacttgtgacaggggccgttgctccagggagaactgcaaatatcttcatccacccccacatttaaaaacgcagttggagataa

SEQ ID NO: 858348 - DNA, 101 bp, Homo sapiens
tccctgatgcctgcaaagagtttcaagatgcaggtgaacagaggctaagaatattgtacacaaagattcttgatgttcttgaggaaatccctaaaaatgca

SEQ ID NO: 858349 - DNA, 100 bp, Homo sapiens
taatcacaccaacaaaaagatcctgtggtacaggtcgctacccacaggagaacaagggaacctacatcccagtgcctatagtctcagagttacaaagtgg

SEQ ID NO: 858350 - DNA, 100 bp, Homo sapiens
actattgatgatgagaaattaaggaaagaattttctccttttggatcaattaccagtgctaagatgactgcaagagcaaacgacagctttaggaaagaag

SEQ ID NO: 858351 - DNA, 98 bp, Homo sapiens
gtcggtgagcgcgtttcccgcctgagcgcaactagcggcgggtcgtgggcacctccaggtttctgaaggattgtcattcttgcatagcagtgtgaaaa

SEQ ID NO: 858352 - DNA, 100 bp, Homo sapiens
ctcgaagaacagctgtggaaagaagttgcaaaacactgggtgtttgcgagtaaaccccaaagggttagatgaagaaagcaaagattacctgtcactttac

SEQ ID NO: 858353 - DNA, 100 bp, Homo sapiens
aacacgcccgtgcccatgaacctgttcgccacctgggaggtggacggctccagccccagctgcgtgcccagccctgggcgctgcctatggcacagccaag

SEQ ID NO: 858354 - DNA, 100 bp, Homo sapiens
atcctgccagaaaatttcaaagacagtagattgaaaaggaaaggcttggtaaaaaaggttcagaagactgtaactacagcttctatgattaccacaaaga

SEQ ID NO: 858355 - DNA, 50 bp, Homo sapiens
tgcagaggggcattatgcttcccagagaagcaagatttccagatgtagca

SEQ ID NO: 858356 - DNA, 99 bp, Homo sapiens
ttaaatgaaccaggacaaaacagctgctttcttaatagcgctgtacagtgtgctggaattgatgttcgtctgtgtgatgttggtgaggccatccaagaa

SEQ ID NO: 858357 - DNA, 100 bp, Homo sapiens
gaaaattcacccttgtagagtcattcctgcctttgagcggactcccttttaagtacagctattggaatcagatgcaaagatggtgttgtctttggggtag

SEQ ID NO: 858358 - DNA, 100 bp, Homo sapiens
ggttaaaacctgacacttttaacagtgttatagttttgccgctggactcttccctcccttcccccaccccatcaggatgatatgagacttgaaagaagac

SEQ ID NO: 858359 - DNA, 99 bp, Homo sapiens
atgatgatatccttctcaaccttgtgggatgtgaaaactctgttactgaagaacattcagaagattctcggccttgccccttcacgagccgccaccaag

SEQ ID NO: 858360 - DNA, 100 bp, Homo sapiens
gaaggagttgttgtctcggcagcgcccgcggagacgtgaagagccccatctgctttgatatgattgaagaagcatacatgacaaaatgtggccacagctt

SEQ ID NO: 858361 - DNA, 51 bp, Homo sapiens
tgtacccggtggactcggtgaaggttgaattgctggaaatggaaaagtcac

SEQ ID NO: 858362 - DNA, 99 bp, Homo sapiens
aatgaccaaccgcctcaacccagcaaggctcaggactcttccatgcgtgggcacacgaaggacatagatgagtgcagccaggacccgagcctgtgcctt

SEQ ID NO: 858363 - DNA, 100 bp, Homo sapiens
ttacataaaaatggctgagtgtcttgtcatgctagcactgcattaagtgatgcatacagttgagccccatatgggggttggcaggcagcagagaggcccc

SEQ ID NO: 858364 - DNA, 100 bp, Homo sapiens
ggccacagcatctttgtctagccccagtgcagtttttggtgttgagccagacttgaccagggaaggcggcagtattcccgtgaccttgacctttcaggag

SEQ ID NO: 858365 - DNA, 98 bp, Homo sapiens
tgctcttgctaaagaggtagcaagaaagaaaattagagtgaatgtagttgcaccaggtgaccaagaatatggcccaggtgaccaaagccctggacaag

SEQ ID NO: 858366 - DNA, 104 bp, Homo sapiens
ggatccaaagtaggataccaagttcgttttgatgattgcagttctaagggcttccaagtgttagtggagtctgactggctggattttgggcacaagtttggaga

SEQ ID NO: 858367 - DNA, 100 bp, Homo sapiens
ggaagagggactggaaccatctcagaagccatgcccctcaggctggaacttgccctgtctcctcgcagatgaggtttttcgttggaatatacgttgcaca

SEQ ID NO: 858368 - DNA, 100 bp, Homo sapiens
gatctctggcagctgctgttgaccttggcactggcaggatcaagtgatgctttttctggaagtgaggctctttcaccatgcctggatcacttcctttgaa

SEQ ID NO: 858369 - DNA, 100 bp, Homo sapiens
acgatctgcacttcgcattttggcattgacatttaattttagggtcctttatatagaagggagagtagtcaaatgtcgctgcctccaatgccaagctggc

SEQ ID NO: 858370 - DNA, 100 bp, Homo sapiens
tgtcttgaagacaaaagacgcattgcaaacttaattaaagaactggccagaagaagactgcataaactgggcgtgtcaaaggtcacccaagtggatttcc

SEQ ID NO: 858371 - DNA, 100 bp, Homo sapiens
ctaccccttgggctgggacagtgaggaagtccggcagacttgtggctacacttctggccagtttgacctgggagcaggacccgtggtaccattggccctg

SEQ ID NO: 858372 - DNA, 98 bp, Homo sapiens
tcatcaccaagctgcaggccaagcacgatttactcaagcagaccctgggcgaagattgtcaaaagagtggggaatggtgaggaaacgccgatgattgg

SEQ ID NO: 858373 - DNA, 98 bp, Homo sapiens
gaagagttatgccggcttcctcaccgtgaataagacttacaacagcaacctcttcttctggttcttcccagctcagggctacagaactggctaccctt

SEQ ID NO: 858374 - DNA, 100 bp, Homo sapiens
ggcatgttggtgcatttaactacaaaaccaggctggtgaatcaaagacttctggaagtacagtcacaagttgaagaattacaaaaatctttacaggatca

SEQ ID NO: 858375 - DNA, 100 bp, Homo sapiens
ggtaccactgtgagtgcagagatggctaccatgacaatgggatgttttcaccaagtggagaatcgtgtgaaggtcactgatatgatgcttcaggacaaac

SEQ ID NO: 858376 - DNA, 116 bp, Homo sapiens
atggatgaggagaatgaggattttgcgccggctgctcagaagataccgtgaatctaagaagatcgatcgccacatgcctgagcgagctgtgttccggctgaggaaatggatcatct

SEQ ID NO: 858377 - DNA, 100 bp, Homo sapiens
gtcctttctgtagctacgcctgtagaagaagggacgccctcacaggacacctcaggacccattctggaagatgaaaaatttctgacagatttgtttgcac

SEQ ID NO: 858378 - DNA, 100 bp, Homo sapiens
ctgtcttctaaatctcttcagaattacatcatgccttatgccatgactccaatttttgatgagaaaatgctcaagagatggggttttgccatgttgccca

SEQ ID NO: 858379 - DNA, 100 bp, Homo sapiens
tgagaattgatctatgttggatcagaaaccacccctactcctaatcccccgactacagaagaggagaaaacggaatctaatcaggaggttgctaacccag

SEQ ID NO: 858380 - DNA, 100 bp, Homo sapiens
catgattccttacttctccgccaacgcggtcatctcgcagaacgccatcaaccagctattgtaaaccatggctgtgtggatacaagctcagcagctccaa

SEQ ID NO: 858381 - DNA, 98 bp, Homo sapiens
atcctcttgaaagtgcttcttttaggcagaatcagcttgctgctacactggcgagcaattttggatttaggtggcgagtagaaaaagaagtaatttca

SEQ ID NO: 858382 - DNA, 98 bp, Homo sapiens
aggaacccctccaagcactactgaggagctggtttcacctgaggacctgctggagtggctgcggcctttctgtgctgatgacgcctggccggtgcggc

SEQ ID NO: 858383 - DNA, 100 bp, Homo sapiens
tcgtggttgagacaagtgcaaaaaatgctattaatatcgaagagctctttcaaggaatcagttgcgacatgtgcgcggacaaccgcaacggcgagtgccc

SEQ ID NO: 858384 - DNA, 98 bp, Homo sapiens
cgggtccgtcgcggagccggagggcgggaggaacatgacatcgcggagctccttgacctgtttatggtttgggattggtctacttacctagctgatta

SEQ ID NO: 858385 - DNA, 98 bp, Homo sapiens
ggaattcagtttatggatgagccagaaatggcagtgtttctgcagcacctgttcttcccggagcctatcagcaaagccattcccaaggctatggctac

SEQ ID NO: 858386 - DNA, 100 bp, Homo sapiens
tctcagtttatctggatgttatcagatcacagaccatggtctcagacctccttaactacgtgttttgctcaagaaacttttgggaaacagtacaaacaaa

SEQ ID NO: 858387 - DNA, 98 bp, Homo sapiens
caggtggaagtggatgacgaaaactggatatacagagcccagcccagaaaaggaggatcccttttcccccagaaattactcaatgctgaaacctctca

SEQ ID NO: 858388 - DNA, 100 bp, Homo sapiens
ggagcagaagggaggctccaagacctcatcaacaattaaggtctcctctgagcctccggcctccataagacccaaaacagatgacacctcttcccagtcc

SEQ ID NO: 858389 - DNA, 99 bp, Homo sapiens
aaagagaggcctcccggctcgacaagttcaagcagctgcttgccggccccaacacggaccttgtattccatccaaagaagtgcatttgatcgctgtgct

SEQ ID NO: 858390 - DNA, 100 bp, Homo sapiens
gggcacggagcagccagtgccagacgtgccaaatactggtgtaagcaaacctagagtttctgacgctgtccagcccaacaactatctcatcaggacagag

SEQ ID NO: 858391 - DNA, 100 bp, Homo sapiens
gggagaagagccatgggtcctcgacctgcagggagcagaggggacagaggcaccaaggacctccaagacaggagtcagaaataccatcagaggaggggta

SEQ ID NO: 858392 - DNA, 100 bp, Homo sapiens
gggagatcacactactggggtagatagggatgaggaagaaatgaccaaacgagatgacaaaagagatatcaacagatactgcaaggagaggccctctaaa

SEQ ID NO: 858393 - DNA, 100 bp, Homo sapiens
cccgctccgccctcccttttccctgaatctacttttctcatatcaaccaccacagtcatccagccgattttcagtctcccagactggcgacctcacaatt

SEQ ID NO: 858394 - DNA, 98 bp, Homo sapiens
gaagctcatgagcagcctgcccaacttctgcgggatcttcaaccacctcgagcggctgctggacgaaggcctcctgctccacgacgtgaccatggccg

SEQ ID NO: 858395 - DNA, 99 bp, Homo sapiens
tgccaaagtggttgccatagtgtctcgaaggagtagaagcacatcccagcttagtcaaacaggtatatgactgatgggatgttacttcgtgaagctatg

SEQ ID NO: 858396 - DNA, 98 bp, Homo sapiens
gagagccgccgacatgaagaaagacgtgcggatcctgctggtgggagaactcttcccgaggctgctgtccatgacactgagtccagatcttcacatga

SEQ ID NO: 858397 - DNA, 100 bp, Homo sapiens
cagtggaaaacagattcctgccagtttaatcccatggaatcaatcaaattaaatcatcatgactacattgattccccatcgctgaaggacagaattcatt

SEQ ID NO: 858398 - DNA, 100 bp, Homo sapiens
acccaccccaggacagctgagatatgaagtccatataatgcttgatggcctgttacctcctgacacctattttagattcaatcctgtaatgtgtgaaaac

SEQ ID NO: 858399 - DNA, 118 bp, Homo sapiens
ctagctggaggattgtaaatgcaccaatcagcatgctgtgtctagctcaagccctgaccctctattctgcaccctgtgagccaccgagactgaaccaaacccaggaagcggcgccacc

SEQ ID NO: 858400 - DNA, 100 bp, Homo sapiens
ggaaaaacctcaaaatatgatggtggttggacagtcagcatttgcagactttgaactgataaatttcaaacggaagagagtggcagcatttagaaagaat

SEQ ID NO: 858401 - DNA, 100 bp, Homo sapiens
cggcaaaaccacttacagctgaaaagacaacgactgaaagacctttcattcagaagctgtttcgtcctgtggctgcagatggacagttgcacacactagg

SEQ ID NO: 858402 - DNA, 100 bp, Homo sapiens
aggttttgggaacagtaaaatggttcaatgtaaggaacggatatggtttcatcaacagttgagccccatatgggggttggcaggcagcagagaggcccct

SEQ ID NO: 858403 - DNA, 98 bp, Homo sapiens
gcctttggacgaagcccccgggaaatccagcgcagccagagctgggatgacaggatcagtgaagtggagcccaaatactatgcagatggggaggacgc

SEQ ID NO: 858404 - DNA, 100 bp, Homo sapiens
aagaaggtgtacaggaaggctgtcctggtggtgcacccagataaagcacgtgtggttctcaaatataggcattctgatgggaacttgtgtgttaaagtaa

SEQ ID NO: 858405 - DNA, 100 bp, Homo sapiens
cgtggttcgatggctgccgcggctacgctgaggctctccgctcaggtggattcaccaatgaacttgaagcatcctcatgacctagtcatattaatgagac

SEQ ID NO: 858406 - DNA, 100 bp, Homo sapiens
ggatttaacctgtactgtgaaaaatctcaaaagaagcacacagtataaattcagggtctgggaccattgtacaggatcattaatatacagttcatctgtg

SEQ ID NO: 858407 - DNA, 100 bp, Homo sapiens
tcacctggatgcctacgtgggaagggacctcgaatgtgggaccccagcccctctccagctcgaaatcgtcaaaatgcagatcttcgtgaaaacccttacc

SEQ ID NO: 858408 - DNA, 99 bp, Homo sapiens
tggagaggccagttctgtcgttggcagcttaaccctggaatgtatcagcaccggacagtcatcgctgaccaactcctgacccctgaggattaccagcga

SEQ ID NO: 858409 - DNA, 100 bp, Homo sapiens
gctgggcaagctggagcaggtccgcagcctgtctgccatctacctggagaagtgaaagaactcttttcttctttgggagtcgaatgtaatgtcttggaac

SEQ ID NO: 858410 - DNA, 98 bp, Homo sapiens
tggcaagcacctcgggatcccattccttcacagggaccctagccagctttgggccagattatgttgtatgtggatggaatgaatggagtaataaaccg

SEQ ID NO: 858411 - DNA, 98 bp, Homo sapiens
aagttttagccagtcttcttggagtcactttggctgattttgcctgcctgagctcctctagtagtggccacaattgccagagaagatagagcaggtct

SEQ ID NO: 858412 - DNA, 50 bp, Homo sapiens
gcaagtgcagatagatggcctttgctgctgcagcacggagctgacccaaa

SEQ ID NO: 858413 - DNA, 100 bp, Homo sapiens
tataaggttccaggtagaatgggagtatatactttgaaggtatgggctacgtgagttcgtggtgattgcccctgctgcacacagtgacgctgttctcagc

SEQ ID NO: 858414 - DNA, 99 bp, Homo sapiens
cgggccgagccgggccgcccgggcgcagtctttaaccatggcgtccctcttcaagaagaaaaccgtggatggttgcacgttttcaaaaaatacctaatg

SEQ ID NO: 858415 - DNA, 98 bp, Homo sapiens
cccgcagcctggagaagctggctgagcgcttctcctccaaaatccgcagctcccgggagcaccagttcaaatatcacacttcagtggcttattcagca

SEQ ID NO: 858416 - DNA, 100 bp, Homo sapiens
agggaattgtcctctgtggaagggactttcttttggccctaggccccttcctgcccctgtcgtcagcagggccacccgttcatcgtgcagttcaatgatg

SEQ ID NO: 858417 - DNA, 99 bp, Homo sapiens
gcagagcagcctgaggcacaatgcctatgtcgcggcgtggcggtttgaccagaagctggattcagaccaggatgtagcactcaaacttgcccaggagcg

SEQ ID NO: 858418 - DNA, 100 bp, Homo sapiens
ctgtaacatggaggagctggaaaaggtcctcagtttgcagaagacccctcccagttgccttcaactcagttaccttcctcaccttttggagactatcgac

SEQ ID NO: 858419 - DNA, 100 bp, Homo sapiens
attcatcaaagggccaatgatgaccttgcagatgctgggctagaaaaactccatcttagacttggaacgccagttggaggagcagaagaagcaaggccag

SEQ ID NO: 858420 - DNA, 51 bp, Homo sapiens
ctgccgccggccggcgcgtcgtccccacagctgcatcttcctcccgtgagg

SEQ ID NO: 858421 - DNA, 99 bp, Homo sapiens
ttccacatggagattggcacaggaccagactcaagacacacaactcataacagttgatgaaaaattgttttgatgtggacaatggcacatctgcgggac

SEQ ID NO: 858422 - DNA, 100 bp, Homo sapiens
tctgaagctcatgaagactgtgtaaataatatcagcacttggttaatgaatggttaagtgagaagaatgagaagacaggaaaaccttcagatggcctttc

SEQ ID NO: 858423 - DNA, 98 bp, Homo sapiens
tcttagaagagtcaaatgttcagccagtatcaacaccagtaacagtgtgtggagatatccatggacaggttccctctcccagcctgtgctgactcagc

SEQ ID NO: 858424 - DNA, 100 bp, Homo sapiens
gcggccctgctgaagaacaacaccgccttgcagtccgtttctcttcgaagtaagactatctgggcagtgttgtcgagacaagcctctcctcagctcaata

SEQ ID NO: 858425 - DNA, 98 bp, Homo sapiens
gccgacccgccgagcaaaatgcactgctccgtgtggagatggcgccctctttgacaagtcctgcagcgaccgtgctatggaaagcacagaatcccgcc

SEQ ID NO: 858426 - DNA, 100 bp, Homo sapiens
gcatcaacaacagcaacttgtgattggcggtgaccggatattcagttgcacatccccacatcaatgcactgccaatgggaatctggaaacatcaaagctg

SEQ ID NO: 858427 - DNA, 100 bp, Homo sapiens
taatctgcccaaatcctgactgcccacttaagtcggctcttgcgtatgtggatggcaaatgctgtaaggaatgcaaatccaagaaggatcaagaaggtgg

SEQ ID NO: 858428 - DNA, 100 bp, Homo sapiens
aagcaccatagtgacactgaaatggattggttatatatgcttaagaaatagcctccccaaagtcttgcttacaaaacactacacagcaaaataatgatct

SEQ ID NO: 858429 - DNA, 98 bp, Homo sapiens
taacaacagcgaggaagaagaggacgacgacgacgaggaagaggaggtttctgagatttctcacattggcaaactgagagattttcttctggaacaca

SEQ ID NO: 858430 - DNA, 100 bp, Homo sapiens
gagcgcatgcaacagaagtatgaggccagccgggaggacatctacaagcgggaacctctggcgggaggtgacccgatacctgcggctgggggacattgac

SEQ ID NO: 858431 - DNA, 100 bp, Homo sapiens
atatttcctgtcaccaacaaagatttcagggtgctgccccacgtcccccaccaaagcccatgtaaggagctgagttcttaaagactgaagacaggctatt

SEQ ID NO: 858432 - DNA, 99 bp, Homo sapiens
gagggtgtcctgttacttccaagtcatcaccagaaagtactatactggcaattgctggagaagattttgcaattgttgcttctgatactcgattgagtg

SEQ ID NO: 858433 - DNA, 141 bp, Homo sapiens
ggacaacccactgaacgaagggacggacgcagcccgggccgccatcgccttctcctttttctccatcttcacctggattcatgccagaactgaaagctaaattactgcaggaagcaaaagtcaattcattaataaagccaa

SEQ ID NO: 858434 - DNA, 100 bp, Homo sapiens
gtcagaatccacatggatggggctgaaagaatattctcagaggttagaaggattgagaattatagagttgaaggcatggagatctactctacaacacttt

SEQ ID NO: 858435 - DNA, 100 bp, Homo sapiens
gagcgcctcgtaccacatttccaatttgctggaaaaaatgacatccagcgacaaggactttagagattattttgcagaggatgatggggagatggtaccc

SEQ ID NO: 858436 - DNA, 98 bp, Homo sapiens
acgagtaatcgcctgctttgattcattgaaagagcaatttacagcaatgagggatttatacatgaaaaatggacaaggatttgcattagtttattcca

SEQ ID NO: 858437 - DNA, 100 bp, Homo sapiens
gaatgggctaaatcaactggatatgatccagttaaactttttaccaagatggatgcggcagacaggagctgcacagtgtctgtgcactgcagcaaccatc

SEQ ID NO: 858438 - DNA, 99 bp, Homo sapiens
ttttgagtcccaccatcttccatccctgatgcttggagaagctgaggacacacaggactggacttgaacactaagtcttcaatagctgagattctccat

SEQ ID NO: 858439 - DNA, 100 bp, Homo sapiens
ggatataaagagaaacctcaagatgtggatttaccttatcccctcaacaacttttcagtggcaagggacagagcacaggaaagggacccccacagtcacc

SEQ ID NO: 858440 - DNA, 99 bp, Homo sapiens
tgaggcggcgagagatggtcaggtctggagctcgaccgggccagccagttctggtgactcagtccgcagctatagttccagtaagaactaaaaaacgtt

SEQ ID NO: 858441 - DNA, 100 bp, Homo sapiens
ctgcttggccagcgacagatcctttgctgctctgtctgccggttcttgaggaaacttttgagaagaactttgaaagagaaacccataaaataagtgagca

SEQ ID NO: 858442 - DNA, 100 bp, Homo sapiens
tcagcctcccgactagctgggattacaggttgttcttcgtgggctcccgggagggccacctaccggaccttctgtccatgatccacattgagcgttttac

SEQ ID NO: 858443 - DNA, 98 bp, Homo sapiens
gctatatgggaacaacatacagtgacgcttcacaggatcggtcgcttggttatcggacagaatggaatcctctccacccctgctgtatcctgcatcat

SEQ ID NO: 858444 - DNA, 99 bp, Homo sapiens
aggcctttcctgctgagcccagcctatcttcgcagcctgctcagtattgtgtatggatgcaaagatcaattttgactctaattcagcctatcgccaaaa

SEQ ID NO: 858445 - DNA, 100 bp, Homo sapiens
acatactacctctggccccgagatcagaatgccgagctggactggccattatggaggaggagctgcagcattcccattgtgtgaattgtgtcagtagacg

SEQ ID NO: 858446 - DNA, 99 bp, Homo sapiens
gtggtcgccgcggcggcgtgtgcgcccctcaggccatggaggaattgcaagaccaagagggctgggaatatgcttctctaattggctggaaatttcact

SEQ ID NO: 858447 - DNA, 100 bp, Homo sapiens
ccagcaccttcagtaacacacctggaacaggaacccagcaacaattcttctgccaggtgaaagaagaacgtccagaaaaaataccagatttaaaattatt

SEQ ID NO: 858448 - DNA, 100 bp, Homo sapiens
taatgacaagctcatgtacaaaattacaagtggaaatccacaaggattcttttcaatacatcctaaaacagttgactcacaagcacattacttttctggg

SEQ ID NO: 858449 - DNA, 100 bp, Homo sapiens
ggccggggacctgcatgtgtgtgcgcgcgaaggagcggaagaatggcagtgctcaaactcaccgaccagtggtgtccaccatgtcgagctttactaccag

SEQ ID NO: 858450 - DNA, 98 bp, Homo sapiens
gccaacccacctaactacggaaaacctgatcccaaaattattgaaaacactcgaagggtattatacctgaagaaccttagccctcgggtgactgaaag

SEQ ID NO: 858451 - DNA, 100 bp, Homo sapiens
cggaggcggataagaaagccgctgaggacaagtgcaagcagaatccacattcatctcaatggaaggatcctgccttaagtcaacttatttgtttttgccg

SEQ ID NO: 858452 - DNA, 100 bp, Homo sapiens
gacatggggaagatcgaggagatggagaagatgctgaaagaggctcatgcagagaagaaccggctcatggagtcgaggccccaggatgggtgagttcaac

SEQ ID NO: 858453 - DNA, 100 bp, Homo sapiens
ctcatcacctcacgatacttccttgaattacagcacaaattagataagttgctacaggagagagagtagacttgacacccctcaactggatatatttaga

SEQ ID NO: 858454 - DNA, 100 bp, Homo sapiens
cccggcttcgggcatccaacgcaatgatgaacaacaatgaccttgcttttgaagaaggtcagcaccaagagacctccacctgccatggatgatttggatg

SEQ ID NO: 858455 - DNA, 98 bp, Homo sapiens
cgggcaggccttccgagaggaacctctatgccgacatcgacgccgcctggcaggccctgcgcaccagaaatgcgtgtactgccggaagcggatgaaga

SEQ ID NO: 858456 - DNA, 99 bp, Homo sapiens
aggagaccataacccccgacagcgccatggcccagattctgccaattcgttttcaggagcatctccagatgccattctaaatatggtgaatattgctgc

SEQ ID NO: 858457 - DNA, 98 bp, Homo sapiens
ttgtttccagaagaatctggttttgagcatgcttggagagaattagataaagatgctcctcgtgctgatgaggcatattggcgttcctgtgctatgat

SEQ ID NO: 858458 - DNA, 99 bp, Homo sapiens
tggattcccaggcaaagttggatcacctggcccacctggccctcaagcagagaaggaagctggagaagcttcgagagaaggagcgtaagaaggaagcca

SEQ ID NO: 858459 - DNA, 99 bp, Homo sapiens
caccgagggctaccacgttctgcggacaatgcagatcttcgtgaagactctgactggtaagaccatcaccctcgaggttgagcccagtgacaccatcga

SEQ ID NO: 858460 - DNA, 99 bp, Homo sapiens
attgatgtctccctgcctctcaataccttgggcccagtcatgaagatggaacctctgaataacctccaggatgaagatttgataaagtggaaggcactg

SEQ ID NO: 858461 - DNA, 98 bp, Homo sapiens
gcttgctacagtccgggcgtcgggtcgacggatagaccacgtactcctaaatgctgatggcattcgaggttttccagttgttcttcagcaaatcagta

SEQ ID NO: 858462 - DNA, 98 bp, Homo sapiens
tgcacaacaaaatgtttgagtcaattctgaaagctccggtattattctttgatagaaatccaatagtttttcacagacctacgggatggcatcatctc

SEQ ID NO: 858463 - DNA, 100 bp, Homo sapiens
gcaattcgacgcctgctacatgttgctaatacttcagagagtcagagttgtgccagaagtctcttaatggcagatagaatgcaaatagttgtgattctct

SEQ ID NO: 858464 - DNA, 100 bp, Homo sapiens
ctcccggttctgccgcgcgggccctgcatgtggagctgccgtctcagcagtgaagcccaagagccaaaggaatcaccaccaccttctaaaacgtcagcag

SEQ ID NO: 858465 - DNA, 99 bp, Homo sapiens
tgagggcacctctacccatctggctttcattttccaatctgggtctgtcattgaaagagatatgtgcacttactgccgaaaacccttgggtgtagaaac

SEQ ID NO: 858466 - DNA, 100 bp, Homo sapiens
cacttacgccaaggtcgtagcgctcattgccatcattgtcatgggccttgttaaactgtgccaggagctctgcgtgcctcttgctgtgccctacctggac

SEQ ID NO: 858467 - DNA, 127 bp, Homo sapiens
agacgcggggaccaagtggcaacgacttggacatctgagctgtcactgccgaaaacaggccgcaagagaggcctgctggtgggtacccttgatgttgtgttggactccagcgcccgggtcgctcctt

SEQ ID NO: 858468 - DNA, 98 bp, Homo sapiens
attcttgaaccaggtcatgctccaaataaatgcatcttctgcagacaccgggttaagagggtctctggagcctgcatccagtgttcctacggtcgctg

SEQ ID NO: 858469 - DNA, 100 bp, Homo sapiens
tggacccaacacaaatggttcccagtttttcatctgcactgccaagactgagtgattcttccagatgatcccgataaaaaaccacaagcaaaacagttgc

SEQ ID NO: 858470 - DNA, 100 bp, Homo sapiens
tggcggtcaccaacagggatggattgtaaacttgtgggcccagagacactgtgtttttgtacacataggggagagaatgtagaagatgccttccttgagg

SEQ ID NO: 858471 - DNA, 98 bp, Homo sapiens
gctgcagctccaggagcaagtactccaggaagcacagagctgtaccagtacacggcccacgttgccaggcatttccggagagttcttttgaagtcact

SEQ ID NO: 858472 - DNA, 100 bp, Homo sapiens
cagcttacaactcacaagtgcatgggagattcctgcatcttttgcgctctcaaggtcattgacgagactctggatgttaaggaaatgattttcaatgccg

SEQ ID NO: 858473 - DNA, 100 bp, Homo sapiens
gggggcccacggaggtcagaggggaggaggactctggagctgacagcgcgcacttcacccgcagttggttctgcggggagtgtctccagccctgcctgca

SEQ ID NO: 858474 - DNA, 99 bp, Homo sapiens
gaacagctaagagctgttatcgtcagggtcctgaggccacaggaatgatgagaagacagcagctgattacaagattttaggtggttcagtccttcacct

SEQ ID NO: 858475 - DNA, 100 bp, Homo sapiens
gtccccaaatggttctgtgcctcctatctatgtgcctcctggatatgccccacagatatgtcttctccgactactatgaagaagcctgaaaagccattgt

SEQ ID NO: 858476 - DNA, 100 bp, Homo sapiens
tctttgcctgtatgcagcttaaagttgataaagagaagtggttatatcgaactcctctacaggttatcaatactctggctgaccatcatcatcgtgggac

SEQ ID NO: 858477 - DNA, 99 bp, Homo sapiens
gaactgatagcttatggttctccattgtgatgaaagcacatggtacagattgagaggatccagaatccagatctctggaatagctaccaggcaaagaaa

SEQ ID NO: 858478 - DNA, 99 bp, Homo sapiens
agcccgactcggtgattgaggacaagaccatcgagctcatggcgccaggaactccgagagcttcggctgctccagaaagaagagcatcggaaccagacc

SEQ ID NO: 858479 - DNA, 99 bp, Homo sapiens
gaaaatttgacaacttacggttttcgtggagaagccttggggtcaatttgttgtatagctgaggtaattaataaaatgtctccaacatctctaaagatc

SEQ ID NO: 858480 - DNA, 100 bp, Homo sapiens
acttctcaagggcctggacagcttccttaaccgagatggggaagtcaaaagtgtggatgggatttccaagatcttcaggctcattggtgggcagtattac

SEQ ID NO: 858481 - DNA, 100 bp, Homo sapiens
ccggggtgtaataatgttaactgagataaataggatttaccaatccttggatgaagtgcttgggaagtctttaagtgccataatcaactgccatttcaaa

SEQ ID NO: 858482 - DNA, 100 bp, Homo sapiens
caaagaactgagagtgattgagagtggaccacactgcgccaacacagaaattataaaatgcttggacagaagagatgagtactatttccactaaggccta

SEQ ID NO: 858483 - DNA, 100 bp, Homo sapiens
cttttcgtaaagggaagtcatttctactggacttcatgcttagatacatgtataacaagagaggagtctgcaatgccgagtggaggaaggaggaaccgga

SEQ ID NO: 858484 - DNA, 99 bp, Homo sapiens
cctcccaaagtgctggaattacaggagaaaagttgaaattatgcacacccatagtcttttcactcttcttggagaaaggctgatgttgcatacaaacac

SEQ ID NO: 858485 - DNA, 98 bp, Homo sapiens
gcagtaccttcttcaagagaaatggagcccttctccaaggaggatcgtttaaaaattgatgtaattgactggttggtatttgacccagcgcagagggc

SEQ ID NO: 858486 - DNA, 100 bp, Homo sapiens
ggagtcaaggtcgaagttttttcatcccaagccagttccgacgggacaacttgcagagctgcaaccccaggacagagctggagccagggccagctggatg

SEQ ID NO: 858487 - DNA, 99 bp, Homo sapiens
gggggccgccgcagcaccatggcgaccaccgtcagcactcagcgcgggccgttttttgtagcatcagatccaacagttaaaacagatcgactgtggcac

SEQ ID NO: 858488 - DNA, 100 bp, Homo sapiens
cagaaccctgggaggggaattccagcaccgcagcaaccactccagaaactttccctccttcagatatacctgtgtttcccacaatcacagccactgtgac

SEQ ID NO: 858489 - DNA, 100 bp, Homo sapiens
ttaccttatcccctcaacaacttttcagtggcaaccctcaaggacgttttgttctgaagactctcatattcagctctgggaaataattatttctctgatt

SEQ ID NO: 858490 - DNA, 98 bp, Homo sapiens
aatagactttgggtcggccagtcatgtatcaaagactgtttgttcaacatatctacaatctcggtactacagatccccgtcgaggtcaagatcaagat

SEQ ID NO: 858491 - DNA, 135 bp, Homo sapiens
gccaatctcctcacttccctggtccgtgcacacctggactcagggcccagcactgccaaactggactactccaagtaaccgtgtgactggtgtgtacgagctcagcctgtgccacgtggctgacgcgggcagccc

SEQ ID NO: 858492 - DNA, 100 bp, Homo sapiens
cccaattggagttctgctggtgatctttgaatctcgtcctgactgtctaccccagctgccactgcagagccccgccatggaagacacgccgttggtgata

SEQ ID NO: 858493 - DNA, 99 bp, Homo sapiens
tgacagcgaagcggagcaagagggaccccagaaactgatccgcaaagtgtctacctcggggcagatccggaccaaggagacaaggagaaggccttagga

SEQ ID NO: 858494 - DNA, 100 bp, Homo sapiens
ttttattgctagaatggcccaatatagctttgacaagaataaagggattcattcctcattttaactgatgttacagtgaagatgggttcttgaactcttg

SEQ ID NO: 858495 - DNA, 99 bp, Homo sapiens
ggccaaggacctggccgacatcgcggccttcttccgatccggctggactctgtgaagctgagcaggagcagatgcggaagatcctctaccagaaagagt

SEQ ID NO: 858496 - DNA, 100 bp, Homo sapiens
cagaaacacaaagcagcccaaccaaaggggaatgaaggatggcagcatgccgtgcattaaaagctgttttggtagatctcagtggcacacttcacattga

SEQ ID NO: 858497 - DNA, 100 bp, Homo sapiens
cagccttgttcatcggctcccagagaaaaatcggcagatgttacagctgctcatgaaccacttggcaaattggctgattgcaattctggcccaactcaac

SEQ ID NO: 858498 - DNA, 116 bp, Homo sapiens
tgatttggagatcgactctctgtcctcactgctggatgacatgaccaagaatgatcctttcaaagcccgggtttatttgcaagatgggtttgagggaattaaggataaagtctgct

SEQ ID NO: 858499 - DNA, 100 bp, Homo sapiens
gttgaagattgtgaagcaatagcctaaggaactgcaagcacatgttgaccagataactgaaatggcagcagtaatgaggaaagccattgaaattgacgag

SEQ ID NO: 858500 - DNA, 98 bp, Homo sapiens
gccgcaagtggatccagtgcttcaacgatggactgccatggtggcataagtggcaccatttacgagtacggagccctcaccattgatggggaggagta

SEQ ID NO: 858501 - DNA, 100 bp, Homo sapiens
cttcatccaggagcatccacactgcaatgatataggaatgaggtgtagtattgagtcctgtttgagctattgttctctttttcctgaaaaatggcactgt

SEQ ID NO: 858502 - DNA, 100 bp, Homo sapiens
ctatttcacacttcagatgctgaagcgagtccctgagctcccggcaattgccttgcctcctattgcaaagtggccttatcagaatggcttcaccttaaac

SEQ ID NO: 858503 - DNA, 100 bp, Homo sapiens
gaatgggacttgaacaggaagctggacgctgcagctggaactagcgtgccaagtcactcagcctctgaagaagcttcgggttcagactcaggcagtcagt

SEQ ID NO: 858504 - DNA, 100 bp, Homo sapiens
aagattggaagaaatatattactggcacagatatattggatatgaaactggaagacatcctggccactatgtacatggtatttgtatctatggaaacgga

SEQ ID NO: 858505 - DNA, 98 bp, Homo sapiens
atgataactctgaatatgtggaaactattatagtgaatgatttgggaggggacttcaaaggagttggtaaaggctccttagctgctgataaggttgtt

SEQ ID NO: 858506 - DNA, 100 bp, Homo sapiens
tgtgcgagaatcccagtggtgtgcacccaggccgcgacacatggtggcggagcgtgctttggacaccatgaattttgatgttataaagggcaagccagta

SEQ ID NO: 858507 - DNA, 100 bp, Homo sapiens
gagatcaggcctgaccgggataagctccagccaaaccaaacaggaagcttacttttctctacctagccaatgatgtcatacagaacagcaagaggaaggg

SEQ ID NO: 858508 - DNA, 100 bp, Homo sapiens
cggcgcgctgcccgaggggagcaaggacaggggccgctttggtgttgtgcgagcgtgccgggagaatgccacggggcgaacgttcgtggccaagatcgtg

SEQ ID NO: 858509 - DNA, 100 bp, Homo sapiens
gctctgaagtaagcacagtagaactgctgcatctgcaacaacagcaggagtcagtggatcggtggggaaaatgctgcttaccctgggccctgggctgtag

SEQ ID NO: 858510 - DNA, 100 bp, Homo sapiens
cttggaggtggagcaggccctgactccaggtgaaatgacaatggatgctctgttggctcgattgaaacttctgaatccagatgaccttagagaagaaatc

SEQ ID NO: 858511 - DNA, 100 bp, Homo sapiens
gacagtggagagtacaggtgccagacaaacctctccaccctcagtgacccggtgcagctagaagtccatatcggcttcaacggaccacaccaaaatgcca

SEQ ID NO: 858512 - DNA, 100 bp, Homo sapiens
aacctgacaagcccaaactgtgaagaagatggaagccaaagttcatcagagtccaaaatggtgatcaggaagagagtcaagccctacccgtcgagaagct

SEQ ID NO: 858513 - DNA, 98 bp, Homo sapiens
tgaggtgggcagtgtgccagggtcccttgcggcctcctcaagatccggggatttctttcacggtttgataatgtccttcccgtcagcctggcatttga

SEQ ID NO: 858514 - DNA, 99 bp, Homo sapiens
cagaccatgttagataaacttgtggatggacttgctacctcttgggtgaactctagcaattacaagatccttccgctgaggaattgagaaaactaatga

SEQ ID NO: 858515 - DNA, 100 bp, Homo sapiens
ccatcaagtctccacacagctagcagccacgtggggcacttctccaggaaactggccaagaagcggaaagagaccatgagcagcacccgacaggagatga

SEQ ID NO: 858516 - DNA, 100 bp, Homo sapiens
tggccttgggtcggagcccatctgatgaatacaaagacaacctgcaccaggtcaggttgccaaaaaggaagatctcatcagtgcgtttggaacagatgac

SEQ ID NO: 858517 - DNA, 100 bp, Homo sapiens
aggtggaccccaagaagaccattcagatgggatctttccggatcaatccagatggcagccagtcagtggtggaggacaaattgatggccaggagatcact

SEQ ID NO: 858518 - DNA, 100 bp, Homo sapiens
gggctgctatcaacgaagagatatcacatggctcgttcggaacaccacctggatacggctgcgctgcagaccgggcagaggagcagcgccggcaccaaga

SEQ ID NO: 858519 - DNA, 98 bp, Homo sapiens
gcctgagttgggagaagagctccagagagtcttgggcgtctttggtactggcttttttaggggtctgcctggggattacccttgctgtggatagaagc

SEQ ID NO: 858520 - DNA, 98 bp, Homo sapiens
agaagttatcagtaccagcagcaaggcagaaccaccccagtgcacctccctggcctggtctgctgatggccaggagagataccagaaggagcaggaca

SEQ ID NO: 858521 - DNA, 100 bp, Homo sapiens
ggcggcggcggcaccagcagtaacaacagcgaggaagaagaggacgacgacgacgaggaagaggaggtttctgagatgaaatcatgcaccaggacatcgt

SEQ ID NO: 858522 - DNA, 100 bp, Homo sapiens
actactgggttattaatcctgctgacagtagtggcattacacctaaaggattaggtagtgggcagcagtcagtgacaggtgtaacctctgtggatgacag

SEQ ID NO: 858523 - DNA, 99 bp, Homo sapiens
gttgctaaggatagcagacaagttcacccaacataactttcaagagatcatacatctgtcggtggcctgggagacagtttttatgaatacttactgaaa

SEQ ID NO: 858524 - DNA, 100 bp, Homo sapiens
caactctgcctgcaagaagactgagcaccatcactatgtgagtgcctggtgaagaatgtgatgggatcactagcatgtctgcggagagcggccctgggac

SEQ ID NO: 858525 - DNA, 98 bp, Homo sapiens
gattgggctgagcagaggacgacatgttgcttttcgtggaggatccacccacttcagtttcccttggactgcgaatggaagaaatgattttcaacttg

SEQ ID NO: 858526 - DNA, 99 bp, Homo sapiens
caatgattaagaaccttaaggaacaaggagttacgttcccagctattggctctcagattttgaagatgtaactgagtttctggaagaggtcattgaagc

SEQ ID NO: 858527 - DNA, 99 bp, Homo sapiens
ttgaatgactggaaactgattggaaactctttgggaaagccactcgaaaaggaacttagtgatttggcccgtgaccctccagcacaatgttctgcaggt

SEQ ID NO: 858528 - DNA, 100 bp, Homo sapiens
gatctacaaccttggagcccagagccacgtcaaaaatatattgcactttatccatattcaagtgtggaacctggagatttgactttcacagaaggtgaag

SEQ ID NO: 858529 - DNA, 99 bp, Homo sapiens
tcaggcagtacgggaagaacttcttcagaattagaaaggagctgcttcccaataaggaaacagtgaaggttgtggatgaacgaaggtaccggaaagtct

SEQ ID NO: 858530 - DNA, 100 bp, Homo sapiens
atctcccatatttctgcagtttgttgattgtgtttggcaaatgacaaggcaggttgtaaatgtcttaaaatccttattgtcaaatcttgatgaagtaaag

SEQ ID NO: 858531 - DNA, 98 bp, Homo sapiens
ttgctggttcttgaagaacaagaggtgagacactttgacagcccctacctgttgtaccacgagaagataaaaactagtcgagtattcatccgagactg

SEQ ID NO: 858532 - DNA, 98 bp, Homo sapiens
tgaccaattgtggaatcacagatctagtgctaaaagactgtccaaagatgatgttcatccatgttggtgtaatacggtgcccagtatgccgccaagaa

SEQ ID NO: 858533 - DNA, 100 bp, Homo sapiens
cttggacaagcaagtgcctgataccagcgtgcaagagacagaccggatcctggtggagaagcctttgaagaagatggtggagagaattcgcaagttccag

SEQ ID NO: 858534 - DNA, 100 bp, Homo sapiens
agttgggagctatgagtcctctgaaatgaacagcataactttcaaacctctggttgaaagaaatatacccagttcagtcactgcagtagaattccttgta

SEQ ID NO: 858535 - DNA, 100 bp, Homo sapiens
gcttgttcagcagggtattatgaattagcacaaagcagtatagctgtgactatggatctggcagattctttatcctttgtggacttggaggaattattag

SEQ ID NO: 858536 - DNA, 100 bp, Homo sapiens
gcgggtccggtgcaggtgaggggcgcgcgcctgcccagctttgcagcccccgaacgcggcctcgcacagatggaacagattaaaagggccaataaactgt

SEQ ID NO: 858537 - DNA, 100 bp, Homo sapiens
atcgccgcgggggaccgcccttcgccttcgttgagttcgaggacccgcgccttgttgtcctcctggtgcgaagagctcggccgcctgctgctgctccgac

SEQ ID NO: 858538 - DNA, 114 bp, Homo sapiens
ctgactggggttctgagactccctgtcccggaccgcagcatgcttttcacttccactgcatctctcgctggctcaaaacacgacaggtgtgtccattggacaacagagagtggg

SEQ ID NO: 858539 - DNA, 98 bp, Homo sapiens
aagcccacccagggagttgatgatgtcatttgtcagagtgaaccgctgtggtccccgagttggtgtaagaaagacaccgaaagtaaagaagaagaaaa

SEQ ID NO: 858540 - DNA, 100 bp, Homo sapiens
tgcctgtccacctcccggtcttcaactgataagctggcttttgatgttggcttgcaagaggacaccacagatattgatgatgttaagaagttcaaaccgg

SEQ ID NO: 858541 - DNA, 99 bp, Homo sapiens
agcaatgaccctggacctcgctctgctccgtagcgtgcagcattttgctgaagcattcaaggccaagaatgtggtgataaaagaaaatgtggctgaagt

SEQ ID NO: 858542 - DNA, 121 bp, Homo sapiens
tgctccagcaaggatgtggctcttccacactctgctctgcatagccaccttcaggctctacacacagatgatcctctcacttgggattatgtggcaaggcgagaattagagattgagtcac

SEQ ID NO: 858543 - DNA, 100 bp, Homo sapiens
gtttgctcgattttgacatattctacaacgtcactggatgcctaaggaatcttctgcggcttgtccatagtgtgaataaaaactaaatcacatctataat

SEQ ID NO: 858544 - DNA, 100 bp, Homo sapiens
cggagctctgatcgccgggaacccttgccgctgctgtcctgcgaccccaagcaggtgtccctggccagtgtccttccacctgtccacaagcatggggaac

SEQ ID NO: 858545 - DNA, 98 bp, Homo sapiens
cagaagctatacactcattatctgatacttgtaatcagattgtggtggtgccatgcagcaagaatcagagagatgcagagttagagccagaaggcctg

SEQ ID NO: 858546 - DNA, 145 bp, Homo sapiens
gaaggacctcctcggccacttcggctgtgtcaatgccattgaattctccaacaatggaggccagtggctggtctcagatggctcggactcaaaagaacaaggccacagcacaccacttagggctgcttaaggctcgtcttgctaa

SEQ ID NO: 858547 - DNA, 99 bp, Homo sapiens
tttataccatgaaatgattgaatctggtgttatcaacttaaaagatgccacctctaagttggcttggacgccttttctggctgcattcagtgtgggtct

SEQ ID NO: 858548 - DNA, 100 bp, Homo sapiens
gtgtcctgaaggagttccaccaggccgggaagcccatcggggctgcccttgagatggagttgctgcctctttggctctgcctgggttttcacttcctgac

SEQ ID NO: 858549 - DNA, 100 bp, Homo sapiens
aggagcggaaggttaatgttcttcagaagaaggtgcaagaattgtttatccgtgattatggagagatttttaatgtccagttaccggataaagaagaacg

SEQ ID NO: 858550 - DNA, 98 bp, Homo sapiens
acacagctgcctcccggtgcgagaagaagaccccggcttgagagtgagagacatattgatgtctttgactgttggaaaccttgcagagcaagaatttg

SEQ ID NO: 858551 - DNA, 129 bp, Homo sapiens
tttattaccctttgtgtcatcctccacagctccagggaaggcactcaaaagtggggggcaggaaagcctctaaagagagcaatcactacacttatggctgggattttgcgcttagtagttcaatggccc

SEQ ID NO: 858552 - DNA, 100 bp, Homo sapiens
tggctatgaggaaaaactgcagtccaatcctctacagcatctctttgaacgggagtcgtgtgaggttggctgtagcagcgcggaaggtgcatatgaagag

SEQ ID NO: 858553 - DNA, 100 bp, Homo sapiens
catgattctcctggcagttgtcatatgtactgtgtcagccatcatgtgtgtcagcatgagagagctgtaggtaaaacttgcctactgatcagttacacaa

SEQ ID NO: 858554 - DNA, 99 bp, Homo sapiens
cgcgtctgcccggccaagaggcaaaggggaggttacgcagcaaaccatccagaagatgaaggatttgggggcagagcacttggcaggtcatgaaggggt

SEQ ID NO: 858555 - DNA, 100 bp, Homo sapiens
agaagagccatggaaacaggaggaagaattcccaagccaaagctttccagatgtcctcaatggaaccataacgtttttgcctttggaagaagatgatgag

SEQ ID NO: 858556 - DNA, 99 bp, Homo sapiens
ggggataggctcagacacaaggagaggcttggagagagcagacgccttctggattcaagaagacgaggactttaggttcaagatggtgactgcagccat

SEQ ID NO: 858557 - DNA, 100 bp, Homo sapiens
cgtgtaaataccgggaagccacatgcagccactgcaagagtcaggttccgatgatcgcgctgcagggcgtctctggccgagcctctttttgtggaaaacg

SEQ ID NO: 858558 - DNA, 98 bp, Homo sapiens
cccacggagctggtggcactaaagcccctcgggggactctgagcaggaaatctatacctttggaagaatattgggaaaagggagctttggaatagtca
